United States Patent Application Publication US 2021/0199660 A1 - sequence listing, part 11

SEQ ID NO: 144851 - DNA, 120 bp, Artificial Sequence
  ENSG00000104866_17 (sequence is synthesized)
gaggtcaaggggggcagctgcggcctggagcacgaactgagctgctccaagaacgagaaggagctcgaggagctgcttctggaagccagtcaggaatccgggcaggagacactgtgacac

SEQ ID NO: 144852 - DNA, 120 bp, Artificial Sequence
  ENSG00000104866_18 (sequence is synthesized)
tttagttccctttttccggtcggtctgcgatgagctgaggccagagccatgagaatctgctcaccttccccccagccttcctgaggcccaggatgccaggggtgggggccattctggggc

SEQ ID NO: 144853 - DNA, 120 bp, Artificial Sequence
  ENSG00000104866_19 (sequence is synthesized)
ccccctccccccacagcaacactacaaggggtgcaggagctacagggagtggccctccgcgcgtgactcaagcacttctatttatgagcccagcactggaagactctgggggtgaatggg

SEQ ID NO: 144854 - DNA, 120 bp, Artificial Sequence
  ENSG00000104866_20 (sequence is synthesized)
aggagggggagcaggaggaggaggaggtctccaaggacatcaggcgcctgttctggaggggccaggcttgccctgcggagggcaggcgtcctgggtggtggtgggatggtcccctgtggc

SEQ ID NO: 144855 - DNA, 120 bp, Artificial Sequence
  ENSG00000104866_21 (sequence is synthesized)
cccgggcacagggccgggcaggcagcctggtgccggagaggcggtgcgtgctggtggtggttgagatgcacagaacagccccagacagcgcaggccgggcagggtggggggatgggagca

SEQ ID NO: 144856 - DNA, 120 bp, Artificial Sequence
  ENSG00000104866_22 (sequence is synthesized)
gaggatcagagctttctttttctcaagtgcaataaatctatcagggagctggggcgggagcagccggcactccgggaccctgctgtccaggccactggaggctgcgccctgagaggcact

SEQ ID NO: 144857 - DNA, 120 bp, Artificial Sequence
  ENSG00000104866_23 (sequence is synthesized)
acagccctttgggggcgagtggcatgggtgtgggtgagggtgggcagagggctggggctactcctgtcggtgcaactctgttcacaccttttctaataaactggggctgggttcactttg

SEQ ID NO: 144858 - DNA, 120 bp, Artificial Sequence
  ENSG00000104866_24 (sequence is synthesized)
gtgagcggccctgccaccgcccacttggctccctgagctcccgggccccttcgagggtgcctcggccctcttcgacatgatcgagtactacgagtcggccacccacctcaacatctcctt

SEQ ID NO: 144859 - DNA, 120 bp, Artificial Sequence
  ENSG00000104866_25 (sequence is synthesized)
ctttcttgcctcggtgatccaccagccttgtcacccaggatttaggttggcagattcgtctctcgcctttggaatttctaccttctcctaggttttgttttttaaaatcaggcctatgat

SEQ ID NO: 144860 - DNA, 120 bp, Artificial Sequence
  ENSG00000104866_26 (sequence is synthesized)
accgctcatgggctcatatttattttagcattgtaatttaagttgtattttatgcaactctaccccgatacagagagctgttgatgtaactgcagcgagcaaatggaggactagagacta

SEQ ID NO: 144861 - DNA, 120 bp, Artificial Sequence
  ENSG00000104866_27 (sequence is synthesized)
ctcctatccgcctttcttttcgacttcttcatgccgttaccactcttcatcataagcggcgggctcgccagcctcgagcgaaagtgtgactgcgaacgggcaggcgcgcgcggggctcgg

SEQ ID NO: 144862 - DNA, 120 bp, Artificial Sequence
  ENSG00000104866_28 (sequence is synthesized)
cggaggcgcgcttgggctcccggcggcgacgactacgaccactaggagagcggacggaggcggcgcctgaagcggcggcggagcccatgccccgggacggcgggcggacccggagagaca

SEQ ID NO: 144863 - DNA, 120 bp, Artificial Sequence
  ENSG00000104866_29 (sequence is synthesized)
ctgcgctaggtggtgctggggacacagacatggccaagaccaccccaacgctgtcctgctggggctcccaggaggaagacagacccgccctagacagtgacaacctagagtgggcaggac

SEQ ID NO: 144864 - DNA, 120 bp, Artificial Sequence
  ENSG00000104866_30 (sequence is synthesized)
tgggctggtggagcccagaggcggggtccgatcagtctgggggccagggagggcttccaggaggaggagacagctcagctgacagccgcaggatgaggcgaagtgaataattacaatctg

SEQ ID NO: 144865 - DNA, 120 bp, Artificial Sequence
  ENSG00000104866_31 (sequence is synthesized)
aaaagaaagcagtgttgctgccataacagggtcagctagaggctgctttcagatgggagaggagggaagaccaccgtggggcggggcctctgggcttccatccggaggctgggagcagaa

SEQ ID NO: 144866 - DNA, 120 bp, Artificial Sequence
  ENSG00000104866_32 (sequence is synthesized)
ccagccttgtgagaagcctgggaaagggtccagaccgcgggagcagtgagtgcagtgggaggagctctggtgtttgatgctgggggttgagcagagaatggggagccgtcaaaggaggcg

SEQ ID NO: 144867 - DNA, 120 bp, Artificial Sequence
  ENSG00000104866_33 (sequence is synthesized)
ttcctgttgcatcctggaggggtggggtgggtcactgtgtccccaggtggcaggcccagaccccactctactgagcacctgccaagggccatggctgtcggcccctgggctcagctcgga

SEQ ID NO: 144868 - DNA, 120 bp, Artificial Sequence
  ENSG00000104866_34 (sequence is synthesized)
gggagacacagggctctgcccttgggagtttgtactccagtctagagagacaacgataagatgagtgaaatctccagcctgtcagatggtgggatctgcattggagggagacagtggtga

SEQ ID NO: 144869 - DNA, 120 bp, Artificial Sequence
  ENSG00000104866_35 (sequence is synthesized)
ctgtgggtgggagtgagctggctgtgaggtgaggtgggccagaggtggtcacatttgagcaaagatcagaagcatctggtggaggctgtcatccaggcacccaggcccaggggtcacaga

SEQ ID NO: 144870 - DNA, 120 bp, Artificial Sequence
  ENSG00000104866_36 (sequence is synthesized)
tgtgtgcccaggggtgccaggccgaggcagggctgcagggcaaggcctgggactgcggggcctccatggaggtcctaagcagagggggttgctcctaccctgcagtcccctccccaggaa

SEQ ID NO: 144871 - DNA, 120 bp, Artificial Sequence
  ENSG00000104866_37 (sequence is synthesized)
gcacccggaccccagacagggctctgactgccggcctcctccaggtctggcctacatctgcgagggcctcaaggagcagaggaaggggctggtgaccctggtgctgtggaacaaccagct

SEQ ID NO: 144872 - DNA, 120 bp, Artificial Sequence
  ENSG00000104866_38 (sequence is synthesized)
cacgcacacaggcatggccttcctgggcatgacactggtgagtcaggctggcagggaagggaggcacctcggtccccgctgccacctcccactccagctctcagcacagttgcctctagc

SEQ ID NO: 144873 - DNA, 120 bp, Artificial Sequence
  ENSG00000104866_39 (sequence is synthesized)
tgacggctcctgtcctgcccatcctgcaggttcaagacgatttaaactcagccccacctgcttcctcattcagcttctgtgcctgttttccctgaggaggagcccttctttcattatctc

SEQ ID NO: 144874 - DNA, 73 bp, Artificial Sequence
  ENSG00000104866_40 (sequence is synthesized)
gcctgttttccctgaggaggagcccttctttcattatctcctttttttttttgagaccgagtctcatgccact

SEQ ID NO: 144875 - DNA, 120 bp, Artificial Sequence
  ENSG00000104866_41 (sequence is synthesized)
caggccggtcttgaactcctgacctcgagtgatcccccccacctcggcctccgaaagtattgggattatgagtgagtcaccgtgcctggttttcagtttttatgtggtgcttaaagcaag

SEQ ID NO: 144876 - DNA, 120 bp, Artificial Sequence
  ENSG00000104866_42 (sequence is synthesized)
cgtgcctggttttcagtttttatgtggtgcttaaagcaagccactcaggtacagagactctcagggcgagcactcgtgtgctcaaaccccgggataagagttgccctccttgggggcttc

SEQ ID NO: 144877 - DNA, 120 bp, Artificial Sequence
  ENSG00000104866_43 (sequence is synthesized)
agggcgctcaaggtccaggccctggccaggggcccaggctgtggggggtagggactgactgggtgcctggggagctgggagtggacgggggacctggcatttggggagacttcaggcaca

SEQ ID NO: 144878 - DNA, 120 bp, Artificial Sequence
  ENSG00000104866_44 (sequence is synthesized)
ggagggacttcaggccaggcctgcggcagggcaggacggcgccggtgttcacgcaggcgcgcgaaagaaaaggagcgcccgggcctggctctcttcccggcttctttcctgacttggcct

SEQ ID NO: 144879 - DNA, 120 bp, Artificial Sequence
  ENSG00000104866_45 (sequence is synthesized)
gcctggagcacggtgagaggggccctagggcaggtgttgaggggccctgggtgctgtatgtgaccccaggcaagcccctgcctgttgtggacctcagtttccccctctttaaaatggttc

SEQ ID NO: 144880 - DNA, 120 bp, Artificial Sequence
  ENSG00000104866_46 (sequence is synthesized)
tcgcaggggccagcaaagtggggcttagttctcatctccaccctgcttcccttgggtcctgggagctcttcctggggtgggggggcatgtaaggtgtgctgccttgagcctgaccatctc

SEQ ID NO: 144881 - DNA, 120 bp, Artificial Sequence
  ENSG00000104866_47 (sequence is synthesized)
agcggtctctgggcactctgcaggccctgagggtctggctggggccgggctggggacaggttgtatttgccccacccgcctgacgggggtgctggcccgtcctcccacacagaactgagc

SEQ ID NO: 144882 - DNA, 120 bp, Artificial Sequence
  ENSG00000104866_48 (sequence is synthesized)
tgctccaagaacgagaaggagctcgaggagctgcttctggaagccagtcaggaatccgggcaggagacactgtgacactttaggtgaggccaggcccggggcccacagcactcgggagga

SEQ ID NO: 144883 - DNA, 120 bp, Artificial Sequence
  ENSG00000104866_49 (sequence is synthesized)
tggttacagagcatctgccagggcactggtcaggcattactgcgtcttcccccacagtcccgtctattctgcatccatgctctggtgtctcgtacggtcacctcccagccaggcgagttt

SEQ ID NO: 144884 - DNA, 120 bp, Artificial Sequence
  ENSG00000104866_50 (sequence is synthesized)
acacccatcctttctgcagggagagacaggccccagatacctcctggcttcaggtctagggtctcaggatgctggatatggagtggctctgcccagtcgcccatcgctcaacaggaacag

SEQ ID NO: 144885 - DNA, 120 bp, Artificial Sequence
  ENSG00000104866_51 (sequence is synthesized)
atcccagcctgtccctggcagccccaggtgttgtgcaggtgggagtatgccccgggcccagccagcactgcaggagcctggtgggcggcttgttcccctttgccagcaggggcctggggg

SEQ ID NO: 144886 - DNA, 120 bp, Artificial Sequence
  ENSG00000104866_52 (sequence is synthesized)
cctttgccagcaggggcctggggggccatgggggtgctgttgcggatttctgagaggtctgtttttccctttaggaaaggggggagcaggccgggcatggtggcccacacctgtaatccc

SEQ ID NO: 144887 - DNA, 120 bp, Artificial Sequence
  ENSG00000104866_53 (sequence is synthesized)
agttcctttaagttcaggatgtaagcgaagccttccattaagtaaagtaagcggcgggctcgccagcctcgagcgaaagtgtgactgcgaacgggcaggcgcgcgcggggctcggcggag

SEQ ID NO: 144888 - DNA, 120 bp, Artificial Sequence
  ENSG00000104866_54 (sequence is synthesized)
atgccctgtgttggacggactgcagctggagcagtcactgagcacggaggccagaaacctgtttttacaaaagctccccaggtggttctgacaacctcgcttggctgtctgtgtgctttg

SEQ ID NO: 144889 - DNA, 81 bp, Artificial Sequence
  ENSG00000104866_55 (sequence is synthesized)
aggatatcgtgtctggagcagtggagcccaaagacccctggagacatggctggagtgcaatggcgcgatctcaggtcatca

SEQ ID NO: 144890 - DNA, 81 bp, Artificial Sequence
  ENSG00000104866_56 (sequence is synthesized)
acccggctaattttgtatgtttttaactcccgacctcaggtgatccacgcgccttggcctcccaaagtctgggatgacagg

SEQ ID NO: 144891 - DNA, 120 bp, Artificial Sequence
  ENSG00000104870_0 (sequence is synthesized)
aggatgtgagagaggaactggggtctccagtcacgggagccaggagccggccagggccgcaggcaggaagggagcgaggctgaagggaacgtcgtcctctcagcatgggggtcccgcggc

SEQ ID NO: 144892 - DNA, 120 bp, Artificial Sequence
  ENSG00000104870_1 (sequence is synthesized)
ctcagccctgggcgctggggctcctgctctttctccttcctgggagcctgggcgcagaaagccacctctccctcctgtaccaccttaccgcggtgtcctcgcctgccccggggactcctg

SEQ ID NO: 144893 - DNA, 120 bp, Artificial Sequence
  ENSG00000104870_2 (sequence is synthesized)
ccttctgggtgtccggctggctgggcccgcagcagtacctgagctacaatagcctgcggggcgaggcggagccctgtggagcttgggtctgggaaaaccaggtgtcctggtattgggaga

SEQ ID NO: 144894 - DNA, 120 bp, Artificial Sequence
  ENSG00000104870_3 (sequence is synthesized)
aagagaccacagatctgaggatcaaggagaagctctttctggaagctttcaaagctttggggggaaaaggtccctacactctgcagggcctgctgggctgtgaactgggccctgacaaca

SEQ ID NO: 144895 - DNA, 120 bp, Artificial Sequence
  ENSG00000104870_4 (sequence is synthesized)
cctcggtgcccaccgccaagttcgccctgaacggcgaggagttcatgaatttcgacctcaagcagggcacctggggtggggactggcccgaggccctggctatcagtcagcggtggcagc

SEQ ID NO: 144896 - DNA, 120 bp, Artificial Sequence
  ENSG00000104870_5 (sequence is synthesized)
agcaggacaaggcggccaacaaggagctcaccttcctgctattctcctgcccgcaccgcctgcgggagcacctggagaggggccgcggaaacctggagtggaaggagcccccctccatgc

SEQ ID NO: 144897 - DNA, 120 bp, Artificial Sequence
  ENSG00000104870_6 (sequence is synthesized)
gagctgcaacttcggttcctgcggaatgggctggccgctggcaccggccagggtgacttcggccccaacagtgacggatccttccacgcctcgtcgtcactaacagtcaaaagtggcgat

SEQ ID NO: 144898 - DNA, 120 bp, Artificial Sequence
  ENSG00000104870_7 (sequence is synthesized)
gagcaccactactgctgcattgtgcagcacgcggggctggcgcagcccctcagggtggagctggaatctccagccaagtcctccgtgctcgtggtgggaatcgtcatcggtgtcttgcta

SEQ ID NO: 144899 - DNA, 120 bp, Artificial Sequence
  ENSG00000104870_8 (sequence is synthesized)
ctcacggcagcggctgtaggaggagctctgttgtggagaaggatgaggagtgggctgccagccccttggatctcccttcgtggagacgacaccggggtcctcctgcccaccccaggggag

SEQ ID NO: 144900 - DNA, 120 bp, Artificial Sequence
  ENSG00000104870_9 (sequence is synthesized)
gcccaggatgctgatttgaaggatgtaaatgtgattccagccaccgcctgaccatccgccattccgactgctaaaagcgaatgtagtcaggcccctttcatgctgtgagacctcctggaa

SEQ ID NO: 144901 - DNA, 120 bp, Artificial Sequence
  ENSG00000104870_10 (sequence is synthesized)
cactggcatctctgagcctccagaaggggttctgggcctagttgtcctccctctggagccccgtcctgtggtctgcctcagtttcccctcctaatacatatggctgttttccacctcgat

SEQ ID NO: 144902 - DNA, 120 bp, Artificial Sequence
  ENSG00000104870_11 (sequence is synthesized)
aatataacacgagtttgggcccgaatcagtgtgttctcatcatttttcaggcaggggaggtaagggaataagtcgggggactgaatggcggctgggcctcggatctctcctacaggtaac

SEQ ID NO: 144903 - DNA, 120 bp, Artificial Sequence
  ENSG00000104870_12 (sequence is synthesized)
ggcggagctcggggccgggactctcagcctatcaagtgtctgtaattaattaaccaactgagatccagttcaggggtgaaagttcttcaggtacgaggagggcattgttgtcagtctgga

SEQ ID NO: 144904 - DNA, 120 bp, Artificial Sequence
  ENSG00000104870_13 (sequence is synthesized)
gcagagcccctcctcggcgtcctggtcccggccgtgcccgcggtgtcccgggaggaaggggcgggccgggggtcgggaggagtcacgtgccccctcccgccccaggtcgtcctctcagca

SEQ ID NO: 144905 - DNA, 120 bp, Artificial Sequence
  ENSG00000104870_14 (sequence is synthesized)
gctcaaagctgcctggggccattctaggcacagaggcaggggccagggccggctttaaggccagctcctcgtgcagtctgaggagtggatcagaagggaccagcacctgagcccccctcc

SEQ ID NO: 144906 - DNA, 120 bp, Artificial Sequence
  ENSG00000104870_15 (sequence is synthesized)
gctggggatgtgcacagatattcattccaagtgccacaaaggagaagttgagactcaaccagagcccccctccatgcgcctgaaggcccgacccagcagccctggcttttccgtgcttac

SEQ ID NO: 144907 - DNA, 120 bp, Artificial Sequence
  ENSG00000104870_16 (sequence is synthesized)
tggtttcccgttgccttgtctcactgctgcgccggtccttcctgagtctgaccttcctccccactgctgccacctccttgaatctgactgccttgaacctcacgcctgtcagtgccccca

SEQ ID NO: 144908 - DNA, 120 bp, Artificial Sequence
  ENSG00000104870_17 (sequence is synthesized)
aaacctgatggcttgtccttcccaaggccaactgccttccgtctcctgctgcttctggcctcactgagtctgaagagctgttaactaccatggccagtcctccctgagtctgaccatctt

SEQ ID NO: 144909 - DNA, 120 bp, Artificial Sequence
  ENSG00000104870_18 (sequence is synthesized)
ccatcctgctgctgctgctgctgctgctgcgggtcttcctggaatctgaccattcgttgtctgctatgcccgtcctcaccaagactgactgcctgctgctttgctactgcccgggcccat

SEQ ID NO: 144910 - DNA, 120 bp, Artificial Sequence
  ENSG00000104870_19 (sequence is synthesized)
ggagtcagggagcagcagcctcccacaggatgtgagagaggaactggggtctccagtcacgggagccaggagccggccagggccgcaggcaggaagggagcgaggctgaagggaacaaag

SEQ ID NO: 144911 - DNA, 120 bp, Artificial Sequence
  ENSG00000104870_20 (sequence is synthesized)
aacagcgagcgctagggaaggccacggggatacagaggggtaggaggaggatccagagacctccaagttgtggactccggaggcatcgagttcctttcccagttttgtcaagaattccct

SEQ ID NO: 144912 - DNA, 120 bp, Artificial Sequence
  ENSG00000104870_21 (sequence is synthesized)
ccaaaggccagacagattttctgtgcttggatttagtctatattggaagtaccttgaggctgaaggcacgtggctgtgagcacgacacaggaagatacagatttgctgaaaagaatagtg

SEQ ID NO: 144913 - DNA, 120 bp, Artificial Sequence
  ENSG00000104870_22 (sequence is synthesized)
aacataaagcagaagccagaactgctgatggccgtcagcccggtccctccattccacctgacggtgcagcaaattctgccgacttgccagagaggcagctccaggagggagaagctgctg

SEQ ID NO: 144914 - DNA, 120 bp, Artificial Sequence
  ENSG00000104870_23 (sequence is synthesized)
cctgaaaggaacttgggcagtaatgcccagtcctaggcagttgctgaaatctttgccttttattttcttttttgagctgggatcttgctctgtcgcccagactggagtggagtgcagtgg

SEQ ID NO: 144915 - DNA, 120 bp, Artificial Sequence
  ENSG00000104870_24 (sequence is synthesized)
cacagtcatagcgccatgtagccttggactcccaagctcaagagatcctcccgcctcagccttacaagtagctgggactatagagcccccctccatgcgcctgaaggcccgacccagcag

SEQ ID NO: 144916 - DNA, 120 bp, Artificial Sequence
  ENSG00000104870_25 (sequence is synthesized)
ccagcgattctcctgctttggtctcctgagtagctgagattacaggcacttgcactgttgcctagactggagtgcagtagcgggattagagttcactgcagcctcaacctcccaagctca

SEQ ID NO: 144917 - DNA, 120 bp, Artificial Sequence
  ENSG00000104870_26 (sequence is synthesized)
tgtaggaggagctctgttgtggagaaggatgaggaagattctgatgacctctccctctctctctctcctcagccccttggatctcccttcgtggagacgacaccggggtcctcctgccca

SEQ ID NO: 144918 - DNA, 120 bp, Artificial Sequence
  ENSG00000104870_27 (sequence is synthesized)
ctcagcatgggggtcccgcggcctcagccctgggcgctggggctcctgctctttctccttcctgggagcctgggcgcaggtgagggccgctccgggccagggccctgctgcaggcgggcg

SEQ ID NO: 144919 - DNA, 120 bp, Artificial Sequence
  ENSG00000104870_28 (sequence is synthesized)
gacccgagttccccgcgagcccctggcgctgccttctccgctcaattaactttctcaacgtctcctgctgggcctgaggctgggaaccacctgtcgcctcttgtgtctgtttccctctct

SEQ ID NO: 144920 - DNA, 120 bp, Artificial Sequence
  ENSG00000104870_29 (sequence is synthesized)
tctctctctctctgggtctctgtccccccccccccgggtttctgtcccctctctctgaatctgtccccctccctccataatagattcttctccctccctgggtatctgtcccactgcagt

SEQ ID NO: 144921 - DNA, 120 bp, Artificial Sequence
  ENSG00000104870_30 (sequence is synthesized)
tagattcttctccctccctgggtatctgtcccactgcagtctagttccccgcccgtgtgctcccttcagctctgtttctgtctgcagaaagccacctctccctcctgtaccaccttaccg

SEQ ID NO: 144922 - DNA, 120 bp, Artificial Sequence
  ENSG00000104870_31 (sequence is synthesized)
cccactgctctgcctgcctctccccactgcactggcacagccccgccttgccgctgctgatccattgccggtgtgaccgcggccgctcgtgctgtagctggttcttacgtccaacctggg

SEQ ID NO: 144923 - DNA, 120 bp, Artificial Sequence
  ENSG00000104870_32 (sequence is synthesized)
ggcagtctgcccagatcgcctgcctggcctcgcctctgcccatcagacacttggtgctggaatctccgaggctgggagggactgggagcgccccagttctgtgtcctgactgggtggggt

SEQ ID NO: 144924 - DNA, 120 bp, Artificial Sequence
  ENSG00000104870_33 (sequence is synthesized)
agcatgggggtcccgcggcctcagccctgggcgctggggctcctgctctttctccttcctgggagcctgggcgcagagcccccctccatgcgcctgaaggcccgacccagcagccctggc

SEQ ID NO: 144925 - DNA, 120 bp, Artificial Sequence
  ENSG00000104872_0 (sequence is synthesized)
gtttacagttcggcacgtaggacggagggtagtgcgtctagagacacatattccccacggatttgacgatggtgttcggtcttgaatggaaatgtagtcttaggccagtcttaggttttt

SEQ ID NO: 144926 - DNA, 120 bp, Artificial Sequence
  ENSG00000104872_1 (sequence is synthesized)
gaacaggatagtaggtatccggagtcgattgagggccagagcaggcactggggttcggatcctgggcaaagtttcccacgttgagggtctcgaggacgcctagatctctttcccagggcc

SEQ ID NO: 144927 - DNA, 120 bp, Artificial Sequence
  ENSG00000104872_2 (sequence is synthesized)
atggcgaacccgaagctgctgggaatggggctaagcgaggcggaggcgatcggtgctgattcggcgcgatttgaggagctgctgctgcaggcctcgaaggagctccagcaagcccagaca

SEQ ID NO: 144928 - DNA, 120 bp, Artificial Sequence
  ENSG00000104872_3 (sequence is synthesized)
accagaccagaatcgacacaaatccagcctcagcctggtttctgcataaagaccaactcctcggaagggaaggttttcatcaacatctgccactccccctctatccctcctcccgccgac

SEQ ID NO: 144929 - DNA, 120 bp, Artificial Sequence
  ENSG00000104872_4 (sequence is synthesized)
tacgacgtagctgtcaacagcgacttctaccggaggatgcagaacagcgatttcttgcgggagctcgtgatcaccatcgccagggagggccttgaggacaaatacaacttgcagctgaat

SEQ ID NO: 144930 - DNA, 120 bp, Artificial Sequence
  ENSG00000104872_5 (sequence is synthesized)
ccggaatggcgcatgatgaagaaccggccattcatgggctccatctcgcagcagaacatccgctcggagcagcgtcctcggatccaggagctgggggacctgtacacgcccgcccccggg

SEQ ID NO: 144931 - DNA, 120 bp, Artificial Sequence
  ENSG00000104872_6 (sequence is synthesized)
agagctgagtcagggcctgaaaagcctcacctgaacctgtggctggaagcccccgacctcctcttggccgaagttgacctccccaaactggatggagccctggggctgtcgctggagatc

SEQ ID NO: 144932 - DNA, 120 bp, Artificial Sequence
  ENSG00000104872_7 (sequence is synthesized)
ggggagaaccgcctggtgatggggggcccccagcagctgtatcatctagacgcttatatcccgctgcagatcaactctcatgagagcaaggcagccttccaccggaagagaaagcaatta

SEQ ID NO: 144933 - DNA, 120 bp, Artificial Sequence
  ENSG00000104872_8 (sequence is synthesized)
atggtggccatgccgcttctgccggtgccttcttgatcagggtgtctccttgtgcttctgagatgtggagaagaggctgctggcttccctaaaagttgaaataaaagatttttgcctttg

SEQ ID NO: 144934 - DNA, 120 bp, Artificial Sequence
  ENSG00000104872_9 (sequence is synthesized)
cagtgaccggacccctggatccttgagtattcggggattttggcggggtgctcaaagatgggactgcagttcccagaatgcactaaggcgggaaccaggcctcggggaattgaggcctcg

SEQ ID NO: 144935 - DNA, 120 bp, Artificial Sequence
  ENSG00000104872_10 (sequence is synthesized)
gactccccgcgaaaaaccgggcgcccaggcctggggaacgcagcgagcagcgccggccgggcagactctcaccagtgcgcatgcgtggctctccggcaccggtccgtactccagcgagat

SEQ ID NO: 144936 - DNA, 120 bp, Artificial Sequence
  ENSG00000104872_11 (sequence is synthesized)
gaggatgcaggttgggggcggggctgcggttgaggcctgggcaggggtctctacccctaccctccccgccaccgcctgtcttttccctctctgtcaccccagaacagcgatttcttgcgg

SEQ ID NO: 144937 - DNA, 120 bp, Artificial Sequence
  ENSG00000104872_12 (sequence is synthesized)
gccttcggtagatccccggtctgatgtttcctcaacgctcttgggaatccctccctccatcctcccacactgggtgatgtcctggggccctgggcactgagagagggaggagagagaact

SEQ ID NO: 144938 - DNA, 120 bp, Artificial Sequence
  ENSG00000104872_13 (sequence is synthesized)
gggggtgtgggataagatttgaaggaacaggaggagttcagcaggcagacagaagaaggttctaggtagagcggcccagagctgggagagaatgattggattggatcagccagtaatgga

SEQ ID NO: 144939 - DNA, 120 bp, Artificial Sequence
  ENSG00000104872_14 (sequence is synthesized)
gagtgactgaaagaaattcagtgggccgaggttgctagaagaatgaggtcttctccagaggtgggaggggcagaccacatagggtctccaacgccaggcttgtggggctcagaccttcac

SEQ ID NO: 144940 - DNA, 120 bp, Artificial Sequence
  ENSG00000104872_15 (sequence is synthesized)
ttgggagcactggggagccagagaagagctgtgagcagggaagggatagggtcaactctagtgacatcacactgatggacaggagataagaggccagggaggaggctgggcggagagtcc

SEQ ID NO: 144941 - DNA, 120 bp, Artificial Sequence
  ENSG00000104872_16 (sequence is synthesized)
agagcggaaagtgagtgcccagctctcacttccttatgtctctctctgcttcttacggccgctgtccctgaatgtttcttccctgtctgggtctgggctgtgggcttcctgcagagggct

SEQ ID NO: 144942 - DNA, 120 bp, Artificial Sequence
  ENSG00000104872_17 (sequence is synthesized)
acgggactccccgcgaaaaaccgggcgcccaggcctggggaacgcagcgagcagcgccggccgggcagactctcaccagtgcgcatgcgtggctctccggcaccggtccgtactccagcg

SEQ ID NO: 144943 - DNA, 120 bp, Artificial Sequence
  ENSG00000104872_18 (sequence is synthesized)
aggtgaagatctcgcgggcgcggggccctgcacgcgtcgcagccatcgcctaccccgaacgctttccgcgaagactgcggggcgctctgtgttaaggggaaccttgagggccatggcgaa

SEQ ID NO: 144944 - DNA, 120 bp, Artificial Sequence
  ENSG00000104872_19 (sequence is synthesized)
atatagtttcccagcgtgtgaggctaccatgcctggtccaggtgatcatcctgttgctggggagggtgacctgattccgccacctctccaggatggagccctggggctgtcgctggagat

SEQ ID NO: 144945 - DNA, 120 bp, Artificial Sequence
  ENSG00000104872_20 (sequence is synthesized)
cgatttgaggagctgctgctgcagctctcatgcataagaattgctccatttgaggaacaaatgaggggtctgatggcacagactccgagcctggaggtagttttcctttatacaggcctc

SEQ ID NO: 144946 - DNA, 120 bp, Artificial Sequence
  ENSG00000104872_21 (sequence is synthesized)
gtgccctcagaggacccaggagtctggcccgctaggccccttcttccctagaacccaagaatcctgggcccaggaccctcctccctcagctcctggagatctggcccctcgatctgattc

SEQ ID NO: 144947 - DNA, 120 bp, Artificial Sequence
  ENSG00000104872_22 (sequence is synthesized)
ttttccctatggtagatctctagtgccctggacatcccacacccgggcagtcctggttctgccacctggccaggctggcacttttccatgccccactccagggccgggaggcctgggcag

SEQ ID NO: 144948 - DNA, 120 bp, Artificial Sequence
  ENSG00000104872_23 (sequence is synthesized)
tccatgccccactccagggccgggaggcctgggcagagtgctcttcgtgcattagcggatctcctggctttagtcctgagcctgctgtctccttcttttttctttctttctttttttttt

SEQ ID NO: 144949 - DNA, 120 bp, Artificial Sequence
  ENSG00000104872_24 (sequence is synthesized)
cgggtgaggggcaggtcctgggccctcgggaaagagtggagccaggagcggtttggggaacacccctaggagaggaggggctggcttgggcagggtgccctggagtctgtgctactagga

SEQ ID NO: 144950 - DNA, 120 bp, Artificial Sequence
  ENSG00000104879_0 (sequence is synthesized)
gggtcagtgtcacctccaggatacagacagccccccttcagcccagcccagccaggtctcctacaccgccaccatgccattcggtaacacccacaacaagttcaagctgaattacaagcc

SEQ ID NO: 144951 - DNA, 120 bp, Artificial Sequence
  ENSG00000104879_1 (sequence is synthesized)
tgaggaggagtaccccgacctcagcaaacataacaaccacatggccaaggtactgacccttgaactctacaagaagctgcgggacaaggagactccatctggcttcactgtagacgatgt

SEQ ID NO: 144952 - DNA, 120 bp, Artificial Sequence
  ENSG00000104879_2 (sequence is synthesized)
catccagacaggagtggacaacccaggtcaccccttcatcatgaccgtgggctgcgtggctggtgatgaggagtcctacgaagttttcaaggaactctttgaccccatcatctcggatcg

SEQ ID NO: 144953 - DNA, 120 bp, Artificial Sequence
  ENSG00000104879_3 (sequence is synthesized)
ccacgggggctacaaacccactgacaagcacaagactgacctcaaccatgaaaacctcaagggtggagacgacctggaccctaactacgtgctcagcagccgcgtccgcactggccgcag

SEQ ID NO: 144954 - DNA, 120 bp, Artificial Sequence
  ENSG00000104879_4 (sequence is synthesized)
catcaagggctacacgttgcccccacactgctcccgtggcgagcgccgggcggtggagaagctctctgtggaagctctcaacagcctgacgggcgagttcaaagggaagtactaccctct

SEQ ID NO: 144955 - DNA, 120 bp, Artificial Sequence
  ENSG00000104879_5 (sequence is synthesized)
gaagagcatgacggagaaggagcagcagcagctcatcgatgaccacttcctgttcgacaagcccgtgtccccgctgctgctggcctcaggcatggcccgcgactggcccgacgcccgtgg

SEQ ID NO: 144956 - DNA, 120 bp, Artificial Sequence
  ENSG00000104879_6 (sequence is synthesized)
tagggctgcagaagattgaggagatctttaagaaagctggccaccccttcatgtggaaccagcacctgggctacgtgctcacctgcccatccaacctgggcactgggctgcgtggaggcg

SEQ ID NO: 144957 - DNA, 120 bp, Artificial Sequence
  ENSG00000104879_7 (sequence is synthesized)
tgcatgtgaagctggcgcacctgagcaagcaccccaagttcgaggagatcctcacccgcctgcgtctgcagaagaggggtacaggtggcgtggacacagctgccgtgggctcagtatttg

SEQ ID NO: 144958 - DNA, 120 bp, Artificial Sequence
  ENSG00000104879_8 (sequence is synthesized)
acgtgtccaacgctgatcggctgggctcgtccgaagtagaacaggtgcagctggtggtggatggtgtgaagctcatggtggaaatggagaagaagttggagaaaggccagtccattgacg

SEQ ID NO: 144959 - DNA, 120 bp, Artificial Sequence
  ENSG00000104879_9 (sequence is synthesized)
acatgatccccgcccagaagtaggcgcctgcccacctgccaccgactgctggaacccagccagtgggagggcctggcccaccagagtcctgctccctcactcctcgccccgccccctgtc

SEQ ID NO: 144960 - DNA, 120 bp, Artificial Sequence
  ENSG00000104879_10 (sequence is synthesized)
ccagagtcccacctgggggctctctccacccttctcagagttccagtttcaaccagagttccaaccaatgggctccatcctctggattctggccaatgaaatatctccctggcagggtcc

SEQ ID NO: 144961 - DNA, 120 bp, Artificial Sequence
  ENSG00000104879_11 (sequence is synthesized)
tcttcttttcccagagctccaccccaaccaggagctctagttaatggagagctcccagcacactcggagcttgtgctttgtctccacgcaaagcgataaataaaagcattggtggcctta

SEQ ID NO: 144962 - DNA, 120 bp, Artificial Sequence
  ENSG00000104880_0 (sequence is synthesized)
ctcgcgcggcttcccgcttccggctcccagctgctagctactgtggatctgggggggccggacggaggcatcggaggcggctgcgagagtggcagaggagctggcggagagcggcctgcg

SEQ ID NO: 144963 - DNA, 120 bp, Artificial Sequence
  ENSG00000104880_1 (sequence is synthesized)
ggcgatcgggccgagcctcgctcaaggagcacccccggggcaccctcctgtccgatggcagcccggccctgtccaggaatgtcggtatgacggtctctcagaaagggggtccccagccaa

SEQ ID NO: 144964 - DNA, 120 bp, Artificial Sequence
  ENSG00000104880_2 (sequence is synthesized)
caccgagcccggctggccctgggacgcaactcggaccaatcacaggagagatggatgaagccgattctgcgtttttaaaatttaagcagacagctgatgactctctgtcccttacatctc

SEQ ID NO: 144965 - DNA, 120 bp, Artificial Sequence
  ENSG00000104880_3 (sequence is synthesized)
caaacaccgagtccatttttgtagaagatccctacaccgcctcgctgaggagtgagattgagtcagacggccacgagtttgaagctgagtcctggagcctcgccgtggatgcagcctacg

SEQ ID NO: 144966 - DNA, 120 bp, Artificial Sequence
  ENSG00000104880_4 (sequence is synthesized)
ccaagaagcaaaagagggaggtggtgaaaagacaagatgtcctttatgagctgatgcagacagaggtgcaccacgtgcggacgctcaagatcatgctgaaggtgtactccagggccctgc

SEQ ID NO: 144967 - DNA, 120 bp, Artificial Sequence
  ENSG00000104880_5 (sequence is synthesized)
aggaggagctgcagttcagcagcaaggccattggccgcctcttcccatgcgctgacgacctgctggagacgcacagccacttcctcgctcggctcaaggagcgccgccaggagtccctgg

SEQ ID NO: 144968 - DNA, 120 bp, Artificial Sequence
  ENSG00000104880_6 (sequence is synthesized)
aggagggcagtgaccggaattatgtcatccagaaaatcggcgacctcctggttcagcagttttcaggtgaaaatggggagagaatgaaagaaaagtacggtgtgttttgtagtggccaca

SEQ ID NO: 144969 - DNA, 120 bp, Artificial Sequence
  ENSG00000104880_7 (sequence is synthesized)
atgaagctgttagtcattacaagttgctgcttcagcaaaacaagaaatttcaaaacttgatcaagaaaattggcaacttctccatcgtgcggcggcttggcgtgcaggagtgcattctcc

SEQ ID NO: 144970 - DNA, 120 bp, Artificial Sequence
  ENSG00000104880_8 (sequence is synthesized)
tggttacacaacgcataaccaaatacccagtgctggtggagcgcatcatccagaacacggaagctggcactgaggactatgaagacctgacccaggccttgaacctcatcaaagatatca

SEQ ID NO: 144971 - DNA, 120 bp, Artificial Sequence
  ENSG00000104880_9 (sequence is synthesized)
tctcacaagtggacgccaaggtcagtgagtgtgagaagggccagcgcctcagggagatcgcagggaagatggacctgaagtcttccagcaaactcaagaacgggctcaccttccgcaagg

SEQ ID NO: 144972 - DNA, 120 bp, Artificial Sequence
  ENSG00000104880_10 (sequence is synthesized)
aagacatgcttcagcggcagctccacctggagggcatgctatgctggaagaccacatcagggcgcttgaaagatatcctggctatcctgctgaccgacgtacttttgctgctacaagaaa

SEQ ID NO: 144973 - DNA, 120 bp, Artificial Sequence
  ENSG00000104880_11 (sequence is synthesized)
aagatcagaaatacgtctttgcttctgtggactcaaagccacccgtcatctcgttacaaaagctcatcgtgagggaagtggccaacgaggagaaagcgatgtttctgatcagcgcctcct

SEQ ID NO: 144974 - DNA, 120 bp, Artificial Sequence
  ENSG00000104880_12 (sequence is synthesized)
tgcaagggccggagatgtatgaaatctacacgagctccaaagaggacaggaacgcctggatggcccacatccaaagggctgtggagagctgccctgacgaggaggaggggcccttcagcc

SEQ ID NO: 144975 - DNA, 120 bp, Artificial Sequence
  ENSG00000104880_13 (sequence is synthesized)
tgcccgaagaggaaaggaaggtggtcgaggcccgcgccacgagactccgggactttcaagagcggttgagcatgaaagaccagctgatcgcacagagcctcctagagaaacagcagatct

SEQ ID NO: 144976 - DNA, 120 bp, Artificial Sequence
  ENSG00000104880_14 (sequence is synthesized)
acctggagatggccgagatgggcggcctcgaagacctgccccagccccgaggcctattccgtggaggggacccatccgagaccctgcagggggagctaattctcaagtcggccatgagcg

SEQ ID NO: 144977 - DNA, 120 bp, Artificial Sequence
  ENSG00000104880_15 (sequence is synthesized)
agatcgagggcatccagagcctgatctgcaggcagctgggcagcgccaacggccaggcggaagacggaggcagctccacaggcccgcccaggagggctgagaccttcgcgggctacgact

SEQ ID NO: 144978 - DNA, 120 bp, Artificial Sequence
  ENSG00000104880_16 (sequence is synthesized)
gcacaaacagccccaccaagaatggcagtttcaagaagaaagtcagcagcactgaccccaggccccgagactggcgaggccccccaaacagcccggacttgaagctcagtgacagtgaca

SEQ ID NO: 144979 - DNA, 120 bp, Artificial Sequence
  ENSG00000104880_17 (sequence is synthesized)
ttcctgggagctctgaggaatcgccgcaggtggtggaggcgccaggcacggaatccgatccccgtctgcccaccgtcctggagtcggagcttgtccagcggatccagacactgtcccagc

SEQ ID NO: 144980 - DNA, 120 bp, Artificial Sequence
  ENSG00000104880_18 (sequence is synthesized)
tgctcctgaaccttcaggcggtaatcgcccaccaggacagctatgtggagacgcagcgggctgccatccaggagcgggagaagcagttccggctgcagtcgacgcgtgggaacctgctgc

SEQ ID NO: 144981 - DNA, 120 bp, Artificial Sequence
  ENSG00000104880_19 (sequence is synthesized)
tggagcaggagcggcaacgcaacttcgagaagcagcgggaggagcgcgcggccctggagaagctgcagagccagctgcggcacgagcagcagcgctgggagcgcgagcgccagtggcagc

SEQ ID NO: 144982 - DNA, 120 bp, Artificial Sequence
  ENSG00000104880_20 (sequence is synthesized)
accaggagctggagcgtgcgggcgcgcggctgcaggagcgcgagggcgaggcgcggcagctacgcgagcggctggagcaggagcgggccgagctggagcgccagcgccaggcctaccagc

SEQ ID NO: 144983 - DNA, 120 bp, Artificial Sequence
  ENSG00000104880_21 (sequence is synthesized)
gcgcctggagctgctgcgccgcctcaagaagcagaacaccgcgccaggcgcgctgccgcccgacacactggccgaggcccagcccccaagccaccctcccagcttcaacggggaagggct

SEQ ID NO: 144984 - DNA, 120 bp, Artificial Sequence
  ENSG00000104880_22 (sequence is synthesized)
ggagggccctcgtgtgagcatgctgccatccggcgtggggccagagtacgcagagcgccccgaggtggctcgccgggacagcgcccccaccgagaaccggctggccaagagcgatgtgcc

SEQ ID NO: 144985 - DNA, 120 bp, Artificial Sequence
  ENSG00000104880_23 (sequence is synthesized)
catccagctgctcagcgccaccaaccagttccagaggcaggcggccgtgcagcagcagatccccaccaagctggcggcctccaccaagggtggcaaggacaagggcggcaagagcagggg

SEQ ID NO: 144986 - DNA, 120 bp, Artificial Sequence
  ENSG00000104880_24 (sequence is synthesized)
ctctcagcgctgggagagctcagcgtccttcgacctgaagcagcagctgctgctcaacaagctcatggggaaagatgagagcacctcacggaaccgccgctcgctgagccctatcctgcc

SEQ ID NO: 144987 - DNA, 120 bp, Artificial Sequence
  ENSG00000104880_25 (sequence is synthesized)
cggcagacacagtcctgcgcccccaccagaccctggcttccccgccccgagcccaccgccagctgacagcccctccgagggcttctctctcaaggccgggggcacagccctcctgcccgg

SEQ ID NO: 144988 - DNA, 120 bp, Artificial Sequence
  ENSG00000104880_26 (sequence is synthesized)
gcccccagctccctcgccactgccggccacaccactcagcgccaaggaggacgccagcaaagaagacgtcatcttcttctaaaagggccgtgactcaaggaaagtttttaatggaaagtt

SEQ ID NO: 144989 - DNA, 120 bp, Artificial Sequence
  ENSG00000104880_27 (sequence is synthesized)
gagccagaactaaaccagggagctgtctgaaatcatagcaccccatccgggtggcggggagatcaactccgagctgtttttccgaggcagtgaggaacggtgccggctctgcacggagct

SEQ ID NO: 144990 - DNA, 120 bp, Artificial Sequence
  ENSG00000104880_28 (sequence is synthesized)
gaggacaggacagaccttgctttgagaaggagctgccggccggggccacgctccacagccgccgcgcgacagtggagccaagggttagggcaccaggaggggccaggtggcgtcggcagc

SEQ ID NO: 144991 - DNA, 120 bp, Artificial Sequence
  ENSG00000104880_29 (sequence is synthesized)
atctgtccccagaatcaggcagaatccacttcccaaacagagccccacgcaggttcaccatgaacctcagggtcagggaatgagccaggcacgggggcatgggcagagagggccacgggg

SEQ ID NO: 144992 - DNA, 120 bp, Artificial Sequence
  ENSG00000104880_30 (sequence is synthesized)
cagggcccactgagggaacatcagtggccctccagtcaggttctgtgggtttggaagcccatcgtgaaaggggctgacctttgcccctttttacttggcattggttttgaaaccagctgt

SEQ ID NO: 144993 - DNA, 120 bp, Artificial Sequence
  ENSG00000104880_31 (sequence is synthesized)
ttcccaaactctgcttcccaagggcaaccgttgctgttcacacgctcagcctgtctgggggagcgggcctctagcttcagccagggcgggtacacaccctgggcacagggtcctcagccc

SEQ ID NO: 144994 - DNA, 120 bp, Artificial Sequence
  ENSG00000104880_32 (sequence is synthesized)
ccgggaaatgagctcccagggctggcgtcccaccttccaggtgggggctggcacatcacagactgtcgagagcgccatgtcccagggcatgcagaggatgcacctagagacgttgcagca

SEQ ID NO: 144995 - DNA, 120 bp, Artificial Sequence
  ENSG00000104880_33 (sequence is synthesized)
agtggacaagtggccgctgtgcgggcccctcgcttgtagtgagctgttgcagcttacggtccgttccctggaggggtggaggaaggaggtgttgggcagcatcaaaggtgctgggacatc

SEQ ID NO: 144996 - DNA, 120 bp, Artificial Sequence
  ENSG00000104880_34 (sequence is synthesized)
ccagggtggtgagatccatccacgatccagctccggtggagaaagggcccatgtcaagccttgttctgcaccccaagcattggtggtaggactgggtcctggctgatcgtccttgttccc

SEQ ID NO: 144997 - DNA, 120 bp, Artificial Sequence
  ENSG00000104880_35 (sequence is synthesized)
agtggggtacatgtgagcccctgccagggccaagtccttctcccgaacccagggtcctgggaactgcagatcccggggggattcagcccttctcccactgtgctggcagaggcactcctg

SEQ ID NO: 144998 - DNA, 120 bp, Artificial Sequence
  ENSG00000104880_36 (sequence is synthesized)
tgacgctgaatacagtgaacagggacattcccgccactcggggacagatgggcacaagggaggggaaactccatcaggaagtgctcccctgggcagaggcgcccactgggtgctgtgggc

SEQ ID NO: 144999 - DNA, 120 bp, Artificial Sequence
  ENSG00000104880_37 (sequence is synthesized)
tcaggagggggcggggcaggagctggtgccaaccgggaaccagagccccacagccatacagcccattggtgacaaggtcctgagaacacagtggccaggtgtccccaggctcctggcccc

SEQ ID NO: 145000 - DNA, 120 bp, Artificial Sequence
  ENSG00000104880_38 (sequence is synthesized)
tccgacgacctcaactctgcccagcccggtccctggccatcagcgacgctgtccgccccccgtcagatcccatgtgtgccatgtttatcatcagtgttttgtatttttgtactgagtatc

SEQ ID NO: 145001 - DNA, 120 bp, Artificial Sequence
  ENSG00000104880_39 (sequence is synthesized)
ggagcactttacagaagctgactgtacattcctgttctgttgtgaagagaacattcccagaccctggcaccctcctgagccggcgtgtgccggtccagccctccgagatgccacaattcc

SEQ ID NO: 145002 - DNA, 120 bp, Artificial Sequence
  ENSG00000104880_40 (sequence is synthesized)
ttggatgggggagaagttcaaggaatttctgctcggccacgcggtgggaaccccgcgtccccgccatgtggcagaggggtctcagtcgtgctaggcatcgggcggcagcgccgacagccc

SEQ ID NO: 145003 - DNA, 120 bp, Artificial Sequence
  ENSG00000104880_41 (sequence is synthesized)
ttccctcgccagtgcccctcggccactcctgggttggagcccgattttatttgtaaagttgacagtcgagcaaatgttcctattttcgtgggatctgcacacgtctttgtcagttgtggt

SEQ ID NO: 145004 - DNA, 120 bp, Artificial Sequence
  ENSG00000104880_42 (sequence is synthesized)
catgatcttagtcacctgctaattatttttacaatgattacaacatttcctcactgcgggatatttctgacccgctttagaacttaagacctgattctagcaataaacgtgtccgagatg

SEQ ID NO: 145005 - DNA, 120 bp, Artificial Sequence
  ENSG00000104880_43 (sequence is synthesized)
aaacaccatgccctgccatctctgggtcttagagtcaccctaacatctgatctagattaattatcatcatgtgcgaggttttggcatgaagcacgccaggctcaccgtttcatgatctta

SEQ ID NO: 145006 - DNA, 120 bp, Artificial Sequence
  ENSG00000104880_44 (sequence is synthesized)
gactatttacagcaaactcaaacagctcacttgctttttacaccctgcaaagaccaagggagagcctggaggggttgttttttttttctgttttattctatcaaagcagcaaatactgca

SEQ ID NO: 145007 - DNA, 120 bp, Artificial Sequence
  ENSG00000104880_45 (sequence is synthesized)
atttccacagtaaatggtcacagtggggaccaatatcctgccctccagacccgctgcttcagccaatacagcaagggaagacgcagctctgttttctagaaggatcccaccgaggcataa

SEQ ID NO: 145008 - DNA, 120 bp, Artificial Sequence
  ENSG00000104880_46 (sequence is synthesized)
aaacggcgcagcccagcctggcgccgcgccgggtcccggagccccgggcgcgaacatggggaatgcgcactccaaaagcggggacaggcacagcgcgctccccggccgccccgagctgtc

SEQ ID NO: 145009 - DNA, 120 bp, Artificial Sequence
  ENSG00000104880_47 (sequence is synthesized)
tttttacggctctttccccaggaaatggagcgagaacgtcttcttggataacgagctgctgacctccaagatcctgtctgtgctgcggccgcagtcggagcggggcttccgcgccgggga

SEQ ID NO: 145010 - DNA, 120 bp, Artificial Sequence
  ENSG00000104880_48 (sequence is synthesized)
gcaaggcccctccctgccctgcccacccttcctgctctctggggacccccatggggtcaccatgcccacccagctgtcccctcctcttccctagcaaaccactgatgaccgcctggcagg

SEQ ID NO: 145011 - DNA, 120 bp, Artificial Sequence
  ENSG00000104880_49 (sequence is synthesized)
ggccagcctgtcggtgctctgggccttgcagctgtttctgtagggttagcggtggtgccggggtcactttctgaatctctttttttttttttcaaaaaggaaagtttttaatggaaagtt

SEQ ID NO: 145012 - DNA, 120 bp, Artificial Sequence
  ENSG00000104880_50 (sequence is synthesized)
ctctctgtcccttacatctccaaacaccgagtccatttttgtagaaggtatggtcatctccgctctctcgcggctgccacacagttcctgtctctcctgggaagagctggggctcgtgtc

SEQ ID NO: 145013 - DNA, 120 bp, Artificial Sequence
  ENSG00000104881_0 (sequence is synthesized)
cccgttctccgctccccaagccggagcccgagctggaggaagcccccaggtgccaggatctgcccggatccgcgcccgctccggccggcaccatggacagcgaggcattccagagcgcgc

SEQ ID NO: 145014 - DNA, 120 bp, Artificial Sequence
  ENSG00000104881_1 (sequence is synthesized)
gggactttctggacatgaacttccagtcgctggccatgaaacacatggatctgaagcagatggagctggacacggcggcggccaaggtggatgaactgaccaagcagctggagtcgctgt

SEQ ID NO: 145015 - DNA, 120 bp, Artificial Sequence
  ENSG00000104881_2 (sequence is synthesized)
ggtcagactctcccgcgcctcctggcccgcaggccggacccccttctaggccgccccggtacagctccagctcgatccctgagcccttcggcagccgagggtccccccggaaggcggcca

SEQ ID NO: 145016 - DNA, 120 bp, Artificial Sequence
  ENSG00000104881_3 (sequence is synthesized)
ccgacggcgcagacaccccgttcggacgatcagagagtgccccaaccctacacccctacagcccgctgtcccccaagggacggccgtcgtcgccgcgcaccccgctctacctgcagccgg

SEQ ID NO: 145017 - DNA, 80 bp, Artificial Sequence
  ENSG00000104881_4 (sequence is synthesized)
acgcctacggcagcctggaccgcgcgacctcgccccggccccgcgccttcgatggcgcaggcagctccctcggccgtgcg

SEQ ID NO: 145018 - DNA, 120 bp, Artificial Sequence
  ENSG00000104881_5 (sequence is synthesized)
acgcctttcgacttcctgggccgcgcaggctccccccgcggcagccccctggcggaggggccccaggccttcttccccgagcgtgggccgtcaccgcgcccccctgccacagcctacgac

SEQ ID NO: 145019 - DNA, 120 bp, Artificial Sequence
  ENSG00000104881_6 (sequence is synthesized)
cctacgacgcgccagcgtccgccttcgggagctccctgctaggctccggcggcagcgcattcgccccgcctctgcgcgcgcaagacgacctgacgctgcgccggcggcctccgaaagcct

SEQ ID NO: 145020 - DNA, 120 bp, Artificial Sequence
  ENSG00000104881_7 (sequence is synthesized)
ggaacgagtctgacctggacgtggcgtacgagaagaagccttcgcagacagcgagctatgaacgcctggacgtcttcgcaaggcctgcctcgccgagcctgcagctgttgccttggaggg

SEQ ID NO: 145021 - DNA, 120 bp, Artificial Sequence
  ENSG00000104881_8 (sequence is synthesized)
agagcagcctggatggactggggggcaccggcaaggacaacctcactagcgccaccctgccgcgcaattacaaggtctctcctctggccagcgaccggcgttcagacgcgggcagctacc

SEQ ID NO: 145022 - DNA, 120 bp, Artificial Sequence
  ENSG00000104881_9 (sequence is synthesized)
ttcagacgcgggcagctaccggcgctcgctgggctccgcggggccgtcgggcactttgcctcgcagctggcagcccgtcagccgcatccccatgcccccctccagcccccagccccgcgg

SEQ ID NO: 145023 - DNA, 120 bp, Artificial Sequence
  ENSG00000104881_10 (sequence is synthesized)
tccccctcagcatgatcttcaagctgcagaacgccttctgggagcacggggccagccgcgccatgctccctgggtcccccctcttcacccgagcacccccgcctaagctgcagccccaac

SEQ ID NO: 145024 - DNA, 120 bp, Artificial Sequence
  ENSG00000104881_11 (sequence is synthesized)
cacaaccacagccccagccacaatcacaaccacagccccagctgcccccacagccccagacccaaccccaaacccctaccccagccccccagcatccccaacagacatggccccctgtga

SEQ ID NO: 145025 - DNA, 120 bp, Artificial Sequence
  ENSG00000104881_12 (sequence is synthesized)
acgaaggaccccccaaaccccccaccgagctggagcctgagccggagatagaggggctgctgacaccagtgctggaggctggcgatgtggatgaaggccctgtagcaaggcctctcagcc

SEQ ID NO: 145026 - DNA, 120 bp, Artificial Sequence
  ENSG00000104881_13 (sequence is synthesized)
cagccagcactgccaccggaggcacagtcggtgcccgagctggaggaggtggcacgggtgttggcggaaattccccggcccctcaaacgcaggggctccatggagcaggcccctgctgtg

SEQ ID NO: 145027 - DNA, 120 bp, Artificial Sequence
  ENSG00000104881_14 (sequence is synthesized)
gccctgccccctacccacaagaaacagtaccagcagatcatcagccgcctcttccatcgtcatggggggccagggcccggggggccggagccagagctgtcccccatcactgagggatct

SEQ ID NO: 145028 - DNA, 120 bp, Artificial Sequence
  ENSG00000104881_15 (sequence is synthesized)
gaggccagggcagggccccctgctcctgccccaccagctcccattccacccccggccccgtcccagagcagcccaccagagcagccgcagagcatggagatgcgctctgtgctgcggaag

SEQ ID NO: 145029 - DNA, 120 bp, Artificial Sequence
  ENSG00000104881_16 (sequence is synthesized)
gcgggctccccgcgcaaggcccgccgcgcgcgcctcaaccctctggtgctcctcctggacgcggcgctgaccggggagctggaggtggtgcagcaggcggtgaaggagatgaacgacccg

SEQ ID NO: 145030 - DNA, 120 bp, Artificial Sequence
  ENSG00000104881_17 (sequence is synthesized)
agccagcccaacgaggagggcatcactgccttgcacaacgccatctgcggcgccaactactctatcgtggatttcctcatcaccgcgggtgccaatgtcaactcccccgacagccacggc

SEQ ID NO: 145031 - DNA, 120 bp, Artificial Sequence
  ENSG00000104881_18 (sequence is synthesized)
tggacacccttgcactgcgcggcgtcgtgcaacgacacagtcatctgcatggcgctggtgcagcacggcgctgcaatcttcgccaccacgctcagcgacggcgccaccgccttcgagaag

SEQ ID NO: 145032 - DNA, 120 bp, Artificial Sequence
  ENSG00000104881_19 (sequence is synthesized)
tgcgacccttaccgcgagggttatgctgactgcgccacctacctggcagacgtcgagcagagtatggggctgatgaacagcggggcagtgtacgctctctgggactacagcgccgagttc

SEQ ID NO: 145033 - DNA, 120 bp, Artificial Sequence
  ENSG00000104881_20 (sequence is synthesized)
ggggacgagctgtccttccgcgagggcgagtcggtcaccgtgctgcggagggacgggccggaggagaccgactggtggtgggccgcgctgcacggccaggagggctacgtgccgcggaac

SEQ ID NO: 145034 - DNA, 120 bp, Artificial Sequence
  ENSG00000104881_21 (sequence is synthesized)
tacttcgggctgttccccagggtgaagcctcaaaggagtaaagtctagcaggatagaaggaggtttctgaggctgacagaaacaagcattcctgccttccctccagacctctccctctgt

SEQ ID NO: 145035 - DNA, 120 bp, Artificial Sequence
  ENSG00000104881_22 (sequence is synthesized)
tttttgctgcctttatctgcacccctcaccctgctggtggtggtccttgccaccggttctctgttctcctggaagtccagggaagaaggagggccccagccttaaatttagtaatctgcc

SEQ ID NO: 145036 - DNA, 120 bp, Artificial Sequence
  ENSG00000104881_23 (sequence is synthesized)
ttagccttgggaggtctgggaagggctggaaatcactggggacaggaaaccacttccttttgccaaatcagatcccgtccaaagtgcctcccatgcctaccaccatcatcacatccccca

SEQ ID NO: 145037 - DNA, 120 bp, Artificial Sequence
  ENSG00000104881_24 (sequence is synthesized)
gcaagccagccacctgcccagccgggcctgggatgggccaccacaccactggatattcctgggagtcactgctgacaccatctctcccagcagtcttggggtctgggtgggaaacattgg

SEQ ID NO: 145038 - DNA, 120 bp, Artificial Sequence
  ENSG00000104881_25 (sequence is synthesized)
tctctaccaggatccctgccccacctctccccaattaagtgccttcacacagcactggtttaatgtttataaacaaaatagagaaactttccttataaataaaagtagtttgcacagaaa

SEQ ID NO: 145039 - DNA, 120 bp, Artificial Sequence
  ENSG00000104881_26 (sequence is synthesized)
cctggacgcggcgctgaccggggagctggaggtggtgcagcaggcggtgaaggaggtgagcgctgctgagcgggaggtgggcacggcgggggcatcgcagatgccagccgcgggactgag

SEQ ID NO: 145040 - DNA, 120 bp, Artificial Sequence
  ENSG00000104881_27 (sequence is synthesized)
ctccgctccccaagccggagcccgagctggaggaagcccccaggtgccaggatctgcccggatcctctcttcttcctgaggcctcaattctcagagctctgaattcttcctgcaccttct

SEQ ID NO: 145041 - DNA, 120 bp, Artificial Sequence
  ENSG00000104881_28 (sequence is synthesized)
accagccctgggaggtggggagatcacagccaaatgcctctttacaagcactgtccctgcagagagctaggccaggtgagtttgggaatttgggtaggagccagggatagctcaaaggtt

SEQ ID NO: 145042 - DNA, 120 bp, Artificial Sequence
  ENSG00000104881_29 (sequence is synthesized)
aagtgtggaccctgaagccagactgcctggttccacgctgtgtgaccttgggcaagtcacttaacctcactgggcctcaattttcttgagtgtaaaagggaaataatgggccgggcacgg

SEQ ID NO: 145043 - DNA, 120 bp, Artificial Sequence
  ENSG00000104881_30 (sequence is synthesized)
aaaaaaaaaaaaaaaaggcaaataatgatagaatcgatcctattgacatatgttattaaattcatataaagcctttaaaacagcacctgatgggccaggtgcagttgctcacacctgtaa

SEQ ID NO: 145044 - DNA, 120 bp, Artificial Sequence
  ENSG00000104881_31 (sequence is synthesized)
ttctgggattacaggtgtgagccactcgactcagccaataatgcatatttttatttccacctgctttactgtcagaatgagtaagacagagaagaaatcattaaacaccaggattctact

SEQ ID NO: 145045 - DNA, 120 bp, Artificial Sequence
  ENSG00000104881_32 (sequence is synthesized)
attctacttcctgctggagttttctgcctgagatgttaggagaggaaactctcaggatctcagaaaatcacatctatcacggttggtagaagtagattctagagtcagccagaactgagt

SEQ ID NO: 145046 - DNA, 120 bp, Artificial Sequence
  ENSG00000104881_33 (sequence is synthesized)
tcaagtcccaactgcatggctttgggcaactgacttgtcctctctgaggcccagattccctttcggtaatgtggagatggcagtgtatctacctcacaaagcagtggtgagattacaata

SEQ ID NO: 145047 - DNA, 120 bp, Artificial Sequence
  ENSG00000104881_34 (sequence is synthesized)
aggtaggcatgtaaagcgccaggcacatactaactgctcaataaatgggaggcatcataattgtatattattcacagcccaaggaaagtgtagcccagagagggcaaggaacttccctga

SEQ ID NO: 145048 - DNA, 120 bp, Artificial Sequence
  ENSG00000104883_0 (sequence is synthesized)
gtcgcggtgacgtcacggagttgccatggcgtcgctgagcggcctggcgtcggcgctggagtcgtacaggggccgggaccgcctgatccgagtgctggggtactgctgccagctggttgg

SEQ ID NO: 145049 - DNA, 120 bp, Artificial Sequence
  ENSG00000104883_1 (sequence is synthesized)
tggagttctggttgaacagtgtcccgccaggtccgaagtggggacacgtctgttggtggtgtccacccaactcagccactgcaggaccatcttgcgactctttgatgacctggccatgtt

SEQ ID NO: 145050 - DNA, 120 bp, Artificial Sequence
  ENSG00000104883_2 (sequence is synthesized)
tgtctacactaagcaatatggcctgggggcacaggaggaggacgcctttgtccgctgtgtctccgtcctagggaacctggctgaccagctctactacccctgtgagcacgtggcctgggc

SEQ ID NO: 145051 - DNA, 120 bp, Artificial Sequence
  ENSG00000104883_3 (sequence is synthesized)
ggctgatgcccgggtcctccacgtggactcttctcggtggtggacgctgagtacaaccctgtgggccctctctctgctcctgggggttgccaggtccctgtggatgctgctgaaactgag

SEQ ID NO: 145052 - DNA, 120 bp, Artificial Sequence
  ENSG00000104883_4 (sequence is synthesized)
ctggccaacgccgtgcactggctgccccggggcgtgctgtgggccggccgcttcccgccgtggctagtgggcctcatgggcaccatctcctcaatcctcagcatgtaccaggcggcccgg

SEQ ID NO: 145053 - DNA, 120 bp, Artificial Sequence
  ENSG00000104883_5 (sequence is synthesized)
gccggcggccaggccgaggccactaccccctgacactgccggaagagcacagggacacagccagagcccacggagggcccttcccgcaaagcagaagccgccagggcaggggccggggct

SEQ ID NO: 145054 - DNA, 120 bp, Artificial Sequence
  ENSG00000104883_6 (sequence is synthesized)
ctcatggagctgcctgtggtgaaacccatgggcagggtgggtggagggactgatgcgaggtcccccaggcctcagcctggagctcctgagccgtgacagttttcaggggccgtgcagggc

SEQ ID NO: 145055 - DNA, 120 bp, Artificial Sequence
  ENSG00000104883_7 (sequence is synthesized)
ttcagcagcacctcctgcctgccagctggcgtcttgtatccaaatcaagatgaggaagagggggcctgtcgtgccttgagaaagctggaacgggaatcaattaaacattgtggtgctggc

SEQ ID NO: 145056 - DNA, 120 bp, Artificial Sequence
  ENSG00000104883_8 (sequence is synthesized)
ggcaggcttggtgcgaatactgcctccttagagctccaggaacccagttcttagctgtgatggatccttgcaatgaaagaattaagaagggcgggtgcggtggttcacgcctgtaattcc

SEQ ID NO: 145057 - DNA, 120 bp, Artificial Sequence
  ENSG00000104883_9 (sequence is synthesized)
agcactttggaaggtcgacgtgggaagattgcttaagcccagggctcaaggccagcctgggtaacatgaacaattcttaacgtccaaagataacgtctttccttaacgtcgaaagatgcc

SEQ ID NO: 145058 - DNA, 120 bp, Artificial Sequence
  ENSG00000104883_10 (sequence is synthesized)
ttgttgtgatattacagcagtcattcctgctcactacgggcaggcagacagtgcagaaaaggtgaagcacaaaaactaaaaaggaaaatctctccttgaaccactgcgaacagatccgag

SEQ ID NO: 145059 - DNA, 120 bp, Artificial Sequence
  ENSG00000104884_0 (sequence is synthesized)
ttcatgagggaggcgggtcgaccccgctgcacagtccggccggcgccatgaagctcaacgtggacgggctcctggtctacttcccgtacgactacatctaccccgagcagttctcctaca

SEQ ID NO: 145060 - DNA, 120 bp, Artificial Sequence
  ENSG00000104884_1 (sequence is synthesized)
tgcgggagctcaaacgcacgctggacgccaagggtcatggagtcctggagatgccctcaggcaccgggaagacagtatccctgttggccctgatcatggcataccagagagcatatccgc

SEQ ID NO: 145061 - DNA, 120 bp, Artificial Sequence
  ENSG00000104884_2 (sequence is synthesized)
tggaggtgaccaaactcatctactgctcaagaactgtgccagagattgagaaggtgattgaagagcttcgaaagttgctcaacttctatgagaagcaggagggcgagaagctgccgtttc

SEQ ID NO: 145062 - DNA, 120 bp, Artificial Sequence
  ENSG00000104884_3 (sequence is synthesized)
tgggactggctctgagctcccgcaaaaacttgtgtattcaccctgaggtgacacccctgcgctttgggaaggacgtcgatgggaaatgccacagcctcacagcctcctatgtgcgggcgc

SEQ ID NO: 145063 - DNA, 120 bp, Artificial Sequence
  ENSG00000104884_4 (sequence is synthesized)
agtaccagcatgacaccagcctgccccactgccgattctatgaggaatttgatgcccatgggcgtgaggtgcccctccccgctggcatctacaacctggatgacctgaaggccctggggc

SEQ ID NO: 145064 - DNA, 120 bp, Artificial Sequence
  ENSG00000104884_5 (sequence is synthesized)
ggcgccagggctggtgcccatacttccttgctcgatactcaatcctgcatgccaatgtggtggtttatagctaccactacctcctggaccccaagattgcagacctggtgtccaaggaac

SEQ ID NO: 145065 - DNA, 120 bp, Artificial Sequence
  ENSG00000104884_6 (sequence is synthesized)
tggcccgcaaggccgtcgtggtcttcgacgaggcccacaacattgacaacgtctgcatcgactccatgagcgtcaacctcacccgccggacccttgaccggtgccagggcaacctggaga

SEQ ID NO: 145066 - DNA, 120 bp, Artificial Sequence
  ENSG00000104884_7 (sequence is synthesized)
ccctgcagaagacggtgctcaggatcaaagagacagacgagcagcgcctgcgggacgagtaccggcgtctggtggaggggctgcgggaggccagcgccgcccgggagacggacgcccacc

SEQ ID NO: 145067 - DNA, 120 bp, Artificial Sequence
  ENSG00000104884_8 (sequence is synthesized)
tggccaaccccgtgctgcccgacgaagtgctgcaggaggcagtgcctggctccatccgcacggccgagcatttcctgggcttcctgaggcggctgctggagtacgtgaagtggcggctgc

SEQ ID NO: 145068 - DNA, 120 bp, Artificial Sequence
  ENSG00000104884_9 (sequence is synthesized)
gtgtgcagcatgtggtgcaggagagcccgcccgccttcctgagcggcctggcccagcgcgtgtgcatccagcgcaagcccctcagattctgtgctgaacgcctccggtccctgctgcata

SEQ ID NO: 145069 - DNA, 120 bp, Artificial Sequence
  ENSG00000104884_10 (sequence is synthesized)
ctctggagatcaccgaccttgctgacttctccccgctcaccctccttgctaactttgccacccttgtcagcacctacgccaaaggcttcaccatcatcatcgagccctttgacgacagaa

SEQ ID NO: 145070 - DNA, 120 bp, Artificial Sequence
  ENSG00000104884_11 (sequence is synthesized)
ccccgaccattgccaaccccatcctgcacttcagctgcatggacgcctcgctggccatcaaacccgtatttgagcgtttccagtctgtcatcatcacatctgggacactgtccccgctgg

SEQ ID NO: 145071 - DNA, 120 bp, Artificial Sequence
  ENSG00000104884_12 (sequence is synthesized)
acatctaccccaagatcctggacttccaccccgtcaccatggcaaccttcaccatgacgctggcacgggtctgcctctgccctatgatcatcggccgtggcaatgaccaggtggccatca

SEQ ID NO: 145072 - DNA, 120 bp, Artificial Sequence
  ENSG00000104884_13 (sequence is synthesized)
gctccaaatttgagacccgggaggatattgctgtgatccggaactatgggaacctcctgctggagatgtccgctgtggtccctgatggcatcgtggccttcttcaccagctaccagtaca

SEQ ID NO: 145073 - DNA, 120 bp, Artificial Sequence
  ENSG00000104884_14 (sequence is synthesized)
tggagagcaccgtggcctcctggtatgagcaggggatccttgagaacatccagaggaacaagctgctctttattgagacccaggatggtgccgaaaccagtgtcgccctggagaagtacc

SEQ ID NO: 145074 - DNA, 120 bp, Artificial Sequence
  ENSG00000104884_15 (sequence is synthesized)
aggaggcctgcgagaatggccgcggggccatcctgctgtcagtggcccggggcaaagtgtccgagggaatcgactttgtgcaccactacgggcgggccgtcatcatgtttggcgtcccct

SEQ ID NO: 145075 - DNA, 120 bp, Artificial Sequence
  ENSG00000104884_16 (sequence is synthesized)
acgtctacacacagagccgcattctcaaggcgcggctggaatacctgcgggaccagttccagattcgtgagaatgactttcttaccttcgatgccatgcgccacgcggcccagtgtgtgg

SEQ ID NO: 145076 - DNA, 120 bp, Artificial Sequence
  ENSG00000104884_17 (sequence is synthesized)
ttgccgacaagcggtttgcccgtggggacaagcgggggaagctgccccgctggatccaggagcacctcacagatgccaacctcaacctgaccgtggacgagggtgtccaggtggccaagt

SEQ ID NO: 145077 - DNA, 120 bp, Artificial Sequence
  ENSG00000104884_18 (sequence is synthesized)
acttcctgcggcagatggcacagcccttccaccgggaggatcagctgggcctgtccctgctcagcctggagcagctagaatcagaggagacgctgaagaggatagagcagattgctcagc

SEQ ID NO: 145078 - DNA, 120 bp, Artificial Sequence
  ENSG00000104884_19 (sequence is synthesized)
agctctgagtggggcgggtggggccataaacggttcctggtgactcctgagtcttgcctggccctggttcccagcggcggtggtgctagaaggtcttatgaagtcaggtgacatttctca

SEQ ID NO: 145079 - DNA, 120 bp, Artificial Sequence
  ENSG00000104884_20 (sequence is synthesized)
ctgtcacgtccacagcctttaatcgcaggagaaggcagctatccaccaggtacccagaggcaagggggggccaggagatgatagaccccctctcaccccaccagcccatccctcctgcac

SEQ ID NO: 145080 - DNA, 120 bp, Artificial Sequence
  ENSG00000104884_21 (sequence is synthesized)
tgttcccaagaagctgcggccagcgcagttcactggacgttagtgggggctcaggtcctgggtgctggcgctgagggtccgaggggccttgtccaggtgccagctgggaaactggagaca

SEQ ID NO: 145081 - DNA, 120 bp, Artificial Sequence
  ENSG00000104884_22 (sequence is synthesized)
ggcacaggggatggttggaggggaggtgaggggcaagtgttacatccaccctccagctccaggtccagcctggcagccaactatccaaccccctcgcctctaccccaagtaaaacccatc

SEQ ID NO: 145082 - DNA, 120 bp, Artificial Sequence
  ENSG00000104884_23 (sequence is synthesized)
tttgctcctgtcctgggtctcttctgacaccaacccaccacctgctgactccaccactggcccgaccgccctgcctttgcctcatctctgcacctacccacatggcctcctctatttttg

SEQ ID NO: 145083 - DNA, 120 bp, Artificial Sequence
  ENSG00000104884_24 (sequence is synthesized)
acccagatgtccccctcacctgagtcccaggagcccttggagcatccacgttcagtgtgttgagtgacatggctctcttcattctgcaaagagggcagcagggaggaaatgagtgaatcc

SEQ ID NO: 145084 - DNA, 120 bp, Artificial Sequence
  ENSG00000104884_25 (sequence is synthesized)
aggagtggcccccctccacgagggacctttccagcacagggtttgatctgtgtgtatcacaggggagatgggagccatggaaggttcttgagcaagatgggggtgggggtggggtgggct

SEQ ID NO: 145085 - DNA, 120 bp, Artificial Sequence
  ENSG00000104884_26 (sequence is synthesized)
gtggattctgctgatgtcagggctctttgccgacctgatcaacactcacccggctgctcctgccgccgcctcgcctcggagccgggagaccagcttctcacttcctcgcctgatagactc

SEQ ID NO: 145086 - DNA, 120 bp, Artificial Sequence
  ENSG00000104884_27 (sequence is synthesized)
acggatcttggagagtgagctgctgcggcgaagggcctggggaggggccggggatgctgctcagtcccccaggcccatgcagtccccacgcccaccccaggagccgaagcacagcccatc

SEQ ID NO: 145087 - DNA, 120 bp, Artificial Sequence
  ENSG00000104884_28 (sequence is synthesized)
ctcacctgttctgcgtcaccagctgtgcctgtgttgggggcacctagggggaaagatgggggacactgagatggggacatagagaagccaccaggagggaagacagacaggggctagggg

SEQ ID NO: 145088 - DNA, 120 bp, Artificial Sequence
  ENSG00000104884_29 (sequence is synthesized)
ctcaccgagaggggcgggtaggtcctccttgtggaggatttctttgtacagctcttccgcttgttgatacttgttctgtttcaggtaggctgaggcctgcggagaagggagtgtctggga

SEQ ID NO: 145089 - DNA, 120 bp, Artificial Sequence
  ENSG00000104884_30 (sequence is synthesized)
aagggagtgtctgggaacttttcggaccccagttcccaacactgcatccagtcccgcctttttttttttttttgtagagacaggggtcttggtatgttgcccaggctggtcttgaactcc

SEQ ID NO: 145090 - DNA, 120 bp, Artificial Sequence
  ENSG00000104884_31 (sequence is synthesized)
tcctgccttggcctcccaaagtgttggggttacaagcgtgaaccaccacgtctggccccactttctaatgtgctgacctggccgtatccttcccctgcctaaagccttgccctggggcag

SEQ ID NO: 145091 - DNA, 120 bp, Artificial Sequence
  ENSG00000104884_32 (sequence is synthesized)
agtgggtttggagctcggccttacttcctgccctggggatggaggacaggcagcctcctgtttctgagcctgtctgctgtactttgggctggtggcatggcctcggtgcctcagtcttcc

SEQ ID NO: 145092 - DNA, 120 bp, Artificial Sequence
  ENSG00000104884_33 (sequence is synthesized)
cacacgcaaagtggagcgacagctcccacctcatagggacgctataagaactagcgatgtggggaccgggctaagaggggagccggccacagtgagctcaataaatgtctgctgctgcca

SEQ ID NO: 145093 - DNA, 120 bp, Artificial Sequence
  ENSG00000104884_34 (sequence is synthesized)
catgaagtgagaagggggctgggggtcgcgctcgctagcgggcgcggggggtcttgaagatggggtcatcggctcaacgtggacgggctcctggtctacttcccgtacgactacatctac

SEQ ID NO: 145094 - DNA, 120 bp, Artificial Sequence
  ENSG00000104884_35 (sequence is synthesized)
cattcatttatttcttcaacaaacaggccaggctcagcactgtggaagcagcaggaaccaaaaaagatctcatccctaaccccccagaacttatattccagatgggaaaaccagtagcaa

SEQ ID NO: 145095 - DNA, 120 bp, Artificial Sequence
  ENSG00000104884_36 (sequence is synthesized)
agatgcagccaaataaacaaggaaataattccagaaagtgacagttatcatgaaaaaaaatacattgttgtgttggaatatgtctgcgtagaaaaggtggctggggagggcctctcggag

SEQ ID NO: 145096 - DNA, 120 bp, Artificial Sequence
  ENSG00000104884_37 (sequence is synthesized)
gggctgacttttgagcagtctcagatgaccaaatggagcagccttgggaggttttccaggccacatgggaccagcaagtataaaggccctggggggactgagcctgctgatttttgaagg

SEQ ID NO: 145097 - DNA, 120 bp, Artificial Sequence
  ENSG00000104884_38 (sequence is synthesized)
tcaggcaccaggccactggaggcatgtgggggccatgggaggcttcttggggcggggaggtgacatggctggactcagggactcaggtttccctagggtccctctggctgccgtgaagcg

SEQ ID NO: 145098 - DNA, 120 bp, Artificial Sequence
  ENSG00000104884_39 (sequence is synthesized)
agcaggggatgatgggtccaggcaggaggtgatggtggctggccccgcgtggggtcgggggcagtgggcgaattgcaggtaggttttggaggcagagctgcccggctttgctgatggctt

SEQ ID NO: 145099 - DNA, 120 bp, Artificial Sequence
  ENSG00000104884_40 (sequence is synthesized)
aggtagaaaggtcgtgggaggccaggtgcagtggctcatacttgtaatcctggcactttgggagcctgaggcgggtggaccactgcaggtcccccatctctactaaaaatgtagaaatta

SEQ ID NO: 145100 - DNA, 77 bp, Artificial Sequence
  ENSG00000104884_41 (sequence is synthesized)
cactgcaggtcccccatctctactaaaaatgtagaaattagctgggtgtgttgtaggggggtgtatcacttgaaccc

SEQ ID NO: 145101 - DNA, 120 bp, Artificial Sequence
  ENSG00000104884_42 (sequence is synthesized)
actctagcctgggcgacagcgcgaggctccatctcaaaaaacaaaaacaagaaaaggtcatgggagaaagcttgaggctctggctcctggctttggcgtgggtgctgggcagcccatgcg

SEQ ID NO: 145102 - DNA, 120 bp, Artificial Sequence
  ENSG00000104884_43 (sequence is synthesized)
gtgctgggagagtgagcagtgggcggggctgtgggctctctacttgggatccttcgtgaaagtttgcacaggtgtgggcccgaagcggacaggttggggtgtattttggactcagatgcc

SEQ ID NO: 145103 - DNA, 120 bp, Artificial Sequence
  ENSG00000104884_44 (sequence is synthesized)
tggtttggggcttaagcagtcatgtttggtcgcatttactcccaggcagtacggggtggagattggggtgaagcgagggagcaggagagggaatgactgagtgggtgcagctgtggctgt

SEQ ID NO: 145104 - DNA, 120 bp, Artificial Sequence
  ENSG00000104884_45 (sequence is synthesized)
ggtaatctcacccctccttgcctgccctctgcaggcttcaccatcatcatcgagccctttgacgacagaaccccgaccattgccaaccccatcctgcacttcaggtgggaccctgcccgg

SEQ ID NO: 145105 - DNA, 120 bp, Artificial Sequence
  ENSG00000104884_46 (sequence is synthesized)
gctatcttgctcaagctgatctcgaactcctgggttcgatcaatactcagacaatcttggcaggcgcaggaggaccaaattctagtgaatgagatcgagtctctcggctctttcccttcc

SEQ ID NO: 145106 - DNA, 120 bp, Artificial Sequence
  ENSG00000104884_47 (sequence is synthesized)
atgttttctttttgattggccctcgacgatcctcagtgacgcctcccgcaccgcctcacccgagagtcagccgccctcgcttttccgtgcgcacgcgcagtatcccgattggctctgccc

SEQ ID NO: 145107 - DNA, 120 bp, Artificial Sequence
  ENSG00000104884_48 (sequence is synthesized)
tagcggattgacgggcaggttagccaatggtctcgtaatataggtggagcgagccctcgaggatgtccacgacccggcctctcgctgaatattcatgagggaggcgggtcgaccccgctg

SEQ ID NO: 145108 - DNA, 120 bp, Artificial Sequence
  ENSG00000104884_49 (sequence is synthesized)
cacagtccggccggcgccatgaagtgagaagggggctgggggtcgcgctcgctagcgggcgcggggggtcttgaagatggggtcatcggtgggcgcgcctgggtccccaagggggcgagg

SEQ ID NO: 145109 - DNA, 120 bp, Artificial Sequence
  ENSG00000104884_50 (sequence is synthesized)
ggagggtgaaggggtgggacgggggcagccgcagggagcagcagtgatagcgaggagacactgagggggccccgaggctcctgaggacctgagggttaccgggggcgccgggcccgtcac

SEQ ID NO: 145110 - DNA, 120 bp, Artificial Sequence
  ENSG00000104884_51 (sequence is synthesized)
ccttctctgggctcgacgaccgggcactgtggaggcgggagaggggctgaggggacgggaactgacccagcagcccctgccgccaggctcaacgtggacgggctcctggtctacttcccg

SEQ ID NO: 145111 - DNA, 120 bp, Artificial Sequence
  ENSG00000104884_52 (sequence is synthesized)
aaaaaagaacccacttaggaggtcgtgctagcaggtgtgacaagtgaccacatgactctggagtgtctgattattgctctgtctgtgccattatgcggcaatggctatttgtgacatgca

SEQ ID NO: 145112 - DNA, 120 bp, Artificial Sequence
  ENSG00000104884_53 (sequence is synthesized)
ggtgtacagcgtgggggtgcaagtttccaaaacaggcccagtgcccaccctcactgagtgctcattggctggggagacaggcacgtgaccgtcgtgatggcggaggcagggctgctggtc

SEQ ID NO: 145113 - DNA, 120 bp, Artificial Sequence
  ENSG00000104884_54 (sequence is synthesized)
ccatacttccttgctcgatactcaacaacgtctgcatcgactccatgagcgtcaacctcacccgccggacccttgaccggtgccagggcaacctggagaccctgcagaagacggtgctca

SEQ ID NO: 145114 - DNA, 120 bp, Artificial Sequence
  ENSG00000104885_0 (sequence is synthesized)
attgtgctcgcttcacgccggcccaagatggcggaggcgctggaggccccgggcctgtgactacaaagagggagtcgggggccgggccggaccggagcgcggcggcggcggcggcggcgg

SEQ ID NO: 145115 - DNA, 80 bp, Artificial Sequence
  ENSG00000104885_1 (sequence is synthesized)
accggcggccccgcccctcccccaaccgcccgcctagcatggtgcggcggccgcgcgcgcggacatgggggagaagctgg

SEQ ID NO: 145116 - DNA, 120 bp, Artificial Sequence
  ENSG00000104885_2 (sequence is synthesized)
gcgcgcgcggacatgggggagaagctggagctgagactgaagtcgcccgtgggggctgagcccgccgtctacccgtggccgctgccggtctacgataaacatcacgatgctgctcatgaa

SEQ ID NO: 145117 - DNA, 120 bp, Artificial Sequence
  ENSG00000104885_3 (sequence is synthesized)
atcatcgagaccatccgatgggtctgtgaagaaatcccggatctcaagctcgctatggagaattacgttttaattgactatgacaccaaaagcttcgagagcatgcagaggctctgcgac

SEQ ID NO: 145118 - DNA, 120 bp, Artificial Sequence
  ENSG00000104885_4 (sequence is synthesized)
aagtacaaccgtgccatcgacagcatccaccagctgtggaagggcaccacgcagcccatgaagctgaacacgcggccgtccactggactcctgcgccatatcctgcagcaggtctacaac

SEQ ID NO: 145119 - DNA, 120 bp, Artificial Sequence
  ENSG00000104885_5 (sequence is synthesized)
cactcggtgaccgaccccgagaagctcaacaactacgagcccttctcccccgaggtgtacggggagacctccttcgacctggtggcccagatgattgatgagatcaagatgaccgacgac

SEQ ID NO: 145120 - DNA, 120 bp, Artificial Sequence
  ENSG00000104885_6 (sequence is synthesized)
gacctgtttgtggacttggggagcggtgtgggccaggtcgtgctccaggttgctgctgccaccaactgcaaacatcactatggcgtcgagaaagcagacatcccggccaagtatgcggag

SEQ ID NO: 145121 - DNA, 120 bp, Artificial Sequence
  ENSG00000104885_7 (sequence is synthesized)
accatggaccgcgagttcaggaagtggatgaaatggtatggaaaaaagcatgcagaatacacattggagagaggcgatttcctctcagaagagtggagggagcgaatcgccaacacgagt

SEQ ID NO: 145122 - DNA, 120 bp, Artificial Sequence
  ENSG00000104885_8 (sequence is synthesized)
gttatatttgtgaataattttgcctttggtcctgaggtggatcaccagctgaaggagcggtttgcaaacatgaaggaaggtggcagaatcgtgtcctcgaaaccctttgcacctctgaac

SEQ ID NO: 145123 - DNA, 120 bp, Artificial Sequence
  ENSG00000104885_9 (sequence is synthesized)
ttcagaataaacagtagaaacttgagtgacatcggcaccatcatgcgcgtggtggagctctcgcccctgaagggctcggtgtcgtggacggggaagccagtctcctactacctgcacact

SEQ ID NO: 145124 - DNA, 120 bp, Artificial Sequence
  ENSG00000104885_10 (sequence is synthesized)
atcgaccgcaccatacttgaaaactatttttctagtctgaaaaacccaaaactcagggaggaacaggaggcagcccggcgccgccagcagcgcgagagcaagagcaacgcggccacgccc

SEQ ID NO: 145125 - DNA, 120 bp, Artificial Sequence
  ENSG00000104885_11 (sequence is synthesized)
actaagggcccagagggcaaggtggccggccccgccgacgcccccatggactctggtgctgaggaagagaaggcgggagcagccaccgtgaagaagccgtctccctccaaagcccgcaag

SEQ ID NO: 145126 - DNA, 120 bp, Artificial Sequence
  ENSG00000104885_12 (sequence is synthesized)
aagaagctaaacaagaaggggaggaagatggctggccgcaagcgcgggcgccccaagaagatgaacactgcgaaccccgagcggaagcccaagaagaaccaaactgcactggatgccctg

SEQ ID NO: 145127 - DNA, 120 bp, Artificial Sequence
  ENSG00000104885_13 (sequence is synthesized)
cacgctcagaccgtgtctcagacggcggcctcctcaccccaggatgcctacagatcccctcacagcccgttctaccagctacctccgagcgtgcagcggcactcccccaacccgctgctg

SEQ ID NO: 145128 - DNA, 120 bp, Artificial Sequence
  ENSG00000104885_14 (sequence is synthesized)
gtggcgcccaccccgcccgcgctgcagaagcttctagagtccttcaagatccagtacctgcagttcctggcatacacaaagaccccccagtacaaggccagcctgcaggagctgctgggc

SEQ ID NO: 145129 - DNA, 120 bp, Artificial Sequence
  ENSG00000104885_15 (sequence is synthesized)
caggagaaggagaagaacgcccagctcctgggtgcggctcagcagctcctcagccactgccaggcccagaaggaggagatcaggaggctgtttcagcaaaaattggatgagctgggtgtg

SEQ ID NO: 145130 - DNA, 120 bp, Artificial Sequence
  ENSG00000104885_16 (sequence is synthesized)
aaggcgctgacctacaacgacctgattcaagcgcagaaggagatctccgcccataaccagcagctgcgggagcagtcggagcagctggagcaggacaaccgcgcgctccgcggccagagc

SEQ ID NO: 145131 - DNA, 120 bp, Artificial Sequence
  ENSG00000104885_17 (sequence is synthesized)
ttgcagctgctcaaggctcgctgcgaggagctgcagctggactgggccacgctgtcgctggagaagctgttgaaggagaagcaggccctgaagagccagatctcggagaagcagaggcac

SEQ ID NO: 145132 - DNA, 120 bp, Artificial Sequence
  ENSG00000104885_18 (sequence is synthesized)
tgcctggagctgcagatcagcattgtggagctagagaagagccagcggcagcaggagctcctgcagctcaagtcctgtgtgccgcctgacgacgccctgtccctgcacctgcgtgggaag

SEQ ID NO: 145133 - DNA, 120 bp, Artificial Sequence
  ENSG00000104885_19 (sequence is synthesized)
ggcgccctgggccgcgagctggagcctgacgccagccggctgcacctggagctggactgcaccaagttctcgctgcctcacttgagcagcatgagcccggagctctccatgaacggccag

SEQ ID NO: 145134 - DNA, 120 bp, Artificial Sequence
  ENSG00000104885_20 (sequence is synthesized)
gctgctggctatgagctctgcggtgtgctgagccggccttcgtcgaagcagaacacgccccagtacctggcctcacccctggaccaggaggtggtgccctgtacccctagccacgtcggc

SEQ ID NO: 145135 - DNA, 120 bp, Artificial Sequence
  ENSG00000104885_21 (sequence is synthesized)
cggccgcgcctggagaagctgtctggcctagccgcacccgactacactaggctgtccccggccaagattgtgctgaggcggcacctgagccaggaccacacggtgcccggcaggccggct

SEQ ID NO: 145136 - DNA, 120 bp, Artificial Sequence
  ENSG00000104885_22 (sequence is synthesized)
gccagtgagctgcattcgagagctgagcacaccaaggagaacggccttccctaccagagccccagcgtgcctggcagcatgaagctgagccctcaggacccgcggcccctgtcccctggg

SEQ ID NO: 145137 - DNA, 120 bp, Artificial Sequence
  ENSG00000104885_23 (sequence is synthesized)
gccttgcagcttgctggagagaagagcagtgagaagggcctgagagagcgcgcctacggcagcagcggggagctcatcaccagcctgcccatcagcatcccgctcagcaccgtgcagccc

SEQ ID NO: 145138 - DNA, 120 bp, Artificial Sequence
  ENSG00000104885_24 (sequence is synthesized)
aacaagctcccggtcagcattcccctggccagcgtggtgctgcccagccgcgccgagagggcgaggagcacccccagtcccgtgctgcagccccgtgacccctcgtccacacttgaaaag

SEQ ID NO: 145139 - DNA, 120 bp, Artificial Sequence
  ENSG00000104885_25 (sequence is synthesized)
cagattggtgctaatgcccacggtgctgggagcagaagccttgccctggcccccgcaggcttctcctacgctggctcggtggccatcagcggggccttggcgggcagcccggcctctctc

SEQ ID NO: 145140 - DNA, 120 bp, Artificial Sequence
  ENSG00000104885_26 (sequence is synthesized)
acacctggagccgagccggccaccttggatgagtcctccagctctgggagcctttttgccaccgtggggtcccgcagctccacgccacagcaccccctgctgctggcacagccccggaac

SEQ ID NO: 145141 - DNA, 120 bp, Artificial Sequence
  ENSG00000104885_27 (sequence is synthesized)
tcgcttcctgcctctcccgcccaccagctctcctccagtccccggcttggtggggccgcccagggcccgttgcccgaggccagcaagggagacctgccctccgattccggcttctcagat

SEQ ID NO: 145142 - DNA, 120 bp, Artificial Sequence
  ENSG00000104885_28 (sequence is synthesized)
cctgagagtgaagccaagaggaggattgtgttcaccatcaccactggtgcgggcagtgccaagcagtcgccctccagcaagcacagccccctgaccgccagcgcccgtggggactgtgtg

SEQ ID NO: 145143 - DNA, 120 bp, Artificial Sequence
  ENSG00000104885_29 (sequence is synthesized)
ccgagccacgggcaggacagtcgcaggcgcggccggcggaagcgagcatctgcggggacgcccagcttgagcgcaggcgtgtcccccaagcgccgagccctgccgtccgtcgctggcctt

SEQ ID NO: 145144 - DNA, 120 bp, Artificial Sequence
  ENSG00000104885_30 (sequence is synthesized)
ttcacacagccttcggggtctcccctcaacctcaactccatggtcagtaacatcaaccagcccctggagattacagccatctcgtccccggagacctccctgaagagctcccctgtgccc

SEQ ID NO: 145145 - DNA, 120 bp, Artificial Sequence
  ENSG00000104885_31 (sequence is synthesized)
ggagccaggctctgaggacgagcccagcagtgctcgaattgagagaaaaattgcaacaatctccttagaaagcaaatctcccccgaaaaccttggaaaatggtggtggcttggcgggaag

SEQ ID NO: 145146 - DNA, 120 bp, Artificial Sequence
  ENSG00000104885_32 (sequence is synthesized)
gaagcccgcgcccgccggcgagccagtcaatagcagcaagtggaagtccaccttctcgcccatctccgacatcggcctggccaagtcggcggacagcccgctgcaggccagctccgccct

SEQ ID NO: 145147 - DNA, 120 bp, Artificial Sequence
  ENSG00000104885_33 (sequence is synthesized)
cagccagaactccctgttcacgttccggcccgccctggaggagccctctgccgatgccaagctggccgctcaccccaggaaaggctttcccggctccctgtcgggggctgacggactcag

SEQ ID NO: 145148 - DNA, 120 bp, Artificial Sequence
  ENSG00000104885_34 (sequence is synthesized)
cccgggcaccaaccctgccaacggctgcaccttcggcgggggcctggccgcggacctgagtttacacagcttcagtgatggtgcttctcttccccacaagggccccgaggcggccggcct

SEQ ID NO: 145149 - DNA, 120 bp, Artificial Sequence
  ENSG00000104885_35 (sequence is synthesized)
gagctccccgctgagcttcccctcgcagcgcggcaaggagggctcggacgccaaccctttcctgagcaagaggcagctggacggcctggctgggctgaagggcgagggcagccgcggcaa

SEQ ID NO: 145150 - DNA, 120 bp, Artificial Sequence
  ENSG00000104885_36 (sequence is synthesized)
ggaggcaggggagggcggcctaccgctgtgcgggcccacggacaagaccccactgctgagcggcaaggccgccaaggcccgggaccgcgaggtcgacctcaagaatggccacaacctctt

SEQ ID NO: 145151 - DNA, 120 bp, Artificial Sequence
  ENSG00000104885_37 (sequence is synthesized)
tcttcatctctgcggcggccgtgcctcccggaagcctcctcagcggccccggcctggccccggcggcgtcctccgcaggcggcgcggcgtcctccgcccagacgcaccggtccttcctgg

SEQ ID NO: 145152 - DNA, 120 bp, Artificial Sequence
  ENSG00000104885_38 (sequence is synthesized)
cttcccgccgggaccgcagttcgcgctcggccccatgtccctgcaggccaacctcggctccgtggccggctcctccgtgctgcagtcgctgttcagctctgtgccggccgccgcaggcct

SEQ ID NO: 145153 - DNA, 120 bp, Artificial Sequence
  ENSG00000104885_39 (sequence is synthesized)
ggtgcacgtgtcgtccgctgccaccagactgaccaactcgcacgccatgggcagcttttccggggtggcaggcggcacagttggaggtaactaggatttctacctcaaccgcgagaccta

SEQ ID NO: 145154 - DNA, 120 bp, Artificial Sequence
  ENSG00000104885_40 (sequence is synthesized)
tgcaaggacggtgtggaccaactcgcgcccgcggcatggtgcccgccggcctgccgggctcccacccctggacggcagaggcaaggacggacgggagctccactgtgaatcggcggcacg

SEQ ID NO: 145155 - DNA, 120 bp, Artificial Sequence
  ENSG00000104885_41 (sequence is synthesized)
cgccgcaggaggctgggactggtccagtttgtactgtcgatagttttagataaagtatttatcattttttaaaaagtataaacaattctgacttattttattccatctaagtggtaaaag

SEQ ID NO: 145156 - DNA, 120 bp, Artificial Sequence
  ENSG00000104885_42 (sequence is synthesized)
gcaacttattgagaaatataaatatctatatatgagagctctatataaagacacgtgtctgcagggcgggcccgccagcggattcgccacagcctgccccggtgctatctcgtccccagg

SEQ ID NO: 145157 - DNA, 120 bp, Artificial Sequence
  ENSG00000104885_43 (sequence is synthesized)
cccgcgcctgcctccacccgcttggtgctgactagacgctgacaacgccgaaccccgttctcggaaacgccgcccggccggctcccccgacgcgctgctcccgtaccaaaggcaggcccg

SEQ ID NO: 145158 - DNA, 120 bp, Artificial Sequence
  ENSG00000104885_44 (sequence is synthesized)
tcgccaccacattcctcggaggcctccccgcggcctgagccccttcctgagcgccctggcgcctgccctgagctcttcacctttaccccggcactgtgaacccccagactgttcaccctc

SEQ ID NO: 145159 - DNA, 120 bp, Artificial Sequence
  ENSG00000104885_45 (sequence is synthesized)
cggggcgtgggttgcgcccttgcatgtgaaggggcctgcgcggtgacgcagctggccatgtgctgcgcgatggtgctgtgaggacggcgcgggcacgttgaacaagtgcatttacttttg

SEQ ID NO: 145160 - DNA, 120 bp, Artificial Sequence
  ENSG00000104885_46 (sequence is synthesized)
tatttctcggctgtccatggctcgcagcatgccctgcgatgcggggcaggcctgtcgtgggtcccttggtgtttctgtacaggagagagtcacactaatgagtggcagtattttatagag

SEQ ID NO: 145161 - DNA, 120 bp, Artificial Sequence
  ENSG00000104885_47 (sequence is synthesized)
atgtgatgagaatttataaatttcatagatttgacagcttttatttttagatggtataatgcacagtgaagaggaaagaaaagcgaggggaaaaaaccttatttattcaaacagtgcaca

SEQ ID NO: 145162 - DNA, 120 bp, Artificial Sequence
  ENSG00000104885_48 (sequence is synthesized)
aaatggccccagcgtcagccccgaccctagacccctcagttgcagctcccagcagcccagacagagctgccggcgcccctgcctgccccacatcccttcctgtcagggccacgcctggca

SEQ ID NO: 145163 - DNA, 120 bp, Artificial Sequence
  ENSG00000104885_49 (sequence is synthesized)
cccatcccttggagcctgtgctggttctcccagctgctgtgggtgtgctggggccagggtgcactgctgaaacctggcctctctggccctaggccccagggtgacgtcggccccccactc

SEQ ID NO: 145164 - DNA, 120 bp, Artificial Sequence
  ENSG00000104885_50 (sequence is synthesized)
tgcagccttggcgggtgcctgggactgggtgtggaaggagaggagctgaggccggggtgtagcaggcaggcagggccactccagtgcttctggagccctgagcagtcagggcctgggttg

SEQ ID NO: 145165 - DNA, 120 bp, Artificial Sequence
  ENSG00000104885_51 (sequence is synthesized)
tctgagcagtggtggctctgtgccctccctggaggatgggatctgggagtctgagctccccgcatctggccctgggctgtgtggcacttgctgagcccaccttctcaagtgcttgctcct

SEQ ID NO: 145166 - DNA, 120 bp, Artificial Sequence
  ENSG00000104885_52 (sequence is synthesized)
gtgagatggcatcggggagccccttccccaaggtgccacagatccaccctccagggagctgccagccctgtgttctggttcccaagggcaggatggacacacgtcacatccctaccacgt

SEQ ID NO: 145167 - DNA, 120 bp, Artificial Sequence
  ENSG00000104885_53 (sequence is synthesized)
ggcctccaaagggagccacggaggaaaggcttctgtggttgctaggtgggggagtcctgtgtgggagggcctgaagacccctgcttgtgcctggtgaggggggtgctgcctcccccagcc

SEQ ID NO: 145168 - DNA, 120 bp, Artificial Sequence
  ENSG00000104885_54 (sequence is synthesized)
cccaacaacctctcagacccccaccctccaacatagctgagttctgaagatggtgctccggacctgtcctcttaagtggtgcccagtgccctccccaccccacgttggtgctctcagcta

SEQ ID NO: 145169 - DNA, 120 bp, Artificial Sequence
  ENSG00000104885_55 (sequence is synthesized)
gaaggtgctgtgcctctgcctgagccccaagccccgagcctggccttcaggacaggcagcctgctctgtgtcgccacgggccggatacgccacagggttgatggcagagacggccgagtc

SEQ ID NO: 145170 - DNA, 120 bp, Artificial Sequence
  ENSG00000104885_56 (sequence is synthesized)
cctggtctagaacaagacacattctttaaacactgtattacttctgcctccctctaggtgacagtggcagtccgggtgccatcacgggtcctgcagatggccatgcagggctcctgccca

SEQ ID NO: 145171 - DNA, 120 bp, Artificial Sequence
  ENSG00000104885_57 (sequence is synthesized)
cgcaggccaccgtatgttcaggacacgcactgggtctcagagccactggcccaggcagaagtctccttgagcccactgggtcatatgcgtgtcaccacacgtgaactagtgtggtggctg

SEQ ID NO: 145172 - DNA, 120 bp, Artificial Sequence
  ENSG00000104885_58 (sequence is synthesized)
cctgcggacaccctcctgttctgagccctgggcctgtgttcttctcagacactcccagactgaggggtggtgtgtggcgggtggcagggtggctgtggagactggggatctggagcctgg

SEQ ID NO: 145173 - DNA, 120 bp, Artificial Sequence
  ENSG00000104885_59 (sequence is synthesized)
tgctggcacctggcctgagtttccgtgggcagctggcggggacctgtgctgctgctgctgactgtgggtgggcgggcggcgcctgggagtggctcttgctcaggaattgataggaaccct

SEQ ID NO: 145174 - DNA, 120 bp, Artificial Sequence
  ENSG00000104885_60 (sequence is synthesized)
aaaaactaggataccccctcctcggcccatgaggcacgcacagtgacttatttaagacttcccccttaatttatctgcccccaggatgcgtcagtctgttcagtggtcagcaggcccccc

SEQ ID NO: 145175 - DNA, 120 bp, Artificial Sequence
  ENSG00000104885_61 (sequence is synthesized)
accccccgccgactgccctcgccatcgtggtcagacccccctcccaacacaacacgctgctggtctgtgtcagcctttgtaacgtgggaggctctgccgtgtcttccgggtgaactgtat

SEQ ID NO: 145176 - DNA, 120 bp, Artificial Sequence
  ENSG00000104885_62 (sequence is synthesized)
ttggattgcgcgcattgtcacggtccgcccctgggctgcaggcgccccttcctctgggcacccctgcattctgcatccccacctctagacgctgtaataaacagactgttttcactcgga

SEQ ID NO: 145177 - DNA, 120 bp, Artificial Sequence
  ENSG00000104885_63 (sequence is synthesized)
gctctggcaaggctctgggagctggtgttgggtgtctttaaccacgcggtgccctccgcctctgctcatccgtttggagcccgtgtcggccgcggggctgcatgtggcagcgccacactg

SEQ ID NO: 145178 - DNA, 80 bp, Artificial Sequence
  ENSG00000104885_64 (sequence is synthesized)
agcgcctcggcctcttcctttcaggccccggcctcggttgagacccggccgccccctccgcctccgcctccgcctccccc

SEQ ID NO: 145179 - DNA, 120 bp, Artificial Sequence
  ENSG00000104885_65 (sequence is synthesized)
ccgcccgtcctccacgccccccctccacctaacgccgccttgcctcctcccccaacgctgctggcctctaaccctgagcccgcgcttctgcagagcctcgcgtccctcccgcctaaccaa

SEQ ID NO: 145180 - DNA, 120 bp, Artificial Sequence
  ENSG00000104885_66 (sequence is synthesized)
gctttcttgccccccacctctgctgcctctctgccgcctgctaacgcctctttgtctatcaagctcacctccctcccgcacaagggcgcccgcccctccttcacggtgcaccaccagccc

SEQ ID NO: 145181 - DNA, 120 bp, Artificial Sequence
  ENSG00000104885_67 (sequence is synthesized)
gctggccctggcccaggccgcgcccgggatcccacaggccagcgccacggggccgtccgcggtgtgggtgtccctcggcatgccgcctccctatgccgcgcacctttcgggggttaagcc

SEQ ID NO: 145182 - DNA, 120 bp, Artificial Sequence
  ENSG00000104885_68 (sequence is synthesized)
cggtgctgggagcagaagccttgccctggcccccgcaggtaacgcccctcctgtgccctaccctcaggactctgctgctgctgctgctcttcaggcaggagggctgggttgctgggagtg

SEQ ID NO: 145183 - DNA, 120 bp, Artificial Sequence
  ENSG00000104885_69 (sequence is synthesized)
gaacagggcttcctggggtgatcatgggggctgctgccccaaaccgccacgcctcattactgacaccctttcctgcatcccacgagctgggatgcggatcgggctcagctgcagccatct

SEQ ID NO: 145184 - DNA, 120 bp, Artificial Sequence
  ENSG00000104885_70 (sequence is synthesized)
cggcctcatacctgggtctcccgacactgacacctcctgcttgggtgtattaattcagcccgtgaggtcggccccagtgctctcgggggctcctgtactcacagctgggaggcccctgac

SEQ ID NO: 145185 - DNA, 120 bp, Artificial Sequence
  ENSG00000104885_71 (sequence is synthesized)
tcaggatcggctccacacacagcagtgcccaatggcacacgaccgtgggcctccgtgctggtagcggcatggtttctggttccttgagaaggtgccgcctgagcagtctctgctgttagc

SEQ ID NO: 145186 - DNA, 120 bp, Artificial Sequence
  ENSG00000104885_72 (sequence is synthesized)
ccagtttctgcagagagccagagaggatgccactttggcttttgttgacactgcaggcctgtctgttgtggaagccgcagagacagcatgtcagcgggcatggctgtgtgccagcaaaac

SEQ ID NO: 145187 - DNA, 120 bp, Artificial Sequence
  ENSG00000104885_73 (sequence is synthesized)
tgtacttaaaacagcagaggacatgagacccccaggctggtttgctggccccaggttgagatgcggtatgatgcggcagctacttttttaggagtaaaaagtaaaatgtggccgggcgtg

SEQ ID NO: 145188 - DNA, 65 bp, Artificial Sequence
  ENSG00000104885_74 (sequence is synthesized)
ctcatgcctgtaatcccagcaccttgggatgccgaggtgggcgtctgtactaaaaatacaaaaat

SEQ ID NO: 145189 - DNA, 89 bp, Artificial Sequence
  ENSG00000104885_75 (sequence is synthesized)
gcaaaaagagtaaaactccatctcaaaaacaaaacaacaacaaaacaagtaaaatgtacatggccgctattgagacaggaggggctcta

SEQ ID NO: 145190 - DNA, 120 bp, Artificial Sequence
  ENSG00000104885_76 (sequence is synthesized)
taaaatgtacatggccgctattgagacaggaggggctctagggaggctgggcaggcttcacggttggccacgtgagggccctggagaggccaccgaagcccgggcagttctgccctcgca

SEQ ID NO: 145191 - DNA, 120 bp, Artificial Sequence
  ENSG00000104885_77 (sequence is synthesized)
gggctgggttgtgcccttggggtgaggtctgctctgcgagaggcagtgacagtttcaggagattttcaactgggtggcaaacagccaactccagaagcgccttgctgcgcccctgcactg

SEQ ID NO: 145192 - DNA, 120 bp, Artificial Sequence
  ENSG00000104885_78 (sequence is synthesized)
aggcctcattggcagaagcagggaggccgccctttgtccccgggtggtcatggaagtgcaccactcatcgtgggctgggaagcatggctgcggccttcaaggcggccatagcttggagta

SEQ ID NO: 145193 - DNA, 120 bp, Artificial Sequence
  ENSG00000104885_79 (sequence is synthesized)
tccaagctgagttgtcttctgagaacaggagggagggaggccacgcagccatgggctttcctcatggtgtctctgagatcacggggccagagggcaacttactcagaggaagcctagctc

SEQ ID NO: 145194 - DNA, 120 bp, Artificial Sequence
  ENSG00000104885_80 (sequence is synthesized)
agcggggagcccgcaccaggaggcttcttgggaggcagcgtctcagccgggacctgcagggcacaggcagcccagatgggcgggaggaggcacagggtcagccctgagccttgagcttgc

SEQ ID NO: 145195 - DNA, 120 bp, Artificial Sequence
  ENSG00000104885_81 (sequence is synthesized)
ccacagagccttctggttccaccccagaggggccgttttcagactcccaaccccttccccacttccccgcctctcctggagcccacagagctcctagggggtggtgctcccacagcaagg

SEQ ID NO: 145196 - DNA, 120 bp, Artificial Sequence
  ENSG00000104885_82 (sequence is synthesized)
acagccttcggggtctcccctcaacctcaactccatggtaaggatggggaccggcagggctggggagcgcggcctgtgaaagaaagaccagagggagaccgggcgcggtggctcacgcct

SEQ ID NO: 145197 - DNA, 77 bp, Artificial Sequence
  ENSG00000104885_83 (sequence is synthesized)
ggtggcgggtgcggcttgcagtgaactgagatcggccactgcctgggccacagagcgagactccctctcggggggac

SEQ ID NO: 145198 - DNA, 120 bp, Artificial Sequence
  ENSG00000104885_84 (sequence is synthesized)
gcgtggtttcactgttgatggacctggtgccctgtcgctggacctctgctgccttttcaaatgactgcaccaaaccgttgctgcaaggctgtccccggaggcgggctctcacgggcggct

SEQ ID NO: 145199 - DNA, 120 bp, Artificial Sequence
  ENSG00000104885_85 (sequence is synthesized)
gacggacgtcgggaagcaccactcacgtgctcccgagctgctccctcacgtgtgtggcccaggcgagcctcaccagcgtacattagagaaacggaggtcgccgacctctttaccacagcc

SEQ ID NO: 145200 - DNA, 120 bp, Artificial Sequence
  ENSG00000104885_86 (sequence is synthesized)
gggccctgtgggtctgcctggagtagagccctcgggaagagcatatttgggttctgaccatttttgtcatcatcttttctgtgtaataaaaaaacaatgtgtttgttaaaagaaaggaaa

SEQ ID NO: 145201 - DNA, 120 bp, Artificial Sequence
  ENSG00000104886_0 (sequence is synthesized)
ccggccccagcctgagcggggacggcggccgggagggcgcggcccgggttcccgttccccgcggagccatgcggtacaacgagaaggagctgcaggctctgtcccggcagccggccgaga

SEQ ID NO: 145202 - DNA, 120 bp, Artificial Sequence
  ENSG00000104886_1 (sequence is synthesized)
gagatggcggccgagctgggcatgaggggccccaagaagggcagcgtgctgaagcggcggctggtgaagctggtggtgaatttcctcttctactttcggacagacgaggccgagcccgtc

SEQ ID NO: 145203 - DNA, 120 bp, Artificial Sequence
  ENSG00000104886_2 (sequence is synthesized)
ggagccctgctgctggagcgctgcagagtcgtccgggaagagcccggcaccttctccatcagcttcattgaggaccctgagaggaagtatcactttgagtgcagcagcgaggagcagtgt

SEQ ID NO: 145204 - DNA, 120 bp, Artificial Sequence
  ENSG00000104886_3 (sequence is synthesized)
caggagtggatggaggctctgcgtcgggccagctacgagttcatgcggagaagcctcatcttctacaggaacgaaatccggaaggtgacgggcaaggaccccctggaacagttcggcata

SEQ ID NO: 145205 - DNA, 120 bp, Artificial Sequence
  ENSG00000104886_4 (sequence is synthesized)
tccgaggaggccaggttccagctgagtggcttgcaggcgtgagcgcagggcacggtggtcagcgtgcagcgggacgggactggccctgcccagccatgaatcgcttggccatgcctggat

SEQ ID NO: 145206 - DNA, 90 bp, Artificial Sequence
  ENSG00000104886_5 (sequence is synthesized)
tgcccagccatgaatcgcttggccatgcctggatctgttttgttttggtttttggtttttgggtcagggtttcactgcagctcactgtga

SEQ ID NO: 145207 - DNA, 120 bp, Artificial Sequence
  ENSG00000104886_6 (sequence is synthesized)
tcccaagtagcggggatcacaggcatgagccgccacacccggccatcacacctggattttcagtgggaggtttttggtttggagacatccaaagcctgaagccaggtgggtgtgggcagg

SEQ ID NO: 145208 - DNA, 120 bp, Artificial Sequence
  ENSG00000104886_7 (sequence is synthesized)
ggctgcattttatgaaactgcccagcaagctgcgctccctggggccccaggatccacctaactggcctggcacctggtgccacgtgctgctgccgccaggatatgcgccttcccacaggt

SEQ ID NO: 145209 - DNA, 120 bp, Artificial Sequence
  ENSG00000104886_8 (sequence is synthesized)
gccctgcctgagttgtgtgcatccaggggcctggtgagcccccaggctggtggcatggcccccctgccccgtgctgaatgaatgtacagagccagacaaagctgtgaatggcctaggggc

SEQ ID NO: 145210 - DNA, 120 bp, Artificial Sequence
  ENSG00000104886_9 (sequence is synthesized)
tgagtcccacaccagctgtgaattctcctgcagacaggagggccctggctgtgcacctggggaagtggttgccctggggccagggtgcttgttctgttcaaataaaggtacctcttttcc

SEQ ID NO: 145211 - DNA, 120 bp, Artificial Sequence
  ENSG00000104886_10 (sequence is synthesized)
aactaacaggtatagatgagcatacagaagcgttctcggctacaaggaaggcggccgaaaccatttcagccgcgatcccgattcgaccccaacgaatcttggttgtttcttttttatttt

SEQ ID NO: 145212 - DNA, 84 bp, Artificial Sequence
  ENSG00000104886_11 (sequence is synthesized)
attcgaccccaacgaatcttggttgtttcttttttattttgtcaacggcacaatcacaactcactgcagcctcgacctcctgga

SEQ ID NO: 145213 - DNA, 120 bp, Artificial Sequence
  ENSG00000104886_12 (sequence is synthesized)
gcctcgacattccgagctcaagcgatcctctcgagtagctgggcctacagggaacccccggtccgcgtcggccgccgccctcaaccgcctctactcctcaccagagcccaaggccgcgtt

SEQ ID NO: 145214 - DNA, 120 bp, Artificial Sequence
  ENSG00000104886_13 (sequence is synthesized)
atctcctcctcgtttcgccacctccacgacttcgtttggcgaacggcgggcaaagaaagcacttccggggcaaatgagacgggccctctggtgtgcgcatgcctggcccgcccagcggcg

SEQ ID NO: 145215 - DNA, 120 bp, Artificial Sequence
  ENSG00000104886_14 (sequence is synthesized)
tgagtcagagggtcccgaggcgcgaaggaaaaggctggagggggagaggctgaaagcgcggcctggaaggcaaactgcgcgtgcgcacaacgctctcaacgaaccctcggtccgctgcgg

SEQ ID NO: 145216 - DNA, 120 bp, Artificial Sequence
  ENSG00000104886_15 (sequence is synthesized)
ccgcacggggccaactttcgcgagggagcggctgacactctccgggcgacgttatcgctccctccgcctgcgcctggccgctctagaaaggggtgccagccatcgctggggtgccttgat

SEQ ID NO: 145217 - DNA, 120 bp, Artificial Sequence
  ENSG00000104886_16 (sequence is synthesized)
tctgttccaccttggtccggtttatttcagtttaatggttatgtaacaacggtccgtctctcctaccaaccggtaccccgcccacgccagcagccacgggtcgccagcgccacgcagcgg

SEQ ID NO: 145218 - DNA, 120 bp, Artificial Sequence
  ENSG00000104886_17 (sequence is synthesized)
gggggccagagaagggacagtttatgggcaatggcaagaggaagctgcttgtggctgtgggtaggaccgaccacaggtgttccatccccaggcttcattgaggaccctgagaggaagtat

SEQ ID NO: 145219 - DNA, 120 bp, Artificial Sequence
  ENSG00000104886_18 (sequence is synthesized)
ggcaaggtgtgtgcagggctgcagagggccggggtggggctgcaggtggcagaggcagtcctccagccctggctcatggccacccgtcctccccacaggaccccctggaacagttcggca

SEQ ID NO: 145220 - DNA, 80 bp, Artificial Sequence
  ENSG00000104886_19 (sequence is synthesized)
gggagaccgagacagtgccaggggcgggaggccggggccggggtctgggcgggggtgccggaggccggagtccgggtcgg

SEQ ID NO: 145221 - DNA, 120 bp, Artificial Sequence
  ENSG00000104886_20 (sequence is synthesized)
gcgagccatggacagccgagaaatacaaaagtaaatgcacttgttcaacgtgcccgcgccgtcctcacagcaccatcgcgcagcacatggccagctgcgtcaccgcgcaggccccttcac

SEQ ID NO: 145222 - DNA, 120 bp, Artificial Sequence
  ENSG00000104886_21 (sequence is synthesized)
atgcaagggcgcaacccacgccccggagggtgaacagtctgggggttcacagtgccggggtaaaggtgaagagctcagggcaggcgccagggcgctcaggaaggggctcaggccgcgggg

SEQ ID NO: 145223 - DNA, 120 bp, Artificial Sequence
  ENSG00000104886_22 (sequence is synthesized)
aggcctccgaggaatgtggtggcgacgggcctgcctttggtacgggagcagcgcgtcgggggagccggccgggcggcgtttccgagaacggggttcggcgttgtcagcgtctagtcagca

SEQ ID NO: 145224 - DNA, 120 bp, Artificial Sequence
  ENSG00000104886_23 (sequence is synthesized)
ccaagcgggtggaggcaggcgcgggcctggggacgagatagcaccggggcaggctgtggcgaatccgctggcgggcccgccctgcagacacgtgtctttatatagagctctcatatatag

SEQ ID NO: 145225 - DNA, 120 bp, Artificial Sequence
  ENSG00000104886_24 (sequence is synthesized)
tgccccgtcccggcgcccgtgtctcctccagcccgtcggagccctgctgctggagcgctgcagagtcgtccgggaagagcccggcaccttctccatcagtgagtggggctagggaagcca

SEQ ID NO: 145226 - DNA, 120 bp, Artificial Sequence
  ENSG00000104886_25 (sequence is synthesized)
gcggcgcttcccgcagcccggggcacccgcagcgccgcactttcccctccccgggcgcccaaggtctcctctgtgtccccagcctggcgccaccctcctcaaacacaagagtgcattgtc

SEQ ID NO: 145227 - DNA, 120 bp, Artificial Sequence
  ENSG00000104886_26 (sequence is synthesized)
cacgggcagctcaaggtcaagttctcctggcgggcaccacccttcccacctgccgagtccacttaagcttgggtccctcccagactctgctctttgttccctgtgggcccaggctgtact

SEQ ID NO: 145228 - DNA, 120 bp, Artificial Sequence
  ENSG00000104886_27 (sequence is synthesized)
tacagggcaggtgggccagccccacccaaagcgtttccccagctgccaagagtagcatgggtctagcattgttatatggccccgggctggaaatcccaggtgggggtaggaggagtgaga

SEQ ID NO: 145229 - DNA, 120 bp, Artificial Sequence
  ENSG00000104886_28 (sequence is synthesized)
ggggggtgttctcctgggtcttaagagattcccttctgcggggaaagatggagtccctgctagtttgcccagagtggctgtcaaaattccacaggccaggtggcttaaatatcagaaaca

SEQ ID NO: 145230 - DNA, 120 bp, Artificial Sequence
  ENSG00000104886_29 (sequence is synthesized)
ttctctacagttctggaggccagaaatcctagatgaaggtgtgggtggggccgaatccttctgaggccgaggggaatctcccagttcctagtggtggccagtatcctccaggttccttgg

SEQ ID NO: 145231 - DNA, 120 bp, Artificial Sequence
  ENSG00000104886_30 (sequence is synthesized)
cttgtggaagcgtcaccttgtcctccttgcatcacgtctgtgcccacatttccccttctacacagacgccaagcagaatttagggcccaccctgacaacccctttttacttcactttatt

SEQ ID NO: 145232 - DNA, 77 bp, Artificial Sequence
  ENSG00000104886_31 (sequence is synthesized)
tagggcccaccctgacaacccctttttacttcactttattattttatttgcttattttttgagacagggtcttggta

SEQ ID NO: 145233 - DNA, 120 bp, Artificial Sequence
  ENSG00000104886_32 (sequence is synthesized)
gtgatcacagctcactgcagcctcaacccccttggctcaagcagtcctcccacttctgactccggagtggctgggcctacaaggccccaccaccacacctggctaatttttgtttttgta

SEQ ID NO: 145234 - DNA, 78 bp, Artificial Sequence
  ENSG00000104886_33 (sequence is synthesized)
gagtggctgggcctacaaggccccaccaccacacctggctaatttttgtttttgtagagatggggattttgccatgtc

SEQ ID NO: 145235 - DNA, 120 bp, Artificial Sequence
  ENSG00000104888_0 (sequence is synthesized)
ggggtgaccggcggcaggagccgccaccatggagttccgccaggaggagtttcggaagctagcgggtcgtgctctcgggaagctgcaccgccttctggagaagcggcaggaaggcgcgga

SEQ ID NO: 145236 - DNA, 120 bp, Artificial Sequence
  ENSG00000104888_1 (sequence is synthesized)
gacgctggagctgagtgcggatgggcgcccggtgaccacgcagacccgggacccgccggtggtggactgcacctgcttcggcctccctcgccgctacattatcgccatcatgagtggtct

SEQ ID NO: 145237 - DNA, 120 bp, Artificial Sequence
  ENSG00000104888_2 (sequence is synthesized)
gggcttctgcatcagctttggcatccgctgcaacctgggcgtggccatcgtctccatggtcaataacagcacgacccaccgcgggggccacgtggtggtgcagaaagcccagttcagctg

SEQ ID NO: 145238 - DNA, 120 bp, Artificial Sequence
  ENSG00000104888_3 (sequence is synthesized)
ggatccagagactgtcggcctcatacacggctcctttttctggggctacattgtcactcagattccaggaggatttatctgtcaaaaatttgcagccaacagagttttcggctttgctat

SEQ ID NO: 145239 - DNA, 120 bp, Artificial Sequence
  ENSG00000104888_4 (sequence is synthesized)
tgtggcaacatccactctaaacatgctgatcccctcagctgcccgcgtccactatggctgtgtcatcttcgtgaggatcctgcaggggttggtagagggggtcacataccccgcctgcca

SEQ ID NO: 145240 - DNA, 120 bp, Artificial Sequence
  ENSG00000104888_5 (sequence is synthesized)
tgggatctggagcaaatgggccccacccttagaacggagtcgcctggcgacgacagccttttgtggttcctatgctggggcggtggtcgcgatgcccctcgccggggtccttgtgcagta

SEQ ID NO: 145241 - DNA, 120 bp, Artificial Sequence
  ENSG00000104888_6 (sequence is synthesized)
ctcaggatggagctctgttttctacgtctacggcagcttcgggatcttctggtacctgttctggctgctcgtctcctacgagtcccccgcgctgcaccccagcatctcggaggaggagcg

SEQ ID NO: 145242 - DNA, 120 bp, Artificial Sequence
  ENSG00000104888_7 (sequence is synthesized)
caagtacatcgaggacgccatcggagagagcgcgaaactcatgaaccccctcacgaagtttagcactccctggcggcgcttcttcacgtctatgccagtctatgccatcatcgtggccaa

SEQ ID NO: 145243 - DNA, 120 bp, Artificial Sequence
  ENSG00000104888_8 (sequence is synthesized)
cttctgccgcagctggacgttctacctgctgctcatctcccagcccgcctacttcgaagaagtgttcggcttcgagatcagcaaggtaggcctggtgtccgcgctgccccacctggtcat

SEQ ID NO: 145244 - DNA, 120 bp, Artificial Sequence
  ENSG00000104888_9 (sequence is synthesized)
gaccatcatcgtgcccatcggcggccagatcgcggacttcctgcggagccgccgcatcatgtccaccaccaacgtgcgcaagttgatgaactgcggaggcttcggcatggaagccacgct

SEQ ID NO: 145245 - DNA, 120 bp, Artificial Sequence
  ENSG00000104888_10 (sequence is synthesized)
gctgttggtggtcggctactcgcactccaagggcgtggccatctccttcctggtcctagccgtgggcttcagcggcttcgccatctctgggttcaacgtgaaccacctggacatagcccc

SEQ ID NO: 145246 - DNA, 120 bp, Artificial Sequence
  ENSG00000104888_11 (sequence is synthesized)
catcgtgggggccatgactaagcacaagactcgggaggagtggcagtacgtgttcctaattgcctccctggtgcactatggaggtgtcatcttctacggggtctttgcttctggagagaa

SEQ ID NO: 145247 - DNA, 120 bp, Artificial Sequence
  ENSG00000104888_12 (sequence is synthesized)
gcagccgtgggcagagcctgaggagatgagcgaggagaagtgtggcttcgttggccatgaccagctggctggcagtgacgacagcgaaatggaggatgaggctgagcccccgggggcacc

SEQ ID NO: 145248 - DNA, 120 bp, Artificial Sequence
  ENSG00000104888_13 (sequence is synthesized)
ccctgcacccccgccctcctatggggccacacacagcacatttcagccccccaggcccccaccccctgtccgggactactgaccatgtgcctcccactgaatggcagtttccaggacctc

SEQ ID NO: 145249 - DNA, 120 bp, Artificial Sequence
  ENSG00000104888_14 (sequence is synthesized)
cattccactcatctctggcctgagtgacagtgtcaaggaaccctgctcctctctgtcctgcctcaggcctaagaagcactctcccttgttcccagtgctgtcaaatcctctttccttccc

SEQ ID NO: 145250 - DNA, 120 bp, Artificial Sequence
  ENSG00000104888_15 (sequence is synthesized)
aattgcctctcaggggtagtgaagctgcagactgacagtttcaaggatacccaaattcccctaaaggttccctctccacccgttctgcctcagtggtttcaaatctctcctttcagggct

SEQ ID NO: 145251 - DNA, 120 bp, Artificial Sequence
  ENSG00000104888_16 (sequence is synthesized)
ttatttgaatggacagttcgacctcttactctctcttgtggttttgaggcacccacaccccccgctttcctttatctccagggactctcaggctaacctttgagatcactcagctcccat

SEQ ID NO: 145252 - DNA, 120 bp, Artificial Sequence
  ENSG00000104888_17 (sequence is synthesized)
ctcctttcagaaaaattcaaggtcctcctctagaagtttcaaatctctcccaactctgttctgcatcttccagattggtttaaccaattactcgtccccgccattccagggattgattct

SEQ ID NO: 145253 - DNA, 120 bp, Artificial Sequence
  ENSG00000104888_18 (sequence is synthesized)
caccagcgtttctgatggaaaatggcggtttcaagtccccgattccgtgcccacttcacatctcccctaccagcagattctgcgaaagcaccaaatttctcaagaccctcttctccctag

SEQ ID NO: 145254 - DNA, 120 bp, Artificial Sequence
  ENSG00000104888_19 (sequence is synthesized)
cttagcataatgtctggggaaacaaccaaaatcgcaattttaacaatatgcctctctacccccgtgcactttttctgacatggttttcaggtctaaatagtggctgctccagtccatgaa

SEQ ID NO: 145255 - DNA, 120 bp, Artificial Sequence
  ENSG00000104888_20 (sequence is synthesized)
ctcaaaggtttgaagctaccaccattgaactcccccatggtggtttcatgatgccccctccccaattcctcgcactttattctcctgggtggtttcgaactaccctgtttctcagtggcc

SEQ ID NO: 145256 - DNA, 120 bp, Artificial Sequence
  ENSG00000104888_21 (sequence is synthesized)
atttgttgtgtccctcaggggcttaatgactcaaaatctgggatccttcccctctcagacacccctctttcagcttagaatttggggaacctatagagaagtcacagaatcccatgaaag

SEQ ID NO: 145257 - DNA, 120 bp, Artificial Sequence
  ENSG00000104888_22 (sequence is synthesized)
ggaatggggcaggagccaggggtgttttttcccagtgcagggttgtgtctttgtgtctctgtctctgtgactgtaaatcctgccctgccccactcccaataaaagctttggtgtataggc

SEQ ID NO: 145258 - DNA, 120 bp, Artificial Sequence
  ENSG00000104888_23 (sequence is synthesized)
cagtcccatctcaggttcctccctgaatgtgatccttttttgaaaccctgccactgcctacgtcccactgcatgtgttgtgtcccttatctaaagacccacagggtctcccaggctacgg

SEQ ID NO: 145259 - DNA, 87 bp, Artificial Sequence
  ENSG00000104888_24 (sequence is synthesized)
gtggcaccactctcctgcctcagccttctgagcagctgggactacaggcgtgcgccggcatacccagctaacatttttatttttatc

SEQ ID NO: 145260 - DNA, 79 bp, Artificial Sequence
  ENSG00000104888_25 (sequence is synthesized)
gactctcctgcctcagccttctgagcagctgggactacaggcgtgcgccggcatacccagctaacatttttatttttat

SEQ ID NO: 145261 - DNA, 120 bp, Artificial Sequence
  ENSG00000104888_26 (sequence is synthesized)
ccagtcctgggagtacaggcgtgagccaccgtgccctgtcctttctcctattttaatttcagcataggccttgcccctgcatcagaaaagagtcctgatttgtgcctttgtcctacctga

SEQ ID NO: 145262 - DNA, 120 bp, Artificial Sequence
  ENSG00000104888_27 (sequence is synthesized)
agttcctccccttgctcccttccaatctggtccgcccccttggctgcttcgtgtccccgcctggaccctgtgcaggtcactccgcaaacgctcataagctggatataagtggagagagtc

SEQ ID NO: 145263 - DNA, 120 bp, Artificial Sequence
  ENSG00000104888_28 (sequence is synthesized)
atcatcatacatgggcccctaggctttcatggaggcaaggaagcaggcaaagcaaggcgtctaggtggtgatggactctgttgttaaggcagcataggccctagcaacgtggaagagcgg

SEQ ID NO: 145264 - DNA, 120 bp, Artificial Sequence
  ENSG00000104888_29 (sequence is synthesized)
agtttgtagactttaattgacagaaagatagtgtgagctttgattggcaggcttttggaggtgggaggggttcctcgttgctgataggtcgagacgctaagtctgtgggtgctgattggt

SEQ ID NO: 145265 - DNA, 120 bp, Artificial Sequence
  ENSG00000104888_30 (sequence is synthesized)
attctggatctctgttctcatctctctgcatctatgttctatctcctgggtttctgtccccgcctctctttgggactctgtctgcttccttctctaggtttccatctcttccctctctgg

SEQ ID NO: 145266 - DNA, 120 bp, Artificial Sequence
  ENSG00000104888_31 (sequence is synthesized)
gtctctgtccccctatttctaggtctctctccccctctctctgggtctctgtctccctctctctgggtctctgtcatcctctgtgtctctgacccctccatctctgggtctctgtccccc

SEQ ID NO: 145267 - DNA, 120 bp, Artificial Sequence
  ENSG00000104888_32 (sequence is synthesized)
tctccctttctctctgggtctctgtccccctctttctgggtctctggcccgctatgtctctgggtctctgtcccgctgtatctctgggtctctgtccccctctctctctgggtctctgct

SEQ ID NO: 145268 - DNA, 80 bp, Artificial Sequence
  ENSG00000104888_33 (sequence is synthesized)
tctctggcccgctatgtctctgggtctctgtcccgctgtatctctgggtctctgtccccctctctctctgggtctctgct

SEQ ID NO: 145269 - DNA, 82 bp, Artificial Sequence
  ENSG00000104888_34 (sequence is synthesized)
cctctttctgggtctctgtcccactatgtctctgggtctctgtccccctgtatctctgggtctctgtccccttctctctctg

SEQ ID NO: 145270 - DNA, 120 bp, Artificial Sequence
  ENSG00000104888_35 (sequence is synthesized)
tctctctccctctctctgggtctctgtctcttcctctctagatctctgtccccctttcactggatctctctcccttcttctgtctgtgaccccctctctctgggcctctgtacaactccc

SEQ ID NO: 145271 - DNA, 120 bp, Artificial Sequence
  ENSG00000104888_36 (sequence is synthesized)
tgtacaactccccccatctctgtcaccctctttttgggtctttctccacctgtctgaaggcacctctctctctctgcagcctctctctgggtttgaggcagccctccaaataccctcttc

SEQ ID NO: 145272 - DNA, 120 bp, Artificial Sequence
  ENSG00000104888_37 (sequence is synthesized)
gtcatcacagacttgattctggatccagaacgggcgggggcgagagtcacgctggggaatgagccaatccccctaccagggccatctgtcccctgccaggacaccacccgccactccccc

SEQ ID NO: 145273 - DNA, 120 bp, Artificial Sequence
  ENSG00000104888_38 (sequence is synthesized)
tccctaccccctaggctggcagcctggactcaaggttccctagggatgcctgggacgggctgctggattcccagggtcctggacatctccccaccccctagcaaacgtggctgagaagca

SEQ ID NO: 145274 - DNA, 120 bp, Artificial Sequence
  ENSG00000104888_39 (sequence is synthesized)
tctgttcttttgacacctttgctgaagcatctccttagcaccttttgcttcctcgaatagactcttatccgggagaggcggctggagagtctttgggcctcggagtgggggcacaggctc

SEQ ID NO: 145275 - DNA, 120 bp, Artificial Sequence
  ENSG00000104888_40 (sequence is synthesized)
ttgaatcccaaagggttgtctggggtctaagtctcctgagttgaaggatttgacagagctgggagagggggactgaagaccgtcaatgtgaagaaggagggggctgggggcctgaattcc

SEQ ID NO: 145276 - DNA, 120 bp, Artificial Sequence
  ENSG00000104888_41 (sequence is synthesized)
tggatcaggggggcgaagggagccagggacctggactcttggtgaaggaggaggtgcgggcttagaattctggatgttgaaaagcaggttttgccctggatcctggtcttgggggtgagg

SEQ ID NO: 145277 - DNA, 120 bp, Artificial Sequence
  ENSG00000104888_42 (sequence is synthesized)
gaaccccctcacggtccgggaccaaatcttcggggaaggggcggggagagatagcaagccacgaacctgcacagcgtgtagatcagggacggttcctgcagactctagaggagacgggac

SEQ ID NO: 145278 - DNA, 120 bp, Artificial Sequence
  ENSG00000104888_43 (sequence is synthesized)
tggaacgcaaagagaggggctagaacctaggaggcgggttgcaacccgcggaggacgagattctcaggtgctgggggcagggttaggtcgggagttgagcaggattagaaccactgacag

SEQ ID NO: 145279 - DNA, 120 bp, Artificial Sequence
  ENSG00000104888_44 (sequence is synthesized)
ggcatagttaaagccagcagagaagggattagaatgtgggggttttgcttagaccttgagttgaggctgtattttgggagcatttttgataaaaagagactcctagggcaggctcagtgg

SEQ ID NO: 145280 - DNA, 87 bp, Artificial Sequence
  ENSG00000104888_45 (sequence is synthesized)
catttttgataaaaagagactcctagggcaggctcagtggcttccgcctgcaatcccaacactttgggggtggaggctgcttgggca

SEQ ID NO: 145281 - DNA, 120 bp, Artificial Sequence
  ENSG00000104889_0 (sequence is synthesized)
gtgttctgcccgcggattggccggaagcaggcgccgcttcgaggcccgcggaaaacgcgcgccgagacccgctcctgcagtattagttcttgcagctggtggtggcggctgaggcggcat

SEQ ID NO: 145282 - DNA, 120 bp, Artificial Sequence
  ENSG00000104889_1 (sequence is synthesized)
ggatctcagcgagctggagagagacaatacaggccgctgtcgcctgagttcgcctgtgcccgcggtgtgccgcaaggagccttgcgtcctgggcgtcgatgaggcgggcaggggccccgt

SEQ ID NO: 145283 - DNA, 120 bp, Artificial Sequence
  ENSG00000104889_2 (sequence is synthesized)
gctgggccccatggtctacgccatctgttattgtcccctgcctcgcctggcagatctggaggcgctgaaagtggcagactcaaagaccctattggagagcgagcgggaaaggctgtttgc

SEQ ID NO: 145284 - DNA, 120 bp, Artificial Sequence
  ENSG00000104889_3 (sequence is synthesized)
gaaaatggaggacacggactttgtcggctgggcgctggatgtgctgtctccaaacctcatctctaccagcatgcttgggcgggtcaaatacaacctgaactccctgtcacatgatacagc

SEQ ID NO: 145285 - DNA, 120 bp, Artificial Sequence
  ENSG00000104889_4 (sequence is synthesized)
cactgggcttatacagtatgcattggaccagggcgtgaacgtcacccaggtattcgtggacaccgtagggatgccagagacataccaggcgcggctgcagcaaagttttcccgggattga

SEQ ID NO: 145286 - DNA, 120 bp, Artificial Sequence
  ENSG00000104889_5 (sequence is synthesized)
ggtgacggtcaaggccaaagcagatgccctctacccggtggttagtgctgccagcatctgtgccaaggtggcccgggaccaggccgtgaagaaatggcagttcgtggagaaactgcagga

SEQ ID NO: 145287 - DNA, 120 bp, Artificial Sequence
  ENSG00000104889_6 (sequence is synthesized)
cttggatactgattatggctcaggctaccccaatgatcccaagacaaaagcgtggttgaaggagcacgtggagcctgtgttcggcttcccccagtttgtccggttcagctggcgcacggc

SEQ ID NO: 145288 - DNA, 120 bp, Artificial Sequence
  ENSG00000104889_7 (sequence is synthesized)
ccagaccatcctggagaaagaggcggaagatgttatatgggaggactcagcatccgagaatcaggagggactcaggaagatcacatcctacttcctcaatgaagggtcccaagcccgtcc

SEQ ID NO: 145289 - DNA, 120 bp, Artificial Sequence
  ENSG00000104889_8 (sequence is synthesized)
ccgttcttcccaccgatatttcctggaacgcggcctggagtcagcaaccagcctctagcagctgcctctacgcgctctacctgcttccccaacccagacattaaaattgtttaaggagaa

SEQ ID NO: 145290 - DNA, 120 bp, Artificial Sequence
  ENSG00000104889_9 (sequence is synthesized)
ccacacgtaggggatgtacttttgggacagaagcaaggtgggagtgtgctctgcagccgggtccagctacttccttttggaaccttaaatagaatgggtgttggttgattaattttattt

SEQ ID NO: 145291 - DNA, 85 bp, Artificial Sequence
  ENSG00000104889_10 (sequence is synthesized)
aaccttaaatagaatgggtgttggttgattaattttatttggtttgatttttttcatttttaaattttagacgaagtctcactct

SEQ ID NO: 145292 - DNA, 65 bp, Artificial Sequence
  ENSG00000104889_11 (sequence is synthesized)
gccatgcccaactaatttttttttttttttgagacacagtctcctgttgcccaggctggagtacc

SEQ ID NO: 145293 - DNA, 74 bp, Artificial Sequence
  ENSG00000104889_12 (sequence is synthesized)
ctgggattacaggcatgagccactgcaccgacctttttagttatatttttaatttttaaaaatttttaaatttt

SEQ ID NO: 145294 - DNA, 75 bp, Artificial Sequence
  ENSG00000104889_13 (sequence is synthesized)
ctacaggtgcggtttcaccgtgttagccatgatggtctcaatcttctgaccttgtgatccgtctgcttcagcctc

SEQ ID NO: 145295 - DNA, 70 bp, Artificial Sequence
  ENSG00000104889_14 (sequence is synthesized)
ttttagtagaaacacggtttcaccgtgttagccatgatggtctcaatcttctgaccttgtgatccgattg

SEQ ID NO: 145296 - DNA, 88 bp, Artificial Sequence
  ENSG00000104889_15 (sequence is synthesized)
agctcagtgtcaccttaacctcctgagtagctgaggttccaggcacacgccacgatgcccaactaatttttgtattttttgtagagat

SEQ ID NO: 145297 - DNA, 120 bp, Artificial Sequence
  ENSG00000104889_16 (sequence is synthesized)
tttgtattttttgtagagatgaggtttcatcatgtcgcccaggctggtcttgtagtcctgggttcaagtgatctgcccgctgtgacctctcaatgtgtgagctaccatacctggctgact

SEQ ID NO: 145298 - DNA, 120 bp, Artificial Sequence
  ENSG00000104889_17 (sequence is synthesized)
ccatacctggctgactaatatgtaaaatacatgatgtggctgggcgcaggggctcatacatgtaatcctagtgctttggaaggctgagtcaggaggatcttgaccagtctggacaacata

SEQ ID NO: 145299 - DNA, 120 bp, Artificial Sequence
  ENSG00000104889_18 (sequence is synthesized)
gcgggaaacgggagtcgggattgcactgcaccaagggaggggatgtggtcgtggtgatggcacctaaagaagcagtgatgatagaacagggatgaatggcaactttcacgggctcagtga

SEQ ID NO: 145300 - DNA, 120 bp, Artificial Sequence
  ENSG00000104889_19 (sequence is synthesized)
cgtcacccaggtgagttaactgtaagttgtccccatttggtcatctcaggataaaatggggacaaaacaggagttcgagactgcagtgagccatgatcatgccacagcactccatcctgg

SEQ ID NO: 145301 - DNA, 120 bp, Artificial Sequence
  ENSG00000104889_20 (sequence is synthesized)
gtgacaaaggaagccccccaactcaaaaatggaggcagggcgcagtggctcacgcctataatcgcagcactttgggaagccgcggcgggtagatcaccggaggtcaagagttcgagacca

SEQ ID NO: 145302 - DNA, 120 bp, Artificial Sequence
  ENSG00000104889_21 (sequence is synthesized)
gatctggaggcgctgaaagtggcaggtgagcccgaggtgtgcgtctggggaagggattcctgggtatgtgcaggggcaggtgagaactgaaaggggagggcaggaactgggagaaccagc

SEQ ID NO: 145303 - DNA, 120 bp, Artificial Sequence
  ENSG00000104892_0 (sequence is synthesized)
agacgcccggcgcagcgggagcggcggggcgtgcctggcctgcgggacgcgactgatcgcagtggggcgaagcggggccggagccgcccgcggtcaggagcagcaatgtctgtgcaggta

SEQ ID NO: 145304 - DNA, 120 bp, Artificial Sequence
  ENSG00000104892_1 (sequence is synthesized)
gcggctcctggaagtgcagggctgggcccagagcgcctgagccctgaggagctggtgcggcagacgcggcaagtggtccaggggctggaggcgctgcgggcagagcaccatggcctggct

SEQ ID NO: 145305 - DNA, 120 bp, Artificial Sequence
  ENSG00000104892_2 (sequence is synthesized)
gggcacctggcggaggccctggcgggacagggcccggcagccggcttggagatgctggaggaaaagcagcaggtggtgagccactcgctggaggccatcgagctggggctgggcgaggcc

SEQ ID NO: 145306 - DNA, 120 bp, Artificial Sequence
  ENSG00000104892_3 (sequence is synthesized)
caggtgctgctggccctgtcggcacatgtgggtgcactggaggcagagaagcagcggctgcgctcgcaggcccggcggctggcccaggagaacgtgtggctgcgggaggaactggaggag

SEQ ID NO: 145307 - DNA, 120 bp, Artificial Sequence
  ENSG00000104892_4 (sequence is synthesized)
acgcagcggcggcttcgggccagcgaggagtccgtggcccagctggaggaggagaagcgccacctggagttcctggggcagctgcgacagtacgacccaccggcggagagccagcagtct

SEQ ID NO: 145308 - DNA, 120 bp, Artificial Sequence
  ENSG00000104892_5 (sequence is synthesized)
gagtccccgcctcgccgagacagcctggcctccctgttccccagcgaggaggaggagaggaaaggtcctgaggccgcaggagcagcagctgctcagcagggtggctatgagatccctgcc

SEQ ID NO: 145309 - DNA, 120 bp, Artificial Sequence
  ENSG00000104892_6 (sequence is synthesized)
cgccttcggaccctgcataacctcgtgatccagtacgcggggcagggccgctatgaggtggcggtgcctctgtgccgccaggccttggaggacctggagcgcagctcgggccactgccac

SEQ ID NO: 145310 - DNA, 120 bp, Artificial Sequence
  ENSG00000104892_7 (sequence is synthesized)
gagcagacgctgggccctgagcaccccgcggtggccgccacgctcaacaacttggctgtcctctatgggaagcgtgggcgttaccgggaggcagagcccctgtgccagcgcgctttggag

SEQ ID NO: 145311 - DNA, 120 bp, Artificial Sequence
  ENSG00000104892_8 (sequence is synthesized)
atccgagagaaggtcctgggtgctgaccacccagatgtggccaagcagctcaacaacctggccctgctgtgccagaaccagggcaagtttgaggacgtggagcggcactatgcccgggcc

SEQ ID NO: 145312 - DNA, 120 bp, Artificial Sequence
  ENSG00000104892_9 (sequence is synthesized)
ctgagcatctatgaggcactgggcgggccccatgaccccaacgtggccaagaccaagaacaacctggcctcagcctacctgaaacagaacaagtatcaacaagcggaagagctgtacaaa

SEQ ID NO: 145313 - DNA, 120 bp, Artificial Sequence
  ENSG00000104892_10 (sequence is synthesized)
gaaatcctccacaaggaggacctacccgcccctctcggtgcccccaacacaggcacagctggtgacgcagaacaggcccttcgccgcagcagctcactctccaagatccgtgagtctatc

SEQ ID NO: 145314 - DNA, 120 bp, Artificial Sequence
  ENSG00000104892_11 (sequence is synthesized)
aggcgaggaagtgagaagctggtctcccggctccgaggcgaggcggcggcaggagcagccggaatgaagagagccatgtcactcaacacactgaacgtggatgctccaagggctcctggg

SEQ ID NO: 145315 - DNA, 120 bp, Artificial Sequence
  ENSG00000104892_12 (sequence is synthesized)
actcagtttcccagctggcacctggacaaggcccctcggaccctcagcgccagcacccaggacctgagcccccactaacgtccagtgaactgcgctggccgcagcttcttgggaacagtg

SEQ ID NO: 145316 - DNA, 120 bp, Artificial Sequence
  ENSG00000104892_13 (sequence is synthesized)
caggagggatgggctggtggggtgagagggggtctatcatctcctggcccccccttgcctctgggtacctggtggatagctgccttctcctgcgattaaaggctgtggacgtgacagtga

SEQ ID NO: 145317 - DNA, 120 bp, Artificial Sequence
  ENSG00000104892_14 (sequence is synthesized)
ggagggcggagcccctgttcccccagggtccatctgttgcctgggagccaacacatggccccatcctcattccccccaacctagaggcctcctgggcttctgggggccctggcccctcgg

SEQ ID NO: 145318 - DNA, 120 bp, Artificial Sequence
  ENSG00000104892_15 (sequence is synthesized)
ccctctcctcccaccccacccacccccagtggtctgactggttcccgacaaaaacaccctaagaatgagctcacgcagaggctgccgcctccacacgccccgcctcactctgccggcaga

SEQ ID NO: 145319 - DNA, 120 bp, Artificial Sequence
  ENSG00000104892_16 (sequence is synthesized)
aggatgggtggagcagggaagagccaggatggggagaagttaggggtcctgatggccattatgggaatagaggctgggggccaactgactggcccgggcaatgattccccaaacccctca

SEQ ID NO: 145320 - DNA, 120 bp, Artificial Sequence
  ENSG00000104892_17 (sequence is synthesized)
agtcccccagaccctccttagaatgccacagtcccccaaccctccacagagcccccagacccaccagaacttccacagacgcccccactagctactccacgaagcccccgagcctcgcca

SEQ ID NO: 145321 - DNA, 120 bp, Artificial Sequence
  ENSG00000104892_18 (sequence is synthesized)
gcccccactagctactccacgaagcccccgagcctcgccagacccccagggggcctctgacgctcgtgaccaccacctccctcaaaccttgagataggctgggtgcggtggctcacgcct

SEQ ID NO: 145322 - DNA, 120 bp, Artificial Sequence
  ENSG00000104892_19 (sequence is synthesized)
aggcgtgagccactgcgcctggccattttatttttatttttatttttttacattttatttttggttcatggttttttacattttattttggtacaattttattttggagacaggttctta

SEQ ID NO: 145323 - DNA, 120 bp, Artificial Sequence
  ENSG00000104892_20 (sequence is synthesized)
attttggtacaattttattttggagacaggttcttacctcttgccccactctttttcacccaagctggaatacagtggtgccatcatagctcactgcaaccttgacctctggggatccca

SEQ ID NO: 145324 - DNA, 120 bp, Artificial Sequence
  ENSG00000104892_21 (sequence is synthesized)
ggatcccacctcaatctcccaagcagctgcaactacaggtgtgcgccaccacacttggctcattttaacttttttttttttttgtggagatggggatcttgctatattgcccaggctggt

SEQ ID NO: 145325 - DNA, 84 bp, Artificial Sequence
  ENSG00000104892_22 (sequence is synthesized)
atagctctaaaatggatgtggggttggctgacagttggccaatccaggccgggctcagatgggaagttctgcttcatatgggaa

SEQ ID NO: 145326 - DNA, 120 bp, Artificial Sequence
  ENSG00000104892_23 (sequence is synthesized)
caggccgggctcagatgggaagttctgcttcatatgggaaccttgtggagtgcaggctgaggggagaggaagctctcaggggaagcccgtctcatggtgatgctgagatgcaaaaagaaa

SEQ ID NO: 145327 - DNA, 120 bp, Artificial Sequence
  ENSG00000104892_24 (sequence is synthesized)
tgttcaaggtctcttgaggcctaagctcagaactgacacgactgtcacttgtgcccctctgctattggccaaagcaagtcacatggccacaccaaaagttcaaggcccatcattttgtcg

SEQ ID NO: 145328 - DNA, 120 bp, Artificial Sequence
  ENSG00000104894_0 (sequence is synthesized)
ctcttttggggttcttcctttctctctcagctctccgtctctctttctctctcagcctctttctttctccctgtctcccccactgtcagcacctcttctgtgtggtgagtggaccgctta

SEQ ID NO: 145329 - DNA, 120 bp, Artificial Sequence
  ENSG00000104894_1 (sequence is synthesized)
ccccactaggtgaagatgtcagcccaggagagctgcctcagcctcatcaagtacttcctcttcgttttcaacctcttcttcttcgtcctcggcagcctgatcttctgcttcggcatctgg

SEQ ID NO: 145330 - DNA, 120 bp, Artificial Sequence
  ENSG00000104894_2 (sequence is synthesized)
atcctcattgacaagaccagcttcgtgtcctttgtgggcttggccttcgtgcctctgcagatctggtccaaagtcctggccatctcaggaatcttcaccatgggcatcgccctcctgggt

SEQ ID NO: 145331 - DNA, 120 bp, Artificial Sequence
  ENSG00000104894_3 (sequence is synthesized)
tgtgtgggggccctcaaggagctccgctgcctcctgggcctgtattttgggatgctgctgctcctgtttgccacacagatcaccctgggaatcctcatctccactcagcgggcccagctg

SEQ ID NO: 145332 - DNA, 120 bp, Artificial Sequence
  ENSG00000104894_4 (sequence is synthesized)
gagcgaagcttgcgggacgtcgtagagaaaaccatccaaaagtacggcaccaaccccgaggagaccgcggccgaggagagctgggactatgtgcagttccagctgcgctgctgcggctgg

SEQ ID NO: 145333 - DNA, 120 bp, Artificial Sequence
  ENSG00000104894_5 (sequence is synthesized)
ccgcgtgccctgctcctgctacaacttgtcggcgaccaacgactccacaatcctagataaggtgatcttgccccagctcagcaggcttggacacctggcgcggtccagacacagtgcaga

SEQ ID NO: 145334 - DNA, 120 bp, Artificial Sequence
  ENSG00000104894_6 (sequence is synthesized)
catctgcgctgtccctgcagagagccacatctaccgcgagggctgcgcgcagggcctccagaagtggctgcacaacaaccttatttccatagtgggcatttgcctgggcgtcggcctact

SEQ ID NO: 145335 - DNA, 120 bp, Artificial Sequence
  ENSG00000104894_7 (sequence is synthesized)
cgagctcgggttcatgacgctctcgatattcctgtgcagaaacctggaccacgtctacaaccggctcgctcgataccgttaggccccgccctccccaaagtcccgccccgcccccgtcac

SEQ ID NO: 145336 - DNA, 120 bp, Artificial Sequence
  ENSG00000104894_8 (sequence is synthesized)
gtgcgctgggcacttccctgctgcctgtaaatatttgtttaatccccagttcgcctggagccctccgccttcacattcccctggggacccacgtggctgcgtgcccctgctgctgtcacc

SEQ ID NO: 145337 - DNA, 120 bp, Artificial Sequence
  ENSG00000104894_9 (sequence is synthesized)
tctcccacgggacctggggctttcgtccacagcttcctgtccccatctgtcggcctaccaccacccacaagattatttttcacccaaacctcaaataaatcccctgcgtttttggtaaaa

SEQ ID NO: 145338 - DNA, 120 bp, Artificial Sequence
  ENSG00000104894_10 (sequence is synthesized)
tcggttgcctgggaaggacgagctcagggcggagcgcagcccaccccggccctcccgccgctccacccagcaccggagggtgggggcggcccagcttcagggagccctgattgggtgtac

SEQ ID NO: 145339 - DNA, 120 bp, Artificial Sequence
  ENSG00000104894_11 (sequence is synthesized)
gcagggaaagcctcctgctattggctgcgatctccctcccctttctccgcagatgactgtcatggtgctgagcgtacagctacagcgcagggcactccgccggaaatgcgagccgcacgt

SEQ ID NO: 145340 - DNA, 120 bp, Artificial Sequence
  ENSG00000104894_12 (sequence is synthesized)
gccgggcgctggggattcgagccccgggcccagcctgatcgctgacggcggcggcgggcacagcggcagtctgtggggtggctggggcatggcgggtgcctgccccaactggggagacaa

SEQ ID NO: 145341 - DNA, 120 bp, Artificial Sequence
  ENSG00000104894_13 (sequence is synthesized)
ggcaccgcagggcaagctgcccatggccctggggctctggccgctgtgggttcaagacgaggaccagcctgacactggaagtgcgggcgcagaattagaggaggcacaattagaggctga

SEQ ID NO: 145342 - DNA, 120 bp, Artificial Sequence
  ENSG00000104894_14 (sequence is synthesized)
ggcagagggggaagacagatgagcctccaaaataaaggaccctgggcttgcttccgaccttactccttctcagcctctacccccacttgtagcagctattcccgcctcatcagccagccc

SEQ ID NO: 145343 - DNA, 120 bp, Artificial Sequence
  ENSG00000104894_15 (sequence is synthesized)
tgcggcagttcccgtcgagccccgcccttttctacctatccccttctccagccccttcccgcccaattcacggccccacccctgacctttctcgcccgggtgggcatcacccccgtctcg

SEQ ID NO: 145344 - DNA, 120 bp, Artificial Sequence
  ENSG00000104894_16 (sequence is synthesized)
atgcccagaggtgggttccagtagatcaggggtccctttagatcccccagcgcctgagacatggagacctgggagggactgccccatgagtccttggtgcccacaaattccaaggcccct

SEQ ID NO: 145345 - DNA, 120 bp, Artificial Sequence
  ENSG00000104894_17 (sequence is synthesized)
agacgccctgaaagaagagacagagacttatgagccgtagaaatagtggaagaaacagaaagacagacctgaagtacacagagctagccattcagtaaggatttgagactggcccagaga

SEQ ID NO: 145346 - DNA, 120 bp, Artificial Sequence
  ENSG00000104894_18 (sequence is synthesized)
tttttggtaaaatagctttatcctctgtcagaacacaaacaaacaaactttgagaggggaggaaggaaaccgtctagctcagggctcacttaggagagggatgagattagaaagttcaac

SEQ ID NO: 145347 - DNA, 120 bp, Artificial Sequence
  ENSG00000104894_19 (sequence is synthesized)
atgtccagggcccacctggctctgctcctgcacagaaagggttcatcttcactttgtgatctcacaggtgagggtcatgtgttccaggctctcatactggctgctcactccgtagaagcc

SEQ ID NO: 145348 - DNA, 120 bp, Artificial Sequence
  ENSG00000104894_20 (sequence is synthesized)
gctggggcaggtgggagggcctcccccaacccaagcaacttcctggggtctcccttgtctcagggagacctacggtgccctactctgcaggcaggctacaggctcccatccactgctcac

SEQ ID NO: 145349 - DNA, 120 bp, Artificial Sequence
  ENSG00000104894_21 (sequence is synthesized)
cggaggcttcttggagcctgagtcttcttccggcaaatggggttgtgcatacaaacaacaatgatcatgagagccatttctcaagcacttcctatctgtcgggacttgtggctggtcaga

SEQ ID NO: 145350 - DNA, 120 bp, Artificial Sequence
  ENSG00000104894_22 (sequence is synthesized)
tgcccccacaaaccttcccctcgcttgaggttcagagaggggaagccccttgatggatgtcatacagcaaggacgtaaaagagccaaaataacattaataataggaaaataataatgaag

SEQ ID NO: 145351 - DNA, 120 bp, Artificial Sequence
  ENSG00000104894_23 (sequence is synthesized)
tatgaccctaaataataatgaaatataaccctaaacgctcatatttaagaagtctttgccctgtgttgaggactgggttgaacacatgtcctcatgtgtctctcaaaatgaccctagggg

SEQ ID NO: 145352 - DNA, 120 bp, Artificial Sequence
  ENSG00000104894_24 (sequence is synthesized)
tgcactccagcctgggggacagagcgaggctccaactcaaaaaaaaaccctaagaaatagatatcatctcctatgcctcagggaggtttaaggagccaagccaatgtcacagaacaagtg

SEQ ID NO: 145353 - DNA, 120 bp, Artificial Sequence
  ENSG00000104894_25 (sequence is synthesized)
agtgatagggctgaaactactggggacgaggaggagctgaaggaggaaggagagggtaagaggaagagagacagagatccagggacgggaaacaggcccagaaagaagagaaagtttcag

SEQ ID NO: 145354 - DNA, 120 bp, Artificial Sequence
  ENSG00000104894_26 (sequence is synthesized)
aaggaaacagggactcagggtggggcagggacagagtcccagagagaggggcaccaagatactgctccccacttgggtggctgcctaggtgggaaatggggctgcctggagctgtgccac

SEQ ID NO: 145355 - DNA, 120 bp, Artificial Sequence
  ENSG00000104894_27 (sequence is synthesized)
cctttagatcccccagcgcctgagacatggagacctgggagggactgccccatgagtccttggtgcccacaaattccaaggcccctcaggtaccagagcatgtgtcccagtggagcagca

SEQ ID NO: 145356 - DNA, 120 bp, Artificial Sequence
  ENSG00000104897_0 (sequence is synthesized)
ctttctttgcccgccgttcgccaaacgaagtcgtggaggtggcgaaacgaggaggagataacgcggccttgggctctggtgtctcccagtctgctaaagccctaaggccatcaccatgga

SEQ ID NO: 145357 - DNA, 120 bp, Artificial Sequence
  ENSG00000104897_1 (sequence is synthesized)
cttccagcatcgccccgggggcaagaccgggagcgggggcgtggcctcctcctccgagagcaaccgtgaccgcagggagcgcctccggcagctggccctggagaccatcgacatcaacaa

SEQ ID NO: 145358 - DNA, 120 bp, Artificial Sequence
  ENSG00000104897_2 (sequence is synthesized)
ggacccgtacttcatgaagaaccacctgggctcctatgaatgcaaactctgcctgacacttcacaacaatgaggggagctacctggcacatacgcaggggaagaagcaccagaccaacct

SEQ ID NO: 145359 - DNA, 120 bp, Artificial Sequence
  ENSG00000104897_3 (sequence is synthesized)
ggcccggcgagcagccaaggaggccaaggaggcccctgcccagcccgcgcctgagaaggtcaaggtggaggtgaagaagtttgtgaagatcggccgcccgggctacaaagtgaccaagca

SEQ ID NO: 145360 - DNA, 120 bp, Artificial Sequence
  ENSG00000104897_4 (sequence is synthesized)
gagagactcggagatgggccagcagagcctcctcttccagattgactaccctgagatcgccgagggcatcatgccacgtcaccgcttcatgtctgcgtacgagcagaggatcgagcctcc

SEQ ID NO: 145361 - DNA, 120 bp, Artificial Sequence
  ENSG00000104897_5 (sequence is synthesized)
ggaccggcgctggcagtacctgctcatggccgccgagccctacgagaccattgccttcaaggtgccgagcagagagatcgacaaggcggagggcaagttctggacacactggaaccggga

SEQ ID NO: 145362 - DNA, 120 bp, Artificial Sequence
  ENSG00000104897_6 (sequence is synthesized)
gcctccctgctggcccccctggggtgaagcggcctccacccccgctgatgaacggtctgccccctcggccaccgctgcctgagtctttgccaccgcccccgccaggaggcctgcctctgc

SEQ ID NO: 145363 - DNA, 120 bp, Artificial Sequence
  ENSG00000104897_7 (sequence is synthesized)
catgccccccacagggcctgcgccctcagggcccccgggaccaccccagctacccccgccagctccaggggtccaccccccggccccagtggtgcatccccctgcatctggggtccatcc

SEQ ID NO: 145364 - DNA, 120 bp, Artificial Sequence
  ENSG00000104897_8 (sequence is synthesized)
atcccccagctcctggcgtccaccccccagctcctggcgtccatcccccagcccctggggtccacccaccaacctctggggtccaccccccagctcctggagtccaccctccagcccccg

SEQ ID NO: 145365 - DNA, 120 bp, Artificial Sequence
  ENSG00000104897_9 (sequence is synthesized)
gggttcacccaccagcccccggagtccacccaccagcccctggggttcacccaccagccccaggggtccatcctcccccatcagcgggggttcacccccaggccccgggggtgcacccag

SEQ ID NO: 145366 - DNA, 120 bp, Artificial Sequence
  ENSG00000104897_10 (sequence is synthesized)
cagcccccgccgttcaccctcaggccccaggggtgcacccaccagccccagggatgcaccctcaggccccgggggtccacccccaacctcccggggtccatccgtcggctcctggggtcc

SEQ ID NO: 145367 - DNA, 120 bp, Artificial Sequence
  ENSG00000104897_11 (sequence is synthesized)
accctcagcctccgggagttcacccctcaaatcctggggtgcaccccccaactcccatgcccccaatgctgaggcccccacttccctccgaaggcccagggaacatacctccccctcccc

SEQ ID NO: 145368 - DNA, 120 bp, Artificial Sequence
  ENSG00000104897_12 (sequence is synthesized)
caaccaactgagaagctgctccctcccccagcaagcccagcgccaggtgctcttgccttttcccactgagagaaggctgctcttttgtactgccccccgctcattaaacagcctccccca

SEQ ID NO: 145369 - DNA, 120 bp, Artificial Sequence
  ENSG00000104897_13 (sequence is synthesized)
ctgggcaggatgcccctcccatcgggcttggggtcccctgggccccccccaagtcggagccagaagggtctgcacaggccgggcagggcacctctcccattgggctctgcaggagggcct

SEQ ID NO: 145370 - DNA, 120 bp, Artificial Sequence
  ENSG00000104897_14 (sequence is synthesized)
gctcaagtctctgtgagcctcgcgggccactgctccacagccggggagccagcctggcctgagcctccctgggcgcttgagtacggttcctggggagcattagagaacagaggcatggat

SEQ ID NO: 145371 - DNA, 60 bp, Artificial Sequence
  ENSG00000104897_15 (sequence is synthesized)
acacgtctgtaatcaaccaaggtgctgccactgtactccatcctgggcgacagagtgaga

SEQ ID NO: 145372 - DNA, 120 bp, Artificial Sequence
  ENSG00000104897_16 (sequence is synthesized)
cataagtgtgttctttagtctccagtgcgggaggtgcagccctgatagcctcctccctgagccactgttttccggccttggtggccgtccctcacccacctgcagcctctggcgttgtgt

SEQ ID NO: 145373 - DNA, 120 bp, Artificial Sequence
  ENSG00000104897_17 (sequence is synthesized)
ctgggagctgtcaggctgggcccgataagcacccatctcacccagcagcccatttcccagctgagccacagtctgtgccctcctgtccgggtcttgtggaagcttctgggaattcttgcc

SEQ ID NO: 145374 - DNA, 120 bp, Artificial Sequence
  ENSG00000104897_18 (sequence is synthesized)
cacgttagctggccccattttgcaggtgcaccccgctgtgaccgttgttcttgtgtatccttggacgacaccaaacagccaggcggagctctggaaaataggtgtctcccagtctgctaa

SEQ ID NO: 145375 - DNA, 120 bp, Artificial Sequence
  ENSG00000104899_0 (sequence is synthesized)
agcacccacgatgcgggacctgcctctcaccagcctggccctagtgctgtctgccctgggggctctgctggggactgaggccctcagagcagaggagccagctgtgggcaccagtggcct

SEQ ID NO: 145376 - DNA, 120 bp, Artificial Sequence
  ENSG00000104899_1 (sequence is synthesized)
catcttccgagaagacttggactggcctccaggcagcccacaagagcctctgtgcctggtggcactgggcggggacagcaatggcagcagctcccccctgcgggtggtgggggctctaag

SEQ ID NO: 145377 - DNA, 120 bp, Artificial Sequence
  ENSG00000104899_2 (sequence is synthesized)
cgcctatgagcaggccttcctgggggccgtgcagagggcccgctggggcccccgagacctggccaccttcggggtctgcaacaccggtgacaggcaggctgccttgccctctctacggcg

SEQ ID NO: 145378 - DNA, 120 bp, Artificial Sequence
  ENSG00000104899_3 (sequence is synthesized)
gctgggggcctggctgcgggaccctggggggcagcgcctggtggtcctacacctggaggaagtgacctgggagccaacaccctcgctgaggttccaggagcccccgcctggaggagctgg

SEQ ID NO: 145379 - DNA, 120 bp, Artificial Sequence
  ENSG00000104899_4 (sequence is synthesized)
ccccccagagctggcgctgctggtgctgtaccctgggcctggccctgaggtcactgtgacgagggctgggctgccgggtgcccagagcctctgcccctcccgagacacccgctacctggt

SEQ ID NO: 145380 - DNA, 120 bp, Artificial Sequence
  ENSG00000104899_5 (sequence is synthesized)
gttagcggtggaccgccctgcgggggcctggcgcggctccgggctggccttgaccctgcagccccgcggagaggactcccggctgagtaccgcccggctgcaggcactgctgttcggcga

SEQ ID NO: 145381 - DNA, 120 bp, Artificial Sequence
  ENSG00000104899_6 (sequence is synthesized)
cgaccaccgctgcttcacacggatgaccccggccctgctcctgctgccgcggtccgagcccgcgccgctgcctgcgcacggccagctggacaccgtgcccttcccgccgcccaggccatc

SEQ ID NO: 145382 - DNA, 120 bp, Artificial Sequence
  ENSG00000104899_7 (sequence is synthesized)
aactcgaggagtcgccacccagcgcagaccccttcctggagacgctcacgcgcctggtgcgggcgctgcgggtccccccggcccgggcctccgcgccgcgcctggccctggatccggacg

SEQ ID NO: 145383 - DNA, 120 bp, Artificial Sequence
  ENSG00000104899_8 (sequence is synthesized)
ggccggcttcccgcagggcctagtcaacctgtcggaccccgcggcgctggagcgcctactcgacggcgaggagccgctgctgctgctgctgaggcccactgcggccaccaccggggatcc

SEQ ID NO: 145384 - DNA, 120 bp, Artificial Sequence
  ENSG00000104899_9 (sequence is synthesized)
atcctgcgcccctgcacgaccccacgtcggcgccgtgggccacggccctggcgcgccgcgtggctgctgaactgcaagcggcggctgccgagctgcgaagcctcccgggtctgcctccgg

SEQ ID NO: 145385 - DNA, 120 bp, Artificial Sequence
  ENSG00000104899_10 (sequence is synthesized)
ccacagccccgctgctggcgcgcctgctcgcgctctgcccaggtggccccggcggcctcggcgatcccctgcgagcgctgctgctcctgaaggcgctgcagggcctgcgcgtggagtggc

SEQ ID NO: 145386 - DNA, 120 bp, Artificial Sequence
  ENSG00000104899_11 (sequence is synthesized)
gatccgcgcgggccgggtcgggcacagcgcagcgcgggggccaccgccgccgacgggccgtgcgcgctgcgcgagctcagcgtagacctccgcgccgagcgctccgtactcatccccgag

SEQ ID NO: 145387 - DNA, 120 bp, Artificial Sequence
  ENSG00000104899_12 (sequence is synthesized)
cgagacctaccaggccaacaattgccagggcgtgtgcggctggcctcagtccgaccgcaacccgcgctacggcaaccacgtggtgctgctgctgaagatgcaggtccgtggggccgccct

SEQ ID NO: 145388 - DNA, 120 bp, Artificial Sequence
  ENSG00000104899_13 (sequence is synthesized)
ggcgcgcccaccctgctgcgtgcccaccgcctacgcgggcaagctgctcatcagcctgtcggaggagcgcatcagcgcgcaccacgtgcccaacatggtggccaccgagtgtggctgccg

SEQ ID NO: 145389 - DNA, 120 bp, Artificial Sequence
  ENSG00000104899_14 (sequence is synthesized)
gtgacccctgcgccgcgcggactcctgccccgagggtccggacgcgccccagctcgcgccccttcccatatttattcggaccccaagcatcgccccaataaagaccagcaagcaaccggc

SEQ ID NO: 145390 - DNA, 120 bp, Artificial Sequence
  ENSG00000104899_15 (sequence is synthesized)
gtggtcctacacctggaggaagagcctctgcccctcccgagacacccgctacctggtgttagcggtggaccgccctgcgggggcctggcgcggctccgggctggccttgaccctgcagcc

SEQ ID NO: 145391 - DNA, 120 bp, Artificial Sequence
  ENSG00000104899_16 (sequence is synthesized)
ggtatgtggggcccagccccaagcttggcaccgccgtcttccttcaggtgggccgggtcctcctagggaagatcaggggctggcagagcccccaccctgggcagggaggctgtggtcttg

SEQ ID NO: 145392 - DNA, 120 bp, Artificial Sequence
  ENSG00000104899_17 (sequence is synthesized)
ttcctaggactgggttgcgggtccgtggcctggaaggtgggcaccacactctgtcctgtccccgaagcccagctcttagacttgcccctgcctcggtgccagggagagagctgctgcctt

SEQ ID NO: 145393 - DNA, 120 bp, Artificial Sequence
  ENSG00000104899_18 (sequence is synthesized)
ctccccacccctgaagacgacgcagggctcggggccagtggaacccttcttcccacagccccagcctgttctcagggccgctggcctaagatactccctgcggggaaggggcttcatcgg

SEQ ID NO: 145394 - DNA, 120 bp, Artificial Sequence
  ENSG00000104899_19 (sequence is synthesized)
gcaccccaacccagagaccccagggcggcagccccacccacagcctcagacgcagcccctgcctgcccctgccgtcaccgctccctggctgcaggaaggcagctaagaggggcacccttg

SEQ ID NO: 145395 - DNA, 120 bp, Artificial Sequence
  ENSG00000104899_20 (sequence is synthesized)
tcccccgcttgaggtcccctgcacagtggccagagcggcagggacagatcccaaagattcccggggggtgtggccttcaatggctcaggcgtcccctgctgtcccggctgcagtgacctg

SEQ ID NO: 145396 - DNA, 120 bp, Artificial Sequence
  ENSG00000104899_21 (sequence is synthesized)
gctgccgggtgcccaggtaccagggagttgcatggggcagtgcccgggccgtggcggggggcatggatttgttgcagggtctgcagtactgagaacagcgtagaaccagtggcgatggga

SEQ ID NO: 145397 - DNA, 120 bp, Artificial Sequence
  ENSG00000104901_0 (sequence is synthesized)
agacctgggctcgagaccataactgtttggctttaacagtacgtgggcggccggaatccgggagtccggtgacccgggctgtggtctagcataaaggcggagcccagaagaaggggcggg

SEQ ID NO: 145398 - DNA, 120 bp, Artificial Sequence
  ENSG00000104901_1 (sequence is synthesized)
gtatgggagaagcctccccacctgcccccgcaaggcggcatctgctggtcctgctgctgctcctctctaccctggtgatcccctccgctgcagctcctatccatgatgctgacgcccaag

SEQ ID NO: 145399 - DNA, 120 bp, Artificial Sequence
  ENSG00000104901_2 (sequence is synthesized)
agagctccttgggtctcacaggcctccagagcctactccaaggcttcagccgacttttcctgaaaggtaacctgcttcggggcatagacagcttattctctgcccccatggacttccggg

SEQ ID NO: 145400 - DNA, 120 bp, Artificial Sequence
  ENSG00000104901_3 (sequence is synthesized)
agacaggagaggtgctgatctccgagaatgtggtggcatccattcaaccagcggaggggagcttcgagggtgatttgaaggtacccaggatggaggagaaggaggccctggtacccatcc

SEQ ID NO: 145401 - DNA, 120 bp, Artificial Sequence
  ENSG00000104901_4 (sequence is synthesized)
agaaggccacggacagcttccacacagaactccatccccgggtggccttctggatcattaagctgccacggcggaggtcccaccaggatgccctggagggcggccactggctcagcgaga

SEQ ID NO: 145402 - DNA, 120 bp, Artificial Sequence
  ENSG00000104901_5 (sequence is synthesized)
agcgacaccgcctgcaggccatccgggatggactccgcaaggggacccacaaggacgtcctagaagaggggaccgagagctcctcccactccaggctgtccccccgaaagacccacttac

SEQ ID NO: 145403 - DNA, 120 bp, Artificial Sequence
  ENSG00000104901_6 (sequence is synthesized)
tgtacatcctcaggccctctcggcagctgtaggggtggggaccggggagcacctgcctgtagcccccatcagaccctgccccaagcaccatatggaaataaagttctttcttacatctaa

SEQ ID NO: 145404 - DNA, 120 bp, Artificial Sequence
  ENSG00000104901_7 (sequence is synthesized)
gccgaccatagcagacaaagaccccagccaagcccagtggcgctgcggcgttcaggacccccgtaggccaaaatcccagcccagcccttccccatgtggccagacaaagggacggtggag

SEQ ID NO: 145405 - DNA, 120 bp, Artificial Sequence
  ENSG00000104901_8 (sequence is synthesized)
gaacgaaggatggggcgtggctgtgtcaccaagggcgtggtcatggagtagaggcccgggctcctgggtgaggccggcaagtttggagcgtggtcagacaataggggcgtggctacggct

SEQ ID NO: 145406 - DNA, 120 bp, Artificial Sequence
  ENSG00000104901_9 (sequence is synthesized)
cgctgcagctcctatccatgatgctgacgcccaagagagctccttgggtctcacaggcctccagagcctactccaaggcttcagccgacttttcctgaaagtacccaggatggaggagaa

SEQ ID NO: 145407 - DNA, 120 bp, Artificial Sequence
  ENSG00000104901_10 (sequence is synthesized)
cctccctgggaactaccacaaagaggagaaccaggagcaccagctggggaacaacaccctctccagccacctccagatcgacaaggtacccaggatggaggagaaggaggccctggtacc

SEQ ID NO: 145408 - DNA, 120 bp, Artificial Sequence
  ENSG00000104901_11 (sequence is synthesized)
gcagattcctcatctacaggcgctagtggactggagacggctggcggctgtcccgggacggggaagagagctttggtgcctgagggaagatggcttagggcccggtcccttaaggcctcc

SEQ ID NO: 145409 - DNA, 120 bp, Artificial Sequence
  ENSG00000104903_0 (sequence is synthesized)
ccttatctgcactgggccagcatcctccggccgctgcgccgccaggggtgagagggaggaaaccgggccgccgggggcggggagaaggcgggccggcccgggagccgctcactttccctg

SEQ ID NO: 145410 - DNA, 120 bp, Artificial Sequence
  ENSG00000104903_1 (sequence is synthesized)
ggggggacctacgcggagacctcggctatcctggccttccgaggcccacgaggaggcgcggcccaacgccggggcctggagcattgaggccggaccctcgcgagacagcagagcctggcc

SEQ ID NO: 145411 - DNA, 120 bp, Artificial Sequence
  ENSG00000104903_2 (sequence is synthesized)
tgacgctggaaaccacaccctggcccagactgccagccctgacgggacagagccagggcactcaccaggctgcaagaacagtgctggggtgagtacccccacgtcggggtccatgtgccc

SEQ ID NO: 145412 - DNA, 120 bp, Artificial Sequence
  ENSG00000104903_3 (sequence is synthesized)
gcctcaggcacaggcagaggtgggccccaccatgactgagaaggcagagatggtgtgtgcccccagcccagcgcctgccccaccccctaagcctgcctcgcctgggcccccgcaggtgga

SEQ ID NO: 145413 - DNA, 120 bp, Artificial Sequence
  ENSG00000104903_4 (sequence is synthesized)
ggaggtgggccaccgaggaggctcctcgccccccaggctgccacctggtgtaccagtgatcagcctgggccacagcaggcccccaggggtagccatgcccaccacagagctgggcactct

SEQ ID NO: 145414 - DNA, 120 bp, Artificial Sequence
  ENSG00000104903_5 (sequence is synthesized)
gcggcccccgctgctgcaactctccaccctgggaactgccccgcccactttggccctgcactaccaccctcaccccttcctcaacagtgtctacattgggccagcaggaccttttagcat

SEQ ID NO: 145415 - DNA, 120 bp, Artificial Sequence
  ENSG00000104903_6 (sequence is synthesized)
agctggacctggctgaggggcaccagccccagaaggtggcccggcgcgtgttcaccaacagccgggagcgctggcggcagcagaacgttaacggcgccttcgccgagctgaggaagctgc

SEQ ID NO: 145416 - DNA, 120 bp, Artificial Sequence
  ENSG00000104903_7 (sequence is synthesized)
tgccgacgcacccgcccgaccggaagctgagcaagaacgaggtgctccgcctagccatgaagtacatcggcttcctggtgcggctgctgcgcgaccaagccgcagctctggccgcaggcc

SEQ ID NO: 145417 - DNA, 80 bp, Artificial Sequence
  ENSG00000104903_8 (sequence is synthesized)
ccacccctcccgggcctcgcaaacggccggtgcaccgggtcccagacgacggcgcccgccggggatccggacgcagggcc

SEQ ID NO: 145418 - DNA, 120 bp, Artificial Sequence
  ENSG00000104903_9 (sequence is synthesized)
ccgacggcagccccggtggagcggcccggcccatcaagatggagcaaaccgctttgagcccagaggtgcggtgaccgcacgcggcagcacctctgagccggagggcaccagggactcggc

SEQ ID NO: 145419 - DNA, 120 bp, Artificial Sequence
  ENSG00000104903_10 (sequence is synthesized)
ccagggccgtcaaggaaagggcagtggacgtgctgcgcatgttcgggagcgaactcccccgaagaaggaccagtgaagacgtcaggggcaaggtctcgggggtccggaagggtgatcatc

SEQ ID NO: 145420 - DNA, 120 bp, Artificial Sequence
  ENSG00000104903_11 (sequence is synthesized)
gacccccaagggacccgcagacccttaaaaaaatcacccacaaccctctggaagtggccttgcccggtccccttcccaggggcgaggtcggcaaagcaacatggcagagcagtcatagga

SEQ ID NO: 145421 - DNA, 120 bp, Artificial Sequence
  ENSG00000104903_12 (sequence is synthesized)
gggagtgtgcaaagccaaagggcagactcggacataagaggaggcagcttccctgcctcagtttaccccctgcgtgcatccaggcacctccctccccggctgccctggggcccgggtccc

SEQ ID NO: 145422 - DNA, 120 bp, Artificial Sequence
  ENSG00000104903_13 (sequence is synthesized)
cagaggcccggggtccctacagtggctgggggagcggaaggcgaagccctgaggggtggcggaccgagtcctgccagcgccggctgggggcggggccgggaggcccgcgctgctaggtcc

SEQ ID NO: 145423 - DNA, 120 bp, Artificial Sequence
  ENSG00000104903_14 (sequence is synthesized)
ccagcctgcattcctttgttcattccttcattcattcattcaccagcagggacccactagtgaggggccaggcctgcttccccagggcctagctgaggaagacagggcagaggggccaac

SEQ ID NO: 145424 - DNA, 120 bp, Artificial Sequence
  ENSG00000104903_15 (sequence is synthesized)
caacagtctcacaccttgctgggacatcctggactctggaaccaagagcaaacagggatgtcaaaacagtatgcaaaactgtggatgatcgcggggcattgtggtgcatgcctgtaatcc

SEQ ID NO: 145425 - DNA, 88 bp, Artificial Sequence
  ENSG00000104903_16 (sequence is synthesized)
atcacttgagcccaggagttccagaccaccctggacaacagagtgagaacctgcctctacaaaaaaaatttttttttttctctcagct

SEQ ID NO: 145426 - DNA, 87 bp, Artificial Sequence
  ENSG00000104903_17 (sequence is synthesized)
agccgggcatggtggcacatgcctgtacggctcgagcccaggaatttgaggctgcagtgcactatgattgcaccactgcactccagc

SEQ ID NO: 145427 - DNA, 120 bp, Artificial Sequence
  ENSG00000104903_18 (sequence is synthesized)
tgggcagtggggtcagtgtttgggggtctagggtcagcatttgaggtcatagtgtcagtagtggggtcacagggttgctatgggggatgtttgcagtgggagtgggggtcactcaagcaa

SEQ ID NO: 145428 - DNA, 120 bp, Artificial Sequence
  ENSG00000104903_19 (sequence is synthesized)
ttatggagcactttcagggacagcaatgggaagaaccgcagggtcattcttgaggtgcagagggtcagcctgggtgggggctgggggccttccgtgaagggtcagagtccatcttggagg

SEQ ID NO: 145429 - DNA, 120 bp, Artificial Sequence
  ENSG00000104903_20 (sequence is synthesized)
gattccaagctcacatggcatcaatgagttaatgaggagtctctgggttggatctttagatctgaggataacagggttaatcttggggtttctggggatcccaggatcagttaggggctc

SEQ ID NO: 145430 - DNA, 120 bp, Artificial Sequence
  ENSG00000104903_21 (sequence is synthesized)
cctgtcttgttccctctccaggctgcagaggtgagggaattctggaagaaggaatatttgctcagaggctgggcaacagcgcccctcctgggtcacaaagagctcagggacagtgcgctg

SEQ ID NO: 145431 - DNA, 120 bp, Artificial Sequence
  ENSG00000104903_22 (sequence is synthesized)
cctagcacctggggggcgcctcctactctaacgtaggacccccctcccgtgtcctggaagtttctgggcctgcccccgccatctgcctttgcctactgaaacttctctcctcctcctttc

SEQ ID NO: 145432 - DNA, 120 bp, Artificial Sequence
  ENSG00000104903_23 (sequence is synthesized)
cccctccccctccctccttcccatttgaggggtttcttgagctaagcaggtgggagcggggcacctagtcctcctccccactggctgccttctttcccacaggtgagtacccccacgtcg

SEQ ID NO: 145433 - DNA, 120 bp, Artificial Sequence
  ENSG00000104904_0 (sequence is synthesized)
attttgcgaacggcgagcagcggcggcggcgcggagagacgcagcggaggttttcctggtttcggaccccagcggccggatggtgaaatcctccctgcagcggatcctcaatagccactg

SEQ ID NO: 145434 - DNA, 120 bp, Artificial Sequence
  ENSG00000104904_1 (sequence is synthesized)
cttcgccagagagaaggaaggggataaacccagcgccaccatccacgccagccgcaccatgccgctcctaagcctgcacagccgcggcggcagcagcagtgagagttccagggtctccct

SEQ ID NO: 145435 - DNA, 120 bp, Artificial Sequence
  ENSG00000104904_2 (sequence is synthesized)
ccactgctgtagtaacccgggtccggggcctcggtggtgctccgatgcccctcacccacccctgaagatcccaggtgggcgagggaatagtcagagggatcacaatctttcagctaactt

SEQ ID NO: 145436 - DNA, 120 bp, Artificial Sequence
  ENSG00000104904_3 (sequence is synthesized)
attctactccgatgatcggctgaatgtaacagaggaactaacgtccaacgacaagacgaggattctcaacgtccagtccaggctcacagacgccaaacgcattaactggcgaacagtgct

SEQ ID NO: 145437 - DNA, 120 bp, Artificial Sequence
  ENSG00000104904_4 (sequence is synthesized)
cagttctcctggagttcgctgaggagcagctgcgagccgaccatgtcttcatttgcttccacaagaaccgcgaggacagagccgccttgctccgaaccttcagctttttgggctttgaga

SEQ ID NO: 145438 - DNA, 120 bp, Artificial Sequence
  ENSG00000104904_5 (sequence is synthesized)
ttgtgagaccggggcatccccttgtccccaagagacccgacgcttgcttcatggcctacacgttcgagagagagtcttcgggagaggaggaggagtagggccgcctcggggctgggcatc

SEQ ID NO: 145439 - DNA, 120 bp, Artificial Sequence
  ENSG00000104904_6 (sequence is synthesized)
cggcccctggggccaccccttgtcagccgggtgggtaggaaccgtagactcgctcatctcgcctgggtttgtccgcatgttgtaatcgtgcaaataaacgctcactccgaattagcggtg

SEQ ID NO: 145440 - DNA, 120 bp, Artificial Sequence
  ENSG00000104904_7 (sequence is synthesized)
tatttcttgaagtttaatattgtgtttgtgatactgaagtatttgctttaattctaaataaaaatttatattttacttttttattgctggtttaagatgattcagattatccttgtactt

SEQ ID NO: 145441 - DNA, 120 bp, Artificial Sequence
  ENSG00000104904_8 (sequence is synthesized)
tgaggagaagtttcttatttggagtcttttggaaacagtcttagtcttttaacttggaaagatgaggtattaatcccctccattgctctccaaaagccaataaagtgattacacccgatg

SEQ ID NO: 145442 - DNA, 120 bp, Artificial Sequence
  ENSG00000104904_9 (sequence is synthesized)
ctcgtgacctgcatcatcttcagttccagggtctccctccactgctgtagtaacccgggtccggggcctcggtggtgctcctgatgcccctcacccacccctgaagatcccaggtgggcg

SEQ ID NO: 145443 - DNA, 120 bp, Artificial Sequence
  ENSG00000104904_10 (sequence is synthesized)
gcctctacatcgagatcccgggcggcgcgctgcccgaggggagcaaggacaggtgaggggcaaggacaggcagggagtgctcacccaggggagcagggaccaggtgaggggcaaggacag

SEQ ID NO: 145444 - DNA, 120 bp, Artificial Sequence
  ENSG00000104904_11 (sequence is synthesized)
gcggggagtgctcacccaggggagcagggaccaggtgcgggttgctgcccaaggggtgcagggacagatgagggagggcactgccttcaggcagcacatatgggggccaccatcgctttg

SEQ ID NO: 145445 - DNA, 61 bp, Artificial Sequence
  ENSG00000104904_12 (sequence is synthesized)
ctgccttcaggcagcacatatgggggccaccatcgctttgttggtggggacagggtccccc

SEQ ID NO: 145446 - DNA, 120 bp, Artificial Sequence
  ENSG00000104904_13 (sequence is synthesized)
gcacttttcggtcccggccgtcgagcgtgcgctgcgggagcggggagcgctttgcggtggacgagctcccgcgggtccctgttgcctcgatgtggcccctgcacgcgacggacctcgtgg

SEQ ID NO: 145447 - DNA, 120 bp, Artificial Sequence
  ENSG00000104904_14 (sequence is synthesized)
gccccgtttttcgcccctgagcgagtcggtctggatggcccgggacgcgccgggcgaggccgcgcacgtagacggcacccagggcttctccgcgggggccgccggggagctgggggtggc

SEQ ID NO: 145448 - DNA, 120 bp, Artificial Sequence
  ENSG00000104904_15 (sequence is synthesized)
gcactccgacagcccggcagcgccctgggaagacccccgccgcttcccgggaagacgcgtcccgcttccgggggcgcgggtgccagctgcggttgtgggggagcccgcggggtctcggtc

SEQ ID NO: 145449 - DNA, 120 bp, Artificial Sequence
  ENSG00000104904_16 (sequence is synthesized)
tattctactccgtgagtatggggccgggcctgctggggctgctctggggccacaggtactttcttgtgcaccttgctgcccgtacctgtgattgaatgtaatcgtgggaaccctgagttt

SEQ ID NO: 145450 - DNA, 120 bp, Artificial Sequence
  ENSG00000104904_17 (sequence is synthesized)
cccaggcgttgcctgagctcaacacggcctaggcccaagctttagcgctgccgggttcttggagtcctgtggggtgagtcagggttctgaattgggctgcaccccctggacaggatgatc

SEQ ID NO: 145451 - DNA, 120 bp, Artificial Sequence
  ENSG00000104904_18 (sequence is synthesized)
agggtgcgtgggggtgcctgcgccgccccttcattctcagcccgcaggcacggtctccctgcgggggtggggggtgcgggcggggggttctggtcggcaggggttctgacggcttctccc

SEQ ID NO: 145452 - DNA, 120 bp, Artificial Sequence
  ENSG00000104904_19 (sequence is synthesized)
tcccgactgcgtcccccgaggtgggcgtcgctcagccccggatcgggaggttgggccgcggtgctggcggtgccgcggtttgggggccgtgcaaaatggaggcaactttggggcctgttt

SEQ ID NO: 145453 - DNA, 120 bp, Artificial Sequence
  ENSG00000104904_20 (sequence is synthesized)
accctgcgcagcaaatggctgctggcgctgccggctgcgcgattgtgaaaatctcccccggggcgcgaggccgcgtctgcctggatgacgcaaccgggagggcccgggcctggagcgggg

SEQ ID NO: 145454 - DNA, 120 bp, Artificial Sequence
  ENSG00000104904_21 (sequence is synthesized)
gcgggggggcgggcggccgggagccggagcggggcgcgtcctccatgaggtcaggctaggcccgcccggtcttcgcggggacaagcaagagtcccagattttggccgtagtgcagggtgg

SEQ ID NO: 145455 - DNA, 120 bp, Artificial Sequence
  ENSG00000104904_22 (sequence is synthesized)
aaaggggaagccgcgacagaactgaaaaggggaagcgctggctgtcttggtggccggggggtgaggctctgccccggcggggctgcgtgaggggaaggggccccccgccctgggaaggtt

SEQ ID NO: 145456 - DNA, 120 bp, Artificial Sequence
  ENSG00000104904_23 (sequence is synthesized)
gggctgtcctgggcggcgccgcccgaggagtcggggctcagtgactgctgcccttgtaggtgcttggggcaggcgttggagctgccttcgggaagcctcgggggtgtgggaccgggtggg

SEQ ID NO: 145457 - DNA, 120 bp, Artificial Sequence
  ENSG00000104904_24 (sequence is synthesized)
gggattacaggcgtgagctaccgctcccggcctggggtccctttttaaaaagtgcactccaaattcgtaccctgggattctaccctccaagggatgccaggcagtgtcagagcttttctg

SEQ ID NO: 145458 - DNA, 120 bp, Artificial Sequence
  ENSG00000104904_25 (sequence is synthesized)
gcagtgtcagagcttttctgtcatggggcatgcacgtgggtgggtgcagcggtgctgctcaacactgtggtgtcaggacggccccacccagaggacgatctgggccccagggggaccctg

SEQ ID NO: 145459 - DNA, 120 bp, Artificial Sequence
  ENSG00000104907_0 (sequence is synthesized)
gattcgcccacccactgtgccaacatggcggcgcccaggtcctaattcgggaaacgtgcaccttgactaattcggttttctgtggctacgagagcaggcttggcgggcggaggcgccagc

SEQ ID NO: 145460 - DNA, 120 bp, Artificial Sequence
  ENSG00000104907_1 (sequence is synthesized)
ggatgtctcatgcaaggatcgtctctgtggctaagcctcactttccgctccgcccgggtgctctctagagcccggtttttcgagtggcagtctccagggctgccgaatacagcagcgatg

SEQ ID NO: 145461 - DNA, 120 bp, Artificial Sequence
  ENSG00000104907_2 (sequence is synthesized)
gagaacggcaccgggccctacggagaagaacgtccacgtgaagtccaggagacgacagtcaccgagggggctgccaaaatcgcctttcccagtgccaacgaggtcttttataacccggtg

SEQ ID NO: 145462 - DNA, 120 bp, Artificial Sequence
  ENSG00000104907_3 (sequence is synthesized)
caggaattcaatcgggacctgacatgtgctgtgatcaccgagtttgctcgcattcagcttggggccaaaggaatccagatcaaggttccaggagagaaggacacgcaaaaagtggtcgtg

SEQ ID NO: 145463 - DNA, 120 bp, Artificial Sequence
  ENSG00000104907_4 (sequence is synthesized)
gacttgtcagagcaagaggaggaaaaggttgaactgaaagagagtgaaaacctggcctcaggagaccaacctcgcacagcggccgtgggggagatctgtgaggaaggcctgcatgtgctg

SEQ ID NO: 145464 - DNA, 120 bp, Artificial Sequence
  ENSG00000104907_5 (sequence is synthesized)
gaaggcctggcagcttcaggcctacgttccattcgatttgccctagaggtgcctgggctcagatctgtggttgcaaacgatgcctccacccgggctgtggatctcatacgccggaatgtc

SEQ ID NO: 145465 - DNA, 120 bp, Artificial Sequence
  ENSG00000104907_6 (sequence is synthesized)
cagctcaatgacgtggcccacctggtacagccgagccaagcagatgcccggatgctgatgtaccagcaccagagggtgtcggagaggtttgacgtcatcgatctggacccctatggcagc

SEQ ID NO: 145466 - DNA, 120 bp, Artificial Sequence
  ENSG00000104907_7 (sequence is synthesized)
ccagccaccttcctggatgcagctgtgcaggctgtgagtgaaggagggttgctgtgtgtgacctgcacagacatggcggtgttggcggggaacagcggggagacgtgctacagcaagtac

SEQ ID NO: 145467 - DNA, 120 bp, Artificial Sequence
  ENSG00000104907_8 (sequence is synthesized)
ccgctgctcagcatcagcgctgacttctacgtgcgtgtttttgtccgtgtcttcaccggccaggccaaggtcaaggcctcagccagcaagcaggcgctggtgttccagtgtgtgggctgc

SEQ ID NO: 145468 - DNA, 120 bp, Artificial Sequence
  ENSG00000104907_9 (sequence is synthesized)
ggggccttccaccttcagcgtctcggcaaagcgtcaggagtccccagcggccgggccaagttctctgcagcctgtggtccccctgtgacccccgagtgtgaacactgtgggcaacgacac

SEQ ID NO: 145469 - DNA, 120 bp, Artificial Sequence
  ENSG00000104907_10 (sequence is synthesized)
cagcttggtggccccatgtgggcagagcccatccatgacctggattttgtgggccgtgtcctggaggctgtgagcgctaaccccggccgcttccacacctcggagcggatccgaggggtc

SEQ ID NO: 145470 - DNA, 120 bp, Artificial Sequence
  ENSG00000104907_11 (sequence is synthesized)
ctgagcgtcatcactgaggagctcccggacgtgcctctgtactacaccctggaccagctgagcagcaccatccactgcaacacaccaagcctcctgcagttgcggtcggccctcctccac

SEQ ID NO: 145471 - DNA, 120 bp, Artificial Sequence
  ENSG00000104907_12 (sequence is synthesized)
gctgacttccgggtctcactctcccacgcctgtaagaacgctgtgaagacggatgcccctgcctctgccctctgggacatcatgcgttgctgggagaaggaatgtccggtgaaacgggag

SEQ ID NO: 145472 - DNA, 120 bp, Artificial Sequence
  ENSG00000104907_13 (sequence is synthesized)
cgactatcagagactagcccagcgttccgcattctcagtgtggagcccaggctgcaggccaacttcaccatccgggaagatgccaaccccagctcccgacagcgaggactcaagcgcttc

SEQ ID NO: 145473 - DNA, 120 bp, Artificial Sequence
  ENSG00000104907_14 (sequence is synthesized)
caggctaacccggaggccaactggggtccccggcctcgtgcccggccagggggcaaggcggccgacgaagctatggaggagagacgcaggctgcttcagaacaagcggaaggagccgccg

SEQ ID NO: 145474 - DNA, 120 bp, Artificial Sequence
  ENSG00000104907_15 (sequence is synthesized)
gaagatgtggcccagcgggctgcccggctcaagacatttccttgcaagaggtttaaggagggcacctgtcaacgcggggaccagtgctgctactcccacagccccccgacacccagggtt

SEQ ID NO: 145475 - DNA, 120 bp, Artificial Sequence
  ENSG00000104907_16 (sequence is synthesized)
tctgctgatgctgcccctgactgtccagagacctccaaccagaccccccctggacctggggctgccgctgggccaggcatagactgaaccaataaagagatgtcacgtcaccttctcccg

SEQ ID NO: 145476 - DNA, 120 bp, Artificial Sequence
  ENSG00000104907_17 (sequence is synthesized)
aggacgggctaggcagcgcggggagggattcggactcggggcgggcctgcacgagggcatcggctccacagggaccagtcatccccaaaacgaggggatatcagcttaccgaggccgcag

SEQ ID NO: 145477 - DNA, 120 bp, Artificial Sequence
  ENSG00000104907_18 (sequence is synthesized)
gttttcctagtccctacctcatagatatgtaggacatccccgggcccggaatgcggctctctgaccctctctgtgccctcccccgccccccgaaccaggcttggcgggcggaggcgccag

SEQ ID NO: 145478 - DNA, 120 bp, Artificial Sequence
  ENSG00000104907_19 (sequence is synthesized)
aaaagaaagaaagaaagaaaaggaggcacagagaaatgaagaaagctggtcaagatcatcacacagcaaggaagtgatggtaagaaaagtgaagccgcgggagtaacctgcccagagcat

SEQ ID NO: 145479 - DNA, 120 bp, Artificial Sequence
  ENSG00000104907_20 (sequence is synthesized)
gtgatgggactgagattcaaacccggtaaatccaactccagagcctgagtcattcctgcagggtgctctgaaataatgtgtatatagcacccagaacacagaagaggaccaataagtgtt

SEQ ID NO: 145480 - DNA, 120 bp, Artificial Sequence
  ENSG00000104907_21 (sequence is synthesized)
gggtttctccgcttaccgccccttttctgagccacaacttcctcatctgtgaaatgggactagggacgtgtcctctcccaggggatccactgtgattaacacccccggaacagcacgatc

SEQ ID NO: 145481 - DNA, 120 bp, Artificial Sequence
  ENSG00000104907_22 (sequence is synthesized)
cctgggctcttctgccgcccaaatccagaggggcttcagccacatagcaggccctgggttctgctccttcagcctttccgcagggatttcagggacgatattttggagattaaggggagg

SEQ ID NO: 145482 - DNA, 120 bp, Artificial Sequence
  ENSG00000104907_23 (sequence is synthesized)
tttctcagaggggaccttgttattctctgacttgtgcctctgggtggctgcagtcaaggttccaggagagaaggacacgcaaaaagtggtcgtggacttgtcagagcaagaggaggaaaa

SEQ ID NO: 145483 - DNA, 120 bp, Artificial Sequence
  ENSG00000104907_24 (sequence is synthesized)
acccactgtgccaacatggcggcgcccaggtcctaattcgggaaacgtgcaccttgactaattcggttttctgtggctacgagagcagagcccggtttttcgagtggcagtctccagggc

SEQ ID NO: 145484 - DNA, 120 bp, Artificial Sequence
  ENSG00000104907_25 (sequence is synthesized)
gctagtcctctgtctcccaccagatgtgctgtgatcaccgagtttgctcgcattcagcttggggccaaaggaatccagagtgagtggaggtccaggcttctggtgggcgggggtcacaca

SEQ ID NO: 145485 - DNA, 120 bp, Artificial Sequence
  ENSG00000104907_26 (sequence is synthesized)
agtggtggtaaggtgggggtggggctcagccagggaaagaaggggtaaagggcagatggggtcccacctactcctcccctcgcacaggggcaaggcggccgacgaagctatggaggagag

SEQ ID NO: 145486 - DNA, 120 bp, Artificial Sequence
  ENSG00000104907_27 (sequence is synthesized)
ggagggcaggtggtggtcacctggaggtcccttgggcctagtattccctaacctctgacctctgcccccaggagaaggaatgtccggtgaaacgggagcgactatcagagactagcccag

SEQ ID NO: 145487 - DNA, 120 bp, Artificial Sequence
  ENSG00000104915_0 (sequence is synthesized)
gcccacaaccaagatggctgaggagagggcggaagtgtccgcacgtcgggcctccgaggcttctctttctcccctggcggtccggctctcgatggtggcgtgacgggggcgggggtggcg

SEQ ID NO: 145488 - DNA, 120 bp, Artificial Sequence
  ENSG00000104915_1 (sequence is synthesized)
gcgcgttctcctcggttgggagggaaccagcccgcgaacccaggccgggaggggggttcggcctgggggggaagggactgacatgtctctcgaagaccccttttttgtagtccgaggcga

SEQ ID NO: 145489 - DNA, 120 bp, Artificial Sequence
  ENSG00000104915_2 (sequence is synthesized)
ggtgcagaaggcggtgaacacggcccgcgggctgtaccagcgctggtgcgagctcctgcaggaaagcgcggcggtcggacgcgaggagctggactggacgaccaatgagctgcggaatgg

SEQ ID NO: 145490 - DNA, 120 bp, Artificial Sequence
  ENSG00000104915_3 (sequence is synthesized)
cctgcgcagcatcgagtgggacctcgaggacctggaagagaccatcggtatagtggaagccaacccaggcaagttcaagctcccagccggggacctgcaggagagaaaggtgttcgtgga

SEQ ID NO: 145491 - DNA, 120 bp, Artificial Sequence
  ENSG00000104915_4 (sequence is synthesized)
gcggatgcgagaggcagtccaggaaatgaaggaccatatggtcagcccaacagccgtagcatttttggagaggaataacagagagatactcgcaggcaagccagctgcccagaagtcacc

SEQ ID NO: 145492 - DNA, 120 bp, Artificial Sequence
  ENSG00000104915_5 (sequence is synthesized)
agatggtgtctgggagcatccaggttctgaagcacatgtccggccgcgttggagaagagctggacgagcagggcatcatgctggatgccttcgcccaagagatggaccacacccagtccc

SEQ ID NO: 145493 - DNA, 120 bp, Artificial Sequence
  ENSG00000104915_6 (sequence is synthesized)
gcatggacggggtcctcaggaagttggccaaagtatcccacatgacgagtgaccgccgacagtggtgtgccatcgccgtgctagtgggggtgcttctcctcgttctcatcttactattct

SEQ ID NO: 145494 - DNA, 120 bp, Artificial Sequence
  ENSG00000104915_7 (sequence is synthesized)
ctctctgaccccagccctccctggcaggctggtcccttaagcctggggagccaccaagcactttggagctggcctcgccccctaggaggagagggtccctcctgggtagctggagagtag

SEQ ID NO: 145495 - DNA, 120 bp, Artificial Sequence
  ENSG00000104915_8 (sequence is synthesized)
agggtcccgcctggggagctgtccccatggctctcccctagagccagtgggacccttcaggaccctgggctggaaccaccaccactggtcctgtctcaagtgcacttagggggtggtgga

SEQ ID NO: 145496 - DNA, 120 bp, Artificial Sequence
  ENSG00000104915_9 (sequence is synthesized)
ggcagggacacctgagacacacctgtctccatttccagttccaggaccccaaagccatttgcccctgtgccttatacacgtgccaacctggaaataaaatgtcagccttttttatacgta

SEQ ID NO: 145497 - DNA, 120 bp, Artificial Sequence
  ENSG00000104915_10 (sequence is synthesized)
cggccccagcgtgcccggcgggctgggcaaggccgtcggggtgcagagtgggaggcgcacgcaggggtatataggggtctccggagtcccccatgcgtttgggtttgcagtcgggggcag

SEQ ID NO: 145498 - DNA, 120 bp, Artificial Sequence
  ENSG00000104915_11 (sequence is synthesized)
gaggacctggaagagaccatcgatatcctggggctttgtggcagagggtggcatgggagagcccattgcggtggcagcccaccttcgggtagggctggacccctagggacggggatgata

SEQ ID NO: 145499 - DNA, 120 bp, Artificial Sequence
  ENSG00000104915_12 (sequence is synthesized)
gggtcctcaggaagttggccaaagtatcccacatgacgagtgttccaggaccccaaagccatttgcccctgtgccttatacacgtgccaacctggaaataaaatgtcagccttttttata

SEQ ID NO: 145500 - DNA, 120 bp, Artificial Sequence
  ENSG00000104915_13 (sequence is synthesized)
gaagttggccaaagtatcccacatgacgagtggtgagtcccctcaggggaggggtcagtcctggtgggggcaggttgtaggtggtaccctctccccgtgacccctgaccttctcgttccc

SEQ ID NO: 145501 - DNA, 120 bp, Artificial Sequence
  ENSG00000104915_14 (sequence is synthesized)
acctggaagagaccatcggtatagtggaagccaacccaggcaagccagctgcccagaagtcacccagcgacctgctggatgccagcgcagtctcggccacatctcgctacatcgaggagc

SEQ ID NO: 145502 - DNA, 120 bp, Artificial Sequence
  ENSG00000104918_0 (sequence is synthesized)
aagaggcctcaaagaaagagctgcggtgcaggaattcgtgtgccggatttggttagctgagcccaccgagaggcgcctgcaggatgaaagctctctgtctcctcctcctccctgtcctgg

SEQ ID NO: 145503 - DNA, 120 bp, Artificial Sequence
  ENSG00000104918_1 (sequence is synthesized)
ggctgttggtgtctagcaagaccctgtgctccatggaagaagccatcaatgagaggatccaggaggtcgccggctccctaatatttagggcaataagcagcattggcctggagtgccaga

SEQ ID NO: 145504 - DNA, 120 bp, Artificial Sequence
  ENSG00000104918_2 (sequence is synthesized)
gaggcttcgccgtcaccggctgcacttgtggctccgcctgtggctcgtgggatgtgcgcgccgagaccacatgtcactgccagtgcgcgggcatggactggaccggagcgcgctgctgtc

SEQ ID NO: 145505 - DNA, 120 bp, Artificial Sequence
  ENSG00000104918_3 (sequence is synthesized)
gtgtgcagccctgaggtcgcgcgcagcgcgtgcacagcgcgggcggaggcggctccaggtccggaggggttgcgggggagctggaaataaacctggagatgatgatgatgatgatgatga

SEQ ID NO: 145506 - DNA, 120 bp, Artificial Sequence
  ENSG00000104921_0 (sequence is synthesized)
agtggctctactttcagaagaaagtgtctctcttcctgcttaaacctctgtctctgacggtccctgccaatcgctctggtcgaccccaacacactaggaggacagacacaggctccaaac

SEQ ID NO: 145507 - DNA, 120 bp, Artificial Sequence
  ENSG00000104921_1 (sequence is synthesized)
tccactaaccagagctgtgattgtgcccgctgagtggactgcgttgtcagggagtgagtgctccatcatcgggagaatccaagcaggaccgccatggaggaaggtcaatattcagagatc

SEQ ID NO: 145508 - DNA, 120 bp, Artificial Sequence
  ENSG00000104921_2 (sequence is synthesized)
gaggagcttcccaggaggcggtgttgcaggcgtgggactcagatcgtgctgctggggctggtgaccgccgctctgtgggctgggctgctgactctgcttctcctgtggcactgggacacc

SEQ ID NO: 145509 - DNA, 120 bp, Artificial Sequence
  ENSG00000104921_3 (sequence is synthesized)
acacagagtctaaaacagctggaagagagggctgcccggaacgtctctcaagtttccaagaacttggaaagccaccacggtgaccagatggcgcagaaatcccagtccacgcagatttca

SEQ ID NO: 145510 - DNA, 120 bp, Artificial Sequence
  ENSG00000104921_4 (sequence is synthesized)
caggaactggaggaacttcgagctgaacagcagagattgaaatctcaggacttggagctgtcctggaacctgaacgggcttcaagcagatctgagcagcttcaagtcccaggaattgaac

SEQ ID NO: 145511 - DNA, 120 bp, Artificial Sequence
  ENSG00000104921_5 (sequence is synthesized)
gagaggaacgaagcttcagatttgctggaaagactccgggaggaggtgacaaagctaaggatggagttgcaggtgtccagcggctttgtgtgcaacacgtgccctgaaaagtggatcaat

SEQ ID NO: 145512 - DNA, 120 bp, Artificial Sequence
  ENSG00000104921_6 (sequence is synthesized)
aagcagtgggtccacgcccggtatgcctgtgacgacatggaagggcagctggtcagcatccacagcccggaggagcaggacttcctgaccaagcatgccagccacaccggctcctggatt

SEQ ID NO: 145513 - DNA, 120 bp, Artificial Sequence
  ENSG00000104921_7 (sequence is synthesized)
ggccttcggaacttggacctgaagggggagtttatctgggtggatgggagccacgtggactacagcaactgggctccaggggagcccaccagccggagccagggcgaggactgcgtgatg

SEQ ID NO: 145514 - DNA, 120 bp, Artificial Sequence
  ENSG00000104921_8 (sequence is synthesized)
atgcggggctccggtcgctggaacgacgccttctgcgaccgtaagctgggcgcctgggtgtgcgaccggctggccacatgcacgccgccagccagcgaaggttccgcggagtccatggga

SEQ ID NO: 145515 - DNA, 120 bp, Artificial Sequence
  ENSG00000104921_9 (sequence is synthesized)
cctgattcaagaccagaccctgacggccgcctgcccaccccctctgcccctctccactcttgagcatggatacagccaggcccagagcaagaccctgaagacccccaaccacggcctaaa

SEQ ID NO: 145516 - DNA, 120 bp, Artificial Sequence
  ENSG00000104921_10 (sequence is synthesized)
agcctctttgtggctgaaaggtccctgtgacattttctgccacccaaacggaggcagctgacacatctcccgctcctctatggcccctgccttcccaggagtacaccccaacagcaccct

SEQ ID NO: 145517 - DNA, 120 bp, Artificial Sequence
  ENSG00000104921_11 (sequence is synthesized)
ctccagatgggagtgcccccaacagcaccctctccagatgagagtacaccccaacagcaccctctccagatgagagtacaccccaacagcaccctctccagatgagagtacaccccaaca

SEQ ID NO: 145518 - DNA, 120 bp, Artificial Sequence
  ENSG00000104921_12 (sequence is synthesized)
gcaccctctccagatgcagccccatctcctcagcaccccaggacctgagtatccccagctcaggtggtgagtcctcctgtccagcctgcatcaataaaatggggcagtgatggcctccca

SEQ ID NO: 145519 - DNA, 120 bp, Artificial Sequence
  ENSG00000104921_13 (sequence is synthesized)
agaagaaagtgtctctcttcctgcttaaacctctgtctctgacggtccctgccaatcgctctggtcgaccccaacacactaggaggacagacacaggctccaaactccactaagtgacca

SEQ ID NO: 145520 - DNA, 120 bp, Artificial Sequence
  ENSG00000104921_14 (sequence is synthesized)
ccttcacccccatctcagagctgggggagcccaacgcatcctctcaaaacccaattttcccatcctgcctcccatcttgccactgccagccctttcccatcccccaccctccagagcccc

SEQ ID NO: 145521 - DNA, 120 bp, Artificial Sequence
  ENSG00000104921_15 (sequence is synthesized)
tcaccccacacccagcatccctgtcctccacactttcagcacctccatggcttatacccaagacctccatccccagctgggaggtggggtgcaggcaggtgggggcactgacaatccccc

SEQ ID NO: 145522 - DNA, 120 bp, Artificial Sequence
  ENSG00000104921_16 (sequence is synthesized)
ggaacttcgagctgaacagcagagattgaaatctcagggtgagagactgggatcggggttatgaagccagattgggtgggaaggagggagtgtctcagagccctggggaaccacgaggct

SEQ ID NO: 145523 - DNA, 120 bp, Artificial Sequence
  ENSG00000104921_17 (sequence is synthesized)
ggggggccaggcttggggggcaccctcggcctgtacacatcctccctgagaccagccctgcgctcctgcacacaccagacttggagctgtcctggaacctgaacgggcttcaagcagatc

SEQ ID NO: 145524 - DNA, 120 bp, Artificial Sequence
  ENSG00000104921_18 (sequence is synthesized)
atgggtgcacctgctgtgtagctcaagtgtgatgggctctggagtgccccacttctgatctcaggctgctatctctccacaccagctgtgtctccctgctaaccacgctagtgagtccag

SEQ ID NO: 145525 - DNA, 120 bp, Artificial Sequence
  ENSG00000104921_19 (sequence is synthesized)
attgtagactaaacaaaatcagcaaatggcccctgagtgccaccaagtcccagatgctatcctgtgctggtaactaggatttgatggctcaccctaaccatcattaaatcccaaatcagc

SEQ ID NO: 145526 - DNA, 120 bp, Artificial Sequence
  ENSG00000104936_0 (sequence is synthesized)
gggacagccagggacaggcagacatgcagccagggctccagggcctggacaggggctgccaggccctgtgacaggaggaccccgagcccccggcccggggaggggccatggtgctgcctg

SEQ ID NO: 145527 - DNA, 120 bp, Artificial Sequence
  ENSG00000104936_1 (sequence is synthesized)
tccaacatgtcagccgaggtgcggctgaggcggctccagcagctggtgttggacccgggcttcctggggctggagcccctgctcgaccttctcctgggcgtccaccaggagctgggcgcc

SEQ ID NO: 145528 - DNA, 120 bp, Artificial Sequence
  ENSG00000104936_2 (sequence is synthesized)
tccgaactggcccaggacaagtacgtggccgacttcttgcagtgggcggagcccatcgtggtgaggcttaaggaggtccgactgcagagggacgacttcgagattctgaaggtgatcgga

SEQ ID NO: 145529 - DNA, 120 bp, Artificial Sequence
  ENSG00000104936_3 (sequence is synthesized)
cgcggggcgttcagcgaggtagcggtagtgaagatgaagcagacgggccaggtgtatgccatgaagatcatgaacaagtgggacatgctgaagaggggcgaggtgtcgtgcttccgtgag

SEQ ID NO: 145530 - DNA, 120 bp, Artificial Sequence
  ENSG00000104936_4 (sequence is synthesized)
gagagggacgtgttggtgaatggggaccggcggtggatcacgcagctgcacttcgccttccaggatgagaactacctgtacctggtcatggagtattacgtgggcggggacctgctgaca

SEQ ID NO: 145531 - DNA, 120 bp, Artificial Sequence
  ENSG00000104936_5 (sequence is synthesized)
ctgctgagcaagtttggggagcggattccggccgagatggcgcgcttctacctggcggagattgtcatggccatagactcggtgcaccggcttggctacgtgcacagggacatcaaaccc

SEQ ID NO: 145532 - DNA, 120 bp, Artificial Sequence
  ENSG00000104936_6 (sequence is synthesized)
gacaacatcctgctggaccgctgtggccacatccgcctggccgacttcggctcttgcctcaagctgcgggcagatggaacggtgcggtcgctggtggctgtgggcaccccagactacctg

SEQ ID NO: 145533 - DNA, 120 bp, Artificial Sequence
  ENSG00000104936_7 (sequence is synthesized)
tcccccgagatcctgcaggctgtgggcggtgggcctgggacaggcagctacgggcccgagtgtgactggtgggcgctgggtgtattcgcctatgaaatgttctatgggcagacgcccttc

SEQ ID NO: 145534 - DNA, 120 bp, Artificial Sequence
  ENSG00000104936_8 (sequence is synthesized)
tacgcggattccacggcggagacctatggcaagatcgtccactacaaggagcacctctctctgccgctggtggacgaaggggtccctgaggaggctcgagacttcattcagcggttgctg

SEQ ID NO: 145535 - DNA, 120 bp, Artificial Sequence
  ENSG00000104936_9 (sequence is synthesized)
tgtcccccggagacacggctgggccggggtggagcaggcgacttccggacacatcccttcttctttggcctcgactgggatggtctccgggacagcgtgcccccctttacaccggatttc

SEQ ID NO: 145536 - DNA, 120 bp, Artificial Sequence
  ENSG00000104936_10 (sequence is synthesized)
gaaggtgccaccgacacatgcaacttcgacttggtggaggacgggctcactgccatggtgagcgggggcggggagacactgtcggacattcgggaaggtgcgccgctaggggtccacctg

SEQ ID NO: 145537 - DNA, 120 bp, Artificial Sequence
  ENSG00000104936_11 (sequence is synthesized)
atggccctcagggacagtgaggtcccaggccccacacccatggaactggaggccgagcagctgcttgagccacacgtgcaagcgcccagcctggagccctcggtgtccccacaggatgaa

SEQ ID NO: 145538 - DNA, 120 bp, Artificial Sequence
  ENSG00000104936_12 (sequence is synthesized)
acagctgaagtggcagttccagcggctgtccctgcggcagaggctgaggccgaggtgacgctgcgggagctccaggaagccctggaggaggaggtgctcacccggcagagcctgagccgg

SEQ ID NO: 145539 - DNA, 120 bp, Artificial Sequence
  ENSG00000104936_13 (sequence is synthesized)
gagatggaggccatccgcacggacaaccagaacttcgccagtcaactacgcgaggcagaggctcggaaccgggacctagaggcacacgtccggcagttgcaggagcggatggagttgctg

SEQ ID NO: 145540 - DNA, 120 bp, Artificial Sequence
  ENSG00000104936_14 (sequence is synthesized)
caggcagagggagccacagctgtcacgggggtccccagtccccgggccacggatccaccttcccatctagatggccccccggccgtggctgtgggccagtgcccgctggtggggccaggc

SEQ ID NO: 145541 - DNA, 120 bp, Artificial Sequence
  ENSG00000104936_15 (sequence is synthesized)
cccatgcaccgccgccacctgctgctccctgccagggtccctaggcctggcctatcggaggcgctttccctgctcctgttcgccgttgttctgtctcgtgccgccgccctgggctgcatt

SEQ ID NO: 145542 - DNA, 120 bp, Artificial Sequence
  ENSG00000104936_16 (sequence is synthesized)
gggttggtggcccacgccggccaactcaccgcagtctggcgccgcccaggagccgcccgcgctccctgaaccctagaactgtcttcgactccggggccccgttggaagactgagtgcccg

SEQ ID NO: 145543 - DNA, 120 bp, Artificial Sequence
  ENSG00000104936_17 (sequence is synthesized)
gggcacggcacagaagccgcgcccaccgcctgccagttcacaaccgctccgagcgtgggtctccgcccagctccagtcctgtgatccgggcccgccccctagcggccggggagggagggg

SEQ ID NO: 145544 - DNA, 89 bp, Artificial Sequence
  ENSG00000104936_18 (sequence is synthesized)
gtgatccgggcccgccccctagcggccggggagggaggggccgggtccgcggccggcgaacggggctcgaagggtccttgtagccggga

SEQ ID NO: 145545 - DNA, 120 bp, Artificial Sequence
  ENSG00000104936_19 (sequence is synthesized)
acagaccatttctttctttcggccaggctgaggccctgacgtggatgggcaaactgcaggcctgggaaggcagcaagccgggccgtccgtgttccatcctccacgcacccccacctatcg

SEQ ID NO: 145546 - DNA, 120 bp, Artificial Sequence
  ENSG00000104936_20 (sequence is synthesized)
ttggttcgcaaagtgcaaagctttcttgtgcatgacgccctgctctggggagcgtctggcgcgatctctgcctgcttactcgggaaatttgcttttgccaaacccgctttttcggggatc

SEQ ID NO: 145547 - DNA, 120 bp, Artificial Sequence
  ENSG00000104936_21 (sequence is synthesized)
ccgcgcccccctcctcacttgcgctgctctcggagccccagccggctccgcccgcttcggcggtttggatatttattgacctcgtcctccgactcgctgacaggctacaggacccccaac

SEQ ID NO: 145548 - DNA, 120 bp, Artificial Sequence
  ENSG00000104936_22 (sequence is synthesized)
aaccccaatccacgttttggatgcactgagaccccgacattcctcggtatttattgtctgtccccacctaggacccccacccccgaccctcgcgaataaaaggccctccatctgcccaaa

SEQ ID NO: 145549 - DNA, 120 bp, Artificial Sequence
  ENSG00000104936_23 (sequence is synthesized)
gccacaagcctccaccccagctggtcccccacccaggctgcccagtttaacattcctagtcataggaccttgacttctgagaggcctgattgtcatctgtaaataaggggtaggactaaa

SEQ ID NO: 145550 - DNA, 120 bp, Artificial Sequence
  ENSG00000104936_24 (sequence is synthesized)
gcactcctcctggaggactgagagatgggctggaccggagcacttgagtctgggatatgtgaccatgctacctttgtctccctgtcctgttccttcccccagccccaaatccagggtttt

SEQ ID NO: 145551 - DNA, 120 bp, Artificial Sequence
  ENSG00000104936_25 (sequence is synthesized)
ccaaagtgtggttcaagaaccacctgcatctgaatctagaggtactggatacaaccccacgtctgggccgttacccaggacattctacatgagaacgtgggggtggggccctggctgcac

SEQ ID NO: 145552 - DNA, 120 bp, Artificial Sequence
  ENSG00000104936_26 (sequence is synthesized)
ctgaactgtcacctggagtcagggtggaaggtggaagaactgggtcttatttccttctccccttgttctttagggtctgtccttctgcagactccgttaccccaccctaaccatcctgca

SEQ ID NO: 145553 - DNA, 120 bp, Artificial Sequence
  ENSG00000104936_27 (sequence is synthesized)
cacccttggagccctctgggccaatgccctgtcccgcaaagggcttctcaggcatctcacctctatgggagggcatttttggcccccagaaccttacacggtgtttatgtggggaagccc

SEQ ID NO: 145554 - DNA, 120 bp, Artificial Sequence
  ENSG00000104936_28 (sequence is synthesized)
ctgggaagcagacagtcctagggtgaagctgagaggcagagagaaggggagacagacagagggtggggctttcccccttgtctccagtgccctttctggtgaccctcggttcttttcccc

SEQ ID NO: 145555 - DNA, 120 bp, Artificial Sequence
  ENSG00000104936_29 (sequence is synthesized)
ggaaccccccggaacccctctctttcctccagaacccactgtctcctctccttccctcccctcccatacccatccctctctccatcctgcctccacttcttccacccccgggagtccagg

SEQ ID NO: 145556 - DNA, 120 bp, Artificial Sequence
  ENSG00000104936_30 (sequence is synthesized)
tgccaccgacacatgcaacttcgacttggtggaggacgggctcactgccatggagacactgtcggacattcgggaaggtgcgccgctaggggtccacctgccttttgtgggctactccta

SEQ ID NO: 145557 - DNA, 120 bp, Artificial Sequence
  ENSG00000104936_31 (sequence is synthesized)
ctggagtggggagctatctgagctgagacttggagggatgagaagcaggagaggactcctcctcccttaggccgtctctcttcaccgtgtaacaagctgtcatggcatgcttgctcggct

SEQ ID NO: 145558 - DNA, 89 bp, Artificial Sequence
  ENSG00000104936_32 (sequence is synthesized)
ctcatccagttgcagtctagagaattagagaattatggagagtgtggcaggtgccctgaagggaagcaacaggatacaagaaaaaatga

SEQ ID NO: 145559 - DNA, 86 bp, Artificial Sequence
  ENSG00000104936_33 (sequence is synthesized)
agacactgtcggacattcgggaaggtgcgccgctaggggtccacctgccttttgtgggctactcctactcctgcatggccctcagg

SEQ ID NO: 145560 - DNA, 120 bp, Artificial Sequence
  ENSG00000104936_34 (sequence is synthesized)
ggggagtggttggaaggagggcccagagctggtgggcccagaggggtgggcccaagcctcgctctgctccttttggtccaggtgcggtcgctggtggctgtgggcaccccagactacctg

SEQ ID NO: 145561 - DNA, 120 bp, Artificial Sequence
  ENSG00000104936_35 (sequence is synthesized)
ggatccaccttcccatgtaagacccctctctttcccctgcctcagacctgctgcccattctgcagatcccctccctggctcctggtctccccgtccagatatagggctcaccctacgtct

SEQ ID NO: 145562 - DNA, 120 bp, Artificial Sequence
  ENSG00000104936_36 (sequence is synthesized)
ttgcgactttagagggcagaagccctttattcagccccagatctccctccgttcaggcctcaccagattccctccgggatctccctagataacctccccaacctcgattcccctcgctgt

SEQ ID NO: 145563 - DNA, 120 bp, Artificial Sequence
  ENSG00000104936_37 (sequence is synthesized)
ctctcgccccaccgctgagggctgggctgggctccgatcgggtcacctgtcccttctctctccagctagatggccccccggccgtggctgtgggccagtgcccgctggtggggccaggcc

SEQ ID NO: 145564 - DNA, 120 bp, Artificial Sequence
  ENSG00000104936_38 (sequence is synthesized)
ccatgcaccgccgccacctgctgctccctgccagggtacgtccggctgcccacgcccccctccgccgtcgcgccccgcgctccacccgccccttgccacccgcttagctgcgcatttgcg

SEQ ID NO: 145565 - DNA, 120 bp, Artificial Sequence
  ENSG00000104936_39 (sequence is synthesized)
gggctgggcccacggcaggagggcggatcttcgggcagccaatcaacacaggccgctaggaagcagccaatgacgagttcggacgggattcgaggcgtgcgagtggactaacaacagctg

SEQ ID NO: 145566 - DNA, 120 bp, Artificial Sequence
  ENSG00000104936_40 (sequence is synthesized)
ctgtgtgcggtaagagggtgtgtcaggtggatgaggggccttccctatctgagacggggatggtgtccttcactgcccgtttctggggtgatctgggggactcttataaagatgtctctg

SEQ ID NO: 145567 - DNA, 120 bp, Artificial Sequence
  ENSG00000104936_41 (sequence is synthesized)
ttgcggggggtctcttacctggaatgggataggtcttcaggaattctaacggggccactgcctagggaaggagtgtctgggacctattctctgggtgttgggtggcctctgggttctctt

SEQ ID NO: 145568 - DNA, 80 bp, Artificial Sequence
  ENSG00000104936_42 (sequence is synthesized)
atcaaagaaaaagaaaaaagaaaaaatgctggaggggccactttagataagccctgagttggggctggtttggggggaac

SEQ ID NO: 145569 - DNA, 120 bp, Artificial Sequence
  ENSG00000104936_43 (sequence is synthesized)
ctttagataagccctgagttggggctggtttggggggaacatgtaagccaagatcaaaaagcagtgaggggcccgccctgacgactgctgctcacatctgtgtgtcttgcgcaggagaca

SEQ ID NO: 145570 - DNA, 120 bp, Artificial Sequence
  ENSG00000104936_44 (sequence is synthesized)
ctggtgagctccgggccggggtgactaggaagagggacaagagcccgtgctgtcactggacgaggaggtggggagaggaagctctaggattgggggtgctgcccggaaacgtctgtggga

SEQ ID NO: 145571 - DNA, 120 bp, Artificial Sequence
  ENSG00000104936_45 (sequence is synthesized)
cggcagatctctatggttatctctgggctggggctgcaggtctctgcccaaggatggggtgtctctgggaggggttgtcccagccatccgtgatggatcagggcctcaggggactaccaa

SEQ ID NO: 145572 - DNA, 120 bp, Artificial Sequence
  ENSG00000104938_0 (sequence is synthesized)
aacatctggggacagcgggaaaacatgagtgactccaaggaaccaagggtgcagcagctgggcctcctggaagaagatccaacaaccagtggcatcagactttttccaagagactttcaa

SEQ ID NO: 145573 - DNA, 120 bp, Artificial Sequence
  ENSG00000104938_1 (sequence is synthesized)
ttccagcagatacatggccacaagagctctacagggtgtcttggccatggcgccctggtgctgcaactcctctccttcatgctcttggctggggtcctggtggccatccttgtccaagtg

SEQ ID NO: 145574 - DNA, 120 bp, Artificial Sequence
  ENSG00000104938_2 (sequence is synthesized)
tccaaggtccccagctccctaagtcaggaacaatccgagcaagacgcaatctaccagaacctgacccagcttaaagctgcagtgggtgagctctcagagaaatccaagctgcaggagatc

SEQ ID NO: 145575 - DNA, 120 bp, Artificial Sequence
  ENSG00000104938_3 (sequence is synthesized)
taccaggagctgacccagctgaaggctgcagtgggtgagttgccagagaaatccaagctgcaggagatctaccaggagctgacccggctgaaggctgcagtgggtgagttgccagagaaa

SEQ ID NO: 145576 - DNA, 120 bp, Artificial Sequence
  ENSG00000104938_4 (sequence is synthesized)
tccaagctgcaggagatctaccaggagctgacccggctgaaggctgcagtgggtgagttgccagagaaatccaagctgcaggagatctaccaggagctgacccggctgaaggctgcagtg

SEQ ID NO: 145577 - DNA, 120 bp, Artificial Sequence
  ENSG00000104938_5 (sequence is synthesized)
ggtgagttgccagagaaatccaagctgcaggagatctaccaggagctgacggagctgaaggctgcagtgggtgagttgccagagaaatccaagctgcaggagatctaccaggagctgacc

SEQ ID NO: 145578 - DNA, 120 bp, Artificial Sequence
  ENSG00000104938_6 (sequence is synthesized)
cagctgaaggctgcagtgggtgagttgccagaccagtccaagcagcagcaaatctatcaagaactgaccgatttgaagactgcatttgaacgcctgtgccgccactgtcccaaggactgg

SEQ ID NO: 145579 - DNA, 120 bp, Artificial Sequence
  ENSG00000104938_7 (sequence is synthesized)
gcggaactggcacgactccgtcaccgcctgccaggaagtgagggcccagctcgtcgtaatcaaaactgctgaggagcagaacttcctacagctgcagacttccaggagtaaccgcttctc

SEQ ID NO: 145580 - DNA, 120 bp, Artificial Sequence
  ENSG00000104938_8 (sequence is synthesized)
ctggatgggactttcagacctaaatcaggaaggcacgtggcaatgggtggacggctcacctctgtcacccagcttccagcggtactggaacagtggagaacccaacaatagcgggaatga

SEQ ID NO: 145581 - DNA, 120 bp, Artificial Sequence
  ENSG00000104938_9 (sequence is synthesized)
agactgtgcggaatttagtggcagtggctggaacgacaatcgatgtgacgttgacaattactggatctgcaaaaagcccgcagcctgcttcagagacgaatagttgtttccctgctagcc

SEQ ID NO: 145582 - DNA, 120 bp, Artificial Sequence
  ENSG00000104938_10 (sequence is synthesized)
tcagcctccattgtggtatagcagaacttcacccacttgtaagccagcgcttcttctctccatccttggaccttcacaaatgccctgagacggttctctgttcgatttttcatcccctat

SEQ ID NO: 145583 - DNA, 120 bp, Artificial Sequence
  ENSG00000104938_11 (sequence is synthesized)
gaacctgggtcttattctgtccttctgatgcctccaagtttccctggtgtagagcttgtgttcttggcccatccttggagctttataagtgacctgagtgggatgcatttagggggcggg

SEQ ID NO: 145584 - DNA, 120 bp, Artificial Sequence
  ENSG00000104938_12 (sequence is synthesized)
cttggtatgttgtatgaatccactctctgttccttttggagattagactatttggattcatgtgtagctgccctgtcccctggggctttatctcatccatgcaaactaccatctgctcaa

SEQ ID NO: 145585 - DNA, 120 bp, Artificial Sequence
  ENSG00000104938_13 (sequence is synthesized)
cttccagctacaccccgtgcacccttttgactggggacttgctggttgaaggagctcatcttgcaggctggaagcaccagggaattaattcccccagtcaaccaatggcatccagagagg

SEQ ID NO: 145586 - DNA, 120 bp, Artificial Sequence
  ENSG00000104938_14 (sequence is synthesized)
gcatggaggctccatacaacctcttccacccccacatctttctttgtcctatacatgtcttccatttggctgtttctgagttgtagcctttataataaagtggtaaatgttgtaactgca

SEQ ID NO: 145587 - DNA, 120 bp, Artificial Sequence
  ENSG00000104938_15 (sequence is synthesized)
ctgagatggtctctgtgtgatgtgactttacttgagttaccaaccctgcctgagcctcagtttcctcccctgtgaaatgagaacacggggtaactgcgatcattgcacttggtgttcaca

SEQ ID NO: 145588 - DNA, 120 bp, Artificial Sequence
  ENSG00000104938_16 (sequence is synthesized)
gtgggccaggcacacagtagacactcagttcaaccaatccgctgccttctgttctgagctctaaagctgctaattctcccagtctggaagagatggagccaggactcctgggttctcctg

SEQ ID NO: 145589 - DNA, 120 bp, Artificial Sequence
  ENSG00000104938_17 (sequence is synthesized)
gggatcagggagagtcttgggaagtagggagaggaatggtctctccccattccaagcggtccacccaacatggacagtcaaggaagggccctgattttcaagggcttgaaggctgggcag

SEQ ID NO: 145590 - DNA, 120 bp, Artificial Sequence
  ENSG00000104938_18 (sequence is synthesized)
atatgggaatatggacaacctaatctgagcccagccctgaccagcctcccccaacagaacgcctgtgccgccactgtcccaaggactggacattcttccaaggaaactgttacttcatgt

SEQ ID NO: 145591 - DNA, 120 bp, Artificial Sequence
  ENSG00000104938_19 (sequence is synthesized)
atcaaaactgctgaggagcaggtacacgtggtgggggtcctcgtcctggcctggggcatggcttctggccaactggggaggaggtgctcagagaggattttgcagaagaggggctttgct

SEQ ID NO: 145592 - DNA, 120 bp, Artificial Sequence
  ENSG00000104938_20 (sequence is synthesized)
ctatttggaaagatgggaagagaaggatatgaatgaaggggtcccaggtacccttcaagcaaatacaaaccagatctgaacacatgtgaatatttgggggaaacgtcaaatgtaagcaaa

SEQ ID NO: 145593 - DNA, 120 bp, Artificial Sequence
  ENSG00000104938_21 (sequence is synthesized)
tcaagctgtgatgtgctgtcactcagtgcagagctgaaaggagatgtgctggaccagcaattagtagtgggtccaatgtggctccagtacatgaaacccagtcaggagtaaattcatgtg

SEQ ID NO: 145594 - DNA, 120 bp, Artificial Sequence
  ENSG00000104938_22 (sequence is synthesized)
gacatgcaaaatagataaacatgcagcattcacaggagcacatgaggagaggccagctgtgcatgcgtgcctgcatgtcaggacacacatgccatggggatacagatgtgagaggggctc

SEQ ID NO: 145595 - DNA, 120 bp, Artificial Sequence
  ENSG00000104938_23 (sequence is synthesized)
agacatgaggaggctcaggacctgctatatcagaaaactgcaggttaacttgaaagcagaactttctgccaagagacggggaggtggaacctggaaaatgggaagcagagctccctcctg

SEQ ID NO: 145596 - DNA, 120 bp, Artificial Sequence
  ENSG00000104938_24 (sequence is synthesized)
actcctcctctaccctccagaacttcctacagctgcagacttccaggagtaaccgcttctcctggatgggactttcagacctaaatcaggaaggcacgtggcaatgggtggacggctcac

SEQ ID NO: 145597 - DNA, 120 bp, Artificial Sequence
  ENSG00000104938_25 (sequence is synthesized)
ctctgtcacccaggtagattctgggagaaagggacactgtatccagtcgggctgggttcctgcaactctgacttgagctttccctgggggtcccccccaacctccctgaccccataggac

SEQ ID NO: 145598 - DNA, 120 bp, Artificial Sequence
  ENSG00000104938_26 (sequence is synthesized)
taagagtctggggttttactgagttgaggaaggtggtcttcatacccacctccagacaggatgaaaggtgccaagaattccaccagcagagctgcaggaggagcttgccctgtgggtagg

SEQ ID NO: 145599 - DNA, 120 bp, Artificial Sequence
  ENSG00000104938_27 (sequence is synthesized)
tgtgttaaaatacagtgtattaataggaagtctgaagtctagtaaggccaccagctcaggagacaattgccatttacacaaagtgagtagcttatcctacccacaggttcctagagggcg

SEQ ID NO: 145600 - DNA, 120 bp, Artificial Sequence
  ENSG00000104938_28 (sequence is synthesized)
cacatttcacagcagggggccgctggggaagcagcagggtctgtcgtgagggaaagtcatggaggggactgtgggccagagcttttattatggtttgcatggggagaaaagggcaaggcc

SEQ ID NO: 145601 - DNA, 120 bp, Artificial Sequence
  ENSG00000104938_29 (sequence is synthesized)
aggcaagcaggcttcagatgggcagatatgaagcattttgtgggctctggggcatagaggctgcctagcggcctgacacctggccttggggtgattagggcagaaagatagtggcttgga

SEQ ID NO: 145602 - DNA, 120 bp, Artificial Sequence
  ENSG00000104938_30 (sequence is synthesized)
aagatagtggcttggagtgcaagagcccaataaggcaggtggttggcagtacagaccccagactggttggtttgtattttaaaatcacactctcggccaggcgcggtggctcacgcctgt

SEQ ID NO: 145603 - DNA, 81 bp, Artificial Sequence
  ENSG00000104938_31 (sequence is synthesized)
gcgcggtggctcacgcctgtaattccggcactttgggaggtcaaggcgggtagatcacgaggtcaagagatcaaaaccatg

SEQ ID NO: 145604 - DNA, 120 bp, Artificial Sequence
  ENSG00000104941_0 (sequence is synthesized)
gctccccgcgccctccacgggtaacggccccctctctcggtgctcagaaaccggcggtgtcgacaggtggctctcgcttggcctccttgtctgcaagcctttctcctagagatctgtgcc

SEQ ID NO: 145605 - DNA, 120 bp, Artificial Sequence
  ENSG00000104941_1 (sequence is synthesized)
tcctggcgaaccatgggagacctgccgccctaccctgagcgccctgcccagcagcctccgggccggaggacttctcaggcctcccagaggcggcacagtcgggaccaagctcaggccctg

SEQ ID NO: 145606 - DNA, 120 bp, Artificial Sequence
  ENSG00000104941_2 (sequence is synthesized)
gcagcggaccccgaggagaggcagcagatacctccagacgcccagcgaaacgcccctggttggtcacagaggggcagcctgtcccaacaggagaacttgctgatgccccaggtcttccag

SEQ ID NO: 145607 - DNA, 120 bp, Artificial Sequence
  ENSG00000104941_3 (sequence is synthesized)
gctgaggaagcccggctgggtggcatggagtacccatctgtgaacacgggctttccctcagagttccagcctcagccttactctgatgaaagcaggatgcaggtcgccgagctcaccacc

SEQ ID NO: 145608 - DNA, 120 bp, Artificial Sequence
  ENSG00000104941_4 (sequence is synthesized)
agcctaatgctgcagcggctccagcagggccaaagcagcctgttccagcaactggaccccaccttccaggagcccccagtcaaccccttgggccagttcaacctctaccagacagaccag

SEQ ID NO: 145609 - DNA, 120 bp, Artificial Sequence
  ENSG00000104941_5 (sequence is synthesized)
ttctctgaaggtgcccagcacgggccttacataagggatgaccctgcccttcagttcttgccctctgagctgggcttcccacactacagtgcccaggtgcctgagcccgagcctctggag

SEQ ID NO: 145610 - DNA, 120 bp, Artificial Sequence
  ENSG00000104941_6 (sequence is synthesized)
ctggccgtgcagaacgccaaggcctacctgctgcagaccagcatcaattgcgacctcagcctgtacgagcacctggtgaatctgctgaccaagatcctgaaccagcggcctgaggacccc

SEQ ID NO: 145611 - DNA, 120 bp, Artificial Sequence
  ENSG00000104941_7 (sequence is synthesized)
ttgtctgtcctggagtctctgaaccgcaccacgcagtgggagtggttccaccccaagctggacacgctgcgggacgaccccgagatgcagcccacctacaagatggcggagaaacagaag

SEQ ID NO: 145612 - DNA, 120 bp, Artificial Sequence
  ENSG00000104941_8 (sequence is synthesized)
gcgctgttcacccggagtggaggcggcactgaaggcgaacaggagatggaggaggaggtgggggagacaccagtgcccaacatcatggagactgccttctacttcgagcaggccggcgtc

SEQ ID NO: 145613 - DNA, 120 bp, Artificial Sequence
  ENSG00000104941_9 (sequence is synthesized)
ggcctgagctcggacgagagcttccgcattttcctggccatgaaacagctggtggagcagcagcccatccacacctgtcgcttctggggcaagatcctgggaatcaaacgcagctacctg

SEQ ID NO: 145614 - DNA, 120 bp, Artificial Sequence
  ENSG00000104941_10 (sequence is synthesized)
gaggaggaggtggaggagatgacggaaggtggcgaggtcatggaggcgcacggcgaggaggagggcgaggaggacgaggagaaggccgtggacatcgtccctaagtccgtatggaagccg

SEQ ID NO: 145615 - DNA, 120 bp, Artificial Sequence
  ENSG00000104941_11 (sequence is synthesized)
ccgcccgtgatccccaaggaggagagccgctcaggcgccaacaagtacctgtactttgtgtgcaacgagccgggcctgccatggacgcggctgccccacgtcactccagcccagatcgtg

SEQ ID NO: 145616 - DNA, 120 bp, Artificial Sequence
  ENSG00000104941_12 (sequence is synthesized)
aacgcccgaaagatcaagaagttcttcacaggctacctggacacgccagtcgtcagctacccacccttcccgggcaacgaggccaactacctgcgggcccagatagcccgcatctcggcc

SEQ ID NO: 145617 - DNA, 120 bp, Artificial Sequence
  ENSG00000104941_13 (sequence is synthesized)
gccacgcaggtcagcccgctgggcttctaccagtttagtgaggaggagggcgacgaggaggaggaaggtggtgctgggcgcgactcctacgaggagaacccggacttcgagggcatcccc

SEQ ID NO: 145618 - DNA, 120 bp, Artificial Sequence
  ENSG00000104941_14 (sequence is synthesized)
gtgctggagctggtcgactccatggccaactgggtgcatcacacacagcacatcctgccgcagggccgctgcacttgggtgaaccctttgcagaagacagaggaggaggaggacctgggg

SEQ ID NO: 145619 - DNA, 120 bp, Artificial Sequence
  ENSG00000104941_15 (sequence is synthesized)
gaggaggaagagaaggcagatgaggggccagaggaggtggagcaggaggttggccccccactgctaacgccactttcagaagatgcagaaatcatgcacctggcaccctggaccacccgc

SEQ ID NO: 145620 - DNA, 120 bp, Artificial Sequence
  ENSG00000104941_16 (sequence is synthesized)
ctgtcctgcagcctctgcccgcagtactcagtggccgttgtgcgctccaacctctggcccggggcctatgcctatgccagtggcaaaaagtttgagaacatctacatcggctggggtcac

SEQ ID NO: 145621 - DNA, 120 bp, Artificial Sequence
  ENSG00000104941_17 (sequence is synthesized)
aagtacagccccgagagcttcaacccggccctgccagcccccattcaacaagagtaccccagtggcccagagatcatggagatgagtgaccccacagtggaagaggagcaggctctgaaa

SEQ ID NO: 145622 - DNA, 120 bp, Artificial Sequence
  ENSG00000104941_18 (sequence is synthesized)
gcagcccaggaacaagccctgggagccacagaggaggaggaggagggcgaggaggaggaggagggcgaggagacagatgactgaggcccaccctctagccactttccccaagcaggtaga

SEQ ID NO: 145623 - DNA, 120 bp, Artificial Sequence
  ENSG00000104941_19 (sequence is synthesized)
tagcaaatttccccttagaggtagttagcatggattatattttcactatgtgcttcctgtccccagagggcagggatagaaaaggaaggcaactgcttcaaataaaattcctccacggca

SEQ ID NO: 145624 - DNA, 120 bp, Artificial Sequence
  ENSG00000104941_20 (sequence is synthesized)
agcaccaggcacagggccaggcacatgggagccagctcagtgagctgagtgagtgaggtccctctcctcccactcctcctgcgggaggcaggtacgagcacctggtgaatctgctgacca

SEQ ID NO: 145625 - DNA, 120 bp, Artificial Sequence
  ENSG00000104946_0 (sequence is synthesized)
agtggggccttcggcggcgactatggaaggagccggctacagggtggtgtttgagaagggcggagtgtacctgcacaccagcgctaagaagtatcaggaccgagactctctcatcgctgg

SEQ ID NO: 145626 - DNA, 120 bp, Artificial Sequence
  ENSG00000104946_1 (sequence is synthesized)
tgtcatccgtgtcgtggaaaaggacaatgacgtcctcctgcactgggctcctgtagaggaggctggagattccacccaaatcctcttctccaagaaggactccagtgggggtgactcatg

SEQ ID NO: 145627 - DNA, 120 bp, Artificial Sequence
  ENSG00000104946_2 (sequence is synthesized)
tgcttctgaggaggaaccaacctttgaccccggctatgaacctgactgggctgtcatcagcactgtgcggccacagctctgccactcagagcccacgagaggtgcagagcccagctgccc

SEQ ID NO: 145628 - DNA, 120 bp, Artificial Sequence
  ENSG00000104946_3 (sequence is synthesized)
ccagggctcctgggccttctcagtgagtctgggggagctaaagtccatccgccgctccaagccaggcctcagctgggcctacctggttctggtgacccaggctggaggttccctgcccgc

SEQ ID NO: 145629 - DNA, 120 bp, Artificial Sequence
  ENSG00000104946_4 (sequence is synthesized)
actgcacttccaccgcgggggcacccgcgccctgctccgcgtcctcagccgctacctgctgttggccagctccccgcaggactcccgcctctaccttgtcttcccccacgactcctctgc

SEQ ID NO: 145630 - DNA, 120 bp, Artificial Sequence
  ENSG00000104946_5 (sequence is synthesized)
tctctccaactccttccaccacctgcagctctttgaccaggacagctccaatgtggtgtcacgcttcctccaggatccctactccaccaccttcagcagcttctcccgagtgaccaactt

SEQ ID NO: 145631 - DNA, 120 bp, Artificial Sequence
  ENSG00000104946_6 (sequence is synthesized)
cttccggggtgccctgcagccacagcctgagggagccgcctccgaccttcccccgccacccgacgatgagcccgagcctggattcgaggtcatttcctgtgtggagctggggcctcggcc

SEQ ID NO: 145632 - DNA, 120 bp, Artificial Sequence
  ENSG00000104946_7 (sequence is synthesized)
aaccgtggagcggggccctccagttacagaggaggagtgggcacgccacgtgggccctgaaggtcgcctgcagcaggtccctgagctgaagaaccggatcttctcggggggtctgagccc

SEQ ID NO: 145633 - DNA, 120 bp, Artificial Sequence
  ENSG00000104946_8 (sequence is synthesized)
acagctgaggagcacaaggcccacatacgcaagaaaacggatgagtatttccgcatgaagctgcagtggaaatctgtgagccctgagcaggagcggagaaactcacttctgcatggatac

SEQ ID NO: 145634 - DNA, 120 bp, Artificial Sequence
  ENSG00000104946_9 (sequence is synthesized)
cgcagcctcatcgaaagggatgtgagccgcactgacaggaccaacaagttctacgagggtcccgagaacccggggctgggcctgctgaacgatatcctcctcacctactgcatgtatcac

SEQ ID NO: 145635 - DNA, 120 bp, Artificial Sequence
  ENSG00000104946_10 (sequence is synthesized)
ttcgacctcggctacgtccagggcatgagtgatcttctctccccgatcctctacgtcattcagaacgaggtggatgctttctggtgtttctgtggcttcatggagctcgtgcaagggaac

SEQ ID NO: 145636 - DNA, 120 bp, Artificial Sequence
  ENSG00000104946_11 (sequence is synthesized)
tttgaagagagccaggagaccatgaagcggcaactcgggcgactgctgctgctcctgagggtgctggaccccctgctctgcgacttcctggattcccaggactccggctctctctgcttc

SEQ ID NO: 145637 - DNA, 120 bp, Artificial Sequence
  ENSG00000104946_12 (sequence is synthesized)
tgtttccggtggctgctcatctggttcaagagggaattccccttcccggatgtccttcggctgtgggaggtgctgtggacagggctccctggccccaatctgcacctgctggtggcctgc

SEQ ID NO: 145638 - DNA, 120 bp, Artificial Sequence
  ENSG00000104946_13 (sequence is synthesized)
gccatcctggacatggagagggacaccctcatgctgtccggcttcggctccaatgagatcctcaagcacatcaacgagctgactatgaagctgagcgtggaggacgtgctgacccgcgcc

SEQ ID NO: 145639 - DNA, 120 bp, Artificial Sequence
  ENSG00000104946_14 (sequence is synthesized)
gaggccctgcaccgccagctaaccgcctgccccgagctgccccacaacgtgcaggagatcctggggctggccccgcccgcagagccccacagcccctcgcccaccgcctccccgctgcct

SEQ ID NO: 145640 - DNA, 120 bp, Artificial Sequence
  ENSG00000104946_15 (sequence is synthesized)
ctgtcgcccacccgggccccgcccaccccgccgccctccacggacacagccccgcagcccgacagcagcctggagatcctgcccgaggaggaggacgagggcgccgactcctaaccccgc

SEQ ID NO: 145641 - DNA, 120 bp, Artificial Sequence
  ENSG00000104946_16 (sequence is synthesized)
caggcagcctcgttctgcacaggcactttagcccgagccaggcacacctgcgagggggcaggtgtgctccgccgccctgctgataagctggcttcattaaactgacacttctcatgtgca

SEQ ID NO: 145642 - DNA, 120 bp, Artificial Sequence
  ENSG00000104946_17 (sequence is synthesized)
tgctgtccggcttcggctccaatgagatcctcaagcacgaagcacagagtgggcgctcgggcggaggtggttgagtgccgactggcgcctgacccaccccctcccgcagcacatcaacga

SEQ ID NO: 145643 - DNA, 120 bp, Artificial Sequence
  ENSG00000104946_18 (sequence is synthesized)
acagagctagtgacgagacactggaaggctgagctgaccacctgcgctgccccagggcaggaggatgaagatgaagatgaagatgactctccaccttgctccacagccaaacacagccaa

SEQ ID NO: 145644 - DNA, 120 bp, Artificial Sequence
  ENSG00000104946_19 (sequence is synthesized)
cccaaatcctcttctccaagaaggtaggctccacccgctttgcccttctccactcgctttttttctaggtccgtgctgttgtaagtcatttgagggacctgcgtacaatcccagacctac

SEQ ID NO: 145645 - DNA, 120 bp, Artificial Sequence
  ENSG00000104946_20 (sequence is synthesized)
tcgtggggcatgtgtgaccctgtttaggcttgggtactctgcctctccttttgctcctctctgtgaaatgggcagaggatgcccattcaaggaaaaagagcagggagcataagacgcacg

SEQ ID NO: 145646 - DNA, 120 bp, Artificial Sequence
  ENSG00000104946_21 (sequence is synthesized)
gtcgtggggacggctgacccctctctccctttgcttcttgggagatccctgccagggtgcaagatgtggattcgagttgcttgaagggaaatggcatttcctctggtgccagaggacagg

SEQ ID NO: 145647 - DNA, 120 bp, Artificial Sequence
  ENSG00000104946_22 (sequence is synthesized)
gcctgacagcctactcacccacttcgtcactgctcccggctttcccttcgttatgtctcctgggacttcccatggctggaccccgtcctgggcaattctgagacccagagataagtcaga

SEQ ID NO: 145648 - DNA, 120 bp, Artificial Sequence
  ENSG00000104946_23 (sequence is synthesized)
tccagacccacctaagccctgacccttactcactttttgagaaactgatagatgaggtcgaaaacgctaggaagtgttggaactttttgcacccagacagtctgattccagatccccaac

SEQ ID NO: 145649 - DNA, 120 bp, Artificial Sequence
  ENSG00000104946_24 (sequence is synthesized)
gcttcctgggagagcagacatttgagctgggactcccaggatatgaaaggacaagaaggtatttcagggacagcagaacaaccttcaaggcacacggagaagttggatgcctctgtaggg

SEQ ID NO: 145650 - DNA, 120 bp, Artificial Sequence
  ENSG00000104946_25 (sequence is synthesized)
atttgatgtaacttgacctgctggagattcgggtcctttgcagtttttcatcacggtgcatagtctgggtaatttcttctttaggttcacttccaagaagtggaattttgttcaggacag

SEQ ID NO: 145651 - DNA, 120 bp, Artificial Sequence
  ENSG00000104946_26 (sequence is synthesized)
tgcttgttttcacacagctttggagagtttgtcctccgttgttactttcctcaaaggttagaatgctcagactctcactttcatttgagttaacttggggggaaaaaaaggttcaacacc

SEQ ID NO: 145652 - DNA, 60 bp, Artificial Sequence
  ENSG00000104946_27 (sequence is synthesized)
tcagcctcccaaggagctggaattacaggggtgtggcaccatttttagtagagatggggt

SEQ ID NO: 145653 - DNA, 83 bp, Artificial Sequence
  ENSG00000104946_28 (sequence is synthesized)
gttacaggcgtgcgccatcgcacccggccttcagcttaaatttttgctacagcgtatctaggagtgtcagttcccttagcgct

SEQ ID NO: 145654 - DNA, 120 bp, Artificial Sequence
  ENSG00000104946_29 (sequence is synthesized)
ttgctacagcgtatctaggagtgtcagttcccttagcgctcaccagcagcgggcagaggtctgtttcgtcgggcgtgctgggcgtcctgcctcccttccatgtccatggcagatgtggaa

SEQ ID NO: 145655 - DNA, 120 bp, Artificial Sequence
  ENSG00000104946_30 (sequence is synthesized)
ttgcctagacttggggaaggtcttccagtcaggatgacttctcaaactctcagtcccagcgctgggcaaggctgagtgggctccatgtcatcccccagattcccaggactccggctctct

SEQ ID NO: 145656 - DNA, 83 bp, Artificial Sequence
  ENSG00000104946_31 (sequence is synthesized)
agcctgggcaacaagagcgaatattctttattacttggtcaatgtaaaaactgcaggaaattaagatgaagaagaaaaagtaa

SEQ ID NO: 145657 - DNA, 120 bp, Artificial Sequence
  ENSG00000104946_32 (sequence is synthesized)
aggtggtgcagctctcagaccctcccacttgtttacttcgtggcgagagggcgaacactgcgcctgcgcactctccgtagccggatccaccttcagcgtctgcgccacgtgactccgatc

SEQ ID NO: 145658 - DNA, 120 bp, Artificial Sequence
  ENSG00000104946_33 (sequence is synthesized)
caccctcgaggttccagtggaataacccccttctgaaaaatggtttcacccgctccttctctagaacgggtcgggccgctaccactgtccggcccggaggggaactgttttctccggaag

SEQ ID NO: 145659 - DNA, 120 bp, Artificial Sequence
  ENSG00000104951_0 (sequence is synthesized)
ggcccaccgtactacttctgcgcctgcgcgaccgtgattccccgctcgcgactccccaccccccagggctccctaaagagggccacgagctgcgaaagggcgggaaaggcagttggagaa

SEQ ID NO: 145660 - DNA, 120 bp, Artificial Sequence
  ENSG00000104951_1 (sequence is synthesized)
gaggtaagcggttactcactccatggctgcagcaaggagaggcggcggcggcctcggctgaagaaagaaggtgggagcggagagcgcaggcgtgaaacccaccttgtcccatccacatca

SEQ ID NO: 145661 - DNA, 120 bp, Artificial Sequence
  ENSG00000104951_2 (sequence is synthesized)
ggacatcccagctggagttcaaccttcatcccttctgtggcagttaggagactgaatcaaggtccagagaaggtggaggaatcctgatactgagcggaagaaaatacacagatgtgcttc

SEQ ID NO: 145662 - DNA, 120 bp, Artificial Sequence
  ENSG00000104951_3 (sequence is synthesized)
cttcccagtcctgacaaatggcctttccttaagttcctcattaattcatatgaagacaacacatttggtgactaaatttggaatcagaggcttttaaagcctcccagctgctctgacccc

SEQ ID NO: 145663 - DNA, 120 bp, Artificial Sequence
  ENSG00000104951_4 (sequence is synthesized)
aatatcaggaacttggcatctctgatctaacaagggcaccactaacaaggacaaagccaccatcattcaccttgattccgcacatgcccaacgatgacttctgtcctgggctaaccataa

SEQ ID NO: 145664 - DNA, 120 bp, Artificial Sequence
  ENSG00000104951_5 (sequence is synthesized)
aggccatgggtgctgagagagccccccagaggcagccatgcaccctgcacctcctcgtcctcgtccccatcctcctcagcctggtggcctcccaggactggaaggctgaacgcagccaag

SEQ ID NO: 145665 - DNA, 120 bp, Artificial Sequence
  ENSG00000104951_6 (sequence is synthesized)
accccttcgagaaatgcatgcaggatcctgactatgagcagctgctcaaggtggtgacctgggggctcaatcggaccctgaagccccagagggtgattgtggttggcgctggtgtggccg

SEQ ID NO: 145666 - DNA, 120 bp, Artificial Sequence
  ENSG00000104951_7 (sequence is synthesized)
ggctggtggccgccaaggtgctcagcgatgctggacacaaggtcaccatcctggaggcagataacaggatcgggggccgcatcttcacctaccgggaccagaacacgggctggattgggg

SEQ ID NO: 145667 - DNA, 120 bp, Artificial Sequence
  ENSG00000104951_8 (sequence is synthesized)
agctgggagccatgcgcatgcccagctctcacaggatcctccacaagctctgccagggcctggggctcaacctgaccaagttcacccagtacgacaagaacacgtggacggaggtgcacg

SEQ ID NO: 145668 - DNA, 120 bp, Artificial Sequence
  ENSG00000104951_9 (sequence is synthesized)
aaaagggccactcgcccgaagacatctaccagatggctctcaaccaggccctcaaagacctcaaggcactgggctgcagaaaggcgatgaagaagtttgaaaggcacacgctcttggaat

SEQ ID NO: 145669 - DNA, 120 bp, Artificial Sequence
  ENSG00000104951_10 (sequence is synthesized)
atcttctcggggaggggaacctgagccggccggccgtgcagcttctgggagacgtgatgtccgaggatggcttcttctatctcagcttcgccgaggccctccgggcccacagctgcctca

SEQ ID NO: 145670 - DNA, 120 bp, Artificial Sequence
  ENSG00000104951_11 (sequence is synthesized)
gcgacagactccagtacagccgcatcgtgggtggctgggacctgctgccgcgcgcgctgctgagctcgctgtccgggcttgtgctgttgaacgcgcccgtggtggcgatgacccagggac

SEQ ID NO: 145671 - DNA, 120 bp, Artificial Sequence
  ENSG00000104951_12 (sequence is synthesized)
cgcacgatgtgcacgtgcagatcgagacctctcccccggcgcggaatctgaaggtgctgaaggccgacgtggtgctgctgacggcgagcggaccggcggtgaagcgcatcaccttctcgc

SEQ ID NO: 145672 - DNA, 120 bp, Artificial Sequence
  ENSG00000104951_13 (sequence is synthesized)
cgccgctgccccgccacatgcaggaggcgctgcggaggctgcactacgtgccggccaccaaggtgttcctaagcttccgcaggcccttctggcgcgaggagcacattgaaggcggccact

SEQ ID NO: 145673 - DNA, 120 bp, Artificial Sequence
  ENSG00000104951_14 (sequence is synthesized)
caaacaccgatcgcccgtcgcgcatgattttctacccgccgccgcgcgagggcgcgctgctgctggcctcgtacacgtggtcggacgcggcggcagcgttcgccggcttgagccgggaag

SEQ ID NO: 145674 - DNA, 120 bp, Artificial Sequence
  ENSG00000104951_15 (sequence is synthesized)
aggcgttgcgcttggcgctcgacgacgtggcggcattgcacgggcctgtcgtgcgccagctctgggacggcaccggcgtcgtcaagcgttgggcggaggaccagcacagccagggtggct

SEQ ID NO: 145675 - DNA, 120 bp, Artificial Sequence
  ENSG00000104951_16 (sequence is synthesized)
ttgtggtacagccgccggcgctctggcaaaccgaaaaggatgactggacggtcccttatggccgcatctactttgccggcgagcacaccgcctacccgcacggctgggtggagacggcgg

SEQ ID NO: 145676 - DNA, 120 bp, Artificial Sequence
  ENSG00000104951_17 (sequence is synthesized)
tcaagtcggcgctgcgcgccgccatcaagatcaacagccggaaggggcctgcatcggacacggccagccccgaggggcacgcatctgacatggaggggcaggggcatgtgcatggggtgg

SEQ ID NO: 145677 - DNA, 120 bp, Artificial Sequence
  ENSG00000104951_18 (sequence is synthesized)
ccagcagcccctcgcatgacctggcaaaggaagaaggcagccaccctccagtccaaggccagttatctctccaaaacacgacccacacgaggacctcgcattaaagtattttcggaaaaa

SEQ ID NO: 145678 - DNA, 120 bp, Artificial Sequence
  ENSG00000104951_19 (sequence is synthesized)
agtggagggcagtggagaggaccgcgctgtcctgctgtcaccaagagctggagacaccatctcccaccgagagtcatggccccattggccctgcacctcctcgtcctcgtccccatcctc

SEQ ID NO: 145679 - DNA, 120 bp, Artificial Sequence
  ENSG00000104953_0 (sequence is synthesized)
gaacttggctgacctccgcagcttccgcccggtgagggacccttgtcctgggatctcgaactctgagagctctccgacgctgaattatcagggcattctaaatcggctcaagcagttccc

SEQ ID NO: 145680 - DNA, 120 bp, Artificial Sequence
  ENSG00000104953_1 (sequence is synthesized)
caggttttctcctcattttgctgcggagttggagagcatttactactcgctgcacaagatccagcaggatgtggcagaacatcacaagcagataggaaacgtcttacagattgtggagag

SEQ ID NO: 145681 - DNA, 120 bp, Artificial Sequence
  ENSG00000104953_2 (sequence is synthesized)
ctgcagccaactccagggtttccagtctgaggaggtctcacctgctgaaccagccagccctgggacgccccagcaggtgaaggacaagaccctgcaggagtcgagctttgaggacatcat

SEQ ID NO: 145682 - DNA, 120 bp, Artificial Sequence
  ENSG00000104953_3 (sequence is synthesized)
ggccaccaggtcctccgactggctccggcggcctttgggggaggacaatcagccggagacccagctgttctgggacaaggagccttggttttggcacgacactctgaccgagcaactctg

SEQ ID NO: 145683 - DNA, 120 bp, Artificial Sequence
  ENSG00000104953_4 (sequence is synthesized)
gcggatttttgccggcgtccacgatgagaaggcaaagcccagagacagacagcaggcaccaggcctggggcaggaaagcaaggcaccaggatcctgtgacccaggaacagacccatgtcc

SEQ ID NO: 145684 - DNA, 120 bp, Artificial Sequence
  ENSG00000104953_5 (sequence is synthesized)
tgaagatgcctccacccccaggccacctgaggcctcctccagtccccctgagggttcccaagacaggaacacaagttggggtgtggtccaggagcctcctggaagagcctctcggtttct

SEQ ID NO: 145685 - DNA, 120 bp, Artificial Sequence
  ENSG00000104953_6 (sequence is synthesized)
acagtccatatcctgggaccctgaggactttgaagatgcatggaagaggccagatgccttgcccgggcagtcaaagagactcgccgtcccgtgcaaactggaaaagatgcggatcttggc

SEQ ID NO: 145686 - DNA, 120 bp, Artificial Sequence
  ENSG00000104953_7 (sequence is synthesized)
ggagcctgactggacaggtggctgaggacaggttccctgagagccacctgcctatacagacccctggggccttcctgcgcacctgcctgctgtcctcaaacagcaggagcctgctcaccg

SEQ ID NO: 145687 - DNA, 120 bp, Artificial Sequence
  ENSG00000104953_8 (sequence is synthesized)
gtggctacaacctggccagcgtgagcgtgtgggacctggcggcgccctccctgcatgtgaaggagcagttgccctgtgcaggtctcaactgccaggccctggatgccaacctggatgcca

SEQ ID NO: 145688 - DNA, 120 bp, Artificial Sequence
  ENSG00000104953_9 (sequence is synthesized)
acctggccttcgccagcttcaccagtggtgtggtcaggatctgggacctgcgggatcagagtgtggtcagggacctcaagggttatcctgatggagtcaagagtatcgtggtcaagggct

SEQ ID NO: 145689 - DNA, 120 bp, Artificial Sequence
  ENSG00000104953_10 (sequence is synthesized)
acaacatctggactgggggtccggatgcctgtctgcggtgctgggaccagaggaccatcatgaaacctctggagtaccaattcaagtctcagataatgagcctgtcccacagcccccagg

SEQ ID NO: 145690 - DNA, 120 bp, Artificial Sequence
  ENSG00000104953_11 (sequence is synthesized)
aggactgggtgctgctgggcatggccaatggccagcagtggctgcaaagcaccagcgggagccagcggcacatggtggggcaaaaagacagcgtcatcctgagcgtcaagttctccccct

SEQ ID NO: 145691 - DNA, 120 bp, Artificial Sequence
  ENSG00000104953_12 (sequence is synthesized)
ttggccagtggtgggcaagcgttggaatggacgacttccttggcgtctacagcatgccggcggggacaaaagtgttcgaggtgcctgagatgtctccagtcacgtgctgtgacgtctctt

SEQ ID NO: 145692 - DNA, 120 bp, Artificial Sequence
  ENSG00000104953_13 (sequence is synthesized)
ccaacaaccgcctcgttgtcacaggctccggggagcacgcctccgtgtaccagatcacctactgaggggcctcgctgctgtcatcccactccggctcctcttttcatccccccccttccc

SEQ ID NO: 145693 - DNA, 120 bp, Artificial Sequence
  ENSG00000104953_14 (sequence is synthesized)
cccccccaacaagggggacatggtggagggaagcgggaaggctcttctgtggcatcgcacgatctagtctgtggtgtagactggtcgccatcacgtgtaataaagcacccgggaaaggca

SEQ ID NO: 145694 - DNA, 120 bp, Artificial Sequence
  ENSG00000104953_15 (sequence is synthesized)
agtttcctcttggcctgaacttggctgacctccgcagcttccgcccgactctggctaaagtcttggaggctactgccttgaagatgacctctagggaccagcccagacccaagggccccc

SEQ ID NO: 145695 - DNA, 120 bp, Artificial Sequence
  ENSG00000104953_16 (sequence is synthesized)
acgtgagtgtccctgagggtgagggggaaggggcagccacaggctgcgtctcaggggctgtgcagtgaaccctgctgttctctctgtccccctcctcctctccgttgtcatggtgacaga

SEQ ID NO: 145696 - DNA, 120 bp, Artificial Sequence
  ENSG00000104953_17 (sequence is synthesized)
tttgtcttccttccatcctgcccctcgggtcccccgggggggacttgggtgatccaggaggctatactggagtagcccaggacccacagcccagggcttccaggaccctataccctgact

SEQ ID NO: 145697 - DNA, 120 bp, Artificial Sequence
  ENSG00000104953_18 (sequence is synthesized)
ctctctctgcaactctgcctggacccgcagacaggaccccaggcagctgacaagccctgtgcaagctgcccaggaatccgaggtcttctggtcctaacaggcaggtcagcaggcctgatg

SEQ ID NO: 145698 - DNA, 120 bp, Artificial Sequence
  ENSG00000104953_19 (sequence is synthesized)
agacttttccattttccaggggcaggaaagcaaggcaccaggatcctgtgacccaggaacagacccatgtcctgaagatgcctccagtaatcccagcgggcaggggccgaccgactccag

SEQ ID NO: 145699 - DNA, 120 bp, Artificial Sequence
  ENSG00000104953_20 (sequence is synthesized)
gcgggatggggtgggggcatcctgtgctgaggagccaatgcaagccgcttagcccctcttgtctccccactagcccccaggccacctgaggcctcctccagtccccctgagggttcccaa

SEQ ID NO: 145700 - DNA, 120 bp, Artificial Sequence
  ENSG00000104953_21 (sequence is synthesized)
gacaggaacacaagttggggtgtggtccaggtgagacccaggcccgagctggtagcccagcgtgaaggctgcccagggtggggtagaggaggtgggcacagatgtgcggggaggctgggg

SEQ ID NO: 145701 - DNA, 120 bp, Artificial Sequence
  ENSG00000104953_22 (sequence is synthesized)
gagagggaccccaaaatctgaaaaagaagcccctctaggccttgatgtgtggctcccactgggcaaaggggctcacaagcaggtcagttaccccaaggcctcccctcccaagatcctggg

SEQ ID NO: 145702 - DNA, 120 bp, Artificial Sequence
  ENSG00000104953_23 (sequence is synthesized)
aaatggcccccggtgggggaaggaggagtttcctcttggcctgaacttggctgacctccgcagcttccgcccggtgagggacactctggctaaagtcttggaggctactgccttgaagat

SEQ ID NO: 145703 - DNA, 120 bp, Artificial Sequence
  ENSG00000104953_24 (sequence is synthesized)
caagcagttccccaggtgagagcaattccaggggccggaggtctcacgctgggaaggagccccacctggcctctctcccgggggtcctagtgagtggtctagaggctgctggcccaagag

SEQ ID NO: 145704 - DNA, 120 bp, Artificial Sequence
  ENSG00000104953_25 (sequence is synthesized)
ccaggctcaggaacaggaagccatgcagatacccagcatggagaacccggcaatacccatcccagcttttgattaaacaaaattaccaacaaatattaaaattttgattttcctgttcga

SEQ ID NO: 145705 - DNA, 120 bp, Artificial Sequence
  ENSG00000104953_26 (sequence is synthesized)
atacgcagggggtgagggctccagagcaaaggagccacttcggttgcagccagacccaggagggtccctgcccagcccccactgcagggggccccaggatccctggcagcccagcctggc

SEQ ID NO: 145706 - DNA, 120 bp, Artificial Sequence
  ENSG00000104953_27 (sequence is synthesized)
ctgtggtcctgggcagtccgcttcccccacccgctgcttccagttccgggctttcccagccgcctcgctgtgctttcaaaatcgccatcagcacagccccctcctccgacagcccgcctg

SEQ ID NO: 145707 - DNA, 120 bp, Artificial Sequence
  ENSG00000104953_28 (sequence is synthesized)
actctcccccgggagggctgctagcaggcacaagggagccacacttttcatgctgagcgcattaaagtgccggtaaattgcgcattaacgaggcggggtgaattggagagggctcccctg

SEQ ID NO: 145708 - DNA, 120 bp, Artificial Sequence
  ENSG00000104953_29 (sequence is synthesized)
ggatttgctgctgctgggcgggctcagctgggaaatccatcactggctgccccaggaggcatcagcctggagtccccccccccccgcggggctccgatggagggtctcccctcccggccc

SEQ ID NO: 145709 - DNA, 120 bp, Artificial Sequence
  ENSG00000104957_0 (sequence is synthesized)
accgcgctctcagcgcgcacttccgggcacggtcagggcgtgacgtcgggaggagggcagacacgccgctttttggatgcctcctatgcctggcgggagtcttgtctgagctggcaccac

SEQ ID NO: 145710 - DNA, 120 bp, Artificial Sequence
  ENSG00000104957_1 (sequence is synthesized)
cacacggcccacgacatcttcgcagggaagcctgtggaccctctgccaggctccacaagaggtcaggacagtgcagtgtgttcacaaggccagtttctgatcgtccgccccgaggctgag

SEQ ID NO: 145711 - DNA, 120 bp, Artificial Sequence
  ENSG00000104957_2 (sequence is synthesized)
gaccagtaggcagctcccaagatgggtgaaaggaaaggggtcaacaagtactatcctccagacttcaaccctgagaagcatggctctctcaaccgataccacaacagccacccgcttcgg

SEQ ID NO: 145712 - DNA, 120 bp, Artificial Sequence
  ENSG00000104957_3 (sequence is synthesized)
gagcgggctcggaagctgtcacagggcatcctcatcatccgattcgaaatgccatataacatctggtgcgatggctgcaagaaccacatcggcatgggtgttcgttacaatgcagaaaag

SEQ ID NO: 145713 - DNA, 120 bp, Artificial Sequence
  ENSG00000104957_4 (sequence is synthesized)
aagaaggtgggcaattactacacaaccccgatctacaggttccggatgaaatgccacctctgtgtcaactacatcgagatgcagacggaccccgccaactgcgactacgtgatcgtgagt

SEQ ID NO: 145714 - DNA, 120 bp, Artificial Sequence
  ENSG00000104957_5 (sequence is synthesized)
ggcgcccagcgcaaggaggagcgctgggacatggcggacaatgagcaggtgctgaccacagagcatgagaagaagcagaagctggagacggacgccatgttccggctggagcatggcgag

SEQ ID NO: 145715 - DNA, 120 bp, Artificial Sequence
  ENSG00000104957_6 (sequence is synthesized)
ggaaaagaaaaaagccatccaggaggaggaggagagagaccaggccttgcaggccaaggcgagcctgaccatcccgctggtgcccgagacggaagatgaccgcaagctggcggctctgct

SEQ ID NO: 145716 - DNA, 120 bp, Artificial Sequence
  ENSG00000104957_7 (sequence is synthesized)
gaagttccacaccctggactcctacgaggacaagcagaaactcaagcggaccgagatcatcagccgctcctggttcccctctgcccccggatccgcctccagcagcaaggtcagcggcgt

SEQ ID NO: 145717 - DNA, 120 bp, Artificial Sequence
  ENSG00000104957_8 (sequence is synthesized)
cctgaagaagctggcacagagccgcagaaccgcgcttgccacctcccccatcaccgtcggggacctgggcatcgtgcggcggaggtctcgggacgtcccggagagcccccagcatgcggc

SEQ ID NO: 145718 - DNA, 120 bp, Artificial Sequence
  ENSG00000104957_9 (sequence is synthesized)
cgacacccccaagtctggggaaccgcgggtaccagaggaggctgcccaggaccggcccatgtcccccggagactgtcctccggaaacaactgagacccccaagtgcagcagcccgagggg

SEQ ID NO: 145719 - DNA, 120 bp, Artificial Sequence
  ENSG00000104957_10 (sequence is synthesized)
gcaggaagggagccgtcaggacaagcccctgtcgccagcaggctcctcccaggaggcagctgacacccccgacacgcggcacccctgcagtctcggctcctccctcgtggcggactactc

SEQ ID NO: 145720 - DNA, 120 bp, Artificial Sequence
  ENSG00000104957_11 (sequence is synthesized)
cgactcggagagtgagtgagcgatccccatcctggagactggacccgctctagaggcccggacacacccaggaggcccctcacagactgcagacccccggctcgcccaccagccctggga

SEQ ID NO: 145721 - DNA, 120 bp, Artificial Sequence
  ENSG00000104957_12 (sequence is synthesized)
gagctcagatgccgcatcctccccagaccgcgccttcctgcaaccgtggagttatttatttggtcctggtgagggtgtttgtgccttgtgagactccgtacattaaagacctgtctcttc

SEQ ID NO: 145722 - DNA, 120 bp, Artificial Sequence
  ENSG00000104957_13 (sequence is synthesized)
atgcgcctcggagctggcttcaaccagcgaaggctgaacccgcttccagggtcctcgccgagctgggagttaggatccgagggggccaagagggataagaaaacttctctgggtgcccac

SEQ ID NO: 145723 - DNA, 120 bp, Artificial Sequence
  ENSG00000104957_14 (sequence is synthesized)
gtggtactgagcgcccttgggagggctctggagaagaccatcgccttccagggtagctccctccctcaaagggaaggaaactgaggtccagaaaagttatgactcgccccaaggggattg

SEQ ID NO: 145724 - DNA, 120 bp, Artificial Sequence
  ENSG00000104957_15 (sequence is synthesized)
atagaattaaactaaattaaaaaataaatggaaccgcccagcccatcccctacccacctgtcctgcattttttttctccttatcactgtctcaccactagaggccagctccaccagggca

SEQ ID NO: 145725 - DNA, 120 bp, Artificial Sequence
  ENSG00000104957_16 (sequence is synthesized)
gaagaggcccaccctggagtaaccctcactggagaatccagaggtgagatgagccttgtacctatctcagcagagggagtaggataatatttaaatattaagggtggggagaaggaatga

SEQ ID NO: 145726 - DNA, 120 bp, Artificial Sequence
  ENSG00000104957_17 (sequence is synthesized)
aggcaagaaataaaatgcccaaaatgccccaaacgccatccggaccataaaagtgatggcgatagtgttggacttaggagctcaaagatgctaaccttgacaggcctggtggcccaagtc

SEQ ID NO: 145727 - DNA, 81 bp, Artificial Sequence
  ENSG00000104957_18 (sequence is synthesized)
gctttagcccaggagtgccaatccctcctgggcaacatagtgagatccttgtttccttaaaaaaaaaaaaaaagtgcatac

SEQ ID NO: 145728 - DNA, 120 bp, Artificial Sequence
  ENSG00000104957_19 (sequence is synthesized)
tgagccacatccaggaggcccagagcgcctggaaggacgacttcgccctcaacagcatgctgcggagaaggttccggaggccagctccaccagggcaagggtttttccctgcctgccact

SEQ ID NO: 145729 - DNA, 120 bp, Artificial Sequence
  ENSG00000104957_20 (sequence is synthesized)
acctgcctgggggccctggccctgagtctgcgctggggcccccaaagcccagccgagctctgatcgttgcagagcatgagaagaagcagaagctggagacggacgccatgttccggctgg

SEQ ID NO: 145730 - DNA, 120 bp, Artificial Sequence
  ENSG00000104957_21 (sequence is synthesized)
tccgggtgaggggggctccagcccggggtcagagaggatgcatggtggaccaaggcccgggtccagccctccccccaccacatcctagctttgagcaggccactgtaccctctgagcctc

SEQ ID NO: 145731 - DNA, 120 bp, Artificial Sequence
  ENSG00000104957_22 (sequence is synthesized)
agtttccccatctgctacatggtgaccatgccctgtcttaatccattctggctactataataaaaaataccatagacagaaacagtagaaatttggctgggcacagtgactcacgcctgt

SEQ ID NO: 145732 - DNA, 64 bp, Artificial Sequence
  ENSG00000104957_23 (sequence is synthesized)
aatccagcacataccaccccccccctcccccagcatctctaaataaataaataatagaaattaa

SEQ ID NO: 145733 - DNA, 120 bp, Artificial Sequence
  ENSG00000104957_24 (sequence is synthesized)
gtggtactgagcgcccttgggagggctctggagaagaccatcgccttccaggggaaggaaactgaggtccagaaaagttatgactcgccccaaggggattgcctggcaggacgtgaaggg

SEQ ID NO: 145734 - DNA, 80 bp, Artificial Sequence
  ENSG00000104960_0 (sequence is synthesized)
agtggttcggccgcggcgaccccactccggcggcgcgtcccccgagcttggtacggctcagcccgtctcccccgaagccg

SEQ ID NO: 145735 - DNA, 80 bp, Artificial Sequence
  ENSG00000104960_1 (sequence is synthesized)
tcagtcggtggagcccgcagccccccttgtggcccgcggcagctccccgcccgctcggcccgcgcccgccatggtccgtc

SEQ ID NO: 145736 - DNA, 120 bp, Artificial Sequence
  ENSG00000104960_2 (sequence is synthesized)
ctcgtggtgcgcgccgtccgctcgcgctcctggcctgccagcccccgaggcccgcagcctccgcggatccgggcccgctcggcccctcccatggaaggtgctcgggtcttcggggcactg

SEQ ID NO: 145737 - DNA, 120 bp, Artificial Sequence
  ENSG00000104960_3 (sequence is synthesized)
gggcactgggtcccatcggtccctcctcacctgggctcaccctcgggggtctggccgtgagcgagcaccggctcagcaacaagctgctggcttggagcggcgtcctcgagtggcaggaga

SEQ ID NO: 145738 - DNA, 120 bp, Artificial Sequence
  ENSG00000104960_4 (sequence is synthesized)
agcgcagaccctactctgactccactgcaaagctgaagcggaccctgccctgccaagcctacgtgaaccaaggcgagaacctggagaccgaccagtggccgcagaagctgatcatgcagc

SEQ ID NO: 145739 - DNA, 120 bp, Artificial Sequence
  ENSG00000104960_5 (sequence is synthesized)
tgatccctcagcagctgctgaccaccctgggccccctgttccggaactcccagttggcacagttccacttcaccaacagagactgcgactcgctcaaggggctctgccgcatcatgggca

SEQ ID NO: 145740 - DNA, 120 bp, Artificial Sequence
  ENSG00000104960_6 (sequence is synthesized)
acggcttcgcgggctgcatgctgttcccccacatctccccctgtgaggtgcgcgtgctcatgctcctgtactcgtccaagaagaagatcttcatgggcctcatcccctacgaccagagcg

SEQ ID NO: 145741 - DNA, 120 bp, Artificial Sequence
  ENSG00000104960_7 (sequence is synthesized)
cagtccagatcgtcaacaacaagtttctggcatggagtggtgtcatggagtggcaggagcccaggcctgagcccaacagtcggtccaagaggtggctgccatcccacgtctacgtgaacc

SEQ ID NO: 145742 - DNA, 120 bp, Artificial Sequence
  ENSG00000104960_8 (sequence is synthesized)
agggggagatcctgaggaccgagcagtggccaaggaagctgtacatgcagctcatcccgcagcagctgctgaccaccctagtgccgctgttccggaactcgcgcctggtccagttccact

SEQ ID NO: 145743 - DNA, 120 bp, Artificial Sequence
  ENSG00000104960_9 (sequence is synthesized)
tcaccaaggacctggagacactgaagagcctgtgccggatcatggacaatggcttcgccggctgcgtgcacttttcctacaaagcatcgtgtgagatccgcgtgcttatgctcctgtact

SEQ ID NO: 145744 - DNA, 120 bp, Artificial Sequence
  ENSG00000104960_10 (sequence is synthesized)
cttcagagaagaaaatcttcattggcctcatcccccatgaccagggcaactttgtcaacggcatccggcgtgtcattgccaaccagcagcaggtcctgcagcggaacctggagcaggagc

SEQ ID NO: 145745 - DNA, 120 bp, Artificial Sequence
  ENSG00000104960_11 (sequence is synthesized)
aacagcaacgagggatgggggggtagtggttaccccgggctgggcccctccaggagtcacagatgaggcccccgcagagactggtgagtggtgaccctgtcatgtacaggagggaccctg

SEQ ID NO: 145746 - DNA, 120 bp, Artificial Sequence
  ENSG00000104960_12 (sequence is synthesized)
gggcatgtggggggggtggggttgggaaagaagcagggcgaccttggccttggggagagcagagcagagggagaggcagcagtcccagcggtcctaggctgtcgggaaactgcagcccag

SEQ ID NO: 145747 - DNA, 120 bp, Artificial Sequence
  ENSG00000104960_13 (sequence is synthesized)
cctcagggccatgggaggtggtatccaggcctgggtggggccaggcctctgctcacagggatgtggggtcagtgcttgggagcctgtggccagcagcccccactgcacccctgcccccag

SEQ ID NO: 145748 - DNA, 120 bp, Artificial Sequence
  ENSG00000104960_14 (sequence is synthesized)
gtgacacgcttctgagcaggggcccctggggacttcaactgcccagcaacatggaggatggtgtcctgaggcctccaaggacggtccccacccctctacgtttccccaataaagcctttt

SEQ ID NO: 145749 - DNA, 120 bp, Artificial Sequence
  ENSG00000104960_15 (sequence is synthesized)
aggaccgccgagcccacactccgctcccgcccgggccccgctcccccgcgccgccttggtacgctccggccacgccccctcggacgcgcttggaaggtgctcgggtcttcggggcactgg

SEQ ID NO: 145750 - DNA, 120 bp, Artificial Sequence
  ENSG00000104960_16 (sequence is synthesized)
gttgtggctcgcgcgtcttcccaggactcccccgcgccggagaggcccgcaggaccgccgagcccacactccgctcccgcccgggccccgctcccccgcgccgccttggaaggtgctcgg

SEQ ID NO: 145751 - DNA, 120 bp, Artificial Sequence
  ENSG00000104960_17 (sequence is synthesized)
agggcggtggcaggggcagtggctgtggccgtggggatcagggcagccctttctgaccagctccttcccatagggagaccgaccagtggccgcagaagctgatcatgcagctgatccctc

SEQ ID NO: 145752 - DNA, 120 bp, Artificial Sequence
  ENSG00000104960_18 (sequence is synthesized)
agcagctgctggtgagacccgcccctcccaccccatccactctgagcacccccatgcctggctgacccagctgtctgtcctgtcgcccccagaccaccctgggccccctgttccggaact

SEQ ID NO: 145753 - DNA, 120 bp, Artificial Sequence
  ENSG00000104960_19 (sequence is synthesized)
agctgtctcaggctcgggtgcaatccgtaccctcagtgggttccctttcagtgggttcctttgtccccaggcccattattccgtcctcccctcttccctgatgtattttggcgcggtctc

SEQ ID NO: 145754 - DNA, 120 bp, Artificial Sequence
  ENSG00000104960_20 (sequence is synthesized)
ctggctctgcgggcccagggctccggatgaggtctcccgccgtcccgacccccgcaaggggccagcttggtgtcgccttcgttcttctgccaccccattcggtaggggctcccgttcccg

SEQ ID NO: 145755 - DNA, 120 bp, Artificial Sequence
  ENSG00000104960_21 (sequence is synthesized)
caggtcctgcagcggaacctggagcaggagcaacagcaacgaggggtgaggtggccggcctccagggctgctcagtctccctccacccccgctgcctgctcaccactggcctctgatttc

SEQ ID NO: 145756 - DNA, 120 bp, Artificial Sequence
  ENSG00000104960_22 (sequence is synthesized)
ggccgctccgtgcccgtggagtgcgcacctagaatacgcgcccgcgcccacatgtgggatgctttgatggactgccgtgagcccagaccttaaacgtaaacattcagcttcgcaggaagg

SEQ ID NO: 145757 - DNA, 120 bp, Artificial Sequence
  ENSG00000104960_23 (sequence is synthesized)
ggggtctcccctggggccgagggtagccctcgtggcctctcggaccccatctggaaatgactgactccaggcaccctccgtagagcacagggtgaaggaactcagcctgagaggcctcca

SEQ ID NO: 145758 - DNA, 120 bp, Artificial Sequence
  ENSG00000104960_24 (sequence is synthesized)
gtttctgcatctgtgcccagcttcgaggtggccctgggggcgtgagtgcagggagggactggggccagccctgttggggcccaggagcctgtcggggacacatagcgtatggcagggacc

SEQ ID NO: 145759 - DNA, 120 bp, Artificial Sequence
  ENSG00000104960_25 (sequence is synthesized)
tggtaaatgggtgtgctaggcacaagagccagccaggagggagtggcacgttggggcttggtattctggtctgtaaaatgggctaacctccccgagtggcctgagctggccgtgagggag

SEQ ID NO: 145760 - DNA, 120 bp, Artificial Sequence
  ENSG00000104960_26 (sequence is synthesized)
cagagctgagggtgctgaagcaggcgcggtgagtaggtcctcaggcctggctccaaggggacccaggtatccagccagtggctgtgcagggactgagtggggcaggcgcggccatgacct

SEQ ID NO: 145761 - DNA, 120 bp, Artificial Sequence
  ENSG00000104960_27 (sequence is synthesized)
gcccctcgtggtgcgcgccgtccgctcgcgctcctggcctgccagcccccgaggcccgcagcctccgcggatccgggcccgctcggcccctcccatgcttcgcaggtactttgggctgca

SEQ ID NO: 145762 - DNA, 120 bp, Artificial Sequence
  ENSG00000104960_28 (sequence is synthesized)
cacgcttctccggacccaaaagatgcacatgcttttcagaaaccgtaaggtttacctggggctgtaaaaccgcacatcgcgactttgcaccgtgcacacgcttgccccgatgtgagattt

SEQ ID NO: 145763 - DNA, 120 bp, Artificial Sequence
  ENSG00000104960_29 (sequence is synthesized)
cccctgggttcgcgctcgggtccgcttcttaaatacactgcctcagcggtgtggatggcacagagctgtggcagccctactgaaaccttaaacaggcttcctggggtcataaacatggat

SEQ ID NO: 145764 - DNA, 120 bp, Artificial Sequence
  ENSG00000104960_30 (sequence is synthesized)
cacctcccacaacttaaacgtaccccttcactccactgccttcgccccttcctgcagcattcgcatctagttgttcaaaagtgctttccgggtcctcagacatgcaccccaaggttttaa

SEQ ID NO: 145765 - DNA, 120 bp, Artificial Sequence
  ENSG00000104960_31 (sequence is synthesized)
acctcagtgcaagtactagatgggcttccctgtgcaatagggatgtcaggcgcgcagttttgcacacgattgccaagatgtgagatttactttaggttgcaccttaaccgtcgtttttaa

SEQ ID NO: 145766 - DNA, 120 bp, Artificial Sequence
  ENSG00000104960_32 (sequence is synthesized)
atatgatcgtcccatcttgatgtgctgctcctgctgtggaaggtatccctgggttttaggcaagcatatgtgttctttactatggctccagatcccagcatatttgaagtcctgagtcaa

SEQ ID NO: 145767 - DNA, 120 bp, Artificial Sequence
  ENSG00000104960_33 (sequence is synthesized)
agcctgtgccggatcatggacaatggcttcgtgagtggtgccagcagacgcaggggaggggccggccagggcagagcgagcccggaccgctcacgggggcggacatgggagaggaacaga

SEQ ID NO: 145768 - DNA, 120 bp, Artificial Sequence
  ENSG00000104960_34 (sequence is synthesized)
gcaccatgtcccagaccagctggggagagagggtggctagtgtgggcgtgacttctgggggctctgtgctgtccccacggcactggatggggcactgaccctggttctgcgggggcctgc

SEQ ID NO: 145769 - DNA, 80 bp, Artificial Sequence
  ENSG00000104960_35 (sequence is synthesized)
gagaggcccgcaggaccgccgagcccacactccgctcccgcccgggccccgctcccccgcgccgccttggtacgctccgg

SEQ ID NO: 145770 - DNA, 120 bp, Artificial Sequence
  ENSG00000104960_36 (sequence is synthesized)
cttaagtgacccgttcccccttcacccagcaccgtttgttgagggcctgccatatctgggccccgagtacccagtctgtagggaaagtggacatccatactcaccccccaggcatggccc

SEQ ID NO: 145771 - DNA, 120 bp, Artificial Sequence
  ENSG00000104960_37 (sequence is synthesized)
tgggaggctgactgtgcatggctccagggaggccagggacagggccctgagcgggtgatccctgggctggacaccaaggttgagaagttaggccggcagcgtggaggggacagcactgtg

SEQ ID NO: 145772 - DNA, 120 bp, Artificial Sequence
  ENSG00000104960_38 (sequence is synthesized)
ggggtggcccggtgtggggaggggacatggggttttgggacggtcacaccacttcatctagacaccacagccaggcacatctgtcaggcttagttctcccatgcgccatcctcaagaggc

SEQ ID NO: 145773 - DNA, 120 bp, Artificial Sequence
  ENSG00000104960_39 (sequence is synthesized)
accagcactttatctgttgagcctttatgtggcaccaactgtgtgcactattacccggttttacagatgatggaggcccagaagcaggaggtggctggtgttaggtcacacagctaggag

SEQ ID NO: 145774 - DNA, 120 bp, Artificial Sequence
  ENSG00000104960_40 (sequence is synthesized)
gcagcagaacggtggggcgctgcctgtgctcttaacccccaggccaagtcaccccatcaggcagtcaggagggctggcggcagggggtgatgtgggtgggaggtagtgccttcttggcat

SEQ ID NO: 145775 - DNA, 120 bp, Artificial Sequence
  ENSG00000104960_41 (sequence is synthesized)
tctcaccgcagcctgggtgccgggtgccactctgacctcagccatggcagggtcgggggatgccgatgggcgctgcacgggctctcagaggcccctcacctatggccatggccttgactg

SEQ ID NO: 145776 - DNA, 120 bp, Artificial Sequence
  ENSG00000104960_42 (sequence is synthesized)
tgggggcctctgtccaccgatgatctcccttcatcccctacaggtggggcggtccagggtggtgggggcacagtggccccgggcagtgaccacagggtcctgacccgcggcccccgcagg

SEQ ID NO: 145777 - DNA, 120 bp, Artificial Sequence
  ENSG00000104960_43 (sequence is synthesized)
cggcaggtcatcaccacccgcaagcaggtgtgccagccaagcacagcccctctggggacagagggggattagaccccactgccctggttgggcagccagacttggtgtgggcggagtgtg

SEQ ID NO: 145778 - DNA, 120 bp, Artificial Sequence
  ENSG00000104960_44 (sequence is synthesized)
atgcgatggctggagcaaggagctgcaggggagcccggaggatgccgggcgggttcccaccagggctccatggaaaagcggccactgggcggctctgcagggctggagggtgggtcttgg

SEQ ID NO: 145779 - DNA, 120 bp, Artificial Sequence
  ENSG00000104960_45 (sequence is synthesized)
accacgtgtcctggtcatgccttgccagttgaggcagactctgcaggtcctgtgcaccaggtgagggccgggacctgtctcaggccactggggagccatggggggctgtgagcagatgag

SEQ ID NO: 145780 - DNA, 120 bp, Artificial Sequence
  ENSG00000104960_46 (sequence is synthesized)
gggcagggcctgttcccctgggactagagaatggacccagctggggctaacaggccaaggctcggagggagggatggcaggccccaggacagacagacaggtttcccaggagcctgggcc

SEQ ID NO: 145781 - DNA, 120 bp, Artificial Sequence
  ENSG00000104960_47 (sequence is synthesized)
cctcttcccaccccgttcccttccaacaggcagtgggacctggtggtgtcaactcaggcccagtccagatcgtcaacaacaagtttctggcatggagtggtgtcatggagtggcaggagg

SEQ ID NO: 145782 - DNA, 120 bp, Artificial Sequence
  ENSG00000104960_48 (sequence is synthesized)
tgagcactcggcagcccagggacttgggacccccagatcctcacggactgtggctgggaggggacactggcattgggggtctccagccctgagggctcctctttgcctctcccccaaaag

SEQ ID NO: 145783 - DNA, 120 bp, Artificial Sequence
  ENSG00000104960_49 (sequence is synthesized)
cccaggcctgagcccaacagtcggtccaagaggtggctgccatcccacgtctacgtgaaccagggggagatcctgtgagtgctgggctggggggtggaggcagcatccaggggagctggg

SEQ ID NO: 145784 - DNA, 120 bp, Artificial Sequence
  ENSG00000104960_50 (sequence is synthesized)
gcttcctgaccctcgtccctttgtgccccacaggaggaccgagcagtggccaaggaagctgtacatgcagctcatcccgcagcagctgctggtgaggggctggggccgggtgctggagcc

SEQ ID NO: 145785 - DNA, 120 bp, Artificial Sequence
  ENSG00000104960_51 (sequence is synthesized)
tgcacgcagtagctcttccagagggcggggctgggggcaagagcgcctccccaggtggcctgagctggctgtgagggagcggagctgagggtgctgaagcaggtgtggtgggtagctcct

SEQ ID NO: 145786 - DNA, 120 bp, Artificial Sequence
  ENSG00000104960_52 (sequence is synthesized)
caggcttggcttcaaggggtcccaggcagccagctggtggctgtgcagggactgagcggggcaggggcagccacgacctgcacctggggggctgccaagggatctgagagcggcttccac

SEQ ID NO: 145787 - DNA, 80 bp, Artificial Sequence
  ENSG00000104964_0 (sequence is synthesized)
ccgcagcagccgagccgcggccactgccggcgtcgccgccattagacaatagcggtggggccggggagcggggaggcggg

SEQ ID NO: 145788 - DNA, 80 bp, Artificial Sequence
  ENSG00000104964_1 (sequence is synthesized)
attagacaatagcggtggggccggggagcggggaggcgggcggcggggaggggcggggaggggcgccgggcgcgcaggaa

SEQ ID NO: 145789 - DNA, 120 bp, Artificial Sequence
  ENSG00000104964_2 (sequence is synthesized)
cgccgggacaaaggcgcggccgcccggcgcccccagcagcccgagccggggcgcacagccggggcgcagcccgcgccccccgccgcgattgacatgatgtttccacaaagcaggcattcg

SEQ ID NO: 145790 - DNA, 120 bp, Artificial Sequence
  ENSG00000104964_3 (sequence is synthesized)
atgtttccacaaagcaggcattcgggctcctcgcacctaccccagcaactcaaattcaccacctcggactcctgcgaccgcatcaaagacgaatttcagctactgcaagctcagtaccac

SEQ ID NO: 145791 - DNA, 120 bp, Artificial Sequence
  ENSG00000104964_4 (sequence is synthesized)
agcctcaagctcgaatgtgacaagttggccagtgagaagtcagagatgcagcgtcactatgtgatgtactacgagatgtcctacggcttgaacatcgagatgcacaaacaggctgagatc

SEQ ID NO: 145792 - DNA, 120 bp, Artificial Sequence
  ENSG00000104964_5 (sequence is synthesized)
gtcaaaaggctgaacgggatttgtgcccaggtcctgccctacctctcccaagagcaccagcagcaggtcttgggagccattgagagggccaagcaggtcaccgctcccgagctgaactct

SEQ ID NO: 145793 - DNA, 120 bp, Artificial Sequence
  ENSG00000104964_6 (sequence is synthesized)
ctggccctgcccttgaccccactacccgtggggctgcagccgccttcgctgccggcggtcagcgcaggcaccggcctcctctcgctgtccgcgctgggttcccaggcccacctctccaag

SEQ ID NO: 145794 - DNA, 120 bp, Artificial Sequence
  ENSG00000104964_7 (sequence is synthesized)
gaagacaagaacgggcacgatggtgacacccaccaggaggatgatggcgagaagtcggattagcagggggccgggacagggaggttgggaggggggacagaggggagacagaggcacgga

SEQ ID NO: 145795 - DNA, 120 bp, Artificial Sequence
  ENSG00000104964_8 (sequence is synthesized)
gagaaaggaatgtttagcacaagacacagcggagctcgggattggctaaactcccatagtatttatggtggccgccggcgggggccccagcccagcttgcaggccacctctagctttctt

SEQ ID NO: 145796 - DNA, 120 bp, Artificial Sequence
  ENSG00000104964_9 (sequence is synthesized)
cctaccccattcccggcttccctcctcctcccctgcagcctggttaggtggatacctgccctgacatgtgaggcaagctaaggcctggagggtcagatgggagaccaggtcccaagggag

SEQ ID NO: 145797 - DNA, 120 bp, Artificial Sequence
  ENSG00000104964_10 (sequence is synthesized)
caagacctcgcgaagcgcagcagccccggcccttcccccgttttgaacatgtgtaaccgacagtctgcctgggccacagccctctcaccctggtactgcatgcacgcaatgctagctgcc

SEQ ID NO: 145798 - DNA, 120 bp, Artificial Sequence
  ENSG00000104964_11 (sequence is synthesized)
cctttcccgtcctgggcaccccgagtctcccccgaccccgggtcccaggtatgctcccacctccacctgccccactcaccacctctgctagttccagacacctccacgcccacctggtcc

SEQ ID NO: 145799 - DNA, 120 bp, Artificial Sequence
  ENSG00000104964_12 (sequence is synthesized)
tctcccatcgcccacaaaagggggggcacgagggacgagcttagctgagctgggaggagcagggtgagggtgggcgacccaggattccccctccccttcccaaataaagatgagggtact

SEQ ID NO: 145800 - DNA, 120 bp, Artificial Sequence
  ENSG00000104964_13 (sequence is synthesized)
aagccagcccggttatcctgttacctcctaagccctccccaagctcccgctctcctcccccccgccccgcctctttttcaggcctccctgggagtgtttctcccggtggtggggaggggc

SEQ ID NO: 145801 - DNA, 120 bp, Artificial Sequence
  ENSG00000104964_14 (sequence is synthesized)
agagaccttccccacagcctacggcccccagccctccctacattcgcacaagcgcttactacctgccaggggcctgagtggccgacccccgaggaatgtgcagtctggcctcatcctgca

SEQ ID NO: 145802 - DNA, 120 bp, Artificial Sequence
  ENSG00000104964_15 (sequence is synthesized)
cttacctcactctaagctgcaggcgacagccggtgtccagccccacctttgccactgactggctgccctcgggcccgaacacggctttgctcatcccaccctggccagacctagcccctc

SEQ ID NO: 145803 - DNA, 120 bp, Artificial Sequence
  ENSG00000104964_16 (sequence is synthesized)
ttgggaaaataatatatgctagactctgacctaatcacttgacaaatactgaattcatttattttaaacagccccattttgtagaggagaaaaccgaggcacaaaaatagttaaataatt

SEQ ID NO: 145804 - DNA, 120 bp, Artificial Sequence
  ENSG00000104964_17 (sequence is synthesized)
aggagccctggaatgcgtgttctcgcggtgcacatggagtgggggaggagccaggccagggctagggacctaaagtgcccccagtctccatccgcagccccagcggccccctgcccctct

SEQ ID NO: 145805 - DNA, 120 bp, Artificial Sequence
  ENSG00000104964_18 (sequence is synthesized)
ctcccccctttgtctgtctctgccactcccctatctctttgtctccgtgtccccccatccttccccacccccatctcccgctccccctctctctcccccatacagtactacgagatgtcc

SEQ ID NO: 145806 - DNA, 120 bp, Artificial Sequence
  ENSG00000104964_19 (sequence is synthesized)
ggtaacgtcactccgcccccaggtccagtgttgggggcgggcgacagggccctccacatcccctccaccacgggcagctgctccctcaaccccggccacctcccctgggaagcgcgagga

SEQ ID NO: 145807 - DNA, 120 bp, Artificial Sequence
  ENSG00000104964_20 (sequence is synthesized)
tcggggcctgttctccattcagccggcccctgctgggctgagcctgcctcgctagcctggcagatggccgaggcagtggccgaggtgccaaaccgccgggttgcagaccggccctgccag

SEQ ID NO: 145808 - DNA, 120 bp, Artificial Sequence
  ENSG00000104964_21 (sequence is synthesized)
cgggatttgtgcccaggtcctgccctacctctcccaagaggtaagagccagggccttggggaggggttgtgagggggccccgcacttgcccagcccctgtccactgcagccatcttgggt

SEQ ID NO: 145809 - DNA, 120 bp, Artificial Sequence
  ENSG00000104964_22 (sequence is synthesized)
ggtgtgctgggcgccccagggcacacgcctcccctctctggacctccctggctctgaacaccagagccggcctgtgcagaagaatccccgggccagagacactccaggggtgcaggcgtg

SEQ ID NO: 145810 - DNA, 120 bp, Artificial Sequence
  ENSG00000104964_23 (sequence is synthesized)
tggggggcgggcctcaccctgctctggaattcccagctggagtgagtcatgtcataggtagaaatgtcagatgggcctaaactgcaccaggaatgtttttttctcatctctcttcctcct

SEQ ID NO: 145811 - DNA, 120 bp, Artificial Sequence
  ENSG00000104964_24 (sequence is synthesized)
ttcaccctcttgagacatcctcctccaggccatgcgggctgcacaggaccaaggactagagggtgttaggggattgtgggggaaggggtagcacagggtggtcacacatggacacagcca

SEQ ID NO: 145812 - DNA, 120 bp, Artificial Sequence
  ENSG00000104964_25 (sequence is synthesized)
cacagataggcacgagcacatcaacacacgggagatacacagatgcagacacggatacacgtgtgtgcagacagcacagggacacgcatgcaggaatgtgcagctacacgtgggcacacg

SEQ ID NO: 145813 - DNA, 120 bp, Artificial Sequence
  ENSG00000104964_26 (sequence is synthesized)
tgatcctgagcacacattaccacatgcacacacacacccagatgaacctgacgcccagctcctcttctcctttcttgggttctgaggctcaggatgcgaggccgcccctccccagggcca

SEQ ID NO: 145814 - DNA, 120 bp, Artificial Sequence
  ENSG00000104964_27 (sequence is synthesized)
tgtaaggcccatctcctgtccctgccaagtttactgtcaaaagtttgtaacttcctcttcaatccctgtgggtatctcaggatcctttgggtgccctgctttgcccagggacaagtctta

SEQ ID NO: 145815 - DNA, 120 bp, Artificial Sequence
  ENSG00000104964_28 (sequence is synthesized)
gcaggacccaatgaaagccctagagaaaagggcacttggagcccttcagaacagaggcttcctggtagccaaggcaaaaagggagattggtagattctagcatctgctggccacagagtc

SEQ ID NO: 145816 - DNA, 120 bp, Artificial Sequence
  ENSG00000104964_29 (sequence is synthesized)
aggtgtttggggagagctcagggaggaactgccctgaatctgagcccattccccagccagccctgccagaattcattgggccctccccagccatggtaggagaagggctcaatttggcca

SEQ ID NO: 145817 - DNA, 120 bp, Artificial Sequence
  ENSG00000104964_30 (sequence is synthesized)
ggacgtccctgtacagttgggcaggttgtgtactgcacaaacattcacatgtttcacatctttgcaggtggctgtgcacataggataggtcaggatccagggtttctcccgggctcactc

SEQ ID NO: 145818 - DNA, 120 bp, Artificial Sequence
  ENSG00000104964_31 (sequence is synthesized)
aaaagctgtttcctaactacttagcacaaaacccttttaattgttttctgcacttttccatttgtctctgttggccagacgaagagacgagcttggtgaaaggaagcagttggagagagg

SEQ ID NO: 145819 - DNA, 120 bp, Artificial Sequence
  ENSG00000104964_32 (sequence is synthesized)
gagggtgctttctgatggggttgaaaaccactgggaggagcagacatgatggcccacttggtagtggggctcctcctggcctcagggccgtccccctctcctctcccaggatcaggagga

SEQ ID NO: 145820 - DNA, 120 bp, Artificial Sequence
  ENSG00000104964_33 (sequence is synthesized)
ttattttattattatttttttctttttccagtatactagcttgtcttttaagaaaggggatattaaaaaaaaaaaaagacaaaagtgtttttaaaaaaaagcaacacccacacctgtgtc

SEQ ID NO: 145821 - DNA, 120 bp, Artificial Sequence
  ENSG00000104964_34 (sequence is synthesized)
tgtctgtatatagtcagcttatctcgtgttcaatcgtctgatctctacagagagaagtggaaaatgctgtatcaagggtgggcttagctgtgcctttccaataaagatgtgagaagcttc

SEQ ID NO: 145822 - DNA, 120 bp, Artificial Sequence
  ENSG00000104964_35 (sequence is synthesized)
tgcctttctgcagaaaaggaaactaaggctcagcaagaaccaccgcccagccagagccaaggtcacagagcacgtccgtggcacgcgtccaggtcgtgccacagcagggccggcggcttc

SEQ ID NO: 145823 - DNA, 120 bp, Artificial Sequence
  ENSG00000104964_36 (sequence is synthesized)
attctcccggctggtttttctgcagaactgtccccaccatctgacctgccaggaattcagcttgtgaatttgtctctgtctgtctccaggcaccaccaccagggcagggacccacccccg

SEQ ID NO: 145824 - DNA, 80 bp, Artificial Sequence
  ENSG00000104964_37 (sequence is synthesized)
ggggtcgcgccaggggccgtaaacacgggcccaggaagtggggcaggagggggggcgccgcagctgcgcggccgctccct

SEQ ID NO: 145825 - DNA, 120 bp, Artificial Sequence
  ENSG00000104967_0 (sequence is synthesized)
gctcggccctcttgccccagggagccaagaagaagcggggagtcccgtccccccagtggcgcgtccagtccccagcctctgtggtcccaggagagaccccacctctcagttctttcccgg

SEQ ID NO: 145826 - DNA, 120 bp, Artificial Sequence
  ENSG00000104967_1 (sequence is synthesized)
ccctatcggagacccccctcggccctgccatcctgctcacggccgctctccaggctctgtcagccccccgagaaccggctcccccctacccccgccttccctctccggggctccccctcc

SEQ ID NO: 145827 - DNA, 80 bp, Artificial Sequence
  ENSG00000104967_2 (sequence is synthesized)
ctctccggggctccccctcccccatccctccaccgccccctccccctcccacctcccctcccctccccctcccccgcccc

SEQ ID NO: 145828 - DNA, 80 bp, Artificial Sequence
  ENSG00000104967_3 (sequence is synthesized)
ccatgaggatgatggccgccggcgcggtgcacggcctcttcacggcctccgcggccccgcagccgccgccgcccccgccg

SEQ ID NO: 145829 - DNA, 120 bp, Artificial Sequence
  ENSG00000104967_4 (sequence is synthesized)
gcagcagcagcagccgccgccccaggccccccccatggagcccgaggccccggattcccgcaagaggcccctcgaaacgccccccgaggtggtctgcaccaagcgcagcaacacgggaga

SEQ ID NO: 145830 - DNA, 120 bp, Artificial Sequence
  ENSG00000104967_5 (sequence is synthesized)
ggaaggcgaatacttcctgaaggtgctgatccccagctacgcggcgggctccatcattggcaagggcgggcagaccatcgtgcagctgcagaaggagaccggagccaccatcaagctctc

SEQ ID NO: 145831 - DNA, 120 bp, Artificial Sequence
  ENSG00000104967_6 (sequence is synthesized)
caagtccaaagacttctaccccggaaccacagagcgggtatgcctagtacagggcacggcagaggccttgaatgctgtgcacagctttattgccgagaaggtccgagaaatcccacaagc

SEQ ID NO: 145832 - DNA, 120 bp, Artificial Sequence
  ENSG00000104967_7 (sequence is synthesized)
gatgaccaagcctgaggtggtcaacatccttcaaccccaaaccacgatgaaccccgacagagccaagcaggccaagctgatcgtccccaacagcacggcgggcctgatcatcggcaaggg

SEQ ID NO: 145833 - DNA, 120 bp, Artificial Sequence
  ENSG00000104967_8 (sequence is synthesized)
aggcgccacggtgaaagccgtgatggaacagtcaggagcatgggtgcagctgtcccagaagccggagggcatcaacctgcaggagcgcgtggtgacggtcagcggcgagcccgagcaggt

SEQ ID NO: 145834 - DNA, 120 bp, Artificial Sequence
  ENSG00000104967_9 (sequence is synthesized)
gcacaaggccgtgagcgccatcgtgcagaaggtacaagaagacccccagagcagcagctgcctcaacatcagctacgccaacgtggcaggccccgtggccaactccaaccccaccggctc

SEQ ID NO: 145835 - DNA, 80 bp, Artificial Sequence
  ENSG00000104967_10 (sequence is synthesized)
gctctccgtacgccagccccgcggatgtgctgccagccgcggccgcagcgtcggccgccgccgcctccggcctgctgggc

SEQ ID NO: 145836 - DNA, 120 bp, Artificial Sequence
  ENSG00000104967_11 (sequence is synthesized)
cgccttctcaggcaccgacctgctggccatcagcacggcgcttaacacgctggcaagttacggctacaacaccaactccctgggcctgggcctcaactcggccgcagcttccggcgtcct

SEQ ID NO: 145837 - DNA, 80 bp, Artificial Sequence
  ENSG00000104967_12 (sequence is synthesized)
ggcgtcctggccgccgtggccgccggggccaacccagcagccgccgccgccgccaacctcctggcatcctacgcgggcga

SEQ ID NO: 145838 - DNA, 80 bp, Artificial Sequence
  ENSG00000104967_13 (sequence is synthesized)
cgcctcccggagccctggggtcctttgcgttggccgcagccgccaacggctacctcggggccggggcgggcggcggggcg

SEQ ID NO: 145839 - DNA, 120 bp, Artificial Sequence
  ENSG00000104967_14 (sequence is synthesized)
ggcggccgggggcttcctgacggcggagaagctggcggctgagagtgccaaggagctggtggagattgcggtgcctgagaacctggtgggagccatcctggggaaggggggcaagacgtt

SEQ ID NO: 145840 - DNA, 120 bp, Artificial Sequence
  ENSG00000104967_15 (sequence is synthesized)
ggtggagtaccaggagctgacgggcgctcgcatccagatctccaagaagggcgagttcctgccaggcacgcggaaccggcgggtcaccatcacgggcagccccgcggccacgcaagccgc

SEQ ID NO: 145841 - DNA, 120 bp, Artificial Sequence
  ENSG00000104967_16 (sequence is synthesized)
tcaatacctcatcagtcagcgggtcacctacgagcagggagtgagggcctcaaacccccagaaagtgggatgaggcctgtggtgtgtgctcccacccttttctctcctcccatctcctcc

SEQ ID NO: 145842 - DNA, 120 bp, Artificial Sequence
  ENSG00000104967_17 (sequence is synthesized)
tcttccctctcctcctcccccccaactcctgacctcagcttggtgtagtcctgctcctcttgggatggggctggggtaggcccgactgcaccctccccttctggtagtcataggcaggat

SEQ ID NO: 145843 - DNA, 120 bp, Artificial Sequence
  ENSG00000104967_18 (sequence is synthesized)
tgagtgacggttgggaagggggctcagaagccccctccccagcccggaactgacccctccttcctccctccctgtgcttggctgggcctgacccttcctgtcccagggcccaggtctgtg

SEQ ID NO: 145844 - DNA, 120 bp, Artificial Sequence
  ENSG00000104967_19 (sequence is synthesized)
ccttcctgtcccagggcccaggtctgtgtgatatctgtatatattgcattttgttgattttaatagaaaacaaagcgttattttctctttctttccctcctttttttttttttttttttt

SEQ ID NO: 145845 - DNA, 120 bp, Artificial Sequence
  ENSG00000104967_20 (sequence is synthesized)
agtttttgtttccatatgggaggaggggagggagcctctgggtcacccagaatgaggggccttcccaaaacacaacaccccacctctctgctttcagttctagatctgagggaagccatg

SEQ ID NO: 145846 - DNA, 120 bp, Artificial Sequence
  ENSG00000104967_21 (sequence is synthesized)
ggagtagaggtagcagaggcgtctgagctgaaatggggcatttggagcaaggaccccagagttcccagatcttctcagctactctcctcccactggagctgtccctcctaggtgggaatg

SEQ ID NO: 145847 - DNA, 120 bp, Artificial Sequence
  ENSG00000104967_22 (sequence is synthesized)
ttcactcttttgttgtcaggttgtatgggggggcagggacagtgctgctgggaaggatgccagctctgggattgggccagtcctgtgggcaagacttgcaagaggctggatcaacttggt

SEQ ID NO: 145848 - DNA, 120 bp, Artificial Sequence
  ENSG00000104967_23 (sequence is synthesized)
gtggtatctctgatggcttagagtaatggcaatgagggtctctgttgtgatgtcactgagtactttctggggtgcttctgggcaccccttatgatgtcacaggaagcagttcctcagagg

SEQ ID NO: 145849 - DNA, 120 bp, Artificial Sequence
  ENSG00000104967_24 (sequence is synthesized)
ttacttcctgtgaacataagggagcaggtacttcctgtgatgtctcaatgagttcttccttgaaggtcactttggtgatatcatgggaaggtgtacttccggtgatgcctagaggtcacg

SEQ ID NO: 145850 - DNA, 120 bp, Artificial Sequence
  ENSG00000104967_25 (sequence is synthesized)
tcctgtgatgtcattaggctgaagcatgtacttcctgtattggacagtgaccagtctctgacctgccttctccctccacacccttctttggtgggtgttggcctgggggtcttcctagga

SEQ ID NO: 145851 - DNA, 120 bp, Artificial Sequence
  ENSG00000104967_26 (sequence is synthesized)
agagaataaggcacgggacttggatccaatctggaggactctaacggaaaaaaaccaatattgtcagggtcatctccattcaaacacgtcaagtctgcgaactcgccctggagggagggg

SEQ ID NO: 145852 - DNA, 120 bp, Artificial Sequence
  ENSG00000104967_27 (sequence is synthesized)
tgggagatggacctagtgcaaactactgttaaagacctcccttcccacccctgccttttgtgtgcatgcctgtgtctgcgtggctttgtttcattgaatcgggtgagccaagtgtgtggt

SEQ ID NO: 145853 - DNA, 120 bp, Artificial Sequence
  ENSG00000104967_28 (sequence is synthesized)
ggctctgtcaggccagtatggccaggtgtagagttcagtgagccatagtagggtcccttgggccagaatgcttcgtgtggtctgataggttagattggtttggtggcttccagcaagctg

SEQ ID NO: 145854 - DNA, 120 bp, Artificial Sequence
  ENSG00000104967_29 (sequence is synthesized)
gcatacttcggtgatgtctgatggatcagaatgttttggtgtgctcaccaggggctctggagaactagaatgttctgatggagtctgacaagccaggcggccttgagagttggtttagga

SEQ ID NO: 145855 - DNA, 120 bp, Artificial Sequence
  ENSG00000104967_30 (sequence is synthesized)
gtggctccctgagtgctgtggctgtggtcagctctaaggacctgttggcagactgagatttcagggcctgacaaccatgtagactaggatagctgagacctccctctacccccacccatc

SEQ ID NO: 145856 - DNA, 120 bp, Artificial Sequence
  ENSG00000104967_31 (sequence is synthesized)
tccctctcttccttggagaccacctccactttctccaacccaaagcagggcgcccagtgccctggttccatcatcagcatctctgggggaggggcgccccatgcccaccctctcccccat

SEQ ID NO: 145857 - DNA, 120 bp, Artificial Sequence
  ENSG00000104967_32 (sequence is synthesized)
ttgtccgcctcctaggtcttccaaacccttttcttctctatgactttgggggaaatccagcctccttgtctctctcctaaaaaaggagggaagaaaagccacagagacaattcctgcccc

SEQ ID NO: 145858 - DNA, 120 bp, Artificial Sequence
  ENSG00000104967_33 (sequence is synthesized)
gaggtaccttgcactgaatttcccaccccagcccttccacccgatgggaggctgtaacttgggcactggggtgactttttccatgcccttgtcatctccagggtgggaggcaggccccac

SEQ ID NO: 145859 - DNA, 120 bp, Artificial Sequence
  ENSG00000104967_34 (sequence is synthesized)
ttcccctcccctatcccccacttcccattgttgttgccccacccctaatctccagactgaacccagatggagatctgagtgccaaaacaattcttgatgtaactttgtacatatcttcta

SEQ ID NO: 145860 - DNA, 120 bp, Artificial Sequence
  ENSG00000104967_35 (sequence is synthesized)
ctaccgttgggggctcttggggttagaggtgggggcggctctgtgggccattgctcccctccacctctcaaaagaccttacagtatttcacagtatctctacccgcacgcgagtattaca

SEQ ID NO: 145861 - DNA, 120 bp, Artificial Sequence
  ENSG00000104967_36 (sequence is synthesized)
gtatctagctggaatatccccctacagccccccaggaccctatgaggaagggaaggagccagggagagtgaagtaaggtctgggactggggaggtgggatctgaatgaactcatttgcat

SEQ ID NO: 145862 - DNA, 120 bp, Artificial Sequence
  ENSG00000104967_37 (sequence is synthesized)
atcatttgcatcctccgcttggcagccgctttctacaaactcattcactggagtctgggtcccaatcagccgggtccaggactcctctcacacagacacatctccggaggctgggcctcc

SEQ ID NO: 145863 - DNA, 120 bp, Artificial Sequence
  ENSG00000104967_38 (sequence is synthesized)
tgaaaagtgtttgcttggggtgtctgtgtaacaacccctccctattcatatttcttggggaccccctacccagccagccagggtgatctgaaaggtatactttgctagctcagtgagcta

SEQ ID NO: 145864 - DNA, 120 bp, Artificial Sequence
  ENSG00000104967_39 (sequence is synthesized)
gttcactcaccatgttggtgagcagagagccacacctttccccattttaccttgggaaactcactccaccatctttgccatctcttgaaagtcccttctgcaatctgacctcaatctttt

SEQ ID NO: 145865 - DNA, 120 bp, Artificial Sequence
  ENSG00000104967_40 (sequence is synthesized)
gtgctgcagtttgtccagaggggacacagatgtggggtcagggatgaggattattgaaaaacccatcatctctttttttttccccgtctccctattagccaatccgatctcagagtctct

SEQ ID NO: 145866 - DNA, 120 bp, Artificial Sequence
  ENSG00000104967_41 (sequence is synthesized)
gagtggcctccttgcacccttctcttcagcacccagtaggtgcttaataagtgtttgctgcattggattatctccctattccttctcatttgccctctagcttcccataccttctccaag

SEQ ID NO: 145867 - DNA, 120 bp, Artificial Sequence
  ENSG00000104967_42 (sequence is synthesized)
tgtcttcctccctttctttgtctggctccctatgactttctatttttttttcctccgtgtggttcccattgttttctgtcctgtctctatcttagtctttgtctgtcttcctcctttcct

SEQ ID NO: 145868 - DNA, 120 bp, Artificial Sequence
  ENSG00000104967_43 (sequence is synthesized)
caaatgtctcaactctctctccccaatttccccatttaaaaaaaaaaaaaagtgccaaacttccttggaactgagccgctctggggggagaggaccttggatagaggggaggaaatggga

SEQ ID NO: 145869 - DNA, 120 bp, Artificial Sequence
  ENSG00000104967_44 (sequence is synthesized)
ccatttctctttgaggaggtccctaagaggcattgcaaaagtgtggacatggagctaaattgggtcccccttccacagccctcccaccctgagtttttcttagaatctttgtaagaaaaa

SEQ ID NO: 145870 - DNA, 120 bp, Artificial Sequence
  ENSG00000104967_45 (sequence is synthesized)
aaaaaaaagacagaaaaaagctctccttttcaacttacccctatccttttgggtccccccaaattccaccagccaaggagaatcccacttgccaacttcctggcaaatctatggaaactg

SEQ ID NO: 145871 - DNA, 120 bp, Artificial Sequence
  ENSG00000104967_46 (sequence is synthesized)
gggaggaggagacaagctcaactcctcctctgctagcccaaggggcggtaccaactggattcaagagaaggacctcaaagctcctatgagaagagggggttcgatgtgccaaattaacct

SEQ ID NO: 145872 - DNA, 120 bp, Artificial Sequence
  ENSG00000104967_47 (sequence is synthesized)
ccttcatcccccatctcagggggctctgagccaacctgcccagccaccttcttctgccctgtcccagccacctctacatgggcaaggaggcttcactgcaataattagtaggggtggtga

SEQ ID NO: 145873 - DNA, 120 bp, Artificial Sequence
  ENSG00000104967_48 (sequence is synthesized)
tcagaagacaatgattttgccgtttctatctgccctaacgcctaccctggacttgtagttgggaattatgggtatcccaagtggatgttgataaaagccgacctatagatggttggggac

SEQ ID NO: 145874 - DNA, 120 bp, Artificial Sequence
  ENSG00000104967_49 (sequence is synthesized)
ctctacttggaacaccagggtgtcgcttatctccgaggtgtatttcctctcccctctggaccaccaaatccttcaatatcccctcattctgtttctcctccctgttcctccatcccacat

SEQ ID NO: 145875 - DNA, 120 bp, Artificial Sequence
  ENSG00000104967_50 (sequence is synthesized)
cctccttcttactttgttttgattggtggccaattgtttggaaaatgagaggagtccccctgaatggatgattgctgtttcaggaccgggattagaggctgtgatagactgtgcagtggc

SEQ ID NO: 145876 - DNA, 120 bp, Artificial Sequence
  ENSG00000104967_51 (sequence is synthesized)
aaaagtattaacaagagtggcgatgaggatggcagttggggcgtccaggctgctgactgagtgcccgcctgtcggtacagccagccaggccttcgacaagcacctgcctggaaaccgggc

SEQ ID NO: 145877 - DNA, 120 bp, Artificial Sequence
  ENSG00000104967_52 (sequence is synthesized)
tcgctgtcctgaaagcctggactggatgtcacgatggggagaacgggatcgcgatacccaagctggggcacaggcgagccagggacactggtttactggggtgataacacccagccctgc

SEQ ID NO: 145878 - DNA, 120 bp, Artificial Sequence
  ENSG00000104967_53 (sequence is synthesized)
tatcgcgatccgtttgcactgtggtcagctgtctccacgccgtggttggagagggcttgtctccgggcgccactgctggtgtgtatggtctgtcttagtgtcccctgcaagttgcattgg

SEQ ID NO: 145879 - DNA, 120 bp, Artificial Sequence
  ENSG00000104967_54 (sequence is synthesized)
agattgctgggtggcagggagggaaatgggaagagaatctgtggggtcatggtggtgaaggctgctggtttttaatcccttctcaaccagtccaggacacttgtctcccagagataactg

SEQ ID NO: 145880 - DNA, 120 bp, Artificial Sequence
  ENSG00000104967_55 (sequence is synthesized)
gggggggactgcctaaccccccctcccccacccctttccctaccccacctctccccccaaaaccaccaacctctcatcttctaagtgactccatcaccaccggccaccgggacctgcggc

SEQ ID NO: 145881 - DNA, 120 bp, Artificial Sequence
  ENSG00000104967_56 (sequence is synthesized)
ctcattgctccagcccgccccactcgaccgtcagactcgctcatcgaactctttttgattaaccctttctgtgttcatcccacggaaaactgtgtgtccggcaggggggaggggggaggc

SEQ ID NO: 145882 - DNA, 120 bp, Artificial Sequence
  ENSG00000104967_57 (sequence is synthesized)
taggggcagttgctacctttcctccatctcctcccaccacccatgcctccccacccgcaccccatcccatgccccacccccatccctcacccctagggtctgccccaccctggggattga

SEQ ID NO: 145883 - DNA, 120 bp, Artificial Sequence
  ENSG00000104967_58 (sequence is synthesized)
catcctctataaatatctatgctatttggctttgtccctttaaaaggcgggtccaggggcgtggcctccctcaaatggagcgctcactctgaccccctccttcgtgtgccccccacacac

SEQ ID NO: 145884 - DNA, 120 bp, Artificial Sequence
  ENSG00000104967_59 (sequence is synthesized)
tccccacgccttcattgtaaatagtcacttttgtactgggtttgagccaggggacgtggggagtcatttttcttttctttatgttggcatctcaggccactggaggcatggcccacatcc

SEQ ID NO: 145885 - DNA, 120 bp, Artificial Sequence
  ENSG00000104967_60 (sequence is synthesized)
cgggtcgatttgggagaattttaaggtatgtcccctcacctgtccccatcgctaaggatttcaagctatcagtattactctagagggatggggtgcatagattccccggcagggtggtgg

SEQ ID NO: 145886 - DNA, 120 bp, Artificial Sequence
  ENSG00000104967_61 (sequence is synthesized)
gagaggtgtggaaaggtgtagtctgggaggatgcctccgttttccccttctgtgaaatggattcatcctccaatttccctgaggagcctcagtgagataatggtggagtcagaggagcta

SEQ ID NO: 145887 - DNA, 120 bp, Artificial Sequence
  ENSG00000104967_62 (sequence is synthesized)
gaacctctcttccccctttctctgttggagacagggtagcagaagaatgggggacaggggaggctgcagggccatctttggagaaccgattgctaaatccttcttaggaccttaaggtag

SEQ ID NO: 145888 - DNA, 120 bp, Artificial Sequence
  ENSG00000104967_63 (sequence is synthesized)
cctcctctccaggcttgttctccctcttggaatatggggaggactggaggacctctaaggtcccttggttctccccagtccttagattaaaaggcccaggccccaggctggccccctgcc

SEQ ID NO: 145889 - DNA, 120 bp, Artificial Sequence
  ENSG00000104967_64 (sequence is synthesized)
tgctgtcccactccttcattccatttcttggaatgtggccatgcctccagtgcctccattcaaccccctctaactgattccttccatcctctgcgaccagagacgccgcccgcctcctgc

SEQ ID NO: 145890 - DNA, 120 bp, Artificial Sequence
  ENSG00000104967_65 (sequence is synthesized)
ccaccacctccagaagctcctggctggggtgcactgccgtctcctcccactccccacattgccatgcctgggccacgcccaccccacccactcacccacccccagtgtccgttgtgtgac

SEQ ID NO: 145891 - DNA, 120 bp, Artificial Sequence
  ENSG00000104967_66 (sequence is synthesized)
ctagtgcaccatgtattagcttccatggcccccaccccagcccccaccacaccccctttccccacccctttcccctcggcgacttcacctttttttgccgcgataaacgccatctcagca

SEQ ID NO: 145892 - DNA, 65 bp, Artificial Sequence
  ENSG00000104967_67 (sequence is synthesized)
acgccccccgaggtggtctgcaccaagcgcagcaacacgggagatggagccctgctgtgtgaccc

SEQ ID NO: 145893 - DNA, 67 bp, Artificial Sequence
  ENSG00000104967_68 (sequence is synthesized)
ctcagcctcccaagtagctgagattaaaggcgtgccaccggccaggctggtctcaaactcctaacct

SEQ ID NO: 145894 - DNA, 120 bp, Artificial Sequence
  ENSG00000104967_69 (sequence is synthesized)
gcagagactcagtgactagaaggggaaagacggcacctttccaaggtggaaatgtttgaaattgcagcaggaaattagtcaggagacctgaacttgctatcttcagttcttcagactctt

SEQ ID NO: 145895 - DNA, 120 bp, Artificial Sequence
  ENSG00000104967_70 (sequence is synthesized)
acatcgggtagagggagctgcctggactcaagggaagagtgaagagtgggatgggaatgggtgggtgcggagttctggcatgtagattctgcctcactacaagggagaactttctcacaa

SEQ ID NO: 145896 - DNA, 120 bp, Artificial Sequence
  ENSG00000104967_71 (sequence is synthesized)
caaagaatggccaaaactccacaagctgccgctggcactgcatctaggtcttcgaggctgtccttcatcgtgttggtccccccaggagtggagggtgttaagcaatgatgggaggagact

SEQ ID NO: 145897 - DNA, 120 bp, Artificial Sequence
  ENSG00000104967_72 (sequence is synthesized)
gaatcagaattggatttgaatctgagcccagtagctgtgttcgtgtccttgggctggtgatgaccgtgggctggtaccttcacttctctgtgcccctctgtgcctcagtttcctcttgtg

SEQ ID NO: 145898 - DNA, 120 bp, Artificial Sequence
  ENSG00000104969_0 (sequence is synthesized)
aagcgcaaccgtcggtgggtcggggatcggtcgcctgagaggtatcacctcttctgggctcaagatggacaacaagaagcgcctggcctacgccatcatccagttcctgcatgaccagct

SEQ ID NO: 145899 - DNA, 120 bp, Artificial Sequence
  ENSG00000104969_1 (sequence is synthesized)
ccggcacgggggcctctcgtccgatgctcaggagagcttggaagtcgccatccagtgcctggagactgcgtttggggtgacggtagaagacagtgaccttgcgctccctcagactctgcc

SEQ ID NO: 145900 - DNA, 120 bp, Artificial Sequence
  ENSG00000104969_2 (sequence is synthesized)
ggagatatttgaagcggctgccacgggcaaggagatgccgcaggacctgaggagccccgcgcgaaccccgccttccgaggaggactcagcagaggcagagcgcctcaaaaccgaaggaaa

SEQ ID NO: 145901 - DNA, 120 bp, Artificial Sequence
  ENSG00000104969_3 (sequence is synthesized)
cgagcagatgaaagtggaaaactttgaagctgccgtgcatttctacggaaaagccatcgagctcaacccagccaacgccgtctatttctgcaacagagccgcagcctacagcaaactcgg

SEQ ID NO: 145902 - DNA, 120 bp, Artificial Sequence
  ENSG00000104969_4 (sequence is synthesized)
caactacgcaggcgcggtgcaggactgtgagcgggccatctgcattgacccggcctacagcaaggcctacggcaggatgggcctggcgctctccagcctcaacaagcacgtggaggccgt

SEQ ID NO: 145903 - DNA, 120 bp, Artificial Sequence
  ENSG00000104969_5 (sequence is synthesized)
ggcttactacaagaaggctctggagctggaccccgacaacgagacatacaagtccaacctcaagatagcggagctgaagctgcgggaggcccccagccccacgggaggcgtgggcagctt

SEQ ID NO: 145904 - DNA, 120 bp, Artificial Sequence
  ENSG00000104969_6 (sequence is synthesized)
cgacatcgccggcctgctgaacaaccctggcttcatgagcatggcttcgaacctaatgaacaatccccagattcagcagctcatgtccggcatgatttcgggtggcaacaaccccttggg

SEQ ID NO: 145905 - DNA, 120 bp, Artificial Sequence
  ENSG00000104969_7 (sequence is synthesized)
aactcccggcaccagcccctcgcagaacgacctggccagcctcatccaggcgggccagcagtttgcccagcagatgcagcagcagaacccagagttgatagagcagctcaggagccagat

SEQ ID NO: 145906 - DNA, 120 bp, Artificial Sequence
  ENSG00000104969_8 (sequence is synthesized)
ccggagtcggacgcccagcgccagcaacgacgaccagcaggagtgacgctgcctgctcccggtgtgaccgcgtccttccctggccgacccgaaggaagccttctggttgtctgccacttc

SEQ ID NO: 145907 - DNA, 120 bp, Artificial Sequence
  ENSG00000104969_9 (sequence is synthesized)
tttatctctgccctcctccactccctttttgtaactcccttacagcccccagacccttcttgaaacgagagccagcaagctgagcacagaccagcagcgacctcccttccagcccccaga

SEQ ID NO: 145908 - DNA, 120 bp, Artificial Sequence
  ENSG00000104969_10 (sequence is synthesized)
aagctcggtcacttgagtgttttctagaatcctggggtgctcccgggccgctctcagagaagtggcaggtttcacgttcagccgtgtggcggatcgtgtggcttccaaagccttttacag

SEQ ID NO: 145909 - DNA, 120 bp, Artificial Sequence
  ENSG00000104969_11 (sequence is synthesized)
cccccgccccccatcccgtggtctgtctgcaggaactctcccgtctgtgagaagcctctttccgagtcgacctcccggccaccccggccctgtgcctgctcggaagagctcactgccagc

SEQ ID NO: 145910 - DNA, 120 bp, Artificial Sequence
  ENSG00000104969_12 (sequence is synthesized)
tgcggcctgggcaccgcgggccatgtgtgtttgcatgaggaactctttagtggcagacacctaagagacggctgcggtcaccccacgcctccgcggctcaggagccgtcctgggtgcata

SEQ ID NO: 145911 - DNA, 120 bp, Artificial Sequence
  ENSG00000104969_13 (sequence is synthesized)
ggaccagtttctgtgacttttctccagttgggcatgttgacagacatgtttcccctcctcccaccctcattttctggtcctcgcgactgagagccaggggcgacatcatgaccttctgtc

SEQ ID NO: 145912 - DNA, 120 bp, Artificial Sequence
  ENSG00000104969_14 (sequence is synthesized)
ccggccgccttagccccgggcacagggaaggcagctgggccgtttctgtctgtgtcccatcctgctgtccttctgtcctggatgtttcatgggcccggggccccccagggaagcttaccc

SEQ ID NO: 145913 - DNA, 120 bp, Artificial Sequence
  ENSG00000104969_15 (sequence is synthesized)
ctcctgtgctgggtggaggccacgggacacctcaggtgccacccaccttggccctaaaacagccaccaggaaagcagccggagagccggacagcaggcagcctgtctgggttcctgaggc

SEQ ID NO: 145914 - DNA, 120 bp, Artificial Sequence
  ENSG00000104969_16 (sequence is synthesized)
ctgggggtggcagacgagcccacggcgccgtggtcccagcagcagggttgtcagtcggagcatcctggggctccctggctcctggccgtctgtgaggtaggcgcagtaccgtgtatcgta

SEQ ID NO: 145915 - DNA, 120 bp, Artificial Sequence
  ENSG00000104969_17 (sequence is synthesized)
ggtagcagtaggaacgggggccgccgcggccctgcagccgctcatggcggtgaggtgtgtgccaagcccacccggggtgcagggcgtgacgtgtggggaataaataggcgttgtgacctc

SEQ ID NO: 145916 - DNA, 120 bp, Artificial Sequence
  ENSG00000104969_18 (sequence is synthesized)
ctctcttcgtgtggccacatggcctcagcctctgcctccgtcttcacgcggccgtctccgtgcggccatgttcaatccctgcattagggccaccacagcgacctcatctccacttgtttc

SEQ ID NO: 145917 - DNA, 120 bp, Artificial Sequence
  ENSG00000104969_19 (sequence is synthesized)
catctgcaaagacacagacaaggtcccgtgctcaggtcccaggtggacgtgactagcccagaacttggctgctccagcggcgggggcgggggcggctgcttctccacgcagcttgttaca

SEQ ID NO: 145918 - DNA, 120 bp, Artificial Sequence
  ENSG00000104969_20 (sequence is synthesized)
tctgaatgtttagagtcaccatcgccagccttcgggggaaatggaggcacagtgaggccaagccttcctgagctggcgcctcaaggcagccggccagcctgccccgggggaagctcacgt

SEQ ID NO: 145919 - DNA, 120 bp, Artificial Sequence
  ENSG00000104969_21 (sequence is synthesized)
ggggcttcctgctcagagccgtgaaggtcactgtggccgaggcccctccaagttggcccaggcacccaggaaacctgtgtgaaaggtcttgtactaaaaaaagacctgtccatagactac

SEQ ID NO: 145920 - DNA, 120 bp, Artificial Sequence
  ENSG00000104969_22 (sequence is synthesized)
agctccagattccagaacagcctctcctgatgtcaccatctggcaccctttagagctttggcaggaaactgcagggaccacagacatgagcagaagcagctgtcaagtcctgggaatgag

SEQ ID NO: 145921 - DNA, 120 bp, Artificial Sequence
  ENSG00000104969_23 (sequence is synthesized)
gcggtgcgcaagcgcaaccgtcggtgggtcggggatcggtcgcctgagagatgacgtcttgctttgtcacccagactggcgtgcagtggtgcgatctcagctcagtgcagtctccacctc

SEQ ID NO: 145922 - DNA, 120 bp, Artificial Sequence
  ENSG00000104969_24 (sequence is synthesized)
aaatctgaggtcaccaagtgaggtgtgtctgcctggggatcctgacctgatgccgcctgttacagaatcatttccaatgaaacctctgaagagatgtcggcaccattctcagctaaagac

SEQ ID NO: 145923 - DNA, 120 bp, Artificial Sequence
  ENSG00000104969_25 (sequence is synthesized)
acctggttgggtgtgaccctcatctcaaagaccccagactttgaagagaaactcttttcttgaggcagggtctcactctctttcccaggctggagtgcattggtgtgatcacagctcact

SEQ ID NO: 145924 - DNA, 120 bp, Artificial Sequence
  ENSG00000104969_26 (sequence is synthesized)
ggcgctgcgagatcgctcctgaagcaggaacccaaaacaggatttaagtcacaatgtggaggtcacagctcgtgggtgggggggcgaaaatgtagggaaaagggtatgaaagaccgaatg

SEQ ID NO: 145925 - DNA, 120 bp, Artificial Sequence
  ENSG00000104969_27 (sequence is synthesized)
cccggctcttactgttggttggcgtgctggagtccagaaccaaggctggttaagatggaaagtgtctgatgaaagagaatgatgcgctgggagctttgtcttcctgacaaatttgttctg

SEQ ID NO: 145926 - DNA, 120 bp, Artificial Sequence
  ENSG00000104969_28 (sequence is synthesized)
cgcaaccgtcggtgggtcggggatcggtcgcctgagagagtcttcttctgcatatcgtgctagaggtgggggaaatctgggattcaggaccgtccaccaccacctcccacccgctgtgta

SEQ ID NO: 145927 - DNA, 120 bp, Artificial Sequence
  ENSG00000104972_0 (sequence is synthesized)
ctcagcctgggcggcacagccagatgcgagatgcgtctctgctgatctgagtctgcctgcagcatggacctgggtcttccctgaagcatctccagggctggagggacgactgccatgcac

SEQ ID NO: 145928 - DNA, 120 bp, Artificial Sequence
  ENSG00000104972_1 (sequence is synthesized)
cgagggctcatccatccacagagcagggcagtgggaggagacgccatgacccccatcctcacggtcctgatctgtctcgggctgagtctgggcccccggacccacgtgcaggcagggcac

SEQ ID NO: 145929 - DNA, 120 bp, Artificial Sequence
  ENSG00000104972_2 (sequence is synthesized)
ctccccaagcccaccctctgggctgaaccaggctctgtgatcacccaggggagtcctgtgaccctcaggtgtcaggggggccaggagacccaggagtaccgtctatatagagaaaagaaa

SEQ ID NO: 145930 - DNA, 120 bp, Artificial Sequence
  ENSG00000104972_3 (sequence is synthesized)
acagcaccctggattacacggatcccacaggagcttgtgaagaagggccagttccccatcccatccatcacctgggaacacacagggcggtatcgctgttactatggtagcgacactgca

SEQ ID NO: 145931 - DNA, 120 bp, Artificial Sequence
  ENSG00000104972_4 (sequence is synthesized)
ggccgctcagagagcagtgaccccctggagctggtggtgacaggagcctacatcaaacccaccctctcagcccagcccagccccgtggtgaactcaggagggaatgtaaccctccagtgt

SEQ ID NO: 145932 - DNA, 120 bp, Artificial Sequence
  ENSG00000104972_5 (sequence is synthesized)
gactcacaggtggcatttgatggcttcattctgtgtaaggaaggagaagatgaacacccacaatgcctgaactcccagccccatgcccgtgggtcgtcccgcgccatcttctccgtgggc

SEQ ID NO: 145933 - DNA, 120 bp, Artificial Sequence
  ENSG00000104972_6 (sequence is synthesized)
cccgtgagcccgagtcgcaggtggtggtacaggtgctatgcttatgactcgaactctccctatgagtggtctctacccagtgatctcctggagctcctggtcctaggtgtttctaagaag

SEQ ID NO: 145934 - DNA, 120 bp, Artificial Sequence
  ENSG00000104972_7 (sequence is synthesized)
ccatcactctcagtgcagccaggtcctatcgtggcccctgaggagaccctgactctgcagtgtggctctgatgctggctacaacagatttgttctgtataaggacggggaacgtgacttc

SEQ ID NO: 145935 - DNA, 120 bp, Artificial Sequence
  ENSG00000104972_8 (sequence is synthesized)
cttcagctcgctggcgcacagccccaggctgggctctcccaggccaacttcaccctgggccctgtgagccgctcctacgggggccagtacagatgctacggtgcacacaacctctcctcc

SEQ ID NO: 145936 - DNA, 120 bp, Artificial Sequence
  ENSG00000104972_9 (sequence is synthesized)
gagtggtcggcccccagcgaccccctggacatcctgatcgcaggacagttctatgacagagtctccctctcggtgcagccgggccccacggtggcctcaggagagaacgtgaccctgctg

SEQ ID NO: 145937 - DNA, 120 bp, Artificial Sequence
  ENSG00000104972_10 (sequence is synthesized)
tgtcagtcacagggatggatgcaaactttccttctgaccaaggagggggcagctgatgacccatggcgtctaagatcaacgtaccaatctcaaaaataccaggctgaattccccatgggt

SEQ ID NO: 145938 - DNA, 120 bp, Artificial Sequence
  ENSG00000104972_11 (sequence is synthesized)
ccatgcggggacctacaggtgctacggctcacagagctccaaaccctacctgctgactcaccccagtgaccccctggagctcgtggtctcaggaccgtctgggggccccagctccccgac

SEQ ID NO: 145939 - DNA, 120 bp, Artificial Sequence
  ENSG00000104972_12 (sequence is synthesized)
aacaggccccacctccacatctgcaggccctgaggaccagcccctcacccccaccgggtcggatccccagagtggtctgggaaggcacctgggggttgtgatcggcatcttggtggccgt

SEQ ID NO: 145940 - DNA, 120 bp, Artificial Sequence
  ENSG00000104972_13 (sequence is synthesized)
catcctactgctcctcctcctcctcctcctcttcctcatcctccgacatcgacgtcagggcaaacactggacatcgacccagagaaaggctgatttccaacatcctgcaggggctgtggg

SEQ ID NO: 145941 - DNA, 120 bp, Artificial Sequence
  ENSG00000104972_14 (sequence is synthesized)
gccagagcccacagacagaggcctgcagtggaggtccagcccagctgccgatgcccaggaagaaaacctctatgctgccgtgaagcacacacagcctgaggatggggtggagatggacac

SEQ ID NO: 145942 - DNA, 120 bp, Artificial Sequence
  ENSG00000104972_15 (sequence is synthesized)
tcggcagagcccacacgatgaagacccccaggcagtgacgtatgccgaggtgaaacactccagacctaggagagaaatggcctctcctccttccccactgtctggggaattcctggacac

SEQ ID NO: 145943 - DNA, 120 bp, Artificial Sequence
  ENSG00000104972_16 (sequence is synthesized)
aaaggacagacaggcggaagaggacaggcagatggacactgaggctgctgcatctgaagccccccaggatgtgacctacgcccagctgcacagcttgaccctcagacgggaggcaactga

SEQ ID NO: 145944 - DNA, 120 bp, Artificial Sequence
  ENSG00000104972_17 (sequence is synthesized)
gcctcctccatcccaggaagggccctctccagctgtgcccagcatctacgccactctggccatccactagcccagggggggacgcagaccccacactccatggagtctggaatgcatggg

SEQ ID NO: 145945 - DNA, 120 bp, Artificial Sequence
  ENSG00000104972_18 (sequence is synthesized)
agctgcccccccagtggacaccattggaccccacccagcctggatctaccccaggagactctgggaacttttaggggtcactcaattctgcagtataaataactaatgtctctacaattt

SEQ ID NO: 145946 - DNA, 120 bp, Artificial Sequence
  ENSG00000104972_19 (sequence is synthesized)
tgaaataaagcaacagacttctcaataatcaatgaagtagctgagaaaactaagtcagaaagtgcattaaactgaatcacaatgtaaatattacacatcaagcgatgaaactggaaaact

SEQ ID NO: 145947 - DNA, 120 bp, Artificial Sequence
  ENSG00000104972_20 (sequence is synthesized)
atgaaactggaaaactacaagccacgaatgaatgaattaggaaagaaaaaaagtaggaaatgaatgatcttggctttcctataagaaatttagggcagggcacggtggctcacgcctgta

SEQ ID NO: 145948 - DNA, 120 bp, Artificial Sequence
  ENSG00000104972_21 (sequence is synthesized)
gagaaaagaggagaggagaggaggaacagaaaagaaaagaaaagaaaaagtgggaaacaaataatctaagaatgaggagaaagcaagaagagtgacccccttgtgggcactccattggtt

SEQ ID NO: 145949 - DNA, 120 bp, Artificial Sequence
  ENSG00000104972_22 (sequence is synthesized)
ggtaaggaccccacaacactgagctgatggacggctgaaggagggagggtgaccatgtgggaggctgtgagaaggaaggagatgcctccgctaccctcgtcaggaagggcagacacagga

SEQ ID NO: 145950 - DNA, 120 bp, Artificial Sequence
  ENSG00000104972_23 (sequence is synthesized)
aggaaccagttttatttgctgctacatcctggctctcagtgggatgaaaacaaaccagacagacggtggctgggggtcaggaaagggcccattaccatctgaaatgatgcagagggccta

SEQ ID NO: 145951 - DNA, 120 bp, Artificial Sequence
  ENSG00000104972_24 (sequence is synthesized)
gtgactgcccccacctcagccctaatggaatgagagcaagggtcctggggagggcagttccacttcctgtgtggctgcagatgacagcaccccatgagaagaaggacccagcctccgatt

SEQ ID NO: 145952 - DNA, 120 bp, Artificial Sequence
  ENSG00000104972_25 (sequence is synthesized)
gaggcaggggtgggttctgtcctaggttcagtctcctctggaggtggtgatatagacaggctcctcccctgcttgggcctcagtttctccaaatgtaaaggtgagaggcctgcgggtggg

SEQ ID NO: 145953 - DNA, 120 bp, Artificial Sequence
  ENSG00000104972_26 (sequence is synthesized)
gctcggctctggtgcaggaacaagggctgcaggtcagactcctgggcttccttcccagctctgccgcttcctggctgggggccccgggcaggcgattcccctctctgagcgtcagttttt

SEQ ID NO: 145954 - DNA, 120 bp, Artificial Sequence
  ENSG00000104972_27 (sequence is synthesized)
catctgtacagtgggtggggtggatgtttctgtgctgcacgactgttgtgggggttggaggtggtgaacagaaggtccagcagtcacctgcacacagtaggcgctcatttcaatgacatc

SEQ ID NO: 145955 - DNA, 120 bp, Artificial Sequence
  ENSG00000104972_28 (sequence is synthesized)
acagtcagtcccatctacaaatgtaaagtgtccttcgggctcagtgccatctacaaatgtaaagtgtccttcgggctctgtccatcctatgaggcatttggaacatggaggcaggagtgt

SEQ ID NO: 145956 - DNA, 120 bp, Artificial Sequence
  ENSG00000104972_29 (sequence is synthesized)
ttttaggtttccttccttaccttcgagctgtgtgtgcagggcagggggctccaatgttcccagggctgaggctctgtccttcttcccccagcccagagaaaggctgatttccaacatcct

SEQ ID NO: 145957 - DNA, 120 bp, Artificial Sequence
  ENSG00000104972_30 (sequence is synthesized)
gtcccaggcaccaaaggcctcctggtgccagatctaatcctgcagaacttctctgtcctccttcccccggctctcagcatcgtcacggtggacccctccttgtccagcacgctgcctccc

SEQ ID NO: 145958 - DNA, 120 bp, Artificial Sequence
  ENSG00000104972_31 (sequence is synthesized)
gcctgctgcgacctcactctctcctgctgtcctgggacctcgtgggcctcctcccgggtccccttcctgctcctcatcctctgtttggccgtctggttgttagagctctccccaggcctc

SEQ ID NO: 145959 - DNA, 120 bp, Artificial Sequence
  ENSG00000104972_32 (sequence is synthesized)
aggaggatgaggaataaatgaaccaccccggtcccccaggctccccttcattcattcaaccagcaagtgttcccagggagctcactgtggatggggctccccatgggagctgcagacaca

SEQ ID NO: 145960 - DNA, 120 bp, Artificial Sequence
  ENSG00000104972_33 (sequence is synthesized)
gcagggaggaaagccgcccccgcctcctgagctcacctcgtggtgggagacaaaatgcaaataaatgtgccgcctccaggagtgcaacgtgctgtaaggaacataaaccagagaaagggc

SEQ ID NO: 145961 - DNA, 120 bp, Artificial Sequence
  ENSG00000104972_34 (sequence is synthesized)
agctgatgacccatggcgtctaagatcaacgtaccaatctcaaaaataccaggctgaattccccatgggtcctgtgacctcagcccatgcggggacctacaggaccgtctgggggcccca

SEQ ID NO: 145962 - DNA, 120 bp, Artificial Sequence
  ENSG00000104972_35 (sequence is synthesized)
gctccccgacaacaggccccacctccacatctgcaggccctgaggaccagcccctcacccccaccgggtcggatccccagagtgtaggcgctcatttcaatgacatcacccccatccctg

SEQ ID NO: 145963 - DNA, 120 bp, Artificial Sequence
  ENSG00000104972_36 (sequence is synthesized)
ccccaggcagcagcgagctcttgcaggaaggcccgtgaggctgcagccaaatgggcaacgtcagagtgaggagcagaggccagaaccacagcgagggagcggccagaccctccacggcct

SEQ ID NO: 145964 - DNA, 120 bp, Artificial Sequence
  ENSG00000104972_37 (sequence is synthesized)
tagggcgtccctgagattccatcgggaaagggatgtaatcggatcacccggggaacagtgaggaaaattgactccagggggtcaggaggattcaaggacaccccccaccactgtctctct

SEQ ID NO: 145965 - DNA, 120 bp, Artificial Sequence
  ENSG00000104973_0 (sequence is synthesized)
attccgcggcgtcggctgcggctgcagtggtggtggcgggtaccgcacggggtatggtccccgggtccgagggcccggcccgcgccgggagcgtggtggccgacgtggtgtttgtgattg

SEQ ID NO: 145966 - DNA, 120 bp, Artificial Sequence
  ENSG00000104973_1 (sequence is synthesized)
agggtacggccaacctgggaccctacttcgaggggctccgcaagcactacctgctcccggccatcgagtattttaatggtggtcctcctgctgagacggacttcgggggagactatgggg

SEQ ID NO: 145967 - DNA, 120 bp, Artificial Sequence
  ENSG00000104973_2 (sequence is synthesized)
ggacccagtacagcctcgtggtgttcaacacagtggactgcgctcccgagtcctacgtacaatgtcacgctcccaccagcagcgcctatgagtttgtcacctggctcgatggcattaagt

SEQ ID NO: 145968 - DNA, 120 bp, Artificial Sequence
  ENSG00000104973_3 (sequence is synthesized)
tcatgggcgggggtggtgagagctgcagcctcatcgcggaaggactcagcacagccttgcagctgtttgatgacttcaagaagatgcgcgagcagattggccagacgcaccgggtctgcc

SEQ ID NO: 145969 - DNA, 120 bp, Artificial Sequence
  ENSG00000104973_4 (sequence is synthesized)
tcctcatctgcaactcacccccatacttgttgcctgctgttgagagcaccacgtactctggatgcacaactgagaatcttgtgcagcagattggggagcgggggatccacttctccattg

SEQ ID NO: 145970 - DNA, 120 bp, Artificial Sequence
  ENSG00000104973_5 (sequence is synthesized)
tgtctccccggaagctgcctgcgcttcggcttctgtttgagaaggcagcccccccggccttgctggagccgctgcagcctccgacagatgtgagccaggacccgaggcacatggtgctgg

SEQ ID NO: 145971 - DNA, 120 bp, Artificial Sequence
  ENSG00000104973_6 (sequence is synthesized)
ttcggggactcgtgctgcctgttgggggtggctcagccccaggccccctccagtcaaagcagccagtccccctgcctcccgccgcaccctcaggtgccactctctcagcagccccccagc

SEQ ID NO: 145972 - DNA, 120 bp, Artificial Sequence
  ENSG00000104973_7 (sequence is synthesized)
agcctctgccccccgtccccccgcagtaccaggttcccgggaacctgagtgcagctcaggtggccgcgcagaatgcagtggaggctgccaagaaccagaaggctgggctgggccctcgct

SEQ ID NO: 145973 - DNA, 120 bp, Artificial Sequence
  ENSG00000104973_8 (sequence is synthesized)
tctcgcccatcacccctctccaacaagctgctcccggagtgggtccccccttcagccaggccccagctccccaactacccccaggaccccctggcgcccccaagccaccacctgcttccc

SEQ ID NO: 145974 - DNA, 120 bp, Artificial Sequence
  ENSG00000104973_9 (sequence is synthesized)
agcccagtctggtctccactgtggcccctggctccggcctggctcccacggcacagcccggggcaccgtccatggcaggcactgtggccccaggaggggtgagcggcccttccccagccc

SEQ ID NO: 145975 - DNA, 120 bp, Artificial Sequence
  ENSG00000104973_10 (sequence is synthesized)
agctgggagccccagccctcggtgggcagcagtcagtctccaataagcttctggcctggagcggggtcctggagtggcaagagaaacccaaacctgcctcagtggatgccaacaccaagc

SEQ ID NO: 145976 - DNA, 120 bp, Artificial Sequence
  ENSG00000104973_11 (sequence is synthesized)
tgacgcggtcactgccctgccaggtctacgtgaatcatggcgagaacctgaagacggagcagtggccccagaagctgatcatgcagctcatcccccagcagctgctgaccaccctgggcc

SEQ ID NO: 145977 - DNA, 120 bp, Artificial Sequence
  ENSG00000104973_12 (sequence is synthesized)
ctttgttccggaactcaaggatggtccagttccatttcaccaacaaggacctggagtctctcaaaggcctctaccgcatcatgggcaacggcttcgcgggctgcgtgcacttcccccaca

SEQ ID NO: 145978 - DNA, 120 bp, Artificial Sequence
  ENSG00000104973_13 (sequence is synthesized)
cggcgccctgtgaggtgcgcgtgctcatgctcctgtactcgtccaagaagaagatcttcatgggcctcatcccctacgaccagagcggcttcgtcaacggcatccggcaggtcatcacca

SEQ ID NO: 145979 - DNA, 120 bp, Artificial Sequence
  ENSG00000104973_14 (sequence is synthesized)
accacaagcaggtccagcagcagaagctggagcagcagcagcgaggaatggggggacagcaggcacccccagggctggggcccattctggaggaccaagccaggccctcacagaatctgc

SEQ ID NO: 145980 - DNA, 120 bp, Artificial Sequence
  ENSG00000104973_15 (sequence is synthesized)
tccagctccgcccaccgcagccccagcctcagggtaccgtaggggcctctggggccacggggcagccccagccccaaggtactgcccagcccccgccaggtgcccctcaaggccctcctg

SEQ ID NO: 145981 - DNA, 120 bp, Artificial Sequence
  ENSG00000104973_16 (sequence is synthesized)
ccagaaccctggggccaaccctcagctgcgaagcctcctcctcaacccaccaccgccgcagactggggtgcccccaccccaggcctccctccaccacctccagccaccaggggctcctgc

SEQ ID NO: 145982 - DNA, 120 bp, Artificial Sequence
  ENSG00000104973_17 (sequence is synthesized)
gctgctgcctccgccgcaccagggcctggggcagccccagttggggcccccactcctgcatccaccacctgcccagtcctggcccgcacaacttccccctcgggctccactgccagcggc

SEQ ID NO: 145983 - DNA, 120 bp, Artificial Sequence
  ENSG00000104973_18 (sequence is synthesized)
aaaacgaaagagagaaggagagggccgtgtgtttcgagaaaaatgggagcgagcctatttctttgtggaagtgaagagcatgcctatgtgtttaatatgcaaacaaatcgtgtctgtgtt

SEQ ID NO: 145984 - DNA, 120 bp, Artificial Sequence
  ENSG00000104973_19 (sequence is synthesized)
gaaagaatacaacctgaaacgccactatgaatcaaagcatagtaagagctacgaccagtacacagaacagactcgagatgccatcctcaacgaactgaaaaagggactcaaatgtcaata

SEQ ID NO: 145985 - DNA, 120 bp, Artificial Sequence
  ENSG00000104973_20 (sequence is synthesized)
gggtttgttttgaaaagcgaattaacagaagtggcgcggcagtggtacgccgttccggaatcacgtgagaagaatgacctgggcattcagagctacagcagatggcaagtttataaagga

SEQ ID NO: 145986 - DNA, 120 bp, Artificial Sequence
  ENSG00000104973_21 (sequence is synthesized)
gcagagtgacgtgtcctgcacagaaacacatgactgttgagaccgttatttaagtctaacgggcatttgcgttgcacagtgagttggagataactcgggggatttacaagtccagttgct

SEQ ID NO: 145987 - DNA, 120 bp, Artificial Sequence
  ENSG00000104973_22 (sequence is synthesized)
tgaaagagtcaaattgattgtggccttttctttcgctgctcataaactattaccacccagttagctttatttatttgtggtgttaagaatcttgatgtgaccgaagaagtctgtggcatg

SEQ ID NO: 145988 - DNA, 120 bp, Artificial Sequence
  ENSG00000104973_23 (sequence is synthesized)
gtgccaaggcaggcccaacactgggaaaggactaattttttttgtatattgagagaaaagtttcacatagactggccagagttccgaagcacaactacagacagcgtcatgacaggggga

SEQ ID NO: 145989 - DNA, 120 bp, Artificial Sequence
  ENSG00000104973_24 (sequence is synthesized)
cttggcaggacaccttgatccaaggcgacagcatttggcaaggacacggaagttgggtcgttgcatccatcatcaggagttgacttgttctgagcaactgaacagaacacaccgcgatgc

SEQ ID NO: 145990 - DNA, 120 bp, Artificial Sequence
  ENSG00000104973_25 (sequence is synthesized)
tctcgacacttccgctcctggacttcagtcacgagtgagttgatggtgacttgacctgagagatttcacagaagctctgtgacttggttgtggaagaaatctgaactgttcaagttaacc

SEQ ID NO: 145991 - DNA, 120 bp, Artificial Sequence
  ENSG00000104973_26 (sequence is synthesized)
aacttggttcattttaaatcaggcaaaagccacagtgggttcccctgagaaggttagtcaaagacttctggtcaaggttatgaccgttctgaacactgaatatttctccgcaaggatgtc

SEQ ID NO: 145992 - DNA, 120 bp, Artificial Sequence
  ENSG00000104973_27 (sequence is synthesized)
cacaaacagctacttgaatgtatgatggtgtatgcttggtcctggggaatccaccggcaaggaaaaaaaacctttactctttcctgtgctgcagtcggctttcagaaatgaaagaggtgg

SEQ ID NO: 145993 - DNA, 120 bp, Artificial Sequence
  ENSG00000104973_28 (sequence is synthesized)
cccggactgtattcacctacgtcctggggttgaagaccaaattcccccaaaggctctcggaatccagactcatgagaaggaacagacattgtccagtttgcctttgttggcagatgtttc

SEQ ID NO: 145994 - DNA, 120 bp, Artificial Sequence
  ENSG00000104973_29 (sequence is synthesized)
ttgtgtgaatgcagaccataaatagtaattgaactacagtgcaatacggcgctggttcctaaatacaagtctgtgtgaagatggtgagattctacaactatctccagtagttgtcctgaa

SEQ ID NO: 145995 - DNA, 120 bp, Artificial Sequence
  ENSG00000104973_30 (sequence is synthesized)
tatctgtgtttgggagtacccacgcttgtgaacagctgttttccgttacgaacctgaatcaaattaaacatcgttcccagttgaaggattcaaggctgaattctaaactgcccgtcccca

SEQ ID NO: 145996 - DNA, 120 bp, Artificial Sequence
  ENSG00000104973_31 (sequence is synthesized)
ccgtgccacccgaggcctgacactgacatctcggtgtggaagggaagacgccagccttttggcttcaactcaaaggcgcaaaaagaattatgaaagagaaaattttaataattaaatatt

SEQ ID NO: 145997 - DNA, 120 bp, Artificial Sequence
  ENSG00000104973_32 (sequence is synthesized)
tctatttttcaatttgtattttttcaattttgaatttaaaaatataaactccagtaacatccatgtttgtattatgttccatgcattcaccatagttgagtaaagatccgatttgatgat

SEQ ID NO: 145998 - DNA, 120 bp, Artificial Sequence
  ENSG00000104973_33 (sequence is synthesized)
agcgggggtccccggggcccggtcccccagccgggcctgcagcccagcgtcatggaggacgacatcctcatggatctcatctgaatccccaacacccaataaagttcctttttaacacac

SEQ ID NO: 145999 - DNA, 90 bp, Artificial Sequence
  ENSG00000104973_34 (sequence is synthesized)
ctagggactcctgggcctgagggaggaggggccgagaaagggctgggcctggactcctgagtttgagggaggaggggctgggggtctgga

SEQ ID NO: 146000 - DNA, 120 bp, Artificial Sequence
  ENSG00000104973_35 (sequence is synthesized)
gggcctgggggcctggactcctgggtctgagggtggaggcgctggggcccggattcctgggtccgagggaggagggagctaggggcccagatccctgggtctgagggaggaagggctggg

SEQ ID NO: 146001 - DNA, 120 bp, Artificial Sequence
  ENSG00000104973_36 (sequence is synthesized)
gtgacagtcaggggcggggtgtggtggggctggggctggccccctcctcacacctctcctggcatcgcccccaggaagacggagcagtggccccagaagctgatcatgcagctcatcccc

SEQ ID NO: 146002 - DNA, 120 bp, Artificial Sequence
  ENSG00000104973_37 (sequence is synthesized)
gagctttcccccacttggggtgggttgctggtccctgtgaggggccgtgaatgagtgatggcttggggtggttggtgtccccgtgagaggctgtgaataagtgatggcttggggtggttg

SEQ ID NO: 146003 - DNA, 120 bp, Artificial Sequence
  ENSG00000104973_38 (sequence is synthesized)
ctgcgaggggccgtgaatgagcgatggcttgggtttgagctgcaggaaacatctcatacattaagggattgaaaggactttgagggtgattgtgtttttgtcagaagtcacttttgtggt

SEQ ID NO: 146004 - DNA, 120 bp, Artificial Sequence
  ENSG00000104973_39 (sequence is synthesized)
ggcttctgtgtgctcagcaatgttgccatcagtttagaagtaggaaaaaccttcccattcagggaggcctggctgagctccagcagccaccttgtactccctgtgtgattgtcccctttc

SEQ ID NO: 146005 - DNA, 120 bp, Artificial Sequence
  ENSG00000104973_40 (sequence is synthesized)
tgtcctctctttttccgtctacccctgtcctccttttccagatgggtacattgtagcctcagtgcagggggatgggtcagagccaggatagatccctctgtggcttgggtcagaattttt

SEQ ID NO: 146006 - DNA, 120 bp, Artificial Sequence
  ENSG00000104973_41 (sequence is synthesized)
ttttttttttttttttgaaacagtgtcttgctctgtctcccaggcttgtagtgcagtggcacagtcgtggctcactgcaacctgtacctcctgggttgaagcgattcttctgcctcagcc

SEQ ID NO: 146007 - DNA, 120 bp, Artificial Sequence
  ENSG00000104973_42 (sequence is synthesized)
ggtggcatcgctccagggtcttcctccatcccgcagctgtcttccctctgtgtgtgtctccacatggcattctctctgtatctttgtgtctgtgcttataaggacatcagtaattttgga

SEQ ID NO: 146008 - DNA, 120 bp, Artificial Sequence
  ENSG00000104973_43 (sequence is synthesized)
ttaggccccattttcctgacctcatcttactacaattgcaaagaccctctttccagatagagtcaccttcacaggtgctggggactggaacctcagcttagctttctggttttgtttttt

SEQ ID NO: 146009 - DNA, 78 bp, Artificial Sequence
  ENSG00000104973_44 (sequence is synthesized)
gggactggaacctcagcttagctttctggttttgttttttgagacagagtttcactgttgtcattccgtctcctgggt

SEQ ID NO: 146010 - DNA, 120 bp, Artificial Sequence
  ENSG00000104973_45 (sequence is synthesized)
tcccaaagtgctaggattaccggtgtgagccaccgcgcccagcctcagcatagctttctgggagtcacagttcacactttgtaactcggggaaggagcagatcagttacttccgtgcacc

SEQ ID NO: 146011 - DNA, 120 bp, Artificial Sequence
  ENSG00000104973_46 (sequence is synthesized)
aggcactcctgcaggaaagagaaccttagggggatcacctcacgagaccctcacagaaccttgtgaagaaggcattcctgagagttagtacttccggctgcaaatcacgtagtttcccaa

SEQ ID NO: 146012 - DNA, 120 bp, Artificial Sequence
  ENSG00000104973_47 (sequence is synthesized)
acacatagataattgggggcactcggaaaaaatgttctcttatgattctgtgggtcacctgggctcagtgggccatctcgcttggcgactctcacggggttgccatcagatggcagctga

SEQ ID NO: 146013 - DNA, 120 bp, Artificial Sequence
  ENSG00000104973_48 (sequence is synthesized)
gactctggtcatctgaaacctttactgggctggatgttcaaaacagctcctcacacagccctggctgttggctggggcttggctaggaccggccatcccagtgtctgcacatggcctgtc

SEQ ID NO: 146014 - DNA, 120 bp, Artificial Sequence
  ENSG00000104973_49 (sequence is synthesized)
cacgtggccacactgtggcagctgggttctgagagggcaggcgttgtaggagcaggcatttatattttgcacaggacaggacatctagagggggccagctattgggattggtttcatagg

SEQ ID NO: 146015 - DNA, 120 bp, Artificial Sequence
  ENSG00000104973_50 (sequence is synthesized)
tctgtgacatcagggacagggccctgtggttctcttggcctctcctttatagtcacaaggtagctctcatggctccacgcatcctgtgtgctttcatgaaggaggggaagggggctgtgt

SEQ ID NO: 146016 - DNA, 120 bp, Artificial Sequence
  ENSG00000104973_51 (sequence is synthesized)
gtttccctttcttcaagacagcagaaactttctcagattccagagcaggcattcctttcacctcctatcccggacctaggccactgggcagcccctagttgatgggaggctgctgggagc

SEQ ID NO: 146017 - DNA, 120 bp, Artificial Sequence
  ENSG00000104973_52 (sequence is synthesized)
aggtatccgtgactgtctggggctgggacatgttacagccccagacagcattgggaatgcaggggaggaggacacttggatatggaataggcagctagcagggtctgtctcaggcaggaa

SEQ ID NO: 146018 - DNA, 120 bp, Artificial Sequence
  ENSG00000104973_53 (sequence is synthesized)
accgaggctcagagaagtcaattcacttggccaaggtcagcctcgcctccctcaggagcccctgccctgaatgctccatgtgttacccccctgatgaccagtgatgtttcctgggtgctt

SEQ ID NO: 146019 - DNA, 120 bp, Artificial Sequence
  ENSG00000104973_54 (sequence is synthesized)
gccggtgctgagggctggaggatctcttggatacccggggtccgacccaccgttgatcacaggcctgtgggtaccacgctgtgcatctaggccgctctcccggccgtgaccctcagccgc

SEQ ID NO: 146020 - DNA, 120 bp, Artificial Sequence
  ENSG00000104973_55 (sequence is synthesized)
cctctgaggaggccgccgtggcattttatgcccaagaaactgggtccatgaggagcaggtggtggctgaaggttgaagagctgggctccagcactttctctccgctttccctctcagtgg

SEQ ID NO: 146021 - DNA, 120 bp, Artificial Sequence
  ENSG00000104973_56 (sequence is synthesized)
gcagctggaaccctagcttgccctgagcgcctcagtttctgtctccagagcaacccatagcacacctgttctccttaaccttctatagcagaaacctcacctcaccttgcctgtggggcc

SEQ ID NO: 146022 - DNA, 120 bp, Artificial Sequence
  ENSG00000104973_57 (sequence is synthesized)
gacataggatccaagaatgagggttcccccatggcctttgcggagctctgagggctccgggaaagtacagcccatgggtccaaggacctagtgggttaagagcgtttcccatgatcctcc

SEQ ID NO: 146023 - DNA, 120 bp, Artificial Sequence
  ENSG00000104973_58 (sequence is synthesized)
tgtgtgtgctcctgggattgctgggaaatgtggtcttagggccagagaagtagttttggagaagggcccccaaaggctcatgggaaacagcatatttgtaactagatggggccagaaggt

SEQ ID NO: 146024 - DNA, 120 bp, Artificial Sequence
  ENSG00000104973_59 (sequence is synthesized)
gcttctgttgggtcccccaagggctgcctagaaaacttagtgcctctgggccctcctgggcccaagggcctactgggagatgcagtcccttccccactgcccctcaggtcagatgctgct

SEQ ID NO: 146025 - DNA, 120 bp, Artificial Sequence
  ENSG00000104974_0 (sequence is synthesized)
gcatttctcctctgtgctcactgccacacgcagctcaacctgagctacacagccagatgcgagatgcttctctgctgatctgagtctgcctgcagcatggaccttggtcttccctgaagc

SEQ ID NO: 146026 - DNA, 120 bp, Artificial Sequence
  ENSG00000104974_1 (sequence is synthesized)
atctccagggctggagggacgactgccatgcaccgagggctcatccatccgcagagcagggcagtgggaggagacgctatgacccccatcgtcacagtcctgatctgtctcaggctgagt

SEQ ID NO: 146027 - DNA, 120 bp, Artificial Sequence
  ENSG00000104974_2 (sequence is synthesized)
ctgggcccccggacccacgtgcaggcagggaccctccccaagcccacactctgggctgagccaggctctgtgatcacccaggggagtcccgtgaccctctggtgtcaggggatcctggag

SEQ ID NO: 146028 - DNA, 120 bp, Artificial Sequence
  ENSG00000104974_3 (sequence is synthesized)
acccaggagtaccgtctgtatagagaaaagaaaacagcaccctggattacacggatcccacaggagattgtgaagaagggccagttccccatcccatccatcacctgggaacacacaggg

SEQ ID NO: 146029 - DNA, 120 bp, Artificial Sequence
  ENSG00000104974_4 (sequence is synthesized)
cggtatcgctgtttctacggtagccacactgcaggctggtcagagcccagtgaccccctggagctggtggtgacaggagcctacatcaaacccaccctctcagctctacccagccctgtg

SEQ ID NO: 146030 - DNA, 120 bp, Artificial Sequence
  ENSG00000104974_5 (sequence is synthesized)
gtgacctcaggagggaacgtgaccctccattgtgtctcacaggtggcatttggcagcttcattctgtgtaaggaaggagaagatgaacacccacaatgcctgaactcacagccccgtacc

SEQ ID NO: 146031 - DNA, 120 bp, Artificial Sequence
  ENSG00000104974_6 (sequence is synthesized)
catgggtggtcccgggccatcttctctgtgggccccgtgagcccgagtcgcaggtggtcgtacaggtgctatgcttatgactcgaactctccccatgtgtggtctctacccagtgatctc

SEQ ID NO: 146032 - DNA, 120 bp, Artificial Sequence
  ENSG00000104974_7 (sequence is synthesized)
ctggagctcctggtcctaggtgtttctaagaagccatcactctcagtgcagccaggtcctatagtggcccctggggagagcctgaccctccagtgtgtttctgatgtcagctacgacaga

SEQ ID NO: 146033 - DNA, 120 bp, Artificial Sequence
  ENSG00000104974_8 (sequence is synthesized)
tttgttctgtataaggagggagaacgtgacttcctccagctccctggcccacagccccaggctgggctctcccaggccaacttcaccctgggccctgtgagccgctcctacgggggccag

SEQ ID NO: 146034 - DNA, 120 bp, Artificial Sequence
  ENSG00000104974_9 (sequence is synthesized)
tacagatgctccggtgcatacaacctctcctccgagtggtcggcccccagcgaccccctggacatcctgatcgcaggacagttccgtggcagacccttcatctcggtgcatccgggcccc

SEQ ID NO: 146035 - DNA, 120 bp, Artificial Sequence
  ENSG00000104974_10 (sequence is synthesized)
acggtggcctcaggagagaacgtgaccctgctgtgtcagtcatgggggccgttccacactttccttctgaccaaggcgggagcagctgatgcccccctccgtctcagatcaatacacgaa

SEQ ID NO: 146036 - DNA, 120 bp, Artificial Sequence
  ENSG00000104974_11 (sequence is synthesized)
tatcctaagtaccaggctgaattccctatgagtcctgtgacctcagcccactcggggacctacaggtgctacggctcactcagctccaacccctacctgctgtctcaccccagtgactcc

SEQ ID NO: 146037 - DNA, 120 bp, Artificial Sequence
  ENSG00000104974_12 (sequence is synthesized)
ctggagctcatggtctcaggagcagctgagaccctcagcccaccacaaaacaagtccgattccaaggctggagcagctaacaccctcagcccatcacaaaacaagactgcctcacacccc

SEQ ID NO: 146038 - DNA, 120 bp, Artificial Sequence
  ENSG00000104974_13 (sequence is synthesized)
cagccgggaggtgaacagcagagagaagaatgtacccttcagagtggtggagccttgggaacagatctgatgatgccaggaggttccgggagacaatttagggctgatgctatctggact

SEQ ID NO: 146039 - DNA, 120 bp, Artificial Sequence
  ENSG00000104974_14 (sequence is synthesized)
gtctgccaatcatttttagagggaggaatcagtgttggattgcagagacattttctggagtgatccatgaaggaccattaacctgtgatacctttcctctctattaatgttgacttccct

SEQ ID NO: 146040 - DNA, 120 bp, Artificial Sequence
  ENSG00000104974_15 (sequence is synthesized)
tggttggatcctcttctttccccacccccagacagacatgaggctacatcccacatggcagcgttgggtccacacctctgcacatctgtgtgctctggtccatggtgtgtaacacagtct

SEQ ID NO: 146041 - DNA, 120 bp, Artificial Sequence
  ENSG00000104974_16 (sequence is synthesized)
tctttattactcattgccatactccctggtgtgctttactgagcctccatctcttcaattcagagttccaaacgtgcttcagtaactaaatcaatgggagagtatcggatttcaaccagg

SEQ ID NO: 146042 - DNA, 120 bp, Artificial Sequence
  ENSG00000104974_17 (sequence is synthesized)
aaaagataaatccaccctgatgccctgacaccctctctgaaccctacgagcccttccctccttctcacatgctacctgtgcagcttctccttagatcattgtgtaaccatcactgccatc

SEQ ID NO: 146043 - DNA, 120 bp, Artificial Sequence
  ENSG00000104974_18 (sequence is synthesized)
ctgttccacacatggtcatcaccctacacccattcagcagccactccccattccctcttccctccagcacctgctaaccacaaatgtgctttctgtctctacggatttgcctattctgtc

SEQ ID NO: 146044 - DNA, 120 bp, Artificial Sequence
  ENSG00000104974_19 (sequence is synthesized)
tgaaaacatttcaatctcctttgacctgtgagctcctcacttcgagacttcctgcctttccaggcagaaccaaagtacaccacgtcaaaagcaatgataggcatttgcagtgtgttggtg

SEQ ID NO: 146045 - DNA, 120 bp, Artificial Sequence
  ENSG00000104974_20 (sequence is synthesized)
atccacgaaaggaaaatcacggaagcaggatagaaatccagctgcagacaagacctcaggtcgatgaatcttgacaagcagttgagctgtttttttctactcacctaggacagtcaggca

SEQ ID NO: 146046 - DNA, 120 bp, Artificial Sequence
  ENSG00000104974_21 (sequence is synthesized)
gaagtatgcaaaatgactggggctgattcttttctgaattgtcgcaaacagcaagaggacttgagtcctagcattaaagagttcaacatgtctaggtccaagaccactgttgtgtttgaa

SEQ ID NO: 146047 - DNA, 120 bp, Artificial Sequence
  ENSG00000104974_22 (sequence is synthesized)
ggatgtaaaaccctgctgcataggatggaatatttggagggaggatcctgaaaaacatgagggatcaaatagtcctcaactttctaggacaaagggagcagctatttgccatctaccctc

SEQ ID NO: 146048 - DNA, 120 bp, Artificial Sequence
  ENSG00000104974_23 (sequence is synthesized)
cagaataaagaaatcttatcattcaccatctaccctctagaataaagaaatcttatcattcgccatctaccctgtagaataaagaaatcttatcattcaccgtctaccctctagagtaaa

SEQ ID NO: 146049 - DNA, 120 bp, Artificial Sequence
  ENSG00000104974_24 (sequence is synthesized)
caaatcttatcattcaccatctaccctctagaataaagaaatcttatcattcgccatctaccctctagaataaagaaatcttatcattcaccgtctaccctctagagtaaacaaatctta

SEQ ID NO: 146050 - DNA, 120 bp, Artificial Sequence
  ENSG00000104974_25 (sequence is synthesized)
tcattcgccatctaccctctagaatagagaaatcttatcattcatcatctaccctccagaataaagaaatgttatcatttgccatctaccctctagaataaagaaatcttattaaggaca

SEQ ID NO: 146051 - DNA, 120 bp, Artificial Sequence
  ENSG00000104974_26 (sequence is synthesized)
gctgagaccctcagcccaccacaaaacaagtccgattccaaggctggtgagtgaggagatgcttgccgtgatgacgctgggcacagagggtcaggtcctgtcaaggggagctgggtgtcc

SEQ ID NO: 146052 - DNA, 120 bp, Artificial Sequence
  ENSG00000104974_27 (sequence is synthesized)
tgggtggacattttaaaaaattacattcattctaatttaaagaattcttcaacacctttaatgatttataagtgaagtatttcattcctttacatttttaaaataagagataactatcca

SEQ ID NO: 146053 - DNA, 120 bp, Artificial Sequence
  ENSG00000104974_28 (sequence is synthesized)
tgagaaagctactgctttgagtatattcattgtatttcatgctaactcactactaaattgctctgttctaactgcttttcaatggatctcctctaatttactaatacaatttgtataaac

SEQ ID NO: 146054 - DNA, 120 bp, Artificial Sequence
  ENSG00000104974_29 (sequence is synthesized)
aaaccgtaagacaatgggaaattttacttctttatttctaaattatgtgccaatatttctcactttaaatgtcaatatatatgttactacatcttaaataaatatctgaagttttacata

SEQ ID NO: 146055 - DNA, 120 bp, Artificial Sequence
  ENSG00000104974_30 (sequence is synthesized)
tctaacctaggagggacctcaccccacagccgacctctagtccctaaggagaccccaggggctcacaaagatcccagggaggggaggacctgcccaggcttcaggggcaaattcctcaca

SEQ ID NO: 146056 - DNA, 120 bp, Artificial Sequence
  ENSG00000104976_0 (sequence is synthesized)
cttacagcgcctgcctctttctgagcggcatgaagccacctcccaggcggcgagcggccccggcgcgctatctgggcgaggtgaccggtcccgcgacctggagcgctcgcgagaagcggc

SEQ ID NO: 146057 - DNA, 120 bp, Artificial Sequence
  ENSG00000104976_1 (sequence is synthesized)
agctagtgcgactcctgcaggcgcggcagggccagccggagccggacgccaccgagctggcccgggagctgcggggccggagcgaggctgagatccgggtcttcctccagcagctcaagg

SEQ ID NO: 146058 - DNA, 120 bp, Artificial Sequence
  ENSG00000104976_2 (sequence is synthesized)
gccgcgtagcccgggaggccattcagaaagtgcatccgggtggccttcagggaccaaggcgccgggaggcacagcccccagcccccatagaggtctggacggatctggctgagaagataa

SEQ ID NO: 146059 - DNA, 120 bp, Artificial Sequence
  ENSG00000104976_3 (sequence is synthesized)
cagggccactggaagaagccctggcagtggctttctcgcaggtgctcaccatcgcggccacggaaccggtcaccctcctgcactccaagccccccaagcccacgcaggcccgtggaaagc

SEQ ID NO: 146060 - DNA, 120 bp, Artificial Sequence
  ENSG00000104976_4 (sequence is synthesized)
ctttgctcctgagcgcccctggaggacaggaagaccccgcccctgaaatacctagctctgcccctgctgcacctagctccgcacccaggactcctgaccctgcccctgagaaaccttctg

SEQ ID NO: 146061 - DNA, 120 bp, Artificial Sequence
  ENSG00000104976_5 (sequence is synthesized)
agtcgtcggctggtccctccactgaagaagactttgctgtggactttgagaagatctacaagtacttgtcctctgtctcccgaagtggccgcagccccgagctctcagcagctgagtccg

SEQ ID NO: 146062 - DNA, 120 bp, Artificial Sequence
  ENSG00000104976_6 (sequence is synthesized)
gagacgtacctacgcctgacagccccccagcccattcccgctggagggagcctggggcctgcagcagaaggggatggggctggctccaaggcaccagaggagacccccccagccaccgag

SEQ ID NO: 146063 - DNA, 120 bp, Artificial Sequence
  ENSG00000104976_7 (sequence is synthesized)
aaggccgagcacagcgaactgaaatcgccttggcaagcagctgggatctgtcccctgaacccgttcctggtgcccctggagcttctgggtcgggcagccacccctgccaggtgaggggca

SEQ ID NO: 146064 - DNA, 120 bp, Artificial Sequence
  ENSG00000104976_8 (sequence is synthesized)
tggcgggcaggaggccacaccaggccccccgccctgcccctcggttctgctcggctggccctggctctttctgaggatcccgtcatgggggaaggtccttgagatgatgctcagctgtgg

SEQ ID NO: 146065 - DNA, 120 bp, Artificial Sequence
  ENSG00000104976_9 (sequence is synthesized)
ggcgggcctctaagatgccccatactttgggggtctcagaaatggaacccccgttgtacaggggttgggtgggggttgcaggactccactcacaagcctcctgatgtcaaggacaggcgg

SEQ ID NO: 146066 - DNA, 120 bp, Artificial Sequence
  ENSG00000104976_10 (sequence is synthesized)
acagggctggcctcccccagtccccaagccccactgtgccttgttgtctgctggggggccatagctggcactgcccaccgtaaaggccctcgcacattttcccccttcctgtacacctcg

SEQ ID NO: 146067 - DNA, 120 bp, Artificial Sequence
  ENSG00000104976_11 (sequence is synthesized)
gggccagcatcctcaccttcttcaactgaccagtcgtggttactccctgctgccaggtccttccccttcccgggggtattctgtgaccatgaataaagttatcattctctttctctttca

SEQ ID NO: 146068 - DNA, 120 bp, Artificial Sequence
  ENSG00000104976_12 (sequence is synthesized)
atgcgtgggtgaggcgagggctaaacgggcggaatgaactgggagtaagatgctgccgagtccgggcgaaaagcaacgcatgctgttggacaggatacgagcttgaagtgagagggaata

SEQ ID NO: 146069 - DNA, 120 bp, Artificial Sequence
  ENSG00000104976_13 (sequence is synthesized)
gagaagaggggacgaagaagggagttgaacggggtagtagtcagcatagggttgggccctggctgcgtgaaggagccggaactggcctgggccttacaacttccttagatccgggtcttc

SEQ ID NO: 146070 - DNA, 120 bp, Artificial Sequence
  ENSG00000104976_14 (sequence is synthesized)
gcgtgggtgaggcgagggctaaacgggcggaatgaactgggagtaagatgctgccgagtccgggcgaaaagcaacgcatgctgttggacaggatacgagcttgaaatccgggtcttcctc

SEQ ID NO: 146071 - DNA, 120 bp, Artificial Sequence
  ENSG00000104976_15 (sequence is synthesized)
aggcgcagtagcggggcccagagcatacaagggattgggctttggcttctctgctgcagccctgagctcatagaagcctcattccgccgcctctttcctttctagatccgggtcttcctc

SEQ ID NO: 146072 - DNA, 120 bp, Artificial Sequence
  ENSG00000104979_0 (sequence is synthesized)
ctcttccgctgcgtgccggaccatggcgcaggggcagcgcaagtttcaggcgcacaaacccgcaaagagtaagacggcagcggcagcctctgaaaagaatcggggcccaagaaaaggcgg

SEQ ID NO: 146073 - DNA, 120 bp, Artificial Sequence
  ENSG00000104979_1 (sequence is synthesized)
tcgtgttatcgctcccaagaaggcgcgcgtcgtgcagcagcaaaagctcaagaagaacctagaagtcggaatccggaagaagatcgaacatgacgtggtgatgaaagccagcagcagcct

SEQ ID NO: 146074 - DNA, 120 bp, Artificial Sequence
  ENSG00000104979_2 (sequence is synthesized)
gcccaagaagctggcactgctgaaggccccagccaagaagaaaggggcagctgccgccacctcctccaagacaccttcctgaggacgctggccccagtgcaggccaacatcccaccccct

SEQ ID NO: 146075 - DNA, 120 bp, Artificial Sequence
  ENSG00000104979_3 (sequence is synthesized)
ctgtcccccagcactgggcttcacctagaacttcagtgggggccaagggtgctgagaacccagcaatgaccaggaagatacagtcactaacttcatctgtccccgtgccccttcccaggt

SEQ ID NO: 146076 - DNA, 120 bp, Artificial Sequence
  ENSG00000104979_4 (sequence is synthesized)
cctgcctccacaggtttaacccagaacaataaacctggctttgtcatccctcttgcagtcctgtgttcgggtgagcaggccaggtgagcccacaagtctccatgagtgacgtggcctggc

SEQ ID NO: 146077 - DNA, 120 bp, Artificial Sequence
  ENSG00000104979_5 (sequence is synthesized)
gtgctccaccccaccccaccgcctttagcaaccatgtgcccaggggacagctgggcttctacacctctggccctgagcctgagagccgggaaagagtcttttctccatttaaccccgggt

SEQ ID NO: 146078 - DNA, 120 bp, Artificial Sequence
  ENSG00000104979_6 (sequence is synthesized)
gactcactccctggccagtcctcacccctggggacacaaccagagtcaagctggacatcagtaggtcagatgccacctcacaggaccaaggtgccgattaaaccggaatacattcagaaa

SEQ ID NO: 146079 - DNA, 120 bp, Artificial Sequence
  ENSG00000104979_7 (sequence is synthesized)
aaaaggcggtcgtgttatcgctcccaagaaggcgcgcgtcgtgcagcagcaaaagctcaagaaggtttcactatgctgctcgggctggtcttgaactcctggcctcaaggcatcctcccg

SEQ ID NO: 146080 - DNA, 120 bp, Artificial Sequence
  ENSG00000104979_8 (sequence is synthesized)
caaagagtaagacggcagcggcagcctctgaaaagaatcggggcccaagaaaaggcggtcgtgttatcgctcccaagaaggcgcgcgtcgtgcagcagcaaaagctcaagaagagacagg

SEQ ID NO: 146081 - DNA, 120 bp, Artificial Sequence
  ENSG00000104979_9 (sequence is synthesized)
tggcgcaggggcagcgcaagtttcaggcgcacaaacccgcaaagagtaagacggcagcggcagcctctgaaaagaatcggggcccaagaaaaggcgaacctagaagtcggaatccggaag

SEQ ID NO: 146082 - DNA, 120 bp, Artificial Sequence
  ENSG00000104979_10 (sequence is synthesized)
ctggggacgagctaggagcgaggggatagagccaggggccgcgttaggagcgaaggatggagcccggggcgcagagagggaacctagaagtcggaatccggaagaagatcgaacatgacg

SEQ ID NO: 146083 - DNA, 120 bp, Artificial Sequence
  ENSG00000104980_0 (sequence is synthesized)
acacgattctccaacatggcggcggcggccctgcggagtggctggtgccgctgtccacggagatgcctcggcagtggaatccaatttctttccagccacaacctaccccatgggtcgacc

SEQ ID NO: 146084 - DNA, 120 bp, Artificial Sequence
  ENSG00000104980_1 (sequence is synthesized)
tatcagatgcgccggccgggcggagagctgccactgtccaaatcatattcttctggaaacagaaaaggctttctgtccggcttgctagataatgtcaaacaagaattagccaaaaacaaa

SEQ ID NO: 146085 - DNA, 120 bp, Artificial Sequence
  ENSG00000104980_2 (sequence is synthesized)
gaaatgaaagaaagtataaaaaaattccgtgacgaggccagaaggctagaagaatcagacgtgctccaggaggccagaaggaaatacaaaaccatcgagtcagaaaccgtgcggacgagc

SEQ ID NO: 146086 - DNA, 120 bp, Artificial Sequence
  ENSG00000104980_3 (sequence is synthesized)
gaggtgctacggaagaagcttggggagctgacgggcaccgtgaaggagagccttcacgaagtcagtaaaagtgatctcggccggaaaatcaaggagggcgtggaggaagcagccaagacg

SEQ ID NO: 146087 - DNA, 120 bp, Artificial Sequence
  ENSG00000104980_4 (sequence is synthesized)
gccaagcagtcggccgagtcggtatccaaaggcggggagaagctgggcaggacagcggccttcagagccctctcccagggggtggagtccgtgaagaaggaaattgacgacagcgtcctg

SEQ ID NO: 146088 - DNA, 120 bp, Artificial Sequence
  ENSG00000104980_5 (sequence is synthesized)
ggacagaccgggccctaccggaggccccagcgactccggaagagaacggagtttgcgggagataagttcaaggaggagaaagtgtttgagccaaacgaggaggccctgggggtcgtgctg

SEQ ID NO: 146089 - DNA, 120 bp, Artificial Sequence
  ENSG00000104980_6 (sequence is synthesized)
cacaaggactccaagtggtaccagcagtggaaggacttcaaggagaacaacgtggtgtttaaccggttcttcgagatgaagatgaagtatgacgaaagcgacaacgcgttcatccgggca

SEQ ID NO: 146090 - DNA, 120 bp, Artificial Sequence
  ENSG00000104980_7 (sequence is synthesized)
tgttctccaagacagagatgtcggaggtgctcacggagatcctccgggtggacccggcctttgacaaggaccggtttctgaaacagtgcgagaacgacatcatccccaatgtcctggagg

SEQ ID NO: 146091 - DNA, 120 bp, Artificial Sequence
  ENSG00000104980_8 (sequence is synthesized)
ccatgatttctggagagcttgacattctcaaagactggtgctatgaagctacttacagccagctggcccaccccatccagcaggccaaggcactgggtctccagttccattctcgcatcc

SEQ ID NO: 146092 - DNA, 120 bp, Artificial Sequence
  ENSG00000104980_9 (sequence is synthesized)
tagacattgacaacgtcgacctggccatgggcaagatgatggagcaggggccggtgctgatcatcaccttccaggcacagctggtgatggtggtcaggaaccccaaaggcgaggtggtgg

SEQ ID NO: 146093 - DNA, 120 bp, Artificial Sequence
  ENSG00000104980_10 (sequence is synthesized)
agggtgacccggacaaggtgctgcggatgctgtacgtgtgggcgctctgccgagaccaggacgagctcaacccctacgcggcctggcggctcctggacatctcggcctccagcaccgagc

SEQ ID NO: 146094 - DNA, 120 bp, Artificial Sequence
  ENSG00000104980_11 (sequence is synthesized)
agattctctgagtgtggtgccggagccaggtagccccggcctgggtcatcaggcacagaggcaccgcaacaccacctgcggcaactccagacctctgggaacaagactgcgggctctgcc

SEQ ID NO: 146095 - DNA, 120 bp, Artificial Sequence
  ENSG00000104980_12 (sequence is synthesized)
cccagctctgccaggacggctgcaagaccagctggcccgggaggggacaacgggctgttgcgggtgcgcggcagctggagacactcccccgcagggccaacccctgccctgttgctctgc

SEQ ID NO: 146096 - DNA, 120 bp, Artificial Sequence
  ENSG00000104980_13 (sequence is synthesized)
cctgcaggggtcccggcgcctggtcacctggggtgcacacaggtcacacagtgccaagaggccccagggcccagggactccccccacagcagggtgggacccgggacccgcggctcagtg

SEQ ID NO: 146097 - DNA, 120 bp, Artificial Sequence
  ENSG00000104980_14 (sequence is synthesized)
gcccgctagccacgtcagccaagccactttaggtccattttttaattttaacagtgctcttccatcttgtgcataagcctgagatttggaaagaataaaacaccgaattgcagaagagca

SEQ ID NO: 146098 - DNA, 120 bp, Artificial Sequence
  ENSG00000104980_15 (sequence is synthesized)
caagtgttctggccacccgccccctgccgctcacagctttcaccaccagcatccggctccttcccgctcttctccccgctccaggcacctccctccccctcatcggatccggcccaggct

SEQ ID NO: 146099 - DNA, 120 bp, Artificial Sequence
  ENSG00000104980_16 (sequence is synthesized)
gtccgaaatgtggtcccctggggggacagaggacatgggctcactgcgggagccggagttgggtcctcatctccctggcttggattcctgaccaggctgaaagctgggtccccagccacc

SEQ ID NO: 146100 - DNA, 120 bp, Artificial Sequence
  ENSG00000104980_17 (sequence is synthesized)
tttctcttcctccaccaggttccaggggggtccccctgtggggtgcctcctgggtggtcgcccgcaggccgccctccgcctgtgcctaggccagagccaggcactgacaccagcagggac

SEQ ID NO: 146101 - DNA, 120 bp, Artificial Sequence
  ENSG00000104980_18 (sequence is synthesized)
gggcctgggggggacacccagtgccacagctccacccgcgccccacaggtggcagccgggggtgtctgaggaaactccccaccccgcaccactggagaatgttcccaggacctcgcctgc

SEQ ID NO: 146102 - DNA, 120 bp, Artificial Sequence
  ENSG00000104980_19 (sequence is synthesized)
agtgggggcccgggccaccatcgggggtgggaactatggcccagacaaggcccaggaggtggccttgccaggggctgggggccatgggctgatccaagaggtcttgggcttgtccaaggg

SEQ ID NO: 146103 - DNA, 120 bp, Artificial Sequence
  ENSG00000104980_20 (sequence is synthesized)
gagggtctcgagggaggcctggtcctggcctgagaggcaaggcccacggggagggaccggtgctgggcctggtgctggagccttctcctagcagggcctaggcgcaggggtttcacctcc

SEQ ID NO: 146104 - DNA, 120 bp, Artificial Sequence
  ENSG00000104980_21 (sequence is synthesized)
aaagtgtttgagccaaacgagtaggtaccagcccgtggccctcgctgcccccattttgggcagctttcactgctgtccatttcgggagcccaccaatggttccctcctgagtccgtttct

SEQ ID NO: 146105 - DNA, 120 bp, Artificial Sequence
  ENSG00000104980_22 (sequence is synthesized)
tttttttttggttttttgttttgtttttaccttgggaccattacgccacagctgactcgctttgccagggagctgctggtgccctggaaacacagctgaagttccagccacgtccacaga

SEQ ID NO: 146106 - DNA, 120 bp, Artificial Sequence
  ENSG00000104980_23 (sequence is synthesized)
cacgtccacagaagtgtttttaaaatgtcacctttaagaaaccgaacaagtaggattggctctgttttttttttctctcccctccgcggatcagtcatttccataaaaagtagatgctat

SEQ ID NO: 146107 - DNA, 120 bp, Artificial Sequence
  ENSG00000104980_24 (sequence is synthesized)
cagaacatcttttctctcatggtttcatgccaagcccagagaaacctccagcgaaaacgtgtctcgggggctgcttcctgtgcctggcacaggcgcagggggttgagggtgacactgggg

SEQ ID NO: 146108 - DNA, 120 bp, Artificial Sequence
  ENSG00000104980_25 (sequence is synthesized)
gctggtcagtgacagaggcagcctcaggctgaggacagatcctagaagaggcgtttgatctcaggccaagattcagagtgcggcgaatatggaagtattaaagatcagccaaggggccgc

SEQ ID NO: 146109 - DNA, 120 bp, Artificial Sequence
  ENSG00000104980_26 (sequence is synthesized)
cagcttagccctgggagtagatttgggattttgttccaagagaatcacccactttgctgattaatcctgttttcattgggtcatctggatagagtgttgttcccaggagtgggaagcgtg

SEQ ID NO: 146110 - DNA, 120 bp, Artificial Sequence
  ENSG00000104980_27 (sequence is synthesized)
tgatctgggccagtaagtgggtggcacctgcctccccacttggacctgggttcttggcctctgccattgctggctggcggcagggcacctgggcgccagggtgtgtgggcagcagctctg

SEQ ID NO: 146111 - DNA, 120 bp, Artificial Sequence
  ENSG00000104980_28 (sequence is synthesized)
ggcacatcccccctctcggcccctctgcagctggccatgggcaagatgatggagcaggggccggtgctgatcatcaccttccaggcacagctggtgatggtggtcaggaaccccaaaggc

SEQ ID NO: 146112 - DNA, 120 bp, Artificial Sequence
  ENSG00000104980_29 (sequence is synthesized)
gaggtggtggagggtgacccggtgagtgagggagtgggatggggcaggcacatgacaccgcctgtccccaagatctgtgtgtggccacctggcagagaccccagctcagagccctgaagc

SEQ ID NO: 146113 - DNA, 120 bp, Artificial Sequence
  ENSG00000104980_30 (sequence is synthesized)
tctgggactgggtggggatgtggagaaacctctgggccagagtttggggttgagggaggtcggagaccagcagacctgtctgtttttaccaaggctgagtggttcctgagtctaggcaat

SEQ ID NO: 146114 - DNA, 120 bp, Artificial Sequence
  ENSG00000104980_31 (sequence is synthesized)
tgtgctggcctctgctcccagcccctggggaagttgccggtggctcctgccccacagagcctggcccccccccagagctgcctgggtcacctcaaccctctcaacagtgcccttcccacc

SEQ ID NO: 146115 - DNA, 120 bp, Artificial Sequence
  ENSG00000104980_32 (sequence is synthesized)
gccagaaggctagaagaatcagacgtgctccaggaggccagaaggaaatacgtgagtttctttgctgcttttttttccctcacccaggctggagagtagtggtgcgatctcggctcactg

SEQ ID NO: 146116 - DNA, 120 bp, Artificial Sequence
  ENSG00000104980_33 (sequence is synthesized)
ttttctgaggaggctggttgcacacgggctcctgcccggctgcagctgccccatgagctgtgcccgaagcccttcctgggccttaccggcacctccggtacctccaggtctgtttccctc

SEQ ID NO: 146117 - DNA, 120 bp, Artificial Sequence
  ENSG00000104980_34 (sequence is synthesized)
actcctcctgcctgaggctgttgttcctttgaggttgctgggagcagctgctggaggctagggattgtctcaggtgcctggagcccctcaccccttgggagaagtgggcgtctgtcttca

SEQ ID NO: 146118 - DNA, 120 bp, Artificial Sequence
  ENSG00000104983_0 (sequence is synthesized)
agttgaaccgctcgcgaggagggttgctagtggagaagcaaccttggccatggaccagccggctggcctgcaggtggactacgtcttccggggtgtggagcatgccgtgcgggtgatggt

SEQ ID NO: 146119 - DNA, 120 bp, Artificial Sequence
  ENSG00000104983_1 (sequence is synthesized)
ttctgggcaggtgctggagctggaggtggaggaccggatgacggctgaccagtggcggggcgagttcgatgctggcttcattgaagatttgactcacaagacagggaacttcaaacagtt

SEQ ID NO: 146120 - DNA, 120 bp, Artificial Sequence
  ENSG00000104983_2 (sequence is synthesized)
caacatcttctgtcatatgctggagtcagccctcactcagagtagtgagtcagtcaccctggacctgctgacctacacagacctggagtccctgcggaaccgcaagatggggggccgccc

SEQ ID NO: 146121 - DNA, 120 bp, Artificial Sequence
  ENSG00000104983_3 (sequence is synthesized)
aggctccttggcccccaggtcggcccagctcaactccaagcgctacctgatcctcatctactccgtggagtttgacaggattcactacccgctgcccctcccgtaccagggcaagccaga

SEQ ID NO: 146122 - DNA, 120 bp, Artificial Sequence
  ENSG00000104983_4 (sequence is synthesized)
ccccgtggttctgcagggcatcatccggtcactgaaggaggaactgggccgcctgcaagggctggatggccagaacactcgggacacccgggagaatgagatctggcatctgcgggagca

SEQ ID NO: 146123 - DNA, 120 bp, Artificial Sequence
  ENSG00000104983_5 (sequence is synthesized)
ggcatctgcgggagcaggtgtcgcgcctggcgtccgagaagcgggagctggaggcgcagctgggccgatcgcgcgaggaggcgctggccgggcgcgcggcacgccaggaggccgaggcgc

SEQ ID NO: 146124 - DNA, 120 bp, Artificial Sequence
  ENSG00000104983_6 (sequence is synthesized)
cgggctggagctggagctgcggcaggagcgcggcctcgggcacagggtggccggccgtcgcggccaggactgccgccgtctggccaaggagctcgaggaggcgaaggcatcggagcggag

SEQ ID NO: 146125 - DNA, 120 bp, Artificial Sequence
  ENSG00000104983_7 (sequence is synthesized)
agacgctgaccagcgagctggcattgtacaagagggggaggcggactccgccggtgcagccgcccccgacgcgggaggaccgggcctcatcgtcccgggagcgctccgcgtcgcgaggcc

SEQ ID NO: 146126 - DNA, 120 bp, Artificial Sequence
  ENSG00000104983_8 (sequence is synthesized)
gcgcgctcctcatcccgggagagcggccgcgggagccggggtcggggccgccctgcgcgcccctcgccctcgcccacaggtggtcgcgcgctccgcttcgaccccacggcctttgtgaaa

SEQ ID NO: 146127 - DNA, 120 bp, Artificial Sequence
  ENSG00000104983_9 (sequence is synthesized)
ttgtgaaagccaaggaaaggaagcagagagagatccagatgaagcagcagcagcggaaccgcttaggcagtgggggaagcggggacggtccgtccgtctcctggtctcgccagacccagc

SEQ ID NO: 146128 - DNA, 120 bp, Artificial Sequence
  ENSG00000104983_10 (sequence is synthesized)
cccctgctgccttgactggccgaggggacgcccctaaccgctcccgaaaccgcagctcctcagtggacagtttccgcagccgctgctcgtctgccagctcctgcagcgatttggaggatt

SEQ ID NO: 146129 - DNA, 120 bp, Artificial Sequence
  ENSG00000104983_11 (sequence is synthesized)
tctctgagtcgctctccagagggggtcaccgccgccgtgggaagcctcccagcccaacgccctggagtgggtccaatatgaagtctccccccgtggaacgcagccaccatcagaaatctc

SEQ ID NO: 146130 - DNA, 120 bp, Artificial Sequence
  ENSG00000104983_12 (sequence is synthesized)
tggccaactccgggggctgggtccccatcaaagagtacagctcggagcaccaggcggctgacatggccgaaatagacgcacgcctgaaggccttgcaggagtacatgaaccgactggaca

SEQ ID NO: 146131 - DNA, 120 bp, Artificial Sequence
  ENSG00000104983_13 (sequence is synthesized)
tgcggtcataacgtggagaaggggtactacccctccatcccccacccacttgctgggtatggtgtggggggtggggccagggtggcctccagccctgcccagtccctgccctggccccgt

SEQ ID NO: 146132 - DNA, 120 bp, Artificial Sequence
  ENSG00000104983_14 (sequence is synthesized)
ccctcctgctgcccctggggtctcaggtgtgtgaggccctgaccctgccctctccccaggcagtgcatgctgggagggaggatgtgtgcattttgtaaataaacatatttgccctgggga

SEQ ID NO: 146133 - DNA, 120 bp, Artificial Sequence
  ENSG00000104983_15 (sequence is synthesized)
gaaccgctcgcgaggagggttgctagtggagaagcctggatctctgccctgaactccagactcatatcatggccgactcttctctctttggaagttcatctgacattcagacataaactt

SEQ ID NO: 146134 - DNA, 120 bp, Artificial Sequence
  ENSG00000104983_16 (sequence is synthesized)
cggtcataacgtggagaaggggtactacccctccatcccccacccacttgctgggtgaagaaacgaggctcagagagagaaggtgacgtgacatggaaaggggattcagaacgttagaac

SEQ ID NO: 146135 - DNA, 120 bp, Artificial Sequence
  ENSG00000104983_17 (sequence is synthesized)
tggtgatgtggacccgaggctcgggccttcgtgacctcatgggaacacttaggatcagagcgcctgagtcttggaaacaaaatgttgaagttggagtctttgataaaatcttgaactgga

SEQ ID NO: 146136 - DNA, 120 bp, Artificial Sequence
  ENSG00000104983_18 (sequence is synthesized)
gtcttgttgctcaagccagagacactggagtcgggtagaattgcagagcttaggtgcattgccctggggctgggcaagcggtcagacctcaggagagacttttctccccacccagtcatt

SEQ ID NO: 146137 - DNA, 120 bp, Artificial Sequence
  ENSG00000104983_19 (sequence is synthesized)
gaagatttgactcacaagacagggaacttcaaacagttcaacatcttctgtcatatgctggagtcagccctcactcaggtagggcccgggttggcgggttggggtgggaggggggttctg

SEQ ID NO: 146138 - DNA, 120 bp, Artificial Sequence
  ENSG00000104998_0 (sequence is synthesized)
gttcggcttcccgttgccgcctcgggcgctgtacccagagctcgaagaggagcagcgcggccgcgcggacccggcaaggctgggccggactcggggctcccgagggacgccatgcgggga

SEQ ID NO: 146139 - DNA, 120 bp, Artificial Sequence
  ENSG00000104998_1 (sequence is synthesized)
ggcaggggcgcccctttctggctgtggccgctgcccaagctggcgctgctgcctctgttgtgggtgcttttccagcggacgcgtccccagggcagcgccgggccactgcagtgctacgga

SEQ ID NO: 146140 - DNA, 120 bp, Artificial Sequence
  ENSG00000104998_2 (sequence is synthesized)
gttggacccttgggcgacttgaactgctcgtgggagcctcttggggacctgggagccccctccgagttacacctccagagccaaaagtaccgttccaacaaaacccagactgtggcagtg

SEQ ID NO: 146141 - DNA, 120 bp, Artificial Sequence
  ENSG00000104998_3 (sequence is synthesized)
gcagccggacggagctgggtggccattcctcgggaacagctcaccatgtctgacaaactccttgtctggggcactaaggcaggccagcctctctggccccccgtcttcgtgaacctagaa

SEQ ID NO: 146142 - DNA, 120 bp, Artificial Sequence
  ENSG00000104998_4 (sequence is synthesized)
acccaaatgaagccaaacgccccccggctgggccctgacgtggacttttccgaggatgaccccctggaggccactgtccattgggccccacctacatggccatctcataaagttctgatc

SEQ ID NO: 146143 - DNA, 120 bp, Artificial Sequence
  ENSG00000104998_5 (sequence is synthesized)
tgccagttccactaccgaagatgtcaggaggcggcctggaccctgctggaaccggagctgaagaccatacccctgacccctgttgagatccaagatttggagctagccactggctacaaa

SEQ ID NO: 146144 - DNA, 120 bp, Artificial Sequence
  ENSG00000104998_6 (sequence is synthesized)
gtgtatggccgctgccggatggagaaagaagaggatttgtggggcgagtggagccccattttgtccttccagacaccgccttctgctccaaaagatgtgtgggtatcagggaacctctgt

SEQ ID NO: 146145 - DNA, 120 bp, Artificial Sequence
  ENSG00000104998_7 (sequence is synthesized)
gggacgcctggaggagaggaacctttgcttctatggaaggccccagggccctgtgtgcaggtgagctacaaagtctggttctgggttggaggtcgtgagctgagtccagaaggaattacc

SEQ ID NO: 146146 - DNA, 120 bp, Artificial Sequence
  ENSG00000104998_8 (sequence is synthesized)
tgctgctgctccctaattcccagtggggcggagtgggccagggtgtccgctgtcaacgccacaagctgggagcctctcaccaacctctctttggtctgcttggattcagcctctgccccc

SEQ ID NO: 146147 - DNA, 120 bp, Artificial Sequence
  ENSG00000104998_9 (sequence is synthesized)
cgtagcgtggcagtcagcagcatcgctgggagcacggagctactggtgacctggcaaccggggcctggggaaccactggagcatgtagtggactgggctcgagatggggaccccctggag

SEQ ID NO: 146148 - DNA, 120 bp, Artificial Sequence
  ENSG00000104998_10 (sequence is synthesized)
aaactcaactgggtccggcttccccctgggaacctcagtgctctgttaccagggaatttcactgtcggggtcccctatcgaatcactgtgaccgcagtctctgcttcaggcttggcctct

SEQ ID NO: 146149 - DNA, 120 bp, Artificial Sequence
  ENSG00000104998_11 (sequence is synthesized)
gcatcctccgtctgggggttcagggaggaattagcacccctagtggggccaacgctttggcgactccaagatgcccctccagggacccccgccatagcgtggggagaggtcccaaggcac

SEQ ID NO: 146150 - DNA, 120 bp, Artificial Sequence
  ENSG00000104998_12 (sequence is synthesized)
atgtgagtggcaacacacagagtgtcaccctgcctgaccttccttggggtccctgtgagctgtgggtgacagcatctaccatcgctggacagggccctcctggtcccatcctccggcttc

SEQ ID NO: 146151 - DNA, 120 bp, Artificial Sequence
  ENSG00000104998_13 (sequence is synthesized)
atctaccagataacaccctgaggtggaaagttctgccgggcatcctattcttgtggggcttgttcctgttggggtgtggcctgagcctggccacctctggaaggtgctaccacctaaggc

SEQ ID NO: 146152 - DNA, 120 bp, Artificial Sequence
  ENSG00000104998_14 (sequence is synthesized)
acaaagtgctgccccgctgggtctgggagaaagttcctgatcctgccaacagcagttcaggccagccccacatggagcaagtacctgaggcccagccccttggggacttgcccatcctgg

SEQ ID NO: 146153 - DNA, 120 bp, Artificial Sequence
  ENSG00000104998_15 (sequence is synthesized)
aagtggaggagatggagcccccgccggttatggagtcctcccagcccgcccaggccaccgccccgcttgactctgggtatgagaagcacttcctgcccacacctgaggagctgggccttc

SEQ ID NO: 146154 - DNA, 120 bp, Artificial Sequence
  ENSG00000104998_16 (sequence is synthesized)
tggggccccccaggccacaggttctggcctgaaccacacgtctggctgggggctgccagccaggctagagggatgctcatgcaggttgcaccccagtcctggattagccctcttgatgga

SEQ ID NO: 146155 - DNA, 120 bp, Artificial Sequence
  ENSG00000104998_17 (sequence is synthesized)
tgaagacactgaggactcagagaggctgagtcacttacctgaggacacccagccaggcagagctgggattgaaggacccctatagagaagggcttggcccccatggggaagacacggatg

SEQ ID NO: 146156 - DNA, 120 bp, Artificial Sequence
  ENSG00000104998_18 (sequence is synthesized)
cacggatggaaggtggagcaaaggaaaatacatgaaattgagagtggcagctgcctgccaaaatctgttccgctgtaacagaactgaatttggaccccagcacagtggctcacgcctgta

SEQ ID NO: 146157 - DNA, 84 bp, Artificial Sequence
  ENSG00000104998_19 (sequence is synthesized)
tcactacaaaaataaaacatcaaaaacaaaaacaattagctgggcatgatggcacacacctgtagtccgagccacttgggaggc

SEQ ID NO: 146158 - DNA, 120 bp, Artificial Sequence
  ENSG00000104998_20 (sequence is synthesized)
cacttgggaggctgaggtgggaggatcggttgagcccaggagttcgaagctgcagggacctctgattgcaccactgcactccaggctgggtaacagaatgagaccttatctcaaaaataa

SEQ ID NO: 146159 - DNA, 83 bp, Artificial Sequence
  ENSG00000104998_21 (sequence is synthesized)
gcatttgggcaccatctcagctcccttgcatccaggtgcagcatggactgagttcttgacaacagaatgtggtcagaagtgac

SEQ ID NO: 146160 - DNA, 120 bp, Artificial Sequence
  ENSG00000104998_22 (sequence is synthesized)
tggactgagttcttgacaacagaatgtggtcagaagtgacatatgccaacacggggtctgggtgggggctcccccacatcctttccttgcctatgagctggaacataacacatgcctatg

SEQ ID NO: 146161 - DNA, 120 bp, Artificial Sequence
  ENSG00000104998_23 (sequence is synthesized)
atccagctttggtcatacccaaggggaaggtggagcaagaaatgaaaaggaacctgaatccctgaatgactgcatggatagaaccactaagaaaaataaacttttatatttttatagcta

SEQ ID NO: 146162 - DNA, 120 bp, Artificial Sequence
  ENSG00000105011_0 (sequence is synthesized)
gcacttcagttctcggagagaagaggcgggagtggacctggtcagccctaccccactgaccccaccggacccaggcgcggcctccgccacagccacagcccctgcccctgctgcggcgcg

SEQ ID NO: 146163 - DNA, 120 bp, Artificial Sequence
  ENSG00000105011_1 (sequence is synthesized)
gcgaggcgaggcgatggccaaggtgtcggtgctgaacgtggcggtcctggagaacccgagccctttccacagccccttccggttcgagatcagcttcgagtgcagtgaagccctggcgga

SEQ ID NO: 146164 - DNA, 120 bp, Artificial Sequence
  ENSG00000105011_2 (sequence is synthesized)
cgacctggagtggaagatcatttatgttggctcggctgagagtgaggaatttgatcagatcctagactcggtgctggtgggccctgtgccagcagggagacacatgtttgtctttcaggc

SEQ ID NO: 146165 - DNA, 120 bp, Artificial Sequence
  ENSG00000105011_3 (sequence is synthesized)
cgacgcccccaacccatccctcatcccagagactgatgccgtgggtgtgactgtggtcctcatcacctgcacctaccatggacaggagttcatccgagtgggctactacgtcaacaacga

SEQ ID NO: 146166 - DNA, 120 bp, Artificial Sequence
  ENSG00000105011_4 (sequence is synthesized)
gtacctcaaccctgagctgcgtgagaacccgcccatgaagccagatttctcccagctccagcggaacatcttggcctcgaacccccgggtgacccgcttccatatcaactgggacaacaa

SEQ ID NO: 146167 - DNA, 120 bp, Artificial Sequence
  ENSG00000105011_5 (sequence is synthesized)
catggacaggctggaggccatagagacccaggacccctccctgggctgcggcctcccactcaactgcactcctatcaagggcttggggctccctggctgcatccctggcctcctccctga

SEQ ID NO: 146168 - DNA, 120 bp, Artificial Sequence
  ENSG00000105011_6 (sequence is synthesized)
gaactccatggactgcatctaactgcaggaacccagagtgtcccagcacgccgggaggggcaaccaggcctcccagcgagtcctgcagggcccatctagaggactttgggggccatcagc

SEQ ID NO: 146169 - DNA, 120 bp, Artificial Sequence
  ENSG00000105011_7 (sequence is synthesized)
ggtctgtcaaactcagcccctaggaaagaacaggccttgggtctcccctagtcctggccagaaggatgatctcgcttttcctctacaggcctataagaagcaggtacttcagttctaaat

SEQ ID NO: 146170 - DNA, 120 bp, Artificial Sequence
  ENSG00000105011_8 (sequence is synthesized)
tctgacttgtgttcttttcgtcttcataaattctaactaaggccactgtgccactgtgcacccttgagtaccattgatccaaagctttcccacagacctccctggcccacctagaggctt

SEQ ID NO: 146171 - DNA, 120 bp, Artificial Sequence
  ENSG00000105011_9 (sequence is synthesized)
tcttggtcagtgcctgtcaaggctccagtcctgctgagccaaaggctttgtcattcctttctcttcctgtacatctgagcagacccactccagctttctggtgtcacaggcgggaatgtt

SEQ ID NO: 146172 - DNA, 120 bp, Artificial Sequence
  ENSG00000105011_10 (sequence is synthesized)
agttagtaggtagacttagatcccatttctgtcctgctcccaggaagattcttaggtcctcttcaatccagcagcccctcccagaggtgtgatcagcaggatgctgaggaaccatgttgc

SEQ ID NO: 146173 - DNA, 120 bp, Artificial Sequence
  ENSG00000105011_11 (sequence is synthesized)
ctttcctgtcaatcacagccaccttcctgttatctcctaaatggatctggcttttcctggaggctgccatggttggaagatggtatcagagggcctgcctgggcagtctgtctccgggcc

SEQ ID NO: 146174 - DNA, 120 bp, Artificial Sequence
  ENSG00000105011_12 (sequence is synthesized)
agggtcagggaccctctgcctctggcagccttaacctgtcctctgctaggaccagggtgatttcaagccagggaagcaactgggaccctgaaaactgtccctccccagcccgctccccct

SEQ ID NO: 146175 - DNA, 120 bp, Artificial Sequence
  ENSG00000105011_13 (sequence is synthesized)
ctctgtgccctggtccccttgctgccatgtggatgctgttgtgattgctgtttgtatattatcaaaatgtttttatattaaaaatgtttggtctgaaaattaaaagcacttcatttagaa

SEQ ID NO: 146176 - DNA, 120 bp, Artificial Sequence
  ENSG00000105011_14 (sequence is synthesized)
gcctgtttccacttcctgcttcccacaaggccgttctttatacttggggggagttcagccattcaaattgagagtcaaggtcacttcttaaggttttcaagtaatattcagttcttacag

SEQ ID NO: 146177 - DNA, 120 bp, Artificial Sequence
  ENSG00000105011_15 (sequence is synthesized)
tcaagtaatattcagttcttacagtactgtgttagaagaggagaaaaagacctttgtctctcaaaggcatgtcttagagaattaagattaggccagcctgggcaacatagtgagaccctg

SEQ ID NO: 146178 - DNA, 120 bp, Artificial Sequence
  ENSG00000105048_0 (sequence is synthesized)
agcaaggctcagcctcaagattcacagcatctcagacacagcctaggccgcaccaggatgtcggacaccgaggagcaggaatatgaggaggagcagccggaagaggaggctgcggaggag

SEQ ID NO: 146179 - DNA, 120 bp, Artificial Sequence
  ENSG00000105048_1 (sequence is synthesized)
gaggaggaagcccccgaagagccggagccggtggcagagccagaagaggaacgccccaaaccaagccgccccgtggtgcctcctttgatcccgccaaagatcccagaaggggagcgcgtt

SEQ ID NO: 146180 - DNA, 120 bp, Artificial Sequence
  ENSG00000105048_2 (sequence is synthesized)
gacttcgatgacatccaccgcaagcgcatggagaaagacctgctggagctgcagacactcatcgatgtacatttcgagcagcggaagaaggaggaagaggagctggttgccttgaaggag

SEQ ID NO: 146181 - DNA, 120 bp, Artificial Sequence
  ENSG00000105048_3 (sequence is synthesized)
cgcattgagcggcgccggtcagagagagccgagcaacagcgcttcagaactgagaaggaacgcgaacgtcaggctaagctggcggaggagaagatgaggaaggaagaggaagaggccaag

SEQ ID NO: 146182 - DNA, 120 bp, Artificial Sequence
  ENSG00000105048_4 (sequence is synthesized)
aggtgctgtccaacatgggggcccattttggcggctacctggtcaaggcagaacagaagcgtggtaagcggcagacggggcgggagatgaaggtgcgcatcctctccgagcgtaagaagc

SEQ ID NO: 146183 - DNA, 120 bp, Artificial Sequence
  ENSG00000105048_5 (sequence is synthesized)
ctctggacattgactacatgggggaggaacagctccgggcccggtctgcctggctgcctccatcacagccctcctgccctgccagggagaaagcccaggagctgtcggactggatccacc

SEQ ID NO: 146184 - DNA, 120 bp, Artificial Sequence
  ENSG00000105048_6 (sequence is synthesized)
agctggagtctgagaagttcgacctgatggcgaagctgaaacagcagaaatatgagatcaacgtgctgtacaaccgcatcagccacgcccagaagttccggaagggggcagggaagggcc

SEQ ID NO: 146185 - DNA, 120 bp, Artificial Sequence
  ENSG00000105048_7 (sequence is synthesized)
gcgttggaggccgctggaagtgaggatgccgccccggacagtggcacctgggaagcctgggagtgtttgtcccatcggtagcttgaaataaacgctcccctcagacacccgctgggttct

SEQ ID NO: 146186 - DNA, 120 bp, Artificial Sequence
  ENSG00000105048_8 (sequence is synthesized)
ctgatgttattatggttgagatgcagctggtctctcctggttaattgacttcttattaccaacaagttacttgaaagagtgtcaccaataatcattaaagtacggcaggctgaaccttca

SEQ ID NO: 146187 - DNA, 120 bp, Artificial Sequence
  ENSG00000105048_9 (sequence is synthesized)
agcaaggctcagcctcaagattcacagcatctcagacacagcctaggccgcaccaggatgtcggacaccgaggagcaggaatatgaggagtgagtgctgcactgggagaggaggctgcgg

SEQ ID NO: 146188 - DNA, 120 bp, Artificial Sequence
  ENSG00000105048_10 (sequence is synthesized)
gaggagtgtggcactttggcggggaaggggcggctcagccctcgggccctcgcccgccctctccgggtctggagcgtctcctcgcgccatccctgcaccgccagggggaacgtgcccatc

SEQ ID NO: 146189 - DNA, 120 bp, Artificial Sequence
  ENSG00000105048_11 (sequence is synthesized)
gcagccgaggccagagggacccccgtccagcagagactggaaccctggtctctggccaccgcccccatccctcccccagctcctaacgccttctcttctgtgcccccatctccagaggag

SEQ ID NO: 146190 - DNA, 120 bp, Artificial Sequence
  ENSG00000105048_12 (sequence is synthesized)
ctcaagattcacagcatctcagacacagcctaggttcccatggacttgtcataagacaaaagaggacagctgtgctgagggggcagggtctgcagcctcctggctgtgccaggaccacac

SEQ ID NO: 146191 - DNA, 120 bp, Artificial Sequence
  ENSG00000105048_13 (sequence is synthesized)
agcaaggctcagcctcaagattcacagcatctcagacacagcctaggccgcaccaggatgtcggacaccgaggagcaggaatatgaggagtgagtgctgcactgggagggggagcagccg

SEQ ID NO: 146192 - DNA, 80 bp, Artificial Sequence
  ENSG00000105048_14 (sequence is synthesized)
cggttcaagcgaagagaagatgaggaaggaagaggaagaggccaagaagcgggcagaggatgatgccaagaaaaagaagg

SEQ ID NO: 146193 - DNA, 120 bp, Artificial Sequence
  ENSG00000105048_15 (sequence is synthesized)
cggagccggtggcagagccagaagaggaacgccccaaaccaagcccgcctcagctgggaccctccacgttcaggagcctcccggggctggcggctacctcactggacggcacatcccgga

SEQ ID NO: 146194 - DNA, 88 bp, Artificial Sequence
  ENSG00000105048_16 (sequence is synthesized)
acccaggagtctaggtcgccccctccttggggccccaccccactgggcctcttctctctggtccttaggccgcaccaggatgtcggac

SEQ ID NO: 146195 - DNA, 120 bp, Artificial Sequence
  ENSG00000105048_17 (sequence is synthesized)
agcaaggctcagcctcaagattcacagcatctcagacacagcctaggccgcaccaggatgtcggacaccgaggagcaggaatatgaggaggagcagccggaaggaggctgcggaggagga

SEQ ID NO: 146196 - DNA, 120 bp, Artificial Sequence
  ENSG00000105048_18 (sequence is synthesized)
cccagtcatacatcttcctaaatattccctctacccccagagacaaggtgtgagaaaggcagagatggagggaggaaattgaaacagcagtcgacatttctcctcctcctcctcctccct

SEQ ID NO: 146197 - DNA, 120 bp, Artificial Sequence
  ENSG00000105053_0 (sequence is synthesized)
ggaagttttcgctgggcaactgagaaggtgagtccgggtaactgcggaggatccgagggtcaggctgcagaagcccagaatcccaccccagtccccaagtacagaggtcgctgtcaagat

SEQ ID NO: 146198 - DNA, 120 bp, Artificial Sequence
  ENSG00000105053_1 (sequence is synthesized)
ggagtttccaacccagtaaatccaagggccagaccgtgacctcataaagcatgatctccttctgtccagactgtggcaaaagtatccaagcggcattcaaattctgcccctactgtggaa

SEQ ID NO: 146199 - DNA, 120 bp, Artificial Sequence
  ENSG00000105053_2 (sequence is synthesized)
attctttgcctgtagaggagcatgtagggtcccagacctttgtcaatccacatgtgtcatccttccaaggctcaaagagagggctgaactccagttttgaaacctctcctaagaaagtga

SEQ ID NO: 146200 - DNA, 120 bp, Artificial Sequence
  ENSG00000105053_3 (sequence is synthesized)
aatggtccagcaccgtcacctctccccgattatccctcttctcagatggtgacagttctgagtctgaagatactctgagttcctctgagagatccaaaggctccgggagcagacccccaa

SEQ ID NO: 146201 - DNA, 120 bp, Artificial Sequence
  ENSG00000105053_4 (sequence is synthesized)
cccccaaaagcagccctcagaagaccaggaagagccctcaggtgaccaggggtagccctcagaagaccagctgtagccctcagaagaccaggcagagccctcagacgctgaagcggagcc

SEQ ID NO: 146202 - DNA, 120 bp, Artificial Sequence
  ENSG00000105053_5 (sequence is synthesized)
gagtgaccacctcacttgaagctttgcccacagggacagtgctgacagacaagagtgggcgacagtggaagctgaagtccttccagaccagggacaaccagggcattctctatgaagctg

SEQ ID NO: 146203 - DNA, 120 bp, Artificial Sequence
  ENSG00000105053_6 (sequence is synthesized)
cacccacctccaccctcacctgtgactcaggaccacagaagcaaaagttctcactcaaactggatgccaaggatgggcgcttgttcaatgagcagaacttcttccagcgggccgccaagc

SEQ ID NO: 146204 - DNA, 120 bp, Artificial Sequence
  ENSG00000105053_7 (sequence is synthesized)
ctctgcaagtcaacaagtggaagaagctgtactcgaccccactgctggccatccctacctgcatgggtttcggtgttcaccaggacaaatacaggttcttggtgttacccagcctgggga

SEQ ID NO: 146205 - DNA, 120 bp, Artificial Sequence
  ENSG00000105053_8 (sequence is synthesized)
gccttcagtcggccctggatgtcagcccaaagcatgtgctgtcagagaggtctgtgctgcaggtggcctgccggctgctggatgccctggagttcctccatgagaatgagtatgttcatg

SEQ ID NO: 146206 - DNA, 120 bp, Artificial Sequence
  ENSG00000105053_9 (sequence is synthesized)
gaaatgtgacagctgaaaatatctttgtggatccagaggaccagagtcaggtgactttggcaggctatggcttcgccttccgctattgcccaagtggcaaacacgtggcctacgtggaag

SEQ ID NO: 146207 - DNA, 120 bp, Artificial Sequence
  ENSG00000105053_10 (sequence is synthesized)
gcagcaggagccctcacgagggggaccttgagttcattagcatggacctgcacaagggatgcgggccctcccgccgcagcgacctccagagcctgggctactgcatgctgaagtggctct

SEQ ID NO: 146208 - DNA, 120 bp, Artificial Sequence
  ENSG00000105053_11 (sequence is synthesized)
acgggtttctgccatggacaaattgccttcccaacactgaggacatcatgaagcaaaaacagaagtttgttgataagccggggcccttcgtgggaccctgcggtcactggatcaggccct

SEQ ID NO: 146209 - DNA, 120 bp, Artificial Sequence
  ENSG00000105053_12 (sequence is synthesized)
cagagaccctgcagaagtacctgaaggtggtgatggccctcacgtatgaggagaagccgccctacgccatgctgaggaacaacctagaagctttgctgcaggatctgcgtgtgtctccat

SEQ ID NO: 146210 - DNA, 120 bp, Artificial Sequence
  ENSG00000105053_13 (sequence is synthesized)
atgaccccattggcctcccgatggtgccctaggtggaatccagaactttccatttgcagtgtgcaacagaaaaaaaaaaatgaagtaatgtgactcaaggcctgctgtttaatcacagat

SEQ ID NO: 146211 - DNA, 120 bp, Artificial Sequence
  ENSG00000105053_14 (sequence is synthesized)
aagcttctagaacaagccctggaatgtgcattcctgccactggtttcaggatactcatcagtcctgattagcctcccggagggccccagtttccctcccgtgaatgtgaagttccccatc

SEQ ID NO: 146212 - DNA, 120 bp, Artificial Sequence
  ENSG00000105053_15 (sequence is synthesized)
ttggtggcctgcccttcagccagtgtcctagcaaagctggatggggttgggccggcccacaggggggacccctcctacccttgacacctctgtgctttggtaataaattgttttaccaga

SEQ ID NO: 146213 - DNA, 120 bp, Artificial Sequence
  ENSG00000105053_16 (sequence is synthesized)
ccattggcctcccgatggtgccctaggtggaatccaggtgggaagagcttgtgaggcttaagcctctcaccccttgccctcacccgagccctgccccaggctccaggagacacttcccag

SEQ ID NO: 146214 - DNA, 120 bp, Artificial Sequence
  ENSG00000105053_17 (sequence is synthesized)
aggctgttccacgttcataccagggcccagcttcccagggagacactgggtttttccgcacggtccttgaacttcccagcctcaaggaatggcaagtagcagaaacccggctcaacttgg

SEQ ID NO: 146215 - DNA, 120 bp, Artificial Sequence
  ENSG00000105053_18 (sequence is synthesized)
ctttaagaaaagtggggattgattggctgttgtagctagaaaattacaagggggagcttcaggcacaacgggattcagggcctcaaaaatagcatcaagacgttgtttgtctctcgccat

SEQ ID NO: 146216 - DNA, 120 bp, Artificial Sequence
  ENSG00000105053_19 (sequence is synthesized)
gtgcgggcgacttctttcgccttcccatctcctcctgcttcttcagccttagcactgtgggagtagagtagaaagagaatcaggaccaggcggcatcagtttgtagtccagatttttacc

SEQ ID NO: 146217 - DNA, 120 bp, Artificial Sequence
  ENSG00000105053_20 (sequence is synthesized)
ttgttaaagaatcatctaattagcttcttgcctttactagaagtcagggagtgttaaccttttccgaagagcaagcggtaggttgccatggaaacgcgttgtgacgggtttctgagaaaa

SEQ ID NO: 146218 - DNA, 120 bp, Artificial Sequence
  ENSG00000105053_21 (sequence is synthesized)
caagcggaagtaaggggcggagttgaggcagaagtttaggtaatgtgacctctgattggtggagaggtacctcacggtgcattccgattggtctgacactgacacatgcgcagtagaacc

SEQ ID NO: 146219 - DNA, 120 bp, Artificial Sequence
  ENSG00000105053_22 (sequence is synthesized)
agaaggcgttccaaagcggctagaacggaggggagggggatgagcaatgagggaataatccccattccgtctggaatcagagggcgggcctgccgcggaggcatctgggaaacggagttc

SEQ ID NO: 146220 - DNA, 120 bp, Artificial Sequence
  ENSG00000105053_23 (sequence is synthesized)
ccaggcaggcgaagcccaggggccgtcaggaagtcagcggcgcctgcgcgggcgcctcagattcaggatgcgcgcgcagcgctctccgcccagcggaagttttcgctgggcaactgagaa

SEQ ID NO: 146221 - DNA, 120 bp, Artificial Sequence
  ENSG00000105053_24 (sequence is synthesized)
ggacaaattgccttcccaacactgaggacatcatgaagcaaaaacagaagtgagtctaggggtcagcagaacccctgcaggtggtcagcagaacccctgcaggtggacagaagcccagag

SEQ ID NO: 146222 - DNA, 120 bp, Artificial Sequence
  ENSG00000105053_25 (sequence is synthesized)
cccaactgggagcaggagggaaggggaggtggcatccagcagagcccaagtcctctgagccgcacaggcatgtgctgcagtgtccacacagcaggcgaggcaggtgttccggagccacac

SEQ ID NO: 146223 - DNA, 120 bp, Artificial Sequence
  ENSG00000105053_26 (sequence is synthesized)
tgcctgggctcagactctggcaccaccactgtggggtgttaacgtctgcgagcctcagtgtcctgctccatgagatggtctcctactagctactaccttatgggactgcaaagagttcag

SEQ ID NO: 146224 - DNA, 120 bp, Artificial Sequence
  ENSG00000105053_27 (sequence is synthesized)
tcctactagctactaccttatgggactgcaaagagttcagggaagtcaggtgcacacagcacttagcacaggggctggctcagagaaaatgctcattgtggccgggcgcggtggctcacg

SEQ ID NO: 146225 - DNA, 120 bp, Artificial Sequence
  ENSG00000105053_28 (sequence is synthesized)
ggattcattttaatgtaagctggactttgtcatgccagaaacaaggctcggtcaccgtcagcagtttgcagttttccacctcctcccagttcctccgtgtggttgacccagatatctccg

SEQ ID NO: 146226 - DNA, 120 bp, Artificial Sequence
  ENSG00000105053_29 (sequence is synthesized)
ttatgcagccgcctccgggggaccacctccctccctttgagtcagccacagacagcctacttgacggccccgctggcccccacattccactgaactgtgcggatgccacagtgaccccct

SEQ ID NO: 146227 - DNA, 120 bp, Artificial Sequence
  ENSG00000105053_30 (sequence is synthesized)
ctcaggcacagcatgacctcctgaagtcgagcctgcttgctttgaacctaccagttaaaatctcctcaaaatgtttggataccgcccattggcccctcacagccacgagctccctgacca

SEQ ID NO: 146228 - DNA, 89 bp, Artificial Sequence
  ENSG00000105053_31 (sequence is synthesized)
gtgtgccttgggacgggtggggaggtcacctttgggtgtgcggtgtgcccccaggacctgtaagtaataaaatctttatttccatcttg

SEQ ID NO: 146229 - DNA, 120 bp, Artificial Sequence
  ENSG00000105053_32 (sequence is synthesized)
ggaagttttcgctgggcaactgagaaggtcgctgtcaagatggagtttccaacccagtaaatccaagggccagaccgtgacctcataaaggtattatcccttgggcacagcctctcaaga

SEQ ID NO: 146230 - DNA, 120 bp, Artificial Sequence
  ENSG00000105053_33 (sequence is synthesized)
cctttttcctttttcccaccagcagctggctcctgcttgtctcctctgggttgctgctggccagctttactcccagaaggaacgttgtcatagcatgatctccttctgtccagactgtgg

SEQ ID NO: 146231 - DNA, 120 bp, Artificial Sequence
  ENSG00000105053_34 (sequence is synthesized)
agagcggctccgggtcgcggggttcactggcctcctcttgagcttcccaagccaccttgggctccgtgttgggcatggctaaggcggagatgggcggaacttgtgggaagttcgacagct

SEQ ID NO: 146232 - DNA, 120 bp, Artificial Sequence
  ENSG00000105053_35 (sequence is synthesized)
ttgtaccctcaaaatcgcatgctggccgtggtgctgtgtgtgatttgcgtaagtgatgttccactctgcgtctcatctgtctctggctctcttcagctttaaccctatccctacatgtgg

SEQ ID NO: 146233 - DNA, 120 bp, Artificial Sequence
  ENSG00000105053_36 (sequence is synthesized)
accgagttcactgcttctgactccggcttctaaatcaattttctatagacatgtctgtgtccttaaactatatatggtggtactgtgtgttaatttgtataaatggcactatgctctaaa

SEQ ID NO: 146234 - DNA, 120 bp, Artificial Sequence
  ENSG00000105053_37 (sequence is synthesized)
tggcctggcccccttggcgcccccatacacaaaaggtagctgctccatgccttcgggtctcgttcatagtgcgcactaccccttcctgtggatgacggacactcctcacagccagcagct

SEQ ID NO: 146235 - DNA, 73 bp, Artificial Sequence
  ENSG00000105053_38 (sequence is synthesized)
gagaacctattatgtgacagtccctgggctgagtgtcacaagcattatgtcatttaattcttttggatttttg

SEQ ID NO: 146236 - DNA, 82 bp, Artificial Sequence
  ENSG00000105053_39 (sequence is synthesized)
ctgtcacccaggctggagtgcagcggtgcaatcaaggctcactgcagccacagcctcctaggttcaagtgatccttccactt

SEQ ID NO: 146237 - DNA, 87 bp, Artificial Sequence
  ENSG00000105053_40 (sequence is synthesized)
ttttttttttttttttttttttctggtagagatggggtcttcctgtgttgcccaggttggtctggaactcctgggctcccaccttca

SEQ ID NO: 146238 - DNA, 120 bp, Artificial Sequence
  ENSG00000105053_41 (sequence is synthesized)
cttttggttttctttggggttttgtgtgtgcgtgtgtgtgtgtgtatgtgtgtttactatgtcattgaattatttcagcaagcctatgggatggcttccatgttcctatttaacagatga

SEQ ID NO: 146239 - DNA, 120 bp, Artificial Sequence
  ENSG00000105053_42 (sequence is synthesized)
ggaaatggagactcagtcacttgcccaggtgcacccagcacgcaggttgctttgttcacagctatatccccaatgcccagaataatactcagcatataatggaggctttgtaggaagaat

SEQ ID NO: 146240 - DNA, 120 bp, Artificial Sequence
  ENSG00000105053_43 (sequence is synthesized)
gaatgaatgaatggcagagctggggtttgaacctagatctgtttgactctatactcttaagaactcagctgcatgagttgtgtttaattaaaatatttggtgcttttttttttttttttg

SEQ ID NO: 146241 - DNA, 71 bp, Artificial Sequence
  ENSG00000105053_44 (sequence is synthesized)
tgtttaattaaaatatttggtgcttttttttttttttttgctacaaaatctcactctgtcacccaggctgg

SEQ ID NO: 146242 - DNA, 120 bp, Artificial Sequence
  ENSG00000105053_45 (sequence is synthesized)
ctgggattacaggcctaagccaccacacctggccatttagtgttattttaacaaatacctaatattaatggtggcttaagcaagatgatgttttattgctttttcatttaaaagtcaggg

SEQ ID NO: 146243 - DNA, 120 bp, Artificial Sequence
  ENSG00000105053_46 (sequence is synthesized)
aggggccctgtttccttctttttgcaccaacattttcaacgcataacctgcatctcctgggccgtagtggctgcttcagcttccaccatcacatctgcgttgcagccagctggaacagaa

SEQ ID NO: 146244 - DNA, 120 bp, Artificial Sequence
  ENSG00000105053_47 (sequence is synthesized)
gaggaaaggtagagcctgtcccagcccactaagggcataacctggaagttgcccacatttcttctgctcacatcctcattggccagaacttggtcatgtggtcagtcctcactgcaaagg

SEQ ID NO: 146245 - DNA, 120 bp, Artificial Sequence
  ENSG00000105053_48 (sequence is synthesized)
aagctgggaaacgtagtttttatgctgaaggctacattctagggaacactgtggctcttaccataagagaaagaaaaggaacctgggtacagcaaggtagctcgcagtctctgatgtgtg

SEQ ID NO: 146246 - DNA, 120 bp, Artificial Sequence
  ENSG00000105053_49 (sequence is synthesized)
tttgtgtgcagtacctgaggaatttggctccgatgtggggacttgatgaggagcctggtcattgagggagtaacaaattgccagtggggactgggggcccttatctgagacttcagtgtg

SEQ ID NO: 146247 - DNA, 120 bp, Artificial Sequence
  ENSG00000105053_50 (sequence is synthesized)
acagccttctgcccctcctgtcccccaccaggatgccaaggatgggcgcttgttcaatgagcagaacttcttccagcgggccgccaagcctctgcaaggtacctgacagggaactgggca

SEQ ID NO: 146248 - DNA, 120 bp, Artificial Sequence
  ENSG00000105053_51 (sequence is synthesized)
aggaggggagagtgaggggggcgccaacttggtcacagcacttgacttctacctgcaggcatgagaagggtgggcttagattaaaggcccaggtttgctcccatctgtgtccataacctg

SEQ ID NO: 146249 - DNA, 120 bp, Artificial Sequence
  ENSG00000105053_52 (sequence is synthesized)
actcctgtgacccctcaggcctcagtgtgtgttgtgactggctcacaccagctcttggaagccaagtattaaattttcaggctgggcgtgggttgacgcctatactcccagcactttggg

SEQ ID NO: 146250 - DNA, 86 bp, Artificial Sequence
  ENSG00000105053_53 (sequence is synthesized)
accatcctgggcaatgtggcaaaaccttaatggcatgcacctgtgatcccagctactcaagaggctgagctgagagaattgcttga

SEQ ID NO: 146251 - DNA, 120 bp, Artificial Sequence
  ENSG00000105053_54 (sequence is synthesized)
caaaaattagccgggtgtaatggcatgcacctgtgatcccagctactcaagaggctgagctgagagaattgcttgagcccgggagacagagattgcagtgagctgtgattgtgccactgc

SEQ ID NO: 146252 - DNA, 120 bp, Artificial Sequence
  ENSG00000105053_55 (sequence is synthesized)
cactctgcctaggacgcacctaattgcccagccacaggctgtgacagtacatgggaactgtccaccaggaagttcctcagaggctcagtgctcggggctgttattggggagtagtcatgt

SEQ ID NO: 146253 - DNA, 120 bp, Artificial Sequence
  ENSG00000105053_56 (sequence is synthesized)
ggccccctctgtctgacatgtatccgcatcccaggttccccagaggaaagcaggtgttgcacagaaaccacagtgattgcacaagcagtttaggctcagcgagccccactcacttagggg

SEQ ID NO: 146254 - DNA, 120 bp, Artificial Sequence
  ENSG00000105053_57 (sequence is synthesized)
attctgggagccctcccggaatccagggtcccagaccttgccaggagagccgtctcaggcctgctgcattagcccttcctgcatggctggatagtgacagagagaaagaggaagaagaag

SEQ ID NO: 146255 - DNA, 120 bp, Artificial Sequence
  ENSG00000105053_58 (sequence is synthesized)
cttatttaaaactaggaagcagcaagtcgtgagagccaagagtgcgcttgaccttgttggaaccagggcaccagagccgcttctcattgctgggaagtttggggatgatgaccctgacct

SEQ ID NO: 146256 - DNA, 120 bp, Artificial Sequence
  ENSG00000105053_59 (sequence is synthesized)
tccgcgtggttataacctcactcccttgtttgttcccccacagctgcacccacctccaccctcacctgtgactcaggaccacagaagcaaaagttctcactcaaactggtaagtgaccct

SEQ ID NO: 146257 - DNA, 120 bp, Artificial Sequence
  ENSG00000105053_60 (sequence is synthesized)
gcaggtggggggcagcttggaggggagggactttcacaaacacatccttgacttctgagcccgtctgtcagctgggagagctcggccgggggccagggtccccacctgcaaggagtatta

SEQ ID NO: 146258 - DNA, 120 bp, Artificial Sequence
  ENSG00000105053_61 (sequence is synthesized)
agaccgtgggcggggcaggcgcccagttctccatcatcccagggtgttggaaacccacagttggatccacccaagtctggctctgatgcttccctgctgtgtgacctgggcaagcccatc

SEQ ID NO: 146259 - DNA, 120 bp, Artificial Sequence
  ENSG00000105053_62 (sequence is synthesized)
cccctcagagctcagtttcctcatctgtgaaatggagccactaatacccacagggtgtggcccatctgccccctaccaccggcctcgcagcgtgctcgtatcgagcacctactgtgtatc

SEQ ID NO: 146260 - DNA, 120 bp, Artificial Sequence
  ENSG00000105053_63 (sequence is synthesized)
cacacatcgggtgccgagcatgagtctcagcagacaggacatgtgcactcgaggttggggctaaaaggaaacaaatagagaaagggagagtggccacgagggtgaatcacgccttccaca

SEQ ID NO: 146261 - DNA, 120 bp, Artificial Sequence
  ENSG00000105053_64 (sequence is synthesized)
cagaggaggtgcctaacagaagggcatcgtggtggttcatagccccgccatcatccctgggtgctgggattacaggtgactcttattttctttttgtttatcagaattgtctcacacccc

SEQ ID NO: 146262 - DNA, 120 bp, Artificial Sequence
  ENSG00000105053_65 (sequence is synthesized)
agaaaaccagggacagctgggtcagttgccctccctccgccctaggtggaggccatgagagtgggtcagagcgtgggctgtggagccgggctcactagtggtgggtagcacctgctttga

SEQ ID NO: 146263 - DNA, 120 bp, Artificial Sequence
  ENSG00000105053_66 (sequence is synthesized)
gagcctggcattgcctgagccgggctgtgtttcataagcactgcttcattgaatcctcccagtagggcagctaccgtgtcccatttaacacttctctgcatggttcaggtgtgtctggca

SEQ ID NO: 146264 - DNA, 120 bp, Artificial Sequence
  ENSG00000105053_67 (sequence is synthesized)
cagtaggcaccccatcaacctgagctgttcctgttattactactgtaattatgctcatcatcctagaaatacagccttgctctctgttcgtgcatctgacctcatcaacatttcctgagg

SEQ ID NO: 146265 - DNA, 120 bp, Artificial Sequence
  ENSG00000105053_68 (sequence is synthesized)
ctcaaaacttggtgatgatgagttggccccaggcccagccctggagaggctcccagtctggcgggagccatgtcatgtcccagtcccatcgggaagaggggtgggctgggaggggagcac

SEQ ID NO: 146266 - DNA, 120 bp, Artificial Sequence
  ENSG00000105053_69 (sequence is synthesized)
agggcactgggccaaccagaagacattcaccctccccatccactgggaaggcagctctgttctgaagcattcgaaaggtcaggggctgaatgcccagtggtgttcatccatccatttatt

SEQ ID NO: 146267 - DNA, 120 bp, Artificial Sequence
  ENSG00000105053_70 (sequence is synthesized)
catttattcaccaagcctttcctgcaacctcctgtgaactgagtgctggggacatctgcagagatgggtcagacccaattcctgccctgaaggagctgcccccttgggggagtggggcag

SEQ ID NO: 146268 - DNA, 120 bp, Artificial Sequence
  ENSG00000105053_71 (sequence is synthesized)
gcatgaataccccacatgagattgctcagggcctgcatggctgtgcccacgtcgctcgcgtcagtcactatgggcttcgccagcatcgtggggaggactccaggacgcaaaaagagaaaa

SEQ ID NO: 146269 - DNA, 120 bp, Artificial Sequence
  ENSG00000105053_72 (sequence is synthesized)
ggagaagcccaggcctcaggactggacccctctgtctaccatcagtctcttggcctcttattggcctcatggctttgaacactgtctccatgttaacatctccttcatttctatctccag

SEQ ID NO: 146270 - DNA, 120 bp, Artificial Sequence
  ENSG00000105053_73 (sequence is synthesized)
ccagcctggactcccctgcttggaggagatatatgtgcagcctgccagcttggcacctgcaggttgagtatcccttatccgaaatgatgaggactggaagtattctgattttggattttt

SEQ ID NO: 146271 - DNA, 120 bp, Artificial Sequence
  ENSG00000105053_74 (sequence is synthesized)
gacaaattgccttcccaacactgaggacatcatgaagcaaaaacagaacctgggtgacaaagcaagactccgtcttggacttgttgcccaagtcatctgggaggcagctggccatctacg

SEQ ID NO: 146272 - DNA, 120 bp, Artificial Sequence
  ENSG00000105053_75 (sequence is synthesized)
tctgaagtgcaggagtgaagtctaaagggagactcagaccccgggaatatctccggagccatcagctgaagccccaggagaggatgagattatctgggaaggcatatagagtgggaagag

SEQ ID NO: 146273 - DNA, 120 bp, Artificial Sequence
  ENSG00000105053_76 (sequence is synthesized)
tagtggattggttgattcagtgttcacagtgactttaagaacataacttccctggatggcagaggggactgtgtatatatcttaggctgtgtatatatcttaggcattctgttttaaaag

SEQ ID NO: 146274 - DNA, 120 bp, Artificial Sequence
  ENSG00000105058_0 (sequence is synthesized)
ggcactccagctaccgaagcactggagagtgtcatggaggcctacgagcaggtccaaaagggacccctgaagctgaaaggcgtcgcagagctgggagtgaccaagcggaagaagaaaaag

SEQ ID NO: 146275 - DNA, 120 bp, Artificial Sequence
  ENSG00000105058_1 (sequence is synthesized)
aaggacaaagacaaagcgaaactcctggaagcaatgggaacgagcaaaaagaacgaggaggagaagcggcgcggcctggacaagcggaccccggcccaggcggccttcgagaaaatgcag

SEQ ID NO: 146276 - DNA, 120 bp, Artificial Sequence
  ENSG00000105058_2 (sequence is synthesized)
gagaagcggcaaatggaaaggatcctaaagaaggcatccaaaacccacaagcagagagtggaggacttcaacagacacctggacacactcacggagcattacgacattcccaaagtcagc

SEQ ID NO: 146277 - DNA, 120 bp, Artificial Sequence
  ENSG00000105058_3 (sequence is synthesized)
tggacgaagtagccgcctgcccccagtatggagcagcatcgagggttcgcaaaaggccacactggggttgtgtgtgtttcctttggtatattctggaaacatggctacacacacccttgc

SEQ ID NO: 146278 - DNA, 120 bp, Artificial Sequence
  ENSG00000105058_4 (sequence is synthesized)
atcttctgctacagactgcttttcgaagctgtgtaccctcattctggaacttgattaaagtaagatcgtccttgtactcagtttaggcttcttggcaacatacagaagatacaccctttt

SEQ ID NO: 146279 - DNA, 120 bp, Artificial Sequence
  ENSG00000105058_5 (sequence is synthesized)
cgtttggatggaaagtttctaagtttatccagaggtaaagcccattgtgtgtctgtgtcatgtaaaaatgttttcacccgagttgcatgtaacgctctgaggccagccagctgtcttctc

SEQ ID NO: 146280 - DNA, 120 bp, Artificial Sequence
  ENSG00000105058_6 (sequence is synthesized)
gtaaggagctagcgccatggtggcctgcagtatgcagagccccgcaggacccagcgtgggcgcccttccaagcttcctctagctttgggcctatgctgtcccctgcaggccctagggaag

SEQ ID NO: 146281 - DNA, 120 bp, Artificial Sequence
  ENSG00000105058_7 (sequence is synthesized)
ccacttgcaactatgcggccttcagacttcctcctcagccacctggccactgagacagcatagcctgggtaacggaacagccacctaaggcaagaatggaacggacacaccttgctcctt

SEQ ID NO: 146282 - DNA, 120 bp, Artificial Sequence
  ENSG00000105058_8 (sequence is synthesized)
tctgagcccgtttcccaaaaccccccttccaggtgcttctaatgggtgttgccatagcagacgctgctaatgcatcacagcattctttgaaatggaaccagacacagcctgcctctcaat

SEQ ID NO: 146283 - DNA, 120 bp, Artificial Sequence
  ENSG00000105058_9 (sequence is synthesized)
cctcagctgggggctcctagcagcctcttgtatttactcagagttgacacatcacacagatcctgtttggcattcctaccttacggacgtctcaggggtgacaggaccagggcagagccc

SEQ ID NO: 146284 - DNA, 120 bp, Artificial Sequence
  ENSG00000105058_10 (sequence is synthesized)
cggtacaaacagacaaggctgcagtcaaatgggagggtccaggtgtccgtgttggagggctgggatcttgtagggcctgtgcgtcctggctgaggatcaaaccacatatgttattgggag

SEQ ID NO: 146285 - DNA, 120 bp, Artificial Sequence
  ENSG00000105058_11 (sequence is synthesized)
aaacgatttctgttgacgtagatattgaaagaataatgaaggcagaagagaaaaacgaagtgtggaatttggggttgtcctgtgtaaattacacaataaagcaaaagtcagttattgtaa

SEQ ID NO: 146286 - DNA, 80 bp, Artificial Sequence
  ENSG00000105058_12 (sequence is synthesized)
agctgttgatattgaatggccatgcccatgacgactttgtttgtattgtattataaggctccgataaattattttttctt

SEQ ID NO: 146287 - DNA, 120 bp, Artificial Sequence
  ENSG00000105058_13 (sequence is synthesized)
gcggaaatagtgtttgcaaacaggaagtgtggcactccagctaccgaagcactggagagtgtcatggaggcctacgagcaggtccaaaagggacccctgaagctgaaaggcgtcgcagag

SEQ ID NO: 146288 - DNA, 120 bp, Artificial Sequence
  ENSG00000105058_14 (sequence is synthesized)
ctgggagtgaccaagcggtgaggcccgagggcccgcgggattccgtcttcatcccccttagaccttttctcgggacccctggccctgatcctccgacccgccgcctcctcatgtcttttt

SEQ ID NO: 146289 - DNA, 120 bp, Artificial Sequence
  ENSG00000105063_0 (sequence is synthesized)
gattgtgggatagtggcggagggagccgggcgtcggaggccctgaggccggccgcagagcccggagattgagcggctttggggaaggggtggttaaggaagtaggcctcggcttccgtcg

SEQ ID NO: 146290 - DNA, 120 bp, Artificial Sequence
  ENSG00000105063_1 (sequence is synthesized)
gtcgctgctcggctctgcggcccgtttggaccgcggaggaggtcgccttcccctcccgtggggcgctcggttggactgtggaaaccggggcaacttcccccgtcttcccggctgaggcgc

SEQ ID NO: 146291 - DNA, 120 bp, Artificial Sequence
  ENSG00000105063_2 (sequence is synthesized)
ctgcgtgggcctcgcgacccggctcgccaacccgcctcggcccgcacgcccacctcgcctgcggaccccggaggtgcctacgcggactagtgacgccccccgcccgtcggcaactccacc

SEQ ID NO: 146292 - DNA, 120 bp, Artificial Sequence
  ENSG00000105063_3 (sequence is synthesized)
gactagtgacgccccccgcccgtcggcaactccacccggcgctgaccccctcaactctgcaggacccggcgcgcgaggaccccacgacccgcgggcgcctgcgcggaccccgcgagcccc

SEQ ID NO: 146293 - DNA, 120 bp, Artificial Sequence
  ENSG00000105063_4 (sequence is synthesized)
gccggagccgccggcggcggggcgggggggggcgccccgatgagccccgagtgcgaggagccgccgccccccctcgcagggcgccatgttttggaagtttgacctgcacacaagctcgca

SEQ ID NO: 146294 - DNA, 120 bp, Artificial Sequence
  ENSG00000105063_5 (sequence is synthesized)
gtttgacctgcacacaagctcgcacctggacacgctgctggagcgggaggacctgagcctgcccgagctgctggacgaggaagacgtgctgcaggagtgcaaggtcgtcaaccgcaagct

SEQ ID NO: 146295 - DNA, 120 bp, Artificial Sequence
  ENSG00000105063_6 (sequence is synthesized)
gctggacttcctgctgcagccaccccacctgcaagcaatggtggcctgggtcacccaggagccgccagatagcggtgaggagcggctgcgctacaagtaccccagtgtggcctgcgagat

SEQ ID NO: 146296 - DNA, 120 bp, Artificial Sequence
  ENSG00000105063_7 (sequence is synthesized)
tctgacctcagatgtgccccagatcaatgatgccctgggtgctgatgagtcccttctgaaccggctctacggcttcctgcagagcaccggcagcctcaacccactgctggccagcttctt

SEQ ID NO: 146297 - DNA, 120 bp, Artificial Sequence
  ENSG00000105063_8 (sequence is synthesized)
cagcaaggtcatgggcatcctcatcaaccgcaagacagaccagctcgtgtcctttcttcggaagaaggatgacttcgtggacctgctgctgcagcacattggcacctcggccatcatgga

SEQ ID NO: 146298 - DNA, 120 bp, Artificial Sequence
  ENSG00000105063_9 (sequence is synthesized)
cctcctgctgcgcctgctcacctgtgtggagcggcctcagctgaggcaggatgttgtcaattggctcaacgaggagaagatcgtccagcggctgattgagcagatccacccgtcgaagga

SEQ ID NO: 146299 - DNA, 120 bp, Artificial Sequence
  ENSG00000105063_10 (sequence is synthesized)
tgagaatcaacattccaacgcatcccagtccctgtgtgacatcatccgcctgagccgggagcagatgatccaagtccaggacagcccagagcctgaccaactgctggccaccctggagaa

SEQ ID NO: 146300 - DNA, 120 bp, Artificial Sequence
  ENSG00000105063_11 (sequence is synthesized)
gcaggagacgattgagcagctcttaagcaacatgttcgagggggagcagagccagtctgtcatcgtcagtgggatccaggtgctgctgaccctgctggagcccaggaggccgaggtccga

SEQ ID NO: 146301 - DNA, 120 bp, Artificial Sequence
  ENSG00000105063_12 (sequence is synthesized)
gtccgtgaccgtgaacagcttcttcagcagtgtggatgggcagctggagctcctggcccagggggccctggaaagcactgtgtccagtgtgggcgccttgcacgccctacgcccgcggct

SEQ ID NO: 146302 - DNA, 120 bp, Artificial Sequence
  ENSG00000105063_13 (sequence is synthesized)
cagctgcttccaccagctcctgctggagcctcccaagctggagccgctacagatgacatggggcatgctggctccgcctctgggcaacacgcggctgcacgtggtcaagctcctggccag

SEQ ID NO: 146303 - DNA, 120 bp, Artificial Sequence
  ENSG00000105063_14 (sequence is synthesized)
tgccctgagcgccaatgatgcagccctgacgcacgagctcctggcactggacgtgcccaacaccatgctggacctcttcttccattatgtcttcaacaacttcttgcatgcccaagtaga

SEQ ID NO: 146304 - DNA, 120 bp, Artificial Sequence
  ENSG00000105063_15 (sequence is synthesized)
gggatgcgtgagcaccatgctgagcttggggccacctcctgacagcagccctgagacgcccatccaaaaccctgttgtgaaacatctgctgcagcagtgccgcctggtggagcggatcct

SEQ ID NO: 146305 - DNA, 120 bp, Artificial Sequence
  ENSG00000105063_16 (sequence is synthesized)
tgtacagtgtgcgggaggccctcggaaaggctacatgggtcacctgacaagagtggccggtgccctggtgcagaacacggagaaggggcccaatgcagagcagctgcggcagctgctgaa

SEQ ID NO: 146306 - DNA, 120 bp, Artificial Sequence
  ENSG00000105063_17 (sequence is synthesized)
ggagctgcccagcgagcagcaggagcagtgggaagccttcgtatcggggcccctggcggagaccaacaagaagaacatggtggacctggtgaacacccaccacctacactcctccagtga

SEQ ID NO: 146307 - DNA, 120 bp, Artificial Sequence
  ENSG00000105063_18 (sequence is synthesized)
cgatgaggacgaccggctcaaggagttcaacttccctgaggaggctgtgctgcagcaggccttcatggacttccagatgcagcgcatgacctctgccttcattgaccacttcggcttcaa

SEQ ID NO: 146308 - DNA, 120 bp, Artificial Sequence
  ENSG00000105063_19 (sequence is synthesized)
tgatgaggagtttggggagcaggaggagagtgtgaacgcaccttttgacaagacagccaacatcaccttctccctcaatgctgacgatgagaaccccaacgccaacctacttgagatatg

SEQ ID NO: 146309 - DNA, 120 bp, Artificial Sequence
  ENSG00000105063_20 (sequence is synthesized)
ctacaaggaccgcatccagcagtttgatgatgatgaggaagaggaggacgaggaagaggcccagggctcaggggagtctgatggagaagatggcgcctggcagggcagccagctggccag

SEQ ID NO: 146310 - DNA, 120 bp, Artificial Sequence
  ENSG00000105063_21 (sequence is synthesized)
gggggcccgtctgggccagccacctggtgtccggagtggaggcagcacagacagtgaggacgaagaagaggaggacgaggaggaggaggaagacgaggagggcattggctgtgcagcccg

SEQ ID NO: 146311 - DNA, 120 bp, Artificial Sequence
  ENSG00000105063_22 (sequence is synthesized)
tggaggggccacccctctgtcctaccccagccctggccctcagcctccaggccccagctggacagccacctttgacccagtgcctacagatgccccgaccagcccccgagtctccgggga

SEQ ID NO: 146312 - DNA, 120 bp, Artificial Sequence
  ENSG00000105063_23 (sequence is synthesized)
ggaagagctgcacactgggcctccagccccacaggggcccctcagtgtgccccagggcctccccactcagagcctggccagccctcctgcccgtgacgccctgcagctcaggtctcagga

SEQ ID NO: 146313 - DNA, 120 bp, Artificial Sequence
  ENSG00000105063_24 (sequence is synthesized)
ccccacacccccctcagcacctcaggaagccacagaaggcagcaaagtcacggagccctcagccccttgccaggccttggttagcatcggggaccttcaggccaccttccacgggatccg

SEQ ID NO: 146314 - DNA, 120 bp, Artificial Sequence
  ENSG00000105063_25 (sequence is synthesized)
ttctgcccccagctcctcggacagtgcaaccagagacccctctacctctgtcccagcctccggggcccaccagcccccccagaccacagaaggggagaagagcccagagcccttggggct

SEQ ID NO: 146315 - DNA, 120 bp, Artificial Sequence
  ENSG00000105063_26 (sequence is synthesized)
tccccaaagccagagtgcccaggccctcacgcctcctccgatacccaatggctctgccccggaagggcctgcatccccaggctcccaatagctgcctggtgcggcagcggcggccaaatc

SEQ ID NO: 146316 - DNA, 120 bp, Artificial Sequence
  ENSG00000105063_27 (sequence is synthesized)
ttccgtcctcccgtggatctcccggggtgggggcagggcgggtcccacgatggcccccattgccctcatcaccctgacacccccacattctctcctctggacccccaggaggctggtgcc

SEQ ID NO: 146317 - DNA, 120 bp, Artificial Sequence
  ENSG00000105063_28 (sequence is synthesized)
agggagacaggcccaacccacccccatttgcactgagaagagaagttttggagcgttgcctcctagaataaagatacagagagtcaaatagagagaatggagagagagaaacatatatta

SEQ ID NO: 146318 - DNA, 120 bp, Artificial Sequence
  ENSG00000105063_29 (sequence is synthesized)
tatattatatagagagagggaggagagcgagagagagtgaggacaccgaactgggctggcggctccaaagcacagccttccctgttccgtcccagcgggagctggtgttaggggtcccaa

SEQ ID NO: 146319 - DNA, 120 bp, Artificial Sequence
  ENSG00000105063_30 (sequence is synthesized)
ggttgccacccacgtgcccagctgtcccacgctgcagcgcagacggccacgcccacacccggccttttagctcaggtccaccatgggggacggcccagcgtgggtgggggtgccagaggg

SEQ ID NO: 146320 - DNA, 120 bp, Artificial Sequence
  ENSG00000105063_31 (sequence is synthesized)
tcccgagtgggggccgtgcctttgcccagaccctgcactttcaaccaggccagtccggctctggggagcaggggcctccccggcaacagccccaggggccttgagggtctgaggtcccag

SEQ ID NO: 146321 - DNA, 120 bp, Artificial Sequence
  ENSG00000105063_32 (sequence is synthesized)
ccctgttgccaagtgaccttgtccccagctccctcctcccaggctggtgtgagtgtgcgtgcgtttgtgccgagcttctatttcatattgcaaatataaataaaggaaggcagtttacga

SEQ ID NO: 146322 - DNA, 120 bp, Artificial Sequence
  ENSG00000105063_33 (sequence is synthesized)
ggaggctggagatgggggaagaggggcaggctcgagggcaactgcaggagcctggtgctcactgggagccttaagcctgagtgatggaggcagtgagcctgcgggcagtcccggggcggg

SEQ ID NO: 146323 - DNA, 120 bp, Artificial Sequence
  ENSG00000105063_34 (sequence is synthesized)
gccgggctcagcatgaggcagagggctgggacttggggagaggctgtgcccaaggtgggcactcagcccctgtggtcagtgcctcgtccagtggggactccctggggcgtctgacgcggc

SEQ ID NO: 146324 - DNA, 120 bp, Artificial Sequence
  ENSG00000105063_35 (sequence is synthesized)
agcaggcgcgcctacttgtatctgtcccctgcacgcacctacatgccctgtgggctcagcctgcagctgtggcccctcctgggcacgcgttggccgtggccttgtgtgtgtgtctgcagc

SEQ ID NO: 146325 - DNA, 120 bp, Artificial Sequence
  ENSG00000105063_36 (sequence is synthesized)
ccatgagggtggggcacaaacatcttctgtgctggggacacagagcgggtccctcccactcctggagctagccttaggggttccaggcgggaggggctcagggtagtggggaccagcagt

SEQ ID NO: 146326 - DNA, 120 bp, Artificial Sequence
  ENSG00000105063_37 (sequence is synthesized)
cctggcgcagggactgtggggcagagctgcacctccatggatgccctctggctcaggagtctgccagacatgggggtccagttttcccctccacaggcctcggggtaacaaaactttttt

SEQ ID NO: 146327 - DNA, 120 bp, Artificial Sequence
  ENSG00000105063_38 (sequence is synthesized)
tttccaattaccaattctgcttgttttgatttgtgggtcaaccacatcttaatatcagtcacctctgggtgttatgatcatgaacttttctgagtttcttgccacaagcatctgttgctt

SEQ ID NO: 146328 - DNA, 84 bp, Artificial Sequence
  ENSG00000105063_39 (sequence is synthesized)
tgaacttttctgagtttcttgccacaagcatctgttgcttctggagtcagaaaaaagtggctgggcggagtggatcacacctgt

SEQ ID NO: 146329 - DNA, 120 bp, Artificial Sequence
  ENSG00000105063_40 (sequence is synthesized)
atattgggtcagcattttagacatagtatatagtcccatactgcatctttgggtcagcgatggaccacatatgacagtggtcccgtgagattataatcctctatttttgctgtatttttc

SEQ ID NO: 146330 - DNA, 120 bp, Artificial Sequence
  ENSG00000105063_41 (sequence is synthesized)
ctatgtttagatacacaaacatttaccattgttagaattgcctgtagtattcagtactgtaacatgctgtataggtcggtagtctaggaacaataggctataccacagagcctaggtgta

SEQ ID NO: 146331 - DNA, 120 bp, Artificial Sequence
  ENSG00000105063_42 (sequence is synthesized)
caggaggcgccaccatccaggtgtgtgtaagtgcactctagaatgttcacacaatagcaaaatcgcctaatgatggcgtttttcagagtgcaccctcgttgttaaagcttagttttagtg

SEQ ID NO: 146332 - DNA, 120 bp, Artificial Sequence
  ENSG00000105063_43 (sequence is synthesized)
ttactttgcttaccccttccccggttgatcagcacgtaggttgcttggattttcttcatgctcacaggtgtgtgttagtcaacattcagccagtgtttttggagcagctatgggtgcctg

SEQ ID NO: 146333 - DNA, 120 bp, Artificial Sequence
  ENSG00000105063_44 (sequence is synthesized)
gtggtttctcagggctgaggatacagcagtggcaaaactcagccatctctgccttcttggagtttctagttggagggagagagtagtgtgaagcctctgtccagagggtgggcctgctgg

SEQ ID NO: 146334 - DNA, 120 bp, Artificial Sequence
  ENSG00000105063_45 (sequence is synthesized)
tgggaaggcctgtcactgtggtgaccgtgtgaggtgacggctgggaggtggcttgagagctggtgagtgggtctgtctgctctggttgccatggctgaggctcagcccacttccccaggg

SEQ ID NO: 146335 - DNA, 120 bp, Artificial Sequence
  ENSG00000105063_46 (sequence is synthesized)
cctgccctccacggatgactggcgacggacggtctccttacggccgcattctgtccctgcccgcctgtgttcttgccgttggctcagaactccctctcccagcctctcctggtgtcgtca

SEQ ID NO: 146336 - DNA, 120 bp, Artificial Sequence
  ENSG00000105063_47 (sequence is synthesized)
caccccaggctccctggacccttctgtgacctgcctgtcatcccagcccgctctccttgggctgaccctgggctgcagggaacaggatgggtgtcggccggtctgtcccacacagctagc

SEQ ID NO: 146337 - DNA, 120 bp, Artificial Sequence
  ENSG00000105063_48 (sequence is synthesized)
taacacgtgtccctgtgtctgggtgaccatttttccctggatggtcagctcatgggaggggctcccagcaccaggctgcagagggcccggtggcccgaccaggatcctcacctgtctctc

SEQ ID NO: 146338 - DNA, 120 bp, Artificial Sequence
  ENSG00000105063_49 (sequence is synthesized)
ggcccgtctgggccagccacctggtgtccggtgagtccccctccagtttcccttctccaagcttccaccacacggcagggccaaggggtccccccaacacatttggactgaggctgaagt

SEQ ID NO: 146339 - DNA, 120 bp, Artificial Sequence
  ENSG00000105063_50 (sequence is synthesized)
gaatgaagaaaataaggaacctgcattggtgtgtgtattagttgggggcactttcacttttgagtgatagaaatctaattcaaggccaagcatggtgggctcatgtaatccctgagtgcc

SEQ ID NO: 146340 - DNA, 85 bp, Artificial Sequence
  ENSG00000105063_51 (sequence is synthesized)
tgtaatcccagtactttgggaggccagggcagctgggcaacatagggagatcctgtctctacaaaaaatacaaaagttagatggg

SEQ ID NO: 146341 - DNA, 120 bp, Artificial Sequence
  ENSG00000105072_0 (sequence is synthesized)
gttgcccagggcaaccgctccttcaggcgtgaatgtggcggctgcctctgcgaatggacggcgtgggaagagaatggcttctgcaaggaaagccagccgtcccatgcgtgatgtttttgg

SEQ ID NO: 146342 - DNA, 120 bp, Artificial Sequence
  ENSG00000105072_1 (sequence is synthesized)
tgacttcagtgatgtttccttggaagattcaacaatggaagaaatcagaaacttccagatcagtagaaatcttaccaaaatagcacctggtcatagcagatttctaaaaagaaaccaaac

SEQ ID NO: 146343 - DNA, 120 bp, Artificial Sequence
  ENSG00000105072_2 (sequence is synthesized)
tctagatgagaaacacttactcctgaaagagaaccctgtgctcgggagtggacccaggcttgcctcatgtagaccgcccaccactgcctccaggatccgagccaatgccgcactcatgaa

SEQ ID NO: 146344 - DNA, 120 bp, Artificial Sequence
  ENSG00000105072_3 (sequence is synthesized)
gctggcccagctggaaacccggatcatgaatcggaagctgcagaggaatttgtctgacacggaatctgactcaatgaccgccgatgctggtcttccaaagagagctgacagaatcctctc

SEQ ID NO: 146345 - DNA, 120 bp, Artificial Sequence
  ENSG00000105072_4 (sequence is synthesized)
tgggggtgcactcgaactcgcgtcccagaacacagacaaaacttcccagaatcaagcccgtgaacttcctgtcaccgaaaataatgcacagaacgcgaaggtcagtaggtttctaaagaa

SEQ ID NO: 146346 - DNA, 120 bp, Artificial Sequence
  ENSG00000105072_5 (sequence is synthesized)
gaaacaagcacctgttgaaaacatatcccctgaagcacctgctgggaaagagaggactttgcaaacccccaaacagaaagaacctgctagaacatttgattctccagacagtgacgaaga

SEQ ID NO: 146347 - DNA, 120 bp, Artificial Sequence
  ENSG00000105072_6 (sequence is synthesized)
agaaatgaaagtattgctaggaagcttgatggactcttctagagaaaaaaacacgaatcaaggcttcagcagcgctaacgtcagcgaggaagaagaaagaaaactattttcggtcccatc

SEQ ID NO: 146348 - DNA, 120 bp, Artificial Sequence
  ENSG00000105072_7 (sequence is synthesized)
tcaactgagagcatttactgtacccagcgtggaactctccagcgcaaagccttctcagacatcacacctgccaacctccctggcagcagacagaacccttcacagcactcgctcaagagc

SEQ ID NO: 146349 - DNA, 120 bp, Artificial Sequence
  ENSG00000105072_8 (sequence is synthesized)
agactacccacagagtcacgtttccagtgacaccgcctcccacacgccgtcagtttccatcacaggcgccttttcaaactcagtgtctttaaagatggggcatgtcaagcttgtgtcctc

SEQ ID NO: 146350 - DNA, 120 bp, Artificial Sequence
  ENSG00000105072_9 (sequence is synthesized)
cccgggaaggagtgaggctgagactgtggacgagccagtctcagaaggtgctgatgacagcctcgacgagtttagaataaatattttatcgcttgacggtctggctccagctgtcagtga

SEQ ID NO: 146351 - DNA, 120 bp, Artificial Sequence
  ENSG00000105072_10 (sequence is synthesized)
gaactccgatttggaacaggaagaggaaagtgctcagagacaaaaaacagctggcaaaatcttcagagccgaggcgtccactgggcaggatgccccgaggcaggcccaggcgaggagctg

SEQ ID NO: 146352 - DNA, 120 bp, Artificial Sequence
  ENSG00000105072_11 (sequence is synthesized)
ggcatcacagggaaaggccgcctctgcagagggggatgagagcgaggtctcggagcatctcagtgccagctcggcttctgccatccagcaggacagcacttccagcatgcagccaccatc

SEQ ID NO: 146353 - DNA, 120 bp, Artificial Sequence
  ENSG00000105072_12 (sequence is synthesized)
tgaagcccccatggtgaacacagtcagctcagcttattcggaggattttgaaaactctccaagtctgacagcatctgagccaaccgcccattccaaggagtctcttgacagaacactgga

SEQ ID NO: 146354 - DNA, 120 bp, Artificial Sequence
  ENSG00000105072_13 (sequence is synthesized)
gctgtgcagacgccagatcctgccttcacctacgagtggaccaaggtggccagcatggcagccatggggcctgccctgggaggcgcctacgtggacccgacacccatcgccaatcatgtt

SEQ ID NO: 146355 - DNA, 120 bp, Artificial Sequence
  ENSG00000105072_14 (sequence is synthesized)
atcagtgcagatgcaatagaagccctgaccgcttacagcccggccgtgctggcactccatgatgtgctgaagcagcagctgagcctgacgcagcagttcatccaggccagccggcacctg

SEQ ID NO: 146356 - DNA, 120 bp, Artificial Sequence
  ENSG00000105072_15 (sequence is synthesized)
cacgcctccctcctgcgctccctggacgcggactccttccactaccacaccctggaggaagccaaagagtacattaggtgccacagacctgccccactgaccatggaggatgccctggag

SEQ ID NO: 146357 - DNA, 120 bp, Artificial Sequence
  ENSG00000105072_16 (sequence is synthesized)
gaggtgaacaaggagctgtgagcgccagcaggtggagcttgacgtgacgtcttaacaaaagcaaagcaccgcagcttcccagagttaccagcgcagcacttaagacaggatcttacggcg

SEQ ID NO: 146358 - DNA, 120 bp, Artificial Sequence
  ENSG00000105072_17 (sequence is synthesized)
gggtggggctcctggaccgtgaccggcgtcttcttcctggggagtacgacttggaccgggaccgcgactgggaccgggagcggcttctggaggagcgcgacctgctccgacttctgcagg

SEQ ID NO: 146359 - DNA, 120 bp, Artificial Sequence
  ENSG00000105072_18 (sequence is synthesized)
gaagggtgcccaagggtcagcagcagccaggcgtcgtggggaggccacaggaagaggcctcaggcactgccctgaggcagcctctgcctacctagatctggagcgggagtaggaacggga

SEQ ID NO: 146360 - DNA, 120 bp, Artificial Sequence
  ENSG00000105072_19 (sequence is synthesized)
gcaggagcgcgaccttgaccttgagtacgagcctgaagacttggaggatcttgagttggagcgggaggaagaacgccctcgactcttggatctgctccgagacctcgagggtccgctgtg

SEQ ID NO: 146361 - DNA, 120 bp, Artificial Sequence
  ENSG00000105072_20 (sequence is synthesized)
gggagaggcctgatgatcaggtgccccagtggatgggctgcacccagcccaccctggccctcaggttcctagaccaccccagatgcaggggctctggctgtggatgtggcgccatagcca

SEQ ID NO: 146362 - DNA, 120 bp, Artificial Sequence
  ENSG00000105072_21 (sequence is synthesized)
cagcaacggtaccaagttcctaaatagtgtggccgagcctgctgctgtgtgaattcaggccttgtggaaaacaccgccccataggcacaggctgtgtgagggtggacgtgatgagtgtat

SEQ ID NO: 146363 - DNA, 120 bp, Artificial Sequence
  ENSG00000105072_22 (sequence is synthesized)
ctggggtctgctcccacccatcacaagctgtggaccctggccccccggccactgcagacatctgcgcttttacctgttcctcttctcctggcctttcctccgccgggcccgcatttttgc

SEQ ID NO: 146364 - DNA, 120 bp, Artificial Sequence
  ENSG00000105072_23 (sequence is synthesized)
tcggaagaactcatagaggccgttctgctcccagccttcactgtaagacacggcattccgtgtgtgaccacgtgacacccacccacaaggaagtcgtgaaaaagtcatcaggagttaatc

SEQ ID NO: 146365 - DNA, 120 bp, Artificial Sequence
  ENSG00000105072_24 (sequence is synthesized)
cacagaaccttggagagtacatggccctgtggctgtgggctccgagcatgggcgcagtagagcttggttcagtgttcccacagggctgtcctcctgcagcccagtggctcctctggtgcc

SEQ ID NO: 146366 - DNA, 120 bp, Artificial Sequence
  ENSG00000105072_25 (sequence is synthesized)
cacgcccttgccaccctgctgttccgctgaggtggtggggacccatggtctgtggaactgggaaacaggaacactgactcatgggtggacaggcctgcagcccagcacaggaaggagggg

SEQ ID NO: 146367 - DNA, 120 bp, Artificial Sequence
  ENSG00000105072_26 (sequence is synthesized)
tgaccactgggaagggtgggctgagggccctgtggcagccggctgcttgagacgtgccgccgtgccacaccttccctaacttcttctgatgtgtctccattaaaacgcccttcattgagg

SEQ ID NO: 146368 - DNA, 120 bp, Artificial Sequence
  ENSG00000105072_27 (sequence is synthesized)
aaaatcaaatattcatcacgttgggttgaaaagttggaagattttgcatcttattgaaaagaatttttcaaaaatgtttctgtacaaatgaatggaattgcaccaggctgcccatggaca

SEQ ID NO: 146369 - DNA, 120 bp, Artificial Sequence
  ENSG00000105072_28 (sequence is synthesized)
ccaggtgtggccgattcccaacggtcacccaccagcttctggcaggagcagctcccctcctggcctcccctcccttcgggggtgtgaaatgaaatgatggagtggaaggcgctggctggg

SEQ ID NO: 146370 - DNA, 120 bp, Artificial Sequence
  ENSG00000105072_29 (sequence is synthesized)
gtcgggctccatgctctggatgggactgggccgtcgcacacgccagccggtgcagggttcttccaagtgcaaaactcaagcaggggacgcgacgggcacagactccgaggcagcgctcaa

SEQ ID NO: 146371 - DNA, 120 bp, Artificial Sequence
  ENSG00000105072_30 (sequence is synthesized)
cctgaagtgtcttaggctggtttcctgttagaatcttgtttcccagataacagcaaatggctacattccagaaaaaaaatatcaacttatacaactaaaataactgaactaagggccagt

SEQ ID NO: 146372 - DNA, 120 bp, Artificial Sequence
  ENSG00000105072_31 (sequence is synthesized)
acgccttcgaagaattaggtttcagaatctcactgggcctcctctcaggtcagtattcttctttctagacctaaaccaaggagagtaaaaatgaaaaccctgcttcacttcgcaagtcaa

SEQ ID NO: 146373 - DNA, 120 bp, Artificial Sequence
  ENSG00000105072_32 (sequence is synthesized)
gaggtcggcagggctggtggggaggtgacctagctgggcgtccgggctcgcgagggggatacggggaaatggggccttctccggggctgagctggttgggccgctgcaggatggtcccgc

SEQ ID NO: 146374 - DNA, 120 bp, Artificial Sequence
  ENSG00000105072_33 (sequence is synthesized)
gcctcagtttccctgtctggggtctattggagcatggtcctgcgcgggtcgcttcatagctggggagaagagcaggatggtctcaggggcgccagggttttcaagttttgaatggcttct

SEQ ID NO: 146375 - DNA, 120 bp, Artificial Sequence
  ENSG00000105072_34 (sequence is synthesized)
ggggcctgccctgggaggcgcctacgtggacccgacacccatcgccaatcatgttatcagtgcagatgcaatagaagtacattaggtgccacagacctgccccactgaccatggaggatg

SEQ ID NO: 146376 - DNA, 120 bp, Artificial Sequence
  ENSG00000105085_0 (sequence is synthesized)
tcactggagtttggttctcgaggcggcggcagcgagcggcggcggctccggcggctcctcctcctcctttggtggcggcggcggcccgggaccgagacccggccccggctcccctctccg

SEQ ID NO: 146377 - DNA, 80 bp, Artificial Sequence
  ENSG00000105085_1 (sequence is synthesized)
ccaccccgcgcgcccccaaccccccggcgccgcggggaacatgcggctccggctcccggaggccggcgagtgagtgaccc

SEQ ID NO: 146378 - DNA, 120 bp, Artificial Sequence
  ENSG00000105085_2 (sequence is synthesized)
caaccccccgcctcgcccaggcaatgacagcggctccggcgtctccgcagcagatcagggaccggctgctgcaggccatcgacccccagagcaacatccggaacatggtggcggtgctgg

SEQ ID NO: 146379 - DNA, 120 bp, Artificial Sequence
  ENSG00000105085_3 (sequence is synthesized)
aagtcatctccagcctggagaaataccctattaccaaagaggcacttgaggaaacacgacttgggaagctcatcaacgacgtccgcaagaaaaccaagaacgaggagctcgccaagcggg

SEQ ID NO: 146380 - DNA, 120 bp, Artificial Sequence
  ENSG00000105085_4 (sequence is synthesized)
ccaagaagctgctgcggagctggcagaagctcatcgagccggcacaccagcatgaggcggcgctgcgggggctggcgggggccaccggctctgccaacgggggcgcacacaactgccggc

SEQ ID NO: 146381 - DNA, 120 bp, Artificial Sequence
  ENSG00000105085_5 (sequence is synthesized)
cggaggtgggggcggctggcccacccaggagcatccatgacctgaagagccgcaatgacctccagaggctgcccgggcagcggctggacaggctgggcagccgcaagcgccggggtgacc

SEQ ID NO: 146382 - DNA, 120 bp, Artificial Sequence
  ENSG00000105085_6 (sequence is synthesized)
agcgtgacctcggccacccagggccgccacccaaggtctccaaagctagccacgaccccctggtccccaactcatcccccctccccaccaacgggatcagtgggagtccagagagcttcg

SEQ ID NO: 146383 - DNA, 120 bp, Artificial Sequence
  ENSG00000105085_7 (sequence is synthesized)
ccagctccctggatggcagtgggcatgcaggcccagagggcagccgcctggagcgtgacgagaatgacaagcacagtggcaagatccccgtcaacgccgtgcgaccgcacaccagctccc

SEQ ID NO: 146384 - DNA, 120 bp, Artificial Sequence
  ENSG00000105085_8 (sequence is synthesized)
cgggcctgggcaagccccctggaccctgcttgcagccaaaggcttcggtgctgcagcagctggacagggtggacgagactccggggcctccccatcccaagggaccccctcgctgctctt

SEQ ID NO: 146385 - DNA, 120 bp, Artificial Sequence
  ENSG00000105085_9 (sequence is synthesized)
tcagtcctcggaactcacggcatgagggctcctttgcccggcagcagagcttgtatgcacccaagggctccgtgcccagcccctcaccgcggccccaggcactcgatgccacacaggtgc

SEQ ID NO: 146386 - DNA, 120 bp, Artificial Sequence
  ENSG00000105085_10 (sequence is synthesized)
cgtcaccgcttccactggcacagccgtccacaccccccgtacggcggctcgagctgctgcccagtgcggaaagcccagtgtgctggcttgagcagcctgagagccaccagcggctggcgg

SEQ ID NO: 146387 - DNA, 120 bp, Artificial Sequence
  ENSG00000105085_11 (sequence is synthesized)
ggccgggctgcaaggcagggctgtccccagccgagcccctcctgtcccgggcaggcttttccccagactcctccaaggcggacagtgatgctgcctcctcagggggctcggacagtaaaa

SEQ ID NO: 146388 - DNA, 120 bp, Artificial Sequence
  ENSG00000105085_12 (sequence is synthesized)
agaagaagaggtaccgacctcgagactatacggttaacttggacgggcaggtggctgaggcgggcgtcaagcctgtccggttaaaagagcggaagctcacctttgaccccatgacgagac

SEQ ID NO: 146389 - DNA, 120 bp, Artificial Sequence
  ENSG00000105085_13 (sequence is synthesized)
tggagcagcagtccaggacagagctggacaagcaggaggccaaggccagcctccagagccccttcgaacagacgaactggaaggagctgtcacgcaacgagatcatccagtcctacctga

SEQ ID NO: 146390 - DNA, 120 bp, Artificial Sequence
  ENSG00000105085_14 (sequence is synthesized)
gccggcagagcagcctgctctcatcatcgggcgcgcagaccccaggggctcaccacttcatgtctgagtacctgaagcaggaggagagcacccggcaaggggccaggcagctgcatgtgc

SEQ ID NO: 146391 - DNA, 120 bp, Artificial Sequence
  ENSG00000105085_15 (sequence is synthesized)
tggtgcctcaaagcccgcccacggacctccctggtctgacccgggaggtcacacaggacgatctcgacagaatccaggccagccagtggccgggggtgaacgggtgtcaggacacacagg

SEQ ID NO: 146392 - DNA, 120 bp, Artificial Sequence
  ENSG00000105085_16 (sequence is synthesized)
gtaactggtatgactggacgcagtgcatatcgctcgatccgcacggcgacgacgggcgcttgaacattctgccttatgtctgcttggactgaccggcctgtcagccacaaagtgcattcc

SEQ ID NO: 146393 - DNA, 120 bp, Artificial Sequence
  ENSG00000105085_17 (sequence is synthesized)
catcttgcagaagccgggtgggcgggcaggcaggtgggcaggtggccggggcccagctgcctcctgcgctgggaactcggggagtccggcccaggcgggagggagggggcgggagtcacg

SEQ ID NO: 146394 - DNA, 120 bp, Artificial Sequence
  ENSG00000105085_18 (sequence is synthesized)
cggtctctctgcgctcttccctcaaaactctttttgtgaaatgctgctaccagtttactaacaaaattgcgaagaaggaccgcgtggaaggaaggacggcaaagtgagttcagaactcta

SEQ ID NO: 146395 - DNA, 120 bp, Artificial Sequence
  ENSG00000105085_19 (sequence is synthesized)
tagcaaaccagctataaaaagcgttagtccctcacccccaaagaggtgcggacactttccagcacctgaaagctggggcctcagttgcaggcaggcacagaaaacctgtgggagaggtca

SEQ ID NO: 146396 - DNA, 120 bp, Artificial Sequence
  ENSG00000105085_20 (sequence is synthesized)
cctttaacacagcaacagaagcacgcatctcatctctcttgcattttctgttctttaatttggccctgagtgtcttgagacagtgggccatgccactgcctctgtttgctccctacccag

SEQ ID NO: 146397 - DNA, 120 bp, Artificial Sequence
  ENSG00000105085_21 (sequence is synthesized)
ccactgtcaggccagtgttgtctgtcatgtgccagaagcttctcagctgtggtgagccactggcattgggcaggcgggccagctggccagccagtgtgacccacactccatgggcagcca

SEQ ID NO: 146398 - DNA, 120 bp, Artificial Sequence
  ENSG00000105085_22 (sequence is synthesized)
cctgtttatatctggtttcagttataacccagtttttaaagaaatgctgcaaaaatttaagttttctcatgtttattttaaacaattcctcttccatcagaccaccagacaaaaaaacct

SEQ ID NO: 146399 - DNA, 120 bp, Artificial Sequence
  ENSG00000105085_23 (sequence is synthesized)
ttcctttcttcctcccttttcttttttcccttcctgtacacatctagaaaacttcacctttctagagtccccccaaaacaacacaaaagttattgtgggtgctactggttttatgctgta

SEQ ID NO: 146400 - DNA, 120 bp, Artificial Sequence
  ENSG00000105085_24 (sequence is synthesized)
ctgtggggcgagggggaagacctgtctgtacgctggaaacactcataaccattcctttagattcgtttgccttatggttatttgtcataaacgcgatttgcaaaaacaaggagccttagt

SEQ ID NO: 146401 - DNA, 120 bp, Artificial Sequence
  ENSG00000105085_25 (sequence is synthesized)
gaatgtacagtacctagacttctgtgttctcaggacgcagaagggagcaactttgctatttggtccagtaagtggacaccttgtgatataaatgtggaaataaaaaaaaaaaaaaaacca

SEQ ID NO: 146402 - DNA, 120 bp, Artificial Sequence
  ENSG00000105085_26 (sequence is synthesized)
taccaaagaggcacttgaggtgagtatcccagaccccagcatttgggagggcagaacggggggcaggggatggtaccaaccaggtccttccgcagcttctgggagcatcagtgtctttgc

SEQ ID NO: 146403 - DNA, 120 bp, Artificial Sequence
  ENSG00000105085_27 (sequence is synthesized)
tcttccgtgtctcctctcccactcccatcagatggcagagtagaggtcatcttaagtatcaggagcagctcttgttccacaggcatcctgggtttcagcaggtgggtgggtatgtaccat

SEQ ID NO: 146404 - DNA, 120 bp, Artificial Sequence
  ENSG00000105085_28 (sequence is synthesized)
gtacactggagggcttggggcagcccgcacaccacacactggaggaggtcagacggcaggtgaggatgagcactgggtgccaggttggcccagggagcaggtaggagacgacatggagtg

SEQ ID NO: 146405 - DNA, 120 bp, Artificial Sequence
  ENSG00000105085_29 (sequence is synthesized)
ggggcttcagtgctgctggctcctcttgctctggggttggggagagactggagcaggctggggcagggtgttccagcctcccagtggagaaggacagggacctgacaaatggctttttat

SEQ ID NO: 146406 - DNA, 120 bp, Artificial Sequence
  ENSG00000105085_30 (sequence is synthesized)
ctcccacgggcactgcagagaccaagtggtgttactcccatcctacatgcccagcacacttcgtgggcacgtggggacatcaggagaggtgtgcttggaggaggctccagtgagaggcac

SEQ ID NO: 146407 - DNA, 120 bp, Artificial Sequence
  ENSG00000105085_31 (sequence is synthesized)
catccccaaccctccacttgaagcggaccctctgtgctgtcgcctcggccacagcaccctctcacccaggaagcctctctggcagtgtccttacagtggccttgatggtccacagccccc

SEQ ID NO: 146408 - DNA, 120 bp, Artificial Sequence
  ENSG00000105085_32 (sequence is synthesized)
tgacaccaggagcctgggtgacagcactgctgagaagccacctgggaccctgaaggtctgggaactaggtttgagaatttatattgtcacaaaggaccggaaatccccagaagttttgtg

SEQ ID NO: 146409 - DNA, 120 bp, Artificial Sequence
  ENSG00000105085_33 (sequence is synthesized)
tcagggaagctggcagtttagggctcagtgggaaccgggtcatttcactgtcagggccacttcccaccatttctggctcagctcatggagaagttcctgtcccgaaagtatgtcatcatc

SEQ ID NO: 146410 - DNA, 120 bp, Artificial Sequence
  ENSG00000105085_34 (sequence is synthesized)
agtagaactgtgaggaacacagatgttaagtgatgattaacaaacttagcttttagaggaaaggtccgacgaatagtagacggtgtactgcatcctcatggcaagtaaaataaccgcaca

SEQ ID NO: 146411 - DNA, 120 bp, Artificial Sequence
  ENSG00000105085_35 (sequence is synthesized)
gggcagggcttgctagctgcaggtgaatgccctgtgttcagaccagggagaggcctgagaaggtcccgcagcaaagagggacttgaactagccctggccgcgtgtgtcagtgcctccagc

SEQ ID NO: 146412 - DNA, 120 bp, Artificial Sequence
  ENSG00000105085_36 (sequence is synthesized)
agacatgcaccttcccgtcattgttcctcccagtgtcattcttcctctgagaagctgtgaacttgaggctttgcccctggggtttgaggctcccatgaggtcccctcagaggaaggtgcc

SEQ ID NO: 146413 - DNA, 120 bp, Artificial Sequence
  ENSG00000105085_37 (sequence is synthesized)
atcacggggttctctgccggtgggggggcggggggactgtgcccccacaagggacggcggcaatgactgcagattgggggagggggcgcttcggaggccagagatgccgctcaacttccg

SEQ ID NO: 146414 - DNA, 120 bp, Artificial Sequence
  ENSG00000105085_38 (sequence is synthesized)
acagatcgggggacccgccccgaagacagagcgatcccgcccaaatgccagtggtgccgaggtggagaagccgccgcgtagacgcagatttgcaacctccggctttcccagctacggcgg

SEQ ID NO: 146415 - DNA, 120 bp, Artificial Sequence
  ENSG00000105085_39 (sequence is synthesized)
gcggcttctgccagaggcgctttgccgcctcacgttttcgcgatcggggtcgcgcgtggcggtgcagacccccgccctgccaccacacccattcccacaccctctgaggggcgggggggc

SEQ ID NO: 146416 - DNA, 120 bp, Artificial Sequence
  ENSG00000105085_40 (sequence is synthesized)
gatgacccttctgcgcgcagaatcacaacgtggacgtctggttccctcgccctcacaaaaaactcggcagctgctcagcctgcgactcccgtcccccagtcacgcgccgggaaggctctc

SEQ ID NO: 146417 - DNA, 80 bp, Artificial Sequence
  ENSG00000105088_0 (sequence is synthesized)
cgcaacaaagactcggagcgagcgagggggcgggggtggggcggaatcccggccgccggcgaggcgggggaggcggcggc

SEQ ID NO: 146418 - DNA, 120 bp, Artificial Sequence
  ENSG00000105088_1 (sequence is synthesized)
gccgaggcgccgctagggcgggcgggggtcgggacgccgggctaggggcgcgtcatgtggccgctcacggtcccgccgccgctgctgctgctgctgtgctcaggcctggccggacagact

SEQ ID NO: 146419 - DNA, 120 bp, Artificial Sequence
  ENSG00000105088_2 (sequence is synthesized)
gccggacagactctcttccagaacccagaagagggctggcagctgtacacctcagcccaggcccctgacgggaaatgcatctgcacggccgtgatcccagcgcagagtacctgctctcga

SEQ ID NO: 146420 - DNA, 120 bp, Artificial Sequence
  ENSG00000105088_3 (sequence is synthesized)
gatggcaggagtcgggagctgcggcaactgatggagaaggtccagaacgtctcccagtccatggaggtccttgagttgcggacgtatcgcgacctccagtatgtacgcggcatggagacc

SEQ ID NO: 146421 - DNA, 120 bp, Artificial Sequence
  ENSG00000105088_4 (sequence is synthesized)
ctcatgcggagcctggatgcgcggctccgggcagctgatgggtccctctcggccaagagcttccaggagctgaaggacaggatgacggaactgttgcccctgagctcggtcctggagcag

SEQ ID NO: 146422 - DNA, 120 bp, Artificial Sequence
  ENSG00000105088_5 (sequence is synthesized)
tacaaggcagacacgcggaccattgtacgcttgcgggaggaggtgaggaatctctccggcagtctggcggccattcaggaggagatgggtgcctacgggtatgaggacctgcagcaacgg

SEQ ID NO: 146423 - DNA, 120 bp, Artificial Sequence
  ENSG00000105088_6 (sequence is synthesized)
gtgatggccctggaggcccggctccacgcctgcgcccagaagctgggctgtgggaagctgaccggggtcagtaaccccatcaccgttcgggccatggggtcccgcttcggctcctggatg

SEQ ID NO: 146424 - DNA, 120 bp, Artificial Sequence
  ENSG00000105088_7 (sequence is synthesized)
actgacacgatggcccccagtgcggatagccgggtctggtacatggatggctattacaaaggccgccgggtcctggagttccgtaccctgggagacttcatcaaaggccagaactttatc

SEQ ID NO: 146425 - DNA, 120 bp, Artificial Sequence
  ENSG00000105088_8 (sequence is synthesized)
cacttccgctcgcgctctgtgctggtgcagaggagcctcccgggcgccggttacaacaacaccttcccctactcctggggcggcttctccgacatggacttcatggtggacgagagcggg

SEQ ID NO: 146426 - DNA, 120 bp, Artificial Sequence
  ENSG00000105088_9 (sequence is synthesized)
ctctgggctgtgtacaccaccaaccagaacgcgggcaacatcgtggtcagccggctggacccgcacaccctcgaggtcatgcggtcctgggacaccggctaccccaagcgcagcgctggc

SEQ ID NO: 146427 - DNA, 120 bp, Artificial Sequence
  ENSG00000105088_10 (sequence is synthesized)
gaggccttcatgatctgcggtgtgctctacgtgaccaactcccacctggctggggccaaggtctacttcgcctattttaccaacacgtccagttacgagtacacggacgtgcccttccac

SEQ ID NO: 146428 - DNA, 120 bp, Artificial Sequence
  ENSG00000105088_11 (sequence is synthesized)
aaccagtattcccacatctcgatgctggattacaacccccgggagcgcgccctctatacctggaacaacggccaccaggtgctctacaatgtcaccctgtttcacgtcatcagcacctct

SEQ ID NO: 146429 - DNA, 120 bp, Artificial Sequence
  ENSG00000105088_12 (sequence is synthesized)
ggggacccctgagccaatgctgtggctcgggctgctgcctggggggcctctgggggctgggggcccttttcattctgcctgtgtccctcaagggtgatctctctgtctctgtcacgccct

SEQ ID NO: 146430 - DNA, 120 bp, Artificial Sequence
  ENSG00000105088_13 (sequence is synthesized)
ttctccccgcctttttgctgggcttttgttctctgcctatgtatttctgtctattttttcaatttcccctcttctcctttattgatctctgcttttaatacaccacttctttctttctgc

SEQ ID NO: 146431 - DNA, 120 bp, Artificial Sequence
  ENSG00000105088_14 (sequence is synthesized)
ctttttatggatgtctttttctttttatggctctggttctccagttctttccgtctctgcctctctctgtctctctctctctgtccttccacccctccctccttgcttcccacccattcc

SEQ ID NO: 146432 - DNA, 120 bp, Artificial Sequence
  ENSG00000105088_15 (sequence is synthesized)
tcatccctcactcccacccccacccccacccccaggagttgagtgcatggatctgtttctttttttatttacactttttctttccggtttgccggaataaacaggacctttgacatttga

SEQ ID NO: 146433 - DNA, 80 bp, Artificial Sequence
  ENSG00000105088_16 (sequence is synthesized)
cggcgctttataagaggagcccgccaggcgcgccgagccgcagcccgcgtccccgagccccccctcaccccgtcccggac

SEQ ID NO: 146434 - DNA, 120 bp, Artificial Sequence
  ENSG00000105088_17 (sequence is synthesized)
gcctgggtgtcgagggaccgagcgccccgcggcgggccagagaagggacgcgcggcgggcggccgcggggcatgaggcggaggcgcgatgtcggtgccgctgctcaagatcggggccgtg

SEQ ID NO: 146435 - DNA, 120 bp, Artificial Sequence
  ENSG00000105088_18 (sequence is synthesized)
atcggggccgtgctgagcaccatggccatggtcaccaactggatgtcgcagacgctgccctcgctcgtggggctcaacggcaccgtgtcccgtgcgggcgcctctgagaaaatcactctc

SEQ ID NO: 146436 - DNA, 120 bp, Artificial Sequence
  ENSG00000105122_0 (sequence is synthesized)
gcagacggctgctgattctggggctggtcaggaaaccaaggagacccccccccccaaccatggacccaccgtcgccaagccggacctcccaaacccagcccacagccacctctccgctga

SEQ ID NO: 146437 - DNA, 120 bp, Artificial Sequence
  ENSG00000105122_1 (sequence is synthesized)
cttcctaccgctggcacacagggggcggtggggagaaggcggctggagggttccgctggggccgctttgctggctggggcagggccctgagccaccaggagcccatggtcagcacccagc

SEQ ID NO: 146438 - DNA, 120 bp, Artificial Sequence
  ENSG00000105122_2 (sequence is synthesized)
cagcccctcgctcgatattccgtcgggtcctatctgcgcctcccaaggagtcacggaccagtcgccttcgactctccaaggccctctgggggaggcataagaacccaccgccggagccag

SEQ ID NO: 146439 - DNA, 120 bp, Artificial Sequence
  ENSG00000105122_3 (sequence is synthesized)
acccggagccggagcaggaggccccagagctggagccggagccagagctggagccccctaccccacagatccctgaggcccccacacccaacgtgcctgtctgggacattgggggcttca

SEQ ID NO: 146440 - DNA, 120 bp, Artificial Sequence
  ENSG00000105122_4 (sequence is synthesized)
ccctgcttgatgggaagctggtgctgcttggaggagaggaggagggtcctcgaaggccccgggtgggaagtgctagctccgagggcagcatccacgtggccatggggaacttcagggatc

SEQ ID NO: 146441 - DNA, 120 bp, Artificial Sequence
  ENSG00000105122_5 (sequence is synthesized)
cagatcggatgcctggaaaaacagaaccggagactgctggtcccaaccaggtccacaacgttcgggggttgctcaagaggctgaaagagaagaaaaaggccaggttggagccccgggatg

SEQ ID NO: 146442 - DNA, 120 bp, Artificial Sequence
  ENSG00000105122_6 (sequence is synthesized)
gaccccccagtgctctgggctctagggagtcgctggccacactctctgaactggacctgggtgccgagcgggatgtgcggatctggccactgcaccccagcctcctgggggagccccact

SEQ ID NO: 146443 - DNA, 120 bp, Artificial Sequence
  ENSG00000105122_7 (sequence is synthesized)
gctttcaggtaacctggacgggtggaagccgctgcttctcttgtcgctcggccgctgagagagaccgctggatcgaggaccttcgtcgccaattccagcccacccaggacaacgtggagc

SEQ ID NO: 146444 - DNA, 120 bp, Artificial Sequence
  ENSG00000105122_8 (sequence is synthesized)
gggaagagacatggctgagcgtgtgggtgcacgaagcgaaggggcttccccgagcagcggcgggggcacccggcgtgcgcgccgagctgtggctggatggcgcgctgctggcacgcacgg

SEQ ID NO: 146445 - DNA, 120 bp, Artificial Sequence
  ENSG00000105122_9 (sequence is synthesized)
cgcctcgggccggcccaggccagctcttctgggccgagcgcttccacttcgaggcgctgccaccggcacgtcgcctgtcgctgcggctgcgcggcttgggcccgggaagcgcggtgctgg

SEQ ID NO: 146446 - DNA, 80 bp, Artificial Sequence
  ENSG00000105122_10 (sequence is synthesized)
gccgcgtggccctggcgctggaggagctggacgccccacgcgcgcctgccgccggtctggagcgctggttcccgctgctc

SEQ ID NO: 146447 - DNA, 120 bp, Artificial Sequence
  ENSG00000105122_11 (sequence is synthesized)
cgcgtcgcctgcgcgtgctgccgtccgagcgctacaaggagctggcggagttcctcaccttccactatgcgcgcctctgcggggccctggagcccgcgctgcctgcgcaggccaaggagg

SEQ ID NO: 146448 - DNA, 120 bp, Artificial Sequence
  ENSG00000105122_12 (sequence is synthesized)
agctggcggcagccatggtgcgcgtgctgcgggccaccggccgggcgcaggcgctggtgactgacctgggcactgcggagctggcgcgctgtggaggccgtgaggcgctgctgttccggg

SEQ ID NO: 146449 - DNA, 120 bp, Artificial Sequence
  ENSG00000105122_13 (sequence is synthesized)
gatgagtacatgaagctcgtggcacaggattacctccaggagaccctgggacaggttgtgcggcgtctctgtgcttctactgaggactgtgaagtggaccccagcaaatgtccagcctcg

SEQ ID NO: 146450 - DNA, 120 bp, Artificial Sequence
  ENSG00000105122_14 (sequence is synthesized)
gagctgccagagcaccaggccagacttcggaacagctgcgaggaggtcttcgaaaccattatccattcctacgactggttccctgcggagctgggcatcgtgttctcaagctggcgagaa

SEQ ID NO: 146451 - DNA, 120 bp, Artificial Sequence
  ENSG00000105122_15 (sequence is synthesized)
gcatgtaaagaacgtggctctgaggtgctgggcccccgactggtgtgcgcctccctcttcctgcggctcctgtgccctgccatcctggcacccagcctctttggtttggcaccagaccat

SEQ ID NO: 146452 - DNA, 120 bp, Artificial Sequence
  ENSG00000105122_16 (sequence is synthesized)
ccagcacccggcccagcccgcaccctcacactgattgccaaggtcatccagaacctcgccaaccgtgccccgttcggtgagaaggaggcctacatgggcttcatgaatagcttcctggag

SEQ ID NO: 146453 - DNA, 120 bp, Artificial Sequence
  ENSG00000105122_17 (sequence is synthesized)
gaacatggaccagccatgcaatgcttcctggaccaggtagccatggtggatgtggatgctgcccccagtggttaccagggcagtggtgatctggccctccagttagctgtcctgcatgcc

SEQ ID NO: 146454 - DNA, 120 bp, Artificial Sequence
  ENSG00000105122_18 (sequence is synthesized)
cagctctgtacaatttttgctgagcttgaccagacaacccgagacaccctggaaccactgcccaccatcctgcgagccattgaggagggccagcctgtgcttgtgtcagtgccaatgcgt

SEQ ID NO: 146455 - DNA, 120 bp, Artificial Sequence
  ENSG00000105122_19 (sequence is synthesized)
ctcccactgcccccggcccaggtccactccagcctctccgcaggggagaagcccggcttcctggccccccgggacctccccaagcacacccctctcatctccaagagccagtctctgcgc

SEQ ID NO: 146456 - DNA, 120 bp, Artificial Sequence
  ENSG00000105122_20 (sequence is synthesized)
ctctgcgcagcgttcgccgctcagagagttgggcccggccacggccggacgaagagcggcccctgcggcggccccggccggtgcagcgcacgcagagtgtcccggtccggcgtcctgccc

SEQ ID NO: 146457 - DNA, 120 bp, Artificial Sequence
  ENSG00000105122_21 (sequence is synthesized)
caatctgcggggccctggccgcgacccaaaggctccctgagcatgggaccagcgccccgcgcccggccttggacccgggactccgcctcgctgcctcggaagccgtcggtaccctggcag

SEQ ID NO: 146458 - DNA, 120 bp, Artificial Sequence
  ENSG00000105122_22 (sequence is synthesized)
cgccaaatggaccagccgcaagaccgaaaccaggcactgggcacgcaccgacctgtgaacaagttggcagagctgcagtgcgaggtggccgctctgcgtgaggagcagaaagtgctgtcc

SEQ ID NO: 146459 - DNA, 120 bp, Artificial Sequence
  ENSG00000105122_23 (sequence is synthesized)
cgcctcgtggagtcgctgagcacccaaatccgggccttgacggagcagcaggagcagctgcggggccagctgcaggatctggactccaggctccgtgctgggagctcagagtttgattca

SEQ ID NO: 146460 - DNA, 120 bp, Artificial Sequence
  ENSG00000105122_24 (sequence is synthesized)
gagcacaacctaacaagcaatgaagggcacagtctgaaaaacctggagcaccgcctaaatgagatggagagaactcaggctcagctgagggatgctgtccagagcctgcagctttctcca

SEQ ID NO: 146461 - DNA, 120 bp, Artificial Sequence
  ENSG00000105122_25 (sequence is synthesized)
aggacgcgggggtcttggagtcaaccccagcccctcaaagcaccctgcctcaatggagacaccacctgagctgcccatcctgcctcatcacacgtggtctgggagcagagagatagccat

SEQ ID NO: 146462 - DNA, 120 bp, Artificial Sequence
  ENSG00000105122_26 (sequence is synthesized)
cttagggggggtgtctgactttgccttagccctacttggcctacagtggggagtggagctgctggtcccaaccactctggcagtatgaagttgcccagtaaaatcttgatttcagtgaaa

SEQ ID NO: 146463 - DNA, 120 bp, Artificial Sequence
  ENSG00000105122_27 (sequence is synthesized)
gggcccgatccaattagatctgaccaggccctcccccccccccccaaaccacgcctagcacggccaagccccaccctggccccgccccaataagtctgtccaggccctgcctcttggcaa

SEQ ID NO: 146464 - DNA, 120 bp, Artificial Sequence
  ENSG00000105122_28 (sequence is synthesized)
cctaggaccctggcagattctctcatccaggccccacccctccatcagcccctcccaacctggctgggccgggcactgagatatctcagcctgggcactccctccagctcagtcacgacc

SEQ ID NO: 146465 - DNA, 120 bp, Artificial Sequence
  ENSG00000105122_29 (sequence is synthesized)
ccacccaggactggccaaaccccacctccaagggatgattgataggtcctgtcattccaaccattcccgtctctggtccgacccttcttcaagcatatttaggccccgcccctcagtctg

SEQ ID NO: 146466 - DNA, 120 bp, Artificial Sequence
  ENSG00000105122_30 (sequence is synthesized)
gacaagctccgcctccactccaagctccgcccccggagtccctggcactcccaccaggagctggaagggacttccttagcctctgcccttcgccccaatcccccgacccccacaggagct

SEQ ID NO: 146467 - DNA, 120 bp, Artificial Sequence
  ENSG00000105122_31 (sequence is synthesized)
cagagtttgattcagagcacaacctaacaagcaatgaagggcacagtctgaaaaacctggtgagattgccatctgagccctggggcaggtctgggcggtggaggagcaagggttgcggtg

SEQ ID NO: 146468 - DNA, 120 bp, Artificial Sequence
  ENSG00000105122_32 (sequence is synthesized)
ggcctggcccgccccttccactctacccaaagccagctcgctccataacccgcgcccccaacacacctgccccgcctgcatcgttgcaacggctccaagactccccttccatctattacc

SEQ ID NO: 146469 - DNA, 120 bp, Artificial Sequence
  ENSG00000105122_33 (sequence is synthesized)
agccccgggaatatcagacccgccccttctgtccactcccggccccatatgcacccaaagccctgcctgccaggcaatcgcgaagtctttactccagtactactcttgtatgccctggag

SEQ ID NO: 146470 - DNA, 120 bp, Artificial Sequence
  ENSG00000105122_34 (sequence is synthesized)
cccccaactctcccggagagcccagaaaagctagaagacttccgcgtaaccgcctccggactcccgtggctccacttctttccccaaaggcccagcaatctccctagggacccgacgcaa

SEQ ID NO: 146471 - DNA, 120 bp, Artificial Sequence
  ENSG00000105122_35 (sequence is synthesized)
tgggggagagtccatgtcagcggcctgctggtgagctaggggacctgggtgaagttctaagagtccttgagcaacctggattctggtagtgagtggtgttttgggggtgctaggatcctg

SEQ ID NO: 146472 - DNA, 120 bp, Artificial Sequence
  ENSG00000105122_36 (sequence is synthesized)
aggggcctgagcatcacgcgtgaggggcggggcccaggttgcacctcagcgctgaaaggcttaaatttctgctgtgagggttagaggttccggcctcggttatgagccccagcagcgctg

SEQ ID NO: 146473 - DNA, 120 bp, Artificial Sequence
  ENSG00000105127_0 (sequence is synthesized)
gcatgcgtgctgtggtcgcctagtaaacggggctgctggtgggccgcgtcgaagacatggaccagggctacggaggctacggggcgtggagtgctggacctgccaacacccagggtgcat

SEQ ID NO: 146474 - DNA, 120 bp, Artificial Sequence
  ENSG00000105127_1 (sequence is synthesized)
atggaactggtgtggccagctggcaaggttatgaaaactacaattactatggcgcccagaacaccagtgtcaccacaggcgcaacctacagctacggcccagcctcgtgggaggccgcca

SEQ ID NO: 146475 - DNA, 120 bp, Artificial Sequence
  ENSG00000105127_2 (sequence is synthesized)
aggccaatgatggcggcctggcggccggggcccctgccatgcacatggcctcttacggcccagagccatgcaccgacaattccgactccctcattgccaagatcaaccagcgtttggaca

SEQ ID NO: 146476 - DNA, 120 bp, Artificial Sequence
  ENSG00000105127_3 (sequence is synthesized)
tgatgtccaaggaaggaggcaggggcgggagcggcggcggtggggagggcatacaggaccgggagagctccttccgcttccagccgttcgagtcctatgactccaggccctgcctgccgg

SEQ ID NO: 146477 - DNA, 120 bp, Artificial Sequence
  ENSG00000105127_4 (sequence is synthesized)
agcacaacccctaccgccccagctacagctacgactatgagttcgacctggggtccgaccgcaatggcagctttggggggcagtacagtgaatgccgagacccagcccgggagcggggct

SEQ ID NO: 146478 - DNA, 120 bp, Artificial Sequence
  ENSG00000105127_5 (sequence is synthesized)
cccttgatggcttcatgcggggccggggccagggccgcttccaggaccggagcaaccctggcaccttcatgcgcagcgaccccttcgtgccccccgctgcgtcctctgagcccctgtcca

SEQ ID NO: 146479 - DNA, 120 bp, Artificial Sequence
  ENSG00000105127_6 (sequence is synthesized)
cgccctggaacgagctgaactacgtgggtggacggggcctgggagggccctcccccagccggccacctccgtccctcttctcccagtccatggctcccgactacggcgtgatgggcatgc

SEQ ID NO: 146480 - DNA, 120 bp, Artificial Sequence
  ENSG00000105127_7 (sequence is synthesized)
agggggcgggcggctatgacagcaccatgccctacggatgtggccgctcgcagcctcggatgcgggatcgggatcggcccaagaggagagggtttgaccgcttcggaccagatggcacgg

SEQ ID NO: 146481 - DNA, 120 bp, Artificial Sequence
  ENSG00000105127_8 (sequence is synthesized)
gcaggaaacggaagcagttccaactttacgaggagccagacaccaaactggcccgggttgacagtgaaggagatttctccgaaaatgatgacgcagctggtgacttccgctcaggagatg

SEQ ID NO: 146482 - DNA, 120 bp, Artificial Sequence
  ENSG00000105127_9 (sequence is synthesized)
aagaattcaagggtgaggatgaactctgcgactctgggaggcaaagaggagagaaggaggacgaggacgaggatgtgaagaagagaagggaaaagcaaaggagaagagacaggacgcggg

SEQ ID NO: 146483 - DNA, 120 bp, Artificial Sequence
  ENSG00000105127_10 (sequence is synthesized)
accgtgcagccgacagaattcagtttgcctgttctgtatgcaagttccgtagctttgatgacgaagagatccagaagcatctgcaaagcaaatttcacaaagagaccctgcggttcataa

SEQ ID NO: 146484 - DNA, 120 bp, Artificial Sequence
  ENSG00000105127_11 (sequence is synthesized)
gcaccaagctgcccgacaagaccgtggagttcctccaggaatacattgtaaacagaaataagaaaattgagaagcggcgtcaggaattgatggagaaagaaaccgcaaaaccaaaaccag

SEQ ID NO: 146485 - DNA, 120 bp, Artificial Sequence
  ENSG00000105127_12 (sequence is synthesized)
atcctttcaaagggattggccaggagcacttcttcaagaagatcgaggctgctcactgcctggcctgcgacatgctaattcctgcacagccgcagctcctccagcggcacctgcactccg

SEQ ID NO: 146486 - DNA, 120 bp, Artificial Sequence
  ENSG00000105127_13 (sequence is synthesized)
tggaccacaatcacaaccgcaggttggctgctgaacagttcaagaaaaccagtctccatgtggctaagagtgttttgaacaacagacatatagtgaagatgctggaaaaatacctcaagg

SEQ ID NO: 146487 - DNA, 120 bp, Artificial Sequence
  ENSG00000105127_14 (sequence is synthesized)
gtgaggaccctttcaccagtgaaactgttgatccagaaatggaaggagatgacaatttaggaggtgaggataagaaagagacacctgaggaggtggccgcggacgtcttagcagaggtga

SEQ ID NO: 146488 - DNA, 120 bp, Artificial Sequence
  ENSG00000105127_15 (sequence is synthesized)
gctgaggacgaaggccccacggacacagcggaggccggtagtgatcctcaagccgaacagctgctggaagagcaggtgccctgtggaacggcacatgagaagggcgtccccaaggccaga

SEQ ID NO: 146489 - DNA, 120 bp, Artificial Sequence
  ENSG00000105127_16 (sequence is synthesized)
agtgaggctgcagaggctggaaatggcgccgagacaatggcagcagaggcagaaagtgcccaaaccagagttgctcctgccccagctgccgcggatgctgaagtggaacaaactgatgca

SEQ ID NO: 146490 - DNA, 120 bp, Artificial Sequence
  ENSG00000105127_17 (sequence is synthesized)
gagtctaaagacgctgttcccacagaatgatgctcatttccctgttccagggaaggcgttgggatgatggatgcgttggtctttctcccttggtttgtaagcagtacaagggcgtgtgct

SEQ ID NO: 146491 - DNA, 120 bp, Artificial Sequence
  ENSG00000105127_18 (sequence is synthesized)
cccagaatatgctgtaatctaattttggtgaagagacccagcgtttcctcctgagcagtgcctctcacggcttgtctcatgcagtcgtgtggcttcttgcccaggtttcaaagctgaagt

SEQ ID NO: 146492 - DNA, 120 bp, Artificial Sequence
  ENSG00000105127_19 (sequence is synthesized)
acattgtccttagcggctgtaacatgtctcttgacagtagtgcacttggaataataaaggttgggtgattatatcttgatgatacattacttgttcaatacagccactgatggaatgctt

SEQ ID NO: 146493 - DNA, 120 bp, Artificial Sequence
  ENSG00000105127_20 (sequence is synthesized)
ttttatttttttccttaatttttttttttatttggttgggaacagctgaatactaggaatatatcttgctctatagaggatttttttttgtatgtttcaagcttcagcctttaacctata

SEQ ID NO: 146494 - DNA, 120 bp, Artificial Sequence
  ENSG00000105127_21 (sequence is synthesized)
tatacctttgtagtgcaccatatggtgtgtgactttcacaggacttcgcagcacctggttcacatgtggcactgaccgcgtcacatccacgcactcccaaaggccagaagtatctgaccg

SEQ ID NO: 146495 - DNA, 120 bp, Artificial Sequence
  ENSG00000105127_22 (sequence is synthesized)
acctacgccactggaaacacacccaccgcaacctcaagaaccagactgtgcagagggcattgcgtcccaatctttagtccttgctgaatcagttctctaatattttacctcatttgtgtt

SEQ ID NO: 146496 - DNA, 120 bp, Artificial Sequence
  ENSG00000105127_23 (sequence is synthesized)
ccacctctagattacttcaggtttttttcctttaaaattagttactaccactcaaatgtatttacaaagagaatttggccaggcacggtgatgcatacctataatcccagcacttcggga

SEQ ID NO: 146497 - DNA, 120 bp, Artificial Sequence
  ENSG00000105127_24 (sequence is synthesized)
ggccgtggtgagaggatagcttaagcccaggagttcaagaccaacctggacaacatagcaagaccccatctcttaaaaaaaaaggaaagaaaacttgatgtgattgccataggtggaata

SEQ ID NO: 146498 - DNA, 120 bp, Artificial Sequence
  ENSG00000105127_25 (sequence is synthesized)
ttgccatagatagaaggtatctgtaatatatatatatatatataaaatgaaatatatgtttcattttagagaaataactattactttagatctttccaaatctgagaaagggaggctagc

SEQ ID NO: 146499 - DNA, 120 bp, Artificial Sequence
  ENSG00000105127_26 (sequence is synthesized)
agggaggctagcatgtgttcaaggttagcacgcaacagaatttcctaaaatcagaagaattggaagatcctccccttttgaaatggccctgctgtgtcagtttccctgtggccttttgaa

SEQ ID NO: 146500 - DNA, 120 bp, Artificial Sequence
  ENSG00000105127_27 (sequence is synthesized)
ctgtacatctcacatgttgggaaacgctggccactgggaaatcattagaaaggaggctgtagaatatttgccgagcctctactgtataccaggggctaactcaccaagcacattctagga

SEQ ID NO: 146501 - DNA, 120 bp, Artificial Sequence
  ENSG00000105127_28 (sequence is synthesized)
attgggccctgctcatgaggagccttagtggagattccaggtgaatatttatgaaaaagtcaacattagaactgaaaatggaaataaactgcttgaaaagacgatggtgcctctgggtca

SEQ ID NO: 146502 - DNA, 120 bp, Artificial Sequence
  ENSG00000105127_29 (sequence is synthesized)
tttctgctcagcatccgtttgtgttgtgtagatgcgtcttaatcgcagggtgagcatgccttttaagcttgttctcttaaggcaaaaatgtcggtagcattaaacagtagtgcagaaaaa

SEQ ID NO: 146503 - DNA, 120 bp, Artificial Sequence
  ENSG00000105127_30 (sequence is synthesized)
gtgctgtggtcgcctagtaaacggggctgctggtgggccgcgtcgaagacatggaccagggctacggagctccttccgcttccagccgttcgagtcctatgactccaggccctgcctgcc

SEQ ID NO: 146504 - DNA, 120 bp, Artificial Sequence
  ENSG00000105127_31 (sequence is synthesized)
aaaaccagatcctttcaaaggtgagttgtcatcccaggatgagtgctttcctggatggtagtaaggcatgtgacaggacccgtaaaacgtggcacgaggccgggcacggtggctcacacc

SEQ ID NO: 146505 - DNA, 120 bp, Artificial Sequence
  ENSG00000105127_32 (sequence is synthesized)
cggaagccgtcgggctgcgcggggtcgggcctttagtccccggtgcagcgcggtggggccgagtgctgccggcgcgagagtcagcctcgccgggctccagctctgtacccggcgcgtgct

SEQ ID NO: 146506 - DNA, 120 bp, Artificial Sequence
  ENSG00000105127_33 (sequence is synthesized)
aggcaggggcgggagcggcggcggtggggagggcatacaggaccgggagaggtgattatggacccaagccctcccccgggaccccacacatccccacctttgtgcgcatgggagtgggca

SEQ ID NO: 146507 - DNA, 120 bp, Artificial Sequence
  ENSG00000105127_34 (sequence is synthesized)
ggatgaactctgcgactctgggaggcaaagaggtcctgctacctacccgggatgactttgctattaaacagcagtcatagtttcaggcagtgacctcttgccaaaaatcccacacgccct

SEQ ID NO: 146508 - DNA, 120 bp, Artificial Sequence
  ENSG00000105131_0 (sequence is synthesized)
acccttgtttcctgtccctgtcgcgcccaggtgtttacctggcactcaggtgagtggtgcgctctggctgttttctgtcggagccgcccgcctcttccttcagcgcgtcccacaaatccc

SEQ ID NO: 146509 - DNA, 120 bp, Artificial Sequence
  ENSG00000105131_1 (sequence is synthesized)
caaatcccgacggcacggaggggccccaggccaagggcgatgggcccctgagccctgacaccgcttcgccgctgctgcaggtgcccctggccggcagcgccgccgtggtcccggagcgcg

SEQ ID NO: 146510 - DNA, 120 bp, Artificial Sequence
  ENSG00000105131_2 (sequence is synthesized)
ccggagctggtggtgaccgcgctgctggcgccgtcgcgcctgtcgctgaagctgctgcgcgccttcatgtggagcctggtgttctcggtggcgctggtggccgcggcggtctacggctgc

SEQ ID NO: 146511 - DNA, 120 bp, Artificial Sequence
  ENSG00000105131_3 (sequence is synthesized)
atagcgctcacgcacgtgctgtgccggccccggcgcggctgctgcgggcgccgtcggagcgcgtcccccgcctgcctgagcgacccctcgctgggtgagcacggtttcctgaacctcaag

SEQ ID NO: 146512 - DNA, 120 bp, Artificial Sequence
  ENSG00000105131_4 (sequence is synthesized)
agctcgggcctgcgtctgcactatgtctcggctggacgaggtaacggacccctcatgctgtttctgcacggcttccctgagaactggttctcctggcgttaccagctccgggagttccag

SEQ ID NO: 146513 - DNA, 120 bp, Artificial Sequence
  ENSG00000105131_5 (sequence is synthesized)
agccgcttccatgttgtggctgtggacttgcgaggctatggcccctcggatgcacctcgggatgtggactgctacacaatcgacctgctgctggtggacatcaaagatgtcatcctaggc

SEQ ID NO: 146514 - DNA, 120 bp, Artificial Sequence
  ENSG00000105131_6 (sequence is synthesized)
ctgggttactcgaagtgcatccttgtggcccatgactggggtgccctccttgcctggcatttctccatctactacccatccctggtcgagcggatggttgtggtcagtggtgcccccatg

SEQ ID NO: 146515 - DNA, 120 bp, Artificial Sequence
  ENSG00000105131_7 (sequence is synthesized)
gttcttccgttcccactacatgttcctgttccagctgccctggctgcccgagaagctgctgtctatgtctgactttcagattctgaagaccaccctcacccaccgcaagacaggcatccc

SEQ ID NO: 146516 - DNA, 120 bp, Artificial Sequence
  ENSG00000105131_8 (sequence is synthesized)
atgcttgacccccagcgagctcgaggccttcctttataacttctcacagcctggtggcctcactgggcccctcaactactaccgaaacctcttcaggaacttccccctggaaccccagga

SEQ ID NO: 146517 - DNA, 120 bp, Artificial Sequence
  ENSG00000105131_9 (sequence is synthesized)
gctgaccacacccacattgctgctgtggggggagaaggacacttacttggagctggggctggtggaagccatcggcagccgctttgtgccgggccgcttggaggcccacatcctgccagg

SEQ ID NO: 146518 - DNA, 120 bp, Artificial Sequence
  ENSG00000105131_10 (sequence is synthesized)
catagggcattggatcccacagagcaacccccaggagatgcaccagtacatgtgggccttcttgcaagacctgctggactagtggtccttgctggcctgcccaggaggcatggatactca

SEQ ID NO: 146519 - DNA, 120 bp, Artificial Sequence
  ENSG00000105131_11 (sequence is synthesized)
ggaaggaacacacacccattatctgtgtgtgcctgggagtccatacaatgtccatacatgggtgaactcttgaatcgctcataggcatgggactcctggatcccacacaagcgcacctat

SEQ ID NO: 146520 - DNA, 120 bp, Artificial Sequence
  ENSG00000105131_12 (sequence is synthesized)
gggtgcctcgggacacaccaacccctatactcacacacaggcatggatgcatgtgtgtgtaacaaacactttgaccctgggaactgggtatacctctcttccagtggagccagatgccga

SEQ ID NO: 146521 - DNA, 120 bp, Artificial Sequence
  ENSG00000105131_13 (sequence is synthesized)
gaccgagtgtcccacctcctcccttcctggggcctcactctgcgctttgccaaagtcgcttctctgccatagctgcacagaccttaaaccctgaccttcctgtccctgccttcgacctcc

SEQ ID NO: 146522 - DNA, 120 bp, Artificial Sequence
  ENSG00000105131_14 (sequence is synthesized)
tgcctgggtcttcagctcagtgctactctgaatacaatactgctgaccacatttggctacttcagcttaaatgtatgttaattgaaatgaaatacaatgaaaatgcagtgctcagtccca

SEQ ID NO: 146523 - DNA, 120 bp, Artificial Sequence
  ENSG00000105131_15 (sequence is synthesized)
ataagccaggcccaccattccaactctttctcctttttggcttgtaggccgcacctactctgcatatgccccgcccctcactccaggtgtcgcccacttaactgaagatccaggatcccc

SEQ ID NO: 146524 - DNA, 120 bp, Artificial Sequence
  ENSG00000105131_16 (sequence is synthesized)
acccgccgttggaaccacagctgggtgaagtcagtgctgctaggtctttggagccagaccgaagggagggtcgcgcgcccctgggccgcacctactctgcatatgccccgcccctcactc

SEQ ID NO: 146525 - DNA, 120 bp, Artificial Sequence
  ENSG00000105135_0 (sequence is synthesized)
atgcgcatcgggccggactacggggcgccgctgagccaagtgggccacccgggcacggccacgctcccgggtcacgtgacacggagggggccgaattctgctggaggcagcgccatatcc

SEQ ID NO: 146526 - DNA, 120 bp, Artificial Sequence
  ENSG00000105135_1 (sequence is synthesized)
tggaggtgaaggtaccacctcatggagacccccgcggccgccgcccccgctgggagcttattcccctccttcctgctcctggcctgcgggacgctggtggccgccttgctgggcgccgct

SEQ ID NO: 146527 - DNA, 120 bp, Artificial Sequence
  ENSG00000105135_2 (sequence is synthesized)
caccgcctggggctcttctatcagctgctgcacaaggtggacaaggcaagcgtccggcatggcggagagaacgtggccgctgtgctgagggcccatggtgtgcggttcatcttcacgctg

SEQ ID NO: 146528 - DNA, 120 bp, Artificial Sequence
  ENSG00000105135_3 (sequence is synthesized)
gtcggtgggcacatttccccgctgctggtggcctgtgagaaactgggcatccgtgtggtggacacacgccatgaggtcacggccgtctttgctgctgatgctatggcccgcctgtccggg

SEQ ID NO: 146529 - DNA, 120 bp, Artificial Sequence
  ENSG00000105135_4 (sequence is synthesized)
acggtgggcgtggcggcagtgacagcaggccctggcctcaccaacacggtgactgcggtgaagaatgctcagatggctcagtccccaatcctgcttctgggtggggctgccagcactctg

SEQ ID NO: 146530 - DNA, 120 bp, Artificial Sequence
  ENSG00000105135_5 (sequence is synthesized)
ctgcagaaccggggtgcgctccaggctgttgatcagctgtcccttttccggccactctgtaagttttgtgtgtctgtgcggagggtgcgggacattgtgcccaccctgagggccgcgatg

SEQ ID NO: 146531 - DNA, 120 bp, Artificial Sequence
  ENSG00000105135_6 (sequence is synthesized)
gctgccgcccagtcgggcaccccaggtccggtgtttgtggagctgcccgttgacgtgctgtacccctacttcatggtccagaaggagatggtgccagccaagccacccaagggcctcgtg

SEQ ID NO: 146532 - DNA, 120 bp, Artificial Sequence
  ENSG00000105135_7 (sequence is synthesized)
ggccgagtggtctcctggtatttagagaattacctggccaacctctttgcaggagcctgggagcctcagcccgagggaccgctgcccctggacatcccccaggcttccccgcagcaggtt

SEQ ID NO: 146533 - DNA, 120 bp, Artificial Sequence
  ENSG00000105135_8 (sequence is synthesized)
cagcgctgtgtggagatcctgagccgggccaagaggcctctgatggtgctggggagtcaggccctgctcaccccaacgtctgccgacaagcttcgggctgccgtggagaccttgggtgtt

SEQ ID NO: 146534 - DNA, 120 bp, Artificial Sequence
  ENSG00000105135_9 (sequence is synthesized)
gggggctgttaggccgcaaccaccccctccacatccgggagaaccgcagtgcggccctgaagaaggcggatgtcattgtcctagcaggaactgtgtgtgacttccgcctatcctatggcc

SEQ ID NO: 146535 - DNA, 120 bp, Artificial Sequence
  ENSG00000105135_10 (sequence is synthesized)
gtgtcctcagccacagcagcaagatcatcatcgtcaatcgtaatcgggaagagatgttgctcaactcagacatcttctggaagccccaggaggctgtgcagggagatgtgggttccttcg

SEQ ID NO: 146536 - DNA, 120 bp, Artificial Sequence
  ENSG00000105135_11 (sequence is synthesized)
tgctgaagttagtggagggccttcagggccagacctgggccccagactgggtggaggagctgcgggaagccgaccggcagaaggagcagacctttcgggagaaggcagcgatgcctgtgg

SEQ ID NO: 146537 - DNA, 120 bp, Artificial Sequence
  ENSG00000105135_12 (sequence is synthesized)
cccagcacctgaacccagtgcaggtgctgcagctggtggaggaaacgctacctgacaactcaattctggtggtggatggcggggacttcgtgggcactgctgcccatctggtacagcccc

SEQ ID NO: 146538 - DNA, 120 bp, Artificial Sequence
  ENSG00000105135_13 (sequence is synthesized)
gcggccccctgcgctggctcgatcctggggcctttgggactctgggagttggtgcaggatttgcacttggggccaagctgtgccggccagatgctgaggtctggtgcctgtttggggacg

SEQ ID NO: 146539 - DNA, 120 bp, Artificial Sequence
  ENSG00000105135_14 (sequence is synthesized)
gagcttttggctacagcctcatcgaatttgatacattcgtcagacacaagatcccagtgatggccttggtagggaatgatgctggctggacacagatttctcgggagcaggtgccctctc

SEQ ID NO: 146540 - DNA, 120 bp, Artificial Sequence
  ENSG00000105135_15 (sequence is synthesized)
tgggcagcaacgtggcctgtggcctggcctacactgattatcacaaggcagccatgggtctgggggcccggggcttgctgctctcacgggagaacgaggatcaggtggtcaaggtgctgc

SEQ ID NO: 146541 - DNA, 120 bp, Artificial Sequence
  ENSG00000105135_16 (sequence is synthesized)
acgatgcccagcagcagtgccgagacggccacccggttgtggtcaacatcctcattgggaggacggacttccgcgatggctccattgctgtatagggccttgtgggtcaggacgcttggc

SEQ ID NO: 146542 - DNA, 120 bp, Artificial Sequence
  ENSG00000105135_17 (sequence is synthesized)
tgccttcctgcccctggactgtgtccagctggtttggagtctcatcattgcttgccctgggcctatcccatgaggcccagtgactccacaacctccctgaggaggggatggaggggtcaa

SEQ ID NO: 146543 - DNA, 120 bp, Artificial Sequence
  ENSG00000105135_18 (sequence is synthesized)
atctcagagaggctctcttgtgagctcttggaccctcctcttcacggacccaactgtgccgtttgtcccctctcttatggagactgaataaaccacctctggcccatgtaggcccaagta

SEQ ID NO: 146544 - DNA, 120 bp, Artificial Sequence
  ENSG00000105135_19 (sequence is synthesized)
ggagcccagctgccaggctctgcaaggatactggagggcagggaggagtcacagcagatggctccctgccatctgctctgcgtgcgttgtgcccctggccaaaccccctgggttatataa

SEQ ID NO: 146545 - DNA, 120 bp, Artificial Sequence
  ENSG00000105135_20 (sequence is synthesized)
ccctctcctctctccctgattgccctgccatcctggagacaggcagtgtaacagtggggcacttaagagcgtgggttctattgaactttcagtcttacttgggcaagccttgatgtcctc

SEQ ID NO: 146546 - DNA, 120 bp, Artificial Sequence
  ENSG00000105135_21 (sequence is synthesized)
agctgtaagagggatgtaatgacaagaggatctgataagatgttatgccttggtttgagcctggcatgtagtataatatatgcctaaccaagaccaagcttctcttgacctctcaccctg

SEQ ID NO: 146547 - DNA, 120 bp, Artificial Sequence
  ENSG00000105135_22 (sequence is synthesized)
ctcctgcccccttacctggggcagggggattgccccctttcccagctgccctctgccctggcctttaactttattgctccacctgtccttgggcccaggtggacaaggcaagcgtccggc

SEQ ID NO: 146548 - DNA, 120 bp, Artificial Sequence
  ENSG00000105135_23 (sequence is synthesized)
gtacagtgattgaggcccagaccttgccctaggggtagccagtcaaccagagacaaatagttggctctcaaactgatgaatgcttctttctttaaattttttttatttttattttttaga

SEQ ID NO: 146549 - DNA, 87 bp, Artificial Sequence
  ENSG00000105135_24 (sequence is synthesized)
ttattttttagagacgaagtgcaatcacagctcactgcaccctcaaactcccaggctcaaaagcaatcctcccacctcagcctcctg

SEQ ID NO: 146550 - DNA, 120 bp, Artificial Sequence
  ENSG00000105135_25 (sequence is synthesized)
gctgggactacaagtatgcaccaccatgccaggctaatttgttaatttttttttgtggaatcagcatctcactgtgttgcccaggttggcgtggaactcctggcctcaagtgatcctcct

SEQ ID NO: 146551 - DNA, 120 bp, Artificial Sequence
  ENSG00000105135_26 (sequence is synthesized)
atagatgcttctgtaggaacaaatggtggggtggacacagagggaggcttgaaaacgtgcatgtgatcacgttccctcccacactgcccactgccctcaggacagagagcacactcgttg

SEQ ID NO: 146552 - DNA, 120 bp, Artificial Sequence
  ENSG00000105135_27 (sequence is synthesized)
gccccttagcctgtcttcctgccgtatctctcccctccccttattttagtccccttggacttgaacttggttcatcattctgaggatgttgactcccctgcagcctaggcgacaggacac

SEQ ID NO: 146553 - DNA, 120 bp, Artificial Sequence
  ENSG00000105135_28 (sequence is synthesized)
tcttgtattaagcagagaagtagcaccgttgcatctgtgttgggaaggtccactcagcagccatggacggcaggccggaagggggctgggtggaggccaggggggctgctcaaaatggcc

SEQ ID NO: 146554 - DNA, 120 bp, Artificial Sequence
  ENSG00000105135_29 (sequence is synthesized)
aggacagaagcgaggaggcctgaactggagatgaacagcggcagagcctcaccttctcagagcctccatttgatcatttgaaaaatggggtggtgaaagatacatcacggggctgtttgt

SEQ ID NO: 146555 - DNA, 120 bp, Artificial Sequence
  ENSG00000105135_30 (sequence is synthesized)
tagttcacttcagtaacgttcgctgtgcgcttccacgtgcctggatttgagagatgtgcttggtggatgtagctcttttcattgagtgtttcccaggcagaaggaggtggagggagggga

SEQ ID NO: 146556 - DNA, 120 bp, Artificial Sequence
  ENSG00000105135_31 (sequence is synthesized)
cgaggccagcttgggtttgtcacctgccttgtgctccttaacccttgtttcttgggccttgtcttcccttttcacctgggctgccctcccctggttctggcaggttctggggtgtttcac

SEQ ID NO: 146557 - DNA, 120 bp, Artificial Sequence
  ENSG00000105135_32 (sequence is synthesized)
ctgttttttttctaggagcacccctggcctgcttcccgtctgcctgctcggatgctgctgctggcttcctgctgttttgaggcctctgatgctggaagaacaggaggaagccagctcccc

SEQ ID NO: 146558 - DNA, 120 bp, Artificial Sequence
  ENSG00000105135_33 (sequence is synthesized)
tagggcctggggttctgggagatgtcaccaggggtgggctgaggtggggagggagcctcctctctggcagaggccctatccctgtctctgtcctctggctggccaagccatggggctgaa

SEQ ID NO: 146559 - DNA, 120 bp, Artificial Sequence
  ENSG00000105135_34 (sequence is synthesized)
ggctgcggcctgccttcatcatcttcctgtagatcccagtgatggccttggtagggaatgatgctggctggacacagatttctcgggagcaggtgccctctctgggcagcaacgtggcct

SEQ ID NO: 146560 - DNA, 120 bp, Artificial Sequence
  ENSG00000105135_35 (sequence is synthesized)
gtggcctggcctacactggtgagggggcctcagcgaggttgggaggacaggaggctgtttcagtcccagctgggcttgtgttcctctcctgggctggctgcatgtgcggtgggctgagtc

SEQ ID NO: 146561 - DNA, 120 bp, Artificial Sequence
  ENSG00000105135_36 (sequence is synthesized)
ctggtgtgggagaaccacatcctgatgcgatgtgacctcgacccagcctggcccggggtcggggatcaggctcgggcccgtgcgctctttaagggagaggcgtgggttgcgtggagggtc

SEQ ID NO: 146562 - DNA, 120 bp, Artificial Sequence
  ENSG00000105135_37 (sequence is synthesized)
gcgcccgctaacccgggggcgtgacctcgtgcctcttggtgacgtaacatggggcgggctcactactggggctgagatttggggtccggttgtggaaagagaggcggggcttccgcctgt

SEQ ID NO: 146563 - DNA, 120 bp, Artificial Sequence
  ENSG00000105135_38 (sequence is synthesized)
gtgtggtgctgtcgtcgccaccttgacttgtggtggctagtttgggtgggagtggtggtgatgtaaaggactggggctagccccgcgaggggcgtgaccttgtcacggagaggcatggct

SEQ ID NO: 146564 - DNA, 120 bp, Artificial Sequence
  ENSG00000105135_39 (sequence is synthesized)
tcaccccgagcctaggcgcacaaagggcgtggtctggcagggttgggggcgtggccgcacagaaactggcggcaagggtcgtggccctggatcctgctgcgagaaggggcgcgatttctt

SEQ ID NO: 146565 - DNA, 120 bp, Artificial Sequence
  ENSG00000105135_40 (sequence is synthesized)
tggtaagaggttctgtccagggccctgtctccattgccacgctgtgtatggaggcctggactttgccactggtaagagagaacacggaagctgccgctgccggggcactcgcaccccacc

SEQ ID NO: 146566 - DNA, 120 bp, Artificial Sequence
  ENSG00000105135_41 (sequence is synthesized)
tacctccttccccagtgactcttttcacagaacagatggacagcactctgtgctccctaacctggatgggataaatggggcagagggcaggctccagcgagggggtggcagtgacagttt

SEQ ID NO: 146567 - DNA, 120 bp, Artificial Sequence
  ENSG00000105135_42 (sequence is synthesized)
tgaggtgaggcactggagttgggagacttgctgctctctaggtcctgatccaccctaaccatcctgggtcccctcccgactaggtctggtgcctgtttggggacggagcttttggctaca

SEQ ID NO: 146568 - DNA, 120 bp, Artificial Sequence
  ENSG00000105135_43 (sequence is synthesized)
ggactacggggcgccgctgagccaagtgggccacccgggcacggccacgctcccgggtcacgtgacacggagggggccgaattctgctggaggcagcgccatatcctggaggtggacaag

SEQ ID NO: 146569 - DNA, 120 bp, Artificial Sequence
  ENSG00000105136_0 (sequence is synthesized)
gtctcgtttggtattcactttcgcgactcaggtgaactaacctgcgagaagctggttgtgcgctgaggcgaccagcgccggaaggcacggtggcgactcacgctgttctcgccgctcaga

SEQ ID NO: 146570 - DNA, 120 bp, Artificial Sequence
  ENSG00000105136_1 (sequence is synthesized)
ggcgggtctgaggctcggtggcggcgcccagggtggcccgggccctttcctcggtcattgtctcccctccagctctactcacaggctccgatggcggcggccgccctgagggaccccgct

SEQ ID NO: 146571 - DNA, 120 bp, Artificial Sequence
  ENSG00000105136_2 (sequence is synthesized)
caggttcctgtggctgcagacttgcttacagaccatgaggagcagggctatgtgacctttgaggatgtggctgtctacttctcccaggaggaatggagattgcttgatgacgctcagagg

SEQ ID NO: 146572 - DNA, 120 bp, Artificial Sequence
  ENSG00000105136_3 (sequence is synthesized)
ctcctctaccgcaatgtgatgctggagaactttacacttctggcctctctgggttgttggcatggagccgaggctgaggaggctcctgagcagattgcttctgtaggactgctcagttca

SEQ ID NO: 146573 - DNA, 120 bp, Artificial Sequence
  ENSG00000105136_4 (sequence is synthesized)
aacattcagcaacaccagaagcagcactgtggagagaaacccttaaaaagacaagagggcagggtcccagttttgaggagttgcaaagttcacctatcagagaagtccttgcaaagcagg

SEQ ID NO: 146574 - DNA, 120 bp, Artificial Sequence
  ENSG00000105136_5 (sequence is synthesized)
gaggttgggaaggccctcctgatcagctcaggtgttctcaagcaccaggtgactcacacaggagagaagtcacataggagctccaaaagtagggaggcctttcatgctggaaaaaggcat

SEQ ID NO: 146575 - DNA, 120 bp, Artificial Sequence
  ENSG00000105136_6 (sequence is synthesized)
tacaaatgcagtgaatgtgggaaagcctttggtcagaaatatttacttgttcagcaccagagactacatgctgggaaaaagacgtatgaatgcagtgaatgtgggaagttatttagagat

SEQ ID NO: 146576 - DNA, 120 bp, Artificial Sequence
  ENSG00000105136_7 (sequence is synthesized)
atgtccaacctttttatacaccaaatagttcacactggagaaaggccttacgggtgtagtaactgtggaaaatcctttagccgtaatgctcacctcattgaacaccagagagttcacact

SEQ ID NO: 146577 - DNA, 120 bp, Artificial Sequence
  ENSG00000105136_8 (sequence is synthesized)
ggagaaaagccttttacatgcagtgaatgtggaaaagctttcaggcataattccacacttgttcagcatcacaaaatccacactggagtaaggccttatgagtgcagtgaatgtggaaaa

SEQ ID NO: 146578 - DNA, 120 bp, Artificial Sequence
  ENSG00000105136_9 (sequence is synthesized)
ttgtttagtttcaactccagcctcatgaaacatcagagaattcacactggagaaagaccttataagtgcagtgaatgtggaaaattctatagccacaagtccaaccttatcaaacattgg

SEQ ID NO: 146579 - DNA, 120 bp, Artificial Sequence
  ENSG00000105136_10 (sequence is synthesized)
cgtgttcatactggagaaaggccttacaagtgcagcgactgtgggaaattttttacccaatgctcaagcctcatgcaacatcaaaaagttcacactggagaaaagccttttaagtgcaat

SEQ ID NO: 146580 - DNA, 120 bp, Artificial Sequence
  ENSG00000105136_11 (sequence is synthesized)
gaatgtgggagattctttagagagaattccaccctagttagacatcagagggttcacactggagcaaagccttatgagtgcagggaatgtgggaaattttttagccaaagctcaaccctc

SEQ ID NO: 146581 - DNA, 120 bp, Artificial Sequence
  ENSG00000105136_12 (sequence is synthesized)
atgcaacatcgaaaagttcacattggagaaaagccttttaagtgcaatgaatgtgggagattgtttagagagaattccagccttgttaaacatcagagggttcacactggagcaaagcct

SEQ ID NO: 146582 - DNA, 120 bp, Artificial Sequence
  ENSG00000105136_13 (sequence is synthesized)
tatgagtgcagggaatgtgggaagttttttcgccacaactccagtctttttaaacatcgaaggattcacactggagaaatgcagtgattgtgtgaaatcctttagccagcgtttcaacct

SEQ ID NO: 146583 - DNA, 120 bp, Artificial Sequence
  ENSG00000105136_14 (sequence is synthesized)
cattcaacaccagaaagttcacagtggaaaaaatcttgaaggtaacagatggaaatccgttagccacacctccagtctcattcaacactggacagtttacaatgtggacaatgtagtgaa

SEQ ID NO: 146584 - DNA, 120 bp, Artificial Sequence
  ENSG00000105136_15 (sequence is synthesized)
cactggagaaaggccttagggtgacaggttatgtactgtctctgaatcaatatgacctcacttaaaacagaaactctgaggatggcctttatgagggagctggcaattgaacatcattca

SEQ ID NO: 146585 - DNA, 120 bp, Artificial Sequence
  ENSG00000105136_16 (sequence is synthesized)
tctaaatatgcacactggaggcaagatgagaattcctgacagattgtccttcctgagaagacagccctctgccttggagctccagagagagggagccctgtattcttggctgtacccgtc

SEQ ID NO: 146586 - DNA, 120 bp, Artificial Sequence
  ENSG00000105136_17 (sequence is synthesized)
gaatggagttttgatctcgctgagtttggagttgggggaggaaaggagtggtcttggttcaaatgtgactcacttttgctgttcttgtgaatgttagatcttctttaataaatatttatt

SEQ ID NO: 146587 - DNA, 120 bp, Artificial Sequence
  ENSG00000105136_18 (sequence is synthesized)
tcccatacacccttatgaccatttccagagactgaattgtgtttttataattttcacccttttggctgtgtaacaggtctgcaaagctcctcattcagttattctgtaagttgatccaaa

SEQ ID NO: 146588 - DNA, 120 bp, Artificial Sequence
  ENSG00000105136_19 (sequence is synthesized)
tgtttcaaattttaagaacttgccaaattgtgttctaaatggttagcatttcatatttcctcctggaatatattagattttccatttcttcacattactgacagtttatatgtgtagaag

SEQ ID NO: 146589 - DNA, 120 bp, Artificial Sequence
  ENSG00000105136_20 (sequence is synthesized)
tcataggccattcattttagccatgttactaagtgtgaagtagtatttcattgtagttcttaatttgtatttttccgatgactcagttttgagcattttttaatgtgtttacttgtcacc

SEQ ID NO: 146590 - DNA, 120 bp, Artificial Sequence
  ENSG00000105136_21 (sequence is synthesized)
catatatcttctttagtcaaatgtattttttgcctgttttttaaaacatttggttggttacaagttcttaatatttctggagacaaattccttatttgatataagcattgtcaatatttt

SEQ ID NO: 146591 - DNA, 120 bp, Artificial Sequence
  ENSG00000105136_22 (sequence is synthesized)
ctcatggtccatggcttttgttttcttttcttttttaaaatttagagatgaggtcgtgctatgttgcacagactagtctctaactcctggcctcaagtgatcatcctgcctcagcctccc

SEQ ID NO: 146592 - DNA, 120 bp, Artificial Sequence
  ENSG00000105136_23 (sequence is synthesized)
ttacaggcatgagccaccatgcttggccttgttttcagttcttaacagtatctttcctagagcagattgtcttaattttatggagcccaatttatccatttgttattttattcattgtgc

SEQ ID NO: 146593 - DNA, 120 bp, Artificial Sequence
  ENSG00000105136_24 (sequence is synthesized)
gcccaatttatccatttgttattttattcattgtgcatttggtgttgcatcctcttactataccatatctttgcctataaataaaagccttgactgagtgcggtggctcacgcctgtaat

SEQ ID NO: 146594 - DNA, 77 bp, Artificial Sequence
  ENSG00000105136_25 (sequence is synthesized)
accatcctggctaacacagtgaaactccctgcctgtagttccagctatcctggaggctgaggcaggagaatggtgtg

SEQ ID NO: 146595 - DNA, 120 bp, Artificial Sequence
  ENSG00000105136_26 (sequence is synthesized)
aaaaaaaagccttatgtgagtatgctactgtaatcttatgaatctttttaaatatccaacttctgaaatatttgtaggtttaactacaaataaataattcaatatatagataaatgtgta

SEQ ID NO: 146596 - DNA, 120 bp, Artificial Sequence
  ENSG00000105136_27 (sequence is synthesized)
attcaatatatagataaatgtgtacatattccctatctttactgagagcctagcaagccatggcattccagtagttttgagcacatttaatacccagttattggtttatatcatttttta

SEQ ID NO: 146597 - DNA, 120 bp, Artificial Sequence
  ENSG00000105136_28 (sequence is synthesized)
ataaaaggaaccagaactccttagagaagaggctgttttcaagttgtggcagaaaaggtacaacatgatttgaggaaatactgcattggaaaataaataaatgttcacagaataatgttg

SEQ ID NO: 146598 - DNA, 120 bp, Artificial Sequence
  ENSG00000105136_29 (sequence is synthesized)
aactttacacttctggcctctctgggacttgcatcttccaagacccatgaaataacccagctggagtcatgggaggagcccttcatgcctgcttgggaagttgtgacttcagccataccg

SEQ ID NO: 146599 - DNA, 120 bp, Artificial Sequence
  ENSG00000105136_30 (sequence is synthesized)
agggagaggtctgttcttcccaaagctgaactgtgggcactcattccttctccagtatcctgaagtagctattgtaataggcctgggctgtgtatactaccaccttctctccccaagctg

SEQ ID NO: 146600 - DNA, 120 bp, Artificial Sequence
  ENSG00000105136_31 (sequence is synthesized)
cctgagggaccccgctcaggtgagcgccgcgtcctcctggcctcccccgaatcctaaagccctgtgagggccgcctgctcaggtccccgggtgcagaactgtggggcgttcgtgcgcggc

SEQ ID NO: 146601 - DNA, 120 bp, Artificial Sequence
  ENSG00000105136_32 (sequence is synthesized)
gtcccgtttctgacacgcagtgtgatggggtggcaatggagggcaaggggcccggctcgcaaagatgtgaggcgcattcagcgagtcccgaacctgaggcctcctggtgtctgtagtggg

SEQ ID NO: 146602 - DNA, 120 bp, Artificial Sequence
  ENSG00000105136_33 (sequence is synthesized)
cagcttgggaagggacgaggcgcgtgtcgagcgacagcccgagcagctgcgctttcatcctgagggggccacagtggccgcggagggctggagacagaagagtgacaagatctgtttctc

SEQ ID NO: 146603 - DNA, 120 bp, Artificial Sequence
  ENSG00000105136_34 (sequence is synthesized)
aaagtttgccaaaggcccttcaagtcaaaacagactggggtgggggtgaggcgggtgaagacagacctgtgagtaggtaaattcagtagactagtggagagtctactgggactgggccac

SEQ ID NO: 146604 - DNA, 120 bp, Artificial Sequence
  ENSG00000105136_35 (sequence is synthesized)
agaggaggggaagtgatcagatcttggatggatatcaaaaactgaacagacaggaattcctgttgcatcagatgtgactgaaagaaagggaatgaagagccattctggatttttatttgt

SEQ ID NO: 146605 - DNA, 120 bp, Artificial Sequence
  ENSG00000105136_36 (sequence is synthesized)
atttttgtttgtttgttcctgaatatcaggaaggatggagatgggtaaggctgtgcagggagtaggttttggacatggtaatcctgagatgacccagagtggaggtgtcgtgtccacatg

SEQ ID NO: 146606 - DNA, 120 bp, Artificial Sequence
  ENSG00000105136_37 (sequence is synthesized)
ggcagcttgcccactcacatctggaagtttggggagggatctgggctggagatatggtagatatgggctggttgggtagaggcctggactagggtaagtcctggggctcctatttaggag

SEQ ID NO: 146607 - DNA, 120 bp, Artificial Sequence
  ENSG00000105136_38 (sequence is synthesized)
ggagaatcttaaggttccctttcagatgggccctaaggtgagagaagggagagatggccctgtaggacggggctgcctctatagcatggagttttgtggtcagaagtggttctgtctggt

SEQ ID NO: 146608 - DNA, 120 bp, Artificial Sequence
  ENSG00000105136_39 (sequence is synthesized)
gtctgccggaatggagggttatagagtatgaagacccaggactgcatggagactgcagtgttgagtagtatataggtttgccactccaggctcagcagttcctcatgtacagtccgtatg

SEQ ID NO: 146609 - DNA, 120 bp, Artificial Sequence
  ENSG00000105136_40 (sequence is synthesized)
gacaaaaggaaacgtcagccaggctgctggagcagcccctttggtgcctaagtttccctagccgtcagcacaggagggatgatcaactgctccagtagaagggctctcagcaggatggtc

SEQ ID NO: 146610 - DNA, 120 bp, Artificial Sequence
  ENSG00000105136_41 (sequence is synthesized)
ttcaggggagtatatagcaggcagccaggttgccaaaaggaatggtatgtgctcaggtttctcagacccaggtcccagtttattaacttgtgaatttatgaggtaagtatttaagcacta

SEQ ID NO: 146611 - DNA, 120 bp, Artificial Sequence
  ENSG00000105136_42 (sequence is synthesized)
attgatcatagttcatatacacacaggggcaaataaaacaacacggatttattaagttaaactgatgtaagcacttcataattggttgtaaagttagtatactggaaagtatttgattaa

SEQ ID NO: 146612 - DNA, 120 bp, Artificial Sequence
  ENSG00000105136_43 (sequence is synthesized)
gttgtaaagttagtatactggaaagtatttgattaaaataaagcaccttaagtatcacattcttaatttaaaagtaagtttaagaaacccatattttctttttctttctttctttctttt

SEQ ID NO: 146613 - DNA, 120 bp, Artificial Sequence
  ENSG00000105136_44 (sequence is synthesized)
caggtgtgagccactgcgcctagccagaaacccacattttgaaaacctaccagtttatttgcgctgaaaatgttgacagaagcattaattatgtgtacagtaagagttgatacttagtcc

SEQ ID NO: 146614 - DNA, 120 bp, Artificial Sequence
  ENSG00000105136_45 (sequence is synthesized)
tagacacataagaatgagtttgatacaaacaatcgtcctattgagtaaataccattattattgccatgttgcagatggcaacaccaaggcacagggaagttgagcacttttccaagggca

SEQ ID NO: 146615 - DNA, 120 bp, Artificial Sequence
  ENSG00000105136_46 (sequence is synthesized)
cacaacaggtaagaggcatcactaagaaccaaagcccagattgtagatagtcaggcacacctgactccaggctagacgagtgggcttggatgatcctttggcaacatcactgtctggttc

SEQ ID NO: 146616 - DNA, 120 bp, Artificial Sequence
  ENSG00000105136_47 (sequence is synthesized)
tcatagtcttgattttccataggttcctgtggctgcagacttgcttacagaccatgaggaggtaagtggaggatgtctcaggtcctcacactcctgcactcctacctacatggtcttcag

SEQ ID NO: 146617 - DNA, 120 bp, Artificial Sequence
  ENSG00000105136_48 (sequence is synthesized)
aattatggtgtcttgaggctccttgctggctattctccctacccttccatttgagttccctggaagatggtcacacacagtcagggccctgagtccagactatatattatttttattatt

SEQ ID NO: 146618 - DNA, 72 bp, Artificial Sequence
  ENSG00000105136_49 (sequence is synthesized)
tatatattatttttattattttcgcgatctcggctcactgcaacttctggctcctgggttcaagcaattctc

SEQ ID NO: 146619 - DNA, 70 bp, Artificial Sequence
  ENSG00000105136_50 (sequence is synthesized)
ggattacaggcatgcgccaccacaccagctaattttggatttttggtagagaggtttctccacgttggtt

SEQ ID NO: 146620 - DNA, 120 bp, Artificial Sequence
  ENSG00000105136_51 (sequence is synthesized)
caggcgtgagccaccgtgcccaacccagactatgtattctatggagaggttctcatttctggcaaccaatgacaggaggtttagaaggcatagtgatcaacattagaaaatacatggagg

SEQ ID NO: 146621 - DNA, 120 bp, Artificial Sequence
  ENSG00000105136_52 (sequence is synthesized)
aggttgagctgggaatgcttagacaacctcagatctccattatgtctgggggaagcatcagcgggtataaggccaacatgaagtgattggctgaggagctgagctgaggtgtcctgatat

SEQ ID NO: 146622 - DNA, 120 bp, Artificial Sequence
  ENSG00000105136_53 (sequence is synthesized)
gtgtgcaattccaagtagctaaagatgaagcaagaaaaagagccaaggagggaggccttcaaagtggggctgaggattggccctggcagtcagtgccattgggggtctgggatggcacgg

SEQ ID NO: 146623 - DNA, 120 bp, Artificial Sequence
  ENSG00000105136_54 (sequence is synthesized)
agttctgattgcatttggtaagtgccctctggatgccatgtgtagactggcatgtggtgacactaggggaagcacatgaggtgatgtagagggtagtggttgtggtacaaagtatgtgca

SEQ ID NO: 146624 - DNA, 120 bp, Artificial Sequence
  ENSG00000105136_55 (sequence is synthesized)
cattctaataagtgtaaacagatgtccccaggaccttgtactgggggcttcagggagaacactgacacaaatttgattgtatttgagaaacacagtctaggggatccaaggtaaattgtc

SEQ ID NO: 146625 - DNA, 120 bp, Artificial Sequence
  ENSG00000105136_56 (sequence is synthesized)
tggcaagagaagagtaggactctgcataccatgcccagagctgagatggactttatctgcctacctgcctattgttgctcagtgggagcatgaggagagagtgggcatcagtggctctgg

SEQ ID NO: 146626 - DNA, 120 bp, Artificial Sequence
  ENSG00000105136_57 (sequence is synthesized)
ggcagggtctctcctctgagatggggattaaggaagagggtgagcaggggtggatgtttaggcagatgcctaaatttcccagtaaggaggctgcagataaactctactctgtccatctta

SEQ ID NO: 146627 - DNA, 120 bp, Artificial Sequence
  ENSG00000105136_58 (sequence is synthesized)
ggtgtgaactcagggatggattcatatcataccagtaggcccagatattttgataccaaggcaaggggttgtcgctgatttctatcttttcttccttagtcacccatttatatctattct

SEQ ID NO: 146628 - DNA, 120 bp, Artificial Sequence
  ENSG00000105136_59 (sequence is synthesized)
gatgtttgacctagggccattccccacctctctgtcctccatgtttcacccagtcatcagcagaacccttcagcagtggctttcactgaatgtgtggtgaggtggatgcttatccttgca

SEQ ID NO: 146629 - DNA, 120 bp, Artificial Sequence
  ENSG00000105136_60 (sequence is synthesized)
gggtcaggagtcttgcagtcagcttgatggatcttatccctggtggcctctctgtggcctggtgacactgtgcagatctgtggtagttctattcccctacattctgcctgtctcctctag

SEQ ID NO: 146630 - DNA, 120 bp, Artificial Sequence
  ENSG00000105136_61 (sequence is synthesized)
ccaacatacctgggtgtcggtctgtgccagcaattgagtcaccaatgtgattgctgtttgactgtgttgttcctgcaagaccctcctccaaggttctttctgtactattttgttttcttt

SEQ ID NO: 146631 - DNA, 120 bp, Artificial Sequence
  ENSG00000105137_0 (sequence is synthesized)
gcgcactcggctcggcccggcccgggccgcagcatggccgagccgctactcaggaaaaccttctcccgcctgcggggccgggagaaacttccccggaaaaagtcggacgccaaggagcgc

SEQ ID NO: 146632 - DNA, 120 bp, Artificial Sequence
  ENSG00000105137_1 (sequence is synthesized)
ggccacccagcccagcgcccagagcccagccctccagagccagagccccaggctcccgaagggtcccaggccggagcagaggggccctccagccccgaggcatcaaggagccctgcacgg

SEQ ID NO: 146633 - DNA, 120 bp, Artificial Sequence
  ENSG00000105137_2 (sequence is synthesized)
ggagcctacctgcaaagcctggagcccagtagccgccgatgggtgctgggtggggccaagccagctgaggacacctctttagggcctggggtacctggcactggggagcccgccggcgag

SEQ ID NO: 146634 - DNA, 120 bp, Artificial Sequence
  ENSG00000105137_3 (sequence is synthesized)
atctggtacaaccccatccctgaggaagaccccagacctccagcacctgagcccccggggccacagcctggctcagctgagtcagagggcctggccccccaaggtgcagcccccgccagc

SEQ ID NO: 146635 - DNA, 120 bp, Artificial Sequence
  ENSG00000105137_4 (sequence is synthesized)
cccccaaccaaagcctcccgcaccaagtccccgggccccgccaggcgcctctccataaagatgaagaagctgccggaactgcggcgccgcctgagcctgcgaggcccccgggctggcagg

SEQ ID NO: 146636 - DNA, 120 bp, Artificial Sequence
  ENSG00000105137_5 (sequence is synthesized)
gagcgcgagagggctgcccctgcgggctccgtcatcagccgctaccacctggacagcagcgtggggggccccgggccggcagcagggcctgggggcacccggagcccgagggccggttac

SEQ ID NO: 146637 - DNA, 120 bp, Artificial Sequence
  ENSG00000105137_6 (sequence is synthesized)
ctcagcgacggggactcaccggagcgcccagctgggcccccatcacccacctccttccggccctacgaggtgggtcccgcagcccgggcacccccggccgcactctggggccgcctcagc

SEQ ID NO: 146638 - DNA, 120 bp, Artificial Sequence
  ENSG00000105137_7 (sequence is synthesized)
ctgcacctgtacggtctcggggggctgcggccagcgccgggggccacccccagggacctctgctgcctactgcaagtggatggggaggccagggcccgaacagggccactgcgagggggg

SEQ ID NO: 146639 - DNA, 120 bp, Artificial Sequence
  ENSG00000105137_8 (sequence is synthesized)
ccggacttcctgcggctggaccacaccttccacctggagctggaggccgccaggctcctgcgcgccctggtgcttgcgtgggaccctggcgtgagaaggcaccggccctgtgcccagggc

SEQ ID NO: 146640 - DNA, 120 bp, Artificial Sequence
  ENSG00000105137_9 (sequence is synthesized)
accgtgctgctgcccacggtcttccgagggtgccaggcccaacagctggccgtgcgcctggagcctcaggggctgctgtatgccaagctgaccctgtcggagcagcaggaagcccctgcc

SEQ ID NO: 146641 - DNA, 120 bp, Artificial Sequence
  ENSG00000105137_10 (sequence is synthesized)
acagctgagccccgcgtctttgggctgcccctgccactgctggtggagcgggagcggccccccggccaggtgcccctcatcatccagaagtgcgttgggcagatcgagcgccgagggctg

SEQ ID NO: 146642 - DNA, 120 bp, Artificial Sequence
  ENSG00000105137_11 (sequence is synthesized)
cgggtagtgggactgtaccgtctttgtggctcagcggcagtgaagaaagagcttcgggatgcctttgagcgggacagtgcagcggtctgcctatctgaggacctgtaccccgatatcaat

SEQ ID NO: 146643 - DNA, 120 bp, Artificial Sequence
  ENSG00000105137_12 (sequence is synthesized)
gtcatcactggcatcctcaaggattatcttcgagagttgcccaccccactcatcacccagcccctgtataaggtggtactggaggccatggcccgggaccccccaaacagagttcccccc

SEQ ID NO: 146644 - DNA, 120 bp, Artificial Sequence
  ENSG00000105137_13 (sequence is synthesized)
acccgagggctcctcagctgcctgccagatgtggaaagggccacgctgacgcttctcctggaccacctgcgcctcgtctcctccttccatgcctacaaccgcatgaccccacagaacttg

SEQ ID NO: 146645 - DNA, 120 bp, Artificial Sequence
  ENSG00000105137_14 (sequence is synthesized)
gccgtgtgcttcgggcctgtgctgctgccggcacgccaggcgcccacaaggcctcgtgcccgcagctccggcccaggccttgccagtgcagtggacttcaagcaccacatcgaggtgctg

SEQ ID NO: 146646 - DNA, 120 bp, Artificial Sequence
  ENSG00000105137_15 (sequence is synthesized)
cactacctgctgcagtcttggccagatccccgcctgccccgacaatctccagatgtcgcgccttacttgcgacccaaacgacagccacctctgcacctgccgctggcagaccccgaagtg

SEQ ID NO: 146647 - DNA, 120 bp, Artificial Sequence
  ENSG00000105137_16 (sequence is synthesized)
gtgactcggccccgcggtcgaggaggccccgaaagccccccgagcaaccgctacgccggcgactggagcgtttgcgggcgggacttcctgccctgtgggcgggatttcctgtccgggcca

SEQ ID NO: 146648 - DNA, 120 bp, Artificial Sequence
  ENSG00000105137_17 (sequence is synthesized)
gactacgaccacgtgacgggcagtgacagcgaggacgaggacgaggaggtcggcgagccgagggtcaccggtgacttcgaagacgacttcgatgcgcccttcaacccgcacctgaatctc

SEQ ID NO: 146649 - DNA, 120 bp, Artificial Sequence
  ENSG00000105137_18 (sequence is synthesized)
aaagacttcgacgccctcatcctggatctggagagagagctctccaagcaaatcaacgtgtgcctctgagccagatgacggggtgggaccccggttagtaaggaccgggcgcccagtggc

SEQ ID NO: 146650 - DNA, 120 bp, Artificial Sequence
  ENSG00000105137_19 (sequence is synthesized)
taaggcggtgccctggtgaccaaggagagccagacctgttgctcaggccgagctcctggttgccagcgagttaccacgggaccagtcgcgtgtatggctgagactcattcccagtttcca

SEQ ID NO: 146651 - DNA, 120 bp, Artificial Sequence
  ENSG00000105137_20 (sequence is synthesized)
gggcccggtatttggacactagttgccaagtctggggcctggggattttagggaccagcggttgtgaccatctttcctgagcaccaagggcttccccttttgttgccaaaaaggtagttc

SEQ ID NO: 146652 - DNA, 120 bp, Artificial Sequence
  ENSG00000105137_21 (sequence is synthesized)
tcgcgcttgctaggctggcctctcttgcctccccttggccggggcaacaccagttactgtgagcatcaccctggtgtggtgagtcacctctagtcggccctcttgctgctgccaaccaaa

SEQ ID NO: 146653 - DNA, 120 bp, Artificial Sequence
  ENSG00000105137_22 (sequence is synthesized)
tcagtattagctttgagcactgcactgtttctccctcccttggacgacacaaagactagcatgaggcactgtttgtggggggcagcccctatcctgggttccagcatggacacaggggta

SEQ ID NO: 146654 - DNA, 120 bp, Artificial Sequence
  ENSG00000105137_23 (sequence is synthesized)
gcctggggcttatagagaaacagctggtttcccctacccttttccggggaagtccccacgattggcctctagtcagcaaatggagataacagagtctggcctttccaatccccatctcct

SEQ ID NO: 146655 - DNA, 120 bp, Artificial Sequence
  ENSG00000105137_24 (sequence is synthesized)
tgccccccccttgcccccccccccgaaaaaaattgagcacttaaacccctcccttttggagggggccccctgaagcgtcaggctgggggcagtctggtacggaacatatttattgcctcc

SEQ ID NO: 146656 - DNA, 120 bp, Artificial Sequence
  ENSG00000105137_25 (sequence is synthesized)
atgcatgtgtgtgtgtgtctgtgaggactggtgtgcgtggacacgtctgaagcaggcgtgtggggctctttcagggaccacagaggagggagcagtttgcagtgcccagccaccctgaaa

SEQ ID NO: 146657 - DNA, 120 bp, Artificial Sequence
  ENSG00000105137_26 (sequence is synthesized)
tccccaataatggtgcctcagtgggccccagagttccagtgggagagtacggttccctcctgtctccctcttcttttccgcacctccatctttgtggataataaataaatatgcacaggt

SEQ ID NO: 146658 - DNA, 120 bp, Artificial Sequence
  ENSG00000105137_27 (sequence is synthesized)
actcggctcggcccggcccgggccgcagcatggccgagccgctactcaggaaaaccttctcccgcctgcggggccgggagaaacttccccggaaaaagtcggacgccaaggagcgcgggc

SEQ ID NO: 146659 - DNA, 120 bp, Artificial Sequence
  ENSG00000105137_28 (sequence is synthesized)
ttttgggatgccagggactgagtagggggtgctctaagctgataactgagatcgctagcctgtggctgcctattccaaacaaaacagcaggatccaaggaaccatgacttatcaggggcc

SEQ ID NO: 146660 - DNA, 120 bp, Artificial Sequence
  ENSG00000105137_29 (sequence is synthesized)
agcaccagctccacatcccttcccttcagggtagcaccagcctcacactccctcctcccagaggagcaccaacctcacactccttcccttcaggggagcaccagcctcacatccccaccc

SEQ ID NO: 146661 - DNA, 120 bp, Artificial Sequence
  ENSG00000105137_30 (sequence is synthesized)
cgtcagatgctcccagaggagcatcagcctcacaccctcctccccgccaggggaacaccagcctcacactccttcccttcaggggagcaccagcctcacccccctcccctaagcccaggt

SEQ ID NO: 146662 - DNA, 120 bp, Artificial Sequence
  ENSG00000105137_31 (sequence is synthesized)
ccccaccgccaccccccgcagagtgcctagggggctgggctccgggcggaaggtgtggcctggagcagcgaggccagggtacatgaagcttcagagcacacccggctcaggcccccttgt

SEQ ID NO: 146663 - DNA, 120 bp, Artificial Sequence
  ENSG00000105141_0 (sequence is synthesized)
atagaccaggcttctcaggagaaaccccgggagattccacactgtcagccccttctccaagatcagtacgtgggcctgactcctcctcggtgcccagctcagtattggcaactaggagag

SEQ ID NO: 146664 - DNA, 120 bp, Artificial Sequence
  ENSG00000105141_1 (sequence is synthesized)
tagtgagattgaacttggccttgaggaacagctgcctctagagttggatcagacaagggtgctgagagccgggactcacaaccaaaggagaaatgagcaatccgcggtctttggaagagg

SEQ ID NO: 146665 - DNA, 120 bp, Artificial Sequence
  ENSG00000105141_2 (sequence is synthesized)
agaaatatgatatgtcaggtgcccgcctggccctaatactgtgtgtcaccaaagcccgggaaggttccgaagaagacctggatgctctggaacacatgtttcggcagctgagattcgaaa

SEQ ID NO: 146666 - DNA, 120 bp, Artificial Sequence
  ENSG00000105141_3 (sequence is synthesized)
gcaccatgaaaagagaccccactgccgagcaattccaggaagagctggaaaaattccagcaggccatcgattcccgggaagatcccgtcagttgtgccttcgtggtactcatggctcacg

SEQ ID NO: 146667 - DNA, 120 bp, Artificial Sequence
  ENSG00000105141_4 (sequence is synthesized)
ggagggaaggcttcctcaagggagaagatggggagatggtcaagctggagaatctcttcgaggccctgaacaacaagaactgccaggccctgcgagctaagcccaaggtgtacatcatac

SEQ ID NO: 146668 - DNA, 120 bp, Artificial Sequence
  ENSG00000105141_5 (sequence is synthesized)
aggcctgtcgaggagaacaaagggaccccggtgaaacagtaggtggagatgagattgtgatggtcatcaaagacagcccacaaaccatcccaacatacacagatgccttgcacgtttatt

SEQ ID NO: 146669 - DNA, 120 bp, Artificial Sequence
  ENSG00000105141_6 (sequence is synthesized)
ccacggtagagggatacatcgcctaccgacatgatcagaaaggctcatgctttatccagaccctggtggatgtgttcacgaagaggaaaggacatatcttggaacttctgacagaggtga

SEQ ID NO: 146670 - DNA, 120 bp, Artificial Sequence
  ENSG00000105141_7 (sequence is synthesized)
cccggcggatggcagaagcagagctggttcaagaaggaaaagcaaggaaaacgaaccctgaaatccaaagcaccctccggaaacggctgtatctgcagtagaagtagaaagaccaggagg

SEQ ID NO: 146671 - DNA, 120 bp, Artificial Sequence
  ENSG00000105141_8 (sequence is synthesized)
agctttccttccagcattctttctgtctcacagaaatttagaggcagctcttacctctccccaagatcttctgttcccaaggccaaatggcacccagtttcttttccatcacacccttca

SEQ ID NO: 146672 - DNA, 120 bp, Artificial Sequence
  ENSG00000105141_9 (sequence is synthesized)
tgcaggtcctcctgtccttattagagcaagccagccaaaacttagcacaaggcatggtggcaacattaacatcacctccctcaggctggactttctatctttattaatgcaaccgaagag

SEQ ID NO: 146673 - DNA, 120 bp, Artificial Sequence
  ENSG00000105141_10 (sequence is synthesized)
acctaagagtgcattcacttatcccactttctgttcctgtggtcttctttctcccatgaagcagaaactggataaagctcaagattttccatagacaaaccaaagcccactcatcccctc

SEQ ID NO: 146674 - DNA, 120 bp, Artificial Sequence
  ENSG00000105141_11 (sequence is synthesized)
ctaccccaatccaacctctgctggctcctgcatctcacttggaggtcaaacctcctcctgaggccaatgcattcccaacttccagttctttcctttaccctggagagttagtaaggtaag

SEQ ID NO: 146675 - DNA, 120 bp, Artificial Sequence
  ENSG00000105141_12 (sequence is synthesized)
aaccattctttctctccaaaaccactcctccttggctggcaagttggtgtcctaactccgttctcttcctagctcatggcctctctagataataaagttgtctcctcctttctggatctc

SEQ ID NO: 146676 - DNA, 120 bp, Artificial Sequence
  ENSG00000105141_13 (sequence is synthesized)
accctggactctgccctctctccaagaaaatccatctattcaactattcttgcattcaattactctaaatgagagcgtgttggagctatggcaaattccctgttgtcaccttgctatttt

SEQ ID NO: 146677 - DNA, 120 bp, Artificial Sequence
  ENSG00000105141_14 (sequence is synthesized)
gcagacaacataatatttaacctctcataaccagagaggttaaataatttgtcaaatgcaatacagtaagacagaggcaaggacaaggtttgacttccagcccagcctcttttccacaac

SEQ ID NO: 146678 - DNA, 120 bp, Artificial Sequence
  ENSG00000105141_15 (sequence is synthesized)
ctgctaaatcctgatccatctgaaaacttttctaattagtgaagatgactaataaaaattttccctatctccaaggtaggagctttctggaagtttctagaaattttcaataaccaccag

SEQ ID NO: 146679 - DNA, 120 bp, Artificial Sequence
  ENSG00000105141_16 (sequence is synthesized)
ccaaggttacctccaggtaaccttgcagcaccaggctggaagtcagatcggcttcactatcttccaactctacagcctgtatctctccatccccagctttgacctttcctgctcaagtaa

SEQ ID NO: 146680 - DNA, 120 bp, Artificial Sequence
  ENSG00000105141_17 (sequence is synthesized)
cctacgggcacatccagcgtcactaaaaactcagggcttttcttcccggttactcctccaagcgttccctggtatcctcaacctcagatcccaggttcagatttctgcagtcaatctatg

SEQ ID NO: 146681 - DNA, 120 bp, Artificial Sequence
  ENSG00000105141_18 (sequence is synthesized)
acccctctcttcttgcatccttcatatgccaccagacaccatgcccagtccagcctgattttgaaacaactttcatgccggtcttctcttccctgacatgttactgtccaggctcaagtc

SEQ ID NO: 146682 - DNA, 120 bp, Artificial Sequence
  ENSG00000105141_19 (sequence is synthesized)
ctcagcttctcatatctgcatctttgcaaccaacttcctcccttgcctctctgcttttccatcccacttttcatgtgtcctccataccatctataacagtgatctccctggaacactcaa

SEQ ID NO: 146683 - DNA, 120 bp, Artificial Sequence
  ENSG00000105141_20 (sequence is synthesized)
gaagacacaacataccatattatttaaagaccagggtactggacagtggctcacacctgtattcccgactttgagagtctgaagcgggaggatcacttgaggccaggagttaagagacca

SEQ ID NO: 146684 - DNA, 120 bp, Artificial Sequence
  ENSG00000105141_21 (sequence is synthesized)
ggagtttgaggctgcaaggagctatgatcatgccagtgcatcccagctctaggtgagacagtgagatccggtctccaaaataaatcaatcaatcaaataaagaccaaagtcaaaccgcac

SEQ ID NO: 146685 - DNA, 120 bp, Artificial Sequence
  ENSG00000105141_22 (sequence is synthesized)
atcaggatctctcacacccttccaattttgccatctaccagcacttagctaaacccatctcccatctcttccaccatgaattcactctttcaaaaaggctaatgtcttcttactcaccct

SEQ ID NO: 146686 - DNA, 120 bp, Artificial Sequence
  ENSG00000105141_23 (sequence is synthesized)
tgcctctaagcctttgctatcaccatttcccccaagctggagggccctccctctccctttacccctcttccactacctcccacccctactttttccagaaagccatttcctctctttttt

SEQ ID NO: 146687 - DNA, 120 bp, Artificial Sequence
  ENSG00000105141_24 (sequence is synthesized)
ctgattgatccttccctctcacccaggattagatgctggaaatgaccacttctggagggcagggaacaagcccttaatctgcataatgagtgttcaataaacagttgtcaaactttgaaa

SEQ ID NO: 146688 - DNA, 88 bp, Artificial Sequence
  ENSG00000105141_25 (sequence is synthesized)
ggtgtgagccaccgtgcccagcccttacctttctttttaagaggcgacatctcgctctgtctcccaggctagagtgtgctcccaggtt

SEQ ID NO: 146689 - DNA, 120 bp, Artificial Sequence
  ENSG00000105141_26 (sequence is synthesized)
ctcaagctcccaggttcaagtgatcctcctgcttcagccccccaaaacactgggaatacaggtgtgagccaccctgcccagcccctttccttacctttctctctgactttgcctcctcct

SEQ ID NO: 146690 - DNA, 120 bp, Artificial Sequence
  ENSG00000105143_0 (sequence is synthesized)
gatagaccatgagcagccatggcaacagcctgttcctgcgggagagcggccagcggctgggccgggtgggctggctgcagcggctgcaggaaagcctgcagcagagagcactgcgcacgc

SEQ ID NO: 146691 - DNA, 120 bp, Artificial Sequence
  ENSG00000105143_1 (sequence is synthesized)
gcctgcgcctgcagaccatgaccctcgagcacgtgctgcgcttcctgcgccgaaacgccttcattctgctgacggtcagcgccgtggtcattggggtcagcctggcctttgccctgcgcc

SEQ ID NO: 146692 - DNA, 120 bp, Artificial Sequence
  ENSG00000105143_2 (sequence is synthesized)
catatcagctcacctaccgccagatcaagtacttctcttttcctggagagcttctgatgaggatgctgcagatgctggtgttacctctcattgtctccagcctggtcacaggtatggcat

SEQ ID NO: 146693 - DNA, 120 bp, Artificial Sequence
  ENSG00000105143_3 (sequence is synthesized)
ccctggacaacaaggccacggggcggatggggatgcgggcagctgtgtactacatggtgaccaccatcatcgcggtcttcatcggcatcctcatggtcaccatcatccatcccgggaagg

SEQ ID NO: 146694 - DNA, 120 bp, Artificial Sequence
  ENSG00000105143_4 (sequence is synthesized)
gctccaaggaggggctgcaccgggagggccggatcgagaccatccccacagctgatgccttcatggacctgatcagaaatatgtttccaccaaaccttgtggaggcctgcttcaaacagt

SEQ ID NO: 146695 - DNA, 120 bp, Artificial Sequence
  ENSG00000105143_5 (sequence is synthesized)
tcaagacgcagtacagcacgagggtggtaaccaggaccatggtgaggacagagaacgggtctgagccgggtgcctccatgcctcctccattctcagtggagaacggaaccagcttcctgg

SEQ ID NO: 146696 - DNA, 120 bp, Artificial Sequence
  ENSG00000105143_6 (sequence is synthesized)
aaaatgtcactcgggccttgggtaccctgcaggagatgctgagctttgaggagactgtacccgtgcctggctccgccaatggcatcaacgccctgggcctcgtggtcttctctgtggcct

SEQ ID NO: 146697 - DNA, 120 bp, Artificial Sequence
  ENSG00000105143_7 (sequence is synthesized)
tcctcagggacttcttcgacagcctcaatgaggctattatgaggctggtgggcatcattatctggtatgcacctgtgggcatcctgttcctgattgctgggaagattctggagatggaag

SEQ ID NO: 146698 - DNA, 120 bp, Artificial Sequence
  ENSG00000105143_8 (sequence is synthesized)
acatggccgtcctggggggtcagctgggcatgtacaccctgaccgtcatcgtgggcctgttcctccatgccggcattgtccttcccctcatctacttcctcgtcactcaccggaacccct

SEQ ID NO: 146699 - DNA, 120 bp, Artificial Sequence
  ENSG00000105143_9 (sequence is synthesized)
tccccttcattgggggcatgctacaagccctcatcaccgctatgggcacgtcttccagctcggcaacgctgcccatcaccttccgctgcctggaggagggcctgggtgtggaccgccgca

SEQ ID NO: 146700 - DNA, 120 bp, Artificial Sequence
  ENSG00000105143_10 (sequence is synthesized)
tcaccaggttcgtcctgcccgtgggcgccacggtcaacatggatggcactgccctctacgaggccctggctgccatcttcattgctcaagttaacaactacgagctcaacctgggtcaga

SEQ ID NO: 146701 - DNA, 120 bp, Artificial Sequence
  ENSG00000105143_11 (sequence is synthesized)
tcacaaccatcagcatcacggccacagcagccagtgttggggctgctggcatcccccaggcgggtctggtcaccatggtcattgtgcttacgtcggtcggcttgcccacggaagacatca

SEQ ID NO: 146702 - DNA, 120 bp, Artificial Sequence
  ENSG00000105143_12 (sequence is synthesized)
cgctcatcattgccgtggactggttccttgaccggcttcgcacaatgaccaacgtactgggggactcaattggagcggccgtcatcgagcacttgtctcagcgggagctggagcttcagg

SEQ ID NO: 146703 - DNA, 120 bp, Artificial Sequence
  ENSG00000105143_13 (sequence is synthesized)
aagctgagcttaccctccccagcctggggaaaccctacaagtccctcatggcacaggagaagggggcatcccggggacggggaggcaacgagagtgctatgtgaggggcctccagctctg

SEQ ID NO: 146704 - DNA, 80 bp, Artificial Sequence
  ENSG00000105143_14 (sequence is synthesized)
gcatagcgcgtcccggctccgcgccggtgcctccacggtccggtccccgcgccggtgctgcacagtccctggcgggtccc

SEQ ID NO: 146705 - DNA, 120 bp, Artificial Sequence
  ENSG00000105143_15 (sequence is synthesized)
catccgggcgcagcgcgcaggccgaggcgcgggcaggccgcccccgccgctccggacgccgggatgtaagaggctccgagaagcagcccacacatctcatcagatctaagtgtctagagg

SEQ ID NO: 146706 - DNA, 120 bp, Artificial Sequence
  ENSG00000105143_16 (sequence is synthesized)
tcgggagaaccaagtgggaaagacccaccctcacccctcaccctgtagaaactgggaacactagaagggacattttctgagcaggaaacccaagagacagggttttacgctgtcacccaa

SEQ ID NO: 146707 - DNA, 120 bp, Artificial Sequence
  ENSG00000105143_17 (sequence is synthesized)
agctcattgcagcctcaaactcctgggttcaagcgatcctcctgctttagcctcttgagtggctaggactacaggcacaggccaccgtgcctggctaatttttaatttttaaaaaagaga

SEQ ID NO: 146708 - DNA, 120 bp, Artificial Sequence
  ENSG00000105143_18 (sequence is synthesized)
aatttttaatttttaaaaaagagacagggtctggctatgttgcccaggctggccatgaactcctgggctcaagcggttctccagccttcacctcccaaagtgttgggattgcaggcatga

SEQ ID NO: 146709 - DNA, 120 bp, Artificial Sequence
  ENSG00000105143_19 (sequence is synthesized)
gccactgcgtctggcccacagatgctaagtgctgtctgctcttctccaggggtcagcaaattttttcagcaaatggcccaagagtaaacattttgagctttgtggcccgtacaatctctg

SEQ ID NO: 146710 - DNA, 120 bp, Artificial Sequence
  ENSG00000105143_20 (sequence is synthesized)
tcccaacaactcaactcaggcattgtagcttgaaagcagctgtagacaataggtaatgcatgagtgtggctgtgtgccaataaaactttatttacaaaaacaagcagtaggctgaatttg

SEQ ID NO: 146711 - DNA, 120 bp, Artificial Sequence
  ENSG00000105143_21 (sequence is synthesized)
actagcagaccatagtttgtcaataccgtattatgtcttgtaaggaagagaaaggaaccggacaaaactctagcctcgggagttttcctgactgttcagatcttagctgaatgatctccc

SEQ ID NO: 146712 - DNA, 120 bp, Artificial Sequence
  ENSG00000105143_22 (sequence is synthesized)
ttggtatctacaggcaacttcctgctgtggcttagggactggaaacataatatcccagagggattccctgtgtagtctgtggttcactctttgggattttttttttttttttttttcaca

SEQ ID NO: 146713 - DNA, 120 bp, Artificial Sequence
  ENSG00000105143_23 (sequence is synthesized)
gcaaggagaagcagcattgtggtttcaggagatgggtccatttggagcaggatcctaagtggggcttggcattgggaatttggattagctctagaggacgcaggatctggaaaatcaggg

SEQ ID NO: 146714 - DNA, 120 bp, Artificial Sequence
  ENSG00000105143_24 (sequence is synthesized)
cagatttcccatcccttggatatggtggggagttgaggagggcaaggaagatcccagaaaagccagtggcagcaaaacacaaaggccagggacctacgtactggtaaaactgagacctcc

SEQ ID NO: 146715 - DNA, 120 bp, Artificial Sequence
  ENSG00000105143_25 (sequence is synthesized)
ttatgaggctggtgggcatcattatctggtgagtcctggtctgtgcccacgggatggtggagccagagctgggaagtcaggctgtggggaagctgccgaagggcttgctggggacttttg

SEQ ID NO: 146716 - DNA, 120 bp, Artificial Sequence
  ENSG00000105143_26 (sequence is synthesized)
gtcattcatttacgtattgggtgattcacttacccactcaccaactcattcattcatgtctttctgggatgatttcatcactagttgacttccttgttcatctgttcattcattcattct

SEQ ID NO: 146717 - DNA, 120 bp, Artificial Sequence
  ENSG00000105143_27 (sequence is synthesized)
tctatgcattggttagttcatggaatatctcactctttcattcattcatgtccttctgcaatgattcattcactgctttgttcatctgttcattcactcattcttctatgcattgatgaa

SEQ ID NO: 146718 - DNA, 120 bp, Artificial Sequence
  ENSG00000105143_28 (sequence is synthesized)
atcactcattcagtgatttattcatctatactcatgcttcaatgcattgatttactcatttcctcatgcatttattcattcatctatgcattggttaaatcactggccaactcactaact

SEQ ID NO: 146719 - DNA, 120 bp, Artificial Sequence
  ENSG00000105143_29 (sequence is synthesized)
cattcattcattcacacttttctgcaatgatttgttcacttgttcactcccttgcttatctgttcattcactcattcttcaatacattgaccaagccattcactgacatttattcagcta

SEQ ID NO: 146720 - DNA, 120 bp, Artificial Sequence
  ENSG00000105143_30 (sequence is synthesized)
catttattctttcatgcattggtttctggatttatttggtcattcatttatttattttgcaaaattaatgtatttttaattgacaaataaaaactgtatatattttcatgtgcaacataa

SEQ ID NO: 146721 - DNA, 120 bp, Artificial Sequence
  ENSG00000105143_31 (sequence is synthesized)
ccccgccgctccggacgccggtgagtggggactccgcggctcggcgcggggactcggtgtggctgcggcgcggaggttgcgggcaggtgggggatccgaggcgctggggtcaggcgtgtg

SEQ ID NO: 146722 - DNA, 120 bp, Artificial Sequence
  ENSG00000105143_32 (sequence is synthesized)
gaggcgctggggtcaggcgtgtggggcgctccctgcgcccacgtccccacttctccgccgccctttgtctctgagctcctgcttgccccttagagccgttgccaccgcttttctcctggt

SEQ ID NO: 146723 - DNA, 120 bp, Artificial Sequence
  ENSG00000105143_33 (sequence is synthesized)
cgttctgatagaccatgagcagccatggcaacagcctgttcctgcgggagagcggccagcggctgggccgggtgggctggctgcagcggctgcaggaaagcctgcagcagagagcactgc

SEQ ID NO: 146724 - DNA, 120 bp, Artificial Sequence
  ENSG00000105143_34 (sequence is synthesized)
gctttggaacttggcctaagtgcactggcatcctgactccttgagaaagagcccatctagcatccttctcgccgttgcttccagcaacatggcccttcttccagctttaggatgtcctaa

SEQ ID NO: 146725 - DNA, 120 bp, Artificial Sequence
  ENSG00000105143_35 (sequence is synthesized)
ctggggaggggagtcctggtgacacatctgttgcccaactgaccgtgggctgaacacacgttctgcttgactcatttaggggggagggaaaagtgaaataaaggagcaggaatgaaaggt

SEQ ID NO: 146726 - DNA, 120 bp, Artificial Sequence
  ENSG00000105143_36 (sequence is synthesized)
aatatagaataaatgatcattaaccatagtccctctacggtgctgcagaacaccagaactcattctttctatctagctgtagttttgtatctgttaaccaacctctccccatcctctcct

SEQ ID NO: 146727 - DNA, 120 bp, Artificial Sequence
  ENSG00000105143_37 (sequence is synthesized)
cccgcctacccttcccagcctctaatacaattctactatttccctgatgttttcatctctttcaaaatcagaagacagaaacaagcatttaggtgaaagaatgttataatgtagaatatt

SEQ ID NO: 146728 - DNA, 120 bp, Artificial Sequence
  ENSG00000105143_38 (sequence is synthesized)
gcatttaggtgaaagaatgttataatgtagaatattaacatattcattttaatttttaatttttttagggtgggtgcggtgtctcatgcctacaatcccagcacttttggaggctgaggt

SEQ ID NO: 146729 - DNA, 120 bp, Artificial Sequence
  ENSG00000105143_39 (sequence is synthesized)
ttggaggctgcagtgagctgcactcctgcctggttgacagagcgacattctgtctcaggtcttgaactcctgggctcaggtgatcctccccactcagccacccaagtagctgggattaca

SEQ ID NO: 146730 - DNA, 120 bp, Artificial Sequence
  ENSG00000105143_40 (sequence is synthesized)
agcagctggctcaatttttaaaattgaggggaattcacataacacaaaagcaaccatttgaaaacatataattcaatagcatctagtattttcattatgttgtgcaataattgtcacctc

SEQ ID NO: 146731 - DNA, 120 bp, Artificial Sequence
  ENSG00000105143_41 (sequence is synthesized)
tatctcgttctgaaataacatatttttctttatatgaatgcagttgtgaaatagaattttaatgtaggcttttttttaatgaaggaaggggtgcacaaagagaaaagttcctcaggccca

SEQ ID NO: 146732 - DNA, 120 bp, Artificial Sequence
  ENSG00000105143_42 (sequence is synthesized)
tgaaaatcacaatttctgagccgccctgtacacgtgaggtgtttagttggtagacagatgggcaagttttaatttttatatgcattttatttaatgttgatgaaaaatataattcacatt

SEQ ID NO: 146733 - DNA, 120 bp, Artificial Sequence
  ENSG00000105143_43 (sequence is synthesized)
ttgatgaaaaatataattcacatttcaagtaggggtctaaagtttccattttagatacatttttaattttaattttaaaagtatttatttatttttattttgagacagagtctcactctg

SEQ ID NO: 146734 - DNA, 120 bp, Artificial Sequence
  ENSG00000105143_44 (sequence is synthesized)
ggtactgttttttaggtaagtgaataaggacacatggatatggccaaatataaagaggagacgcaaaagcctgcagtttgggaaacatcagtacagtgcctgccaccccagaggggctca

SEQ ID NO: 146735 - DNA, 120 bp, Artificial Sequence
  ENSG00000105143_45 (sequence is synthesized)
tgaacatcacactgtggccaagaatcattatcatttcattcccaagggactccccgctctcctgactccccgctctccctgttgctcacctgggcattcaggcagaatagctgcatttac

SEQ ID NO: 146736 - DNA, 120 bp, Artificial Sequence
  ENSG00000105143_46 (sequence is synthesized)
tgggcacctgctgtttgccaggcacctgctgattttgtccttgtgaaaagcctccaggctggacacaaaaccgtcctaatttgggggactagcctccgggtgctttgtctagggctccgt

SEQ ID NO: 146737 - DNA, 120 bp, Artificial Sequence
  ENSG00000105143_47 (sequence is synthesized)
ttgttaatttcccttgagccactggggcagcccccagaggcttgtgatgatctcagtgaaataagagtgggctggagtcagggtgtgtcaaaaaggtccattatttttgtggtttcctcc

SEQ ID NO: 146738 - DNA, 120 bp, Artificial Sequence
  ENSG00000105143_48 (sequence is synthesized)
tcttcccagccattctcaggaatgattctggagacttgacgttttcctgccaagacctgtccttagaaccgggcacatcgcaacagacttaccttccccctcccctgccattttgttttt

SEQ ID NO: 146739 - DNA, 86 bp, Artificial Sequence
  ENSG00000105143_49 (sequence is synthesized)
caacagacttaccttccccctcccctgccattttgtttttagttatatttttatttacttgttgttcttagagacagggctggtca

SEQ ID NO: 146740 - DNA, 120 bp, Artificial Sequence
  ENSG00000105143_50 (sequence is synthesized)
attacaggtgtgggccactgcgcctggcctttgtgcttttttggaggggtggaggtctcactatcttgctcaggctgggaagatcatagatcactgtaaccttgaactcttgggctcaag

SEQ ID NO: 146741 - DNA, 82 bp, Artificial Sequence
  ENSG00000105143_51 (sequence is synthesized)
tgatcctcctgcctcagcctcccaaatatttaggactaccacccctagctgcccaggccagtcttgaactcctgggcgcaag

SEQ ID NO: 146742 - DNA, 120 bp, Artificial Sequence
  ENSG00000105143_52 (sequence is synthesized)
gtgctgggattacaggcgtgagccaaaacacccagccacccccgccttctgagagtcctcaggaagcgctcattacccttcgcagccttcgccatctgcccacgccggccttctgtcctg

SEQ ID NO: 146743 - DNA, 120 bp, Artificial Sequence
  ENSG00000105143_53 (sequence is synthesized)
tccaagggcaagaggcgggaggaagggcctgacagagcaatgggcaggggttcttgaggagtctaggagaaaggatgtattttccatggtgatctgggggggttagggagaagcacttag

SEQ ID NO: 146744 - DNA, 70 bp, Artificial Sequence
  ENSG00000105143_54 (sequence is synthesized)
tttccatggtgatctgggggggttagggagaagcacttaggtccgagaatggtggatcaggctaaagttc

SEQ ID NO: 146745 - DNA, 120 bp, Artificial Sequence
  ENSG00000105143_55 (sequence is synthesized)
cttcgcgctggcacggagcatttccagcctcacgcgctttaattttctcagctttaattttctgtggggtcggccaagccatcttccttgtttagcggaggaagccaggctcagagaggg

SEQ ID NO: 146746 - DNA, 120 bp, Artificial Sequence
  ENSG00000105143_56 (sequence is synthesized)
agaggagttggcccaagggcacacagcagccaagtggccaaggccggaaggtgcacccgcaaggagaagggggcagcggagccctctccctggctgttgttactgggacactagagccgc

SEQ ID NO: 146747 - DNA, 120 bp, Artificial Sequence
  ENSG00000105143_57 (sequence is synthesized)
gccttccccaggcctccgccgaggctgctggagcgggtcccgcggtgccagggcctgttccccgcgctccgccagggatgctggggcctccgagggctccggaggcggtttagggggcgg

SEQ ID NO: 146748 - DNA, 120 bp, Artificial Sequence
  ENSG00000105143_58 (sequence is synthesized)
gggcgcggaggcgcggctccgagcagggggcgggggctggatgccggagaggccactcacccccgcccacccccagtccccctcccttcgcaagcacgctgtcccccttctcccacacgg

SEQ ID NO: 146749 - DNA, 120 bp, Artificial Sequence
  ENSG00000105143_59 (sequence is synthesized)
cctcccttcgcaagcacgctgtcccccttctcccacacggctgcggagcctgggctgggcgcgggggaggcggagggcatcgcggaggggatcccgccccctcccccggccgctcggtgc

SEQ ID NO: 146750 - DNA, 120 bp, Artificial Sequence
  ENSG00000105146_0 (sequence is synthesized)
gagcggttggtgccgggtataaaagaaggccgcgcagccacggctgctcacgacgccgcggatcccgaagcctgtgtagcagtgagacatcagtgaggctgcaggacgagcaggattgga

SEQ ID NO: 146751 - DNA, 120 bp, Artificial Sequence
  ENSG00000105146_1 (sequence is synthesized)
agcgccccggccagaaagtgaccccccacccctttcaggaccctgtgaacgggaacagccatccagagggttcaggaaggcgtccgcgccctcacctcttctccccatgagctcccccag

SEQ ID NO: 146752 - DNA, 120 bp, Artificial Sequence
  ENSG00000105146_2 (sequence is synthesized)
agctgtggtgcagctgggcaaagctcaacctgcaggcgaagagttggctacagcaaaccaaacagcccagcagcccagcagcccagccatgcggcgcctcacagtcgatgactttgaaat

SEQ ID NO: 146753 - DNA, 120 bp, Artificial Sequence
  ENSG00000105146_3 (sequence is synthesized)
cgggcgtcccctgggcaaggggaaatttgggaatgtgtacctggctcggctcaaggaaagccatttcattgtggccctgaaggttctcttcaagtcgcagatagagaaggaaggactgga

SEQ ID NO: 146754 - DNA, 120 bp, Artificial Sequence
  ENSG00000105146_4 (sequence is synthesized)
gcaccagctgcgccgggaaattgagatccaggctcatctacaacaccccaatatcctgcgcctgtataactatttccatgatgcacgccgggtgtacctgattctggaatatgctccaag

SEQ ID NO: 146755 - DNA, 120 bp, Artificial Sequence
  ENSG00000105146_5 (sequence is synthesized)
gacctactgccatgacaagaaagtgattcacagagatattaagccagagaacctgctgctggggttcaggggtgaggtgaagattgcagattttggctggtctgtgcacaccccctccct

SEQ ID NO: 146756 - DNA, 120 bp, Artificial Sequence
  ENSG00000105146_6 (sequence is synthesized)
gaggaggaagacaatgtgtgggacactggactacttgccgccagaaatgattgaggggagaacatatgatgaaaaggtggatttgtggtgcattggagtgctctgctatgagctgctggt

SEQ ID NO: 146757 - DNA, 120 bp, Artificial Sequence
  ENSG00000105146_7 (sequence is synthesized)
gggatatccaccctttgagagcgcctcccacagtgagacttacagacgcatcctcaaggtagatgtgaggtttccactatcaatgcctctgggggcccgggacttgatttccaggcttct

SEQ ID NO: 146758 - DNA, 120 bp, Artificial Sequence
  ENSG00000105146_8 (sequence is synthesized)
cagataccagcccttggagagactgcccctggcccagatcctgaagcacccctgggttcaggcccactcccgaagggtgctgcctccctgtgctcagatggcttcctgagccctgtctgc

SEQ ID NO: 146759 - DNA, 120 bp, Artificial Sequence
  ENSG00000105146_9 (sequence is synthesized)
ctctgttccctttgtgtgtgttcagggagctctcctggctctgccacctcatttgtctttatttttttctcttttaagatgtaagatgctaattaataaaagctgaatcatttcatacca

SEQ ID NO: 146760 - DNA, 120 bp, Artificial Sequence
  ENSG00000105146_10 (sequence is synthesized)
ggaagtacctctctgagcggttggtgccgggtataaaagaaggccgcgcagccacggctgctcacgacgccgcggatcccgaagcctgtgtagcagtgagacatcatggctacagcaaac

SEQ ID NO: 146761 - DNA, 120 bp, Artificial Sequence
  ENSG00000105146_11 (sequence is synthesized)
cacaacggccatcaccacctctccgcaccctctgtctccttccttctcgggcctcacccctggccctcgctttcagtgcccagcccggaccgcagcactccagttccgccccaacccggg

SEQ ID NO: 146762 - DNA, 120 bp, Artificial Sequence
  ENSG00000105146_12 (sequence is synthesized)
aaccctggactgaggctcccgtttctgtcctttctattgggcgcacttccgatggcgtcaggaatttcagccaataggagccagccaggaagtacctctctgagcggttggtgccgggta

SEQ ID NO: 146763 - DNA, 120 bp, Artificial Sequence
  ENSG00000105146_13 (sequence is synthesized)
taaaagaaggccgcgcagccacggctgctcacgacgccgcggatcccgaagcctgtgtagcagtgagacatcagtgaggtggctacagcaaaccaaacagcccagcagcccagcagccca

SEQ ID NO: 146764 - DNA, 120 bp, Artificial Sequence
  ENSG00000105146_14 (sequence is synthesized)
cccttcttcccctcacctctcgctccctattcccttctctactgttctcctctcctctctttctctccccttctccttccctcccctctcccttcctatctccctcctcctcctctcttt

SEQ ID NO: 146765 - DNA, 120 bp, Artificial Sequence
  ENSG00000105146_15 (sequence is synthesized)
catgtgttgacatctcccctccctctcctcctccccaacgctcttcttttctccccactccctcccttccctccaattctttctttcacctctccctcccctactctctcctccccttcc

SEQ ID NO: 146766 - DNA, 120 bp, Artificial Sequence
  ENSG00000105171_0 (sequence is synthesized)
agtgcgtcatcagagagcgccggaagcggtccgagaatgaagagtgtgatctaccatgcattgtctcagaaagaggcgaatgactccgatgtccagccttcaggagcacagcgggccgag

SEQ ID NO: 146767 - DNA, 120 bp, Artificial Sequence
  ENSG00000105171_1 (sequence is synthesized)
gccttcgtgagggccttcctgaagcgcagcacgccccgcatgagcccgcaggcccgcgaggaccagctgcagcgcaaggcggtggtcctggagtacttcacccgccacaagcgcaaggag

SEQ ID NO: 146768 - DNA, 120 bp, Artificial Sequence
  ENSG00000105171_2 (sequence is synthesized)
aagaagaagaaagccaaaggcctctctgccaggcaaaggagggagctgcggctctttgacattaaaccagagcagcagagatacagccttttcctccctctccatgaactctggaaacag

SEQ ID NO: 146769 - DNA, 120 bp, Artificial Sequence
  ENSG00000105171_3 (sequence is synthesized)
tacatcagggacctgtgcagtgggctcaagccagacacgcagccacagatgattcaggccaagctcttaaaggcagatcttcacggggctattatttcagtgacaaaatccaaatgcccc

SEQ ID NO: 146770 - DNA, 120 bp, Artificial Sequence
  ENSG00000105171_4 (sequence is synthesized)
tcttatgtgggtattacaggaatccttctacaggaaacaaagcacattttcaaaattatcaccaaagaagaccgcctgaaagttatccccaagctaaactgcgtgttcactgtggaaacc

SEQ ID NO: 146771 - DNA, 120 bp, Artificial Sequence
  ENSG00000105171_5 (sequence is synthesized)
gatggctttatttcctacatttacgggagcaaattccagcttcggtcaagtgaacggtctgcgaagaagttcaaagcgaagggaacgattgacctgtgaattctttgccgtctaaggcag

SEQ ID NO: 146772 - DNA, 120 bp, Artificial Sequence
  ENSG00000105171_6 (sequence is synthesized)
ttgtttatgacagctgaaaactggacactccctaaatgtccacctttcagtgaagagatagttaagccaattccatttatagaccacctccagccagtgacgctccgagttgaggatgtt

SEQ ID NO: 146773 - DNA, 120 bp, Artificial Sequence
  ENSG00000105171_7 (sequence is synthesized)
gaacaacatgggaaggtcgcagcgtactaagtgaagaagtcagaggacagaggaatttctctttctaggagattttcattttgtgtgactcccatggggaggaacagactggcaggaagc

SEQ ID NO: 146774 - DNA, 120 bp, Artificial Sequence
  ENSG00000105171_8 (sequence is synthesized)
acaccggggttaacactggttgacttgaataggattattcgatttttaaaaatacttttccatgttttctgagtgctctatgataaatcagttgcatctgtgataatacagtacatatgt

SEQ ID NO: 146775 - DNA, 120 bp, Artificial Sequence
  ENSG00000105171_9 (sequence is synthesized)
ggacataaacagggatcaaataaaggaggtattgctgcagtccagccaggttgaaagggaaggggggtccccaaaggtccattggatggcaggtgtctacagaggctcgcctttgggtgg

SEQ ID NO: 146776 - DNA, 120 bp, Artificial Sequence
  ENSG00000105171_10 (sequence is synthesized)
ggaaggttgaagaggattgaagggtgagttgctaagtgacttagggtttattcacttcaggaatcatagctggggtggaccccaggagcagagtactgcatgcagctgtgcccatgcatg

SEQ ID NO: 146777 - DNA, 120 bp, Artificial Sequence
  ENSG00000105171_11 (sequence is synthesized)
gttgccccagcgtagtgagatgggacctgccgcagcatgcccactcctgagctgccaggctgagccatggaggactgaaaggaggtcgcccggcatcacctcccgaggtgagacctgctg

SEQ ID NO: 146778 - DNA, 120 bp, Artificial Sequence
  ENSG00000105171_12 (sequence is synthesized)
caaaagccaagccagcagcattgacgccctttgatatcttcgccatttttgctgctgaaagacttggcttttcagtctgaccctggccctctgtgaccatgtgtctgtaaagccagtggg

SEQ ID NO: 146779 - DNA, 120 bp, Artificial Sequence
  ENSG00000105171_13 (sequence is synthesized)
tcaggcccttccatgcagggccagaggaaaagcgggcccagggctgcagtgagagcggggcaggggaccagcctaccagatgggttggaaacatggctcagaaggaccaactaccccttc

SEQ ID NO: 146780 - DNA, 120 bp, Artificial Sequence
  ENSG00000105171_14 (sequence is synthesized)
cctttgaggagcaagtctctgccgatcagcaaggcaaggccaggagccctcctggcgaaaggcaggccacaaatctgttctcccccaggagaagtagcagtgccagggctttgcgtttct

SEQ ID NO: 146781 - DNA, 120 bp, Artificial Sequence
  ENSG00000105171_15 (sequence is synthesized)
ggtaacttccacccaaaccacaccagagagaaacaccgtagtggagaagggaagtgggagcgctgactgctgtgtgccaggagagtagaaaggcccaggtctgtgccaccacccctcccc

SEQ ID NO: 146782 - DNA, 120 bp, Artificial Sequence
  ENSG00000105171_16 (sequence is synthesized)
aaagctcagtgcacccagagtctcacagggaccaacacggtgcctcggtcctgcttccatccatgcaagtgtcctccgctcaccagggtgttctgaggcagctcaagtgctctcccccaa

SEQ ID NO: 146783 - DNA, 120 bp, Artificial Sequence
  ENSG00000105171_17 (sequence is synthesized)
gcagcacgcagtcaccgctgccagtgatgaacacacgcacgggctaggcacatggagcccaagcacactgccacctcggacacgggccccggcccagcgactgccttgtggtgtggccgt

SEQ ID NO: 146784 - DNA, 120 bp, Artificial Sequence
  ENSG00000105171_18 (sequence is synthesized)
cctcatctgccacaggaagacagacttcgagggacctcttgcctaaggcctcgctgactcaagggtagattgagatttggacctaataggctccagaactgtgctttgagctacagggtg

SEQ ID NO: 146785 - DNA, 120 bp, Artificial Sequence
  ENSG00000105171_19 (sequence is synthesized)
gctgcaggatgagacggatgcagttcaaagtgcaggatgtgctgcctttattacctgctttcccgctgagcaaatccctgtcttgagtgggaagtggcatctattcccccagccatctga

SEQ ID NO: 146786 - DNA, 120 bp, Artificial Sequence
  ENSG00000105171_20 (sequence is synthesized)
aaatgctgtgttcataaccaaataggtgctgtagcttcctagccatcccgctcttacccgcccctctgcaatgtaaaaggcgtccactgttgtgtaaatacacagttgctttccagaaaa

SEQ ID NO: 146787 - DNA, 120 bp, Artificial Sequence
  ENSG00000105171_21 (sequence is synthesized)
gcaacccctgctttactgggggcttactaggttcaatttcacgtaacagaaaacctcaaaataacagtagcttcaacaagactcacgtttatttctctctcatgaaaagaagtccaggtg

SEQ ID NO: 146788 - DNA, 120 bp, Artificial Sequence
  ENSG00000105171_22 (sequence is synthesized)
gacaccgccctgggctggtgtggtcctaccaatgaggaaactgaggttagagaggtgtaggttcttggtctcggttatcagctcaattgctcatcgtcggatttgcacatagttcctaat

SEQ ID NO: 146789 - DNA, 120 bp, Artificial Sequence
  ENSG00000105171_23 (sequence is synthesized)
gaagagtaagcggggccgcgaagttggagagggttggggacgttaagggtcggggtcttggtactggtgggtgaaatgggtccgggctacctgttgctgcggagtcctaacagaaccgct

SEQ ID NO: 146790 - DNA, 120 bp, Artificial Sequence
  ENSG00000105171_24 (sequence is synthesized)
gtgatctaccatgcattgtctcagaaagaggcgaatgactccgatgtccagctgtgggtagcagatgcatggcggatgagcaggttgagagcctcaccttcaggagcacagcgggccgag

SEQ ID NO: 146791 - DNA, 120 bp, Artificial Sequence
  ENSG00000105171_25 (sequence is synthesized)
cggaagcggtccgagaatgaagagtgtgatctaccatgcattgtctcagaaagaggcgaatgactccgatgtccagtagctgccgggaatggcgggcgggatgcctgggatcctgggctg

SEQ ID NO: 146792 - DNA, 120 bp, Artificial Sequence
  ENSG00000105171_26 (sequence is synthesized)
agagagcgccggaagcggtccgagaatgaagagtgtgatctaccatgcattgtctcagaaagaggcgaatgactccgatgtccagatacagccttttcctccctctccatgaactctgga

SEQ ID NO: 146793 - DNA, 120 bp, Artificial Sequence
  ENSG00000105171_27 (sequence is synthesized)
agtgcgtcatcagagagcgccggaagcggtccgagaatgaagagtgtgatctaccatgcattgtctcagaaagaggcgaatgactccgatgtccaggtcagttcttggcagggagtccag

SEQ ID NO: 146794 - DNA, 120 bp, Artificial Sequence
  ENSG00000105171_28 (sequence is synthesized)
gagcaacagaggtgatggcaaagatggctcagtagcttctgagcccccagcactgattgagatgtcctttcccacatcatactcctcatttttctggcagacatctaaggctggatcaaa

SEQ ID NO: 146795 - DNA, 120 bp, Artificial Sequence
  ENSG00000105171_29 (sequence is synthesized)
tgccagcctccttttctgttgtgccaaagtcaagtttggtaaaatgaggctttccttaaccttttatcatttcccactgtgttggggacaccaggctgtgcccacgtggtgggcagcatc

SEQ ID NO: 146796 - DNA, 120 bp, Artificial Sequence
  ENSG00000105171_30 (sequence is synthesized)
attcaaccttgtcactgtgccctctgcacttctgcagaaggtgtgcaatcacatatcataagtgaaatttacagattatatctgaatgcctcggcctgctttgtcagttttgcaaaagtt

SEQ ID NO: 146797 - DNA, 120 bp, Artificial Sequence
  ENSG00000105171_31 (sequence is synthesized)
cctcttgtggctcataatgagagcattaccttgaaagcaagattttgaaagaccagtatacctttattttgcttctccatgaaagatgagccactcaggtatttaagagaatcagatcat

SEQ ID NO: 146798 - DNA, 120 bp, Artificial Sequence
  ENSG00000105171_32 (sequence is synthesized)
agggcagccttcctttaccaatctgggctgtgttcagcgaggcgggtgagacaggactcattgtctggcctctctcctcaccttcaggagtaagacccgtgcaagtacatctgttgccca

SEQ ID NO: 146799 - DNA, 120 bp, Artificial Sequence
  ENSG00000105171_33 (sequence is synthesized)
tggcaacaggctgtttgtccttcggctttgttagacagaaaagaggaactgatatgtttttagtgtgtattactttgtagcttttgatagagccagacagtcacccactcgggtttcatt

SEQ ID NO: 146800 - DNA, 120 bp, Artificial Sequence
  ENSG00000105171_34 (sequence is synthesized)
gccaaagcaagatgttgcccacacgtttcagaagtttccaaaaggaatgcatcactgtcctgtcctgtgggaggatgtcttcctccagccgacccgccatccctccttggtgacgggtct

SEQ ID NO: 146801 - DNA, 120 bp, Artificial Sequence
  ENSG00000105171_35 (sequence is synthesized)
agcgccggaagcggtccgagaatgaagagtgtgatctaccatgcattgtctcagaaagaggcgaatgactccgatgtccaggtcagttcttggcagggagtccaggagcaacagagcctt

SEQ ID NO: 146802 - DNA, 120 bp, Artificial Sequence
  ENSG00000105173_0 (sequence is synthesized)
tgccgggactggagcgcgccgtccgccgcggacaagaccctggcctcaggccggagcagccccatcatgccgagggagcgcagggagcgggatgcgaaggagcgggacaccatgaaggag

SEQ ID NO: 146803 - DNA, 120 bp, Artificial Sequence
  ENSG00000105173_1 (sequence is synthesized)
gacggcggcgcggagttctcggctcgctccaggaagaggaaggcaaacgtgaccgtttttttgcaggatccagatgaagaaatggccaaaatcgacaggacggcgagggaccagtgtggg

SEQ ID NO: 146804 - DNA, 120 bp, Artificial Sequence
  ENSG00000105173_2 (sequence is synthesized)
agccagccttgggacaataatgcagtctgtgcagacccctgctccctgatccccacacctgacaaagaagatgatgaccgggtttacccaaactcaacgtgcaagcctcggattattgca

SEQ ID NO: 146805 - DNA, 120 bp, Artificial Sequence
  ENSG00000105173_3 (sequence is synthesized)
ccatccagaggctccccgctgcctgtactgagctgggcaaatagagaggaagtctggaaaatcatgttaaacaaggaaaagacatacttaagggatcagcactttcttgagcaacaccct

SEQ ID NO: 146806 - DNA, 120 bp, Artificial Sequence
  ENSG00000105173_4 (sequence is synthesized)
cttctgcagccaaaaatgcgagcaattcttctggattggttaatggaggtgtgtgaagtctataaacttcacagggagaccttttacttggcacaagatttctttgaccggtatatggcg

SEQ ID NO: 146807 - DNA, 120 bp, Artificial Sequence
  ENSG00000105173_5 (sequence is synthesized)
acacaagaaaatgttgtaaaaactcttttacagcttattgggatttcatctttatttattgcagccaaacttgaggaaatctatcctccaaagttgcaccagtttgcgtatgtgacagat

SEQ ID NO: 146808 - DNA, 120 bp, Artificial Sequence
  ENSG00000105173_6 (sequence is synthesized)
ggagcttgttcaggagatgaaattctcaccatggaattaatgattatgaaggcccttaagtggcgtttaagtcccctgactattgtgtcctggctgaatgtatacatgcaggttgcatat

SEQ ID NO: 146809 - DNA, 120 bp, Artificial Sequence
  ENSG00000105173_7 (sequence is synthesized)
atccccagcaaatctttatacagattgcagagctgttggatctctgtgtcctggatgttgactgccttgaatttccttatggtatacttgctgcttcggccttgtatcatttctcgtcat

SEQ ID NO: 146810 - DNA, 120 bp, Artificial Sequence
  ENSG00000105173_8 (sequence is synthesized)
ctgaattgatgcaaaaggtttcagggtatcagtggtgcgacatagagaactgtgtcaagtggatggttccatttgccatggttataagggagacggggagctcaaaactgaagcacttca

SEQ ID NO: 146811 - DNA, 120 bp, Artificial Sequence
  ENSG00000105173_9 (sequence is synthesized)
ggggcgtcgctgatgaagatgcacacaacatacagacccacagagacagcttggatttgctggacaaagcccgagcaaagaaagccatgttgtctgaacaaaatagggcttctcctctcc

SEQ ID NO: 146812 - DNA, 120 bp, Artificial Sequence
  ENSG00000105173_10 (sequence is synthesized)
ccagtgggctcctcaccccgccacagagcggtaagaagcagagcagcgggccggaaatggcgtgaccaccccatccttctccaccaaagacagttgcgcgcctgctccacgttctcttct

SEQ ID NO: 146813 - DNA, 120 bp, Artificial Sequence
  ENSG00000105173_11 (sequence is synthesized)
gtctgttgcagcggaggcgtgcgtttgcttttacagatatctgaatggaagagtgtttcttccacaacagaagtatttctgtggatggcatcaaacagggcaaagtgttttttattgaat

SEQ ID NO: 146814 - DNA, 120 bp, Artificial Sequence
  ENSG00000105173_12 (sequence is synthesized)
gcttataggttttttttaaataagtgggtcaagtacaccagccacctccagacaccagtgcgtgctcccgatgctgctatggaaggtgctacttgacctaagggactcccacaacaacaa

SEQ ID NO: 146815 - DNA, 120 bp, Artificial Sequence
  ENSG00000105173_13 (sequence is synthesized)
aagcttgaagctgtggagggccacggtggcgtggctctcctcgcaggtgttctgggctccgttgtaccaagtggagcaggtggttgcgggcaagcgttgtgcagagcccatagccagctg

SEQ ID NO: 146816 - DNA, 120 bp, Artificial Sequence
  ENSG00000105173_14 (sequence is synthesized)
ggcagggggctgccctctccacattatcagttgacagtgtacaatgcctttgatgaactgttttgtaagtgctgctatatctatccattttttaataaagataatactgtttttgagaca

SEQ ID NO: 146817 - DNA, 120 bp, Artificial Sequence
  ENSG00000105173_15 (sequence is synthesized)
tggggtttcatgctgtcttgtctcttgctggagacactctggtgagagtgaacttctctaatgcagccacagcccatatggcccagcactgtacctgtcagtgggcactggcctctgcca

SEQ ID NO: 146818 - DNA, 120 bp, Artificial Sequence
  ENSG00000105173_16 (sequence is synthesized)
gtcctgggattccaggaagcttggtgttcctgactggcaccgtctgagattacagatatgtgcctagcctggaagaaccagaatggacatcacagtattcagtcctccccttctgcccag

SEQ ID NO: 146819 - DNA, 120 bp, Artificial Sequence
  ENSG00000105173_17 (sequence is synthesized)
ctccaaagttgcaccagtttgcgtatgtgacagatggagcttgttcaggagatgaaattctcaccatggaattaatgattatgaaggtgggttccagtgaattttccggccattttttaa

SEQ ID NO: 146820 - DNA, 120 bp, Artificial Sequence
  ENSG00000105173_18 (sequence is synthesized)
atgcgtacggcagatcttttccacctgaagtgtgagtgcctctgggaggtgttctccagctggacacattgtggcatggaacatggctgcattttgaacttcttttctcaatcatcggtc

SEQ ID NO: 146821 - DNA, 120 bp, Artificial Sequence
  ENSG00000105176_0 (sequence is synthesized)
gcggccgccacgcgacgcctggctgggcccgcaccggagaggcgtctcggtacctggcaggcggcctgctactcggagcccgctgcggggcggcggcggcggggacatgcacgtgtgaga

SEQ ID NO: 146822 - DNA, 80 bp, Artificial Sequence
  ENSG00000105176_1 (sequence is synthesized)
acatgcacgtgtgagatgcggcagcgggcggcgcggacgcgaacagcagcggcggcggcgggcgcggcctcctgggcgcg

SEQ ID NO: 146823 - DNA, 120 bp, Artificial Sequence
  ENSG00000105176_2 (sequence is synthesized)
gctggttcaggactcacacgccgcgctgaggcccgcgggcccgtcatggaggcgcccaccgtggagacgccccccgacccctcgcccccttcggccccggcccctgccctggttccgttg

SEQ ID NO: 146824 - DNA, 120 bp, Artificial Sequence
  ENSG00000105176_3 (sequence is synthesized)
ccggcccctgccctggttccgttgcgcgccccggatgtggcgcggctgcgcgaggagcaggaaaaggtggtcactaactgccaagagagaatccagcattggaagaaggtagataatgac

SEQ ID NO: 146825 - DNA, 120 bp, Artificial Sequence
  ENSG00000105176_4 (sequence is synthesized)
tataatgcccttcgagaaagactcagcaccttgcctgataaattgtcttataatataatggtaccatttggcccttttgccttcatgccaggaaaacttgtccatactaatgaagtcact

SEQ ID NO: 146826 - DNA, 120 bp, Artificial Sequence
  ENSG00000105176_5 (sequence is synthesized)
gttttactgggggacaactggtttgcaaagtgctcagcaaagcaggctgtaggtttagttgagcaccggaaagaacatgtaagaaaaacaatagatgacttaaaaaaagtgatgaaaaat

SEQ ID NO: 146827 - DNA, 120 bp, Artificial Sequence
  ENSG00000105176_6 (sequence is synthesized)
tttgaatccagagttgaattcacagaagatttgcagaaaatgagcgatgctgcaggtgatattgttgacatacgagaagaaattaaatgtgacttcgaatttaaagcaaaacaccgaatt

SEQ ID NO: 146828 - DNA, 120 bp, Artificial Sequence
  ENSG00000105176_7 (sequence is synthesized)
gctcataaaccgcattccaaaccaaaaacttcagatatttttgaagcagatattgcaaatgatgtgaaatccaaggatttgctagctgataaagaactgtgggctcgacttgaagaacta

SEQ ID NO: 146829 - DNA, 120 bp, Artificial Sequence
  ENSG00000105176_8 (sequence is synthesized)
gagagacaggaagaattgctgggtgaacttgatagtaagcctgatactgtgattgcaaatggagaagatacgacatcttctgaagaggaaaaggaagatcgtaacacaaatgtgaatgcg

SEQ ID NO: 146830 - DNA, 120 bp, Artificial Sequence
  ENSG00000105176_9 (sequence is synthesized)
atgcatcaagtaacagactctcatactccttgtcataaggatgttgcaagttcagaaccattcagtggtcaagtgaatagtcagttgaactgttcagtgaatggttccagttcttaccac

SEQ ID NO: 146831 - DNA, 120 bp, Artificial Sequence
  ENSG00000105176_10 (sequence is synthesized)
agtgatgatgatgatgatgatgatgatgacgacgacgacgacaacattgacgacgatgatggtgataacgaccatgaggctttaggggttggagataattctataccaacaatatatttt

SEQ ID NO: 146832 - DNA, 120 bp, Artificial Sequence
  ENSG00000105176_11 (sequence is synthesized)
tcacatactgttgagcctaagagggtccgaataaatactggaaagaataccactttaaaattcagtgaaaagaaagaagaagccaaacgtaaacgaaagaacagcactggcagtggccac

SEQ ID NO: 146833 - DNA, 120 bp, Artificial Sequence
  ENSG00000105176_12 (sequence is synthesized)
tctgcccaggagctgccgaccatcaggacgcctgcagacatttacagagcctttgttgatgttgtgaatggagaatatgtccctcgcaaatccatcctgaagtctcgaagtagagagaat

SEQ ID NO: 146834 - DNA, 120 bp, Artificial Sequence
  ENSG00000105176_13 (sequence is synthesized)
agtgtgtgtagcgacactagtgaaagcagtgctgctgaatttgatgataggcggggagttttgaggagtatcagctgcgaagaagccacttgcagtgacaccagtgagagcattttggaa

SEQ ID NO: 146835 - DNA, 120 bp, Artificial Sequence
  ENSG00000105176_14 (sequence is synthesized)
taacaccacccccagccattgctcatcccgcactacccactattccagaacgaaaggaagttctgttggaagcatctgaagaaactggaaagagggtttcaaagtttaaagctgccagat

SEQ ID NO: 146836 - DNA, 120 bp, Artificial Sequence
  ENSG00000105176_15 (sequence is synthesized)
tgcaacagaaagactaggccctgtctaggaaatgggaatttacatcctaaaacctagttgttcatttgtttagagtatctatagcaaaataggttacatgtagtttgaaataaggtatcc

SEQ ID NO: 146837 - DNA, 120 bp, Artificial Sequence
  ENSG00000105176_16 (sequence is synthesized)
tgagttactttggcaacaagttcttttacccttacccgtggtatttgaaaaaaatcaaggtaactgtctgaatactttaatatcagcttgttttgtgaattctctgaatactgtcaacac

SEQ ID NO: 146838 - DNA, 120 bp, Artificial Sequence
  ENSG00000105176_17 (sequence is synthesized)
tcttatctaagtttgcctttatgatgcagtggcagcattttgaattacttttcaaagaatactgttcatatgcattgtttttgtgtttcaaactaaatacaggcagttttgtgccagctg

SEQ ID NO: 146839 - DNA, 120 bp, Artificial Sequence
  ENSG00000105176_18 (sequence is synthesized)
tgatattgtgcataccatatggaccattttaaagaaaattttaaaatttcaaatagattcaacaattacattacttgctttcacattttaaaggcactttaaaaaaatctacttctcttg

SEQ ID NO: 146840 - DNA, 120 bp, Artificial Sequence
  ENSG00000105176_19 (sequence is synthesized)
taggttttgcggctagttggctattcaagaaacctcgcccctctgaatgtcatactgtaatctttaaggaagaaagctacatgaattaattgtactctatgggaaaatttctttggaaag

SEQ ID NO: 146841 - DNA, 120 bp, Artificial Sequence
  ENSG00000105176_20 (sequence is synthesized)
atattttgtaaaacttttttttccaagtaaaaactttatgaaacttggtctcaaaaatgttgtgaactttatgattcaaaattgagtacagatatgtccttgattcatatgtatgctaca

SEQ ID NO: 146842 - DNA, 120 bp, Artificial Sequence
  ENSG00000105176_21 (sequence is synthesized)
tgtatcacacaacagatctggaattctttcagttcctcagatacttctcccttagtttttgcagtttcactgggattatgttttgggaaacaaggaaaggtctagatgcttaaacatttt

SEQ ID NO: 146843 - DNA, 120 bp, Artificial Sequence
  ENSG00000105176_22 (sequence is synthesized)
aaataaaaattccttacagtttcatcttcccaacattttcattctttaaggctactttcctactaactgaaataacacatttacttttaccacaattcctcaaaataaatttattctaac

SEQ ID NO: 146844 - DNA, 120 bp, Artificial Sequence
  ENSG00000105176_23 (sequence is synthesized)
attgaaaataacattacaagttaatcattagcttgatgcatgctaaaatgtagcttttaaaaagcattctgcattagtactaaaataagccatcaatgccagtccaccctctctattcat

SEQ ID NO: 146845 - DNA, 120 bp, Artificial Sequence
  ENSG00000105176_24 (sequence is synthesized)
ggctaaatatttaaaggttatttatagcttctttaatgaattcttcttaaacaaagtgaaattatgtcctagaaaagtagaagctattcgtaactagagcagtgcaactttaaagtttta

SEQ ID NO: 146846 - DNA, 120 bp, Artificial Sequence
  ENSG00000105176_25 (sequence is synthesized)
tgaatatgtattttaatgacaagggggcgagcttgcatccccactagttaatggataattcaaaccgaggactgattttgaaagatcacctaaaaatgtagatttgttctttagtaaatt

SEQ ID NO: 146847 - DNA, 120 bp, Artificial Sequence
  ENSG00000105176_26 (sequence is synthesized)
tagatcaactatgcatatattttgtaggtaaatctttcagtccatgccccaaccctcaccaaaaccaaagcagaaattacacacacaaagatgctcccgttaggaattgctattcacatg

SEQ ID NO: 146848 - DNA, 120 bp, Artificial Sequence
  ENSG00000105176_27 (sequence is synthesized)
aggctttctgtgctagatttttttctcagaaacaaactttactgtaggactattgtggtgttcttaacagatttgtaatttcaagatgcgtgtcattaaataatttttcatgttcacaga

SEQ ID NO: 146849 - DNA, 120 bp, Artificial Sequence
  ENSG00000105176_28 (sequence is synthesized)
agtgggtcttctcactcttttccaggctccttggaggtcactgccctgatgacaacatggtcttcccttcaaggaagccacgtttctaagagggctctggcatatgcattggtggtcact

SEQ ID NO: 146850 - DNA, 120 bp, Artificial Sequence
  ENSG00000105176_29 (sequence is synthesized)
agggctctggcatatgcattgggcctctgtgaggttttaatgaatgaaggctgaagaaactccacagagatggtgactttcccccagcacagctcttgccctcaaggaagagacactcga

SEQ ID NO: 146851 - DNA, 120 bp, Artificial Sequence
  ENSG00000105176_30 (sequence is synthesized)
ggcttcgtgggcgtgtgtgacttacacagggctgtgcactcagaagaatcccgtgactgacttaggctctgcagctgccatcttgaaattcttaataacttttgaatggtgttgggggtg

SEQ ID NO: 146852 - DNA, 120 bp, Artificial Sequence
  ENSG00000105176_31 (sequence is synthesized)
gggttggaggggatggtccacactttcattttgcactgggcactacaaattatgtgaccggctctgattaaaatgctacaagaactaacatgaaactggacacagaaaccagaccccaga

SEQ ID NO: 146853 - DNA, 120 bp, Artificial Sequence
  ENSG00000105176_32 (sequence is synthesized)
tcaaggaagccacgtttctaagagggctctggcatatgcattggcaaccagtgacctggaaatgatatctgtaaatttctggctacaaaaaggtgttctttactttcaaatctcctgatg

SEQ ID NO: 146854 - DNA, 120 bp, Artificial Sequence
  ENSG00000105176_33 (sequence is synthesized)
acaggagtctgtgctaatccctcaggactcaaaaatgccccaatttttggaggacaagggtcatcttgcccaccttgcaaccagccagccattccaggaaagctattcctgcagcctcat

SEQ ID NO: 146855 - DNA, 120 bp, Artificial Sequence
  ENSG00000105176_34 (sequence is synthesized)
ggtagggtgagggctgagaaatggggcatggcagctgttttgcatccaccctgttgctgttctcttaccaacaaccagcagcctcttttttcatcaagaactcccctggctgtttattca

SEQ ID NO: 146856 - DNA, 120 bp, Artificial Sequence
  ENSG00000105176_35 (sequence is synthesized)
gtgtgtgtatcttttaattctttatttcatatagtatctttgaccagttttagctatttaatctgaaaagtcataagattaaattaattctaggttttatactttcttggtactaattaa

SEQ ID NO: 146857 - DNA, 120 bp, Artificial Sequence
  ENSG00000105176_36 (sequence is synthesized)
aaattaatagtcacaaacagtacaaatattgtgataatcaaatagtttattttttgataaacacattacttgtcttaacgttctatttcagcaaaatgggaaatttaaaatgtcttactt

SEQ ID NO: 146858 - DNA, 120 bp, Artificial Sequence
  ENSG00000105176_37 (sequence is synthesized)
ggcattatgtattacatttgtagctaggaaattatttcgcagtttattttaaataaattaccagtaggtcattttctgatagtgtaaggagcagattacattattctcttttaaatacct

SEQ ID NO: 146859 - DNA, 120 bp, Artificial Sequence
  ENSG00000105176_38 (sequence is synthesized)
aaatctgtaaagccaatgttctagttttcagatacactgatttttgtagctctgtgcatagctctgttttttcatgagtagttatctgttttcatgacaggtggtcactaactgccaaga

SEQ ID NO: 146860 - DNA, 120 bp, Artificial Sequence
  ENSG00000105176_39 (sequence is synthesized)
gaatccagcattgaggtgaaaagccaggcatccttcaagctagtggatctttgacaaagatgcattgcaaaacaatcaacaaacaatcagaaaggcatgctatgtgtgagtgatgatccc

SEQ ID NO: 146861 - DNA, 120 bp, Artificial Sequence
  ENSG00000105176_40 (sequence is synthesized)
gatgacaacatggtcttcccttcaaggaagccacgtttctaagagggctctggcatatgcattgagatgagtttgctgtgttggccagactagtctccaactccaggcctcaagtgatcc

SEQ ID NO: 146862 - DNA, 120 bp, Artificial Sequence
  ENSG00000105176_41 (sequence is synthesized)
gagtatcagctgcgaagaagccacttgcagtgacaccagtgagagcattttggaagaggaaccacaagaaaatcaaaagaaacttttgcccttatcagtaacacctgagttgaacatata

SEQ ID NO: 146863 - DNA, 120 bp, Artificial Sequence
  ENSG00000105176_42 (sequence is synthesized)
ttgcatagcatgagagccgtatcggagaacatgtgccactctcgagaagcccttcatatgtggtgatatttcacttttaactcccttccttattttcattcttttaaaagatattttaac

SEQ ID NO: 146864 - DNA, 120 bp, Artificial Sequence
  ENSG00000105176_43 (sequence is synthesized)
tgcttagacctttgccagacctgcattcatcattggtagagaaagaactatgtacttttctcctccatcctcttctgatctgcttactgattgagtgcctgttgtaaaacagtaggaaat

SEQ ID NO: 146865 - DNA, 120 bp, Artificial Sequence
  ENSG00000105185_0 (sequence is synthesized)
agtggtcaaggccgcgctcgcgccgaggggctgcgagagtgaccgcggctgctccagcgctgacgccgagccatggcggacgaggagcttgaggcgctgaggagacagaggctggccgag

SEQ ID NO: 146866 - DNA, 120 bp, Artificial Sequence
  ENSG00000105185_1 (sequence is synthesized)
ctgcaggccaaacacggggatcctggtgatgcggcccaacaggaagcaaagcacagggaagcagaaatgagaaacagtatcttagcccaagttctggatcagtcggcccgggccaggtta

SEQ ID NO: 146867 - DNA, 120 bp, Artificial Sequence
  ENSG00000105185_2 (sequence is synthesized)
aacttagcacttgtaaagcctgaaaaaactaaagcagtagagaattaccttatacagatggcaagatatggacaactaagtgagaaggtatcagaacaaggtttaatagaaatccttaaa

SEQ ID NO: 146868 - DNA, 120 bp, Artificial Sequence
  ENSG00000105185_3 (sequence is synthesized)
aaagtaagccaacaaacagaaaagacaacaacagtgaaattcaacagaagaaaagtaatggactctgatgaagatgacgattattgaactacaagtgctcacagactagaacttaacgga

SEQ ID NO: 146869 - DNA, 120 bp, Artificial Sequence
  ENSG00000105185_4 (sequence is synthesized)
acaagtctaggacagaagttaagatctgattatttactttgtttattgtctatatgccttttaaaaaaataaacttgttatgcaaaataaaacatttgggtaagttgttttagtatcata

SEQ ID NO: 146870 - DNA, 120 bp, Artificial Sequence
  ENSG00000105185_5 (sequence is synthesized)
cccctccttctcaagtgaggaatagcagagcaaattttatttggaacttaaaccaatagttataaccaatagtttcaacctcctgcctcaccactgcttccttcctgagctctttcccca

SEQ ID NO: 146871 - DNA, 120 bp, Artificial Sequence
  ENSG00000105185_6 (sequence is synthesized)
ttatcaaaacatggcttcaaaaggtcagctgcatcttcactggattacagaattcttgctgactctcagaagaaattgttggagagaatagtcatacctactttaaaagagaataaattg

SEQ ID NO: 146872 - DNA, 120 bp, Artificial Sequence
  ENSG00000105185_7 (sequence is synthesized)
cctttcctaaattcctctgcttcgctcctttcctggcgttgctctggaaccttgttggtgtctgtgacccaatgactgttagggtcagctagcttcaattgcccctgcactggaagcaag

SEQ ID NO: 146873 - DNA, 120 bp, Artificial Sequence
  ENSG00000105185_8 (sequence is synthesized)
gtttgtcagtaacaccaattaaaatactaccagtgtaagtagaaggtgtgttttgcagatgagaaggtgctaagatgccttgcttatgttctctgtgttgctgtaataccatgaggggta

SEQ ID NO: 146874 - DNA, 120 bp, Artificial Sequence
  ENSG00000105185_9 (sequence is synthesized)
tgttgtggcaaacctggcctttgagatcaagacgaaccccacctgccctgagaagccgtctgctaccaccacagcctacccgaattggtcctgtcccctaaacccctcacactgagaact

SEQ ID NO: 146875 - DNA, 120 bp, Artificial Sequence
  ENSG00000105185_10 (sequence is synthesized)
agaaaagacaacaacagtgaaagtaagtgtccccagatgcttgtggcaaatgaaaagatggatactttaaagattaatgttgagtatacatctaccacacatatttttcagcccagagac

SEQ ID NO: 146876 - DNA, 120 bp, Artificial Sequence
  ENSG00000105185_11 (sequence is synthesized)
attttccttttgtcaaacacgtgaaagtttggggagaaaggctgaatctgttgggggagggttctaatttttataggctcttgactccattcccacccttttagttcacgctaagttgct

SEQ ID NO: 146877 - DNA, 120 bp, Artificial Sequence
  ENSG00000105185_12 (sequence is synthesized)
ttaaagacacaaatgtcttgctaaaattggtagaaatcttttctcggaaaatctgagttatgctttattagaaatgttctgacactcatttaattttcctcccagttcaacagaagaaaa

SEQ ID NO: 146878 - DNA, 120 bp, Artificial Sequence
  ENSG00000105185_13 (sequence is synthesized)
gagacagaggctggccgagctgcaggccaaacacggggatcctggtgatgcggcccaacaggaagcaaagcacagttcaacagaagaaaagtaatggactctgatgaagatgacgattat

SEQ ID NO: 146879 - DNA, 120 bp, Artificial Sequence
  ENSG00000105185_14 (sequence is synthesized)
gggggccgccacgtgcgggacctgccctggcgttggggtgtggggtcccctagcctggagcgggctcgtcctggcgggcctggatccaagcacaatctcagcttttggagccagcagccg

SEQ ID NO: 146880 - DNA, 120 bp, Artificial Sequence
  ENSG00000105185_15 (sequence is synthesized)
tggatgggttctttctcgtatgttacatgggaatgccgacagctgtgttttaattgtgtttgacctatgttttcgttgtagggaagcagaaatgagaaacagtatcttagcccaagttct

SEQ ID NO: 146881 - DNA, 120 bp, Artificial Sequence
  ENSG00000105186_0 (sequence is synthesized)
agggccagatcgccgcgcgagggtggtgggcatcgaggtcccagcagcggacgagggaggtgccgccgtcgcccaggatgggctgggaatgaagcgatgtagccttttaagagatttgct

SEQ ID NO: 146882 - DNA, 120 bp, Artificial Sequence
  ENSG00000105186_1 (sequence is synthesized)
ctgacccatctgaagtccatatggctctgtatgatgaagacctcctgaaaaatcctttctatctggctctgcaaaagtgccgccctgacttgtgcagcaaagtggcccaaatccatggca

SEQ ID NO: 146883 - DNA, 120 bp, Artificial Sequence
  ENSG00000105186_2 (sequence is synthesized)
ttgtcttagtaccctgcaaaggaagcctgtcgagcagcatccagtctacttgtcagtttgagtcctacattttgatacctgtggaagagcattttcagaccttaaatggaaaggatgtct

SEQ ID NO: 146884 - DNA, 120 bp, Artificial Sequence
  ENSG00000105186_3 (sequence is synthesized)
ttattcaagggaacaggattaaattaggagctggttttgcctgtcttctctcagtgcccattctctttgaagaaactttctacaatgaaaaagaagagagtttcagcatcctgtgtatag

SEQ ID NO: 146885 - DNA, 120 bp, Artificial Sequence
  ENSG00000105186_4 (sequence is synthesized)
cccatcctttggaaaagagagagagttcagaagagcctttggcaccctcagatcccttttccctgaaaaccattgaagatgtgagagagttcttgggaagacactccgagcgatttgaca

SEQ ID NO: 146886 - DNA, 120 bp, Artificial Sequence
  ENSG00000105186_5 (sequence is synthesized)
ggaacatcgcctctttccatcgaacattccgagaatgcgagagaaagagcctccgtcaccacatagactcagcgaatgctctctacaccaaatgcctccagcagcttctgagggactctc

SEQ ID NO: 146887 - DNA, 120 bp, Artificial Sequence
  ENSG00000105186_6 (sequence is synthesized)
acctgaaaatgctcgccaagcaggaggcccagatgaacctgatgaagcaggcagtggagatatacgtccatcatgaaatttacaacctgatctttaaatacgtggggaccatggaggcaa

SEQ ID NO: 146888 - DNA, 120 bp, Artificial Sequence
  ENSG00000105186_7 (sequence is synthesized)
gtgaggatgcggcctttaacaaaatcacaagaagccttcaagatcttcagcagaaagatattggtgtgaaaccggagttcagctttaacatacctcgtgccaaaagagagctggctcagc

SEQ ID NO: 146889 - DNA, 120 bp, Artificial Sequence
  ENSG00000105186_8 (sequence is synthesized)
tgaacaaatgcacctccccacagcagaagcttgtctgcttgcgaaaagtggtgcagctcattacacagtctccaagccagagagtgaacctggagaccatgtgtgctgatgatctgctat

SEQ ID NO: 146890 - DNA, 120 bp, Artificial Sequence
  ENSG00000105186_9 (sequence is synthesized)
cagtcctgttatacttgcttgtgaaaacggagatccctaattggatggcaaatttgagttacatcaaaaacttcaggtttagcagcttggcaaaggatgaactgggatactgcctgacct

SEQ ID NO: 146891 - DNA, 120 bp, Artificial Sequence
  ENSG00000105186_10 (sequence is synthesized)
cattcgaagctgccattgaatatattcggcaaggaagcctctctgctaaaccccctgagtctgagggatttggagacaggctgttccttaagcagagaatgagcttactctctcagatga

SEQ ID NO: 146892 - DNA, 120 bp, Artificial Sequence
  ENSG00000105186_11 (sequence is synthesized)
cttcgtctcccaccgactgcctgtttaagcacattgcatcaggtaaccagaaagaagtggagagacttctgagccaagaggaccatgataaagataccgtccaaaagatgtgtcaccctc

SEQ ID NO: 146893 - DNA, 120 bp, Artificial Sequence
  ENSG00000105186_12 (sequence is synthesized)
tctgcttctgcgatgactgtgagaaactcgtctctgggaggttgaatgatccctcagttgtcactccattctccagagacgacagggggcacacccctctccatgtggctgctgtctgtg

SEQ ID NO: 146894 - DNA, 120 bp, Artificial Sequence
  ENSG00000105186_13 (sequence is synthesized)
ggcaggcatccctcatcgacctcctggtttccaagggcgccatggtaaatgccacagactaccatggagccactccgctccacctggcctgtcagaagggctaccagagcgtgacgctgc

SEQ ID NO: 146895 - DNA, 120 bp, Artificial Sequence
  ENSG00000105186_14 (sequence is synthesized)
tgctgctgcactacaaggccagcgcggaagtgcaggacaacaatgggaatacgccactccacctggcctgcacctacggccacgaggactgtgtgaaggctctggtttactacgacgtgg

SEQ ID NO: 146896 - DNA, 120 bp, Artificial Sequence
  ENSG00000105186_15 (sequence is synthesized)
agtcgtgcagacttgacattggcaatgagaaaggagacacccctctacacattgctgcccgctggggctaccaaggcgtcatagagacattgctgcagaacggagcgtccaccgagatcc

SEQ ID NO: 146897 - DNA, 120 bp, Artificial Sequence
  ENSG00000105186_16 (sequence is synthesized)
agaacagactgaaggagacgcccctcaagtgtgcattaaactcaaagattctgtctgtaatggaagcctatcacctgtccttcgagaggaggcagaagtcgtccgaggcccctgtgcagt

SEQ ID NO: 146898 - DNA, 120 bp, Artificial Sequence
  ENSG00000105186_17 (sequence is synthesized)
ccccgcagcgctccgtggactccatcagccaagagtcctccacttccagcttctcctccatgtcagccagctcaaggcaggaggagaccaagaaggactacagagaggtagaaaaacttt

SEQ ID NO: 146899 - DNA, 120 bp, Artificial Sequence
  ENSG00000105186_18 (sequence is synthesized)
tcacccgttgtgccagtgccccaagtgtgccccagctcagaagaggctggcgaaggttcctgccagtgggcttggtgtgaacgtgaccagccaggacggctcctccccgctgcatgtcgc

SEQ ID NO: 146900 - DNA, 120 bp, Artificial Sequence
  ENSG00000105186_19 (sequence is synthesized)
cgccctgcacggccgggcggacctcatccccctcctgctgaagcacggggccaacgcaggtgccaggaacgcagaccaagccgtcccgctccacctggcctgccagcagggccactttca

SEQ ID NO: 146901 - DNA, 120 bp, Artificial Sequence
  ENSG00000105186_20 (sequence is synthesized)
ggtggtgaagtgtctgttagattcgaatgcaaaacccaataagaaggacctcagtggaaacacgcccctcatttacgcctgctccggtggccatcacgagcttgtggcactgctgctaca

SEQ ID NO: 146902 - DNA, 120 bp, Artificial Sequence
  ENSG00000105186_21 (sequence is synthesized)
gcacggggcctccattaacgcttctaacaataagggcaacacagcgctgcacgaggctgtgattgaaaagcacgtcttcgtggtagagctgcttctgctccacggagcgtcagttcaggt

SEQ ID NO: 146903 - DNA, 120 bp, Artificial Sequence
  ENSG00000105186_22 (sequence is synthesized)
gctgaacaagcggcagcgcacggctgtagactgtgctgaacagaattcaaaaataatggaattgcttcaggtggtaccaagctgtgttgcttcattagatgatgtggctgaaactgaccg

SEQ ID NO: 146904 - DNA, 120 bp, Artificial Sequence
  ENSG00000105186_23 (sequence is synthesized)
caaggagtatgtcactgttaagatcaggaaaaaatggaactcaaaactgtatgatctaccagatgagccttttacaagacagttttactttgtccactcagctggtcagtttaagggaaa

SEQ ID NO: 146905 - DNA, 120 bp, Artificial Sequence
  ENSG00000105186_24 (sequence is synthesized)
gacttcaagggagattatggcaagagatagaagtgtccctaatttaaccgaaggttctttgcatgagccagggaggcaaagtgtcacactgagacagaataacctgccagctcagagtgg

SEQ ID NO: 146906 - DNA, 120 bp, Artificial Sequence
  ENSG00000105186_25 (sequence is synthesized)
atctcatgctgctgagaaaggcaacagcgactggccagagaggcctggactgacacagactggccctggacacagacggatgctgcggagacacacggtagaggatgcggtcgtgtccca

SEQ ID NO: 146907 - DNA, 120 bp, Artificial Sequence
  ENSG00000105186_26 (sequence is synthesized)
gggcccggaggctgctggccccctctccactccccaagaggttagtgcttcccggtcctaacaggaatgaggagttgttgaacccactgctaggaagcaaggatgcaacaagatgatgct

SEQ ID NO: 146908 - DNA, 120 bp, Artificial Sequence
  ENSG00000105186_27 (sequence is synthesized)
gagcgtgaacacatctgagaactaaatgtgcttccatgagactggcttgagaagtcttcagcaccaagttcctgaaagcttttctgtggcaggaaagaatgcaacaaaaaagttaaccac

SEQ ID NO: 146909 - DNA, 120 bp, Artificial Sequence
  ENSG00000105186_28 (sequence is synthesized)
caccatctctctcctcttcaaagctaatgaatacaattgaaacagacaaaaattccagtagcatccagatccttaagccagaggtgcatgcttctttttaagtatgagggtttgttggtc

SEQ ID NO: 146910 - DNA, 120 bp, Artificial Sequence
  ENSG00000105186_29 (sequence is synthesized)
acagtgggagaggtttcaccaccgcattctgacctcctcctcccaaaaggtgctaaacctctctgacctgtgtacattcacaaaccacagctagaattcctccacctaggattaagctgg

SEQ ID NO: 146911 - DNA, 120 bp, Artificial Sequence
  ENSG00000105186_30 (sequence is synthesized)
agagaagtaagtaatttaggtttcatggtactgtagaggccaggctgaaatgtcatatctgaaggaagaaagcagcagctggacaatgtttctttgcaaagcaacactcgaaccaaaaga

SEQ ID NO: 146912 - DNA, 120 bp, Artificial Sequence
  ENSG00000105186_31 (sequence is synthesized)
tgcctcaatcccattttgatattcattttagtgaaaggatgcatcagacctgttccacatcatgcacatgggaaagggtggttatcattttccttctaacaagtaggtacagatattcgg

SEQ ID NO: 146913 - DNA, 120 bp, Artificial Sequence
  ENSG00000105186_32 (sequence is synthesized)
ttactacacgtgcacctgtagcagtatttctagaaacatccctttttgttgagaacctcccttgaatgtctgtcacactcacacctgacgggatggttactggattagagagtagatttg

SEQ ID NO: 146914 - DNA, 120 bp, Artificial Sequence
  ENSG00000105186_33 (sequence is synthesized)
gcacatcttttcttagtcttttgattcaaattcaaaacttaacagcacaaaccaggtcagagttactttcggttagaatttattgccatttattcctttttataaatttctatagattat

SEQ ID NO: 146915 - DNA, 120 bp, Artificial Sequence
  ENSG00000105186_34 (sequence is synthesized)
actgttatttttatgttattggcctagagctacacgtatatgggtttgtcctgagtccgttttcaaatgaccttgtgatagggaaatggttttgtccatgttcttggaaatacttgtgta

SEQ ID NO: 146916 - DNA, 120 bp, Artificial Sequence
  ENSG00000105186_35 (sequence is synthesized)
tgtacagaaggaagggagggattatttttctacaaagtaatttatgatttctaattttctaatgtgccttggatatgtgccaaatgatggaaaagaaacagtaaactttatgattcttga

SEQ ID NO: 146917 - DNA, 120 bp, Artificial Sequence
  ENSG00000105186_36 (sequence is synthesized)
gcggccgccgcggcgcgtgcagcgggaacgcggcgcccagctccagcgcgcgtcgcatgtccgcttccagcaggtccaggcagcccgagaaggccacccagagccgctcgaactcggcgc

SEQ ID NO: 146918 - DNA, 120 bp, Artificial Sequence
  ENSG00000105186_37 (sequence is synthesized)
gctcgtcggcggccaggccccggtcgcgcagcacagcagtcagccgggcgcaggtggacaccgccagctcctgcgccttctggcgcgtcttttgcagctcctgccgcaggttctgcgagt

SEQ ID NO: 146919 - DNA, 120 bp, Artificial Sequence
  ENSG00000105186_38 (sequence is synthesized)
ccgccgagccaccgacggtcagcaccaggtggtggtagcacgcagtcgtcttgttgagcccgtccagcagcgccttgcactcctccctcgccatcgcggtgggctccggctgggcccggc

SEQ ID NO: 146920 - DNA, 120 bp, Artificial Sequence
  ENSG00000105186_39 (sequence is synthesized)
cgcccgcgcccgttagcctccccctcagcgcggcaggatgtggctaacccccatcccggccttgggccgcgcggcacgaacgctcttcatggtccgtgactcgctcggcgctaccgccaa

SEQ ID NO: 146921 - DNA, 120 bp, Artificial Sequence
  ENSG00000105186_40 (sequence is synthesized)
cactccgagtcacacgtcgtgtctctgcaccgccctggcctccacggtggctccctgcgaagctgagggtgcggtccccatcctccgtgggtgccaactccggggcaagcaggctgcaga

SEQ ID NO: 146922 - DNA, 120 bp, Artificial Sequence
  ENSG00000105186_41 (sequence is synthesized)
tggaggcaagtgaggatgcggcctttaacaaaatcacaagaagccttcaagatcttcagcagaaagatattggtgtgaaaccggagttcagtgaacctggagaccatgtgtgctgatgat

SEQ ID NO: 146923 - DNA, 120 bp, Artificial Sequence
  ENSG00000105186_42 (sequence is synthesized)
atatacacctaaaaaaaaagttgagaaaaatcacgtaattgacttcataaagcttgtgttagcacttgaagctctgtgcgccttacccgctccggctcccccgtcatggccttgctggta

SEQ ID NO: 146924 - DNA, 120 bp, Artificial Sequence
  ENSG00000105186_43 (sequence is synthesized)
aatcacaagaagccttcaagatcttcagcagaaagatattggtgtgaaaccggagttcaggtaagggtttgcgccacagcggcttggtgtcctcagaggcaggggtgctgtcttctcccg

SEQ ID NO: 146925 - DNA, 120 bp, Artificial Sequence
  ENSG00000105186_44 (sequence is synthesized)
caggcatgagccactgcacccagcctgtggcattttaggctttagatttttggattggagatactcaacctgttataaataggtactagctgtgtttctttaagcaaattcagtgcttca

SEQ ID NO: 146926 - DNA, 120 bp, Artificial Sequence
  ENSG00000105186_45 (sequence is synthesized)
gccattgaatatattcggcaaggaagcctctctgctaaaccccctgtaagatctcacccctgccctggccttcctttgtgggcatcatggttcccttgatagggtgctggggttggtatg

SEQ ID NO: 146927 - DNA, 120 bp, Artificial Sequence
  ENSG00000105186_46 (sequence is synthesized)
tgggcagacggattcttaaattgcctcccaggaatggggcctcagctgtttgagggctgtgagtcttaaaaatcactcagtgaagagaacaccaagccctcaattggtggtaaaaattgg

SEQ ID NO: 146928 - DNA, 120 bp, Artificial Sequence
  ENSG00000105186_47 (sequence is synthesized)
tgggttatcattgggatttacattgttaatatcctacttcattagtccccatcctctccaaagacatgtgggtgcaaagggaagccagaagtagggaatttggatttcttgaccttgata

SEQ ID NO: 146929 - DNA, 120 bp, Artificial Sequence
  ENSG00000105186_48 (sequence is synthesized)
ctggtggctcctttgcctgagttttgttcgggcctgctgggctcatttcacgctcttggcctggcaggctgcgctcggcttgtgctactggcctggatcccatgcctgccaagggcgagc

SEQ ID NO: 146930 - DNA, 120 bp, Artificial Sequence
  ENSG00000105186_49 (sequence is synthesized)
caggtgtggagtggcgaggggtatgtgagcaagtgcagggtctggccactgcacacaaccaggtgtgccgactgaggtggggtgggcagctccaagttgcttgtacagggtcctgctcca

SEQ ID NO: 146931 - DNA, 120 bp, Artificial Sequence
  ENSG00000105186_50 (sequence is synthesized)
tgcaaggctgcagctagagcaggcgtactgtaggccgcttccacggtgggcactggggaacacagtggggcctggaagcttggagacaccaggaactgcagagccccaaagagggtgtca

SEQ ID NO: 146932 - DNA, 120 bp, Artificial Sequence
  ENSG00000105186_51 (sequence is synthesized)
tagccctggctcggggaactcctaggttgggctccctgaagggccagagctcttctctcctctcgtcacctgcaatgtagtgagtcgggagcatgttttagctctctttatgttacagct

SEQ ID NO: 146933 - DNA, 120 bp, Artificial Sequence
  ENSG00000105186_52 (sequence is synthesized)
ctttcagtcctgccatttggtgggtcccgagttcttgtcccatgtcgaggaagaatgaggtacgtagactagtggagggtgagcaaggcagagaggagctttactgaacggcagaatagc

SEQ ID NO: 146934 - DNA, 120 bp, Artificial Sequence
  ENSG00000105186_53 (sequence is synthesized)
tctcaggagacccacagtgggcagcttctttccacaggcaggtcgtcctgacgagttaaagaggcctgacgtaggtagctccttcctgcagttggtagtcccgacatctgtctgagtctg

SEQ ID NO: 146935 - DNA, 120 bp, Artificial Sequence
  ENSG00000105186_54 (sequence is synthesized)
gctgagtccggggttttttatggctcagaagggagggagtatgtgctgattggtccataggtgggcctggagaaagcaccatgagttctcagtctgggtcgtggactccacttgggactg

SEQ ID NO: 146936 - DNA, 120 bp, Artificial Sequence
  ENSG00000105186_55 (sequence is synthesized)
acagcccggcccccaggctttaggctgtccctgtcttgaaggtggggcttcactgggcacctgcacctttccacccagaagcgtgtctgccttctgccaccatcaacatgctggccagtg

SEQ ID NO: 146937 - DNA, 120 bp, Artificial Sequence
  ENSG00000105186_56 (sequence is synthesized)
catccaggctgtttgtgccaaggggcatctgcaggcctgcactgagctgccctcagcccctaccttgactactctcccatgctcatcagcgcccaaaatcttggaggggtctgaggcatc

SEQ ID NO: 146938 - DNA, 120 bp, Artificial Sequence
  ENSG00000105186_57 (sequence is synthesized)
aggaggctggtgtgtcagtgtcacaccaagcatgtgcacacatggctgggttgcaacagtacccgggcttggcctcagctttgctctgaaattgaagtcggtgccaggagtggggaggag

SEQ ID NO: 146939 - DNA, 120 bp, Artificial Sequence
  ENSG00000105186_58 (sequence is synthesized)
cgggagcaggcacttacgagcctgcggcggcagggatgcttcctgggcccctgagagtgcagagattcctggatccagagctgcggctgggcggctgcagctgcgcctgggagtgcaggg

SEQ ID NO: 146940 - DNA, 120 bp, Artificial Sequence
  ENSG00000105186_59 (sequence is synthesized)
ctcccgccctgccagctcagtaggagatgggggctcctgcctgttcctggctcctgttggccctgcagagtgcacaaacctggccgcgcttcctccactgcagcttacgtctttgcagca

SEQ ID NO: 146941 - DNA, 120 bp, Artificial Sequence
  ENSG00000105186_60 (sequence is synthesized)
gccactcccgatgggctgccactgccatctgtgagaccattaatgtgtgcaatttgaggactcagtggccttgccattgtttccttggtttttattgagcattggctggggtcggcgagg

SEQ ID NO: 146942 - DNA, 120 bp, Artificial Sequence
  ENSG00000105186_61 (sequence is synthesized)
ggatgtgattatatttctatgtgaatcgtgagaatcttgaaccatggttgtcctgctggcctgttttactacataccaatgagtaaaatgtgatcatacagaaatcacaaagttgaaatc

SEQ ID NO: 146943 - DNA, 120 bp, Artificial Sequence
  ENSG00000105193_0 (sequence is synthesized)
ccttttccggttgcggcgccgcgcggtgaggttgtctagtccacgctcggagccatgccgtccaagggcccgctgcagtctgtgcaggtcttcggacgcaagaagacagcgacagctgtg

SEQ ID NO: 146944 - DNA, 120 bp, Artificial Sequence
  ENSG00000105193_1 (sequence is synthesized)
gcgcactgcaaacgcggcaatggtctcatcaaggtgaacgggcggcccctggagatgattgagccgcgcacgctacagtacaagctgctggagccagttctgcttctcggcaaggagcga

SEQ ID NO: 146945 - DNA, 120 bp, Artificial Sequence
  ENSG00000105193_2 (sequence is synthesized)
agggtggtggtcacgtggcccagatttatgctatccgtcagtccatctccaaagccctggtggcctattaccagaaatatgtggatgaggcttccaagaaggagatcaaagacatcctca

SEQ ID NO: 146946 - DNA, 120 bp, Artificial Sequence
  ENSG00000105193_3 (sequence is synthesized)
tccagtatgaccggaccctgctggtagctgaccctcgtcgctgcgagtccaaaaagtttggaggccctggtgcccgcgctcgctaccagaaatcctaccgataagcccatcgtgactcaa

SEQ ID NO: 146947 - DNA, 120 bp, Artificial Sequence
  ENSG00000105193_4 (sequence is synthesized)
aactcacttgtataataaacagtttttgagggattttaaagtttcaagaactgtgtgtggccttatgtgttggtattggatgtttaaccagacagaaatcagtaaacatcctggacctat

SEQ ID NO: 146948 - DNA, 120 bp, Artificial Sequence
  ENSG00000105193_5 (sequence is synthesized)
cagcctagttggggagaaggactgggcccaataccagaagctgatccaaagtggtcagaactggggaaggagacctgtgagctgaaagcaggtaaaggaagtatccagacagaggcactg

SEQ ID NO: 146949 - DNA, 120 bp, Artificial Sequence
  ENSG00000105193_6 (sequence is synthesized)
gtaaaagacctggagctgggaagggtctagggaccagggacaggttgtactgtaattctggaaacctgtgaggctcaaagaaagggcagagagctcaggtgggaaatagaaaaggcacct

SEQ ID NO: 146950 - DNA, 120 bp, Artificial Sequence
  ENSG00000105193_7 (sequence is synthesized)
gaacagtccagggatggctttcgactacttgaaacagccttgggagtttcagaagctattggaatgctccttactgttcagccttctaagaaccagtcttagaggtagggtgtctgaggt

SEQ ID NO: 146951 - DNA, 120 bp, Artificial Sequence
  ENSG00000105193_8 (sequence is synthesized)
ccagtgagggacacaagtaggagggagcccagatcttgttccctttaccttgcctatatttcttaacaccacttcagcagtctcatatctggcttttttgactttcctcttctctgggtc

SEQ ID NO: 146952 - DNA, 120 bp, Artificial Sequence
  ENSG00000105193_9 (sequence is synthesized)
aacaagaagcccagtgagatggctaagctgcccagcatgtaacttaaatccctgttcattccccattcctttagctgctggagccagttctgcttctcggcaaggagcgatttgctggtg

SEQ ID NO: 146953 - DNA, 120 bp, Artificial Sequence
  ENSG00000105193_10 (sequence is synthesized)
tagacatccgtgtccgtgtaaagggtggtggtcacgtggcccagatttatggtgagtcccaggaactgggcgcatggaggaggtggctctgggagggaggccttcacagcgctcctgtac

SEQ ID NO: 146954 - DNA, 120 bp, Artificial Sequence
  ENSG00000105193_11 (sequence is synthesized)
actcttggagacagagatgttgtagctcttgaaagctgggggggctggcatcagcaacgggatgtttagaagttgtgttgggtgtagaacagtggggtatttggcaatagagctgggctt

SEQ ID NO: 146955 - DNA, 120 bp, Artificial Sequence
  ENSG00000105193_12 (sequence is synthesized)
ggggttcagaagatgtaaaagctgagatggggttgttgaagattaagggtttgctttgagaactgggatgttaggaagctcacctcactggggcggggggacccaaagggtgaagggaca

SEQ ID NO: 146956 - DNA, 76 bp, Artificial Sequence
  ENSG00000105193_13 (sequence is synthesized)
cacctcactggggcggggggacccaaagggtgaagggacaccgactattttttattttatttatttgttttgagag

SEQ ID NO: 146957 - DNA, 120 bp, Artificial Sequence
  ENSG00000105193_14 (sequence is synthesized)
ctcaggtgatccaccagcctcggcctcccgaagtgctgggattgcaggcgtcagccaccgtgtgcggccgaatttgggtctgtttaaatgcttgcttgtaaaaggggttcctctgttccc

SEQ ID NO: 146958 - DNA, 120 bp, Artificial Sequence
  ENSG00000105193_15 (sequence is synthesized)
tccctttttgggactctcaatttctttggctcagaatggaaagaaaccagagtctgatttctgccccttctgaactctactacttttaaaagaaagaatatctacattgcagggtcagtt

SEQ ID NO: 146959 - DNA, 120 bp, Artificial Sequence
  ENSG00000105193_16 (sequence is synthesized)
aaaaaaattttttttgagttataaggttcttttttaaaaacagtatcttgctgtcacctaccctggagtgcaatagcacaatcctaatgaactgcagccttaaactcctgagttggagat

SEQ ID NO: 146960 - DNA, 120 bp, Artificial Sequence
  ENSG00000105193_17 (sequence is synthesized)
ggtccttggtctcatgtgatccttctgcctggactgggattacaggtgtgatcaccatgcctggcctagaatttaataaaaattctgagatttcctttgtgtagcagatgttgaatgtta

SEQ ID NO: 146961 - DNA, 120 bp, Artificial Sequence
  ENSG00000105197_0 (sequence is synthesized)
acaggtgtggaggggcaacccatcccttcagacaattgggaggtgagggccgattgccttacacggtgagacaagcggcctgactcgtgactatttttttggacaaatcaggcagccact

SEQ ID NO: 146962 - DNA, 120 bp, Artificial Sequence
  ENSG00000105197_1 (sequence is synthesized)
gactcccttcattatggcctcagctttatctctgggcaataagtgtgatcccttccttcgctgcgtcctttgcaggggcggtggcgctctgcaaggcccaagggggcgtggtccagatga

SEQ ID NO: 146963 - DNA, 120 bp, Artificial Sequence
  ENSG00000105197_2 (sequence is synthesized)
ctttgaatcccagttgtcgcccccagggtcagccaggagactagtcagaagcaaacgcgcctgcggcaatccgcccgatgcctttggtctctctcgggcttccgtccacccgcccctccc

SEQ ID NO: 146964 - DNA, 120 bp, Artificial Sequence
  ENSG00000105197_3 (sequence is synthesized)
ccgcgtttccattggctgtagctccggcccggggcgggcgaagagggagcgagtgggcggggccgcgtggcgtcagcgcaagatggcggcctcggcagcggtgttctcgcgcttgcgaag

SEQ ID NO: 146965 - DNA, 120 bp, Artificial Sequence
  ENSG00000105197_4 (sequence is synthesized)
cgggctccggctcggctcgcggggactgtgcacgaggttggcgacgccgccccgccgggccccagatcaggccgcagagatcgggagccgcgggagcactaaggcgcaagggccacagca

SEQ ID NO: 146966 - DNA, 120 bp, Artificial Sequence
  ENSG00000105197_5 (sequence is synthesized)
gcagccgggctcagagggtcccagctatgccaaaaaagttgcgctctggcttgctgggctgcttggagctggtgggactgtgagcgtcgtctatatctttggaaacaacccggtggacga

SEQ ID NO: 146967 - DNA, 120 bp, Artificial Sequence
  ENSG00000105197_6 (sequence is synthesized)
aaatggtgccaagattcctgatgagttcgacaatgatccaattctggtacagcagttgcgccggacatacaaatatttcaaagattatagacagatgatcatcgagcccaccagcccttg

SEQ ID NO: 146968 - DNA, 120 bp, Artificial Sequence
  ENSG00000105197_7 (sequence is synthesized)
ccttctcccagaccctctgcaggaaccgtactaccagccaccctacacgctcgttttggagctcaccggcgtcctcttgcatcctgagtggtcgctggccactggctggaggtttaagaa

SEQ ID NO: 146969 - DNA, 120 bp, Artificial Sequence
  ENSG00000105197_8 (sequence is synthesized)
gcgcccaggcatcgagaccttgttccagcagcttgcccctttatatgaaattgtcatctttacgtcagagactggcatgactgcgtttccactcattgatagtgtggacccccatggctt

SEQ ID NO: 146970 - DNA, 120 bp, Artificial Sequence
  ENSG00000105197_9 (sequence is synthesized)
catctcctaccgcctattccgggacgccacaagatacatggatggacaccatgtaaaggatatttcatgtctgaatcgggacccagctcgagtagtagttgtggactgcaagaaggaagc

SEQ ID NO: 146971 - DNA, 120 bp, Artificial Sequence
  ENSG00000105197_10 (sequence is synthesized)
tctgatgaccgggtcttgttggatctgtctgccttcctcaagaccattgcactgaatggtgtggaggacgtgcgaaccgtgctggagcactatgccctggaggatgacccgctggcggct

SEQ ID NO: 146972 - DNA, 120 bp, Artificial Sequence
  ENSG00000105197_11 (sequence is synthesized)
ttcaaacagcggcaaagccggctagagcaggaggagcagcagcgcctggccgagctctccaagtccaacaagcagaacctcttccttggctccctcaccagccgcttgtggcctcgctcc

SEQ ID NO: 146973 - DNA, 120 bp, Artificial Sequence
  ENSG00000105197_12 (sequence is synthesized)
aaacagccctgaactctgggcctcctcaaactcagtgcctgggtccagggccccagtgcttccagaccaagacttgggccaccacttgtccaataaagtacatcccagacgccacacctg

SEQ ID NO: 146974 - DNA, 120 bp, Artificial Sequence
  ENSG00000105197_13 (sequence is synthesized)
ctgtgtcccgagagtctccagatgggggcatcagggtgaggtccgggactcttgggtcatcgtcccacagtggctgatcggctgccaagcacagtgggggtgctttgttggatcagagca

SEQ ID NO: 146975 - DNA, 120 bp, Artificial Sequence
  ENSG00000105197_14 (sequence is synthesized)
gatttttcaccctggtctcggaatctaaaaaccctcgctgtgtcttcctgtgtgttgcgtgatctgtgaaaaatacatctccctctgaccacagactcctcatctgtggagaagggaaga

SEQ ID NO: 146976 - DNA, 120 bp, Artificial Sequence
  ENSG00000105197_15 (sequence is synthesized)
gaggatggcacttggctttaaagacaggtagctgccaggctactgtggagagaatgtgttatgggcctagtgggcctctggtggaccagagattacccctctcaacaggccagctgctgg

SEQ ID NO: 146977 - DNA, 120 bp, Artificial Sequence
  ENSG00000105197_16 (sequence is synthesized)
ctggttggctccagccagtgtggccctggggtaaagggggcctggagttgcttgacacgccagttgttcaaaagaagcaagaacttgggaatattttttttttttttttgagacagggtc

SEQ ID NO: 146978 - DNA, 88 bp, Artificial Sequence
  ENSG00000105197_17 (sequence is synthesized)
ggtctcactgttgcccaggctggagtgcattgatgtgatcttagcttacaacagccttgacctcccggctcaagtgatctcccctcct

SEQ ID NO: 146979 - DNA, 120 bp, Artificial Sequence
  ENSG00000105197_18 (sequence is synthesized)
caggtgcgtgctaccatacccagctaatttaaacaaattttttttttgtagagatggggtcttggtgcccaagctggtctcaaactcctagtcttaagcaatcttcctgctttggcctcc

SEQ ID NO: 146980 - DNA, 120 bp, Artificial Sequence
  ENSG00000105197_19 (sequence is synthesized)
caaagcgctaggattccaggtgtgagctactgtgcccagctaaaatagggatttttatattaaatctccctattttaaaatgttggctcctagcggggcgcagtggctcacgcctgtaat

SEQ ID NO: 146981 - DNA, 120 bp, Artificial Sequence
  ENSG00000105197_20 (sequence is synthesized)
aataaaataaaataaaaataaaatgttggcttctaactaaaacaggcagatatgtagcagtgttctccactggaactttctgtgatgtttggttcatgttctaggtctgtactgtccagt

SEQ ID NO: 146982 - DNA, 73 bp, Artificial Sequence
  ENSG00000105197_21 (sequence is synthesized)
ccacataaagtttctgagcacttgaaatgtggctagtgtgactgagaaactgaatttttaattttgtttgaga

SEQ ID NO: 146983 - DNA, 90 bp, Artificial Sequence
  ENSG00000105197_22 (sequence is synthesized)
gacactttgggaggccgaagcaggaggattgcttgaatccaggagtacgagaccaccctgggcaacatggtgaaatcctgcctctaaaaa

SEQ ID NO: 146984 - DNA, 120 bp, Artificial Sequence
  ENSG00000105197_23 (sequence is synthesized)
gaccaccctgggcaacatggtgaaatcctgcctctaaaaaaaaaacaaagtaacgagcccagcgaggttatgcatacctgtagtcccagctacgtgagaggctgaggtgggaggaatccc

SEQ ID NO: 146985 - DNA, 120 bp, Artificial Sequence
  ENSG00000105197_24 (sequence is synthesized)
cccagctacgtgagaggctgaggtgggaggaatcccttgagccaaggaggtcgtgcgtggctgtgatgatctgtgatcgtgccgctaaattctagcctgggcaacagagcgagaccctgt

SEQ ID NO: 146986 - DNA, 120 bp, Artificial Sequence
  ENSG00000105197_25 (sequence is synthesized)
tttttttttggagtcagggtctcgctgtgtcgcccaggctggagcacagtggtgtaactatagctcactgcagtgttgaacttctgggctcaaacaatcttcctgccttggcctccccaa

SEQ ID NO: 146987 - DNA, 120 bp, Artificial Sequence
  ENSG00000105197_26 (sequence is synthesized)
atgctgagattataggagtgagccactctgcccaactacttttaattaaatagccacatgtgtctcctgtattgacagtaccactgtgtattaagagtatgagtcccagattgtgtaagt

SEQ ID NO: 146988 - DNA, 120 bp, Artificial Sequence
  ENSG00000105197_27 (sequence is synthesized)
tcaaatccaagctctaccacttctcggctggcttgtgatcctgtgcaagttactttacctctcagtgcctcggtttctacatttataaaataataactgggcaggcacagtggctcatgg

SEQ ID NO: 146989 - DNA, 120 bp, Artificial Sequence
  ENSG00000105197_28 (sequence is synthesized)
ctgtcatcccaacacttcaggaggccgaggtgggaggatcgcctgaggccaggagttggagagcagcctgggcaacatgggaagagcctgtctcttgcgggggggggagaagaaagttct

SEQ ID NO: 146990 - DNA, 120 bp, Artificial Sequence
  ENSG00000105197_29 (sequence is synthesized)
tgtctcaggctagctttggggaccaaatgaagcactcccatgtaggcactcaaatggaactatgtaaaccttaggcaaggcacctctgcctcagtttcctcatctctaaaatggggtgat

SEQ ID NO: 146991 - DNA, 120 bp, Artificial Sequence
  ENSG00000105197_30 (sequence is synthesized)
ggtagtatgttagcagagtggttgtgaggagtgaacgggacagtccgtatgtgggttatatgtatatattcccaggtgcttgctgttaccaggccatatgggttattcacagattgaaat

SEQ ID NO: 146992 - DNA, 73 bp, Artificial Sequence
  ENSG00000105197_31 (sequence is synthesized)
ggttgactttatctccctcgccctgcctccatccccacattgccccccactatcccagtctctcctactccag

SEQ ID NO: 146993 - DNA, 120 bp, Artificial Sequence
  ENSG00000105197_32 (sequence is synthesized)
cccacattgccccccactatcccagtctctcctactccagccttcatctagtgctaactgattaaatattctaagatgaccttctctggtgtgtgtgatgataattaaaaggcattcaga

SEQ ID NO: 146994 - DNA, 120 bp, Artificial Sequence
  ENSG00000105197_33 (sequence is synthesized)
actgtgtggaccagactgaacctctgcactctagatttttttttttttgaagcctctacaaaggataattaaaatttacaccatgactctttgtcctggggtgcactgtctgtaagccgg

SEQ ID NO: 146995 - DNA, 120 bp, Artificial Sequence
  ENSG00000105197_34 (sequence is synthesized)
taagccggtggagttatttcccaaaatccttggtccttcccagcttgaggaagtctgcaggactgagggaggggacctgtgcttttttttttgtttttttgagatggagtctctgttgcc

SEQ ID NO: 146996 - DNA, 120 bp, Artificial Sequence
  ENSG00000105197_35 (sequence is synthesized)
ccaccttaactgagtgattaaccctgcaaatttccttctcctggctcagaagcacccccactgagcaccttgcgaccccccactcctgcccgccctttgactgtaattttccattacctt

SEQ ID NO: 146997 - DNA, 120 bp, Artificial Sequence
  ENSG00000105197_36 (sequence is synthesized)
aaatctgtgttcctatctggcggtatgtcattgccttctatctttggacctagaaatgagttggttcaaaccaggcagatatgcagacctgtttgtatctggtagataagaaacccctgg

SEQ ID NO: 146998 - DNA, 120 bp, Artificial Sequence
  ENSG00000105197_37 (sequence is synthesized)
ctcaggtgatacttgagcaggaggggcctgggacgctggagtcccagtctggccgtgggagttattttctctgtggcgttggtggtggcgaggccgcagagatcgggagccgcgggagca

SEQ ID NO: 146999 - DNA, 120 bp, Artificial Sequence
  ENSG00000105197_38 (sequence is synthesized)
gattatagacaggtgagcagaagccctgggctcagtccccatgtctccagccctggcctccttgtctgagcgcccccatcctgtccctctcccacagatgatcatcgagcccaccagccc

SEQ ID NO: 147000 - DNA, 120 bp, Artificial Sequence
  ENSG00000105197_39 (sequence is synthesized)
gttggggatagacctgggcagtggggttgtgatgaggtggactttcagccctggctgtgctatgtgatcttggggaggagatgtcacctgtcattgcctcgctttcttcagctgggagaa

SEQ ID NO: 147001 - DNA, 120 bp, Artificial Sequence
  ENSG00000105197_40 (sequence is synthesized)
ggcagtcatgctaacacccactctgtagggtagtgtaggtgtgcccaggcacgctataagtgccacaaaggagccagacccgcagtcacagcctatgaacttcttgacctccaagagcca

SEQ ID NO: 147002 - DNA, 120 bp, Artificial Sequence
  ENSG00000105197_41 (sequence is synthesized)
cagagacagagggagagaactctgttctgggaatcccccaggctggatctttgtcctcttggggactctgaggacctctgggtcttggtgtttcactgtcctcactgtcttcccagctgg

SEQ ID NO: 147003 - DNA, 120 bp, Artificial Sequence
  ENSG00000105197_42 (sequence is synthesized)
caagatggcggcctcggcagcggtgttctcgcgcttgcgaagcgggctccggctcggctcgcggggactgtgcacgaggttggcgacgccgccccgccgggccccagatcaggaaacaac

SEQ ID NO: 147004 - DNA, 120 bp, Artificial Sequence
  ENSG00000105197_43 (sequence is synthesized)
agtctgtgggtgagaggggtcccctttggtctgttcaggcacattgctggtctggagtgagcctttctttcccagtgacctttgcctgttcctcttggggtcctggagattccttttctg

SEQ ID NO: 147005 - DNA, 120 bp, Artificial Sequence
  ENSG00000105197_44 (sequence is synthesized)
tatgtgatggggttctgcctctgacatcctaaaccttccatttttctctctacctcccagattcctgatgagttcgacaatggtgagtaaacaagcacagattctggagtccctgaccct

SEQ ID NO: 147006 - DNA, 120 bp, Artificial Sequence
  ENSG00000105197_45 (sequence is synthesized)
cctgaccctctcaactctgtcatttgtaaggatgtctctctccccatctggtgtctccggcccctcctccttccactggggaggtgggggagccagcagctggatggctttgtggggagg

SEQ ID NO: 147007 - DNA, 120 bp, Artificial Sequence
  ENSG00000105197_46 (sequence is synthesized)
gacattacaaagcccaagcccacttccctggcccctcagccccgagcagatggtcagagacagatgggggattggagccttgggtgggagggcttggggacacagggtggcctatctcca

SEQ ID NO: 147008 - DNA, 120 bp, Artificial Sequence
  ENSG00000105197_47 (sequence is synthesized)
gacacatgggttcctgtgccttagaccaagcatctgcggttcccaactccttccccatccccctcgagcccctaccccattaggctcattttcaaaactatgccgccttcctctctcccc

SEQ ID NO: 147009 - DNA, 120 bp, Artificial Sequence
  ENSG00000105198_0 (sequence is synthesized)
agaagactggactcaattctgaaggtcgccaagaaggagagaacaatgtcttctttacccgtgccatacaaactgcctgtgtctttgtctgttggttcctgcgtgataatcaaagggaca

SEQ ID NO: 147010 - DNA, 120 bp, Artificial Sequence
  ENSG00000105198_1 (sequence is synthesized)
ccaatccactcttttatcaatgacccacagctgcaggtggatttctacactgacatggatgaggattcagatattgccttccgtttccgagtgcactttggcaatcatgtggtcatgaac

SEQ ID NO: 147011 - DNA, 120 bp, Artificial Sequence
  ENSG00000105198_2 (sequence is synthesized)
aggcgtgagtttgggatatggatgttggaggagacaacagactacgtgccctttgaggatggcaaacaatttgagctgtgcatctacgtacattacaatgagtatgagataaaggtcaat

SEQ ID NO: 147012 - DNA, 120 bp, Artificial Sequence
  ENSG00000105198_3 (sequence is synthesized)
ggcatacgcatttacggctttgtccatcgaatcccgccatcatttgtgaagatggtgcaagtgtcgagagatatctccctgacctcagtgtgtgtctgcaattgagggagatgatcacac

SEQ ID NO: 147013 - DNA, 120 bp, Artificial Sequence
  ENSG00000105198_4 (sequence is synthesized)
tcctcattgttgaggaatccctctttctacctgaccatgggattcccagaacctgctaacagaataatccctgctcacattttcccctacactttgtcattaaaacagcacgaaaactca

SEQ ID NO: 147014 - DNA, 120 bp, Artificial Sequence
  ENSG00000105202_0 (sequence is synthesized)
cttttccacgtgcgaaagccccggactcgtggagttgtgaacgccgcggactccggagccgcacaaaccagggctcgccatgaagccaggattcagtccccgtgggggtggctttggcgg

SEQ ID NO: 147015 - DNA, 120 bp, Artificial Sequence
  ENSG00000105202_1 (sequence is synthesized)
ccgagggggctttggtgaccgtggtggtcgtggaggccgagggggctttggcgggggccgaggtcgaggcggaggctttagaggtcgtggacgaggaggaggtggaggcggcggcggcgg

SEQ ID NO: 147016 - DNA, 120 bp, Artificial Sequence
  ENSG00000105202_2 (sequence is synthesized)
tggaggaggaggaagaggtggtggaggcttccattctggtggcaaccggggtcgtggtcggggaggaaaaagaggaaaccagtcggggaagaatgtgatggtggagccgcatcggcatga

SEQ ID NO: 147017 - DNA, 120 bp, Artificial Sequence
  ENSG00000105202_3 (sequence is synthesized)
gggtgtcttcatttgtcgaggaaaggaagatgcactggtcaccaagaacctggtccctggggaatcagtttatggagagaagagagtctcgatttcggaaggagatgacaaaattgagta

SEQ ID NO: 147018 - DNA, 120 bp, Artificial Sequence
  ENSG00000105202_4 (sequence is synthesized)
gggtggtgtggaccagatccacatcaaaccgggggctaaggttctctacctcggggctgcctcgggcaccacggtctcccatgtctctgacatcgttggtccggatggtctagtctatgc

SEQ ID NO: 147019 - DNA, 120 bp, Artificial Sequence
  ENSG00000105202_5 (sequence is synthesized)
agtcgagttctcccaccgctctggccgtgacctcattaacttggccaagaagaggaccaacatcattcctgtgatcgaggatgctcgacacccacacaaataccgcatgctcatcgcaat

SEQ ID NO: 147020 - DNA, 120 bp, Artificial Sequence
  ENSG00000105202_6 (sequence is synthesized)
ggtggatgtgatctttgctgatgtggcccagccagaccagacccggattgtggccctgaatgcccacaccttcctgcgtaatggaggacactttgtgatttccattaaggccaactgcat

SEQ ID NO: 147021 - DNA, 120 bp, Artificial Sequence
  ENSG00000105202_7 (sequence is synthesized)
tgactccacagcctcagccgaggccgtgtttgcctccgaagtgaaaaagatgcaacaggagaacatgaagccgcaggagcagttgacccttgagccatatgaaagagaccatgccgtggt

SEQ ID NO: 147022 - DNA, 120 bp, Artificial Sequence
  ENSG00000105202_8 (sequence is synthesized)
cgtgggagtgtacaggccaccccccaaggtgaagaactgaagttcagcgctgtcaggattgcgagagatgtgtgttgatactgttgcacgtgtgtttttctattaaaagactcatccgtc

SEQ ID NO: 147023 - DNA, 120 bp, Artificial Sequence
  ENSG00000105202_9 (sequence is synthesized)
acctggaatatcagggtttgactgcttgcctgcgctgtgtgacttagggccaggcccttttctgtcactgtgcctgtgagtaaaaggagtggcttgaaccagataatgtcattcaacctc

SEQ ID NO: 147024 - DNA, 120 bp, Artificial Sequence
  ENSG00000105202_10 (sequence is synthesized)
actcctgggttcttggcctcaagggaagagacgtgggtgtggggtgaccaaccttagagagacaacggggagtatagataccagactatttgatttgatgggcctctttaaaattttatg

SEQ ID NO: 147025 - DNA, 120 bp, Artificial Sequence
  ENSG00000105202_11 (sequence is synthesized)
ctgctaaaacctgctcttctggtttctttagaaagaaccaggagatcttcatggtttctgagcctgtataggcttcccatttagagggcccctggcacccacgtgtcccactctgttacc

SEQ ID NO: 147026 - DNA, 120 bp, Artificial Sequence
  ENSG00000105202_12 (sequence is synthesized)
ctttgttactttatgtgtttataagctgttaagtgtagtgccttaaaacctcaggctttggccagacgaggtggctcatgcctttaatctcaacactttcggaggccgaggcaggtggat

SEQ ID NO: 147027 - DNA, 120 bp, Artificial Sequence
  ENSG00000105202_13 (sequence is synthesized)
atcttcctctcacaggccaccccccaaggtgaagaactgaagttcagcgctgtcaggattgcgagagatgtgtgttgatactgttgcacgtgtgtttttctattaaaagactcatccgtc

SEQ ID NO: 147028 - DNA, 120 bp, Artificial Sequence
  ENSG00000105202_14 (sequence is synthesized)
ggaacctgggctctcaggcagatgggattgggtacttttgctacttgctgaataactcttggccagtgactttatgtctggacctcagtttattcatgtgaaaaatggacatgatagcaa

SEQ ID NO: 147029 - DNA, 120 bp, Artificial Sequence
  ENSG00000105202_15 (sequence is synthesized)
gtgcgaaagccccggactcgtggagttgtgaacgccgcggactccggagccgcacaaaccagggctcgccatgaagccaggtggaggcttccattctggtggcaaccggggtcgtggtcg

SEQ ID NO: 147030 - DNA, 120 bp, Artificial Sequence
  ENSG00000105202_16 (sequence is synthesized)
gggaggaaaaagaggaaaccagtcggggaagaatgtgatggtggagccgcatcggcatgagggaaggagatgacaaaattgagtaccgagcctggaaccccttccgctccaagctagcag

SEQ ID NO: 147031 - DNA, 120 bp, Artificial Sequence
  ENSG00000105204_0 (sequence is synthesized)
gttgtggtcgccattttgctggttgcattactgggtaatcggggccctggcttgccgcgtccgccggataccctcagccagtgggcaggtctgagctcgggctccccgagcagtttgagt

SEQ ID NO: 147032 - DNA, 120 bp, Artificial Sequence
  ENSG00000105204_1 (sequence is synthesized)
ccccttgcccgctccttcaggtctcagcggcggtggcagccgaggtgcaggatgcaagaaggcgccccccggccgggctcccgctccaggcctcgctcccctgcggccctctgagcccac

SEQ ID NO: 147033 - DNA, 120 bp, Artificial Sequence
  ENSG00000105204_2 (sequence is synthesized)
catggccgtcccaccgggccatggtcccttctctggcttcccagggccccaggagcacacgcaggtattgcctgatgtgcggctactgcctcggaggctgcccctggccttccgggatgc

SEQ ID NO: 147034 - DNA, 120 bp, Artificial Sequence
  ENSG00000105204_3 (sequence is synthesized)
aacctcagccccgctgcgtaagctctctgtggacctcatcaagacctacaagcacatcaatgaggtatactatgcgaagaagaagcggcgggcccagcaggcgccaccccaggattcgag

SEQ ID NO: 147035 - DNA, 120 bp, Artificial Sequence
  ENSG00000105204_4 (sequence is synthesized)
caacaagaaggagaagaaggtcctgaaccatggttatgatgacgacaaccatgactacatcgtgcgcagtggcgagcgctggctggagcgctacgaaattgactcgctcattggcaaagg

SEQ ID NO: 147036 - DNA, 120 bp, Artificial Sequence
  ENSG00000105204_5 (sequence is synthesized)
ctcctttggccaggtggtgaaagcctatgatcatcagacccaggagcttgtggccatcaagatcatcaagaacaaaaaggctttcctgaaccaggcccagattgagctgcggctgctgga

SEQ ID NO: 147037 - DNA, 120 bp, Artificial Sequence
  ENSG00000105204_6 (sequence is synthesized)
gctgatgaaccagcatgacacggagatgaagtactatatagtacacctgaagcggcacttcatgttccggaaccacctgtgcctggtatttgagctgctgtcctacaacctgtacgacct

SEQ ID NO: 147038 - DNA, 120 bp, Artificial Sequence
  ENSG00000105204_7 (sequence is synthesized)
cctgcgcaacacccacttccgcggcgtctcgctgaacctgacccggaagctggcgcagcagctctgcacggcactgctctttctggccacgcctgagctcagcatcattcactgcgacct

SEQ ID NO: 147039 - DNA, 120 bp, Artificial Sequence
  ENSG00000105204_8 (sequence is synthesized)
caagcccgaaaacatcttgctgtgcaaccccaagcgcagcgccatcaagattgtggacttcggcagctcctgccagcttggccagaggatctaccagtatatccagagccgcttctaccg

SEQ ID NO: 147040 - DNA, 120 bp, Artificial Sequence
  ENSG00000105204_9 (sequence is synthesized)
ctcacctgaggtgctcctgggcacaccctacgacctggccattgacatgtggtccctgggctgcatccttgtggagatgcacaccggagagcccctcttcagtggctccaatgaggtcga

SEQ ID NO: 147041 - DNA, 120 bp, Artificial Sequence
  ENSG00000105204_10 (sequence is synthesized)
gggtggctggaccctacgaaggacgaaagaactcaggaaggattaccagggccccgggacacggcggctgcaggaggtgctgggcgtgcagacgggcgggcccgggggccggcgggcggg

SEQ ID NO: 147042 - DNA, 120 bp, Artificial Sequence
  ENSG00000105204_11 (sequence is synthesized)
ggagccgggccacagccccgccgactacctccgcttccaggacctggtgctgcgcatgctggagtatgagcccgccgcccgcatcagccccctgggggctctgcagcacggcttcttccg

SEQ ID NO: 147043 - DNA, 120 bp, Artificial Sequence
  ENSG00000105204_12 (sequence is synthesized)
ccgcacggccgacgaggccaccaacacgggcccggcaggcagcagtgcctccacctcgcccgcgcccctcgacacctgcccctcttccagcaccgccagctccatctccagttctggagg

SEQ ID NO: 147044 - DNA, 120 bp, Artificial Sequence
  ENSG00000105204_13 (sequence is synthesized)
ctccagtggctcctccagtgacaaccggacctaccgctacagcaaccgatattgtgggggccctgggccccctatcacagactgtgagatgaacagcccccaggtcccaccctcccagcc

SEQ ID NO: 147045 - DNA, 120 bp, Artificial Sequence
  ENSG00000105204_14 (sequence is synthesized)
gctgcggccctgggcagggggtgatgtgccccacaagacacatcaagcccctgcctctgcctcgtcactgcctgggaccggggcccagttacccccccagccccgataccttggtcgtcc

SEQ ID NO: 147046 - DNA, 120 bp, Artificial Sequence
  ENSG00000105204_15 (sequence is synthesized)
cccatcaccaacctcaccaccacccccggagctgatggatgtgagcctggtgggcggccctgctgactgctccccacctcacccagcgcctgccccccagcacccggctgcctcagccct

SEQ ID NO: 147047 - DNA, 120 bp, Artificial Sequence
  ENSG00000105204_16 (sequence is synthesized)
ccggactcggatgactggaggtcgtccacccctcccgcctcctgatgaccctgccactctggggcctcacctgggcctccgtggtgtaccccagagcacagcagccagctcgtgaccctg

SEQ ID NO: 147048 - DNA, 120 bp, Artificial Sequence
  ENSG00000105204_17 (sequence is synthesized)
ccccctccctggggcccctcctgaagccataccctcccccatctgggggccctgggctcccatcctcatctctctccttgactggaattgctgctacccagctggggtgggtgaggcctg

SEQ ID NO: 147049 - DNA, 120 bp, Artificial Sequence
  ENSG00000105204_18 (sequence is synthesized)
cactgattggggcctggggcaggggggtcaaggagagggttttggccgctccctccccactaaggactggacccttgggcccctctccccctttttttctatttattgtaccaaagacag

SEQ ID NO: 147050 - DNA, 120 bp, Artificial Sequence
  ENSG00000105204_19 (sequence is synthesized)
tggtggtccggtggagggaagaccccccctcaccccaggaccctaggagggggtgggggcaggtagggggagatggccttgctcctcctcgctgtacccccagtaaagagctttctcaca

SEQ ID NO: 147051 - DNA, 120 bp, Artificial Sequence
  ENSG00000105204_20 (sequence is synthesized)
ttccggtctcagcaggcccaggagggcctcctgggtggggggcgggacgccgggtccctaggggctggtggtcactcagggtggggcgtgtcgcccctcccccgtccacctgctctactc

SEQ ID NO: 147052 - DNA, 120 bp, Artificial Sequence
  ENSG00000105204_21 (sequence is synthesized)
actcttcccccgcgtgccctgggctgacccttgtcccctcctctccccgcccccggtggcagtggcggctgctgttgtcacccaccgggcctcctgtcccgcttgccctccccgccgcgg

SEQ ID NO: 147053 - DNA, 80 bp, Artificial Sequence
  ENSG00000105204_22 (sequence is synthesized)
ggccgggccagagacaggcggtcgccttttcagcgccgccaccgccgccatgctggccgctcgcccaccccactgggggc

SEQ ID NO: 147054 - DNA, 120 bp, Artificial Sequence
  ENSG00000105204_23 (sequence is synthesized)
cagctgcgaagtatgcatagtgttcttggtgggtctccttgcctggagggagaagaatggtgcctggctctgccctgctcccacccctttcttcgtgacatgccctgccccaacaggtgg

SEQ ID NO: 147055 - DNA, 120 bp, Artificial Sequence
  ENSG00000105204_24 (sequence is synthesized)
cacacacccagtggttcagtggcttcaagtcccatgctgggccactcaccctagcccacttagtttccctgtgcctcagtcgccttttctgtaaaacagtttaaataacaagactcaaca

SEQ ID NO: 147056 - DNA, 120 bp, Artificial Sequence
  ENSG00000105205_0 (sequence is synthesized)
catttaaattctgcagctcagagattcacacagaagtctggacacaattcagaagagccacccagaaggagacaacaatgtccctgctacccgtgccatacacagaggctgcctctttgt

SEQ ID NO: 147057 - DNA, 120 bp, Artificial Sequence
  ENSG00000105205_1 (sequence is synthesized)
ctactggttctactgtgacaatcaaagggcgaccacttgcctgtttcttgaatgaaccatatctgcaggtggatttccacactgagatgaaggaggaatcagacattgtcttccatttcc

SEQ ID NO: 147058 - DNA, 120 bp, Artificial Sequence
  ENSG00000105205_2 (sequence is synthesized)
cagccgtgagtatggggcctggaagcagcaggtggaatccaagaatatgccctttcaggatggccaagaatttgaactgagcatctcagtgctgccagataagtaccaggtaatggtcaa

SEQ ID NO: 147059 - DNA, 120 bp, Artificial Sequence
  ENSG00000105205_3 (sequence is synthesized)
tggccaatcctcttacacctttgaccatagaatcaagcctgaggctgtgaagatggtgcaagtgtggagagatatctccctgaccaaatttaatgtcagctatttaaagagataaccaga

SEQ ID NO: 147060 - DNA, 120 bp, Artificial Sequence
  ENSG00000105205_4 (sequence is synthesized)
cttcatgttgccaaggaatccctgtctctacgtgaacttgggattccaaagccagctaacagcatgatcttttctcacttcaatccttactcctgctcattaaaacttaatcaaacttca

SEQ ID NO: 147061 - DNA, 120 bp, Artificial Sequence
  ENSG00000105219_0 (sequence is synthesized)
cttcccctagctgcaagggtcggtgcttggcctcgcccgcaacaccctcctggaggatgctggtgagaggcagggaccaggggtccggctcccggctcgggcctatcgttaggcgctggg

SEQ ID NO: 147062 - DNA, 120 bp, Artificial Sequence
  ENSG00000105219_1 (sequence is synthesized)
cccccaggccctctcctttgcagagtctcgctgcctccctcgacgcagagccttcaagcgccgcagtccccgacggcttccccgcgggccccactgtctccccaagacgcctggcgaggc

SEQ ID NO: 147063 - DNA, 120 bp, Artificial Sequence
  ENSG00000105219_2 (sequence is synthesized)
cgccggggctggaggaggcgctgagcgcgctggggctgcagggagaacgcgagtacgccggggacatcttcgccgaagtcatggtgtgccgcgtgctgcccctgagagccctgccccgcg

SEQ ID NO: 147064 - DNA, 120 bp, Artificial Sequence
  ENSG00000105219_3 (sequence is synthesized)
ctgtgaccccggagatgcgcgccctggtggtagactggctggtccaggtgcacgagtacctgggtctggctggtgacacactttatctggcggttcacctgcttgattcctacctgagcg

SEQ ID NO: 147065 - DNA, 120 bp, Artificial Sequence
  ENSG00000105219_4 (sequence is synthesized)
atggaagagtgcgtgcttcccgagcccgccttcctctgcctcctgagcgcggactccttctcacgggcggagctgctgcgcgccgagcgtcgcatcctgagccgcctggatttccggctg

SEQ ID NO: 147066 - DNA, 120 bp, Artificial Sequence
  ENSG00000105219_5 (sequence is synthesized)
caccaccccggcccgctgctgtgcctcgggctgctggccgcgctggcagggagcagcccccaggtgatgttacttgccacctacttcctggagctgtctttgctggaggccgaggcggcg

SEQ ID NO: 147067 - DNA, 120 bp, Artificial Sequence
  ENSG00000105219_6 (sequence is synthesized)
ggatgggagccgggtcgtcgtgcggctgcggctctgagcctggcgcaccgcttgctcgacggggcgggctccaggctccagccagaactttacagccccgaggaactgggcaccctcgag

SEQ ID NO: 147068 - DNA, 120 bp, Artificial Sequence
  ENSG00000105219_7 (sequence is synthesized)
ccgtgcatggcccgcgctgcgctccgaggtcccgcgccgggtcgcgccgcagtcttcctcaagtatgcgcggccccagcgccaggggaccagccttgccgccgcctgcctgctccgccgc

SEQ ID NO: 147069 - DNA, 120 bp, Artificial Sequence
  ENSG00000105219_8 (sequence is synthesized)
ctccagtctgagcctccctgagtactgggactcagtcacaaaaaaatcaacaacaaaaaacaaaaccctcccagtgtgtgtccgtctctcatctcaataaaagaatttattttattctga

SEQ ID NO: 147070 - DNA, 120 bp, Artificial Sequence
  ENSG00000105219_9 (sequence is synthesized)
agccagaactttacaggtgtagtcttggcggaggaagtgtatggggtcaccgcagcttcagggacttaccttcctggtcatttttacggtctcggagaatgagagacaattattgaggag

SEQ ID NO: 147071 - DNA, 120 bp, Artificial Sequence
  ENSG00000105219_10 (sequence is synthesized)
gaggtggcacctagacttgatttttctgggtgtgggagagaatggggtgggaggaccccattagtccagatctggggtctcttaaccttgccccagagtggaagatagtctcccaggccc

SEQ ID NO: 147072 - DNA, 120 bp, Artificial Sequence
  ENSG00000105219_11 (sequence is synthesized)
agaagatgctcctattgccttccagggctgagaacgaaggatcacccaggcctcgagtcctccatctctgtatctggtggtggatggggtgttcctttagctgctagggccgctaaccat

SEQ ID NO: 147073 - DNA, 120 bp, Artificial Sequence
  ENSG00000105219_12 (sequence is synthesized)
gctaccaggtggcagggcgaaccatggtttccctcagcctgtgcacccagcatagagaggatggctgcccatcctcagctcccctccttgcttcctcgagtgttctgactccgcactagc

SEQ ID NO: 147074 - DNA, 120 bp, Artificial Sequence
  ENSG00000105219_13 (sequence is synthesized)
cgcgccctgtaggaagaatagggtgtccacctctccccggtgctcgcctagtcactccagttgaagacgggacgcgtgcccgatctcaagagagcccccgacccgtccgtggggaaccac

SEQ ID NO: 147075 - DNA, 120 bp, Artificial Sequence
  ENSG00000105219_14 (sequence is synthesized)
atcgacgcttcttctcagcctccagtctccagttccaaggatgggtcatctccaaccacttgccctgcctcagtttctccatctccctgctgcagccccgaggaactgggcaccctcgag

SEQ ID NO: 147076 - DNA, 120 bp, Artificial Sequence
  ENSG00000105219_15 (sequence is synthesized)
cagtttgggtgtggcatgcctaagatgtccaactgactggaggaggctgctgcatccagggctggagctcaggagaaaggcagaggcacaggtgtggagagtgaagcgtccctgccccaa

SEQ ID NO: 147077 - DNA, 120 bp, Artificial Sequence
  ENSG00000105219_16 (sequence is synthesized)
gcgtctacatcgcctgcagctgctgggcgtggcttgcctgtttgtggcgtgcaaaatggaagagtgcgtgcttcccgaggaaactgaggtccggaacttggggcctttccagggcaggga

SEQ ID NO: 147078 - DNA, 120 bp, Artificial Sequence
  ENSG00000105220_0 (sequence is synthesized)
gcttgctgcgcgctgccggcgctccttcctcctcggctcgcgtctcactcagtgtaccttctagtcccgccatggccgctctcacccgggacccccagttccagaagctgcagcaatggt

SEQ ID NO: 147079 - DNA, 120 bp, Artificial Sequence
  ENSG00000105220_1 (sequence is synthesized)
accgcgagcaccgctccgagctgaacctgcgccgcctcttcgatgccaacaaggaccgcttcaaccacttcagcttgaccctcaacaccaaccatgggcatatcctggtggattactcca

SEQ ID NO: 147080 - DNA, 120 bp, Artificial Sequence
  ENSG00000105220_2 (sequence is synthesized)
agaacctggtgacggaggacgtgatgcggatgctggtggacttggccaagtccaggggcgtggaggccgcccgggagcggatgttcaatggtgagaagatcaactacaccgagggtcgag

SEQ ID NO: 147081 - DNA, 120 bp, Artificial Sequence
  ENSG00000105220_3 (sequence is synthesized)
ccgtgctgcacgtggctctgcggaaccggtcaaacacacccatcctggtagacggcaaggatgtgatgccagaggtcaacaaggttctggacaagatgaagtctttctgccagcgtgtcc

SEQ ID NO: 147082 - DNA, 120 bp, Artificial Sequence
  ENSG00000105220_4 (sequence is synthesized)
ggagcggtgactggaaggggtacacaggcaagaccatcacggacgtcatcaacattggcattggcggctccgacctgggacccctcatggtgactgaagcccttaagccatactcttcag

SEQ ID NO: 147083 - DNA, 120 bp, Artificial Sequence
  ENSG00000105220_5 (sequence is synthesized)
gaggtccccgcgtctggtatgtctccaacattgatggaactcacattgccaaaaccctggcccagctgaaccccgagtcctccctgttcatcattgcctccaagacctttactacccagg

SEQ ID NO: 147084 - DNA, 120 bp, Artificial Sequence
  ENSG00000105220_6 (sequence is synthesized)
agaccatcacgaatgcagagacggcgaaggagtggtttctccaggcggccaaggatccttctgcagtggcgaagcactttgttgccctgtctactaacacaaccaaagtgaaggagtttg

SEQ ID NO: 147085 - DNA, 120 bp, Artificial Sequence
  ENSG00000105220_7 (sequence is synthesized)
gaattgaccctcaaaacatgttcgagttctgggattgggtgggaggacgctactcgctgtggtcggccatcggactctccattgccctgcacgtgggttttgacaacttcgagcagctgc

SEQ ID NO: 147086 - DNA, 120 bp, Artificial Sequence
  ENSG00000105220_8 (sequence is synthesized)
tctcgggggctcactggatggaccagcacttccgcacgacgcccctggagaagaacgcccccgtcttgctggccctgctgggtatctggtacatcaactgctttgggtgtgagacacacg

SEQ ID NO: 147087 - DNA, 120 bp, Artificial Sequence
  ENSG00000105220_9 (sequence is synthesized)
ccatgctgccctatgaccagtacctgcaccgctttgctgcgtacttccagcagggcgacatggagtccaatgggaaatacatcaccaaatctggaacccgtgtggaccaccagacaggcc

SEQ ID NO: 147088 - DNA, 120 bp, Artificial Sequence
  ENSG00000105220_10 (sequence is synthesized)
ccattgtgtggggggagccagggaccaatggccagcatgctttttaccagctcatccaccaaggcaccaagatgataccctgtgacttcctcatcccggtccagacccagcaccccatac

SEQ ID NO: 147089 - DNA, 120 bp, Artificial Sequence
  ENSG00000105220_11 (sequence is synthesized)
ggaagggtctgcatcacaagatcctcctggccaacttcttggcccagacagaggccctgatgaggggaaaatcgacggaggaggcccgaaaggagctccaggctgcgggcaagagtccag

SEQ ID NO: 147090 - DNA, 120 bp, Artificial Sequence
  ENSG00000105220_12 (sequence is synthesized)
aggaccttgagaggctgctgccacataaggtctttgaaggaaatcgcccaaccaactctattgtgttcaccaagctcacaccattcatgcttggagccttggtcgccatgtatgagcaca

SEQ ID NO: 147091 - DNA, 120 bp, Artificial Sequence
  ENSG00000105220_13 (sequence is synthesized)
agatcttcgttcagggcatcatctgggacatcaacagctttgaccagtggggagtggagctgggaaagcagctggctaagaaaatagagcctgagcttgatggcagtgctcaagtgacct

SEQ ID NO: 147092 - DNA, 120 bp, Artificial Sequence
  ENSG00000105220_14 (sequence is synthesized)
ctcacgacgcttctaccaatgggctcatcaacttcatcaagcagcagcgcgaggccagagtccaataaactcgtgctcatctgcagcctcctctgtgactcccctttctcttctcgtccc

SEQ ID NO: 147093 - DNA, 120 bp, Artificial Sequence
  ENSG00000105220_15 (sequence is synthesized)
tcctccccggagccggcactgcatgttcctggacaccacccagagcaccctctggttgtgggcttggaccacgagcccttagcagggaaggctggtctcccccagcctaacccccagccc

SEQ ID NO: 147094 - DNA, 120 bp, Artificial Sequence
  ENSG00000105220_16 (sequence is synthesized)
ctccatgtctatgctccctctgtgttagaattggctgaagtgtttttgtgcagctgacttttctgacccatgttcacgttgttcacatcccatgtagaaaaataaagatgccacggagga

SEQ ID NO: 147095 - DNA, 120 bp, Artificial Sequence
  ENSG00000105220_17 (sequence is synthesized)
ttatgtagcagagggcaggagcgctcagcaggacgcaggctgtgcctctgcggacacttaacactaagtggtgagcgggtctagagtggagcaaggtgccctgagaagacaatagtgggg

SEQ ID NO: 147096 - DNA, 120 bp, Artificial Sequence
  ENSG00000105220_18 (sequence is synthesized)
tgggggcacaatcagtcaggacggcaacttggcctgtgtcaccaaatcccaagactgttttccactcctcacctctgtgactgcagaaattggatactctgttcactcgatggttctaaa

SEQ ID NO: 147097 - DNA, 120 bp, Artificial Sequence
  ENSG00000105220_19 (sequence is synthesized)
aactgcattgagattatgtttgtttcgggtgaattcctggacaagaccgaggatgactgccatctcctggcaagacgctcaggtagttcttttgctttaaaaggcagatattgaaaactg

SEQ ID NO: 147098 - DNA, 120 bp, Artificial Sequence
  ENSG00000105220_20 (sequence is synthesized)
gtggcatgatcacagctcactgcagccagtaatcctcttgcctcagcctcccaagtagttgagactacaggttgtaccactatgccctgctagttttttcattttttgtagagagacggg

SEQ ID NO: 147099 - DNA, 65 bp, Artificial Sequence
  ENSG00000105220_21 (sequence is synthesized)
tgtaccactatgccctgctagttttttcattttttgtagagagacggagcacggtctcagctcat

SEQ ID NO: 147100 - DNA, 81 bp, Artificial Sequence
  ENSG00000105220_22 (sequence is synthesized)
tcctgcctcagactcctgtgtagctgggagatttttttagcagagacagtgtctcactgtgttagtcaggatggtctcgat

SEQ ID NO: 147101 - DNA, 87 bp, Artificial Sequence
  ENSG00000105220_23 (sequence is synthesized)
gcgggtcttgctgtgtttcccagactagactggtcttgaattccagggctcaagagatctcccacctcagcctcccacagtgctggg

SEQ ID NO: 147102 - DNA, 120 bp, Artificial Sequence
  ENSG00000105220_24 (sequence is synthesized)
tgggattacaggcgtgagccgccacacccagcctattcaaaatttttttttcttagagacagggtctttgttgcccaggctggactgcagtgatacaatcatagctgactgaagcctcaa

SEQ ID NO: 147103 - DNA, 120 bp, Artificial Sequence
  ENSG00000105220_25 (sequence is synthesized)
agtgatacaatcatagctgactgaagcctcaaattcccaggctaaggtgatcttctcacctcagccttccaagtagctgggtccgcagatgcatgccagtacacccagctcatttaaaaa

SEQ ID NO: 147104 - DNA, 84 bp, Artificial Sequence
  ENSG00000105220_26 (sequence is synthesized)
tacaggcgtgagtcaccgcgcccggctcattttaaaatttttgtagatcagtgtactgttttttgtagtgataggatcccactg

SEQ ID NO: 147105 - DNA, 120 bp, Artificial Sequence
  ENSG00000105220_27 (sequence is synthesized)
aaatttttgtagtgataggatcccactgaggccagagaatagggtctggagacaaaggagcattcacttcagcctctgactggtggcaggccaagtctttatttacatagggtgtaacca

SEQ ID NO: 147106 - DNA, 120 bp, Artificial Sequence
  ENSG00000105220_28 (sequence is synthesized)
aataggaaacctctaaagggtacttaaaccccagattttctacacagggcacttgcttgagcctcatcccgctttctggaatgtacttttgcttcaataaatctgtgcttttgttccttc

SEQ ID NO: 147107 - DNA, 120 bp, Artificial Sequence
  ENSG00000105220_29 (sequence is synthesized)
atccgcgcctgcgctcaaccccgcctacacctgctccgtggcctccccggaggcgatgagccaaccccggtagctccagaggcgtggtcccctcgccttcgccggtcaacatgactcagc

SEQ ID NO: 147108 - DNA, 120 bp, Artificial Sequence
  ENSG00000105220_30 (sequence is synthesized)
atcctcgcgcctagaacactgcctgtaacgtggaaggtgttcgatctatagagttttgtcgaatgaatgaatgaagccgactagtgcacagggagtgcagcggcgcgatggtagctctct

SEQ ID NO: 147109 - DNA, 120 bp, Artificial Sequence
  ENSG00000105220_31 (sequence is synthesized)
agaggccagcaaagcggcggcgcaagaggtagggagagaggagctgaggccccagatcagcggccgcgggcaaggtcgctcagcgggcacccggcctggtcccgccatggccgctctcac

SEQ ID NO: 147110 - DNA, 80 bp, Artificial Sequence
  ENSG00000105220_32 (sequence is synthesized)
agagaggagctgaggccccagatcagcggccgcgggcaaggtcgctcagcgggcacccggcctgggtatcggggcgcggg

SEQ ID NO: 147111 - DNA, 120 bp, Artificial Sequence
  ENSG00000105220_33 (sequence is synthesized)
aacatgactcagcatcctcggtgggctcgcctcctcccccggaacagctgtctaaaatccatgggcgtggaaacgccacgccacgccccgctcccgacttcttcagctcaggccccagaa

SEQ ID NO: 147112 - DNA, 120 bp, Artificial Sequence
  ENSG00000105220_34 (sequence is synthesized)
ctgaccaccccaccagtcctctgccccagtccctctgccttcactcccatggccacctgtgctccagggcctgcctgacccctgtccagcggccctgaagtaaggtctgtgatgtctaaa

SEQ ID NO: 147113 - DNA, 120 bp, Artificial Sequence
  ENSG00000105220_35 (sequence is synthesized)
ggatctggcccccttatgaggatctgagtctgtcaatatctgaagaggtaggaatctggtacaggtatgaggatctgtgtgtgtgtcagtgtctgaggaattaggaatctggtacaggtg

SEQ ID NO: 147114 - DNA, 120 bp, Artificial Sequence
  ENSG00000105220_36 (sequence is synthesized)
tgaggatcttcatgtctctgtatctgaggaagtaggatctgatacaggtattaggatctgggtctatgtctgaggaggtagcatctgatacaggtatgaagacctgagtctgtcagtgtc

SEQ ID NO: 147115 - DNA, 120 bp, Artificial Sequence
  ENSG00000105220_37 (sequence is synthesized)
tgaagtggttggatctggccctggtatgaggatctgggtttgtcagtatttgaggaggtaggatctgtccctggtaggagggtctgtgtcttctagtgtctgaagaagtaggatctggcc

SEQ ID NO: 147116 - DNA, 120 bp, Artificial Sequence
  ENSG00000105220_38 (sequence is synthesized)
ctggtatgaggatctgggtctgtcagtatctgaggaggtaggatctcatacaggtatgaggatctgggtttttcaatgtctgaggaggtaggatctggcacaggcatgagcatctgggtc

SEQ ID NO: 147117 - DNA, 120 bp, Artificial Sequence
  ENSG00000105220_39 (sequence is synthesized)
tgaccatgtctaaagagttgaagctgtgtgcaggtatgaggccttgggtctgccagtgtctggggaggtgaggctgggcatgggtgtgagaccctgggtctgtccatatctgaggaggta

SEQ ID NO: 147118 - DNA, 120 bp, Artificial Sequence
  ENSG00000105220_40 (sequence is synthesized)
ggatctggtatgagtatgaggatctgggtgtgtccgtgtctgaggaggtgggccctggcacaggtatgaggcctggggtctgtccgtgtctgaggaggtgggccctggcgcaggtatgag

SEQ ID NO: 147119 - DNA, 120 bp, Artificial Sequence
  ENSG00000105220_41 (sequence is synthesized)
gacagggcccgacatctcagggaagaccacggtaagctcttcagtttgtcttgtggctgtggtcagtcatctgtagtctgccctgttggtcttcccatgtgttgccagcacctgcctgct

SEQ ID NO: 147120 - DNA, 120 bp, Artificial Sequence
  ENSG00000105220_42 (sequence is synthesized)
gccttgcttcctggaggtgggttgggccagggccctccgagacgcccctgtgcaagaccagggacagggtttccggcaggaggtggggggcggggtgtgccggccctccctcagcacctt

SEQ ID NO: 147121 - DNA, 120 bp, Artificial Sequence
  ENSG00000105220_43 (sequence is synthesized)
tgtggaactgaagtccagcttccttgctgtgggctgaaggtcgttctcagattctcagaggtcacctgcatcctctagcttgtgggcctcttcactgcagaaccagcaatggcaggttaa

SEQ ID NO: 147122 - DNA, 120 bp, Artificial Sequence
  ENSG00000105220_44 (sequence is synthesized)
atccttctctgaagctttgattctgtcttgccacttctgttgcatctctctgacttgtttaccttcctcttctacattttgcttttgttccctaagtgacagtgtcatgctgtgttgtct

SEQ ID NO: 147123 - DNA, 120 bp, Artificial Sequence
  ENSG00000105220_45 (sequence is synthesized)
aggctggacttacagtggcatgatcacagttcactgtattctcaacgtcccaggctcaagcagtcttcctgcctcggcccctcaaatagctgagacttacaggcactaacaggcacttac

SEQ ID NO: 147124 - DNA, 120 bp, Artificial Sequence
  ENSG00000105220_46 (sequence is synthesized)
aggcactaacaggcacttacaggcacttacaggcactaacagcctggctaactgttaaactttttgtagaggccagatttcactatgttgcctaggctggtctccaactcctgggctcaa

SEQ ID NO: 147125 - DNA, 120 bp, Artificial Sequence
  ENSG00000105220_47 (sequence is synthesized)
ttacaggcatgagctaccgtgcctggccctcttttacttttaagggccagtgtgattagattggggctactagataatccaggaaaatctccccttttgtttattttatttatttatttt

SEQ ID NO: 147126 - DNA, 120 bp, Artificial Sequence
  ENSG00000105220_48 (sequence is synthesized)
atccaggaaaatctccccttttgtttattttatttatttattttattttagagatagcatgtcactctgttgctgaggctggagtgcactggcccaatcatagctcactacagccttgaa

SEQ ID NO: 147127 - DNA, 86 bp, Artificial Sequence
  ENSG00000105220_49 (sequence is synthesized)
ctcctgggctcaagcaatcctttttacaacatgcctggctaagtttttttttttttttaaagagacagagtcttgctctgttgccc

SEQ ID NO: 147128 - DNA, 120 bp, Artificial Sequence
  ENSG00000105220_50 (sequence is synthesized)
acctcagcctcctgagtagctgggaacaggcacacgccaccacacccagctgatttttttatttttattttttgtagagatggagtctcagtatgttgcccaagctgccctcgaactcct

SEQ ID NO: 147129 - DNA, 120 bp, Artificial Sequence
  ENSG00000105220_51 (sequence is synthesized)
tggagtctcagtatgttgcccaagctgccctcgaactccttcagagaatttactgtgctttgtctcaggtgtgcagagcagcacagggttacggtagcacaatcttgggagtcagtgagc

SEQ ID NO: 147130 - DNA, 120 bp, Artificial Sequence
  ENSG00000105220_52 (sequence is synthesized)
tggattgaattctgattgttcctgtctatagttctgtgatccagcactgtggacttgtggaacccaaggctctactagaacagggcgatgatgcctttcctccttaggatcttagtatta

SEQ ID NO: 147131 - DNA, 120 bp, Artificial Sequence
  ENSG00000105220_53 (sequence is synthesized)
tgatgcctttcctccttaggatcttagtattatttttttttcgagacaccgtttcactttgttgccccggctggagtgcagtagtgtgaccttgactcactgcaacctcagcctcctggg

SEQ ID NO: 147132 - DNA, 120 bp, Artificial Sequence
  ENSG00000105220_54 (sequence is synthesized)
tagctggaattacagttgcacaccaccacgcccagctaccttcttaggatcttaaaagatagatgttggtaaaattgtgagcaggacccctagcaagtggtgtgtagttctttttttttt

SEQ ID NO: 147133 - DNA, 62 bp, Artificial Sequence
  ENSG00000105220_55 (sequence is synthesized)
cctgatgacaggcatgcgccaccatgcccagctaaatttttttttggtatttttagtagaga

SEQ ID NO: 147134 - DNA, 64 bp, Artificial Sequence
  ENSG00000105220_56 (sequence is synthesized)
acctcgtggtccatctggtgtgtagttcttaaagagcagttatcactgttccctgccttgtggt

SEQ ID NO: 147135 - DNA, 120 bp, Artificial Sequence
  ENSG00000105220_57 (sequence is synthesized)
gttcttaaagagcagttatcactgttccctgccttgtggtgtcatcggatgtgtccccctcgctccaactgagctgtacagcgagtgacccaggctgggactgacccctgctgagaagta

SEQ ID NO: 147136 - DNA, 120 bp, Artificial Sequence
  ENSG00000105220_58 (sequence is synthesized)
ttggaggtgtgaagctatggcaccaggcaggggcttggggcgtgcctggcttgtcctacagaatgggagggcctgtcctcacagacctgcacgtctcagcctctggggcagggtgtgctt

SEQ ID NO: 147137 - DNA, 120 bp, Artificial Sequence
  ENSG00000105220_59 (sequence is synthesized)
cccttcaaggggtttagggatcaggactctcttggagacattccttggtgttttctgcaggtctttgaaggaaatcgcccaaccaactctattgtgttcaccaagctcacaccattcatg

SEQ ID NO: 147138 - DNA, 120 bp, Artificial Sequence
  ENSG00000105220_60 (sequence is synthesized)
cttggagccttggtcggtgagtgagtaggggaaaggtcctggcttggggtaggttggaatgggcttgtggagccctgatgtgccctgtctgtcacttctgcagccatgtatgagcacaag

SEQ ID NO: 147139 - DNA, 120 bp, Artificial Sequence
  ENSG00000105220_61 (sequence is synthesized)
atcttcgttcagggcatcatctgggacatcaacagctttgaccagtgggggtgagttgctcacttaggggagggccgggaatacctttgtgtcggctcagggatttcagtagcaacgtta

SEQ ID NO: 147140 - DNA, 120 bp, Artificial Sequence
  ENSG00000105220_62 (sequence is synthesized)
gcgttcctgggggcttgcagcctcgccgggagtctcggccccgggtctgcttcgttacgaggaaaaacgggcccctccgtggggacatttcccctcctcctccccgtgcagctctggcca

SEQ ID NO: 147141 - DNA, 120 bp, Artificial Sequence
  ENSG00000105220_63 (sequence is synthesized)
tttgagcaggggctcctttcgcagttgtgaagagaggccttggctgacgcagcaagcgggaaagggctgtccctttccatccgctcctggccacatgagcttgggagcgtctgcagggcg

SEQ ID NO: 147142 - DNA, 120 bp, Artificial Sequence
  ENSG00000105220_64 (sequence is synthesized)
ggcagcccgggcgggggtgtttgagggagctgggtggaaggatggagacgtcgggcgtgattcctgcagaagacacctgtgcacgaccgggaagtgggaaggagtgtttgagcaaatcat

SEQ ID NO: 147143 - DNA, 120 bp, Artificial Sequence
  ENSG00000105220_65 (sequence is synthesized)
gggcgggagtgcggccaagggagctctgatcactgatactggtggaggcgggggaggggagcgactgtggctccgggctagacgtcccgatggccatccctgtcatctggatgggtgcct

SEQ ID NO: 147144 - DNA, 120 bp, Artificial Sequence
  ENSG00000105220_66 (sequence is synthesized)
gagtaacttacggcagaaagtggaagccctgggaaggggtggtcccccacttcagtccgggctcctcatccagggtctgcctgcatctacggtctgtgaggatggcttctttctctgggc

SEQ ID NO: 147145 - DNA, 120 bp, Artificial Sequence
  ENSG00000105220_67 (sequence is synthesized)
tgcaactgactggtcagtagggcttctcctcctatgtggaataggtaaggaattgctggccctgtctgccctggggaccagaatacctgatggctcctcagagcttcctggtgcagtcac

SEQ ID NO: 147146 - DNA, 120 bp, Artificial Sequence
  ENSG00000105220_68 (sequence is synthesized)
gaagggctgggtggctgttcagcctgtgtttgtttgcctggcctggtaggtggcccctgcccacacttgggtcccagtcctaggttcggttcccagatgtccaggggtatcatgctctgg

SEQ ID NO: 147147 - DNA, 120 bp, Artificial Sequence
  ENSG00000105220_69 (sequence is synthesized)
tgtcccaggcaggcctgggtgagagctgttgcagagcagtgtgtgggccaggtcctcacacggggttacagctgccctcagcagggggctttgcaggcacaacgtcactggcgtgctggt

SEQ ID NO: 147148 - DNA, 120 bp, Artificial Sequence
  ENSG00000105220_70 (sequence is synthesized)
catggactgatctggtgtccagcttggggtgggcagatcctgggccctgccctcgactcacaggctgctccagccctgccccatccctggctctggggaagaccaaagtgaaggagtttg

SEQ ID NO: 147149 - DNA, 120 bp, Artificial Sequence
  ENSG00000105220_71 (sequence is synthesized)
ggagtggtttctccaggcggccaaggatccttctgcagtggcgaagcactttgttgccctgtctactaacacagtaagtgcccccgtggtcccctgtactgccttcctgggagtgcccag

SEQ ID NO: 147150 - DNA, 120 bp, Artificial Sequence
  ENSG00000105220_72 (sequence is synthesized)
tctcagagacgcggttcgtaggtctggtggatcttggcttggctgatggtatggaaggtttggttgcctgtgggctgcaagccttccttgccttttccgcatttacccattcaacctctg

SEQ ID NO: 147151 - DNA, 120 bp, Artificial Sequence
  ENSG00000105220_73 (sequence is synthesized)
cagctttgaggagggaggcttggagtcagtgggatcacgataaccccttcttccgtctcccaggcctgactgatacacagaacccttcatacacatgaccttcctaggcctttgtgccca

SEQ ID NO: 147152 - DNA, 120 bp, Artificial Sequence
  ENSG00000105220_74 (sequence is synthesized)
cgctgtggtcggccatcggactctccattgccctgcacgtgggtgagtgtgtttctgtgtcttgcagcccctgtgggagacagtgttgcagtctaaggtcggggtagggggcttgtgtcc

SEQ ID NO: 147153 - DNA, 120 bp, Artificial Sequence
  ENSG00000105220_75 (sequence is synthesized)
ctgaacatcatgctgtcctcacaggctgctggcctctctgcagctggctgggatatttatttcatgtccagaaggaaggtctgggtttttttgcgtgtgcaagttggcccccgtctttgc

SEQ ID NO: 147154 - DNA, 120 bp, Artificial Sequence
  ENSG00000105220_76 (sequence is synthesized)
ccctcacaactgcagtcctgtttctctcctatcctaggcagagtcagatccctgcactcagggccacctctcactggaggggctttgtctaggtccgagtcctcccatgtcgtatcttct

SEQ ID NO: 147155 - DNA, 120 bp, Artificial Sequence
  ENSG00000105220_77 (sequence is synthesized)
ggctctccatgcagccttccttcgttgcagaaggagctgtgcccactgcccacaggacgcagggtgtggccacttctgttgactctgcttttgtgtcacaggttttgacaacttcgagca

SEQ ID NO: 147156 - DNA, 120 bp, Artificial Sequence
  ENSG00000105220_78 (sequence is synthesized)
gctgctctcgggggctcactggatggtgagtgctgaggctggttctctgccaagtgctggccagaggcgcgtgtgttggtcctggtcccccgctttctcccccactgtcctgtccctccc

SEQ ID NO: 147157 - DNA, 120 bp, Artificial Sequence
  ENSG00000105220_79 (sequence is synthesized)
ttctgggatgtaagtacaagcacttctgcactgggtgaattaagtgtcctttgccaagtcatggctgttgagaggcccatgaggtcagtgggtgggaggacgctactcgctgtggtcggc

SEQ ID NO: 147158 - DNA, 120 bp, Artificial Sequence
  ENSG00000105221_0 (sequence is synthesized)
gccgtgctagccgttgggcctgcctcggaggaggcgtcgccgccgccgctgccgctgccggcgccgttgccgctgccgggaaacacaaggaaagggaaccagcgcagcgtggcgatgggc

SEQ ID NO: 147159 - DNA, 120 bp, Artificial Sequence
  ENSG00000105221_1 (sequence is synthesized)
gggggtagagccccgccggagaggctgggcggctgccggtgacagactgtgccctgtccacggtgcctcctgcatgtcctgctgccctgagctgtcccgagctaggtgacagcgtaccac

SEQ ID NO: 147160 - DNA, 120 bp, Artificial Sequence
  ENSG00000105221_2 (sequence is synthesized)
gctgccaccatgaatgaggtgtctgtcatcaaagaaggctggctccacaagcgtggtgaatacatcaagacctggaggccacggtacttcctgctgaagagcgacggctccttcattggg

SEQ ID NO: 147161 - DNA, 120 bp, Artificial Sequence
  ENSG00000105221_3 (sequence is synthesized)
tacaaggagaggcccgaggcccctgatcagactctaccccccttaaacaacttctccgtagcagaatgccagctgatgaagaccgagaggccgcgacccaacacctttgtcatacgctgc

SEQ ID NO: 147162 - DNA, 120 bp, Artificial Sequence
  ENSG00000105221_4 (sequence is synthesized)
ctgcagtggaccacagtcatcgagaggaccttccacgtggattctccagacgagagggaggagtggatgcgggccatccagatggtcgccaacagcctcaagcagcgggccccaggcgag

SEQ ID NO: 147163 - DNA, 120 bp, Artificial Sequence
  ENSG00000105221_5 (sequence is synthesized)
gaccccatggactacaagtgtggctcccccagtgactcctccacgactgaggagatggaagtggcggtcagcaaggcacgggctaaagtgaccatgaatgacttcgactatctcaaactc

SEQ ID NO: 147164 - DNA, 120 bp, Artificial Sequence
  ENSG00000105221_6 (sequence is synthesized)
cttggcaagggaacctttggcaaagtcatcctggtgcgggagaaggccactggccgctactacgccatgaagatcctgcggaaggaagtcatcattgccaaggatgaagtcgctcacaca

SEQ ID NO: 147165 - DNA, 120 bp, Artificial Sequence
  ENSG00000105221_7 (sequence is synthesized)
gtcaccgagagccgggtcctccagaacaccaggcacccgttcctcactgcgctgaagtatgccttccagacccacgaccgcctgtgctttgtgatggagtatgccaacgggggtgagctg

SEQ ID NO: 147166 - DNA, 120 bp, Artificial Sequence
  ENSG00000105221_8 (sequence is synthesized)
ttcttccacctgtcccgggagcgtgtcttcacagaggagcgggcccggttttatggtgcagagattgtctcggctcttgagtacttgcactcgcgggacgtggtataccgcgacatcaag

SEQ ID NO: 147167 - DNA, 120 bp, Artificial Sequence
  ENSG00000105221_9 (sequence is synthesized)
ctggaaaacctcatgctggacaaagatggccacatcaagatcactgactttggcctctgcaaagagggcatcagtgacggggccaccatgaaaaccttctgtgggaccccggagtacctg

SEQ ID NO: 147168 - DNA, 120 bp, Artificial Sequence
  ENSG00000105221_10 (sequence is synthesized)
gcgcctgaggtgctggaggacaatgactatggccgggccgtggactggtgggggctgggtgtggtcatgtacgagatgatgtgcggccgcctgcccttctacaaccaggaccacgagcgc

SEQ ID NO: 147169 - DNA, 120 bp, Artificial Sequence
  ENSG00000105221_11 (sequence is synthesized)
ctcttcgagctcatcctcatggaagagatccgcttcccgcgcacgctcagccccgaggccaagtccctgcttgctgggctgcttaagaaggaccccaagcagaggcttggtggggggccc

SEQ ID NO: 147170 - DNA, 120 bp, Artificial Sequence
  ENSG00000105221_12 (sequence is synthesized)
agcgatgccaaggaggtcatggagcacaggttcttcctcagcatcaactggcaggacgtggtccagaagaagctcctgccacccttcaaacctcaggtcacgtccgaggtcgacacaagg

SEQ ID NO: 147171 - DNA, 120 bp, Artificial Sequence
  ENSG00000105221_13 (sequence is synthesized)
tacttcgatgatgaatttaccgcccagtccatcacaatcacaccccctgaccgctatgacagcctgggcttactggagctggaccagcggacccacttcccccagttctcctactcggcc

SEQ ID NO: 147172 - DNA, 120 bp, Artificial Sequence
  ENSG00000105221_14 (sequence is synthesized)
agcatccgcgagtgagcagtctgcccacgcagaggacgcacgctcgctgccatcaccgctgggtggttttttccccctaactttttacttagcctttttggtttgtgtccccacccccac

SEQ ID NO: 147173 - DNA, 120 bp, Artificial Sequence
  ENSG00000105221_15 (sequence is synthesized)
ctcctcaccccctttccagttcttcttcaggcccctcccagacgcaccccagcggcccctgcagcccctgcctccagcctccagcctcacctttgtgcccagactcgcatttggaagact

SEQ ID NO: 147174 - DNA, 120 bp, Artificial Sequence
  ENSG00000105221_16 (sequence is synthesized)
ccacctcccgcccaggcctgggctgttgggcggttggagattcaggttttaatccacacaagccccagtgaggggtgaagcatggcgcctggggcctgcctgagtttctggcctgggtgt

SEQ ID NO: 147175 - DNA, 120 bp, Artificial Sequence
  ENSG00000105221_17 (sequence is synthesized)
cgtgctggtgtctgcctccgcgctgctgcatctggacgaaggctgccttctggtgggacgcgacacccggcagacagtggtgctgccttccaggccccgtggcctaggctcggagtggcc

SEQ ID NO: 147176 - DNA, 120 bp, Artificial Sequence
  ENSG00000105221_18 (sequence is synthesized)
aggcacggggcggtccaatcccccacccgctgtccccctatgggggcagaaaagcaataatgtccaggggcaggcaggggcccttgggagctgcagggctgggggttagggctgctccct

SEQ ID NO: 147177 - DNA, 120 bp, Artificial Sequence
  ENSG00000105221_19 (sequence is synthesized)
ggtgaatggagtcagatcctaggatctgtaccatggggaaccaggagtggccgggctgggtgccgcctcctggtccggcctcctccccaccaaactgtcctcaccctatggatgaggcag

SEQ ID NO: 147178 - DNA, 120 bp, Artificial Sequence
  ENSG00000105221_20 (sequence is synthesized)
gaggaacatttggggccaaacctgcctgcctcccagccccgtgccttactagggcttccttccagctggccttacctcccgctggaccctgggcctggcctggccccactgggggctatg

SEQ ID NO: 147179 - DNA, 120 bp, Artificial Sequence
  ENSG00000105221_21 (sequence is synthesized)
ttggtcagggaggggtgggggtgggcatctctggtacctattggggtggggggcctctgaaaagggaggctcctaggcccccctcacccctccctctccccagggccccacgttctgcag

SEQ ID NO: 147180 - DNA, 120 bp, Artificial Sequence
  ENSG00000105221_22 (sequence is synthesized)
ccttaaggttgaacatgagtgcacgtccatgtcagtgctgtgggactcctgtgcgtgcctcggactgcgtgtgtcggcgggacgcaggcacacgtgggtgtgtgtgcatgtgtgtttgtg

SEQ ID NO: 147181 - DNA, 120 bp, Artificial Sequence
  ENSG00000105221_23 (sequence is synthesized)
tgagggcagcgtgtcctccagtgtgcatggtgtgtgggcttgggccccatccctggcccgagcatttcatcctgtgggggaggggtgctgacctagtgggaggagccccactgtgatcca

SEQ ID NO: 147182 - DNA, 120 bp, Artificial Sequence
  ENSG00000105221_24 (sequence is synthesized)
tgagctgccctgcccacgcctcccctccctgtagcaacacctctgggtgtttggagtttagcttttgtgggtttgctctccctatcccatctcctgtactacacagttcatggcagggtg

SEQ ID NO: 147183 - DNA, 120 bp, Artificial Sequence
  ENSG00000105221_25 (sequence is synthesized)
gggaggggtggggttggttcgggtgggtgagggtctttttcctctgtgtgcgatgttgttatctgacagttctccgtccctactggcctttctcctcgtcttcatatttgtacggtacaa

SEQ ID NO: 147184 - DNA, 120 bp, Artificial Sequence
  ENSG00000105221_26 (sequence is synthesized)
gcaataaagacactcatttcagaccagggcccagcctgcactcacgccagcccaaccactctgggctttgccttggtgatggagtcagacccctgggccccagctcctcctgtactagcc

SEQ ID NO: 147185 - DNA, 120 bp, Artificial Sequence
  ENSG00000105221_27 (sequence is synthesized)
gttcccttcagcaaggagggcactgagctcagggtgagggcagctggggtgtgtgcaggagctcaggctggagagggtgggtggagctggtgctgtggggctgaggggtatgggaaggct

SEQ ID NO: 147186 - DNA, 120 bp, Artificial Sequence
  ENSG00000105221_28 (sequence is synthesized)
ccccgcatgtgggggtggggtggacagagaccactccaggccctcagtgctgcttaggctaagagaggtggggtggagggacagggctggaagatctgggtagcccagaatgaggagggt

SEQ ID NO: 147187 - DNA, 120 bp, Artificial Sequence
  ENSG00000105221_29 (sequence is synthesized)
gcctgtgctgtcactgaatgagagggagtggttcattccacccggctgccgagcctcagaggggggcattcctatcctgccccacctccctgtttatgctgccacctggaagccttgagg

SEQ ID NO: 147188 - DNA, 120 bp, Artificial Sequence
  ENSG00000105221_30 (sequence is synthesized)
cccccaaattccagtacagacccagtggtgtgttcatggtggcgtggttgctgtcacctgggagctcctgagcgtttggttagaaccctgttcagcttggggtcagccctcccctagtca

SEQ ID NO: 147189 - DNA, 120 bp, Artificial Sequence
  ENSG00000105221_31 (sequence is synthesized)
ctgccctttagcctggatgtgtctgggcccctgcacttcccgtgcttgagtcacgtggctgcatggccgggcgctggccggatggaacacctcccccagcaagggaccagggaccagagc

SEQ ID NO: 147190 - DNA, 120 bp, Artificial Sequence
  ENSG00000105221_32 (sequence is synthesized)
cctggcctgccctgctgagccctgctgtgcagagggcctggcacagatgaatttgagattttgccgcaaggtgttagcacttcacacccattgagtctttgagattttaagtgaatgtaa

SEQ ID NO: 147191 - DNA, 120 bp, Artificial Sequence
  ENSG00000105221_33 (sequence is synthesized)
gcagaaaaagtcagatccaatttacagaaatcagagttagctacagctaggactcgtttggttggggttttttagtttgtctttctaaagtcatgtggaccttaatttaattacaaaagt

SEQ ID NO: 147192 - DNA, 120 bp, Artificial Sequence
  ENSG00000105221_34 (sequence is synthesized)
ctaccctggtggtcataaaataggcaggcctatgaagaaaggccttttactcttccatctcgtcccagccccgagttgacccacgttgctgctcctcacaccatggtgatgcaggtctcg

SEQ ID NO: 147193 - DNA, 120 bp, Artificial Sequence
  ENSG00000105221_35 (sequence is synthesized)
tagtgtgggcacaggcctggctacctcatctttttagtgcctctctcctcttccacaggatggggtcccacagctgcagcagctggccccgtagttgagcatgtgtggttatcctgtaga

SEQ ID NO: 147194 - DNA, 120 bp, Artificial Sequence
  ENSG00000105221_36 (sequence is synthesized)
gcttttcccaagaagggtgtttgaacttagagtcttaataaaatcttaccaaataaattttgagtagaataatcgtcttttgcaatgtacattttaaaaatttcacacattcttttttgt

SEQ ID NO: 147195 - DNA, 79 bp, Artificial Sequence
  ENSG00000105221_37 (sequence is synthesized)
gtctcttgaggccaggggttcgagaccagcctgggcatcatagggagaccttcatctctacaaaaaatacaaaaattag

SEQ ID NO: 147196 - DNA, 61 bp, Artificial Sequence
  ENSG00000105221_38 (sequence is synthesized)
ggtggtgcatgcctgcaatcccagctaacttggaaggctgaggcactgcactgcagcctgg

SEQ ID NO: 147197 - DNA, 120 bp, Artificial Sequence
  ENSG00000105221_39 (sequence is synthesized)
ctgcagtgagctatgattgcggcactgcactgcagcctgggacaatgagactgtgtctctaaaaataaaaaaaaaaaaaacatgatacatgctattaaaaaagacagcaaagcaggagta

SEQ ID NO: 147198 - DNA, 120 bp, Artificial Sequence
  ENSG00000105221_40 (sequence is synthesized)
taagaaaggaaattcacccgaggtcgcagggccttgagtactcattttggtgctgattacctctctgcaaatggacacggcatcataaattggtagtttcctgctctttttgtgtaatct

SEQ ID NO: 147199 - DNA, 120 bp, Artificial Sequence
  ENSG00000105221_41 (sequence is synthesized)
tttccagttaatgtgaagcctctgggggctgccctcgtgcactgatggttgtgtggagtcgggggcggcagtgcgattcccttttagctgctgcatggggggaactcaggctttccagct

SEQ ID NO: 147200 - DNA, 120 bp, Artificial Sequence
  ENSG00000105221_42 (sequence is synthesized)
gcttcctggggttccatggggtagacccctcaaccgcttcagctgccccgttaacaggaattgacttggtttcgtttggtgctaccagcagtcctgtaataaactagctatccatctgta

SEQ ID NO: 147201 - DNA, 64 bp, Artificial Sequence
  ENSG00000105221_43 (sequence is synthesized)
cagaactagtttattgttttgggatggagtctcgcactgttgtccaggctggagtgcagtggcg

SEQ ID NO: 147202 - DNA, 120 bp, Artificial Sequence
  ENSG00000105221_44 (sequence is synthesized)
ctggcctgtttttattttttatttttgttttttaaaaactttttaagagatgggtcttgctttgttacctaggctggtcttgaacgcttcggctcaagcacttggtccaccttggcctcc

SEQ ID NO: 147203 - DNA, 120 bp, Artificial Sequence
  ENSG00000105221_45 (sequence is synthesized)
tgggattacaggtgtgagccacagtgcttagcctctagttaactgttcttaaaccaggctcccttctgctgggacctacttcttgtccaccagcttctctcctctacatccctgggctgc

SEQ ID NO: 147204 - DNA, 120 bp, Artificial Sequence
  ENSG00000105221_46 (sequence is synthesized)
tgggctgccaggacctctgtccctgccatgcagactccctgctcccagtggactgtcccctccagggagtcctgcgggccagctcttgccttgcagtgtcttcagctcctttggctaatg

SEQ ID NO: 147205 - DNA, 120 bp, Artificial Sequence
  ENSG00000105221_47 (sequence is synthesized)
aatgctgcttcttactcttggtttaactttacaaaacattggtaacttataaacttgagcttgtcatttgttccgaagaattcacaggagcactctctctccctcattcaaggctcaggg

SEQ ID NO: 147206 - DNA, 120 bp, Artificial Sequence
  ENSG00000105221_48 (sequence is synthesized)
tggtggctcattttcaaggggctgtgaaaagagagggtcactcctttttgatcatttccctgctgcctggcttcaaatggccctcaggccaggtcactttagggaaattggtgatcgctc

SEQ ID NO: 147207 - DNA, 120 bp, Artificial Sequence
  ENSG00000105221_49 (sequence is synthesized)
attataggcatgagccactgcgcctggcgtggaatttcactcaggtcccttcagctctctctggttctgacagatcttgcccaaattcccatggttatgtggtcatttgcttgcctgttg

SEQ ID NO: 147208 - DNA, 120 bp, Artificial Sequence
  ENSG00000105221_50 (sequence is synthesized)
ccatggttatgtggtcatttgcttgcctgttgctgggggtggctgggaggtggcactcagctgttcgactctgaggcccaggactcctggctgctgggactcacgtgtgtccctgcacag

SEQ ID NO: 147209 - DNA, 120 bp, Artificial Sequence
  ENSG00000105221_51 (sequence is synthesized)
gctctccttggtttccataacacagttcagggggctcagctgagagacaaggctgccctgcagggtggggtgatttcaggtggcaggtgccctagggtgtgctccatgcccgtaggggag

SEQ ID NO: 147210 - DNA, 120 bp, Artificial Sequence
  ENSG00000105221_52 (sequence is synthesized)
ggagcaaccttgggtggacccactgcaggttcgtcctgggagttggtgaagacctggctacccccacgtcagagcccagccctcccaaggccctgtgcctgcagagcctggtctgaaggc

SEQ ID NO: 147211 - DNA, 120 bp, Artificial Sequence
  ENSG00000105221_53 (sequence is synthesized)
cgcttcagaacacacagttgctgcccagagcctcccttcctgctccagcctaagccgtttggcaacagtgtcttttggttttcctctttcttttgttaaaatttcctcccacgggccatg

SEQ ID NO: 147212 - DNA, 120 bp, Artificial Sequence
  ENSG00000105221_54 (sequence is synthesized)
cctggacgcttacccgcgctttctgctgctgtgggcttatttcccccacaaattccccctagtcagaaaagggggagcctgaggcccagagaggagcagcaggccttgctgctgagtccc

SEQ ID NO: 147213 - DNA, 120 bp, Artificial Sequence
  ENSG00000105221_55 (sequence is synthesized)
cacctccaccctatgttaggggctgggggtgcctgtggagagagagagcctcggggccccacccagcaggtactgtcaagggaggctggggcctgttggggaggacgtcgctgttgggga

SEQ ID NO: 147214 - DNA, 120 bp, Artificial Sequence
  ENSG00000105221_56 (sequence is synthesized)
gtcccgggctttgctcagggtatcccaggtggaggccgggccaggagtggaattctactttttcccttatttgaattttttgtagtggaagattccaaagacattcaaaaatttaaaaag

SEQ ID NO: 147215 - DNA, 120 bp, Artificial Sequence
  ENSG00000105221_57 (sequence is synthesized)
aaaataaatattacggacccccatgtagccattgtccagtttaaccagttatcagcgtttagccagccttgtttccttagctctgcctgtccctcttgttctggaatactttaaggcctg

SEQ ID NO: 147216 - DNA, 120 bp, Artificial Sequence
  ENSG00000105221_58 (sequence is synthesized)
tcctagacaacacgtcacttcactcatccatacttgaacatgtgtcctgacagatgaagactgtaaagaatataatcatgtggtgctgccatcagagccaaccaaattagctgttcattc

SEQ ID NO: 147217 - DNA, 120 bp, Artificial Sequence
  ENSG00000105221_59 (sequence is synthesized)
ctgatgtgacgattgggcctaaggcagccttcctcagcctcagcactgttaacgttttgggacagatgattctgcgctgtcggggcagccctgtgcattctagggtttcagcagcacccc

SEQ ID NO: 147218 - DNA, 120 bp, Artificial Sequence
  ENSG00000105221_60 (sequence is synthesized)
tggcttctacccactgaagccaatactagctccccaagttgtgacaatcaaaaatgacttttgggttgggcgccacagctcacgcctgtaattccagcactttagaaggctgaggtggga

SEQ ID NO: 147219 - DNA, 84 bp, Artificial Sequence
  ENSG00000105221_61 (sequence is synthesized)
ctgggcaacaaagcaagaccctgtctctgtaaaaataaaaataaattagctgggcatagtggctgggaggatcagtggagcctc

SEQ ID NO: 147220 - DNA, 84 bp, Artificial Sequence
  ENSG00000105221_62 (sequence is synthesized)
ggcatagtggctgggaggatcagtggagcctcagaggttgaggctgtagtgacccatgttcacaccactgcactccagcctggg

SEQ ID NO: 147221 - DNA, 120 bp, Artificial Sequence
  ENSG00000105221_63 (sequence is synthesized)
agctgtgtgcacaggagaagtggggacacacactcaccttagaaagtgtccccctcactcagcagcaggacttactctagccccaactggaacaacccaagtatccactgtgagaggaac

SEQ ID NO: 147222 - DNA, 120 bp, Artificial Sequence
  ENSG00000105221_64 (sequence is synthesized)
aggtcgtgggataggcatatattgagctttgattttgactgcttaacagttttccacagtagttgaaccattttgcacctcccaccaataatgagtaagggttctggttcctctacatcc

SEQ ID NO: 147223 - DNA, 120 bp, Artificial Sequence
  ENSG00000105221_65 (sequence is synthesized)
gagccagcagttggccttgtcagtttttaaaattcgagccatcccagctgtgctgactccttagttgctgagatgagcttgtaaaaagcagctctgttgatcccagcagcggccagggcc

SEQ ID NO: 147224 - DNA, 120 bp, Artificial Sequence
  ENSG00000105221_66 (sequence is synthesized)
gcgagggacagcaagccgggtcggccaagaggagactgcatgtcagaggtcccagcaggagtttcttcagcccagccgtcctgctggagaagctcgttcgcagatgttgtttctaagggc

SEQ ID NO: 147225 - DNA, 74 bp, Artificial Sequence
  ENSG00000105221_67 (sequence is synthesized)
tgtgccaccacgcccagctaattttctgttttcagtggagacaagatttctccatattggtcaggctggtctcg

SEQ ID NO: 147226 - DNA, 120 bp, Artificial Sequence
  ENSG00000105221_68 (sequence is synthesized)
caggcgtgagccaccgtgcccggcctaagccagccatcttcttggctgcagtggctggtatttcatcaccacaggactgcgtcacggacacctcagctgaggcaccaccctcagtgggag

SEQ ID NO: 147227 - DNA, 120 bp, Artificial Sequence
  ENSG00000105221_69 (sequence is synthesized)
cctcagtgggaggacagggcaggatccaggcgggacgcaggggatcttccaactcctccccctgctctccctccagctgtgctgactccttagttgctgagatgagcttgtaaaaagcag

SEQ ID NO: 147228 - DNA, 120 bp, Artificial Sequence
  ENSG00000105221_70 (sequence is synthesized)
gtagagggctgtacctttttggcgctgtggaagccgttgctgtgctgtatttacagggagtccgaaattgaagttcagaggaagaattgccttccaccgcatcttatcagaccctatggg

SEQ ID NO: 147229 - DNA, 120 bp, Artificial Sequence
  ENSG00000105221_71 (sequence is synthesized)
tgccagggtgtgtgctgggagaagaagacagcaagagagccatgcagggggtgacacagctaccagggacctgcgttagctagcagcaggacggtgaagtcggttctagctctgcgacct

SEQ ID NO: 147230 - DNA, 120 bp, Artificial Sequence
  ENSG00000105221_72 (sequence is synthesized)
tggaccacactgttcactcccatacagtggtctcagaaggacgtccaccttgggctgttgtgaggattaaatgaattaatccacgagaagctcctagaatggtgcctggtactgtactgt

SEQ ID NO: 147231 - DNA, 120 bp, Artificial Sequence
  ENSG00000105221_73 (sequence is synthesized)
atgaagatcctgcggaaggaagtcatcattgccaagctggaaaacctcatgctggacaaagatggccacatcaagatcactgactttggcctctgcaaagagggcatcagtgacggggcc

SEQ ID NO: 147232 - DNA, 120 bp, Artificial Sequence
  ENSG00000105221_74 (sequence is synthesized)
agggttgctccgagggtgcacaaagagcacacagtgcagcctctgaggtggggaaggcttcctggaggaggcactggtttagctgagacctcaaggaagagagagaagaacgcccagaag

SEQ ID NO: 147233 - DNA, 120 bp, Artificial Sequence
  ENSG00000105221_75 (sequence is synthesized)
gaggtgctgtccctgatggaggccagagggaagggcttgagtgacagaagcataacatggagagtcaggtgaatacatcaagacctggaggccacggtacttcctgctgaagagcgacgg

SEQ ID NO: 147234 - DNA, 120 bp, Artificial Sequence
  ENSG00000105221_76 (sequence is synthesized)
ctccagtagcatcactgccttacagccagcaaaggcctgagggttgcctccctcctgtggttttcacaccgtgttctccagagcccgtggctgttacttttagggaaagaggaggggagg

SEQ ID NO: 147235 - DNA, 120 bp, Artificial Sequence
  ENSG00000105221_77 (sequence is synthesized)
ctcattgggctgatttctctgcccattcctccccaacccaaccagccggactaatactgaatagcaacgcagggcagcagtcacacctgatacagacagcacccgctgaccctgcgtcca

SEQ ID NO: 147236 - DNA, 120 bp, Artificial Sequence
  ENSG00000105221_78 (sequence is synthesized)
cgctgccgtgggcctgtaggcctgcgccattcccagtgctcctctggaattggaaagaccagggcttgtgactggcgcccagcacccaggtctctggttgggctcaggtgtggttgatat

SEQ ID NO: 147237 - DNA, 120 bp, Artificial Sequence
  ENSG00000105221_79 (sequence is synthesized)
tacgaaggcaaaataaatgagggccaggttgagagtgtgggcatgtttctccactatagctgggtgatcagggaggacctccctgaggaggtgacgtgtgggtagggactggagtgctgt

SEQ ID NO: 147238 - DNA, 120 bp, Artificial Sequence
  ENSG00000105221_80 (sequence is synthesized)
ttacaagtggtgagaactgaagcctggagagcctctgtagcttgtgctgagtcccccaaccaggaagtgttggggacaggctatgaatctgggcttccagagattcccccaccacagctc

SEQ ID NO: 147239 - DNA, 120 bp, Artificial Sequence
  ENSG00000105221_81 (sequence is synthesized)
gtgggggtaggaacgtgtgaggccaagggtagggggatcccccagacctgtgtgtttccagcccagatgccctgagggcaggactgtgatgccagcctcagggccacgggcccagccctc

SEQ ID NO: 147240 - DNA, 120 bp, Artificial Sequence
  ENSG00000105221_82 (sequence is synthesized)
aatgtgcgcaggcgccctgctgtgagcccgcctccttctctgccctgctcttgcgctctcgctctctcagagttcgtctctggctctttactgtgccctgtccacggtgcctcctgcatg

SEQ ID NO: 147241 - DNA, 120 bp, Artificial Sequence
  ENSG00000105221_83 (sequence is synthesized)
aagtttgcgggacggggagcgcaggccgcagcgtgcgcgggccgggggctggacctttcgggcgcggcgggcagatcgagcctggcgtgcgcgggctaagctatcgagggggcgcgccgc

SEQ ID NO: 147242 - DNA, 120 bp, Artificial Sequence
  ENSG00000105221_84 (sequence is synthesized)
gagagaaagctgatgcccatggtgtccctagagccagctgccacttctctgggcgccaccgtagctcccgacctgctgtccgcaaataaccccaggctgggaaaggcaaaggcgccttgg

SEQ ID NO: 147243 - DNA, 75 bp, Artificial Sequence
  ENSG00000105221_85 (sequence is synthesized)
ttgtcatacgctgcctgcagtggaccacagtcatcgagaggaccttccacgtggattctccagacgagagctgat

SEQ ID NO: 147244 - DNA, 120 bp, Artificial Sequence
  ENSG00000105221_86 (sequence is synthesized)
gtaaaaacaagagccatggttgctcagaacagctctagttctcccttggctgtgcctgatggaggcagaggacaagatggttcagcatgtaaccctttcctaccgcagagccatgccttc

SEQ ID NO: 147245 - DNA, 120 bp, Artificial Sequence
  ENSG00000105221_87 (sequence is synthesized)
acttaatgccccaaaaggtgcagccggtatgtgaaccccatatggctgactcctgggggccccagccagggcagggtgtgtgtgtgcagaataagcagggccagggccctgccctggcat

SEQ ID NO: 147246 - DNA, 120 bp, Artificial Sequence
  ENSG00000105221_88 (sequence is synthesized)
tgaatttaccgcccagtccatcacaatcacaccccctgaccgctttagggagggctttctagaggaggaagcaaacgtgtcagctggccggaggaatgacgtgtgggatgccagcaatgg

SEQ ID NO: 147247 - DNA, 120 bp, Artificial Sequence
  ENSG00000105221_89 (sequence is synthesized)
gagaagcatggcatagctaaggaccggcagcagccagggagatggtgatgacagcctgggcttactggagctggaccagcggacccacttcccccagttctcctactcggccagcatccg

SEQ ID NO: 147248 - DNA, 120 bp, Artificial Sequence
  ENSG00000105221_90 (sequence is synthesized)
ttggggtcgctggggacattgccacatctctctgctcagaatgggtccttgagagcgggctccacgccacccttgctggccttaccctttgctgagtgggcagaacagccagagggcctc

SEQ ID NO: 147249 - DNA, 120 bp, Artificial Sequence
  ENSG00000105221_91 (sequence is synthesized)
tcttatgaggtacctcagtgcagaaaacagaatagttgagttgtcatgagctgaaggaccccctggtgggagtctctgaggaactctctgtagatctccttagtgcagtggagaactact

SEQ ID NO: 147250 - DNA, 120 bp, Artificial Sequence
  ENSG00000105221_92 (sequence is synthesized)
ttagtggcagggtgtgcgccaggctgacctgtggcatgcacaccacatgggactcacactggggaagttgggctgagcttctgccctcattcgccaggctccccaccaaggtccagggtg

SEQ ID NO: 147251 - DNA, 120 bp, Artificial Sequence
  ENSG00000105221_93 (sequence is synthesized)
gtggctgccctcattcgccaggctccccaccaaggtccagggtggtggctgccctcattcaccaggctccccaccaaggtccagggtggtggctctgtggcaagttgccccaagtaggga

SEQ ID NO: 147252 - DNA, 120 bp, Artificial Sequence
  ENSG00000105221_94 (sequence is synthesized)
ccttcccaagcctcccatgagcgctcctaggccactagcggagtgtcaactgccacaatacctactttatttgtatttatttatttatttatttttgaggagtcttactctgttgagtgc

SEQ ID NO: 147253 - DNA, 120 bp, Artificial Sequence
  ENSG00000105221_95 (sequence is synthesized)
tacagctacacacgacagtgtggacgcgtctcataggctaatgtcgagggaaagccgcacagaggaggtgagtccacagttcacaggtgtgtctgtgtgcagtggtacagatgggaagta

SEQ ID NO: 147254 - DNA, 120 bp, Artificial Sequence
  ENSG00000105221_96 (sequence is synthesized)
agatgggaagtagaggttaattcttgtgggggatggtcagtaaccgggaggggcacacagggccttccagggggagatgccacctcagcctcgcaagtagctgggactataggtgtgtgc

SEQ ID NO: 147255 - DNA, 73 bp, Artificial Sequence
  ENSG00000105221_97 (sequence is synthesized)
ttcatattaagaaatatgttcaagcaatcctgccacctaagtcccccaaattgctgggattacaggtgtgagc

SEQ ID NO: 147256 - DNA, 120 bp, Artificial Sequence
  ENSG00000105221_98 (sequence is synthesized)
acaggtgtgagccactttgcctggctgcatatttcataattaaaggacagaaagtctagaaaaaaagaatagaagaaagctagtgcccccacgttcgaaataagaaccacagttcacaat

SEQ ID NO: 147257 - DNA, 120 bp, Artificial Sequence
  ENSG00000105221_99 (sequence is synthesized)
ggggacggtgggtggacagggcctggctctcggctctccctgcccagctgttcccaggtaccatgggggtgggccagagggtgaggagggttggatctggcctctctctgagcctcagag

SEQ ID NO: 147258 - DNA, 120 bp, Artificial Sequence
  ENSG00000105221_100 (sequence is synthesized)
tgctgggcccagcctggcatgggagggttgatgtccaggagccccgggcatctttccctggaaggaaaggctggggtggcaggaagccttgggagcatgcacctgagatccgttgacttt

SEQ ID NO: 147259 - DNA, 120 bp, Artificial Sequence
  ENSG00000105221_101 (sequence is synthesized)
tcagactctaccccccttaaacaacttctccgtagcagccccctgctgtctgttccctctgcctgcagaatgccagctgatgaagaccgagaggccgcgacccaacacctttgtcatacg

SEQ ID NO: 147260 - DNA, 120 bp, Artificial Sequence
  ENSG00000105221_102 (sequence is synthesized)
cttcgatgatgaatttaccgcccagtccatcacaatcacaccccctgaccgctgtgagtgcctggggcccccgcgctggtgtgcctgccccaggggtggagggatgggatctgctcttaa

SEQ ID NO: 147261 - DNA, 120 bp, Artificial Sequence
  ENSG00000105221_103 (sequence is synthesized)
ctcacttctcaaggagggccctcgaaggcccccgcttcatgtctgggagatttccccaagtctgctctcaggcccttttgctgttggtcctctttggacctggtgaggccaccaggagcc

SEQ ID NO: 147262 - DNA, 120 bp, Artificial Sequence
  ENSG00000105221_104 (sequence is synthesized)
attgactgcagcacgttctggagctcagtcggggggctcagggcaggaggcagcccggtccctgagcctggctgggttcactgctttacagctgtttgggttcttactctgaactcagcc

SEQ ID NO: 147263 - DNA, 120 bp, Artificial Sequence
  ENSG00000105221_105 (sequence is synthesized)
cagggctgggctatgctggggacacagcactgattgagccagccctgggccctgccctggaaagctcccagcccaggtagggtgggcggcctggagtggtcagggctagggcgtgggagg

SEQ ID NO: 147264 - DNA, 120 bp, Artificial Sequence
  ENSG00000105221_106 (sequence is synthesized)
ccagggactggggaatcccagaggaaatatccgacctggcctgcagttagggagggctttctagaggaggaagcaaacgtgtcagctggccggaggaatgacgtgtgggatgccagcaat

SEQ ID NO: 147265 - DNA, 120 bp, Artificial Sequence
  ENSG00000105221_107 (sequence is synthesized)
gagaggcagatcatttccagagctagtggatgcccagtgtttatagcattcaccccatgccaggcgtgtgacagggcttttgtacatgtgatctcacttaagtctcaaaacatacctgtg

SEQ ID NO: 147266 - DNA, 120 bp, Artificial Sequence
  ENSG00000105221_108 (sequence is synthesized)
gttaggcctattttatggagagctacgagctagttagaagtgtgataccattttacagatgaggaatcatttcactcactgtgaagtgcaaagatttcccagaggtctcatagctgaagt

SEQ ID NO: 147267 - DNA, 120 bp, Artificial Sequence
  ENSG00000105221_109 (sequence is synthesized)
ggagaaactggaggagtggcttttgtctgtgagcatatactctgcccagccctgtgctttgggctttatatggtatttgtgtccttttttgcagagtccgaaattgaagttcagaggaag

SEQ ID NO: 147268 - DNA, 120 bp, Artificial Sequence
  ENSG00000105221_110 (sequence is synthesized)
gggtatcttcctagaaggagcagaacccctcagaacaaaccactagggtctccagaaggcccccgggatgggttgggatggaaaggagtgtctttcagacttgagctccaagcccctgga

SEQ ID NO: 147269 - DNA, 120 bp, Artificial Sequence
  ENSG00000105221_111 (sequence is synthesized)
ggacccagggtcacccctccccgggcctctcttcagcttcccagagctctcagcggaaggccctcaaccacaggcctccgggccgcacggtggggtggttccatggcaggctcttctgga

SEQ ID NO: 147270 - DNA, 120 bp, Artificial Sequence
  ENSG00000105221_112 (sequence is synthesized)
cagccagccaagcagcgagaggcccagctgggggagacagcctgggagcaggaccaggagggagggagtgagtgtgggaggggcgctgggtgggagctcagcctggcccccttggggcag

SEQ ID NO: 147271 - DNA, 120 bp, Artificial Sequence
  ENSG00000105221_113 (sequence is synthesized)
agcaagccgggtcggccaagaggagactgcatgtcagaggtcccagcaggagtttcttcagcccagccgtcctgctggagaagctcgttcgcagatgttgtttctaaggactgtgccctg

SEQ ID NO: 147272 - DNA, 120 bp, Artificial Sequence
  ENSG00000105221_114 (sequence is synthesized)
gaacaccaggcacccgttcctcactgtgagttgccctccccttcccagacagtgtgaggccagcctttggacagagctcagagagagagccctaatcttctggtacaaagcacagtcttg

SEQ ID NO: 147273 - DNA, 120 bp, Artificial Sequence
  ENSG00000105221_115 (sequence is synthesized)
gggtaggccaggcgggcagggcaaggtgttgctgcgccctgccaagtcatccgaaccaagacatgtggtgggggtgagcaggctcggggagtgggagggtgacagcttcttcatagatgg

SEQ ID NO: 147274 - DNA, 120 bp, Artificial Sequence
  ENSG00000105221_116 (sequence is synthesized)
tggcttcatgtaagcatttgaactaactgaagatatcacattatttgctggctgctgtctctatgagttaggagcacttagcccagctggttgaagtggaaacattattttttttgtttt

SEQ ID NO: 147275 - DNA, 120 bp, Artificial Sequence
  ENSG00000105221_117 (sequence is synthesized)
tgttttcagatatgctcatagaagcagatgtgttagcattgtgttgtctgtcagcctggactgagtagatgcctgtttgggctgcagtctccatcaaggccagtggccaccagttaaatg

SEQ ID NO: 147276 - DNA, 120 bp, Artificial Sequence
  ENSG00000105221_118 (sequence is synthesized)
gctgcaagtttgcgggacggggagcgcaggccgcagcgtgcgcgggccgggggctggacctttcgggcgcggcgggcagatcgagcctggcactgtgccctgtccacggtgcctcctgca

SEQ ID NO: 147277 - DNA, 120 bp, Artificial Sequence
  ENSG00000105221_119 (sequence is synthesized)
cctggccaggccccaggctccaggtaggggcccagctggcgctgcctcgcgccctcctcccctccgttctgggaacctgagacgaagcagtggcctcggcgtccctcagtctgttggttg

SEQ ID NO: 147278 - DNA, 120 bp, Artificial Sequence
  ENSG00000105221_120 (sequence is synthesized)
ctggtccctgaggacagaagtgaaggtcttggggtagggatcagggcctcggtcaagcccccaggactggcttctaggccccagaccgtgcatacgcaactgtgccctgtccacggtgcc

SEQ ID NO: 147279 - DNA, 120 bp, Artificial Sequence
  ENSG00000105221_121 (sequence is synthesized)
gctgggattacacgcgtgagccaccacgtccagcttcctgttgtctttgaatttatctcctgagcaagtcttcctccgggcgctgtggaaaggcacagatctgagtgcaggcgacagagg

SEQ ID NO: 147280 - DNA, 120 bp, Artificial Sequence
  ENSG00000105221_122 (sequence is synthesized)
gaggctcctgagggggtcgctgccacctccccaatgagcctccgcagcaccaggaaggagccccacccaccagctccagctccaagagacgcagatctctgcttccccacctgcctccct

SEQ ID NO: 147281 - DNA, 120 bp, Artificial Sequence
  ENSG00000105221_123 (sequence is synthesized)
acttctctgggcgccaccgtagctcccgacctgctgtccgcaaataaccccaggctgggaaaggcaaaggcgccttggtctctgtggaccctggccaggccccaggctccaggtgaatac

SEQ ID NO: 147282 - DNA, 120 bp, Artificial Sequence
  ENSG00000105223_0 (sequence is synthesized)
gtcaggcggggatacagcctggaaggtaatgcatgtccatggtacacaaattcacaagtttggagaccctgacacacccaccttctcacctgggctctgcgtatcccccagccttgaggg

SEQ ID NO: 147283 - DNA, 120 bp, Artificial Sequence
  ENSG00000105223_1 (sequence is synthesized)
aagatgaagcctaaactgatgtaccaggagctgaaggtgcctgcagaggagcccgccaatgagctgcccatgaatgagattgaggcgtggaaggctgcggaaaagaaagcccgctgggtc

SEQ ID NO: 147284 - DNA, 120 bp, Artificial Sequence
  ENSG00000105223_2 (sequence is synthesized)
ctgctggtcctcattctggcggttgtgggcttcggagccctgatgactcagctgtttctatgggaatacggcgacttgcatctctttgggcccaaccagcgcccagccccctgctatgac

SEQ ID NO: 147285 - DNA, 120 bp, Artificial Sequence
  ENSG00000105223_3 (sequence is synthesized)
ccttgcgaagcagtgctggtggaaagcattcctgagggcctggacttccccaatgcctccacggggaacccttccaccagccaggcctggctgggcctgctcgccggtgcgcacagcagc

SEQ ID NO: 147286 - DNA, 120 bp, Artificial Sequence
  ENSG00000105223_4 (sequence is synthesized)
ctggacatcgcctccttctactggaccctcaccaacaatgacacccacacgcaggagccctctgcccagcagggtgaggaggtcctccggcagctgcagaccctggcaccaaagggcgtg

SEQ ID NO: 147287 - DNA, 120 bp, Artificial Sequence
  ENSG00000105223_5 (sequence is synthesized)
aacgtccgcatcgctgtgagcaagcccagcgggccccagccacaggcggacctgcaggctctgctgcagagcggtgcccaggtccgcatggtggacatgcagaagctgacccatggcgtc

SEQ ID NO: 147288 - DNA, 120 bp, Artificial Sequence
  ENSG00000105223_6 (sequence is synthesized)
ctgcataccaagttctgggtggtggaccagacccacttctacctgggcagtgccaacatggactggcgttcactgacccaggtcaaggagctgggcgtggtcatgtacaactgcagctgc

SEQ ID NO: 147289 - DNA, 120 bp, Artificial Sequence
  ENSG00000105223_7 (sequence is synthesized)
aagagacaccaatggagatctgcctcaatggaacccctgctctggcctacctggcgagtgcgcccccacccctgtgtccaagtggccgcactccagacctgaaggctctactcaacgtgg

SEQ ID NO: 147290 - DNA, 120 bp, Artificial Sequence
  ENSG00000105223_8 (sequence is synthesized)
tggacaatgcccggagtttcatctacgtcgctgtcatgaactacctgcccactctggagttctcccaccctcacaggttctggcctgccattgacgatgggctgcggcgggccacctacg

SEQ ID NO: 147291 - DNA, 120 bp, Artificial Sequence
  ENSG00000105223_9 (sequence is synthesized)
agcgtggcgtcaaggtgcgcctgctcatcagctgctggggacactcggagccatccatgcgggccttcctgctctctctggctgccctgcgtgacaaccatacccactctgacatccagg

SEQ ID NO: 147292 - DNA, 120 bp, Artificial Sequence
  ENSG00000105223_10 (sequence is synthesized)
tgaaactctttgtggtccccgcggatgaggcccaggctcgaatcccatatgcccgtgtcaaccacaacaagtacatggtgactgaacgcgccacctacatcggaacctccaactggtctg

SEQ ID NO: 147293 - DNA, 120 bp, Artificial Sequence
  ENSG00000105223_11 (sequence is synthesized)
gcaactacttcacggagacggcgggcacctcgctgctggtgacgcagaatgggaggggcggcctgcggagccagctggaggccattttcctgagggactgggactccccttacagccatg

SEQ ID NO: 147294 - DNA, 120 bp, Artificial Sequence
  ENSG00000105223_12 (sequence is synthesized)
accttgacacctcagctgacagcgtgggcaacgcctgccgcctgctctgaggcccgatccagtgggcaggccaaggcctgctgggcccccgcggacccaggtgctctgggtcacggtccc

SEQ ID NO: 147295 - DNA, 120 bp, Artificial Sequence
  ENSG00000105223_13 (sequence is synthesized)
tgtccccgcgcccccgcttctgtctgccccattgtggctcctcaggctctctcccctgctctcccacctctacctccacccccaccggcctgacgctgtggccccgggacccagcagagc

SEQ ID NO: 147296 - DNA, 120 bp, Artificial Sequence
  ENSG00000105223_14 (sequence is synthesized)
tgggggagggatcagcccccaaagaaatgggggtgcatgctgggcctggccccctggcccacccccactttccagggcaaaaagggcccagggttataataagtaaataacttgtctgta

SEQ ID NO: 147297 - DNA, 120 bp, Artificial Sequence
  ENSG00000105223_15 (sequence is synthesized)
ctctttataatttagtttccatagaagttatatgtgcatttaaaaaaattcaatgctggagcgaccgtgtctggggagccgagccccgcttctcgctgcggtgagcccggactggggcac

SEQ ID NO: 147298 - DNA, 120 bp, Artificial Sequence
  ENSG00000105223_16 (sequence is synthesized)
gcactgcgcagactccccgctgcagtgggcggagctcccacaggccccgccccctcctcccaccctcgttcagcctgtccagacagaagctggggcccaccggaggtagctgcagacgcc

SEQ ID NO: 147299 - DNA, 120 bp, Artificial Sequence
  ENSG00000105223_17 (sequence is synthesized)
ctgcgcgcggctaggaggggccgtcaggcggggatacagcctggaaggtgcgtgtggggctgggtctcggagtgggagacgtggagtgcagaacaccccacacagtgcccacttttgttc

SEQ ID NO: 147300 - DNA, 120 bp, Artificial Sequence
  ENSG00000105223_18 (sequence is synthesized)
cggctaggaggggccgtcaggcggggatacagcctggaaggtgcgtgtggggctgggtctcggagtgggagacgtggagtgcaggctggagcgaccgtgtctggggagccgagccccgct

SEQ ID NO: 147301 - DNA, 120 bp, Artificial Sequence
  ENSG00000105223_19 (sequence is synthesized)
ataaccatcacgtgaccgcccaccgacaccagcgagagtgcagtcgtaaccgtcacgtgaccgcccaccgtcggcccggcgctcccctccgcccgaagctagcaagcggcgcggccaatg

SEQ ID NO: 147302 - DNA, 120 bp, Artificial Sequence
  ENSG00000105223_20 (sequence is synthesized)
aggaggggccgtcaggcggggatacagcctggaaggtgcgtgtggggctgggtctcggagtgggagacgtggagtgcagtttggagaccctgacacacccaccttctcacctgggctctg

SEQ ID NO: 147303 - DNA, 120 bp, Artificial Sequence
  ENSG00000105223_21 (sequence is synthesized)
gtgaggaggttgcaggctcccaagtgctcgcccgccccctcctcctccacacacatagtttctatggcagccacagcgtcatcttctgtcaggcctgtgaacagacacagcatcttccac

SEQ ID NO: 147304 - DNA, 120 bp, Artificial Sequence
  ENSG00000105223_22 (sequence is synthesized)
ccacatctgtggacccacacacacatctcaatacacgaccttccttccacacctctagacagacacgcagaggatcatgagtccaggcacgcattcaaatacacacagttttaaaaaatt

SEQ ID NO: 147305 - DNA, 120 bp, Artificial Sequence
  ENSG00000105223_23 (sequence is synthesized)
gtcaggcggggatacagcctggaaggtgcgtgtggggctgggtctcggagtgggagacgtggagtgcagggtggaatgtagcaaagcccatccaccagccatgtactaccccccaacccg

SEQ ID NO: 147306 - DNA, 120 bp, Artificial Sequence
  ENSG00000105223_24 (sequence is synthesized)
aggaaacctggagctttggaataactgattttcatcaaaacttaagttgataatcattctaggactttagctattggagctggggtggagggggtactgtgggacagggggaaagacaga

SEQ ID NO: 147307 - DNA, 120 bp, Artificial Sequence
  ENSG00000105223_25 (sequence is synthesized)
gaccagactggggagtgtccctgtcatctgtgagcactaggccgctatcgctgagctcagcactgccctcctacaggtcaaggagctgggcgtggtcatgtacaactgcagctgcctggc

SEQ ID NO: 147308 - DNA, 120 bp, Artificial Sequence
  ENSG00000105223_26 (sequence is synthesized)
agctggtgggggctccaggcaaggggacagatggaagagaagctgcagggagagacagtcaccaggaggtgaccggaagaaggtatctaggcacttgagacaggagaaagagagattaca

SEQ ID NO: 147309 - DNA, 89 bp, Artificial Sequence
  ENSG00000105223_27 (sequence is synthesized)
ccaggagttccagaccagcctgggcaatgtagtgcggctccatctctactaaaagtaaaaaaagtaaccaggcatactggttgaggcgg

SEQ ID NO: 147310 - DNA, 120 bp, Artificial Sequence
  ENSG00000105223_28 (sequence is synthesized)
gctgcagtgagctgagatggcgccactgcgcttccagcctgggggacagggcaagactctgtctctaaaaaaaaaaaaatacagtctatccaacacacccatggacggacagctgagcac

SEQ ID NO: 147311 - DNA, 120 bp, Artificial Sequence
  ENSG00000105223_29 (sequence is synthesized)
caaccagcgcccagccccctgctatgacccttgcgatctatccaacacacccatggacggacagctgagcactcacctcccagcccttgctctccggcaccgtatggctgatagcatccc

SEQ ID NO: 147312 - DNA, 120 bp, Artificial Sequence
  ENSG00000105223_30 (sequence is synthesized)
gtgcgcctgcgcgcggctaggaggggccgtcaggcggggatacagcctggaaggtaatgcatgtccatggtacacaaattcacaaggtttgtaaatgagaaaagacgtgaggttcctttt

SEQ ID NO: 147313 - DNA, 120 bp, Artificial Sequence
  ENSG00000105223_31 (sequence is synthesized)
gggtggtgggcagtgtgccagtggcccccatgattatgaatagccccaagactaatcactcttctgtgatgtctgtccctggaaagcgtagaacaccccacacagtgcccacttttgttc

SEQ ID NO: 147314 - DNA, 120 bp, Artificial Sequence
  ENSG00000105223_32 (sequence is synthesized)
ctggctgagctgtgtggtgtgggggcacctgagggcggaggagccacctagaatataccccctgtcccagggctgagaaaagccaggcacaaagacctggggctccgctgacctcatcca

SEQ ID NO: 147315 - DNA, 120 bp, Artificial Sequence
  ENSG00000105223_33 (sequence is synthesized)
tgacccaggtctgtctgcaccctgtctaccttccttccaggccactccctgccccacagggcacccagcctccgactgcatccctcactcaatccagagtcctctccacccattctctgt

SEQ ID NO: 147316 - DNA, 65 bp, Artificial Sequence
  ENSG00000105223_34 (sequence is synthesized)
accccatctctaccaaaaaaaaaaaaataagcccggtgtggtggcacacacctctggtcccagct

SEQ ID NO: 147317 - DNA, 120 bp, Artificial Sequence
  ENSG00000105223_35 (sequence is synthesized)
acagagtgagaccctgttacaaaacaaagaatccctaaatggagccctctactgccctccccctgctcctggaagcctggggctccctctgatccccaattgcagctaccagcccctcta

SEQ ID NO: 147318 - DNA, 120 bp, Artificial Sequence
  ENSG00000105223_36 (sequence is synthesized)
catggcattcaagaacctgcgcacccatttgatcttcattgtacatctctgtgtgcctgctctaagtccagccctatcctgggtaatgttgggaacatggtggtaacagatggacctcat

SEQ ID NO: 147319 - DNA, 120 bp, Artificial Sequence
  ENSG00000105223_37 (sequence is synthesized)
ggcggggatacagcctggaaggtgcgtgtggggctgggtctcggagtgggagacgtggagtgcaggtaatgcatgtccatggtacacaaattcacaagaacaccccacacagtgcccact

SEQ ID NO: 147320 - DNA, 120 bp, Artificial Sequence
  ENSG00000105223_38 (sequence is synthesized)
aggaggggccgtcaggcggggatacagcctggaaggtgcgtgtggggctgggtctcggagtgggagacgtggagtgcaggtaatgcatgtccatggtacacaaattcacaaggtttgtaa

SEQ ID NO: 147321 - DNA, 120 bp, Artificial Sequence
  ENSG00000105223_39 (sequence is synthesized)
gagccgagattgtgccattgcactccagcgtgggcaacaagagcgaaattccacctcaaaaaaaaaaagaaagaataaaagaggatgacaacactgggttttggggagcaggaatgggag

SEQ ID NO: 147322 - DNA, 120 bp, Artificial Sequence
  ENSG00000105223_40 (sequence is synthesized)
caacactgggttttggggagcaggaatgggagccacagccaggaagaggaaatagggatgtgggatttatggagacaggaacagggtctgggagccagcgatgaggaagtcctctcaata

SEQ ID NO: 147323 - DNA, 120 bp, Artificial Sequence
  ENSG00000105223_41 (sequence is synthesized)
gctaaagcagggcccaggcttggttccccaaagctgagggcaaagcctgtggacacagccgccctctgcatcctgccccacctcctatacacccgtcctcaggttctggcctgccattga

SEQ ID NO: 147324 - DNA, 120 bp, Artificial Sequence
  ENSG00000105227_0 (sequence is synthesized)
gctctcgaggtgtctggaggctcagcgagcgccggacccaggaggcccaaggagctggaggtgaccctcaggcagcaagaaccccacggaagggcgtgagccctgcagacagctgtgcgg

SEQ ID NO: 147325 - DNA, 120 bp, Artificial Sequence
  ENSG00000105227_1 (sequence is synthesized)
cacctcgggctgggctcctgttaggaggaagtgcctgcacccaggcagcggctcagaggcagctgctccatgcagaactgaagctggttctgcagcagaaaggggagaggacacaggagc

SEQ ID NO: 147326 - DNA, 120 bp, Artificial Sequence
  ENSG00000105227_2 (sequence is synthesized)
ctggggtgcaggtgcctcccagcaacgccatggaggccaggagccggagtgccgaggagctgaggcgggcggagttggtggaaattatcgtggagacggaggcgcagaccggggtcagcg

SEQ ID NO: 147327 - DNA, 120 bp, Artificial Sequence
  ENSG00000105227_3 (sequence is synthesized)
gcatcaacgtagcgggcggcggcaaagagggaatcttcgttcgggagctgcgcgaggactcacccgccgccaggagcctcagcctgcaggaaggggaccagctgctgagtgcccgagtgt

SEQ ID NO: 147328 - DNA, 120 bp, Artificial Sequence
  ENSG00000105227_4 (sequence is synthesized)
tcttcgagaacttcaagtacgaggacgcactacgcctgctgcaatgcgccgagccttacaaagtctccttctgcctgaagcgcactgtgcccaccggggacctggctctgcggcccggga

SEQ ID NO: 147329 - DNA, 120 bp, Artificial Sequence
  ENSG00000105227_5 (sequence is synthesized)
ccgtgtctggctacgagatcaagggcccgcgggccaaggtggccaagctggtacgcgtgcttagcccggccccggccctggactgccccagcgatccggtctctgcgccgtgagccccat

SEQ ID NO: 147330 - DNA, 120 bp, Artificial Sequence
  ENSG00000105227_6 (sequence is synthesized)
tccccgccatcgtgggccagccttgccctctgtcttgtcactaacccaagctaattccaccctctgccccttcctctctgccccaaactcttccccgggaagggggacagacccacccca

SEQ ID NO: 147331 - DNA, 120 bp, Artificial Sequence
  ENSG00000105227_7 (sequence is synthesized)
gcccagggccctcacccacctcggagaggcgtccccaccatcggatccaggcttgctaggggtcctgaaccaggctacttcgaaccaggaaagccagattccagcctgagtgctggccca

SEQ ID NO: 147332 - DNA, 120 bp, Artificial Sequence
  ENSG00000105227_8 (sequence is synthesized)
attactgctgagtggccctggacaaagttgtttctctccctgggcctcagtttccccatctctagaatgaggatgttggggaaaatcccggatcaggatctagaagtcttgggtccccgt

SEQ ID NO: 147333 - DNA, 120 bp, Artificial Sequence
  ENSG00000105227_9 (sequence is synthesized)
ccctacactcctgttgactcatttggagatcctagatggctgcctgctttcctgggcactcatggtgaaatgacaggcaagaagtggggatgatgtttggggaacaagatacttgaccca

SEQ ID NO: 147334 - DNA, 120 bp, Artificial Sequence
  ENSG00000105227_10 (sequence is synthesized)
gcacatcccccgcctggtccaataccaggtggggctcttcctgtccactcccagcctcccactgtcccaccgcctcctgcctctctcctctctccccagaacatccagagtctgtcccct

SEQ ID NO: 147335 - DNA, 120 bp, Artificial Sequence
  ENSG00000105227_11 (sequence is synthesized)
gtgaagaagaagaagatggtgcctggggctctgggggtccccgctgacctggcccctgttgacgtcgagttctcctttcccaagttctcccgcctgcgtcggggcctcaaagccgaggct

SEQ ID NO: 147336 - DNA, 120 bp, Artificial Sequence
  ENSG00000105227_12 (sequence is synthesized)
gtcaagggtcctgtcccggctgcccctgcccgccggcgcctccagctgcctcggctgcgtgtacgagaagtggccgaagaggctcaggcagcccggctggccgccgccgctcctcccccc

SEQ ID NO: 147337 - DNA, 120 bp, Artificial Sequence
  ENSG00000105227_13 (sequence is synthesized)
aggaaagccaaggtggaggctgaggtggctgcaggagctcgtttcacagcccctcaggtggagctggttgggccgcggctgccaggggcggaggtgggtgtcccccaggtctcagccccc

SEQ ID NO: 147338 - DNA, 120 bp, Artificial Sequence
  ENSG00000105227_14 (sequence is synthesized)
aaggctgccccctcagcagaggcagctggtggctttgccctccacctgccaacccttgggctcggagccccggctccgcctgctgtggaggccccagccgtgggaatccaggtcccccag

SEQ ID NO: 147339 - DNA, 120 bp, Artificial Sequence
  ENSG00000105227_15 (sequence is synthesized)
gtggagctgcctgccttgccctcactgcccactctgcccacacttccctgcctagagacccgggaaggggctgtgtcggtagtggtgcccaccctggatgtggcagcaccgactgtgggg

SEQ ID NO: 147340 - DNA, 120 bp, Artificial Sequence
  ENSG00000105227_16 (sequence is synthesized)
gtggacctggccttgccgggtgcagaggtggaggcccggggagaggcacctgaggtggccctgaagatgccccgccttagttttccccgatttggggctcgagcaaaggaagttgctgag

SEQ ID NO: 147341 - DNA, 120 bp, Artificial Sequence
  ENSG00000105227_17 (sequence is synthesized)
gccaaggtagccaaggtcagccctgaggccagggtgaaaggtcccagacttcgaatgcccacctttgggctttccctcttggagccccggcccgctgctcctgaagttgtagagagcaag

SEQ ID NO: 147342 - DNA, 120 bp, Artificial Sequence
  ENSG00000105227_18 (sequence is synthesized)
ctgaagctgcccaccatcaagatgccctcccttggcatcggagtgtcagggcccgaggtcaaggtgcccaagggacctgaagtgaagctccccaaggctcctgaggtcaagcttccaaaa

SEQ ID NO: 147343 - DNA, 120 bp, Artificial Sequence
  ENSG00000105227_19 (sequence is synthesized)
gtgcccgaggcagcccttccagaggttcgactcccagaggtggagctccccaaggtgtcagagatgaaactcccaaaggtgccagagatggctgtgccggaggtgcggcttccagaggta

SEQ ID NO: 147344 - DNA, 120 bp, Artificial Sequence
  ENSG00000105227_20 (sequence is synthesized)
gagctgcccaaagtgtcagagatgaaactcccaaaggtgccagagatggctgtgccggaggtgcggcttccagaggtacagctgctgaaagtgtcggagatgaaactcccaaaggtgcca

SEQ ID NO: 147345 - DNA, 120 bp, Artificial Sequence
  ENSG00000105227_21 (sequence is synthesized)
gagatggctgtgccggaggtgcggcttccagaggtacagctgccgaaagtgtcagagatgaaactcccagaggtgtcagaggtggctgtgccagaggtgcggcttccagaggtgcagctg

SEQ ID NO: 147346 - DNA, 120 bp, Artificial Sequence
  ENSG00000105227_22 (sequence is synthesized)
cccgagatggccgtgcccgatgtgcacctcccagaagtgcagcttccaaaagtcccagagatgaagctccctgagatgaaactccctgaggtgaaactcccgaaggtgcccgagatggct

SEQ ID NO: 147347 - DNA, 120 bp, Artificial Sequence
  ENSG00000105227_23 (sequence is synthesized)
gtgcccgatgtgcacctcccggaagtgcagctcccgaaagtcccagagatgaaactccctaaaatgcctgagatggctgtgccagaggttcgactccccgaggtgcagctgccaaaagtc

SEQ ID NO: 147348 - DNA, 120 bp, Artificial Sequence
  ENSG00000105227_24 (sequence is synthesized)
tcagagatgaaactccccaaggtgcctgaaatggccgtgcccgatgtgcacctcccagaggtgcagctgcccaaagtctgtgaaatgaaagtccctgacatgaagctcccagagataaaa

SEQ ID NO: 147349 - DNA, 120 bp, Artificial Sequence
  ENSG00000105227_25 (sequence is synthesized)
ctccccaaggtgcctgagatggctgtgcccgatgtgcacctccccgaggtgcagctgccgaaagtgtcagagattcggctgccggaaatgcaagtgccgaaggttcccgacgtgcatctt

SEQ ID NO: 147350 - DNA, 120 bp, Artificial Sequence
  ENSG00000105227_26 (sequence is synthesized)
ccgaaggcaccagaggtgaagctgcccagggctccggaggtgcagctaaaggccaccaaggcagaacaggcagaagggatggaatttggcttcaagatgcccaagatgaccatgcccaag

SEQ ID NO: 147351 - DNA, 120 bp, Artificial Sequence
  ENSG00000105227_27 (sequence is synthesized)
ctagggagggcagagtccccatcacgtggcaagccaggcgaggcgggtgctgaggtctcagggaagctggtaacacttccctgtctgcagccagaggtggatggtgaggctcatgtgggt

SEQ ID NO: 147352 - DNA, 120 bp, Artificial Sequence
  ENSG00000105227_28 (sequence is synthesized)
gtcccctctctcactctgccttcagtggagctagacctgccaggagcacttggcctgcaggggcaggtcccagccgctaaaatgggcaagggagagcgggtggagggccctgaggtggca

SEQ ID NO: 147353 - DNA, 120 bp, Artificial Sequence
  ENSG00000105227_29 (sequence is synthesized)
gcaggggtcagggaagtgggcttccgagtgccctctgttgaaattgtcaccccacagctgcccgccgtggaaattgaggaagggcggctggagatgatagagacaaaagtcaagccctct

SEQ ID NO: 147354 - DNA, 120 bp, Artificial Sequence
  ENSG00000105227_30 (sequence is synthesized)
tccaagttctccttacctaagtttggactctcggggccaaaggtggctaaggcagaggctgagggggctgggcgagctaccaagctgaaggtatccaaatttgccatctcactccccaag

SEQ ID NO: 147355 - DNA, 120 bp, Artificial Sequence
  ENSG00000105227_31 (sequence is synthesized)
gctcgggtgggggctgaggctgaggccaaaggggctggggaggcaggcctgctgcctgccctcgatctgtccatcccacagctcagcctggatgcccacctgccctcaggcaaggtagag

SEQ ID NO: 147356 - DNA, 120 bp, Artificial Sequence
  ENSG00000105227_32 (sequence is synthesized)
gtggcaggggccgacctcaagttcaaggggcccaggtttgctctccccaagtttggggtcagaggccgggacactgaggcagcagaactagtgccaggggtggctgagttggagggcaag

SEQ ID NO: 147357 - DNA, 120 bp, Artificial Sequence
  ENSG00000105227_33 (sequence is synthesized)
ggctggggctgggatgggagggtgaagatgcccaagctgaagatgccttcctttgggctggctcgagggaaggaagcagaagttcaaggtgatcgtgccagcccgggggaaaaggctgag

SEQ ID NO: 147358 - DNA, 120 bp, Artificial Sequence
  ENSG00000105227_34 (sequence is synthesized)
tccaccgctgtgcagcttaagatccccgaggtggagctggtcacgctgggcgcccaggaggaagggagggcagagggggctgtggccgtcagtggaatgcagctgtcaggcctgaaggtg

SEQ ID NO: 147359 - DNA, 120 bp, Artificial Sequence
  ENSG00000105227_35 (sequence is synthesized)
tccacagccgggcaggtggtcactgagggccatgacgcggggctgaggatgcctccgctgggcatctccctgccacaggtggagctgaccggctttggggaggcaggtaccccagggcag

SEQ ID NO: 147360 - DNA, 120 bp, Artificial Sequence
  ENSG00000105227_36 (sequence is synthesized)
caggctcagagtacagtcccttcagcagagggcacagcaggctacagggttcaggtgccccaggtgaccctgtctctgcctggagcccaggttgcaggtggtgagctgctggtgggtgag

SEQ ID NO: 147361 - DNA, 120 bp, Artificial Sequence
  ENSG00000105227_37 (sequence is synthesized)
ggtgtctttaagatgcccaccgtgacagtgccccagcttgagctggacgtggggctaagccgagaggcacaggcgggcgaggcggccacaggcgagggtgggctgaggctgaagttgccc

SEQ ID NO: 147362 - DNA, 120 bp, Artificial Sequence
  ENSG00000105227_38 (sequence is synthesized)
acactgggggccagagctagggtggggggcgagggtgctgaggagcagcccccaggggccgagcgtaccttctgcctctcactgcccgacgtggagctctcgccatccgggggcaaccat

SEQ ID NO: 147363 - DNA, 120 bp, Artificial Sequence
  ENSG00000105227_39 (sequence is synthesized)
gccgagtaccaggtggcagagggggagggagaggccggacacaagctcaaggtacggctgccccggtttggcctggtgcgggccaaggagggggccgaggagggtgagaaggccaagagc

SEQ ID NO: 147364 - DNA, 120 bp, Artificial Sequence
  ENSG00000105227_40 (sequence is synthesized)
cccaaactcaggctgccccgagtgggcttcagccaaagtgagatggtcactggggaagggtcccccagccccgaggaggaggaggaggaggaggaagagggcagtggggaaggggcctcg

SEQ ID NO: 147365 - DNA, 120 bp, Artificial Sequence
  ENSG00000105227_41 (sequence is synthesized)
ggtcgccggggccgggtccgggtccgcttgccacgtgtaggcctggcggccccttctaaagcctctcgggggcaggagggcgatgcagcccccaagtcccccgtcagagagaagtcaccc

SEQ ID NO: 147366 - DNA, 120 bp, Artificial Sequence
  ENSG00000105227_42 (sequence is synthesized)
aagttccgcttccccagggtgtccctaagccccaaggcccggagtgggagtggggaccaggaagagggtggattgcgggtgcggctgcccagcgtggggttttcagagacaggggctcca

SEQ ID NO: 147367 - DNA, 120 bp, Artificial Sequence
  ENSG00000105227_43 (sequence is synthesized)
ggcccggccaggatggagggggctcaggctgcggctgtctgaagcccctagtcagatggggatcccttcttgccttcctttctctaccccctcgctgttgtgtgtgtgataactagcact

SEQ ID NO: 147368 - DNA, 120 bp, Artificial Sequence
  ENSG00000105227_44 (sequence is synthesized)
aaccctaagagggccgggaggtgggtgactgaccagggctggcagggaggcctgctcctgtctctctggcaggagtgcctgtaccccaccaagccatgtgaataaaataatctggaagta

SEQ ID NO: 147369 - DNA, 120 bp, Artificial Sequence
  ENSG00000105227_45 (sequence is synthesized)
actcaaggcagtgaaatcactggcgcacaaaggagctaaattaataaggagctgaagaaaatccggcagaaacccttcatcagaagaggcagcatatgccaggtgcagtggcgcaggcct

SEQ ID NO: 147370 - DNA, 81 bp, Artificial Sequence
  ENSG00000105227_46 (sequence is synthesized)
ggaaagcctaggagtttgagacaagcctgggcaacataggaagaccctgtctctaccggaaaaaaaaatgagccgggtttg

SEQ ID NO: 147371 - DNA, 120 bp, Artificial Sequence
  ENSG00000105229_0 (sequence is synthesized)
ggcgcgggggacgctggtgaccaagatggcggcggagctggtggaggccaaaaacatggtgatgagttttcgagtctccgaccttcagatgctcctgggtttcgtgggccggagtaagag

SEQ ID NO: 147372 - DNA, 120 bp, Artificial Sequence
  ENSG00000105229_1 (sequence is synthesized)
tggactgaagcacgagctcgtcaccagggccctccagctggtgcagtttgactgtagccctgagctgttcaagaagatcaaggagctgtacgagacccgctacgccaagaagaactcgga

SEQ ID NO: 147373 - DNA, 120 bp, Artificial Sequence
  ENSG00000105229_2 (sequence is synthesized)
gcctgccccacagccgcaccggcccctggaccccctgaccatgcactccacctacgaccgggccggcgctgtgcccaggactccgctggcaggccccaatattgactaccccgtgctcta

SEQ ID NO: 147374 - DNA, 120 bp, Artificial Sequence
  ENSG00000105229_3 (sequence is synthesized)
cggaaagtacttaaacggactgggacggttgcccgccaagaccctcaagccagaagtccgcctggtgaagctgccgttctttaatatgctggatgagctgctgaagcccaccgaattagt

SEQ ID NO: 147375 - DNA, 120 bp, Artificial Sequence
  ENSG00000105229_4 (sequence is synthesized)
cccacagaacaacgagaagcttcaggagagcccgtgcatcttcgcattgacgccaagacaggtggagttgatccggaactccagggaactgcagcccggagttaaagccgtgcaggtcgt

SEQ ID NO: 147376 - DNA, 120 bp, Artificial Sequence
  ENSG00000105229_5 (sequence is synthesized)
cctgagaatctgttactcagacaccagctgccctcaggaggaccagtacccgcccaacatcgctgtgaaggtcaaccacagctactgctccgtcccgggctactacccctccaataagcc

SEQ ID NO: 147377 - DNA, 120 bp, Artificial Sequence
  ENSG00000105229_6 (sequence is synthesized)
cggggtggagcccaagaggccgtgccgccccatcaacctcacccacctcatgtacctgtcctcggccaccaaccgcatcactgtcacctgggggaactacggcaagagctactcggtggc

SEQ ID NO: 147378 - DNA, 120 bp, Artificial Sequence
  ENSG00000105229_7 (sequence is synthesized)
cctgtacctggtgcggcagctgacctcatcggagctgctgcagaggctgaagaccattggggtaaagcacccggagctgtgcaaggcactggtcaaggagaagctgcgccttgatcctga

SEQ ID NO: 147379 - DNA, 120 bp, Artificial Sequence
  ENSG00000105229_8 (sequence is synthesized)
cagcgagatcgccaccaccggtgtgcgggtgtccctcatctgtccgctggtgaagatgcggctctccgtgccctgccgggcagagacctgtgcccacctgcagtgcttcgacgccgtctt

SEQ ID NO: 147380 - DNA, 120 bp, Artificial Sequence
  ENSG00000105229_9 (sequence is synthesized)
ctacctgcagatgaacgagaagaagcccacctggatgtgccccgtgtgcgacaagccagccccctacgaccagctcatcatcgacgggctcctctcgaagatcctgagcgagtgtgagga

SEQ ID NO: 147381 - DNA, 120 bp, Artificial Sequence
  ENSG00000105229_10 (sequence is synthesized)
cgccgacgagatcgagtacctggtggacggctcgtggtgcccgatccgcgccgaaaaggagcgcagctgcagcccgcagggcgccatcctcgtgctgggcccctcggacgccaatgggct

SEQ ID NO: 147382 - DNA, 120 bp, Artificial Sequence
  ENSG00000105229_11 (sequence is synthesized)
cctgcccgcccccagcgtcaacgggagcggtgccctgggcagcacgggtggcggcggcccggtgggcagcatggagaatgggaagccgggcgccgatgtggtggacctcacgctggacag

SEQ ID NO: 147383 - DNA, 120 bp, Artificial Sequence
  ENSG00000105229_12 (sequence is synthesized)
gcccaagcgccgctgccccttccagaagggcctggtgccggcctgctgaccccggccgcacactcgactttcctggtgctcaccacgcagaggggcacgggccagcctcgggcgcagagg

SEQ ID NO: 147384 - DNA, 120 bp, Artificial Sequence
  ENSG00000105229_13 (sequence is synthesized)
gaggagtgacctttctttttctttttattgtcgttcgttttgtttttccacccttttgcctggctcctggcacctgtacctctggactctcctatcgggggattaaaaaaaaaagtaaaa

SEQ ID NO: 147385 - DNA, 120 bp, Artificial Sequence
  ENSG00000105229_14 (sequence is synthesized)
tgacaaaaaaagatacaaaaaagaaaaatgaaacaaaaaagtcaaactcttaaaaacaaggccggccacccacacagccgcctccccggctggagtccgagccgggaaggggtagtgggc

SEQ ID NO: 147386 - DNA, 120 bp, Artificial Sequence
  ENSG00000105229_15 (sequence is synthesized)
ctcccctccggatgccccgccgcccgccgccctctgcccacgaccattccagccagtgcgcggggacccgggcggcgggcggtggggcgcagcccctctctggcgaccactttgacgttt

SEQ ID NO: 147387 - DNA, 120 bp, Artificial Sequence
  ENSG00000105229_16 (sequence is synthesized)
cccctctctggcgaccactttgacgtttgtctcttcctttgctttttctctgcaaatgcatcctcgcccagagaccctcacgcgccgagcagcgagcgttttagccgagaagccatggag

SEQ ID NO: 147388 - DNA, 120 bp, Artificial Sequence
  ENSG00000105229_17 (sequence is synthesized)
tgggttggggcggggaggggcagtagggtggggggatgggtgggcaggatgggggtacagtgggcggctggggagggtttagccacagatgtgttgtattttttgaaagtgcaataattt

SEQ ID NO: 147389 - DNA, 120 bp, Artificial Sequence
  ENSG00000105229_18 (sequence is synthesized)
ggtattttgaagacccggcgtgtggtcaggaacccccggggaaggcgggggcccagggtgcggcaccgtgtggcgtgggggggtctcagttttctagccagctacctcggtaattccaat

SEQ ID NO: 147390 - DNA, 120 bp, Artificial Sequence
  ENSG00000105229_19 (sequence is synthesized)
tcaggttaacttccctacggaacagcacagatgtccacagatgtccacagctgccgccgccgccgccgccaccataccccggtccttggggcatgggttgcggtcgcttcccaaggggca

SEQ ID NO: 147391 - DNA, 120 bp, Artificial Sequence
  ENSG00000105229_20 (sequence is synthesized)
gcagggaccccggccaccccggctctcggtttgggttgattcctctcctttttgctcttggttttccgacgggtacgaggctggcccggcaccctgtcccccgggagcctcactcttcca

SEQ ID NO: 147392 - DNA, 120 bp, Artificial Sequence
  ENSG00000105229_21 (sequence is synthesized)
gcaggaccagaccaggggcctccttcctgtccccaggcgttcccggcccctcgcaggccccacccatgcccttggcctcagggtccaacaactgggggagctaccagggctctgccttca

SEQ ID NO: 147393 - DNA, 120 bp, Artificial Sequence
  ENSG00000105229_22 (sequence is synthesized)
ggagcccacagctgggcaccccccttgccccgcaggagaccggggcgcaggcggggcaccggcctcacctggttctccaacaccgctgcctgcggtctgttttgcttttgtcctccccag

SEQ ID NO: 147394 - DNA, 120 bp, Artificial Sequence
  ENSG00000105229_23 (sequence is synthesized)
cccagaattttcctttgtataaacagaactcctagtcaggaagcaatatcatttcaggtctaaagaaagggacgtgcatctggccgagggcagttcagtctcactgcagagcccgcagcc

SEQ ID NO: 147395 - DNA, 120 bp, Artificial Sequence
  ENSG00000105229_24 (sequence is synthesized)
cgctgcgcagctcggcccctcccgcccgcacgggcagctgaaggccgctgttttctaatatttgtattctaatttaattgtttttaaaaaatgcaaataaaaaaggtcgaggtgaagcca

SEQ ID NO: 147396 - DNA, 120 bp, Artificial Sequence
  ENSG00000105229_25 (sequence is synthesized)
cttcttgttgggctctcggatcgggcccaggggctgcttttcgtgcccgggccggagggcctggctgagcacctcaccccagaaccggctctgcctggcagggcccccgtggtcacctga

SEQ ID NO: 147397 - DNA, 120 bp, Artificial Sequence
  ENSG00000105229_26 (sequence is synthesized)
tcttgcacctggccccaaaggtgcatctggttcagtggtgcccttgccttggtcccgtggccttggatgctgggcagcccacgaaaccatctcccccttggggaacttcatgcttcagtg

SEQ ID NO: 147398 - DNA, 80 bp, Artificial Sequence
  ENSG00000105245_0 (sequence is synthesized)
aatcctcccgggagccgaggaggctcgcgcgcgtgcatcccgcaccatcccccggccccgggccctggccggcgtcagac

SEQ ID NO: 147399 - DNA, 80 bp, Artificial Sequence
  ENSG00000105245_1 (sequence is synthesized)
cagcggcggaccccggaggcctgagcggcacctgcccccagccccctgtggggccccggggcccccagaaacctgcagga

SEQ ID NO: 147400 - DNA, 120 bp, Artificial Sequence
  ENSG00000105245_2 (sequence is synthesized)
gccccggggcccccagaaacctgcaggacggagccagacggggcgggcaccatgaacaagttacggcagagcctgcggcggaggaagccagcctacgtgcccgaggcgtcgcgcccgcac

SEQ ID NO: 147401 - DNA, 120 bp, Artificial Sequence
  ENSG00000105245_3 (sequence is synthesized)
cagtggcaggcagacgaggacgcggtgcggaagggcacgtgcagcttcccggtcaggtacctgggtcacgtggaggtagaggagtcccggggaatgcacgtgtgtgaagatgcggtgaag

SEQ ID NO: 147402 - DNA, 120 bp, Artificial Sequence
  ENSG00000105245_4 (sequence is synthesized)
aagctgaaggcgatgggccgaaagtccgtgaagtctgtcctgtgggtgtcagccgatgggctccgagtggtggacgacaaaaccaaggatcttctggtcgaccagaccatcgaaaaggtc

SEQ ID NO: 147403 - DNA, 120 bp, Artificial Sequence
  ENSG00000105245_5 (sequence is synthesized)
tccttttgtgctcctgaccgcaacctggacaaggctttctcctatatctgtcgtgacgggactacccgccgctggatctgccactgttttctggcactgaaggactccggcgagaggctg

SEQ ID NO: 147404 - DNA, 120 bp, Artificial Sequence
  ENSG00000105245_6 (sequence is synthesized)
agccacgctgtgggctgtgcttttgccgcctgcctggagcgaaaacagcgacgggagaaggaatgtggggtcacggccgccttcgatgccagccgcaccagcttcgcccgcgagggctcc

SEQ ID NO: 147405 - DNA, 120 bp, Artificial Sequence
  ENSG00000105245_7 (sequence is synthesized)
ttccgcctgtctgggggtgggcggcctgctgagcgagaggccccggacaagaagaaagcagaggcagcagctgcccccactgtggctcctggccctgcccagcctgggcacgtgtccccg

SEQ ID NO: 147406 - DNA, 120 bp, Artificial Sequence
  ENSG00000105245_8 (sequence is synthesized)
acaccagccaccacatcccctggtgagaagggtgaggcaggcacccctgtggctgcaggcaccactgcggccgccatcccccggcgccatgcacccctggagcagctggttcgccagggc

SEQ ID NO: 147407 - DNA, 120 bp, Artificial Sequence
  ENSG00000105245_9 (sequence is synthesized)
tccttccgtgggttcccagcactcagccagaagaactcgcctttcaaacggcagctgagcctacggctgaatgagctgccatccacgctgcagcgccgcactgacttccaggtgaagggc

SEQ ID NO: 147408 - DNA, 120 bp, Artificial Sequence
  ENSG00000105245_10 (sequence is synthesized)
acagtgcctgagatggagcctcctggtgccggcgacagtgacagcatcaacgctctgtgcacacagatcagttcatcttttgccagtgctggagcgccagcaccagggccaccacctgcc

SEQ ID NO: 147409 - DNA, 120 bp, Artificial Sequence
  ENSG00000105245_11 (sequence is synthesized)
acaacagggacttctgcctggggtgagccctccgtgccccctgcagctgccttccagcctgggcacaagcggacaccttcagaggctgagcgatggctggaggaggtgtcacaggtggcc

SEQ ID NO: 147410 - DNA, 120 bp, Artificial Sequence
  ENSG00000105245_12 (sequence is synthesized)
aaggcccagcagcagcagcagcagcaacagcaacagcagcagcagcagcagcagcaacagcagcaagcagcctcagtggccccagtgcccaccatgcctcctgccctgcagcctttcccc

SEQ ID NO: 147411 - DNA, 120 bp, Artificial Sequence
  ENSG00000105245_13 (sequence is synthesized)
gcccccgtggggccctttgacgctgcacctgcccaagtggccgtgttcctgccacccccacacatgcagcccccttttgtgcccgcctacccgggcttgggctacccaccgatgccccgg

SEQ ID NO: 147412 - DNA, 120 bp, Artificial Sequence
  ENSG00000105245_14 (sequence is synthesized)
actctgcttgggaaagctggggccttcccgccccctgccatacccagtgcccctgggagccaggcccgccctcgccccaatggggccccctggccccctgagccagcgcctgccccagct

SEQ ID NO: 147413 - DNA, 120 bp, Artificial Sequence
  ENSG00000105245_15 (sequence is synthesized)
ccagagttggacccctttgaggcccagtgggcggcattagaaggcaaagccactgtagagaaaccctccaaccccttttctggcgacctgcaaaagacattcgagattgaactgtagccc

SEQ ID NO: 147414 - DNA, 120 bp, Artificial Sequence
  ENSG00000105245_16 (sequence is synthesized)
gagccgccccacccactccatcatctccaggtgccccacgcctgggggtggaggcacaacctctcccctaaccctgctccctggggctgcgcccctcaacaccctctcaacacccccctc

SEQ ID NO: 147415 - DNA, 120 bp, Artificial Sequence
  ENSG00000105245_17 (sequence is synthesized)
cctcaaccaccccgacaaccactacagaaccaacattgtgacgcccaggttgcaacaggatggaattcagggacggacccagcctggctaagggaaccatttcactgccggacttaggct

SEQ ID NO: 147416 - DNA, 120 bp, Artificial Sequence
  ENSG00000105245_18 (sequence is synthesized)
ggcaatgcccccttccccaaccccagacacaggggttggccacaatcccactgaatgcccttggttcacactccatttcccagtttctgttgacccccaccttccagtgttggacaggat

SEQ ID NO: 147417 - DNA, 120 bp, Artificial Sequence
  ENSG00000105245_19 (sequence is synthesized)
ggaggggggacacttgcttaggggctctcctgggccccacaccagtgcccaccccaaatctggtcgtctcctccccccatgcacagcacaagctaagggctgccctctgcccacacgctg

SEQ ID NO: 147418 - DNA, 120 bp, Artificial Sequence
  ENSG00000105245_20 (sequence is synthesized)
cgttcactgccaatgctgtactcacctccatcaccctccaactttggggcccatgtcttccttgggccaaggtctcatgggggctagggccaagttgggggcccaggaggcggggaggga

SEQ ID NO: 147419 - DNA, 120 bp, Artificial Sequence
  ENSG00000105245_21 (sequence is synthesized)
ggaggaggagaagatgcgcagttacctcatgtcggtgcccgctggggaggggtccgggaagaaggggaaggggtgcctggcgggtacttttctatcttttatttccagattttttttgta

SEQ ID NO: 147420 - DNA, 120 bp, Artificial Sequence
  ENSG00000105245_22 (sequence is synthesized)
tctaaacttgaagatttgtattatacaaggacagccaataaaggaagaatataatggtgcccctcgggaaacgagggtgtgtgtagggcgctggtgaggccctagaacctttcctcctga

SEQ ID NO: 147421 - DNA, 120 bp, Artificial Sequence
  ENSG00000105245_23 (sequence is synthesized)
gtcatggactgaaacagagtcagaaggatgtccctgagtgataacctctgagtcatagcgtggtaacaggtaccactgactcagcacctgccaggcgggtattaaaggagccaaaattaa

SEQ ID NO: 147422 - DNA, 120 bp, Artificial Sequence
  ENSG00000105245_24 (sequence is synthesized)
tgccaggcgggtattaaaggagccaaaattaatcaccccatttctattccttacagagttagaatcaaggaataaaaaacaaatattatgaactgctggctgggcacagtggctcacgcc

SEQ ID NO: 147423 - DNA, 78 bp, Artificial Sequence
  ENSG00000105245_25 (sequence is synthesized)
aggtcaggagttcgagaccagcctggccgccatggagaaacccagtctctaccaaaaattgaggctgaggcacaagaa

SEQ ID NO: 147424 - DNA, 84 bp, Artificial Sequence
  ENSG00000105245_26 (sequence is synthesized)
aggcgcctgtaattccagcagaggttgcagtgacctgaggtcacaccattgcactcctgcctgggcaacagaatgagactctgt

SEQ ID NO: 147425 - DNA, 120 bp, Artificial Sequence
  ENSG00000105245_27 (sequence is synthesized)
aaaaactacttctaattagctcaatattaatattttaacaagttgggttggtaacagtatatctttgcccatgctggcaaattcttgttttgtcagcattttccataactctggccaaag

SEQ ID NO: 147426 - DNA, 120 bp, Artificial Sequence
  ENSG00000105245_28 (sequence is synthesized)
tgtcacctgatgtggcaacgttttacagtcttgctattgtttcttgagtcctttaatctataagatgtatttttaaaaatatataacatataaattttgtttcgttatagctctttaaaa

SEQ ID NO: 147427 - DNA, 120 bp, Artificial Sequence
  ENSG00000105245_29 (sequence is synthesized)
agggccgcgggaggcgggggcgcccgggccctggatgtcccgcagcgcggcggccagcacggggcgggcaccatgaacaagttacggcagagcctgcggcggaggaagccagcctacgtg

SEQ ID NO: 147428 - DNA, 120 bp, Artificial Sequence
  ENSG00000105245_30 (sequence is synthesized)
agatggggatggagatggggtcggggacacagcccccgtatcaaaccaaggcctccaggacgcgattccagacacaatccctacctctccctgcctaagggggtctcagcacaacaactg

SEQ ID NO: 147429 - DNA, 120 bp, Artificial Sequence
  ENSG00000105245_31 (sequence is synthesized)
cacactcttgcacagtctgacaacacacacagacccacatttctacagacgacagccacactttcacagacagcacccgcgggcccaggctctcacagggagctacggttgtgtacaaac

SEQ ID NO: 147430 - DNA, 120 bp, Artificial Sequence
  ENSG00000105245_32 (sequence is synthesized)
atgcacacagtctcacaaagaacacccagcactctctcaggcaacagtcacacccttacaaataaccctcatgaaaacactctcaaagacaacctcatgttcccacacaccctaacggat

SEQ ID NO: 147431 - DNA, 120 bp, Artificial Sequence
  ENSG00000105245_33 (sequence is synthesized)
gcaccactgcacacagatacaccctctgtgcaatacccacacacccacactctaaggcaacagccacagtcacacaggctcaccgccaacagctgcactcttggacacagacagtcttgt

SEQ ID NO: 147432 - DNA, 120 bp, Artificial Sequence
  ENSG00000105245_34 (sequence is synthesized)
agatccctcagatgcactctccgaggcaatgtcatcacagacaatagccacaccttcacacagagacatagctacatggataacagccatggacacaccctttgaaagacgacagcctca

SEQ ID NO: 147433 - DNA, 120 bp, Artificial Sequence
  ENSG00000105245_35 (sequence is synthesized)
tctcaaacacagacacaccctcacaggcaacaggcactgagccacaagttctcatagacaacaacggcactctcggatatagacagcagacacacactcacaaccactctcagacatcga

SEQ ID NO: 147434 - DNA, 120 bp, Artificial Sequence
  ENSG00000105245_36 (sequence is synthesized)
tgcccttcagcaacaaccttcagggcctcagactcacagacaacaaccacacttttggatgcatccctcacggacagcattcacagatgcacactatcctacaccattctcagacatgcg

SEQ ID NO: 147435 - DNA, 120 bp, Artificial Sequence
  ENSG00000105245_37 (sequence is synthesized)
ttcttccagacagccttcagaaacacactcacagacattacttgcctgctcagatatagagcccctcatagacagcgttccagaacataccattgcacacttgcttacacacacacacac

SEQ ID NO: 147436 - DNA, 120 bp, Artificial Sequence
  ENSG00000105245_38 (sequence is synthesized)
acacacatccccctctgctgttggtgctcccagtcctgggactgtcaggatggctgatcagtgaagactgtcctagtggctggccacctccacacccactccacacacccacagccctgc

SEQ ID NO: 147437 - DNA, 120 bp, Artificial Sequence
  ENSG00000105245_39 (sequence is synthesized)
gccccagaagccttgcctggggactagacacagttgtcacagaatggctgtgtctcagagttccagagacaagccaccatcccccataccccatgcacctgactcctgcacccctgaccc

SEQ ID NO: 147438 - DNA, 120 bp, Artificial Sequence
  ENSG00000105245_40 (sequence is synthesized)
atgcaattcccaactcctctgctgccctctgatcaccccactgcctgactctcatacccctaaaacccctgaccgtgcggcccctgacttctatgccctctagcccccatgccctcctac

SEQ ID NO: 147439 - DNA, 120 bp, Artificial Sequence
  ENSG00000105245_41 (sequence is synthesized)
gtctgatttcccaccctttgtgtcctcacggccctgggaatgaggaagcatccaccacatggacaagaagccctccaatgccctgaagcctgtgccccataccccccaccccagacctcc

SEQ ID NO: 147440 - DNA, 120 bp, Artificial Sequence
  ENSG00000105245_42 (sequence is synthesized)
agccccttagccccatggttctgaatccccagtgcccaactttcgcactcccctggcttctgttggctcctttcctcactgtcccctgacttgagctgctgatcccatgtgcgctgccaa

SEQ ID NO: 147441 - DNA, 120 bp, Artificial Sequence
  ENSG00000105245_43 (sequence is synthesized)
ctgaccctgtaaccccgcttccagttatcttgttatctgaccccatgctccctgagcactggtccctccccgttgagctccataccttctgacccccacccttgacccacatcactgtcc

SEQ ID NO: 147442 - DNA, 120 bp, Artificial Sequence
  ENSG00000105245_44 (sequence is synthesized)
gacgcggtgcggaagggcacgtgcagcttcccggtcagggtgagtgggcgcggcagggtgcggcggggcgagggggacgggggccgctgtgctgtgctgtgcgggtgcgcggcctggctg

SEQ ID NO: 147443 - DNA, 120 bp, Artificial Sequence
  ENSG00000105245_45 (sequence is synthesized)
gcccaagtcgtttgaagttggtgttaaaaagcgtgaggccggcagtcctggctatcacggtgaaaccccggctctactagaaatacaacaaattagcctcgcgtggtggcgggcgcctgt

SEQ ID NO: 147444 - DNA, 120 bp, Artificial Sequence
  ENSG00000105245_46 (sequence is synthesized)
agaagcaactctttcggacgcggagctggaggggatctgaggtcaggtgtcacggagggaaagggagcccaggccaggacggaccgggggaaaggactcggcgatgttcatagggcggac

SEQ ID NO: 147445 - DNA, 120 bp, Artificial Sequence
  ENSG00000105246_0 (sequence is synthesized)
actcctgagagcagagctggccgcagccatgaccccgcagcttctcctggcccttgtcctctgggccagctgcccgccctgcagtggaaggaaagggcccccagcagctctgacactgcc

SEQ ID NO: 147446 - DNA, 120 bp, Artificial Sequence
  ENSG00000105246_1 (sequence is synthesized)
ccgggtgcaatgccgagcctctcggtacccgatcgccgtggattgctcctggaccctgccgcctgctccaaactccaccagccccgtgtccttcattgccacgtacaggctcggcatggc

SEQ ID NO: 147447 - DNA, 120 bp, Artificial Sequence
  ENSG00000105246_2 (sequence is synthesized)
tgcccggggccacagctggccctgcctgcagcagacgccaacgtccaccagctgcaccatcacggatgtccagctgttctccatggctccctacgtgctcaatgtcaccgccgtccaccc

SEQ ID NO: 147448 - DNA, 120 bp, Artificial Sequence
  ENSG00000105246_3 (sequence is synthesized)
ctggggctccagcagcagcttcgtgcctttcataacagagcacatcatcaagcccgaccctccagaaggcgtgcgcctaagccccctcgctgagcgccagctacaggtgcagtgggagcc

SEQ ID NO: 147449 - DNA, 120 bp, Artificial Sequence
  ENSG00000105246_4 (sequence is synthesized)
ccaccgggtggggcccattgaagccacgtccttcatcctcagggctgtgcggccccgagccaggtactacgtccaagtggcggctcaggacctcacagactacggggaactgagtgactg

SEQ ID NO: 147450 - DNA, 120 bp, Artificial Sequence
  ENSG00000105246_5 (sequence is synthesized)
gagtctccccgccactgccacaatgagcctgggcaagtagcaagggcttcccgctgcctccagacagcacctgggtcctcgccaccctaagccccgggacacctgttggagggcggatgg

SEQ ID NO: 147451 - DNA, 120 bp, Artificial Sequence
  ENSG00000105246_6 (sequence is synthesized)
gatctgcctagcctgggctggagtccttgctttgctgctgctgagctgccgggcaacctcagatgaccgacttttccctttgagcctcagtttctctagctgagaaatggagatgtacta

SEQ ID NO: 147452 - DNA, 120 bp, Artificial Sequence
  ENSG00000105246_7 (sequence is synthesized)
ctctctcctttacctttacctttaccacagtgcagggctgactgaactgtcactgtgagatattttttattgtttaattagaaaagaattgttgttgggctgggcgcagtggatcgcacc

SEQ ID NO: 147453 - DNA, 120 bp, Artificial Sequence
  ENSG00000105246_8 (sequence is synthesized)
tgtaatcccagtcactgggaagccgacgtgggagggtagcttgaggccaggagctcgaaaccagtccgggccacacagcaagaccccatctctaaaaaattaatataaatataaaataaa

SEQ ID NO: 147454 - DNA, 120 bp, Artificial Sequence
  ENSG00000105248_0 (sequence is synthesized)
ggaaaagctcgataattacccagcctaaccatttctcaggtgcttgcgaggtgatcagaaggcaaagatgtcggagcgaaaagtattaaacaaatactacccgccggactttgacccatc

SEQ ID NO: 147455 - DNA, 120 bp, Artificial Sequence
  ENSG00000105248_1 (sequence is synthesized)
aaagatccccaaactcaagctccccaaagaccggcagtacgtggtgcggctgatggcccccttcaacatgaggtgtaagacgtgcggagaatacatctacaaggggaagaaattcaatgc

SEQ ID NO: 147456 - DNA, 120 bp, Artificial Sequence
  ENSG00000105248_2 (sequence is synthesized)
tcggaaggagacggtgcagaacgaggtctacctgggcctgcccatcttccgcttttacatcaagtgcacgcgctgcctggcagagatcaccttcaagacagaccctgaaaacacagacta

SEQ ID NO: 147457 - DNA, 120 bp, Artificial Sequence
  ENSG00000105248_3 (sequence is synthesized)
caccatggagcatggagccacgcggaatttccaggctgagaagctcctggaggaggaggagaagagggtgcagaaggagcgggaggacgaggagctgaacaaccccatgaaggtgctgga

SEQ ID NO: 147458 - DNA, 120 bp, Artificial Sequence
  ENSG00000105248_4 (sequence is synthesized)
gaaccggaccaaggactccaagctggagatggaggtgctggagaacctccaggagctgaaagacctgaaccagcggcaggcgcacgtggacttcgaggctatgctgaggcagcaccgcct

SEQ ID NO: 147459 - DNA, 120 bp, Artificial Sequence
  ENSG00000105248_5 (sequence is synthesized)
tgaggctgctccctcgcccctgcagccagcccttcggcccaaccccaccgccatcctggatgaggccccaaagcccaagaggaaggtggaggtctgggagcagagcgttggcagcctggg

SEQ ID NO: 147460 - DNA, 120 bp, Artificial Sequence
  ENSG00000105248_6 (sequence is synthesized)
cagccggcccccgctgtcgaggctggtcgtggtgaagaaggcaaaggccgacccggactgcagcaacgggcagcctcaggcggcccccaccccaggagccccgcagaacaggaaggaggc

SEQ ID NO: 147461 - DNA, 120 bp, Artificial Sequence
  ENSG00000105248_7 (sequence is synthesized)
caaccctacacccctgacgcctggcgcgtcctccctgagccaactgggtgcatacctggacagtgacgacagcaacggcagcaactgagccctcccaggaccccctcacggggtcaaagt

SEQ ID NO: 147462 - DNA, 120 bp, Artificial Sequence
  ENSG00000105248_8 (sequence is synthesized)
cacacgtccagcttcagccacattgaggccagcattgctggtggtcagggcaggaggccttggcgtgactggaggccggacagacaagcgccagcgtgctccaacacatagggccaccag

SEQ ID NO: 147463 - DNA, 120 bp, Artificial Sequence
  ENSG00000105248_9 (sequence is synthesized)
gggcctcagccccaggaggtcccttctctgtgccctcaccagcctctcaacacctcggggacccctgctgctcctgcccccacctgtcactgtgcttagggctgcaacatccctggagca

SEQ ID NO: 147464 - DNA, 120 bp, Artificial Sequence
  ENSG00000105248_10 (sequence is synthesized)
gcttccaacactacttcagggtggcagtgtttggggcactgggcgagcctgccggcctctagatggcctcatctcttccttccacaaactgtctagaaccaataaaaggaaacctgccaa

SEQ ID NO: 147465 - DNA, 90 bp, Artificial Sequence
  ENSG00000105248_11 (sequence is synthesized)
taattttttttgtacccagggtggttttgaactcttgatctcaggcattccacccacctcatactcccaaagtgctggaattacaggcgt

SEQ ID NO: 147466 - DNA, 120 bp, Artificial Sequence
  ENSG00000105248_12 (sequence is synthesized)
gcgtgagccaccgcgcccggccccacgcaggtctttctaggagagcagtctcaggcttgctgtaggaactcctgggaaacaggagccctgggatacaaagggagtaaatactacccgccg

SEQ ID NO: 147467 - DNA, 120 bp, Artificial Sequence
  ENSG00000105251_0 (sequence is synthesized)
caaaaggacagatgcagaggacaggcgccaggcacagataccatctcccttccccaagccagctgcccccaaccctccccctgcccgcaattagtcctctggggcgggagcggggcacag

SEQ ID NO: 147468 - DNA, 120 bp, Artificial Sequence
  ENSG00000105251_1 (sequence is synthesized)
agcagagccctcttgggggaggggaagcccgatccgcacccacccttcctttgcccccctcttccttctgctgctccaatatcaatttcagccagtgacctctccaccaatttgcacatc

SEQ ID NO: 147469 - DNA, 120 bp, Artificial Sequence
  ENSG00000105251_2 (sequence is synthesized)
cccactctcccggtccgtttcaccgccagacatcggttccatttcgaccctcactggcggtcattcccaccccctctgctggtcaatttcaccccttttggcggtcaagtgcagtccccc

SEQ ID NO: 147470 - DNA, 120 bp, Artificial Sequence
  ENSG00000105251_3 (sequence is synthesized)
atttcccgggcaatttccccctcccctccttctccctctcccctcccctccccagcagtgtcactcccagctgctccccacctcccgcgctccgcgctcgctgcggccagtctcgggcgt

SEQ ID NO: 147471 - DNA, 120 bp, Artificial Sequence
  ENSG00000105251_4 (sequence is synthesized)
cccggtcagtgtccagctgccgcggcctcggccccggcgactcccgcccccagccccccttccctccgcgggcagcggctccctccctccccagaacagctgaaggtctcagtcacctcc

SEQ ID NO: 147472 - DNA, 120 bp, Artificial Sequence
  ENSG00000105251_5 (sequence is synthesized)
ggtctcagtcacctccgaggggagcgcagggggaggggaggggcgggggacgcggcggaggggaggtgggggagccttgacgctgctgcccgggacgcggcccggggctggtgggaacag

SEQ ID NO: 147473 - DNA, 120 bp, Artificial Sequence
  ENSG00000105251_6 (sequence is synthesized)
gcccccctccccagcgtcccacctcccggcggcggcggggaaagtctctccgaaagcgtgaagggggattggaggaggtttttatttccctttgtgcgggtggctggggccggatcgagg

SEQ ID NO: 147474 - DNA, 120 bp, Artificial Sequence
  ENSG00000105251_7 (sequence is synthesized)
gggggccgcgggactgggggctccccgctgagccgagaggagcgcgacaaaggatgcgtcccgccggggtcacagtctccgcggcccaactttgcgcgcggcgcccgcgcccctggggag

SEQ ID NO: 147475 - DNA, 120 bp, Artificial Sequence
  ENSG00000105251_8 (sequence is synthesized)
ggagcccgcccgctgcgctgagaacccaggcgtccgggctgggagaggggccgggagcgtccgcaggtggcgctggcccggatctcccgaccccaggaagggatcccggagcttcctgga

SEQ ID NO: 147476 - DNA, 120 bp, Artificial Sequence
  ENSG00000105251_9 (sequence is synthesized)
ggatcccggagcttcctggaggcggcgggcggccgtgtcgctccagggaaccgcgctgcccgcggaaactccgcgcgcctccgcggatgcccctcgccctagcccccagcgcgcggggtt

SEQ ID NO: 147477 - DNA, 120 bp, Artificial Sequence
  ENSG00000105251_10 (sequence is synthesized)
ctgtcgcctccttttcctccccctcgttcaccttttccttccctctatccatccagagccccgccaaagggcgcacctgatctttctcatccttccctgctcttcccttcctctccacct

SEQ ID NO: 147478 - DNA, 120 bp, Artificial Sequence
  ENSG00000105251_11 (sequence is synthesized)
cctcctcctccttggggaaaggggcccggagaagggcatgtgggggcccctctgacagtggcccgattggggtgacaggcgcccaaatggccaagtggctacgggactacctgagctttg

SEQ ID NO: 147479 - DNA, 120 bp, Artificial Sequence
  ENSG00000105251_12 (sequence is synthesized)
ggggtcggaggccccctccgcagccgcccaccccggactacaccgagagcgacatcctgagggcctaccgcgcgcagaagaacctggacttcgaggacccctatgaggacgcggagagcc

SEQ ID NO: 147480 - DNA, 120 bp, Artificial Sequence
  ENSG00000105251_13 (sequence is synthesized)
gcttggagccggaccccgcgggccctggggactccaagaaccccggagatgccaagtatggttctcccaagcaccggctcatcaaggtggaggctgcggatatggccagagccaaggccc

SEQ ID NO: 147481 - DNA, 120 bp, Artificial Sequence
  ENSG00000105251_14 (sequence is synthesized)
ttctgggcggccccggggaggagctggaagccgacactgagtatttagacccctttgatgctcagcctcatcctgcacccccggatgatgggtacatggagccctacgatgcccaatggg

SEQ ID NO: 147482 - DNA, 120 bp, Artificial Sequence
  ENSG00000105251_15 (sequence is synthesized)
tcatgagtgaacttcccggcagaggggtgcagctctatgacaccccttatgaggaacaggacccagagacagcagatggacccccttctgggcagaagcctcggcagagccggatgcccc

SEQ ID NO: 147483 - DNA, 120 bp, Artificial Sequence
  ENSG00000105251_16 (sequence is synthesized)
aggaagatgaacggccagcagatgagtatgatcagccctgggagtggaagaaagaccacatctccagggcgtttgcagtgcagtttgacagtccagagtgggagaggactccaggctcag

SEQ ID NO: 147484 - DNA, 120 bp, Artificial Sequence
  ENSG00000105251_17 (sequence is synthesized)
ccaaggagctccggagacctccgcccagaagcccccagcctgcggagcgtgtggacccagccctgcccctggagaaacagccgtggtttcatggccccctgaacagggcggatgcagaga

SEQ ID NO: 147485 - DNA, 120 bp, Artificial Sequence
  ENSG00000105251_18 (sequence is synthesized)
gcctcctgtccctctgcaaggaaggcagctacctagtgcggctcagtgagaccaacccccaggactgctccttgtctctcaggagcagccagggcttcctgcatctgaagttcgcgcgga

SEQ ID NO: 147486 - DNA, 120 bp, Artificial Sequence
  ENSG00000105251_19 (sequence is synthesized)
cccgtgagaaccaggtggtgctgggccaacacagcgggcccttccccagcgtgcccgagctcgtcctccactacagttcacgcccactgccggtgcagggtgccgagcatctggctctgc

SEQ ID NO: 147487 - DNA, 120 bp, Artificial Sequence
  ENSG00000105251_20 (sequence is synthesized)
tgtaccccgtggtcacgcagaccccctgacagtgaccctcggcccccttttgagtcctcgggcccagaatcgtatcccaaagccctcccatggcctagaaaataaataagttattgtttg

SEQ ID NO: 147488 - DNA, 120 bp, Artificial Sequence
  ENSG00000105251_21 (sequence is synthesized)
gacaccccttatgaggaacaggacccagagacagcagatggacccccttctgggcagaagcctcggcagagccggatgccccaggaagatgaacggccagcagatgatgcagtttgacag

SEQ ID NO: 147489 - DNA, 120 bp, Artificial Sequence
  ENSG00000105251_22 (sequence is synthesized)
gtagattgggggtgattttctagttttaggacttggccacagtctgggctgaaccccagaaggggtttagggactagggctcctctttggaaacttcgaaccgaccccgtctagccacgc

SEQ ID NO: 147490 - DNA, 120 bp, Artificial Sequence
  ENSG00000105254_0 (sequence is synthesized)
gctgatagcccagcagcagcagcggcggcggcggctgcggagcgggtgtgaggcggctggaccgcgctgcaggcatccgcagggcgcggcaagatggaggtgacgggggtgtcggcaccc

SEQ ID NO: 147491 - DNA, 120 bp, Artificial Sequence
  ENSG00000105254_1 (sequence is synthesized)
acggtgaccgttttcatcagcagctccctcaacaccttccgctccgagaagcgatacagccgcagcctcaccatcgctgagttcaagtgtaaactggagttgctggtgggcagccctgct

SEQ ID NO: 147492 - DNA, 120 bp, Artificial Sequence
  ENSG00000105254_2 (sequence is synthesized)
tcctgcatggaactggagctgtatggagttgacgacaagttctacagcaagctggatcaagaggatgcgctcctgggctcctaccctgtagatgacggctgccgcatccacgtcattgac

SEQ ID NO: 147493 - DNA, 120 bp, Artificial Sequence
  ENSG00000105254_3 (sequence is synthesized)
cacagtggcgcccgccttggtgagtatgaggacgtgtcccgggtggagaagtacacgatctcacaagaagcctacgaccagaggcaagacacggtccgctctttcctgaagcgcagcaag

SEQ ID NO: 147494 - DNA, 120 bp, Artificial Sequence
  ENSG00000105254_4 (sequence is synthesized)
gctcagcaggaggccgaggccgcccagcgcctggccgaggagaaggcccaggccagctccatccccgtgggcagccgctgtgaggtgcgggcggcgggacaatcccctcgccggggcacc

SEQ ID NO: 147495 - DNA, 120 bp, Artificial Sequence
  ENSG00000105254_5 (sequence is synthesized)
gtcatgtatgtaggtctcacagatttcaagcctggctactggattggtgtccgctatgatgagccactggggaaaaatgatggcagtgtgaatgggaaacgctacttcgaatgccaggcc

SEQ ID NO: 147496 - DNA, 120 bp, Artificial Sequence
  ENSG00000105254_6 (sequence is synthesized)
aagtatggcgcctttgtcaagccagcagtcgtgacggtgggggacttcccggaggaggactacgggttggacgagatatgacacctaaggaattcccctgcttcagctcctagctcagcc

SEQ ID NO: 147497 - DNA, 120 bp, Artificial Sequence
  ENSG00000105254_7 (sequence is synthesized)
actgactgcccctcctgtgtgtgcccatggcccttttctcctgaccccattttaattttattcattttttcctttgccattgatttttgagactcatgcattaaattcactagaaaccca

SEQ ID NO: 147498 - DNA, 120 bp, Artificial Sequence
  ENSG00000105254_8 (sequence is synthesized)
gagtgtttgtggagggaagtgggaggcgcaggcggagtgatctgtccagcgagggaggaagcagaagccagaggcacgcggcctgtgcgcttcgaagcgtggggcagtgtcagtcgcggt

SEQ ID NO: 147499 - DNA, 120 bp, Artificial Sequence
  ENSG00000105254_9 (sequence is synthesized)
ggggaaacgggcggcgtgaccaaggcaggagtgagggaacacagggggctgtgtgagcccagaggaagcacctggaggctgggagcatctgaaggaaaggaggcagcagccaggtgaaaa

SEQ ID NO: 147500 - DNA, 120 bp, Artificial Sequence
  ENSG00000105254_10 (sequence is synthesized)
gggacagaggcagcctctgggagcttggatgggggtgaggaaggggaggtggccagtgtacgtagctacttctcccttccgctgggctcaggagagaagagaaggctgcagtacaggcga

SEQ ID NO: 147501 - DNA, 120 bp, Artificial Sequence
  ENSG00000105254_11 (sequence is synthesized)
cttcctgcatggaactggagctgtatggagttgacgacaagttctacagcaagctggatcaagaggatgcgctcctgggctcctaccctgtagatgacggctgccgcatccacgtctcac

SEQ ID NO: 147502 - DNA, 74 bp, Artificial Sequence
  ENSG00000105254_12 (sequence is synthesized)
atgcccgccactacaccagggtcattgaccacagtggcgcccgccttggtgagtatgaggacgtgtcccgggtg

SEQ ID NO: 147503 - DNA, 120 bp, Artificial Sequence
  ENSG00000105254_13 (sequence is synthesized)
ggaggaaatgttgggggcacagtggagcctcggagaccacgctctgcctaggggcgcggggttgggggggactcgaaacgatctcagtccctggaggtgacggaaccatctgccgacact

SEQ ID NO: 147504 - DNA, 120 bp, Artificial Sequence
  ENSG00000105254_14 (sequence is synthesized)
gcgggtccggagagaactcgagagtgcagagatgagggccgggtccagcgaaaaatccgacggtccagagggcgggggcaagaggcgaggggctggattgcggccccgtgcgtcctgact

SEQ ID NO: 147505 - DNA, 120 bp, Artificial Sequence
  ENSG00000105254_15 (sequence is synthesized)
ggggggtcttttggaggaaaagggacgtggcgatggtcattgatgcaaggggcggggcctccgtggcctccttcttctcaccctgcctcctcctcacagtgtaaactggagttgctggtg

SEQ ID NO: 147506 - DNA, 120 bp, Artificial Sequence
  ENSG00000105254_16 (sequence is synthesized)
tgcactccagtttggatgatagagtcattgaccacagtggcgcccgccttggtgagtatgaggacgtgtcccgggtggagaagtacacgatctcacaagaagcctacgaccagaggcaag

SEQ ID NO: 147507 - DNA, 120 bp, Artificial Sequence
  ENSG00000105254_17 (sequence is synthesized)
ctcgagagtgcagagatgagggccgggtccagcgaaaaatccgacggtccagagggcgggggcaagaggcgaggggctggattgcggcccctgtaaactggagttgctggtgggcagccc

SEQ ID NO: 147508 - DNA, 120 bp, Artificial Sequence
  ENSG00000105254_18 (sequence is synthesized)
cagcctccagagccaacacccccgcccccagctcagggcccgccactcactccacttcgtgcgtgatcttgttgacatagatgcagctgttgtcggcctcctgctgagtaattgcttcca

SEQ ID NO: 147509 - DNA, 120 bp, Artificial Sequence
  ENSG00000105254_19 (sequence is synthesized)
atttttgggcatcgccgcctcagtttacagaatagtatggatctggtgccagagccgggaaaacgatgcgcatcgtaaaccgcaaaacactgagcatccaggacagaagccaaggcgctt

SEQ ID NO: 147510 - DNA, 120 bp, Artificial Sequence
  ENSG00000105254_20 (sequence is synthesized)
ggttgaaggccagtgcgcatgcgcgagtttacccttcgcggactgggcgagctcttgccactcctacctccgggcttcagtcttcgccgcctgttctggtcctttcccgggccgctattg

SEQ ID NO: 147511 - DNA, 120 bp, Artificial Sequence
  ENSG00000105254_21 (sequence is synthesized)
gaagaaccgtgaactatggaaggcccctctggattggctgggctggcccaagagtaaggagagccctcttcctggcggtggggaagggacggcggcgattggcggacgctcctggcagga

SEQ ID NO: 147512 - DNA, 120 bp, Artificial Sequence
  ENSG00000105254_22 (sequence is synthesized)
gagcgcggattggtcaggcacggagcaggaggcggggctgatagcccagcagcagcagcggcggcggcggctgcggagcgggtgtgaggcggctggaccgcgctgcaggcatccgcaggg

SEQ ID NO: 147513 - DNA, 120 bp, Artificial Sequence
  ENSG00000105254_23 (sequence is synthesized)
cccgagataggtcctgccttcgtggagcctccagtgcagcctgacgagagacagacccatcattagacagggacagcctagagtggtctgggctgggatcaggaaatcccaggggactgg

SEQ ID NO: 147514 - DNA, 120 bp, Artificial Sequence
  ENSG00000105254_24 (sequence is synthesized)
agccaccaagaagaggtgcctgactccacctgggagaatcagagagggcttcctggaggaagggatgtctgagctgagggatgaggaaagggtgacttaagagaaagaggtggaaaggag

SEQ ID NO: 147515 - DNA, 120 bp, Artificial Sequence
  ENSG00000105254_25 (sequence is synthesized)
ggagcagggtgtacagaggcctagaatgtgaggtaggtcacagtgagcgaccaggctggacagcttgggagaaaccagaacacaggatctctttgtgcatccactcagtacatcctttct

SEQ ID NO: 147516 - DNA, 84 bp, Artificial Sequence
  ENSG00000105254_26 (sequence is synthesized)
gcctggaatggagtgcagtggcactatcgggctcactgcagccttcacctcctgggttcaagtgatccttgtgccccagcctcc

SEQ ID NO: 147517 - DNA, 80 bp, Artificial Sequence
  ENSG00000105255_0 (sequence is synthesized)
gcaatgcgcgcggtgatggagcgctaaccgggggcgcggcggcggcgagggctcggcgggccattggctaccggccgcgg

SEQ ID NO: 147518 - DNA, 120 bp, Artificial Sequence
  ENSG00000105255_1 (sequence is synthesized)
gccgggccggggtgacctgggctgcagccatggaagaacagagggaggccctgaggaagatcatcaaaacactggctgtgaagaatgaagaaattcagagctttatctactccctgaaac

SEQ ID NO: 147519 - DNA, 120 bp, Artificial Sequence
  ENSG00000105255_2 (sequence is synthesized)
agatgctgctgaacgtggaggcgaactcggcgaaggtgcaggaggacctcgaagcagagttccagtccctcttctccctcctggaggagctgaaagaaggcatgcttatgaagataaaac

SEQ ID NO: 147520 - DNA, 120 bp, Artificial Sequence
  ENSG00000105255_3 (sequence is synthesized)
aggaccgtgccagccgtacctacgagctgcagaaccagctggctgcctgcacgcgggccctggagagctccgaggagcttctggagacagccaaccagactctgcaggccatggacagcg

SEQ ID NO: 147521 - DNA, 120 bp, Artificial Sequence
  ENSG00000105255_4 (sequence is synthesized)
aggactttcctcaggctgccaagcaaatcaaagatggagtgaccatggcccctgccttccggctatcattgaaagcgaaggtcagtgacaacatgagtcacctcatggtggacttcgcgc

SEQ ID NO: 147522 - DNA, 120 bp, Artificial Sequence
  ENSG00000105255_5 (sequence is synthesized)
aagagcggcagatgctacaggcactcaagttcctgcctgtgcccagcgcacccgtgatcgacctggctgagtccctggtggcagataactgtgtgaccctggtgtggcgcatgccggatg

SEQ ID NO: 147523 - DNA, 120 bp, Artificial Sequence
  ENSG00000105255_6 (sequence is synthesized)
aggacagcaagattgaccactacgtgctggagtaccggcggaccaacttcgagggcccgccccgcctcaaggaggaccagccctggatggtcatcgagggcatccggcagacagagtaca

SEQ ID NO: 147524 - DNA, 120 bp, Artificial Sequence
  ENSG00000105255_7 (sequence is synthesized)
tgaacttccgtgtgaaggcctgtaacaaggcagttgcaggagagttctctgagccggtgactctggagacaccagcgttcatgttccgcctggatgcgtccacatcccaccagaacctgc

SEQ ID NO: 147525 - DNA, 120 bp, Artificial Sequence
  ENSG00000105255_8 (sequence is synthesized)
gggtggatgatctctccgtggagtgggacgctatgggcgggaaggtgcaggatatcaaggctcgcgagaaagatggcaaggggcggacggcgtctcccatcaactccccagccagaggta

SEQ ID NO: 147526 - DNA, 120 bp, Artificial Sequence
  ENSG00000105255_9 (sequence is synthesized)
ctccatctcccaagaggatgccctcaggtcgtgggggacgggaccgcttcaccgctgagtcctacacagttctgggggacacgctgatcgacggcggggagcattactgggaggtgcgct

SEQ ID NO: 147527 - DNA, 120 bp, Artificial Sequence
  ENSG00000105255_10 (sequence is synthesized)
acgagccggacagcaaggcgttcggcgtgggcgtggcctaccgcagcctgggccgcttcgagcaactgggcaagacggccgcctcctggtgcctgcacgtcaacaattggctgcaggtca

SEQ ID NO: 147528 - DNA, 120 bp, Artificial Sequence
  ENSG00000105255_11 (sequence is synthesized)
gcttcacggccaagcacgccaacaaggtcaaggtgctggacgcccccgtgcccgactgcctgggtgtgcactgtgacttccaccaaggcctcctgtccttctacaatgcccgcaccaaac

SEQ ID NO: 147529 - DNA, 120 bp, Artificial Sequence
  ENSG00000105255_12 (sequence is synthesized)
aagtgctgcacactttcaagaccaggttcacacagccgctgctgcctgctttcacggtatggtgtggcagcttccaggtgacgacaggcctgcaggtccccagtgctgtgcgctgcctgc

SEQ ID NO: 147530 - DNA, 120 bp, Artificial Sequence
  ENSG00000105255_13 (sequence is synthesized)
aaaagcgaggcagtgctaccagcagctccaacaccagcctcacctaggcccccaggcacccacccagctggggtgtttttgggggagtcgccgccaagcccaggctgctggagccaggca

SEQ ID NO: 147531 - DNA, 120 bp, Artificial Sequence
  ENSG00000105255_14 (sequence is synthesized)
ccctcctctgtcacttgctgcttggagccttaactccagatgggggggtcaccaagagggagtgggcaccctggcgggccctctccccacctcacctcttaataaaggtcagacactggc

SEQ ID NO: 147532 - DNA, 120 bp, Artificial Sequence
  ENSG00000105255_15 (sequence is synthesized)
attggctaccggccgcggcaaaggcagcttggggacccagcgtgcgcggggcccgcgggccgggccggggtgacctgggctgcagccatggaagaacagaggaatgaagaaattcagagc

SEQ ID NO: 147533 - DNA, 120 bp, Artificial Sequence
  ENSG00000105255_16 (sequence is synthesized)
aggaggccctgaaacaggacctggagtatggtggacgacccggtgtctgaattccgcctgggggaggtggagctctgagaattccacgccctgtggggggtggagttctcatggagcccc

SEQ ID NO: 147534 - DNA, 120 bp, Artificial Sequence
  ENSG00000105255_17 (sequence is synthesized)
gcccctgggtggagccatgggaagaccccacccactgtgtagtgacatcctgggaaaactctgtacccaggggtggaactgtgagaataccatgtcctgtggggttggttgagtcctcat

SEQ ID NO: 147535 - DNA, 120 bp, Artificial Sequence
  ENSG00000105255_18 (sequence is synthesized)
gaggccccgccctggggtggagccatgagaaggtcaaactcaccaggtgggaaaatcctgtccccaggggtggagccctgagaatagcacgtcctgtgggggtggggtattcatcaagtc

SEQ ID NO: 147536 - DNA, 120 bp, Artificial Sequence
  ENSG00000105255_19 (sequence is synthesized)
ccgcccatgggtggagccatcagaaagccccacccaccagggggtgaggtcctgggaaaactctgtccacaggggtggagccctgagaataccatgtcgttgggggagtggagtcctccc

SEQ ID NO: 147537 - DNA, 120 bp, Artificial Sequence
  ENSG00000105255_20 (sequence is synthesized)
attggctaccggccgcggcaaaggcagcttggggacccagcgtgcgcggggcccgcgggccgggccggggtgacctgggctgcagccatggaagaacagaggatgctgctgaacgtggag

SEQ ID NO: 147538 - DNA, 120 bp, Artificial Sequence
  ENSG00000105255_21 (sequence is synthesized)
cctgagaaggccacgtccccgaggagaaatggactgagaacccagcctgtctatgatgcagccccaaagaaagccgcatccctcattggcagagattttggaataattctgcctgtaaat

SEQ ID NO: 147539 - DNA, 120 bp, Artificial Sequence
  ENSG00000105255_22 (sequence is synthesized)
aattctgcctgtaaatgatggaatcccaagaaagctcagccctcccccaacccactgatggaaccttagcgtctccatggccgggcgcggtgactcacgcctggaatcccagcactttgg

SEQ ID NO: 147540 - DNA, 68 bp, Artificial Sequence
  ENSG00000105255_23 (sequence is synthesized)
taaaaaaaaaaaagtctccaccctgccaaacatggaacccctttgtggccatgcccccaaaattgtcc

SEQ ID NO: 147541 - DNA, 120 bp, Artificial Sequence
  ENSG00000105255_24 (sequence is synthesized)
aacatggaacccctttgtggccatgcccccaaaattgtccaacatgtggttgggcagccctgcagcaagccccctgccccctgaaccaggcacagaatcccgaccccctctcctttccgt

SEQ ID NO: 147542 - DNA, 120 bp, Artificial Sequence
  ENSG00000105258_0 (sequence is synthesized)
gcgcgggctgcgcgtcgccatggagcccgacgggacttacgagccgggcttcgtgggtattcgcttctgccaggaatgtaacaacatgctgtaccccaaggaagacaaggagaaccgcat

SEQ ID NO: 147543 - DNA, 120 bp, Artificial Sequence
  ENSG00000105258_1 (sequence is synthesized)
tggacgaactgacccagattatcgccgacgtgtcccaggaccccacgttgccgcggaccgaggaccacccgtgccaaaagtgcggccacaaggaggctgtgttcttccagtcacacagtg

SEQ ID NO: 147544 - DNA, 120 bp, Artificial Sequence
  ENSG00000105258_2 (sequence is synthesized)
cgcgggccgaggacgccatgcgcctttactacgtgtgcacagccccacactgcggccaccgctggaccgagtgacctcctctctcccccgagtgtaataaacaccagattccatgcgtga

SEQ ID NO: 147545 - DNA, 120 bp, Artificial Sequence
  ENSG00000105258_3 (sequence is synthesized)
gaaggctgggagggctgcgcgggctgcgcgtcgccatggagcccgacgggacttacgagccgggcttcgtgggtattcgcttctgccaggaatggtgaggcggagggagcgggtgatgtt

SEQ ID NO: 147546 - DNA, 120 bp, Artificial Sequence
  ENSG00000105258_4 (sequence is synthesized)
agaaggcgggcgaggaatggctccagaactaacccctggcacctccccctccccacagtaacaacatgctgtaccccaaggaagacaaggagaaccgcattctgctctacgcgtgccgga

SEQ ID NO: 147547 - DNA, 120 bp, Artificial Sequence
  ENSG00000105258_5 (sequence is synthesized)
cgccatggagcccgacgggacttacgagccgggcttcgtgggtattcgcttctgccaggaatgtgccggaactgtgattaccagcaggaggccgacaacagctgcatctatgtcaacaag

SEQ ID NO: 147548 - DNA, 120 bp, Artificial Sequence
  ENSG00000105258_6 (sequence is synthesized)
gcatgcgcactggccttcaaccaagccaagcgccttggcttctgtcctggatgctcagtgttttgcggtttacgatgcgcatcgttttcccggctctggcaccagatccatactattctg

SEQ ID NO: 147549 - DNA, 120 bp, Artificial Sequence
  ENSG00000105258_7 (sequence is synthesized)
taaactgaggcggcgatgcccaaaaattggaagcaattactctaagatatcaaaagattgaagcaagccatgaaacctctgcgcggagagagccgagcccgaggcggcggggagccagca

SEQ ID NO: 147550 - DNA, 120 bp, Artificial Sequence
  ENSG00000105258_8 (sequence is synthesized)
tgcctctgtgatcggactccctgttcgccctccgctgcacctcaagtgatcctgactctcatgtcctgcccatccccaaagagagtcctgtcgtcatatcctccgggatcaccctgccct

SEQ ID NO: 147551 - DNA, 120 bp, Artificial Sequence
  ENSG00000105258_9 (sequence is synthesized)
ctcctcccaatcttgtctggaatccttccgtgaccccctttcccccacactcgccctctcgtagtgccggaactgtgattaccagcaggaggccgacaacagctgcatctatgtcaacaa

SEQ ID NO: 147552 - DNA, 120 bp, Artificial Sequence
  ENSG00000105261_0 (sequence is synthesized)
gtctgacagcaggtggaagcagcccctgtgtgtggagagccttccggagggcatgccccgcgccttcctggtcaggagtcggcgtccacagccccccaactggggccatctgcctgacca

SEQ ID NO: 147553 - DNA, 120 bp, Artificial Sequence
  ENSG00000105261_1 (sequence is synthesized)
gctccggggagatgcctatatcccagactgcagcagcctgggggggccaccggcacaacagtcgtccagtgtcagggatccgtggacagcgcagcccacacagggcaacctgacctctgc

SEQ ID NO: 147554 - DNA, 120 bp, Artificial Sequence
  ENSG00000105261_2 (sequence is synthesized)
cctcaagtgccacagccccgtgcgccgccacctgtgccgctgttgtggcaagggctttcatgacgccttcgatctcaagcgccacatgaggactcacactgggatccggcccttccgctg

SEQ ID NO: 147555 - DNA, 120 bp, Artificial Sequence
  ENSG00000105261_3 (sequence is synthesized)
cagtgcttgcgggaaagcgtttacgcagcgctgctccctggaagctcaccttgctaaggtgcatggacagccggccagctacgcttaccgtgagcgccgcgagaagctgcacgtgtgcga

SEQ ID NO: 147556 - DNA, 120 bp, Artificial Sequence
  ENSG00000105261_4 (sequence is synthesized)
ggactgcggcttcaccagctcccggcccgacacctacgcacagcaccgcgccctgcaccgcgcagcctgatacggtgtgccagcgtcctccccacgaggcaaataaacacagaaaactca

SEQ ID NO: 147557 - DNA, 120 bp, Artificial Sequence
  ENSG00000105261_5 (sequence is synthesized)
atgccccgcgccttcctggtcaggagtcggcgtccacagccccccaactggggccatctgcctgaccagctccggggagatgcctatatcccaggtgggcccctcactgtgcctggaggt

SEQ ID NO: 147558 - DNA, 120 bp, Artificial Sequence
  ENSG00000105270_0 (sequence is synthesized)
ctctccgcccccaccccctgtcggcgtctgggcctcgtccccttctctctgtctcccttgcctcccccatcacgtcccctgacaccgacaccccattgctcccacagtctccccagtctc

SEQ ID NO: 147559 - DNA, 120 bp, Artificial Sequence
  ENSG00000105270_1 (sequence is synthesized)
cactttggtccccagcgctgtctgcccgaggatttgcctgaaggctgcccccaactctgcacccgccccccgagggccaccgaggaccatgactaagacagatcctgccccgatggcccc

SEQ ID NO: 147560 - DNA, 120 bp, Artificial Sequence
  ENSG00000105270_2 (sequence is synthesized)
gccaccccgaggagaggaggaagaagaggaggaggaggatgaacccgtccccgaggcccccagccccacccaggagcgccggcagaagcctgttgtgcacccctcggcacctgcccccct

SEQ ID NO: 147561 - DNA, 120 bp, Artificial Sequence
  ENSG00000105270_3 (sequence is synthesized)
ccctaaggactacgctttcaccttcttcgatcccaatgacccggcgtgccaggagatcctgtttgaccctcagaccaccatccccgagctgtttgccattgtgcgccagtgggtgcccca

SEQ ID NO: 147562 - DNA, 120 bp, Artificial Sequence
  ENSG00000105270_4 (sequence is synthesized)
agtccagcacaagatagacgtcatcggcaatgagattctgcgccgaggctgccatgtgaacgatcgtgacgggctgaccgacatgacactgctccactatgcgtgcaaagctggggccca

SEQ ID NO: 147563 - DNA, 120 bp, Artificial Sequence
  ENSG00000105270_5 (sequence is synthesized)
cggagtcggggaccccgcggcagccgtgcgcctctcgcagcagctgctggcgctgggcgcagatgtgacgctgcgcagccgctggaccaacatgaacgcgcttcactacgcggcctattt

SEQ ID NO: 147564 - DNA, 120 bp, Artificial Sequence
  ENSG00000105270_6 (sequence is synthesized)
tgatgtgcccgacctcgtgcgtgtgctgctgaagggtgcgaggccgcgagtggtgaactccacgtgcagtgacttcaaccacggctcagccctgcacatcgctgcttccagcctgtgcct

SEQ ID NO: 147565 - DNA, 120 bp, Artificial Sequence
  ENSG00000105270_7 (sequence is synthesized)
gggcgccgccaaatgtttgctggagcacggcgccaaccctgcgctgaggaatcgaaaaggacaggtgccggcggaggtggtcccagatcctatggacatgtccctggacaaggcagaggc

SEQ ID NO: 147566 - DNA, 120 bp, Artificial Sequence
  ENSG00000105270_8 (sequence is synthesized)
ggcactggtggccaaggagctgcggacgcttctggaagaggcagtgccactatcttgcgccctccccaaggtcacgctacccaactatgacaacgtcccaggcaatctcatgcttagcgc

SEQ ID NO: 147567 - DNA, 120 bp, Artificial Sequence
  ENSG00000105270_9 (sequence is synthesized)
actgggcttgcgcctgggagaccgcgtgctgctggatggccagaagacgggcacactgcggttctgtgggaccacggagtttgccagcggccagtgggtgggcgtggagctggacgaacc

SEQ ID NO: 147568 - DNA, 120 bp, Artificial Sequence
  ENSG00000105270_10 (sequence is synthesized)
tgagggcaagaacgatggcagcgttgggggcgttcggtacttcatctgccctcccaagcagggtctctttgcctccgtgtccaagatctccaaggcagtggacgcacccccctcctctgt

SEQ ID NO: 147569 - DNA, 120 bp, Artificial Sequence
  ENSG00000105270_11 (sequence is synthesized)
cacctccacaccccggaccccccggatggacttctcccgtgtcaccggcaaaggccgcagggaacacaaaggcaagaagaagaccccatcatccccatctctgggcagcttgcagcagcg

SEQ ID NO: 147570 - DNA, 120 bp, Artificial Sequence
  ENSG00000105270_12 (sequence is synthesized)
tgacggggccaaggctgaggttggagaccaggtccttgtcgcgggccagaagcaggggatcgtgcgcttctacgggaagacagactttgccccaggttactggtatggcattgagctgga

SEQ ID NO: 147571 - DNA, 120 bp, Artificial Sequence
  ENSG00000105270_13 (sequence is synthesized)
ccactgattcccccggggacagcgttggagccaaaaaagtgcatcaagtgacaatgacgcagcccaaacgcaccttcaccacagtccggaccccaaaggacattgcatcagagaactcca

SEQ ID NO: 147572 - DNA, 120 bp, Artificial Sequence
  ENSG00000105270_14 (sequence is synthesized)
tttccaggttgctgttctgctgctggttcccctggatgctgagggcggagatgcagtcttagaggccctggacacctgacaaagagacagagtccccactagcatctcctgacacccgag

SEQ ID NO: 147573 - DNA, 120 bp, Artificial Sequence
  ENSG00000105270_15 (sequence is synthesized)
gagccctgagtcaccctgagatagagattcccagtaacacatccagagtagagacccctgttagccagccctcgatcattgaggccccattattaacagatactcccataataaccccca

SEQ ID NO: 147574 - DNA, 120 bp, Artificial Sequence
  ENSG00000105270_16 (sequence is synthesized)
aatacagaccccatgtcacccagaaagagattccctgagtagcaccttcaggctagtccctatccccaacccctcagagcagattcccagattaacagatttccatatcaccccaaatga

SEQ ID NO: 147575 - DNA, 120 bp, Artificial Sequence
  ENSG00000105270_17 (sequence is synthesized)
tggtgaccctctccacataatgcattacaacagaacattcttgaatcacccaaccctggatcagaaacctccccattaacaaacactgccccttaagtcctcttgaaataaacataggtc

SEQ ID NO: 147576 - DNA, 120 bp, Artificial Sequence
  ENSG00000105270_18 (sequence is synthesized)
acacccccaaagcaaaagagtaacagacattcatgtcattgttccccatttaacatcagtcctctcaagatgtcgtgaccccatggtcaccctgaagcccttagattccaacccctcaat

SEQ ID NO: 147577 - DNA, 120 bp, Artificial Sequence
  ENSG00000105270_19 (sequence is synthesized)
cagagacttccttcattaacaaagacccttgttcttatccctcaagaagaaacccaccataaccagcccactgtcacccctaatttacagacaccaaaacagtcctggaagtgctaatta

SEQ ID NO: 147578 - DNA, 120 bp, Artificial Sequence
  ENSG00000105270_20 (sequence is synthesized)
caggaccccccaagtcttcctaccctctgcaccctcaagaaacccccagtgccttgtatgaagcccaccccacatggcccacagctcctgtgctggccagactcccagaaaattctctat

SEQ ID NO: 147579 - DNA, 120 bp, Artificial Sequence
  ENSG00000105270_21 (sequence is synthesized)
tttttaagtaacgacttccccctttgggggaccccaaaatttggaggccccattctaggactctggggatcccaaaccctagagtacacacgtcccaaactcccctgtgccctcaagtcc

SEQ ID NO: 147580 - DNA, 120 bp, Artificial Sequence
  ENSG00000105270_22 (sequence is synthesized)
tacagcccctagaagaccccaatgccgtaactcctaggacccccaaatcatggaatcccaaatccccagggaatcccaaatttgaaaatccaatcccaagtccccaggaaacccaatcat

SEQ ID NO: 147581 - DNA, 120 bp, Artificial Sequence
  ENSG00000105270_23 (sequence is synthesized)
gaggtccttgtgcctggtatggaggagactgcagtcaggatatgcattccaggctcccagacacctcaagccctattcacaggcaccaggaaaccccacacaggaattcccatccctgga

SEQ ID NO: 147582 - DNA, 120 bp, Artificial Sequence
  ENSG00000105270_24 (sequence is synthesized)
aactggagaatttcaatgccccgagtccatgggtttcaagacaccaaattccaagagccccagccctaagggaaccccaaatcctaaagcctccatctctaataaatggaaggccccaag

SEQ ID NO: 147583 - DNA, 120 bp, Artificial Sequence
  ENSG00000105270_25 (sequence is synthesized)
gccctgaggggatctcaaatcctggaaccccgatttcaatctacgttctagtcactggcctcaaaggaccccacagcacctgggccagaccaacagctcgagggagaacctgaaggccca

SEQ ID NO: 147584 - DNA, 120 bp, Artificial Sequence
  ENSG00000105270_26 (sequence is synthesized)
gggggtccagggcggacctggggccccgaccaccaaggacagctcacgactgccccttcactgcatgtccccaaactcagcatgactcctgtcctcttcaataaagacgtttctatggcc

SEQ ID NO: 147585 - DNA, 120 bp, Artificial Sequence
  ENSG00000105270_27 (sequence is synthesized)
aatcccgagataaacaaacccggggagggggcagccgcgactgaggggcctgacgcgggaggagaagaatggggggctgggcctgggggaggtggcaggcgctgggcgcacacaccgggg

SEQ ID NO: 147586 - DNA, 120 bp, Artificial Sequence
  ENSG00000105270_28 (sequence is synthesized)
ccctctatgggtaacgggggtccctatggttgcccaagatccagttgcgcggaggccacccggggccctggaagctcctaggggcttggaccctggagcctgccgggcaccctctccagc

SEQ ID NO: 147587 - DNA, 120 bp, Artificial Sequence
  ENSG00000105278_0 (sequence is synthesized)
aggctcggggaagacgccaagatggcgacgagtcagtatttcgacttcgcgcagggcggcggcccgcagtacagcgcccagcctccgacccttcccctgcccactgtgggggccagctat

SEQ ID NO: 147588 - DNA, 120 bp, Artificial Sequence
  ENSG00000105278_1 (sequence is synthesized)
actgcacaacccactcctgggatggaccctgccgtgaacccggcctttcccccagctgccccggcagggtacggtggataccagccccactccggccaggacttcgcctacggcagccga

SEQ ID NO: 147589 - DNA, 120 bp, Artificial Sequence
  ENSG00000105278_2 (sequence is synthesized)
ccccaggagcccgtccccacggccaccaccatggctacctaccaggacagttacagctacggacagtcagcagctgccaggagctatgaggacaggccgtacttccagtctgctgccctc

SEQ ID NO: 147590 - DNA, 120 bp, Artificial Sequence
  ENSG00000105278_3 (sequence is synthesized)
cagtctgggcgcatgacagccgcagactccggccagccagggacccaagaagcctgcgggcagcccagcccccatggcagtcacagccacgctcagcccccacagcaggcgcccatagtg

SEQ ID NO: 147591 - DNA, 120 bp, Artificial Sequence
  ENSG00000105278_4 (sequence is synthesized)
gagtccggacagccagcgagcaccttgtcctcgggatacacctaccccacggcgacaggcgtccagcccgagtcgtcagcttccatcgtgacctcctaccccccgccctcctacaacccc

SEQ ID NO: 147592 - DNA, 120 bp, Artificial Sequence
  ENSG00000105278_5 (sequence is synthesized)
acctgcaccgcctacacggcaccaagctacccgaactatgacgcgtcggtgtactccgctgccagccctttctatcctccagcgcagcccccgcctcccccgggacccccgcagcagctg

SEQ ID NO: 147593 - DNA, 120 bp, Artificial Sequence
  ENSG00000105278_6 (sequence is synthesized)
cccccgccgcccgcgcctgcaggctcaggaagcagccccagggccgactcgaagccaccgcttcccagcaagctgccgagacccaaggcggggcccaggcagctccagcttcactactgc

SEQ ID NO: 147594 - DNA, 120 bp, Artificial Sequence
  ENSG00000105278_7 (sequence is synthesized)
gacatctgcaagatcagctgcgctggcccccagacctaccgggaacatctgggagggcagaagcacagaaagaaggaggcggcccagaagacaggcgtgcagcccaacgggagcccgcgc

SEQ ID NO: 147595 - DNA, 120 bp, Artificial Sequence
  ENSG00000105278_8 (sequence is synthesized)
ggggtgcaggcgcagctgcattgcgacctgtgcgccgtgtcctgcaccggggcggacgcctacgcggcccacatccggggatccaagcaccagaaggtcttcaagctgcacgccaaactg

SEQ ID NO: 147596 - DNA, 120 bp, Artificial Sequence
  ENSG00000105278_9 (sequence is synthesized)
gggaagcccattcccaccctcgagcctgcactggccacagagagcccccccggggcagaggccaagcccacgtcccccactggccccagcgtgtgtgcctcgagcaggccagcgctggcc

SEQ ID NO: 147597 - DNA, 120 bp, Artificial Sequence
  ENSG00000105278_10 (sequence is synthesized)
aagagacccgtggcctcgaaggccttatgcgaggggcctcctgagccacaggcagcaggctgcagaccccagtgggggaaaccagcccaacctaaattagagggtcccggagcacctacc

SEQ ID NO: 147598 - DNA, 120 bp, Artificial Sequence
  ENSG00000105278_11 (sequence is synthesized)
caaggaggctcaaaggaagctcccgcgggctgctctgatgcgcagccggtgggcccggaatatgtggaggaggtgttcagcgacgaagggcgagtgcttcgcttccactgcaagctgtgc

SEQ ID NO: 147599 - DNA, 120 bp, Artificial Sequence
  ENSG00000105278_12 (sequence is synthesized)
gagtgcagtttcaacgaccttaacgcgaaggacctgcacgtgagggggcggcggcaccggctgcagtaccggaagaaagtgaacccggaccttcccattgccacggagcccagcagccgg

SEQ ID NO: 147600 - DNA, 120 bp, Artificial Sequence
  ENSG00000105278_13 (sequence is synthesized)
gctcggaaggtcctggaggagcgcatgaggaagcagcggcacctggcggaggagcggctggagcagctgcggcgctggcacgcggagaggaggcggctggaggaggagccaccccaggac

SEQ ID NO: 147601 - DNA, 120 bp, Artificial Sequence
  ENSG00000105278_14 (sequence is synthesized)
ccacgcgccgcccgactgggcccagcctctgctcatgggcaggccggagtcacccgccagcgccccactccagcccgggcggcggccggcgtccagcgacgaccggcacgtcatgtgcaa

SEQ ID NO: 147602 - DNA, 120 bp, Artificial Sequence
  ENSG00000105278_15 (sequence is synthesized)
atgtgcaagcacgccaccatctaccccacggagcaggagctcctggccgtgcagagggccgtgtcccacgcagagcgggccctcaagctggtgtccgacacactggccgaggaggaccgg

SEQ ID NO: 147603 - DNA, 120 bp, Artificial Sequence
  ENSG00000105278_16 (sequence is synthesized)
ggccgccgagaggaagagggtgacaagcgcagcagcgttgccccccagactcgggtcctgaaaggcgtcatgcgagtaggcatcctggcgaaaggcctcctcctgcgtggggacaggaac

SEQ ID NO: 147604 - DNA, 120 bp, Artificial Sequence
  ENSG00000105278_17 (sequence is synthesized)
gtgcgcctcgctctgctctgctccgagaagcccacgcacagcctgctgcggaggatcgcccagcagctgccccggcagctccagatggtgaccgaggatgagtatgaggtctcctccgac

SEQ ID NO: 147605 - DNA, 120 bp, Artificial Sequence
  ENSG00000105278_18 (sequence is synthesized)
cctgaagccaacattgtcatctcctcctgtgaggagcccaggatgcaggtcaccatatctgtcacctcacctctgatgcgggaggacccctccacagacccaggtgtggaggagcctcag

SEQ ID NO: 147606 - DNA, 120 bp, Artificial Sequence
  ENSG00000105278_19 (sequence is synthesized)
cagcggcctgcagccatgcgtgatcgtcatcagggtcctgagggacctctgccggcgtgtgcccacctggggggccctgccagcctgggccatggagctgctggtggagaaggctgtgag

SEQ ID NO: 147607 - DNA, 120 bp, Artificial Sequence
  ENSG00000105278_20 (sequence is synthesized)
cagtgcggctgggcccctgggccccggggatgcagtcaggcgagtcctggagtgcgtggccacagggacgctcctgacagacgggcccgggctccaggatccctgcgagagagaccagac

SEQ ID NO: 147608 - DNA, 120 bp, Artificial Sequence
  ENSG00000105278_21 (sequence is synthesized)
agatgccctcgagcccatgaccctccaagagcgggaagacgtgaccgccagcgcccagcacgccctgcgaatgctggccttccggcagacccacaaggtcctgggcatggatctcctgcc

SEQ ID NO: 147609 - DNA, 120 bp, Artificial Sequence
  ENSG00000105278_22 (sequence is synthesized)
gcccagacaccggctgggggcccgcttccggaagaggcaacggggacctggcgagggagaggagggcgcaggggagaagaagcggggccggcggggcggagaggggctcgtgtgagccgc

SEQ ID NO: 147610 - DNA, 120 bp, Artificial Sequence
  ENSG00000105278_23 (sequence is synthesized)
ctacctcccccacctgcgggcctttgcatccctgcactcctggacgtgtgcgcgccgaccaatggctgcttcatccccgacgttggacaatggtcatttccttttgagtaacgctctgta

SEQ ID NO: 147611 - DNA, 82 bp, Artificial Sequence
  ENSG00000105278_24 (sequence is synthesized)
ttgcttgagcctgagagttcaaggccagcccagacaacagagtgagacccccatctctccaaaatatttttaaaaatcagct

SEQ ID NO: 147612 - DNA, 120 bp, Artificial Sequence
  ENSG00000105278_25 (sequence is synthesized)
ctgagagttcaaggccagcccagacaacagagtgagacccccatctctccaaaatatttttaaaaatcagcttggcatggttggtggccaggcgcggtgattcacgcctgtaatcccagc

SEQ ID NO: 147613 - DNA, 72 bp, Artificial Sequence
  ENSG00000105278_26 (sequence is synthesized)
tggtgaaaccctgtctctagtaaaaaacacaacaattagccccggagccttgaggccaggagggcagtgagc

SEQ ID NO: 147614 - DNA, 120 bp, Artificial Sequence
  ENSG00000105278_27 (sequence is synthesized)
tccggagccttgaggccaggagggcagtgagctgtgattgcaccgtgacactccagcctgggcaacagaagaagactttgtcacttaaaagaaatgttttttaacatttgtgcttaaatt

SEQ ID NO: 147615 - DNA, 120 bp, Artificial Sequence
  ENSG00000105278_28 (sequence is synthesized)
gttacagaaatgacaccatccagccctgggagtggcaccccttcctcgagggccccatcccccacagccaggggggccagcagtacagcaagcagattctaaactcgggggcatcttgct

SEQ ID NO: 147616 - DNA, 120 bp, Artificial Sequence
  ENSG00000105278_29 (sequence is synthesized)
acagcaagcagattctaaactcgggggcatcttgctggctctaaactcacctcgtggtacaggaaggggttttaaaatacttcctctgggctgcgcatggtggctcacacctataatccc

SEQ ID NO: 147617 - DNA, 120 bp, Artificial Sequence
  ENSG00000105278_30 (sequence is synthesized)
ttggtggatcgcttgagcccagcggtttaagatcagtctgggcaatatggtgacaccccatctctacaaaaaattagccagttgtggtggcccaagcctgtagtcccagctactcgggag

SEQ ID NO: 147618 - DNA, 90 bp, Artificial Sequence
  ENSG00000105278_31 (sequence is synthesized)
cccttgagcccaggagttcgaggctgcagcgagccgagattgcgctactgaactccagcctgggttacagagcgagaccctgtctcaaag

SEQ ID NO: 147619 - DNA, 120 bp, Artificial Sequence
  ENSG00000105278_32 (sequence is synthesized)
aactttctttggatgcggctgcggcatggatttgaaatcacgtgggcaggccctgttctggggccccaccacatgtgcaggacaagcccaggggagctcccagccggcatccccacgccc

SEQ ID NO: 147620 - DNA, 120 bp, Artificial Sequence
  ENSG00000105278_33 (sequence is synthesized)
ccagcccagcctgctccaaacagaccccccacccacctccacagccaggatgtcagcagggcctgagccaggctcgtcccctgtggggagagccacagggccaggtggacacgccgacgg

SEQ ID NO: 147621 - DNA, 120 bp, Artificial Sequence
  ENSG00000105278_34 (sequence is synthesized)
gcgatgaggatcctggctgggcctcccccgggaacagctgtgctggacagtcagacccggagcccagaggcacccccacccaccccccgccccgagccctgtaccactgagtgcctttca

SEQ ID NO: 147622 - DNA, 120 bp, Artificial Sequence
  ENSG00000105278_35 (sequence is synthesized)
cagagaaaacccactctgccatgtgtcactgaggcctggatttgagcttccgtccttccttcctccctctctccctgatgtaggccttggctggccctgaggcagggggtccccaatccc

SEQ ID NO: 147623 - DNA, 120 bp, Artificial Sequence
  ENSG00000105278_36 (sequence is synthesized)
cccttgtggtagcagggcccgggacccgtgcctgggggacccggggaggggccgccgtcttgtggatgctggccatggtgggcaggcgcctcctggcactgatggatgtgggggcacccc

SEQ ID NO: 147624 - DNA, 120 bp, Artificial Sequence
  ENSG00000105278_37 (sequence is synthesized)
cttctgagtccccaccccaacctgttcaaaccttccgcttggtcagtttttttttctttggccagctgcccagtggcattgaatgagaaaagtccacctttgggcagatgtgatctccag

SEQ ID NO: 147625 - DNA, 120 bp, Artificial Sequence
  ENSG00000105278_38 (sequence is synthesized)
ccagtggctcagttttgtttctctgtgtttgaaggacagcctgcatgtggctctgtctgaatgtctttgtagagctacctggaaattgggaggcagggggaataaaggaaatcatttgtc

SEQ ID NO: 147626 - DNA, 120 bp, Artificial Sequence
  ENSG00000105278_39 (sequence is synthesized)
ggggaagacgccaagatggcgacgagtcagtatttcgacttcgcgcagggcggcggcccgcagtacagtccagaagtggagaccactcccccggcccttgcatctgggcttccttgtgcc

SEQ ID NO: 147627 - DNA, 120 bp, Artificial Sequence
  ENSG00000105278_40 (sequence is synthesized)
ctgccttggacagttggctgcagtggaagtgacgctgtgactgccctgtgcccaagcttaagaggccttgcctgcatctgctccatcttatgggaccctgcctggtgaaggacccaaggc

SEQ ID NO: 147628 - DNA, 120 bp, Artificial Sequence
  ENSG00000105278_41 (sequence is synthesized)
tggcctgctggaggaggagatataaggagaagagtcacagtgccccatccaacaggtagctgccctccaggggcagagaagcccagccatggtcaggagagccacccagctgaggcccac

SEQ ID NO: 147629 - DNA, 120 bp, Artificial Sequence
  ENSG00000105278_42 (sequence is synthesized)
cacctcagccaggagagccacccagctgagccccatctggccaggagagccatccagctgagccccacctctgccaggattgccacccagctgagccccgccttggccaggagagccacc

SEQ ID NO: 147630 - DNA, 120 bp, Artificial Sequence
  ENSG00000105278_43 (sequence is synthesized)
cagctgagccccgcctgggccagaagagccacccagctgagccccgccttggccagaagagccacccagctgagcaccgccttggccagaagaggcacccagctgagccccgcctggcca

SEQ ID NO: 147631 - DNA, 120 bp, Artificial Sequence
  ENSG00000105278_44 (sequence is synthesized)
ggagagctgcccagctgatccccgcctgcagaatcacaagtgaaataaatgattgttgctttgagtcagaggtcagcggaccttttctgtaaaaagccacatagtaaatatctttggctt

SEQ ID NO: 147632 - DNA, 120 bp, Artificial Sequence
  ENSG00000105278_45 (sequence is synthesized)
tgtgagccacaccatgtctgtcacattagtgaaccctgctattgtattgcaagatgagccgtggacaatgtgtcatccagtgggcttggctgtgtgccaataaaactttatttttttgga

SEQ ID NO: 147633 - DNA, 120 bp, Artificial Sequence
  ENSG00000105278_46 (sequence is synthesized)
agactccggccagccaggtgagccatctgcagggtcggggctgggaacgaggagacgctccccgcagcacagggaaaccttgggaaacttacttttttttttttttagacagagtctcgc

SEQ ID NO: 147634 - DNA, 120 bp, Artificial Sequence
  ENSG00000105278_47 (sequence is synthesized)
gaagacgccaagatggcgacgagtcagtatttcgacttcgcgcagggcggcggcccgcagtacagcaccctcctggaggacgggactttggtctggttattccccgctgctgtgacagcg

SEQ ID NO: 147635 - DNA, 120 bp, Artificial Sequence
  ENSG00000105278_48 (sequence is synthesized)
cccatgacagcagctggtccccactagcacccaggaagtatttatccaatgactcaatgaatctgccgccggatcgcccgggactgctttcactttctgtcagcgcccagcctccgaccc

SEQ ID NO: 147636 - DNA, 120 bp, Artificial Sequence
  ENSG00000105278_49 (sequence is synthesized)
gccaagatggcgacgagtcagtatttcgacttcgcgcagggcggcggcccgcagtacaggtgcagtgactcctgcctgtaatccagcactttggaaggccgaggtggacggatcacttga

SEQ ID NO: 147637 - DNA, 120 bp, Artificial Sequence
  ENSG00000105281_0 (sequence is synthesized)
agagccacgcggcacgcccgggaggctttctctggctggtaaccgctactcccggacaccagaccaccgccttccgtacacaggggcccgcatcccaccctcccggacctaagagcctgg

SEQ ID NO: 147638 - DNA, 120 bp, Artificial Sequence
  ENSG00000105281_1 (sequence is synthesized)
gtcccctgtttccggaggtccgcttcccggcccccagattctggcatcccagccctcagtgtccaagacccaggcagcccgggtccccgcctcccggatccaggcgtccgggatctgcgc

SEQ ID NO: 147639 - DNA, 120 bp, Artificial Sequence
  ENSG00000105281_2 (sequence is synthesized)
caccagaacctagcctcctgcagacctccgccatctgggggcactcaacctcctggagccaagggccccacgtcccacccagagaaactctcgtattcccagctcctagggccaaggaac

SEQ ID NO: 147640 - DNA, 120 bp, Artificial Sequence
  ENSG00000105281_3 (sequence is synthesized)
ccgggcgctccgaactcccagctttcggacatctggcacacggggcagagcagagaagcctcagcgcccagcctggggaatttaaacactccagcttccaagagccaaggaacttcagtg

SEQ ID NO: 147641 - DNA, 120 bp, Artificial Sequence
  ENSG00000105281_4 (sequence is synthesized)
ctgtgaactcacaactctaaggagccctccaaagttccagtctccaggtgctgttactcaactcagtcctaggaacgtcgggtcctgggaaggagcccaagcgctcccagccagcttcca

SEQ ID NO: 147642 - DNA, 120 bp, Artificial Sequence
  ENSG00000105281_5 (sequence is synthesized)
ggcgctaagaaaccccggtgcttcccatcatggtggccgatcctcctcgagactccaaggggctcgcagcggcggagcccaccgccaacgggggcctggcgctggcctccatcgaggacc

SEQ ID NO: 147643 - DNA, 120 bp, Artificial Sequence
  ENSG00000105281_6 (sequence is synthesized)
aaggcgcggcagcaggcggctactgcggttcccgggaccaggtgcgccgctgccttcgagccaacctgcttgtgctgctgacagtggtggccgtggtggccggcgtggcgctgggactgg

SEQ ID NO: 147644 - DNA, 120 bp, Artificial Sequence
  ENSG00000105281_7 (sequence is synthesized)
gggtgtcgggggccgggggtgcgctggcgttgggcccggagcgcttgagcgccttcgtcttcccgggcgagctgctgctgcgtctgctgcggatgatcatcttgccgctggtggtgtgca

SEQ ID NO: 147645 - DNA, 120 bp, Artificial Sequence
  ENSG00000105281_8 (sequence is synthesized)
gcttgatcggcggcgccgccagcctggaccccggcgcgctcggccgtctgggcgcctgggcgctgctctttttcctggtcaccacgctgctggcgtcggcgctcggagtgggcttggcgc

SEQ ID NO: 147646 - DNA, 120 bp, Artificial Sequence
  ENSG00000105281_9 (sequence is synthesized)
tggctctgcagccgggcgccgcctccgccgccatcaacgcctccgtgggagccgcgggcagtgccgaaaatgcccccagcaaggaggtgctcgattcgttcctggatcttgcgagaaata

SEQ ID NO: 147647 - DNA, 120 bp, Artificial Sequence
  ENSG00000105281_10 (sequence is synthesized)
tcttcccttccaacctggtgtcagcagcctttcgctcatactctaccacctatgaagagaggaatatcaccggaaccagggtgaaggtgcccgtggggcaggaggtggaggggatgaaca

SEQ ID NO: 147648 - DNA, 120 bp, Artificial Sequence
  ENSG00000105281_11 (sequence is synthesized)
tcctgggcttggtagtgtttgccatcgtctttggtgtggcgctgcggaagctggggcctgaaggggagctgcttatccgcttcttcaactccttcaatgaggccaccatggttctggtct

SEQ ID NO: 147649 - DNA, 120 bp, Artificial Sequence
  ENSG00000105281_12 (sequence is synthesized)
tggatcatgtggtacgcccctgtgggcatcatgttcctggtggctggcaagatcgtggagatggaggatgtgggtttactctttgcccgccttggcaagtacattctgtgctgcctgctg

SEQ ID NO: 147650 - DNA, 120 bp, Artificial Sequence
  ENSG00000105281_13 (sequence is synthesized)
ggtcacgccatccatgggctcctggtactgcccctcatctacttcctcttcacccgcaaaaacccctaccgcttcctgtggggcatcgtgacgccgctggccactgcctttgggacctct

SEQ ID NO: 147651 - DNA, 120 bp, Artificial Sequence
  ENSG00000105281_14 (sequence is synthesized)
tccagttccgccacgctgccgctgatgatgaagtgcgtggaggagaataatggcgtggccaagcacatcagccgtttcatcctgcccatcggcgccaccgtcaacatggacggtgccgcg

SEQ ID NO: 147652 - DNA, 120 bp, Artificial Sequence
  ENSG00000105281_15 (sequence is synthesized)
ctcttccagtgcgtggccgcagtgttcattgcacagctcagccagcagtccttggacttcgtaaagatcatcaccatcctggtcacggccacagcgtccagcgtgggggcagcgggcatc

SEQ ID NO: 147653 - DNA, 120 bp, Artificial Sequence
  ENSG00000105281_16 (sequence is synthesized)
cctgctggaggtgtcctcactctggccatcatcctcgaagcagtcaacctcccggtcgaccatatctccttgatcctggctgtggactggctagtcgaccggtcctgtaccgtcctcaat

SEQ ID NO: 147654 - DNA, 120 bp, Artificial Sequence
  ENSG00000105281_17 (sequence is synthesized)
gtagaaggtgacgctctgggggcaggactcctccaaaattacgtggaccgtacggagtcgagaagcacagagcctgagttgatacaagtgaagagtgagctgcccctggatccgctgcca

SEQ ID NO: 147655 - DNA, 120 bp, Artificial Sequence
  ENSG00000105281_18 (sequence is synthesized)
gtccccactgaggaaggaaaccccctcctcaaacactatcgggggcccgcaggggatgccacggtcgcctctgagaaggaatcagtcatgtaaaccccgggagggaccttccctgccctg

SEQ ID NO: 147656 - DNA, 120 bp, Artificial Sequence
  ENSG00000105281_19 (sequence is synthesized)
ctgggggtgctctttggacactggattatgaggaatggataaatggatgagctagggctctgggggtctgcctgcacactctggggagccaggggccccagcaccctccaggacaggaga

SEQ ID NO: 147657 - DNA, 120 bp, Artificial Sequence
  ENSG00000105281_20 (sequence is synthesized)
tctgggatgcctggctgctggagtacatgtgttcacaagggttactcctcaaaacccccagttctcactcatgtccccaactcaaggctagaaaacagcaagatggagaaataatgttct

SEQ ID NO: 147658 - DNA, 120 bp, Artificial Sequence
  ENSG00000105281_21 (sequence is synthesized)
gctgcgtccccaccgtgacctgcctggcctcccctgtctcagggagcaggtcacaggtcaccatggggaattctagcccccactggggggatgttacaacaccatgctggttattttggc

SEQ ID NO: 147659 - DNA, 85 bp, Artificial Sequence
  ENSG00000105281_22 (sequence is synthesized)
gacctcctgtccccatggtacgtcccaccctgtccccagatcccctattccctccacaataacagaaacactcccagggactctg

SEQ ID NO: 147660 - DNA, 120 bp, Artificial Sequence
  ENSG00000105281_23 (sequence is synthesized)
tattccctccacaataacagaaacactcccagggactctggggagaggctgaggacaaatacctgctgtcactccagaggacattttttttagcaataaaattgagtgtcaactatttaa

SEQ ID NO: 147661 - DNA, 120 bp, Artificial Sequence
  ENSG00000105281_24 (sequence is synthesized)
aagctgtccagggtattaagtttgctgcatggggtggagctgaggcccggggcgacctgccctggcctgccgtgggaggccagcattcctcaccccgaacccacaatgcctcagggctag

SEQ ID NO: 147662 - DNA, 120 bp, Artificial Sequence
  ENSG00000105281_25 (sequence is synthesized)
cacgccagcctcttggggctgaaggaggctgactccccaagtcctgcaaaggggtgcaagcctagttccaaccctgccgggctgaggcatgagtaggggctgtatttgcgtgcaggcggg

SEQ ID NO: 147663 - DNA, 120 bp, Artificial Sequence
  ENSG00000105287_0 (sequence is synthesized)
cttctgggagccctggattccgggcctctgacccactatagtgcctttctctccttcccaggaccccgccatcctcaggtcccctccgcctgccagatcttttctcggatccccgctctc

SEQ ID NO: 147664 - DNA, 120 bp, Artificial Sequence
  ENSG00000105287_1 (sequence is synthesized)
tgctcacgagatcccgcggatctagaacccagggtcccccggggccccccggccgggtcccgggtgggctccaggcggccggtccccggcctccccccatggccaccgccccctcttatc

SEQ ID NO: 147665 - DNA, 120 bp, Artificial Sequence
  ENSG00000105287_2 (sequence is synthesized)
ctcttatcccgccgggctccctggctctcccgggccggggtctcctccgccccccggcggcctagagctgcagtcgccgccaccgctactgccccagatcccggccccgggttccggggt

SEQ ID NO: 147666 - DNA, 120 bp, Artificial Sequence
  ENSG00000105287_3 (sequence is synthesized)
ctcctttcacatccagatcgggctgacccgcgagttcgtgctgttgcccgccgcctccgagctggctcatgtgaagcagctggcctgttccatcgtggaccagaagttccctgagtgtgg

SEQ ID NO: 147667 - DNA, 120 bp, Artificial Sequence
  ENSG00000105287_4 (sequence is synthesized)
cttctacggcctttacgacaagatcctgcttttcaaacatgaccccacgtcggccaacctcctgcagctggtgcgctcgtccggagacatccaggagggcgacctggtggaggtggtgct

SEQ ID NO: 147668 - DNA, 120 bp, Artificial Sequence
  ENSG00000105287_5 (sequence is synthesized)
gtcggcctcggccaccttcgaggacttccagatccgcccgcacgccctcacggtgcactcctatcgggcgcctgccttctgtgatcactgcggggagatgctcttcggcctagtgcgcca

SEQ ID NO: 147669 - DNA, 120 bp, Artificial Sequence
  ENSG00000105287_6 (sequence is synthesized)
gggcctcaagtgcgatggctgcgggctgaactaccacaagcgctgtgccttcagcatccccaacaactgtagtggggcccgcaaacggcgcctgtcatccacgtctctggccagtggcca

SEQ ID NO: 147670 - DNA, 120 bp, Artificial Sequence
  ENSG00000105287_7 (sequence is synthesized)
ctcggtgcgcctcggcacctccgagtccctgccctgcacggctgaagagctgagccgtagcaccaccgaactcctgcctcgccgtcccccgtcatcctcttcctcctcttctgcctcatc

SEQ ID NO: 147671 - DNA, 120 bp, Artificial Sequence
  ENSG00000105287_8 (sequence is synthesized)
gtatacgggccgccccattgagctggacaagatgctgctctccaaggtcaaggtgccgcacaccttcctcatccacagctatacacggcccaccgtttgccaggcttgcaagaaactcct

SEQ ID NO: 147672 - DNA, 120 bp, Artificial Sequence
  ENSG00000105287_9 (sequence is synthesized)
caagggcctcttccggcagggcctgcaatgcaaagactgcaagtttaactgtcacaaacgctgcgccacccgcgtccctaatgactgcctgggggaggcccttatcaatggagatgtgcc

SEQ ID NO: 147673 - DNA, 120 bp, Artificial Sequence
  ENSG00000105287_10 (sequence is synthesized)
gatggaggaggccaccgatttcagcgaggctgacaagagcgccctcatggatgagtcagaggactccggtgtcatccctggctcccactcagagaatgcgctccacgccagtgaggagga

SEQ ID NO: 147674 - DNA, 120 bp, Artificial Sequence
  ENSG00000105287_11 (sequence is synthesized)
ggaaggcgagggaggcaaggcccagagctccctggggtacatccccctaatgagggtggtgcaatcggtgcgacacacgacgcggaaatccagcaccacgctgcgggagggttgggtggt

SEQ ID NO: 147675 - DNA, 120 bp, Artificial Sequence
  ENSG00000105287_12 (sequence is synthesized)
ttccagaacaacacgaccaacagatactataaggaaattccgctgtcagaaatcctcacggtggagtccgcccagaacttcagccttgtgccgccgggcaccaacccacactgctttgag

SEQ ID NO: 147676 - DNA, 120 bp, Artificial Sequence
  ENSG00000105287_13 (sequence is synthesized)
atcgtcactgccaatgccacctacttcgtgggcgagatgcctggcgggactccgggtgggccaagtgggcagggggctgaggccgcccggggctgggagacagccatccgccaggccctg

SEQ ID NO: 147677 - DNA, 120 bp, Artificial Sequence
  ENSG00000105287_14 (sequence is synthesized)
atgcccgtcatccttcaggacgcacccagcgccccaggccacgcgccccacagacaagcttctctgagcatctctgtgtccaacagtcagatccaagagaatgtggacattgccactgtc

SEQ ID NO: 147678 - DNA, 120 bp, Artificial Sequence
  ENSG00000105287_15 (sequence is synthesized)
taccagatcttccctgacgaagtgctgggctcagggcagtttggagtggtctatggaggaaaacaccggaagacaggccgggacgtggcagttaaggtcattgacaaactgcgcttccct

SEQ ID NO: 147679 - DNA, 120 bp, Artificial Sequence
  ENSG00000105287_16 (sequence is synthesized)
accaagcaggagagccagctccggaatgaagtggccattctgcagagcctgcggcatcccgggatcgtgaacctggagtgcatgttcgagacgcctgagaaagtgtttgtggtgatggag

SEQ ID NO: 147680 - DNA, 120 bp, Artificial Sequence
  ENSG00000105287_17 (sequence is synthesized)
aagctgcatggggacatgttggagatgatcctgtccagtgagaagggccggctgcctgagcgcctcaccaagttcctcatcacccagatcctggtggctttgagacaccttcacttcaag

SEQ ID NO: 147681 - DNA, 120 bp, Artificial Sequence
  ENSG00000105287_18 (sequence is synthesized)
aacattgtccactgtgacttgaaaccagaaaacgtgttgctggcatcagcagacccatttcctcaggtgaagctgtgtgactttggctttgctcgcatcatcggcgagaagtcgttccgc

SEQ ID NO: 147682 - DNA, 120 bp, Artificial Sequence
  ENSG00000105287_19 (sequence is synthesized)
cgctcagtggtgggcacgccggcctacctggcacccgaggtgctgctcaaccagggctacaaccgctcgctggacatgtggtcagtgggcgtgatcatgtacgtcagcctcagcggcacc

SEQ ID NO: 147683 - DNA, 120 bp, Artificial Sequence
  ENSG00000105287_20 (sequence is synthesized)
ttccctttcaacgaggatgaggacatcaatgaccagatccagaacgccgccttcatgtacccggccagcccctggagccacatctcagctggagccattgacctcatcaacaacctgctg

SEQ ID NO: 147684 - DNA, 120 bp, Artificial Sequence
  ENSG00000105287_21 (sequence is synthesized)
caggtgaagatgcgcaaacgctacagcgtggacaaatctctcagccacccctggttacaggagtaccagacgtggctggacctccgagagctggaggggaagatgggagagcgatacatc

SEQ ID NO: 147685 - DNA, 120 bp, Artificial Sequence
  ENSG00000105287_22 (sequence is synthesized)
acgcatgagagtgacgacgcgcgctgggagcagtttgcagcagagcatccgctgcctgggtctgggctgcccacggacagggatctcggtggggcctgtccaccacaggaccacgacatg

SEQ ID NO: 147686 - DNA, 120 bp, Artificial Sequence
  ENSG00000105287_23 (sequence is synthesized)
caggggctggcggagcgcatcagtgttctctgaggtcctgtgccctcgtccagctgctgccctccacagcggttcttcacaggatcccagcaatgaactgttctagggaaagtggcttcc

SEQ ID NO: 147687 - DNA, 120 bp, Artificial Sequence
  ENSG00000105287_24 (sequence is synthesized)
tgcccaaactggatgggacacgtggggagtggggtggggggagctatttccaaggcccctccctgtttccccagcaattaaaacggactcatctctggccccatggccttgatctcagca

SEQ ID NO: 147688 - DNA, 120 bp, Artificial Sequence
  ENSG00000105287_25 (sequence is synthesized)
actgtcgctccggacacttcctcctgggccgccgccgccgccgccgacttaaactttggagggggaaaaagagctactggcgcctggcgaccctccctgccccccacccaaccccgctcc

SEQ ID NO: 147689 - DNA, 120 bp, Artificial Sequence
  ENSG00000105287_26 (sequence is synthesized)
ggcaacgcccccttcctcacggctcccgaccgaacttttctccaacttctgcgactcgtgagattcccttctacccactccggccctcgggacccctctgcccatcccctggccggtcgg

SEQ ID NO: 147690 - DNA, 120 bp, Artificial Sequence
  ENSG00000105287_27 (sequence is synthesized)
gtccctgcgaacccctttatctctggaatccactcggtccccgactcagagactcctgccctccacccccaaggaccccgccatcctcaggtcccctccgcctgccagatcttttctcgg

SEQ ID NO: 147691 - DNA, 120 bp, Artificial Sequence
  ENSG00000105287_28 (sequence is synthesized)
gttcattcagcatcccctcccacctccgccaggttccggaaaattcgaggtgtccacgctcccggagccactctccctcccaccccagctcccccttccagccaccaaacccacgccggc

SEQ ID NO: 147692 - DNA, 120 bp, Artificial Sequence
  ENSG00000105287_29 (sequence is synthesized)
gccccctccccgtacaattggggcgctggcatcctgcccggctcgcgctggggttgggagggggcaggcaggaagcgagggcctgcggggtctctgcgtttccgggggaaacagccggcc

SEQ ID NO: 147693 - DNA, 120 bp, Artificial Sequence
  ENSG00000105287_30 (sequence is synthesized)
acggggacagcgtggggaggaggagcgggtctcagagctgggggcgcagcctaggaagtaataatgggaagaaggatgggcccagaagcagagcttggggaaggagtggtggggctgggc

SEQ ID NO: 147694 - DNA, 120 bp, Artificial Sequence
  ENSG00000105287_31 (sequence is synthesized)
cggggctcaggtctaggggcggagcctaggaggtggagctgggagggacaagtaggggcttaagaacagagcctaggggagcagaagggtggcgggggaagagggtggggcctctatcag

SEQ ID NO: 147695 - DNA, 120 bp, Artificial Sequence
  ENSG00000105287_32 (sequence is synthesized)
ttagggatcaagcagagaaacatccaggaggagatatatattgagatatttatatgcaaggaatcagcttacagaattgtgtgggctggctaggcaactcaaatctggctgggcacagtg

SEQ ID NO: 147696 - DNA, 74 bp, Artificial Sequence
  ENSG00000105287_33 (sequence is synthesized)
gtgggctggctaggcaactcaaatctggctgggcacagtgggggaggccagtaatcccagcactttgggaggca

SEQ ID NO: 147697 - DNA, 120 bp, Artificial Sequence
  ENSG00000105287_34 (sequence is synthesized)
tggtttctgtgtttcacatccttcctagaaaggcttccttctggtgggtgccttgccttcttctgagacatctctgtgggtctcagagccatcgttgctgtgttccctttaccctggccc

SEQ ID NO: 147698 - DNA, 120 bp, Artificial Sequence
  ENSG00000105287_35 (sequence is synthesized)
agcacccttatcctctcaggcagtgtgcctgtgtttgtcaggctggcttatggggtggggacagaaacccactgatgcaccctcatccagactttattatttatgtatttttgagacaga

SEQ ID NO: 147699 - DNA, 80 bp, Artificial Sequence
  ENSG00000105287_36 (sequence is synthesized)
gtcgcagtgacacgatctcggctcactgcaccctctgccccctgggttcaggtgattctcctacctcagcctcccgagta

SEQ ID NO: 147700 - DNA, 120 bp, Artificial Sequence
  ENSG00000105287_37 (sequence is synthesized)
ggccacatccagacttcaggtgtggaaaggaatcatggttctcacaggtggctgctttcagcagctgagggggtttctctttctggccttcatctcttcctctctttttgcctgctcgct

SEQ ID NO: 147701 - DNA, 120 bp, Artificial Sequence
  ENSG00000105287_38 (sequence is synthesized)
cttctttctctctctctctctctctgcagatttctgctttctgggctcttgcctgccccacacctaagccctgtgctaagccctttacctcctgagcttatgtaggcctcaccaccatcc

SEQ ID NO: 147702 - DNA, 120 bp, Artificial Sequence
  ENSG00000105287_39 (sequence is synthesized)
ggcgtgcacgtggtgctccaggcacctggagccccaagcagctccacgggatagggactgggcaggaaagtctggcggttcacgtgactcttcaaacatctctgcagagaaagcggcact

SEQ ID NO: 147703 - DNA, 120 bp, Artificial Sequence
  ENSG00000105287_40 (sequence is synthesized)
atttcctgcccccaggcccccaaagctgaggacccagacacctgggtcctttgagcattgggtggcaggcgccctccttatctccagcgccctcgagtccaagtcccccggccccccccc

SEQ ID NO: 147704 - DNA, 120 bp, Artificial Sequence
  ENSG00000105289_0 (sequence is synthesized)
agttccactggcaggggacctgcctccctgttgccaccacaagagaggaaaagttggtcaaacaggtggggaggccagagctacaagcctcgggttccctccccaccacccgtgccaggc

SEQ ID NO: 147705 - DNA, 120 bp, Artificial Sequence
  ENSG00000105289_1 (sequence is synthesized)
aggcacccgggccctggcacctgctgcctgcccagaggccacccagcctcctagacaggtggctgacatggaggagctgaccatctgggaacagcacacggccacactgtccaaggaccc

SEQ ID NO: 147706 - DNA, 120 bp, Artificial Sequence
  ENSG00000105289_2 (sequence is synthesized)
ccgccggggctttggcattgcgatctctggaggccgagaccggcccggtggatccatggttgtatctgacgtggtacctggagggccggcggagggcaggctacagacaggcgaccacat

SEQ ID NO: 147707 - DNA, 120 bp, Artificial Sequence
  ENSG00000105289_3 (sequence is synthesized)
cgtcatggtgaacggggtttccatggagaatgccacctccgcgtttgccattcagatactcaagacctgcaccaagatggccaacatcacagtgaaacgtccccggaggatccacctgcc

SEQ ID NO: 147708 - DNA, 120 bp, Artificial Sequence
  ENSG00000105289_4 (sequence is synthesized)
cgccaccaaagccagcccctccagcccagggcgccaggactcggatgaagacgatgggccccagcgggtggaggaggtggaccagggccggggctatgacggcgactcatccagtggctc

SEQ ID NO: 147709 - DNA, 120 bp, Artificial Sequence
  ENSG00000105289_5 (sequence is synthesized)
cctgggacgagcgctcccgccggccgaggcctggtcgccggggccgggccggcagccatgggcgtaggagcccaggtggtggctctgaggccaacgggctggccctggtgtccggcttta

SEQ ID NO: 147710 - DNA, 120 bp, Artificial Sequence
  ENSG00000105289_6 (sequence is synthesized)
cggctttaagcggctgccacggcaggacgtgcagatgaagcctgtgaagtcagtgctggtgaagaggagagacagcgaagagtttggcgtcaagctgggcagtcagatcttcatcaagca

SEQ ID NO: 147711 - DNA, 120 bp, Artificial Sequence
  ENSG00000105289_7 (sequence is synthesized)
cattacagattcgggcctggctgcccggcaccgtgggctgcaggaaggagatctcattctacagatcaacggggtgtctagccagaacctgtcactgaacgacacccggcgactgattga

SEQ ID NO: 147712 - DNA, 120 bp, Artificial Sequence
  ENSG00000105289_8 (sequence is synthesized)
gaagtcagaagggaagctaagcctgctggtgctgagagatcgtgggcagttcctggtgaacattccgcctgctgtcagtgacagcgacagctcgccattggaggacatctcggacctcgc

SEQ ID NO: 147713 - DNA, 120 bp, Artificial Sequence
  ENSG00000105289_9 (sequence is synthesized)
ctcggagctatcgcaggcaccaccatcccacatcccaccaccaccccggcatgctcagcggagccccgaggccagccagaccgactctcccgtggagagtccccggcttcggcgggaaag

SEQ ID NO: 147714 - DNA, 120 bp, Artificial Sequence
  ENSG00000105289_10 (sequence is synthesized)
ttcagtagattccagaaccatctcggaaccagatgagcaacggtcagagttgcccagggaaagcagctatgacatctacagagtgcccagcagtcagagcatggaggatcgtgggtacag

SEQ ID NO: 147715 - DNA, 120 bp, Artificial Sequence
  ENSG00000105289_11 (sequence is synthesized)
ccccgacacgcgtgtggtccgcttcctcaagggcaagagcatcgggctgcggctggcagggggcaatgacgtgggcatcttcgtgtccggggtgcaggcgggcagcccggccgacgggca

SEQ ID NO: 147716 - DNA, 120 bp, Artificial Sequence
  ENSG00000105289_12 (sequence is synthesized)
cagttcctgctggggctgccaccaggcgaggagatggagctggtgacgcagaggaagcaggacattttctggaaaatggtgcagtcccgcgtgggtgactccttctacatccgcactcac

SEQ ID NO: 147717 - DNA, 120 bp, Artificial Sequence
  ENSG00000105289_13 (sequence is synthesized)
tttgagctggagcccagtccaccgtctggcctgggcttcacccgtggcgacgtcttccacgtgctggacacgctgcaccccggccccgggcagagccacgcacgaggaggccactggctg

SEQ ID NO: 147718 - DNA, 120 bp, Artificial Sequence
  ENSG00000105289_14 (sequence is synthesized)
gcggtgcgcatgggtcgtgacctgcgggagcaagagcggggcatcattcccaaccagagcagggcggagcagctggccagcctggaagctgcccagagggccgtgggagtcgggcccggc

SEQ ID NO: 147719 - DNA, 120 bp, Artificial Sequence
  ENSG00000105289_15 (sequence is synthesized)
tcctccgcgggctccaatgctcgggccgagttctggcggctgcggggtcttcgtcgaggagccaagaagaccactcagcggagccgtgaggacctctcagctctgacccgacagggccgc

SEQ ID NO: 147720 - DNA, 120 bp, Artificial Sequence
  ENSG00000105289_16 (sequence is synthesized)
tacccgccctacgaacgagtggtgttgcgagaagccagtttcaagcgcccggtagtgatcctgggacccgtggccgacattgctatgcagaagttgactgctgagatgcctgaccagttt

SEQ ID NO: 147721 - DNA, 120 bp, Artificial Sequence
  ENSG00000105289_17 (sequence is synthesized)
gaaatcgcagagactgtgtccaggaccgacagcccctccaagatcatcaaactagacaccgtgcgggtgattgcagaaaaagacaagcatgcgctcctggatgtgaccccctccgccatc

SEQ ID NO: 147722 - DNA, 120 bp, Artificial Sequence
  ENSG00000105289_18 (sequence is synthesized)
gagcgcctcaactatgtgcagtactaccccattgtggtcttcttcatccccgagagccggccggccctcaaggcactgcgccagtggctggcgcctgcctcccgccgcagcacccgtcgc

SEQ ID NO: 147723 - DNA, 120 bp, Artificial Sequence
  ENSG00000105289_19 (sequence is synthesized)
ctctacgcacaagcccagaagctgcgaaaacacagcagccacctcttcacagccaccatccctctgaatggcacgagtgacacctggtaccaggagctcaaggccatcattcgagagcag

SEQ ID NO: 147724 - DNA, 120 bp, Artificial Sequence
  ENSG00000105289_20 (sequence is synthesized)
cagacgcggcccatctggacggcggaagatcagctggatggctccttggaggacaacctagacctccctcaccacggcctggccgacagctccgctgacctcagctgcgacagccgcgtt

SEQ ID NO: 147725 - DNA, 120 bp, Artificial Sequence
  ENSG00000105289_21 (sequence is synthesized)
aacagcgactacgagacggacggcgagggcggcgcgtacacggatggcgagggctacacagacggcgagggggggccctacacggatgtggatgatgagcccccggctccagccctggcc

SEQ ID NO: 147726 - DNA, 120 bp, Artificial Sequence
  ENSG00000105289_22 (sequence is synthesized)
cggtcctcggagcccgtgcaggcagatgagtcccagagcccgagggatcgtgggagaatctcggctcatcagggggcccaggtggacagccgccacccccagggacagtggcgacaggac

SEQ ID NO: 147727 - DNA, 120 bp, Artificial Sequence
  ENSG00000105289_23 (sequence is synthesized)
agcatgcgaacctatgaacgggaagccctgaagaaaaagtttatgcgagtacatgatgcggagtcctccgatgaagacggctatgactggggtccggccactgacctgtgacctctcgaa

SEQ ID NO: 147728 - DNA, 120 bp, Artificial Sequence
  ENSG00000105289_24 (sequence is synthesized)
ggctgccagctggtccgtcctccttctccctccctggggctgggactcagtttcccatacagaacccacaaccttacctccctccgcctggtctttaataaacagagtattttcacagca

SEQ ID NO: 147729 - DNA, 120 bp, Artificial Sequence
  ENSG00000105289_25 (sequence is synthesized)
agccgggagctgcggagctggagggaggaggacgagagcccggccctcagcccgctgtgactctcctcagccccctcccccagcccggggtgggggccgattgactgtttccaggacccc

SEQ ID NO: 147730 - DNA, 120 bp, Artificial Sequence
  ENSG00000105289_26 (sequence is synthesized)
gcctcaggacctggctcctgtgatgggaggtggggagagaaacctccgccgcgtccagggggcgtgtctgggcaggggcggggctgacccgagacctggaggaggaagaggggcaggtgc

SEQ ID NO: 147731 - DNA, 120 bp, Artificial Sequence
  ENSG00000105289_27 (sequence is synthesized)
ccccagcctgggtcgtgccgctgtgggggttgtaagcttctgagagcaaggagtcatcttctcatcttacagtttggacattgaggcccagagagagactggtgtcccccagggccaccc

SEQ ID NO: 147732 - DNA, 120 bp, Artificial Sequence
  ENSG00000105289_28 (sequence is synthesized)
aagggaatgaaggcaggagaggggcttattcctgcccttgaaggcggaacccagaaatgtacacatcaattctgctagtgttccattggccattatttggtcataaggctaacctagctg

SEQ ID NO: 147733 - DNA, 120 bp, Artificial Sequence
  ENSG00000105289_29 (sequence is synthesized)
caaaggacactgggagatgtagtatttggctgggtagctatggtcctggttaaataggctgtttactataaggaagtggaggggtttgtacaacacactagcagtctttgatcgcaaatg

SEQ ID NO: 147734 - DNA, 80 bp, Artificial Sequence
  ENSG00000105290_0 (sequence is synthesized)
actctgcgcgaagccgccacgctattgtcctgaccaggaaggcggggccggcgcggggcggggctggcggcgccggcgca

SEQ ID NO: 147735 - DNA, 120 bp, Artificial Sequence
  ENSG00000105290_1 (sequence is synthesized)
ggtggcgctgggagctcctgtcaccgctggggccgggccgggcgggagtgcaggggacgtgagggcgcaagggccgggacatggggcccgccagccccgctgctcgcggtctaagtcgcc

SEQ ID NO: 147736 - DNA, 120 bp, Artificial Sequence
  ENSG00000105290_2 (sequence is synthesized)
ccgctgctgctgccactattgctgctgcttctgcgcgcgcagcccgccatcgggagcctggccggtgggagccccggcgcggccgaggccccggggtcggcccaggtggctggactatgc

SEQ ID NO: 147737 - DNA, 120 bp, Artificial Sequence
  ENSG00000105290_3 (sequence is synthesized)
gctggactatgcgggcgcctaacccttcaccgggacctgcgcaccggccgctgggaaccagacccacagcgctctcgacgctgtctccgggacccgcagcgcgtgctggagtactgcaga

SEQ ID NO: 147738 - DNA, 120 bp, Artificial Sequence
  ENSG00000105290_4 (sequence is synthesized)
cagatgtacccggagctgcagattgcacgtgtggagcaggctacgcaggccatccccatggagcgctggtgcgggggttcccggagcggcagctgcgcccacccccaccaccaggttgtg

SEQ ID NO: 147739 - DNA, 120 bp, Artificial Sequence
  ENSG00000105290_5 (sequence is synthesized)
cccttccgctgcctgcctggtgaatttgtgagtgaggccctgctggtgcctgaaggctgccggttcttgcaccaggagcgcatggaccaatgtgagagttcaacccggaggcatcaggag

SEQ ID NO: 147740 - DNA, 120 bp, Artificial Sequence
  ENSG00000105290_6 (sequence is synthesized)
gcacaggaggcctgcagctcccagggcctcatcctgcacggctcgggcatgctcttaccctgtggctcggatcggttccgtggtgtggagtatgtgtgctgtccccctccagggaccccc

SEQ ID NO: 147741 - DNA, 120 bp, Artificial Sequence
  ENSG00000105290_7 (sequence is synthesized)
gacccatctgggacagcagttggtgacccctccacccggtcctggcccccggggagcagagtagagggggctgaggacgaggaagaggaggaatccttcccacagccagtagatgattac

SEQ ID NO: 147742 - DNA, 120 bp, Artificial Sequence
  ENSG00000105290_8 (sequence is synthesized)
ttcgtggagcctccgcaggctgaagaggaagaggaaacggtcccacccccaagctcccatacacttgcagtggtcggcaaagtcactcccaccccgaggcccacagacggtgtggatatt

SEQ ID NO: 147743 - DNA, 120 bp, Artificial Sequence
  ENSG00000105290_9 (sequence is synthesized)
tactttggcatgcctggggaaatcagtgagcacgaggggttcctgagggccaagatggacctggaggagcgtaggatgcgccagattaatgaggtgatgcgtgaatgggccatggcagac

SEQ ID NO: 147744 - DNA, 120 bp, Artificial Sequence
  ENSG00000105290_10 (sequence is synthesized)
gcgacagcgcctggtggaaacccacgccacccgcgtcatcgcccttatcaacgaccagcgccgggctgccttggagggcttcctggcagccctgcaggcagatccgcctcaggcggagcg

SEQ ID NO: 147745 - DNA, 120 bp, Artificial Sequence
  ENSG00000105290_11 (sequence is synthesized)
tgtcctgttggccctgcggcgctacctgcgtgcggagcagaaggaacagaggcacacgctgcgccactaccagcatgtggccgccgtggatcccgagaaggcacagcagatgcgcttcca

SEQ ID NO: 147746 - DNA, 120 bp, Artificial Sequence
  ENSG00000105290_12 (sequence is synthesized)
ggtgcatacccaccttcaagtgattgaggagagggtgaatcagagcctgggcctgcttgaccagaacccccacctggctcaggagctgcggccccaaatccaggaactcctccactctga

SEQ ID NO: 147747 - DNA, 120 bp, Artificial Sequence
  ENSG00000105290_13 (sequence is synthesized)
acacctgggtcccagtgaattggaagcccctgcccctgggggcagcagcgaggacaagggtgggctgcagcctccagattccaaggatgcagacacccccatgacccttccaaaagggtc

SEQ ID NO: 147748 - DNA, 120 bp, Artificial Sequence
  ENSG00000105290_14 (sequence is synthesized)
cacagaacaagatgctgcatcccctgagaaagagaagatgaacccgctggaacagtatgagcgaaaggtgaatgcgtctgttccaaggggtttccctttccactcatcggagattcagag

SEQ ID NO: 147749 - DNA, 120 bp, Artificial Sequence
  ENSG00000105290_15 (sequence is synthesized)
ggatgagctggcaccagctgggacaggggtgtcccgtgaggctgtgtcgggtctgctgatcatgggagcgggcggaggctccctcatcgtcctctccatgctgctcctgcgcaggaagaa

SEQ ID NO: 147750 - DNA, 120 bp, Artificial Sequence
  ENSG00000105290_16 (sequence is synthesized)
gccctacggggctatcagccatggcgtggtggaggtggaccccatgctgaccctggaggagcagcagctccgcgaactgcagcggcacggctatgagaaccccacttaccgcttcctgga

SEQ ID NO: 147751 - DNA, 120 bp, Artificial Sequence
  ENSG00000105290_17 (sequence is synthesized)
ggaacgaccctgacccggcccccttcaccccttcagccgagcccagacctcccctcttcctggagccccagaaccccaactcccagcctagggcagcagggagtcttgaagtgatcattt

SEQ ID NO: 147752 - DNA, 120 bp, Artificial Sequence
  ENSG00000105290_18 (sequence is synthesized)
cacacccttttgtgagacggctggaaattcttatttcccctttccaattccaaaattccatccctaagaattcccagatagtcccagcagcctccccacgtggcacctcctcaccttaat

SEQ ID NO: 147753 - DNA, 120 bp, Artificial Sequence
  ENSG00000105290_19 (sequence is synthesized)
ttattttttaagtttatttatggctctttaaggtgaccgccaccttggtcctagtgtctattccctggaattcaccctctcatgtttccctactaacatcccaataaagtcctcttccct

SEQ ID NO: 147754 - DNA, 120 bp, Artificial Sequence
  ENSG00000105290_20 (sequence is synthesized)
aatcctgaggtgctgcatccacagtgggcatggtgctggtgcctgcttggatgatccttaaagaaaggtcctgggggctttggttcatggatccttgagctaggagttaaaggtccaggc

SEQ ID NO: 147755 - DNA, 120 bp, Artificial Sequence
  ENSG00000105290_21 (sequence is synthesized)
ccctgggacccttgggaagcagagcaagaagagtgaactcctgggtctgaaggagaatgggctgggggcttggtctctggtcctgagagagaaggtgcccagacttctggatctgaaaga

SEQ ID NO: 147756 - DNA, 120 bp, Artificial Sequence
  ENSG00000105290_22 (sequence is synthesized)
ggaagggactaggtctcaactgctgccttcttgactggggacattttggaggcctgtattcctgagccctcaacagaggaatgtactaggggatgggggtctctgatgcttgcatccttg

SEQ ID NO: 147757 - DNA, 120 bp, Artificial Sequence
  ENSG00000105290_23 (sequence is synthesized)
atagcaacgggagcgctggggcgcccccgccctacgggagctgtttcccagggaacggtgcctccatggaggcggtgtgcggtgcttgggggagggggctggtgctgggggtctcggtcc

SEQ ID NO: 147758 - DNA, 120 bp, Artificial Sequence
  ENSG00000105290_24 (sequence is synthesized)
aggttgcagtgagccgagattgtaccattccactccagcctgggcgacaagagcaaatctccgtctcaaagaaagaaagaaagagggagaaagaaagagaaaagggacctgactactgga

SEQ ID NO: 147759 - DNA, 120 bp, Artificial Sequence
  ENSG00000105298_0 (sequence is synthesized)
cccagcgcaggcttcggctattggtgttggtgccgcggccactggcccagccgatgggtcgggacacacgctcgcgctcgcggtccgcgggtcgccggggccgaaggcggcagagtcaga

SEQ ID NO: 147760 - DNA, 120 bp, Artificial Sequence
  ENSG00000105298_1 (sequence is synthesized)
gcgggagccgaagtcggagcaggagccatgggcggcgaaaccgacggcgccgggaggacgagggacggcgcagacggaggcggcggagccgggagcgcaggtcagattcagaggaagagc

SEQ ID NO: 147761 - DNA, 120 bp, Artificial Sequence
  ENSG00000105298_2 (sequence is synthesized)
ggtggcagcgctcagggatgcgaagccggagccccccgcggcccaagtggcactcaagagatgggtcctctcagtcggactcaggagaggagcagtcacggggccagtgggctcgccggc

SEQ ID NO: 147762 - DNA, 120 bp, Artificial Sequence
  ENSG00000105298_3 (sequence is synthesized)
gacggcgcgcacgctcgtggtctcctagctcctcagcatccagctccgcgtctccagggcgatcccagagcccccgggcggccgcggctgccctgagccagcagcagagcctgcaggagc

SEQ ID NO: 147763 - DNA, 120 bp, Artificial Sequence
  ENSG00000105298_4 (sequence is synthesized)
ggctgcggctgcgggaggagcggaagcagcaggaggagctgatgaaggccttcgagacgcccgaggagaagcgcgcacggcggctggccaagaaggaggccaaggagcgcaagaagcggg

SEQ ID NO: 147764 - DNA, 120 bp, Artificial Sequence
  ENSG00000105298_5 (sequence is synthesized)
agaagatgggctggggtgaggagtacatgggctacaccaacaccgacaaccccttcggagacaacaacctgctgggcaccttcatctggaataaggccctggagaagaaggggatcagcc

SEQ ID NO: 147765 - DNA, 120 bp, Artificial Sequence
  ENSG00000105298_6 (sequence is synthesized)
acctggaggagaaggagctgaaggagcggaacaagaggatccaggaggacaaccggctggagctgcagaaggtgaagcagctgcggctggagcgggagcgggagaaggccatgcgcgagc

SEQ ID NO: 147766 - DNA, 120 bp, Artificial Sequence
  ENSG00000105298_7 (sequence is synthesized)
aggagctggagatgctgcagcgcgagaaggaggcagagcacttcaagacatgggaggagcaggaggacaacttccacctccagcaggccaagctgcgttccaagatccgcatccgggacg

SEQ ID NO: 147767 - DNA, 120 bp, Artificial Sequence
  ENSG00000105298_8 (sequence is synthesized)
ggcgggccaagcccatcgacctgctggccaagtacatcagcgctgaggatgacgatctggccgtggagatgcatgagccctacacgttcctcaacggcctcaccgtggccgacatggagg

SEQ ID NO: 147768 - DNA, 120 bp, Artificial Sequence
  ENSG00000105298_9 (sequence is synthesized)
acctgctggaggatatccaggtctacatggagctggagcagggcaagaacgccgacttctggcgggacatgaccaccatcaccgaggacgagatctccaagctccgcaagctggaggcct

SEQ ID NO: 147769 - DNA, 120 bp, Artificial Sequence
  ENSG00000105298_10 (sequence is synthesized)
cgggcaaggggccaggtgagcgccgcgagggggtcaacgcctccgtcagctctgatgtgcagtcggtgttcaaggggaagacatacaaccagctgcaggtcatcttccagggcatcgagg

SEQ ID NO: 147770 - DNA, 120 bp, Artificial Sequence
  ENSG00000105298_11 (sequence is synthesized)
ctactgggagagcctcctgcagcagcttcgtgcccacatggcacgggcccggctgcgtgagcgccaccaggacgtgctgcggcagaagctgtacaaactgaagcaggagcagggcgtgga

SEQ ID NO: 147771 - DNA, 120 bp, Artificial Sequence
  ENSG00000105298_12 (sequence is synthesized)
ggcgtggagagcgagccgctgttccccatcctcaagcaggagccccagtcccccagccgcagcctggagcctgaggacgcggcgcccaccccgcccgggccctcctcggagggcggcccc

SEQ ID NO: 147772 - DNA, 120 bp, Artificial Sequence
  ENSG00000105298_13 (sequence is synthesized)
cgaggtggacggcgcgaccccgacagagggcgacggcgacggggacggtgagggcgagggcgagggcgaggcggtgctcatggaggaggacctgatccagcagagcctggacgactacga

SEQ ID NO: 147773 - DNA, 120 bp, Artificial Sequence
  ENSG00000105298_14 (sequence is synthesized)
cgccggcaggtacagcccgcggctgctcacggcgcacgagctgccactggacgcgcacgtgctggaaccggatgaggacctgcagcgcctgcagctctcgcgccagcagctccaggtcac

SEQ ID NO: 147774 - DNA, 120 bp, Artificial Sequence
  ENSG00000105298_15 (sequence is synthesized)
gggagacgccagcgagagcgccgaggacatcttcttccggcgggccaaggagggcatgggccaggacgaggcgcagttcagcgtggagatgccactcaccggcaaggcctacctgtgggc

SEQ ID NO: 147775 - DNA, 120 bp, Artificial Sequence
  ENSG00000105298_16 (sequence is synthesized)
cgacaagtaccggccacgcaagccgcgcttcttcaaccgcgtgcacacgggcttcgagtggaacaagtacaaccagacgcactacgactttgacaacccaccgcccaagatcgtgcaggg

SEQ ID NO: 147776 - DNA, 120 bp, Artificial Sequence
  ENSG00000105298_17 (sequence is synthesized)
atacaagttcaacatcttctaccccgacctcatcgacaagcgctccacgcccgagtacttcctggaggcctgcgccgacaacaaggatttcgccatcctgcgcttccacgcggggccgcc

SEQ ID NO: 147777 - DNA, 120 bp, Artificial Sequence
  ENSG00000105298_18 (sequence is synthesized)
ctacgaggacatcgctttcaagatcgtcaaccgcgagtgggaatactcgcaccgccacggcttccgctgccagtttgccaacggcatcttccagctgtggtttcacttcaagcgctaccg

SEQ ID NO: 147778 - DNA, 120 bp, Artificial Sequence
  ENSG00000105298_19 (sequence is synthesized)
ctatcggcggtgacggccctggggaacggcaggcagcactgaggccgggaccctgctggcgcccgatccgccactgcagaagagaccctctgtggacacccacactctgcagggactggc

SEQ ID NO: 147779 - DNA, 120 bp, Artificial Sequence
  ENSG00000105298_20 (sequence is synthesized)
ccccaactcaccccgtgctggctggtggggtccatttccccgcagcgggccaggagggccgagggccacacgggtgccacagcccaggtcggagtggcccagccggcaggcttgttcttc

SEQ ID NO: 147780 - DNA, 120 bp, Artificial Sequence
  ENSG00000105298_21 (sequence is synthesized)
agcatccgacgggaacatctccaacagaagcaaaacggaaagtgcctcccggacccccagagggccacccaacctcaccagtcaccagccccagaccacccacagcccctcccagacacc

SEQ ID NO: 147781 - DNA, 120 bp, Artificial Sequence
  ENSG00000105298_22 (sequence is synthesized)
ccgcctcatctggaaatagttccgtttgtttctctaaaaagacttgtaggtgggaaaaaaaatcttttgttctcatggaattggcctattggcaagatcgcatgtttttttaataaacgt

SEQ ID NO: 147782 - DNA, 120 bp, Artificial Sequence
  ENSG00000105298_23 (sequence is synthesized)
ccgctgtctgggctgcagggccgcgggttcacgtcccacctcaggccgcatctttctttcgccaggcctcagtttcctcctatataaaaggggggtcaccattgagcctgccatggtgag

SEQ ID NO: 147783 - DNA, 120 bp, Artificial Sequence
  ENSG00000105298_24 (sequence is synthesized)
ctgaggagacactgggacaggctggcctagggtcctgatgcaacggagggggcgctaggggcatctttcgagcacgagggtggccagcagccgccagctgacctcaccgtccaggcggac

SEQ ID NO: 147784 - DNA, 120 bp, Artificial Sequence
  ENSG00000105298_25 (sequence is synthesized)
actctccaccgcccctcagccaggctgggtggggcccacagggcctgccccaagtggcggccacacagggtgttgtggagatgggccagaggggcctgggcttggcggtgccaggctcgt

SEQ ID NO: 147785 - DNA, 120 bp, Artificial Sequence
  ENSG00000105298_26 (sequence is synthesized)
gagaagcaggaaactcaaggccagccctgccacatcacggggcacccactgggcgtgaggcagagcccgcggctgtggggcagctccagccctgcccacaggccaccctcgcccgcacag

SEQ ID NO: 147786 - DNA, 120 bp, Artificial Sequence
  ENSG00000105298_27 (sequence is synthesized)
catttccccgcagcgggtatggaggatgcgtcgaggtccctgtctctgtcaaggtcgtgggaaccaaaagtcactgagccgtcctccccccacctctgagcacagggcctggagggcagg

SEQ ID NO: 147787 - DNA, 120 bp, Artificial Sequence
  ENSG00000105298_28 (sequence is synthesized)
ggctccccgaaggctgggggttggagaagggtgaggggcttcccccagggatccccccacctggcctgctcacggggccttggagcatgagaccagtgaccccgagttttgcccatatca

SEQ ID NO: 147788 - DNA, 120 bp, Artificial Sequence
  ENSG00000105298_29 (sequence is synthesized)
tcttaccctttgcatacatctcactcccagtgggggctccatgtctgcactgaattggatgcactgggtttcaggagtgttaaggagggggtggaagacgtgcagtgctggcaggtcacc

SEQ ID NO: 147789 - DNA, 120 bp, Artificial Sequence
  ENSG00000105298_30 (sequence is synthesized)
tctctctgcaaaacaagggccctggtcaatctcttggacgaaggagctgaggaggggggcgagggggcgggtctgtgctcagggcaggtgtgcctggtgcttccaggccctggagaagaa

SEQ ID NO: 147790 - DNA, 83 bp, Artificial Sequence
  ENSG00000105298_31 (sequence is synthesized)
tttattatttctgtaggttatttttgttttttgagacggtgtcttgctctcttgccaggctggagtgcagtggtgtgttctca

SEQ ID NO: 147791 - DNA, 120 bp, Artificial Sequence
  ENSG00000105298_32 (sequence is synthesized)
ggccgtttacatgaataagttctttagtggtgacttgtgagattttggtgcacctagctttttctaggaagttctaaccctacaggaggttgtgcagtagaaaacgggtgtcatcccagc

SEQ ID NO: 147792 - DNA, 120 bp, Artificial Sequence
  ENSG00000105298_33 (sequence is synthesized)
tcagcttcattagcctcccaccctgtgtagggcctggcctttcccccacgcagccccagggcccttggcctgcacccccagcctctagcagctgctgggaccccctaaacccccgggccc

SEQ ID NO: 147793 - DNA, 120 bp, Artificial Sequence
  ENSG00000105298_34 (sequence is synthesized)
ccttgtgggcattcgggaggcatccagacatgcagcagcatgtccagacccggctttctatagacgctgacctggcggcacctggcctggcttcctgggagcctcgcggctgggctcttc

SEQ ID NO: 147794 - DNA, 120 bp, Artificial Sequence
  ENSG00000105298_35 (sequence is synthesized)
tgcttgggtttcagtgttcgtggtagccccgcctgtctgggcacggccgcgctgtgcttggctggggctgccacggattccagtgccacttagcgcccagcaaaggggctgcagctctgg

SEQ ID NO: 147795 - DNA, 120 bp, Artificial Sequence
  ENSG00000105298_36 (sequence is synthesized)
gtgccgattccagggtcccaggtgattggctggaggggactcgggtccgtctagactctatccagtcccctgtggtgtaggtgtgggcctcttgaccctctgtccgccagcggggactgg

SEQ ID NO: 147796 - DNA, 120 bp, Artificial Sequence
  ENSG00000105298_37 (sequence is synthesized)
agaaggcaggtctcgagcagggtgcctgcactggtcacccccgcccagtgtgtcaccagcagctatgcaccaagctccctgtgggcccagcatggcacagggaacagcagcagccagccc

SEQ ID NO: 147797 - DNA, 120 bp, Artificial Sequence
  ENSG00000105298_38 (sequence is synthesized)
tgcccgcctcgggaagctgccatcgctggatggtcagggagggcttcctggcggaagggatgttctcactgagcatggaggatgcgaggaattcaggaagcgaatgggacagagaaggat

SEQ ID NO: 147798 - DNA, 120 bp, Artificial Sequence
  ENSG00000105298_39 (sequence is synthesized)
gggtagctggcaggaagcacagtgcgtgcaaaggcccagaggtggcaggggttcggcatgggcagcaaggggcagggttgcgaggtgaggccagacccagcggggtgggtggaagtggcc

SEQ ID NO: 147799 - DNA, 120 bp, Artificial Sequence
  ENSG00000105298_40 (sequence is synthesized)
tgagagcagcactgaggccgccgggatgccacgtggtgtggggcagagcacgcggagtcaggctaggctccagcctcccagcaccccactcccgccctcagcagcctccccgtctatcga

SEQ ID NO: 147800 - DNA, 120 bp, Artificial Sequence
  ENSG00000105298_41 (sequence is synthesized)
ggagggacttgagcctcgggcccctgggccagtggtagatgccagacagactccatgtaggatggggggcggcggtggggagctgtttgtcctggggcgggcccaggacttccccagggg

SEQ ID NO: 147801 - DNA, 120 bp, Artificial Sequence
  ENSG00000105298_42 (sequence is synthesized)
ccagcagggtggccttctttgctaggcttcacagagggaaactaaggcccagaaagggcaggccacttgcccacagtcacacagcccaggctggcagagaagatctgaattccagagagc

SEQ ID NO: 147802 - DNA, 120 bp, Artificial Sequence
  ENSG00000105298_43 (sequence is synthesized)
ctggctaccgagcacaccccccaaccccctcatggactgcccaaggccagggcagagttgggccaggttggtgggccgggcccacaactagggttcccagacccacatatcagactcacc

SEQ ID NO: 147803 - DNA, 120 bp, Artificial Sequence
  ENSG00000105298_44 (sequence is synthesized)
tggggaggggcattctcagggccagtcctggcctcccccacgctgggggcctgggcctccaggtcaaggcctcagcaactgcatcttaacgtggctcccaacctccgcccaccccctccc

SEQ ID NO: 147804 - DNA, 120 bp, Artificial Sequence
  ENSG00000105298_45 (sequence is synthesized)
ctccgctgtggccagggtggggacaacctgagaccagggaggtggcgggactggatgggacccctgtgggggaagaggaggggagggggacccccccatggcaggggaggaggccctgat

SEQ ID NO: 147805 - DNA, 120 bp, Artificial Sequence
  ENSG00000105298_46 (sequence is synthesized)
ggacatgggctactgggagagcctcctgcagcagcttcgtgcccacatggcacgggcccggtgagcactaggctgcgtgagcgccaccaggacgtgctgcggcagaagctgtacaaactg

SEQ ID NO: 147806 - DNA, 120 bp, Artificial Sequence
  ENSG00000105321_0 (sequence is synthesized)
aggaagtgacgcgcctggcccgggagctgcggtcgcagaggccgacggagccggagtcgcggacgccgcggggtctccgggacaggaaccctcagtgctgcgtctagattctgcagggga

SEQ ID NO: 147807 - DNA, 120 bp, Artificial Sequence
  ENSG00000105321_1 (sequence is synthesized)
ggtttgctgggaccttggctccacgcagccagcgaaatggcagccacactcgatttgaaatcaaaggaggagaaggatgctgagttggacaagaggatcgaggctcttcggcggaagaat

SEQ ID NO: 147808 - DNA, 120 bp, Artificial Sequence
  ENSG00000105321_2 (sequence is synthesized)
gaggccctcatccggcgctaccaggagattgaggaagaccgtaagaaagctgaacttgagggagtcgcagtcacagctccccgaaagggccgctcagtggagaaggagaacgtggcagtg

SEQ ID NO: 147809 - DNA, 120 bp, Artificial Sequence
  ENSG00000105321_3 (sequence is synthesized)
gagtcggagaagaacctgggtccttcccggaggtctcctgggacccctcggcccccaggggccagcaaggggggccggactcctccacagcagggaggccgggccggcatgggccgagca

SEQ ID NO: 147810 - DNA, 120 bp, Artificial Sequence
  ENSG00000105321_4 (sequence is synthesized)
tcgcgcagctgggagggcagccccggggagcagcctcgaggaggaggagctgggggccgtggccggaggggccggggccgaggttcacctcacctctctggagctggagacacctcaatc

SEQ ID NO: 147811 - DNA, 120 bp, Artificial Sequence
  ENSG00000105321_5 (sequence is synthesized)
tctgaccgtaaatccaaggagtgggaggagcggcgcaggcagaacattgagaagatgaatgaggagatggagaagatcgccgagtatgagcgcaaccagcgggaaggggttcttgaaccc

SEQ ID NO: 147812 - DNA, 120 bp, Artificial Sequence
  ENSG00000105321_6 (sequence is synthesized)
aacccagtgcggaacttcctggacgacccccggcgacgcagcgggcccctggaggagtctgagcgggaccgccgggaggagagccgccggcacggccgcaactgggggggccccgacttc

SEQ ID NO: 147813 - DNA, 120 bp, Artificial Sequence
  ENSG00000105321_7 (sequence is synthesized)
gagcgggtgcgctgtggccttgagcacgagcggcagggccgccgagctggcctgggcagtgctggagacatgacgttgtccatgacgggccgggagcggtcggagtacctgcgctggaag

SEQ ID NO: 147814 - DNA, 120 bp, Artificial Sequence
  ENSG00000105321_8 (sequence is synthesized)
tggcccagtccctgcccatgaaccatcccaccgctatgatgaccaggcctgggcccggcccccgaagccccctacttttggggagttcctgtcccagcacaaagctgaggccagcagccg

SEQ ID NO: 147815 - DNA, 120 bp, Artificial Sequence
  ENSG00000105321_9 (sequence is synthesized)
cagaaggagaaagagcagtcggccccaggccaaggcagcgcccagggcctacagtgaccatgatgaccgctgggagacaaaagaaggggcagcatccccagcccctgagactccacagcc

SEQ ID NO: 147816 - DNA, 120 bp, Artificial Sequence
  ENSG00000105321_10 (sequence is synthesized)
tacttcccccgagacttcccccaaggagacacccatgcagccacccgagatcccagctcctgcccaccggcctcctgaagacgagggggaagagaatgagggggaagaggatgaagaatg

SEQ ID NO: 147817 - DNA, 120 bp, Artificial Sequence
  ENSG00000105321_11 (sequence is synthesized)
ggaggacataagtgaggatgaggaagaggaggagatcgaggtggaagaaggtgatgaggaggaaccagcccaagaccaccaagccccagaggctgcccccaccgggatcccctgcagtga

SEQ ID NO: 147818 - DNA, 120 bp, Artificial Sequence
  ENSG00000105321_12 (sequence is synthesized)
gcaggcccacggagtccccttcagtccggaggagcccctgctggagccccaggcccctggcacgccttccagccctttctcaccacccagcggccaccagcctgtgtccgattggggtga

SEQ ID NO: 147819 - DNA, 120 bp, Artificial Sequence
  ENSG00000105321_13 (sequence is synthesized)
agaggtggagctgaattctccccggaccactcacctggctggcgccctctccccgggtgaggcctggccttttgagagtgtatgaagctggctgcctgtgtgtgtgtgtgtgtgtgtgtg

SEQ ID NO: 147820 - DNA, 120 bp, Artificial Sequence
  ENSG00000105321_14 (sequence is synthesized)
tgtgcgcgcgcgcgcgcgcgcgcgcgcgcgctagaggggtgtggctggtgggggacccttggggctgggccctgggacccagtgtgccccacagccctgtcagctgagggggtagcgcag

SEQ ID NO: 147821 - DNA, 120 bp, Artificial Sequence
  ENSG00000105321_15 (sequence is synthesized)
tgagggggtagcgcagcccatgctcttctgtactgtcatgcccgtctctggaatgtccactcccagagcctgccccagcccttcgagccccctccccaataaagaattcacatcctccaa

SEQ ID NO: 147822 - DNA, 120 bp, Artificial Sequence
  ENSG00000105321_16 (sequence is synthesized)
attctccccggaccactcacctggctggcgccctctccccgggaggtggccagtcagcccctgccttcccggagagtgggcccagcctccgaggaacccaggaagctgaagaggaagggt

SEQ ID NO: 147823 - DNA, 120 bp, Artificial Sequence
  ENSG00000105321_17 (sequence is synthesized)
ctgaggcaactccagaggcaggccccgaaggccaggagacggcggagatcaccgacttccagagggtgcgtttctgcaaggtggtggcggcccctccgctgccgggggccgctcgctgac

SEQ ID NO: 147824 - DNA, 120 bp, Artificial Sequence
  ENSG00000105321_18 (sequence is synthesized)
cgcgcccgccggaccgcggcctccgcgctctgcactaacctcccaccgcctcgctcctctgtcctctgcttctgccacactccagccaggagagggttaaatctaaggggggaggagcca

SEQ ID NO: 147825 - DNA, 120 bp, Artificial Sequence
  ENSG00000105321_19 (sequence is synthesized)
gggtctgcgagccgggcggggccagggcagtagtcgggtgcaggccccaccaacgggggacgtcacggcactgggacggctgggacgcttccgcgttagtctcccatggaggccctgggc

SEQ ID NO: 147826 - DNA, 120 bp, Artificial Sequence
  ENSG00000105321_20 (sequence is synthesized)
gattgaggctggagctttgcacagaaaatctggggcgggcctgggtagttttgtccttgttggggcgggtggagtattcagtggggcaaaacgccagttccaggaagcctcgccagaacc

SEQ ID NO: 147827 - DNA, 120 bp, Artificial Sequence
  ENSG00000105321_21 (sequence is synthesized)
cccagccggattgaggctggagctttgcacagaaaatctggggcgggcctgggtagttttgtccttgttggggcgggtggagtattcagtggggcaaaacgccagttccaggaagcctcg

SEQ ID NO: 147828 - DNA, 120 bp, Artificial Sequence
  ENSG00000105321_22 (sequence is synthesized)
ccagtgagttctgggcctgtgtacagaatcctttcgggggaggcgggaggctgtcgaccttccgtagggcgctggagacgggactaggacgtccctgaggaaggcgcgggcttggaatgt

SEQ ID NO: 147829 - DNA, 120 bp, Artificial Sequence
  ENSG00000105321_23 (sequence is synthesized)
tctctgagagcttgggcagccaataagagtggggttcggactttctttgagcgtgggattgggaatgtttctgaaccttacctggtggagctagaatattcgcctggatatgagaggcac

SEQ ID NO: 147830 - DNA, 120 bp, Artificial Sequence
  ENSG00000105321_24 (sequence is synthesized)
ggagaagagtttggaggcagagcccctgccttgatgaggtttcttctggtgggagctgagtaaatgaaaatatagtgagatgtgaggtcctaccaagtgttgtggagaaaaatccagcag

SEQ ID NO: 147831 - DNA, 120 bp, Artificial Sequence
  ENSG00000105321_25 (sequence is synthesized)
ctgaggggacagagggatgctacttaggagatctgagagggcctctgtgaggaggtgccacctgagcctagttgattgtgatctctgccttgtcatcgcttccctgtgtgatcctgagca

SEQ ID NO: 147832 - DNA, 120 bp, Artificial Sequence
  ENSG00000105321_26 (sequence is synthesized)
gtgggtttgactagatcgtttacatgggaactgggtgagtccacaaagatcatgaaagggctgagtctgaatttctatggagaagatggaggtggcagttgaaaggagggagagtgaggg

SEQ ID NO: 147833 - DNA, 89 bp, Artificial Sequence
  ENSG00000105321_27 (sequence is synthesized)
ctcccgagttgctgggattacaggcgcgcgccaccacaaccggctaattttttttgtagagacgggatttcacaatgttggccagactg

SEQ ID NO: 147834 - DNA, 120 bp, Artificial Sequence
  ENSG00000105321_28 (sequence is synthesized)
cattggcacgagggggctcgaaccacgccaggcttccaggcgtcagtgcccagtgcttggcatctactgatagaaaccaggaatgaggggctggaggcggaaacagcttgaagaaagagg

SEQ ID NO: 147835 - DNA, 120 bp, Artificial Sequence
  ENSG00000105321_29 (sequence is synthesized)
tagaggccagggagtgaggacggtgtctccttttcctggaagttggcaggaagtgacgcgcctggcccgggagctgcggtcgcagaggccgacggagccggagtcgcggacgccgcgggg

SEQ ID NO: 147836 - DNA, 120 bp, Artificial Sequence
  ENSG00000105323_0 (sequence is synthesized)
attttgagccgctgccgccattggagtgggccccccccctttcccccttcgcctcctgacaggaaaggtttaagggggacagagccctgggaggccgggccgggctcgggggccaccccg

SEQ ID NO: 147837 - DNA, 120 bp, Artificial Sequence
  ENSG00000105323_1 (sequence is synthesized)
ggggcccgggccatggatgtgcgccgtctgaaggtgaacgaacttcgcgaggagctgcagcgccgcggcctggacactcgaggcctcaaggccgagcttgctgagcggctgcaggcggcg

SEQ ID NO: 147838 - DNA, 120 bp, Artificial Sequence
  ENSG00000105323_2 (sequence is synthesized)
ttggaggccgaggagcctgacgacgagcgggagctcgacgccgacgacgaaccggggcgacccgggcacatcaacgaggaggtcgagaccgaggggggctccgagctggaggggaccgcg

SEQ ID NO: 147839 - DNA, 120 bp, Artificial Sequence
  ENSG00000105323_3 (sequence is synthesized)
cagccaccgccgcccgggctgcagccgcacgcggagcccggcggctactcggggccggacggacattatgccatggacaatattaccaggcagaaccaattctacgatacccaagtcatc

SEQ ID NO: 147840 - DNA, 120 bp, Artificial Sequence
  ENSG00000105323_4 (sequence is synthesized)
aaacaagaaaacgagtcaggctacgagaggagaccactggaaatggagcagcagcaggcctatcgtccagaaatgaagacagagatgaagcaaggagcacccaccagcttcctcccgcct

SEQ ID NO: 147841 - DNA, 120 bp, Artificial Sequence
  ENSG00000105323_5 (sequence is synthesized)
gaagcttctcaactcaagccagacaggcagcaattccagagtcgaaagaggccttatgaagaaaaccggggacgggggtactttgagcaccgagaggataggaggggccgctctcctcag

SEQ ID NO: 147842 - DNA, 120 bp, Artificial Sequence
  ENSG00000105323_6 (sequence is synthesized)
cctcctgctgaagaggatgaagatgactttgatgatacccttgttgctattgacacctataactgcgacctccacttcaaggtggcccgagatcggagtagtggctatccgctcacaatt

SEQ ID NO: 147843 - DNA, 120 bp, Artificial Sequence
  ENSG00000105323_7 (sequence is synthesized)
gagggctttgcatacctgtggtcaggagcccgtgccagctatggggtcagaaggggccgtgtatgcttcgagatgaagatcaatgaggaaatctccgtgaagcaccttccgtctacagag

SEQ ID NO: 147844 - DNA, 120 bp, Artificial Sequence
  ENSG00000105323_8 (sequence is synthesized)
cctgacccccacgtggtccgtatcggctggtccctggactcctgcagcacccagctaggcgaagagcctttctcctatggctatggaggcactgggaagaagtccaccaatagccggttt

SEQ ID NO: 147845 - DNA, 120 bp, Artificial Sequence
  ENSG00000105323_9 (sequence is synthesized)
gaaaactacggagacaagtttgcagagaacgatgtgattggctgctttgcggattttgaatgtggaaatgacgtggaactgtcttttaccaagaatggaaagtggatgggcattgctttc

SEQ ID NO: 147846 - DNA, 120 bp, Artificial Sequence
  ENSG00000105323_10 (sequence is synthesized)
cgaatccagaaggaagccttggggggtcaggccctctatcctcatgtcctggtgaagaattgcgcagtggagttcaacttcggacagagagcagagccctactgttctgtcctcccgggg

SEQ ID NO: 147847 - DNA, 120 bp, Artificial Sequence
  ENSG00000105323_11 (sequence is synthesized)
tttaccttcatccagcaccttccccttagtgagcgtatccggggcaccgttggaccaaagagcaaggcagaatgtgagattctgatgatggtgggcctgcctgctgctggcaagaccaca

SEQ ID NO: 147848 - DNA, 120 bp, Artificial Sequence
  ENSG00000105323_12 (sequence is synthesized)
tgggccatcaaacatgcagcctccaacccttccaagaagtacaacatcctgggtaccaatgccatcatggataagatgcgggtgatgggcctacgccggcagcggaactatgctggccgc

SEQ ID NO: 147849 - DNA, 120 bp, Artificial Sequence
  ENSG00000105323_13 (sequence is synthesized)
tgggatgtcctgatccagcaggccacccagtgcctcaaccgcctcatccagattgctgcccgcaagaaacgcaactatatcctagatcagacaaatgtttatgggtcagcccagagacga

SEQ ID NO: 147850 - DNA, 120 bp, Artificial Sequence
  ENSG00000105323_14 (sequence is synthesized)
aaaatgagaccatttgaaggcttccagcgcaaagctattgtaatttgtcccactgacgaggacctaaaagaccgaacaataaagcgaaccgacgaggaagggaaggatgtcccagatcat

SEQ ID NO: 147851 - DNA, 120 bp, Artificial Sequence
  ENSG00000105323_15 (sequence is synthesized)
gcggtcttagaaatgaaagccaacttcacgttgccagatgttggggacttcctggatgaggttctgttcattgagctgcagcgggaggaagcggacaagctagtgaggcagtacaacgag

SEQ ID NO: 147852 - DNA, 120 bp, Artificial Sequence
  ENSG00000105323_16 (sequence is synthesized)
gcttccagcgctatgaaaaccgaggaccccctggaggcaaccgtggcggcttccagaaccgagggggaggcagcggtggaggaggcaactaccgaggaggtttcaaccgcagcggaggtg

SEQ ID NO: 147853 - DNA, 120 bp, Artificial Sequence
  ENSG00000105323_17 (sequence is synthesized)
gtggctatagccagaaccgctggggtaacaacaaccgggataacaacaactccaacaacagaggcagctacaaccgggctccccagcaacagccgccaccacagcagcctccgccaccac

SEQ ID NO: 147854 - DNA, 120 bp, Artificial Sequence
  ENSG00000105323_18 (sequence is synthesized)
agccaccaccccagcagccaccgccaccacccagctacagccctgctcggaaccccccaggggccagcacctacaataagaacagcaacatccctggctcaagcgccaataccagcaccc

SEQ ID NO: 147855 - DNA, 120 bp, Artificial Sequence
  ENSG00000105323_19 (sequence is synthesized)
ccaccgtcagcagctacagccctccacagccgagttacagccagccaccctacaaccagggaggttacagccagggctacacagccccaccgcctccacctccaccaccacctgcctaca

SEQ ID NO: 147856 - DNA, 120 bp, Artificial Sequence
  ENSG00000105323_20 (sequence is synthesized)
actatgggagctacggcggttacaacccggccccctataccccaccgccaccccccactgcacagacctaccctcagcccagctataaccagtatcagcagtatgcccagcagtggaacc

SEQ ID NO: 147857 - DNA, 120 bp, Artificial Sequence
  ENSG00000105323_21 (sequence is synthesized)
agtactatcagaaccagggccagtggccgccatactacgggaactacgactacgggagctactccgggaacacacagggtggcacaagtacacagtagccagtgtgacccagaggctccc

SEQ ID NO: 147858 - DNA, 120 bp, Artificial Sequence
  ENSG00000105323_22 (sequence is synthesized)
ggaggcccctgccggcttcctccaccagcgcctgcctcggcccctcctctgcccccgccagatcccgtggtgctggggatggggtcatcccagggctgcctccctccagcccactgcctc

SEQ ID NO: 147859 - DNA, 120 bp, Artificial Sequence
  ENSG00000105323_23 (sequence is synthesized)
ccctctgaggggcttccttcccctccatagggccaggcatttttttctggattcaaacaggcaacaatgaccttttattttctgtttgtccccacctccccagccttccacctcctgttc

SEQ ID NO: 147860 - DNA, 120 bp, Artificial Sequence
  ENSG00000105323_24 (sequence is synthesized)
ttcctaccttcttcctttttgactaaataatccccacctcccttgatcatacagtgaggctacagtgactgaggggagaatcccctcctgttcactctcccaaccctgctccagcccctc

SEQ ID NO: 147861 - DNA, 120 bp, Artificial Sequence
  ENSG00000105323_25 (sequence is synthesized)
caaccctgctccagcccctcagcttcccagaccctcatgcagttggttgtaaattctcccaggagctgttttactgtctacttttcaggattaaaaaaaaaatcaaaacttaaaaaaaaa

SEQ ID NO: 147862 - DNA, 120 bp, Artificial Sequence
  ENSG00000105323_26 (sequence is synthesized)
gggagggggaggaagcagtgacttttttttggtaattatgcgcttttttttaatttttagaatttgtctttttactgtgggtgggctgttgatatttcatcaagataagcatttctttcc

SEQ ID NO: 147863 - DNA, 120 bp, Artificial Sequence
  ENSG00000105323_27 (sequence is synthesized)
tgagttcaggtgactgaggaagagccacaaaacaaaacacaacaaaaccaaaccacagaatcatctttaacccaactttttatacgatgccccagttccccataactttgcacacaagct

SEQ ID NO: 147864 - DNA, 120 bp, Artificial Sequence
  ENSG00000105323_28 (sequence is synthesized)
tctgtgttcagttgaattgtaactgctttttgtatttggagagagtgactattgaacttgaaaccttttattccgggcgtcttggtagtttctggtgggattcagtgggtgagagggaag

SEQ ID NO: 147865 - DNA, 120 bp, Artificial Sequence
  ENSG00000105323_29 (sequence is synthesized)
aaggggaggttggggggctccttcccttcagaacttgaagtttctcccactgcctcctctccagtggtctcccaggtgccagacccaaaagcttttcctacagtgataccctttattttt

SEQ ID NO: 147866 - DNA, 120 bp, Artificial Sequence
  ENSG00000105323_30 (sequence is synthesized)
acttccccttgactcatatgttttaacatgattttaacaaactgcacttattaagaaatgtgtttgccctgttttgtttggtttcgttttgttttctttgaataaatgacatggcacctc

SEQ ID NO: 147867 - DNA, 120 bp, Artificial Sequence
  ENSG00000105323_31 (sequence is synthesized)
ctagcaggaaggaagcagggttgaaaccctgaagtgttactgcagttggccgttaattggggtgggggcctctttaaagggaaattatttactcattcattaaacaacttaactgaggga

SEQ ID NO: 147868 - DNA, 120 bp, Artificial Sequence
  ENSG00000105323_32 (sequence is synthesized)
attgtgggaagctgggaggagagagagagagaggaagtcggacgtgggcgaggggcggggtgtctggactggaacctctgggcccacatgccatggacaatattaccaggcagaaccaat

SEQ ID NO: 147869 - DNA, 120 bp, Artificial Sequence
  ENSG00000105323_33 (sequence is synthesized)
ggaaactgctttctggagccgaagagagtcggaagaacaagaggttttccgtttgggttggggagggtctcgaaaatggggatcctaggatgccatggacaatattaccaggcagaacca

SEQ ID NO: 147870 - DNA, 81 bp, Artificial Sequence
  ENSG00000105323_34 (sequence is synthesized)
attattcgatgccgcctgcctctgcggaccgtagtgggcacatctacactgcagcggggtgccttacccaaagcagatcgg

SEQ ID NO: 147871 - DNA, 120 bp, Artificial Sequence
  ENSG00000105323_35 (sequence is synthesized)
ccgcccttctgtctatgtctttcttattcactattccagttttcttcaccttctcccttctggaaggccactcttctgggtggaggggaccagacttcagaaggtactgacctcttcttc

SEQ ID NO: 147872 - DNA, 120 bp, Artificial Sequence
  ENSG00000105323_36 (sequence is synthesized)
actgtgtttgctgtggcaacagccaccagcagctaattccctttcctccaggaaagccaagtatttgcatttctgctggtgtggtttagatactcttcttcccttccccaaacgaaggag

SEQ ID NO: 147873 - DNA, 120 bp, Artificial Sequence
  ENSG00000105323_37 (sequence is synthesized)
taagtggagggaggtgcagtcttaaaaaccactgctgagttgattctcagcacctcaattccaaagtgcctgagaagccatctctgagtctacccacttccaaggacaaaggccagctat

SEQ ID NO: 147874 - DNA, 120 bp, Artificial Sequence
  ENSG00000105323_38 (sequence is synthesized)
ggggctagccgtcttggcagcattgcttctcttctctgtcccctcatcaggacattgacagggcagttgtaccacatggaagacctccaggactgtcactccatgccctcgcagttcaga

SEQ ID NO: 147875 - DNA, 120 bp, Artificial Sequence
  ENSG00000105323_39 (sequence is synthesized)
ggaatcaaaacaaatgtttatgggtcagcccagagacgaaaaatgagaccatttgaaggcttccagcgcaaagctattgtaatttgtcccactgacgaggacctaaaagaccgaacaata

SEQ ID NO: 147876 - DNA, 120 bp, Artificial Sequence
  ENSG00000105323_40 (sequence is synthesized)
agcagtcacccttgctctggtaggtttctatatccatagcctcgtgcttgctggggacatttgcactaacctagaggggctgagtaaagattccctctgctttcacactcttcctgtccc

SEQ ID NO: 147877 - DNA, 68 bp, Artificial Sequence
  ENSG00000105323_41 (sequence is synthesized)
agaggccctgcactccagccaggatgccatggacaatattaccaggcagaaccaattctacgataccc

SEQ ID NO: 147878 - DNA, 120 bp, Artificial Sequence
  ENSG00000105323_42 (sequence is synthesized)
tcggctggtccctggactcctgcagcacccagctagagttattcagttgagctcctactcccagactggacaatgaaacccatcaagccctccaagttctacatcattaagggcttcctt

SEQ ID NO: 147879 - DNA, 120 bp, Artificial Sequence
  ENSG00000105323_43 (sequence is synthesized)
tcacccttccccacccctattttaaaaaggcatctgattaataaaactagtaaagaaaatgatttttttcttcaaaaataaaagtatgtggcagccattgaggctgttatgaccatcgca

SEQ ID NO: 147880 - DNA, 120 bp, Artificial Sequence
  ENSG00000105323_44 (sequence is synthesized)
gaaagggctgtgggacgcgggagtccagcgcctgaggtcggggagacgacctgaggatcgggggatcccgctacccgccgccgaaaaggatctggggaccagggccccagcacgaccgga

SEQ ID NO: 147881 - DNA, 120 bp, Artificial Sequence
  ENSG00000105323_45 (sequence is synthesized)
gggtggatcctgacactcagtgcaggggggacactgggggaggggcctctgggtttcggaggtgagggacgggggtggcggggaggattccgtaccgtagggatcggagaccggaaactg

SEQ ID NO: 147882 - DNA, 120 bp, Artificial Sequence
  ENSG00000105323_46 (sequence is synthesized)
tagtatgcatgccatgaatagttaatattattattcttaccactcttagttgagctcctggacctgcagatgccttctggatgctttggtccagggttcttcatgaaccgcccctctaat

SEQ ID NO: 147883 - DNA, 120 bp, Artificial Sequence
  ENSG00000105323_47 (sequence is synthesized)
gaaggggccgtgtatgcttcgagatgaaggtgagtaggagcaagagaaggggaagggacagagaagtccatccattgtaatatcctgataccagccaccttggtcagagctgcaactgca

SEQ ID NO: 147884 - DNA, 120 bp, Artificial Sequence
  ENSG00000105323_48 (sequence is synthesized)
aaagagattggattgtgcaataccatgtccaagcagacaaaactgtgatgaactcaagacaactacatcattgctaaatatcatatcagaaaagcaggccaaccatgcattgcttcatca

SEQ ID NO: 147885 - DNA, 120 bp, Artificial Sequence
  ENSG00000105323_49 (sequence is synthesized)
caaccagtgtagtgatgacatgtttgtagaactgagaaaagaagttgtttggaagaaaagtgatctagaaagaatagactcagatgtcacttattaaagggaggccagagggagaacagg

SEQ ID NO: 147886 - DNA, 120 bp, Artificial Sequence
  ENSG00000105323_50 (sequence is synthesized)
gcaaagaactgccagcttaggccagcctctgctgtcatctctccacagttccatgtcaagttatgtttatgaaaataatagatgctcatgtttaacaaaagttcagacagcacagaaaag

SEQ ID NO: 147887 - DNA, 120 bp, Artificial Sequence
  ENSG00000105323_51 (sequence is synthesized)
tacaggataaaacaggcttgagccaccgtgcccggcctactttgctctttttaactgttgcatcatattttgtggcatggatataccataatcagtgctttattgatattttttctgatg

SEQ ID NO: 147888 - DNA, 120 bp, Artificial Sequence
  ENSG00000105323_52 (sequence is synthesized)
gttttccgtttgggttggggagggtctcgaaaatggggatcctagggtacggagctccgtgggcttggcggtcgtgctagcccagcgtgtgggctggggggtggggagccgtgtttccag

SEQ ID NO: 147889 - DNA, 120 bp, Artificial Sequence
  ENSG00000105323_53 (sequence is synthesized)
ggtggggaaggaatgtccaggtgtgcggggctgcgagagttctgaggaaggaggatcctggaatatgccgctggatgcgatcctgggcgttctcctatttggatgccatggacaatatta

SEQ ID NO: 147890 - DNA, 80 bp, Artificial Sequence
  ENSG00000105325_0 (sequence is synthesized)
ggccgggcgcgcgcggcggagggagggagccgggaggcagcggaggagcgaccgccgccatattagggaccgcggagccc

SEQ ID NO: 147891 - DNA, 120 bp, Artificial Sequence
  ENSG00000105325_1 (sequence is synthesized)
ctgcggaggccggaggcgggcgctgtgcggtgccaggagaggcggggtcggcgggagccagcgagccacgggagcgagccaggctaaccttgccgcgggccgagccctgcctcgccatgg

SEQ ID NO: 147892 - DNA, 120 bp, Artificial Sequence
  ENSG00000105325_2 (sequence is synthesized)
accaggactatgagcggcgcctgcttcgccagatcgtcatccagaatgagaacacgatgccacgcgtcacagagatgcggcggaccctgacgcctgccagctccccagtgtcctcgccca

SEQ ID NO: 147893 - DNA, 120 bp, Artificial Sequence
  ENSG00000105325_3 (sequence is synthesized)
gcaagcacggagaccgcttcatcccctccagagccggagccaactggagcgtgaacttccacaggattaacgagaatgagaagtctcccagtcagaaccggaaagccaaggacgccacct

SEQ ID NO: 147894 - DNA, 120 bp, Artificial Sequence
  ENSG00000105325_4 (sequence is synthesized)
cagacaacggcaaagacggcctggcctactctgccctgctcaagaatgagctgctgggtgccggcatcgagaaggtgcaggacccgcagactgaggaccgcaggctgcagccctccacgc

SEQ ID NO: 147895 - DNA, 120 bp, Artificial Sequence
  ENSG00000105325_5 (sequence is synthesized)
ctgagaagaagggtctgttcacgtattcccttagcaccaagcgctccagccccgatgacggcaacgatgtgtctccctactccctgtctcccgtcagcaacaagagccagaagctgctcc

SEQ ID NO: 147896 - DNA, 120 bp, Artificial Sequence
  ENSG00000105325_6 (sequence is synthesized)
ggtccccccggaaacccacccgcaagatctccaagatccccttcaaggtgctggacgcgcccgagctgcaggacgacttctacctcaatctggtggactggtcgtccctcaatgtgctca

SEQ ID NO: 147897 - DNA, 120 bp, Artificial Sequence
  ENSG00000105325_7 (sequence is synthesized)
gcgtggggctaggcacctgcgtgtacctgtggagtgcctgtaccagccaggtgacgcggctctgtgacctctcagtggaaggggactcagtgacctccgtgggctggtctgagcggggga

SEQ ID NO: 147898 - DNA, 120 bp, Artificial Sequence
  ENSG00000105325_8 (sequence is synthesized)
acctggtggcggtgggcacacacaagggcttcgtgcagatctgggacgcagccgcagggaagaagctgtccatgttggagggccacacggcacgcgtcggggcgctggcctggaatgctg

SEQ ID NO: 147899 - DNA, 120 bp, Artificial Sequence
  ENSG00000105325_9 (sequence is synthesized)
agcagctgtcgtccgggagccgcgaccgcatgatcctgcagagggacatccgcaccccgccactgcagtcggagcggcggctgcagggccaccggcaggaggtgtgcgggctcaagtggt

SEQ ID NO: 147900 - DNA, 120 bp, Artificial Sequence
  ENSG00000105325_10 (sequence is synthesized)
ccacagaccaccagctcctcgcctcggggggcaacgacaacaagctgctggtctggaatcactcgagcctgagccccgtgcagcagtacacggagcacctggcggccgtgaaggccatcg

SEQ ID NO: 147901 - DNA, 120 bp, Artificial Sequence
  ENSG00000105325_11 (sequence is synthesized)
cctggtccccacatcagcacgggctgctggcctcggggggcggcacagctgaccgctgtatccgcttctggaacacgctgacaggacaaccactgcagtgtatcgacacgggctcccaag

SEQ ID NO: 147902 - DNA, 120 bp, Artificial Sequence
  ENSG00000105325_12 (sequence is synthesized)
tgtgcaatctggcctggtccaagcacgccaacgagctggtgagcacgcacggctactcacagaaccagatccttgtctggaagtacccctccctgacccaggtggccaagctgaccgggc

SEQ ID NO: 147903 - DNA, 120 bp, Artificial Sequence
  ENSG00000105325_13 (sequence is synthesized)
actcctaccgcgtgctgtacctggcaatgtcccctgatggggaggccatcgtcactggtgctggagacgagaccctgaggttctggaacgtctttagcaaaacccgttcgacaaaggagt

SEQ ID NO: 147904 - DNA, 120 bp, Artificial Sequence
  ENSG00000105325_14 (sequence is synthesized)
ctgtgtctgtgctcaacctcttcaccaggatccggtaaacctgccgggcaggaccgtgccacaccagctgtccagagtcggaggaccccagctcctcagcttgcatggactctgccttcc

SEQ ID NO: 147905 - DNA, 120 bp, Artificial Sequence
  ENSG00000105325_15 (sequence is synthesized)
cagcgcttgtcccccgaggaaggcggctgggcgggcggggagctgggcctggaggatcctggagtctcattaaatgcctgattgtgaaccatgtccaccagtatctggggtgggcacgtg

SEQ ID NO: 147906 - DNA, 120 bp, Artificial Sequence
  ENSG00000105325_16 (sequence is synthesized)
gtcggggaccctcagcagcaggggctctgtctcccttcccaaagggcgagaaccacattggacggtcccggctcagaccgtctgtactcagagcgacggatgccccctgggaccctcact

SEQ ID NO: 147907 - DNA, 120 bp, Artificial Sequence
  ENSG00000105325_17 (sequence is synthesized)
gcctccgtctgttcatcacctgcccaccggagccgcatgctcttcctggaactgcccacgtctgcacagaacagaccaccagacgccagggctgattggtgggggcctgagaccccggtt

SEQ ID NO: 147908 - DNA, 120 bp, Artificial Sequence
  ENSG00000105325_18 (sequence is synthesized)
gcccattcatggctgcaccccaccatgtcaaacccaagaccagccccaaggccagaccaaggcatgtaggcctgggcaggtggctcggggccactggcggagccagcctgtggatccaag

SEQ ID NO: 147909 - DNA, 120 bp, Artificial Sequence
  ENSG00000105325_19 (sequence is synthesized)
agacagtccccacctgggcttcacggcatccttgcagccacctctgctgtcactgctcgaagcagcagtctctctggaagcatctgtgtcatggccatcgcccggcggtcagtgggcttc

SEQ ID NO: 147910 - DNA, 120 bp, Artificial Sequence
  ENSG00000105325_20 (sequence is synthesized)
agatgggcctgtgcatcctggccaagcgtcaccctcacactggaggaggatgtctgctctggacttatcaccccaggagaactgaacccggacctgctcactgccctggctggagaggag

SEQ ID NO: 147911 - DNA, 120 bp, Artificial Sequence
  ENSG00000105325_21 (sequence is synthesized)
cagcgtcctccttccctgcgcaagacttgcgtcccccatgcctgctgggtggctgggtcctgtggaggccagcagcggtgtggcccccgcccccaggctgcctgtgtcttcacctgtcct

SEQ ID NO: 147912 - DNA, 120 bp, Artificial Sequence
  ENSG00000105325_22 (sequence is synthesized)
gtccaccagcgccaacagccgtggggaagccaaggagacccaaggggtccaggaggtgggcgccctccatccttcgagaagcttcccaggctcctctgcttctctgtctcatgctcccag

SEQ ID NO: 147913 - DNA, 120 bp, Artificial Sequence
  ENSG00000105325_23 (sequence is synthesized)
gctgcacagcaggcagggagggaggcaaggcaggggagtggggcctgagctgagcactgccccctcacccccccaccaccccttcccatttcatcggtggggacgtggagagggtggggc

SEQ ID NO: 147914 - DNA, 120 bp, Artificial Sequence
  ENSG00000105325_24 (sequence is synthesized)
gggctggggttggagggtcccacccaccaccctgctgtgcttgggaacccccactccccactccccacatcccaacatcctggtgtctgtccccagtggggttggcgtgcatgtgtacat

SEQ ID NO: 147915 - DNA, 120 bp, Artificial Sequence
  ENSG00000105325_25 (sequence is synthesized)
atgtatttgtgacttttctttggatttgttttgtgtttttgttgactagtcctggaaatgtttgaggctagacggggaggggccaggacccacccactgctcctgggggatgaggtcctg

SEQ ID NO: 147916 - DNA, 120 bp, Artificial Sequence
  ENSG00000105325_26 (sequence is synthesized)
gttttaaagccccgtcatttcaagcgggtcgatcttccacattcactggagagactctccccacctctgtctgggtggggcgcggacccctcactgtgcgcctgtgcagggggtgctggt

SEQ ID NO: 147917 - DNA, 120 bp, Artificial Sequence
  ENSG00000105325_27 (sequence is synthesized)
gcacgtggcagtgtggatttccagtggtcacggtcttactgtttcaaggtttttaaataagaaaaccaaccctgccttcgcccatgcccgcccctgcccgcagttgccaaagagccgcct

SEQ ID NO: 147918 - DNA, 120 bp, Artificial Sequence
  ENSG00000105325_28 (sequence is synthesized)
tgtcgctgtgggcgtcagggcttggctggctcagtgcacaacccacagtggccttcagaggctcctcctgggactgggaaccgccgcagggccaggcggacggcgtgaggtttgtgttgg

SEQ ID NO: 147919 - DNA, 120 bp, Artificial Sequence
  ENSG00000105325_29 (sequence is synthesized)
ggctggttctgcccatgctagggggtgggggagctcccaggacagaccagccttgtttctcatgtaatgcagtgacgctgtcattaaacacgtggattcatgtgtggccgggactggctg

SEQ ID NO: 147920 - DNA, 120 bp, Artificial Sequence
  ENSG00000105325_30 (sequence is synthesized)
gctctaggtccccggctcgggtggggtcacacggtcctgccctagagtccccatctggccctggagctgcagaagcagcttctgaggggcttcccaggcctgcatttcacagatggggag

SEQ ID NO: 147921 - DNA, 120 bp, Artificial Sequence
  ENSG00000105325_31 (sequence is synthesized)
ctcagccctcgaaggccgcagagacgcctcccaggcccgtctgccagggcgccggccacaatcctgcagggccaaggactggactccaggcaagtccctgcgctccagctggacggccct

SEQ ID NO: 147922 - DNA, 120 bp, Artificial Sequence
  ENSG00000105325_32 (sequence is synthesized)
gttccagggaggaggtgctcggttgacaccatcagggagggagggtgggcactgctgggctgagttcacccccagggctggccagatggggccaggagggacagagcaaggggggtgaag

SEQ ID NO: 147923 - DNA, 120 bp, Artificial Sequence
  ENSG00000105325_33 (sequence is synthesized)
gccgtggtgggagggtcccatgatgatgggccagggctcgtgtagaaatgggggaattggttccccatggcccaggacagctgagaggaggtggaggggccccaggggagtgtacgtcag

SEQ ID NO: 147924 - DNA, 120 bp, Artificial Sequence
  ENSG00000105325_34 (sequence is synthesized)
gctttgcggggcacgggggccactcagcagcgctggggcaggtgcctctgctgtcagctccacccgacaggcagacgaaggccagtggggccatcgcttcctggggcgaccctggcagtg

SEQ ID NO: 147925 - DNA, 120 bp, Artificial Sequence
  ENSG00000105325_35 (sequence is synthesized)
gttgggagacgcccagatggagggggaggctgaccaagggccccgcagggcgggctgcaacttttctgttgatcctggaatgtagctggtgcagtgagagggaaagagaattgaaaaact

SEQ ID NO: 147926 - DNA, 120 bp, Artificial Sequence
  ENSG00000105325_36 (sequence is synthesized)
caggctgccataggttctgcgatgagaggtgcaggaggcaggagcctggcccagggggtgctggtgcctccccggggtctgggcggagagaacaggaggaatggctgggaagtggctgag

SEQ ID NO: 147927 - DNA, 120 bp, Artificial Sequence
  ENSG00000105325_37 (sequence is synthesized)
ggagccaggaggccggggggccgggggctgcaggggaggctgtgggggtcctggcagccaggaggccccaggtggttttgaggctcgctcttgcgcggtgcctgagaagagggtgaagga

SEQ ID NO: 147928 - DNA, 120 bp, Artificial Sequence
  ENSG00000105325_38 (sequence is synthesized)
gctggggcaggccccatcctgggcattggagatgatgaaaccgagcagacctggcccatgtggagctggcatgggggacacagcccagagacagagaagcttatgaggaagtgaggaggt

SEQ ID NO: 147929 - DNA, 120 bp, Artificial Sequence
  ENSG00000105325_39 (sequence is synthesized)
ggcgtcacaagggtggggagggggccttggggaagggcggccttggatcagaggctcaccacaagcctggcatttcagccagggctggagaaggcagggacgcctgggtgagaggcaaag

SEQ ID NO: 147930 - DNA, 120 bp, Artificial Sequence
  ENSG00000105325_40 (sequence is synthesized)
ggcacagccatgcaaaggccctggggcaggacggcacctggtatgcgggaggaacagagtgaggagaggagggcagggcgtgcagggccttgtgggcctcagggaggacttgggcaccta

SEQ ID NO: 147931 - DNA, 120 bp, Artificial Sequence
  ENSG00000105325_41 (sequence is synthesized)
cgccgagggagtggagctcctgggtgcgtgtccagatgggaaaggcagggtcgtatctgtggggacctgacaagggcaggggaagcggagaccagggtgcaggctccgcccccacccaag

SEQ ID NO: 147932 - DNA, 120 bp, Artificial Sequence
  ENSG00000105325_42 (sequence is synthesized)
gccgggcccagccagaggaggggcagggcagggcaggaggtttctggatgtttgttgggtttggtttggttttgttttgttttgtttattgtggtaaaatacaaaatctaccgtcttaca

SEQ ID NO: 147933 - DNA, 120 bp, Artificial Sequence
  ENSG00000105325_43 (sequence is synthesized)
cgggcctgcgggagctgcggaggccggaggcgggcgctgtgcggtgccaggagaggcggggtcggcgggagccagcgagccacgggagcgagccagagtccctgctgccctgcaaggtgg

SEQ ID NO: 147934 - DNA, 120 bp, Artificial Sequence
  ENSG00000105325_44 (sequence is synthesized)
ctgccctgcaaggtggcctaggcacaggtcctggggtcaggaccctacgcccctggcagtccggatcgtctctgccctgcggcagccgcgtctacgtggtgagtcgcctgctggctgcat

SEQ ID NO: 147935 - DNA, 120 bp, Artificial Sequence
  ENSG00000105325_45 (sequence is synthesized)
ggggcttgtgaagccgccagtgctgggcgacctgcatggagccgacggtggtggctgatctaccccaaggagggcggagggctggcctccctctggtctcagatttgctggacttgaaca

SEQ ID NO: 147936 - DNA, 120 bp, Artificial Sequence
  ENSG00000105325_46 (sequence is synthesized)
agttcctcgccgcttggctctgggactcttggagtctgagcaggggctccctcacccctgctctgaagctcagtgttcgggtcctgcctggtttttggtgtgccaaggggtacaagctac

SEQ ID NO: 147937 - DNA, 120 bp, Artificial Sequence
  ENSG00000105325_47 (sequence is synthesized)
tgtctgggcaatgctgcctgtgaagccgatgtttccagctgtcctccccaaccatggccacagctgacgtcctctgtggctgcacgcaccacctctgcacagcctggactgagcactgca

SEQ ID NO: 147938 - DNA, 120 bp, Artificial Sequence
  ENSG00000105325_48 (sequence is synthesized)
cttccgacggagactcccccaggagcccctgcccccagggtggggttttcatgccacagtactgcctttgcaagtggtctctgctccgcggtttcctttctggtgcaacgtcctcagggc

SEQ ID NO: 147939 - DNA, 120 bp, Artificial Sequence
  ENSG00000105325_49 (sequence is synthesized)
gtgtccgcgctgtggcctgggtagagccttgctcctttcatggctgggtcgtgttctggcgtgtggagggccgcgctggttcgtccctcacctgttgatgcgctaaccttgccgcgggcc

SEQ ID NO: 147940 - DNA, 120 bp, Artificial Sequence
  ENSG00000105325_50 (sequence is synthesized)
ctgcccctccctcctggctccagagtctggggggcccagccacccgacaccttgctcccctctccttcagtcccccagcactgtcccgaggcacctagaggcccagagacatggggtgct

SEQ ID NO: 147941 - DNA, 120 bp, Artificial Sequence
  ENSG00000105325_51 (sequence is synthesized)
gctgtacctggtgagttcacgccaggcacttcaaggtgccccgggattctggacaaactgccatggccaccccagagcaccctgtcctgtgttcttagggaggatggtgtgcagatctaa

SEQ ID NO: 147942 - DNA, 120 bp, Artificial Sequence
  ENSG00000105325_52 (sequence is synthesized)
aaccccgtgggacccagcagcaggggccggcagggcatctggtgctggttgtgttgccagcgttggaatgggctctaccgaactccccagccctgcaggtgcaggccctgtcctcctgga

SEQ ID NO: 147943 - DNA, 120 bp, Artificial Sequence
  ENSG00000105325_53 (sequence is synthesized)
ggaccttagcttcttcatttgtttattttccccataaagaggggtgaagaggaaagccaaaaccaactcacagctgaccactcagatgaccctgtgaacgtcctacacagtaactgtatg

SEQ ID NO: 147944 - DNA, 120 bp, Artificial Sequence
  ENSG00000105327_0 (sequence is synthesized)
gcgcctggcggcggcggcggcggcaccagcgatcccagcagcggccacgacgcggacgcgcctgcggcccggggagcagcagcagccacagccacagcagccgccactgcagttagagcg

SEQ ID NO: 147945 - DNA, 120 bp, Artificial Sequence
  ENSG00000105327_1 (sequence is synthesized)
gcagccgccactgcagttagagcggcagcagcagcgacagccacagcagcagccgccgcggagagcggcgctcggcgggcgcgccctcctgaaggaagccgcccgccccccaccgccgcc

SEQ ID NO: 147946 - DNA, 80 bp, Artificial Sequence
  ENSG00000105327_2 (sequence is synthesized)
ccctccggcgtgttcatgcccccggggccccagggagcgccatggcccgcgcacgccaggagggcagctccccggagccc

SEQ ID NO: 147947 - DNA, 80 bp, Artificial Sequence
  ENSG00000105327_3 (sequence is synthesized)
cttcccgctcggccgcctggtgccctcggcagtgtcctgcggcctctgcgagcccggcctggctgccgcccccgccgccc

SEQ ID NO: 147948 - DNA, 80 bp, Artificial Sequence
  ENSG00000105327_4 (sequence is synthesized)
tccccgcagccggccccgaggcccgcgcccggacggtcctcagccctcgctctcgctggcggagcagcacctggagtcgc

SEQ ID NO: 147949 - DNA, 120 bp, Artificial Sequence
  ENSG00000105327_5 (sequence is synthesized)
gggggctctggcgggcggtcccacccaggcggccccgggagtccgcggggaggaggaacagtgggcccgggagatcggggcccagctgcggcggatggcggacgacctcaacgcacagta

SEQ ID NO: 147950 - DNA, 120 bp, Artificial Sequence
  ENSG00000105327_6 (sequence is synthesized)
acctcaacgcacagtacgagcggcggagacaagaggagcagcagcggcaccgcccctcaccctggagggtcctgtacaatctcatcatgggactcctgcccttacccaggggccacagag

SEQ ID NO: 147951 - DNA, 120 bp, Artificial Sequence
  ENSG00000105327_7 (sequence is synthesized)
cggtggacgtcagggactcggggggcaggcccctcccacctcctgacaccctggccagcgcgggggactttctctgcaccatgtagcatactggactcccagccctgcctgtcccggggg

SEQ ID NO: 147952 - DNA, 120 bp, Artificial Sequence
  ENSG00000105327_8 (sequence is synthesized)
cgggccggggcagccactccagccccagcccagcctggggtgcactgacggagatgcggactcctgggtccctggccaagaagccaggagagggacggctgatggactcagcatcggaag

SEQ ID NO: 147953 - DNA, 120 bp, Artificial Sequence
  ENSG00000105327_9 (sequence is synthesized)
gtggcggtgaccgagggggtggggactgagccgcccgcctctgccgcccaccaccatctcaggaaaggctgttgtgctggtgcccgttccagctgcaggggtgacactgggagggggggg

SEQ ID NO: 147954 - DNA, 120 bp, Artificial Sequence
  ENSG00000105327_10 (sequence is synthesized)
ctctcctctcggtgctccttcactctgggcctggcctcaggcccctggtgcttccccccctcctcctgggagggggcccgtgaagagcaaatgagccaaacgtgaccactagcctcctgg

SEQ ID NO: 147955 - DNA, 120 bp, Artificial Sequence
  ENSG00000105327_11 (sequence is synthesized)
agccagagagtggggctcgtttgccggttgctccagcccggcgcccagccatcttccctgagccagccggcgggtggtgggcatgcctgcctcaccttcatcagggggtggccaggaggg

SEQ ID NO: 147956 - DNA, 120 bp, Artificial Sequence
  ENSG00000105327_12 (sequence is synthesized)
gcccagactgtgaatcctgtgctctgcccgtgaccgccccccgccccatcaatcccattgcataggtttagagagagcacgtgtgaccactggcattcatttggggggtgggagattttg

SEQ ID NO: 147957 - DNA, 120 bp, Artificial Sequence
  ENSG00000105327_13 (sequence is synthesized)
gctgaagccgccccagccttagtccccagggccaagcgctggggggaagacggggagtcagggagggggggaaatctcggaagagggaggagtctgggagtggggagggatggcccagcc

SEQ ID NO: 147958 - DNA, 120 bp, Artificial Sequence
  ENSG00000105327_14 (sequence is synthesized)
tgtaagatactgtatatgcgctgctgtagataccggaatgaattttctgtacatgtttggttaattttttttgtacatgatttttgtatgtttccttttcaataaaatcagattggaaca

SEQ ID NO: 147959 - DNA, 120 bp, Artificial Sequence
  ENSG00000105327_15 (sequence is synthesized)
gaggcgattgcgattgggtgagacccagtaaggatggaaagtgtagaggagacaggaatccacggctttggaaaaaggaaggacaaaactcaccaaaccagagcagggcaggaagtaaca

SEQ ID NO: 147960 - DNA, 120 bp, Artificial Sequence
  ENSG00000105327_16 (sequence is synthesized)
atgagaaactgaaaaagaaacggaatggaaagctatgagacaggatgaaatttggcatggggtctgcccaggcatgtccatgccaggtgcccagggctgcttccacgacgtgggtcccct

SEQ ID NO: 147961 - DNA, 120 bp, Artificial Sequence
  ENSG00000105327_17 (sequence is synthesized)
cactgcgccgggcctctgtactctttttagtattgcctttaatttttaccagtcgggagcctttcctaggacctagcctcctgcctgcccacttcctaggatgttggagctgagagggtc

SEQ ID NO: 147962 - DNA, 120 bp, Artificial Sequence
  ENSG00000105327_18 (sequence is synthesized)
ctagagaccaccttgttttcatcctgccactggagagggggcaggggtttcactcggcgttgcctagaggtgcttctgttgaagcctctgcaatggggggggctcttcccagttctcctc

SEQ ID NO: 147963 - DNA, 120 bp, Artificial Sequence
  ENSG00000105327_19 (sequence is synthesized)
cttccacagattgttctagaactgccaagactgtgggcaccctgctcctttctcctcatcttgccagccctgtagggaggggcaggataggttgcagtccatccttcagccccttggggg

SEQ ID NO: 147964 - DNA, 120 bp, Artificial Sequence
  ENSG00000105327_20 (sequence is synthesized)
atgtctttctcaaatgtacaacagagacggggcagtcacagctaatgtgccacgcactcgcttggtgcccagctctctgctgaaggcattccgtgtttgtcctctgcctccaggtctcat

SEQ ID NO: 147965 - DNA, 120 bp, Artificial Sequence
  ENSG00000105327_21 (sequence is synthesized)
gtcctggatgaggatgtgacctccgagacatggacattagcccaggcggggggaggagctggaatagggtgggcgagactgtcgcctcgctgcccctggagctgaccatccccactccca

SEQ ID NO: 147966 - DNA, 120 bp, Artificial Sequence
  ENSG00000105327_22 (sequence is synthesized)
cgagagggcaggagacctgaggcttgtgatctgggtggggtcagtcactgtatccctgtgtgaccttgggatactccctaagggcgggcctcagtttccctgcctgtcacatggaaaagg

SEQ ID NO: 147967 - DNA, 120 bp, Artificial Sequence
  ENSG00000105327_23 (sequence is synthesized)
caaaatgtggcccctttggaaaatagaggtcgttaagcctgaccacccccggggtcacctctctggccgtctaccttccacactgacaagggccgtggggacgtagctggccagacaggt

SEQ ID NO: 147968 - DNA, 120 bp, Artificial Sequence
  ENSG00000105327_24 (sequence is synthesized)
gaccccagagcggcgtccccaggtacttcttgctttctggtgcctgtggaggagaagctgagaaattgactcactagcgatgggatcactagaaatgaggcggggagcagtggctgggaa

SEQ ID NO: 147969 - DNA, 80 bp, Artificial Sequence
  ENSG00000105329_0 (sequence is synthesized)
gccgccgccgcccttcgcgccctgggccatctccctcccacctccctccgcggagcagccagacagcgagggccccggcc

SEQ ID NO: 147970 - DNA, 120 bp, Artificial Sequence
  ENSG00000105329_1 (sequence is synthesized)
gcggggccggcctcggcccggagcggaggaaggagtcgccgaggagcagcctgaggccccagagtctgagacgagccgccgccgcccccgccactgcggggaggagggggaggaggagcg

SEQ ID NO: 147971 - DNA, 120 bp, Artificial Sequence
  ENSG00000105329_2 (sequence is synthesized)
ggaggaggagcgggaggagggacgagctggtcgggagaagaggaaaaaaacttttgagacttttccgttgccgctgggagccggaggcgcggggacctcttggcgcgacgctgccccgcg

SEQ ID NO: 147972 - DNA, 120 bp, Artificial Sequence
  ENSG00000105329_3 (sequence is synthesized)
aggaggcaggacttggggaccccagaccgcctccctttgccgccggggacgcttgctccctccctgccccctacacggcgtccctcaggcgcccccattccggaccagccctcgggagtc

SEQ ID NO: 147973 - DNA, 120 bp, Artificial Sequence
  ENSG00000105329_4 (sequence is synthesized)
gccgacccggcctcccgcaaagacttttccccagacctcgggcgcaccccctgcacgccgccttcatccccggcctgtctcctgagcccccgcgcatcctagaccctttctcctccagga

SEQ ID NO: 147974 - DNA, 120 bp, Artificial Sequence
  ENSG00000105329_5 (sequence is synthesized)
gacggatctctctccgacctgccacagatcccctattcaagaccacccaccttctggtaccagatcgcgcccatctaggttatttccgtgggatactgagacacccccggtccaagcctc

SEQ ID NO: 147975 - DNA, 120 bp, Artificial Sequence
  ENSG00000105329_6 (sequence is synthesized)
ccctccaccactgcgcccttctccctgaggacctcagctttccctcgaggccctcctaccttttgccgggagacccccagcccctgcaggggcggggcctccccaccacaccagccctgt

SEQ ID NO: 147976 - DNA, 120 bp, Artificial Sequence
  ENSG00000105329_7 (sequence is synthesized)
ctgttcgcgctctcggcagtgccggggggcgccgcctcccccatgccgccctccgggctgcggctgctgccgctgctgctaccgctgctgtggctactggtgctgacgcctggccggccg

SEQ ID NO: 147977 - DNA, 120 bp, Artificial Sequence
  ENSG00000105329_8 (sequence is synthesized)
cgggactatccacctgcaagactatcgacatggagctggtgaagcggaagcgcatcgaggccatccgcggccagatcctgtccaagctgcggctcgccagccccccgagccagggggagg

SEQ ID NO: 147978 - DNA, 120 bp, Artificial Sequence
  ENSG00000105329_9 (sequence is synthesized)
tgccgcccggcccgctgcccgaggccgtgctcgccctgtacaacagcacccgcgaccgggtggccggggagagtgcagaaccggagcccgagcctgaggccgactactacgccaaggagg

SEQ ID NO: 147979 - DNA, 120 bp, Artificial Sequence
  ENSG00000105329_10 (sequence is synthesized)
tcacccgcgtgctaatggtggaaacccacaacgaaatctatgacaagttcaagcagagtacacacagcatatatatgttcttcaacacatcagagctccgagaagcggtacctgaacccg

SEQ ID NO: 147980 - DNA, 120 bp, Artificial Sequence
  ENSG00000105329_11 (sequence is synthesized)
ctgcgtctgctgaggctcaagttaaaagtggagcagcacgtggagctgtaccagaaatacagcaacaattcctggcgatacctcagcaaccggctgctggcacccagcgactcgccagag

SEQ ID NO: 147981 - DNA, 120 bp, Artificial Sequence
  ENSG00000105329_12 (sequence is synthesized)
tggttatcttttgatgtcaccggagttgtgcggcagtggttgagccgtggaggggaaattgagggctttcgccttagcgcccactgctcctgtgacagcagggataacacactgcaagtg

SEQ ID NO: 147982 - DNA, 120 bp, Artificial Sequence
  ENSG00000105329_13 (sequence is synthesized)
gacatcaacgggttcactaccggccgccgaggtgacctggccaccattcatggcatgaaccggcctttcctgcttctcatggccaccccgctggagagggcccagcatctgcaaagctcc

SEQ ID NO: 147983 - DNA, 120 bp, Artificial Sequence
  ENSG00000105329_14 (sequence is synthesized)
cggcaccgccgagccctggacaccaactattgcttcagctccacggagaagaactgctgcgtgcggcagctgtacattgacttccgcaaggacctcggctggaagtggatccacgagccc

SEQ ID NO: 147984 - DNA, 120 bp, Artificial Sequence
  ENSG00000105329_15 (sequence is synthesized)
aagggctaccatgccaacttctgcctcgggccctgcccctacatttggagcctggacacgcagtacagcaaggtcctggccctgtacaaccagcataacccgggcgcctcggcggcgccg

SEQ ID NO: 147985 - DNA, 120 bp, Artificial Sequence
  ENSG00000105329_16 (sequence is synthesized)
tgctgcgtgccgcaggcgctggagccgctgcccatcgtgtactacgtgggccgcaagcccaaggtggagcagctgtccaacatgatcgtgcgctcctgcaagtgcagctgaggtcccgcc

SEQ ID NO: 147986 - DNA, 120 bp, Artificial Sequence
  ENSG00000105329_17 (sequence is synthesized)
ccgccccgccccgccccggcaggcccggccccaccccgccccgcccccgctgccttgcccatgggggctgtatttaaggacacccgtgccccaagcccacctggggccccattaaagatg

SEQ ID NO: 147987 - DNA, 120 bp, Artificial Sequence
  ENSG00000105329_18 (sequence is synthesized)
gagagaggactgcggatctctgtgtcattgggcgcctgcctggggtctccatccctgacgttcccccactcccactccctctctctccctctctgcctcctcctgcctgtctgcactatt

SEQ ID NO: 147988 - DNA, 120 bp, Artificial Sequence
  ENSG00000105329_19 (sequence is synthesized)
cctttgcccggcatcaaggcacaggggaccagtggggaacactactgtagttagatctatttattgagcaccttgggcactgttgaagtgccttacattaatgaactcattcagtcacca

SEQ ID NO: 147989 - DNA, 120 bp, Artificial Sequence
  ENSG00000105329_20 (sequence is synthesized)
tagcaacactctgagatgcagggactctgataacacccattttaaaggtgaggaaacaagcccagagaggttaagggaggagttcctgcccaccaggaacctgctttagtgggggatagt

SEQ ID NO: 147990 - DNA, 89 bp, Artificial Sequence
  ENSG00000105329_21 (sequence is synthesized)
tggctcacgcctgtaatcctagcacttttgggaggcagagatgggaggattacttgaatccaggcacctatctctacaaaacactttta

SEQ ID NO: 147991 - DNA, 120 bp, Artificial Sequence
  ENSG00000105329_22 (sequence is synthesized)
gggtaacatagtgagaccctatctctacaaaacacttttaaaaaatgtacacctgtggtcccagctactctggaggctaaggtgggaggatcacttgatcctgggaggtcaaggctgcag

SEQ ID NO: 147992 - DNA, 120 bp, Artificial Sequence
  ENSG00000105329_23 (sequence is synthesized)
catccaggaagtccccaacatctggcaacgtgaagttggctaggaggaaggaagtgccccaaagagaacaagaagaagaggaccctgcattgacgttcctctgggaagcactcatttcct

SEQ ID NO: 147993 - DNA, 120 bp, Artificial Sequence
  ENSG00000105329_24 (sequence is synthesized)
acctttcatttctaagaccgcatgatctgggacatccttcccttcctcgtcggttcgctttattgttcggtcttttaggtcctcgtcagtgggacaaattacaatagctttgcgctggaa

SEQ ID NO: 147994 - DNA, 120 bp, Artificial Sequence
  ENSG00000105329_25 (sequence is synthesized)
ttgtgacgtgtgtgcgtgtgtgtgttcccatctgccccacgccccacttatctatccctctgagagtgtgtgtgtatgtcccctatcccctgactcccacaccaaagcagggttcactac

SEQ ID NO: 147995 - DNA, 120 bp, Artificial Sequence
  ENSG00000105339_0 (sequence is synthesized)
ggcactctcggtaaaacccggatgcgctccttgagaaagaagagagagaagcccagaccagagcagtggaagggcctcccggggccccccagagcgccagagcctgaggatgtcgccgtc

SEQ ID NO: 147996 - DNA, 120 bp, Artificial Sequence
  ENSG00000105339_1 (sequence is synthesized)
ccgggcggcgtggacctcctcaccctgccgcagctgtgcttcccagggggtgtgtgcgtggccactgaacctaaggaggattgcgtccacttcctggtgctgaccgatgtctgcgggaat

SEQ ID NO: 147997 - DNA, 120 bp, Artificial Sequence
  ENSG00000105339_2 (sequence is synthesized)
aggacctatggcgtggtggcccagtactaccggcccctgcatgatgagtactgtttctacaatggcaaaacgcaccgggagtgtcctggctgcttcgtgcccttcgcggtgtgcgtggtc

SEQ ID NO: 147998 - DNA, 120 bp, Artificial Sequence
  ENSG00000105339_3 (sequence is synthesized)
tccaggtttccctattacaactccctcaaggactgcctttcctgtttattggctcttctgaagccctgtaaagattttgaagtggacagtcatataaaagatttcgctgcgaagctgtct

SEQ ID NO: 147999 - DNA, 120 bp, Artificial Sequence
  ENSG00000105339_4 (sequence is synthesized)
ttaatacccagcccgccacctggaccgctccatttggtatttaacatgaagtcgctccagattgtgttacctgcccgagcagaccccgaaagccccatcctggacctggaccttcacctg

SEQ ID NO: 148000 - DNA, 120 bp, Artificial Sequence
  ENSG00000105339_5 (sequence is synthesized)
cccttgctgtgcttcaggcctgagaaggtgctacagatcctgacatgcatcctgacggaacagcggatcgtcttcttctcctcggactgggctctgctgacgctggtcactgagtgcttc

SEQ ID NO: 148001 - DNA, 120 bp, Artificial Sequence
  ENSG00000105339_6 (sequence is synthesized)
atggcctacctgtatccgctgcagtggcagcaccccttcgtgcccatcctgtcggaccagatgctggatttcgtcatggcccccacgtccttcctgatgggctgccatctcgaccacttc

SEQ ID NO: 148002 - DNA, 120 bp, Artificial Sequence
  ENSG00000105339_7 (sequence is synthesized)
gaagaagtcagcaaggaagccgacggtttagttctgataaatattgatcatgggagcatcacctactccaagtccacggacgataacgtggacattcctgatgtccccctcctggcagcc

SEQ ID NO: 148003 - DNA, 120 bp, Artificial Sequence
  ENSG00000105339_8 (sequence is synthesized)
cagacgtttattcagagggatgtaaagaatcatttaaactatgaacacagagtctttaatagtgaagaatttctcaaaaccagggctccaggggaccatcagttttataagcaggtctta

SEQ ID NO: 148004 - DNA, 120 bp, Artificial Sequence
  ENSG00000105339_9 (sequence is synthesized)
gacacctacatgttccattcttttcttaaagcccggctcaataggaggatggacgcctttgctcagatggacctcgacacccagtcggaggaggacagaataaatggaatgcttctaagt

SEQ ID NO: 148005 - DNA, 120 bp, Artificial Sequence
  ENSG00000105339_10 (sequence is synthesized)
ccaaggagaccgaccgttgagaaaagagcctcccggaagtcctcgcacctgcatgtcacccacaggcgcatggtggtcagcatgcccaacctgcaggacattgccatgcctgagctggca

SEQ ID NO: 148006 - DNA, 120 bp, Artificial Sequence
  ENSG00000105339_11 (sequence is synthesized)
cccaggaactcctcgctccggctgacggacaccgcaggctgtaggggcagcagcgcagttctgaatgtcacgccgaagtccccgtatacattcaagattcccgaaatccactttccgctg

SEQ ID NO: 148007 - DNA, 120 bp, Artificial Sequence
  ENSG00000105339_12 (sequence is synthesized)
gagagcaagtgcgtgcaggcataccatgcccactttgtctccatgctgagcgaggccatgtgctttctggcccccgataactctctgctcctggcccgctatttgtacctccgagggctc

SEQ ID NO: 148008 - DNA, 120 bp, Artificial Sequence
  ENSG00000105339_13 (sequence is synthesized)
gtttatctgatgcagggacagctgctgaacgccctcttggacttccagaatctgtataaaacagacatacggatctttcccactgatttggtgaagaggacggtggaatccatgtctgcc

SEQ ID NO: 148009 - DNA, 120 bp, Artificial Sequence
  ENSG00000105339_14 (sequence is synthesized)
cctgagtgggagggggctgagcaggcgccggagctgatgaggctcatcagcgagatcctggacaagccgcacgaggcctcgaagctggacgaccacgtgaagaagttcaagctgcccaag

SEQ ID NO: 148010 - DNA, 120 bp, Artificial Sequence
  ENSG00000105339_15 (sequence is synthesized)
aagcacatgcagctgggcgacttcatgaagcgggtccaggagtcagggatcgtgaaggacgccagcatcatacaccggctgttcgaggccttgactgtaggacaggagaaacaaatcgac

SEQ ID NO: 148011 - DNA, 120 bp, Artificial Sequence
  ENSG00000105339_16 (sequence is synthesized)
ccagaaacattcaaagatttctacaactgctggaaggagacggaagcagaagcccaggaggtcagtctgccgtggctggtgatggaacacctggataaaaacgagtgtgtgtgtaagttg

SEQ ID NO: 148012 - DNA, 120 bp, Artificial Sequence
  ENSG00000105339_17 (sequence is synthesized)
tccagctccgtcaagacaaacctaggcgttggcaagatcgccatgacccagaagcgcctgttcctcctaaccgaaggaaggccaggctacttggagatttccaccttcagaaatatagag

SEQ ID NO: 148013 - DNA, 120 bp, Artificial Sequence
  ENSG00000105339_18 (sequence is synthesized)
gaggtcaggagaaccactactacatttctacttcggagaatacccactttaaaaatcagagtggcgtccaagaaagaagtcttcgaagccaacctgaaaaccgagtgtgacctttggcac

SEQ ID NO: 148014 - DNA, 120 bp, Artificial Sequence
  ENSG00000105339_19 (sequence is synthesized)
tacgtccagcaggcgctgaccaacgtcttgctgatggacgccgtcgtgggcacactgcagtcaccaggcgccatctacgctgcctccaagttatcctactttgataagatgagtaacgaa

SEQ ID NO: 148015 - DNA, 120 bp, Artificial Sequence
  ENSG00000105339_20 (sequence is synthesized)
atgcccatgacgcttccggagacaaccctggaaacactgaagcataaaatcaacccctcggcgggggaggcgttcccacaagcggtggacgtgctgctctacactccagggcatcttgac

SEQ ID NO: 148016 - DNA, 120 bp, Artificial Sequence
  ENSG00000105339_21 (sequence is synthesized)
ccagccgaaaaagttgaagatgctcaccccaagttatggtgtgctctgagcgaaggcaaggtgaccgtgttcaatgcttcttcatggaccatccaccagcactcctttaaagtgggcact

SEQ ID NO: 148017 - DNA, 120 bp, Artificial Sequence
  ENSG00000105339_22 (sequence is synthesized)
gcaaaagtgaactgcatggtgatggccgaccagaaccaggtgtgggttggctcggaagactccgtcatctacatcatcaacgtccacagcatgtcctgcaacaagcagctcacagcccac

SEQ ID NO: 148018 - DNA, 120 bp, Artificial Sequence
  ENSG00000105339_23 (sequence is synthesized)
tgctccagtgtcacggatttgattgtgcaggacggacaggaggcacccagcaacgtgtactcgtgcagcatggacggcatggtgctggtgtggaatgtgagcacactgcaggtgaccagc

SEQ ID NO: 148019 - DNA, 120 bp, Artificial Sequence
  ENSG00000105339_24 (sequence is synthesized)
cgcttccagctgccgcgaggtggcctgacgtccatcagactgcacggcggccgcctgtggtgctgcacaggtaacagcatcatggtcatgaaaatgaatggatccctccatcaagaattg

SEQ ID NO: 148020 - DNA, 120 bp, Artificial Sequence
  ENSG00000105339_25 (sequence is synthesized)
aagattgaggagaacttcaaagacaccagtacctccttcctggccttccagctccttcctgaggaggagcagctgtgggcggcctgtgcaggacgcagcgaggtttacatctggagcctg

SEQ ID NO: 148021 - DNA, 120 bp, Artificial Sequence
  ENSG00000105339_26 (sequence is synthesized)
aaggacctggcccagcccccgcagagggtgcccctcgaggactgctctgagatcaactgcatgatccgggtgaagaagcaggtctgggtgggcagccgagggctggggcagggaacaccc

SEQ ID NO: 148022 - DNA, 120 bp, Artificial Sequence
  ENSG00000105339_27 (sequence is synthesized)
aaggggaaaatctacgtgattgacgccgagaggaagaccgtggagaaggagctggtggcgcacatggacaccgtgaggacgctgtgctcggctgaggacagatacgtgctgagtgggtcg

SEQ ID NO: 148023 - DNA, 120 bp, Artificial Sequence
  ENSG00000105339_28 (sequence is synthesized)
ggcagggaggaggggaaagtcgccatttggaaaggcgaataaacgtggctgagtctgccaagtggaactgtgccctatgtgtggggactggctgccccctagagcctgccaggagcagaa

SEQ ID NO: 148024 - DNA, 120 bp, Artificial Sequence
  ENSG00000105339_29 (sequence is synthesized)
gcctggaggggtggcagggcagagcagcccaggctcagcatggagcccacttaccgtgtggccagccgcgagacccatggccacgcaccttctctcaggccttcgggccccctggttaaa

SEQ ID NO: 148025 - DNA, 120 bp, Artificial Sequence
  ENSG00000105339_30 (sequence is synthesized)
ctgcaccaagggtgtttcctgttggggtgtgtctcaggcaggcagctgcgtcttgttggtgataacctctgctgggaggttactttgttgcctagaaagttctggaatccacaaccaggg

SEQ ID NO: 148026 - DNA, 120 bp, Artificial Sequence
  ENSG00000105339_31 (sequence is synthesized)
gctggcactggagccagcagcttggccgagtcacaggtgacccgtggccctcacgtctctggttttacctttccttacttcattcattcactcacccagtccttacgaatcaccgaggaa

SEQ ID NO: 148027 - DNA, 120 bp, Artificial Sequence
  ENSG00000105339_32 (sequence is synthesized)
cactgggctgagcacatgacagggagcctggagccccggggcctccagcgaggcctgagaagggtggttcgggtaaccactgtgggctctctcccatcacagaaggtggacagggcctac

SEQ ID NO: 148028 - DNA, 120 bp, Artificial Sequence
  ENSG00000105339_33 (sequence is synthesized)
ccaggtggaggggaccaccctgcgatcaggtgtttgcgacaggggttgggccagctgaggcaagctgtcttttttcccttttctttttaatagatgcaacatttttataataatcctaga

SEQ ID NO: 148029 - DNA, 120 bp, Artificial Sequence
  ENSG00000105339_34 (sequence is synthesized)
gaccttttttctaccaaagatcacagaccagaaaaagttccatctaaaatatcatgcccaggaaagcacatgggatcaaaagtaaaatagcatcatgtgtgatctcgtcttccagcgtgc

SEQ ID NO: 148030 - DNA, 120 bp, Artificial Sequence
  ENSG00000105339_35 (sequence is synthesized)
cgctcagttccccgaatccgtgtgcacacgtgtgatctcgtcttcagtgtgccgctcagttccctgaatccgtgtgcacactgcgtatgtgtacgcgcagcatgctatactgaactcaac

SEQ ID NO: 148031 - DNA, 120 bp, Artificial Sequence
  ENSG00000105339_36 (sequence is synthesized)
aagatcttggctgtacataaatatttgtaaaagagaccctttgcacctttttactgtaatgttgagacttcattacttaaatgttctacggaaggttctggtgtggttgttggagccgga

SEQ ID NO: 148032 - DNA, 120 bp, Artificial Sequence
  ENSG00000105339_37 (sequence is synthesized)
gggagcgtgtcagcacgtgctgagggcatggggcctgccccctgggcacccatccacaagctgggccacggagctccagcttctcaggacaaagccccggggctggcgcatcctgagggt

SEQ ID NO: 148033 - DNA, 120 bp, Artificial Sequence
  ENSG00000105339_38 (sequence is synthesized)
ctctgggggtgtttgccaggctcctgggatgggccgctttcagaagccctgcagtgcctccagatggaaaggcgggcccggcctccggttgggtctgcattttggagagtccacaccacg

SEQ ID NO: 148034 - DNA, 120 bp, Artificial Sequence
  ENSG00000105339_39 (sequence is synthesized)
ctcctgagcctgtgacagcgccgacttccttcctgtggcggtcgtcttttagttgctgccgtgacgactcagtcgtcctggactcaactgtggccatgatagcggattccctagacaggc

SEQ ID NO: 148035 - DNA, 120 bp, Artificial Sequence
  ENSG00000105339_40 (sequence is synthesized)
atcgctgttgacgctttggtatggaatcggaacagggcgtggcggagctggaccattagccacgtcttttgctgtttcagactcgggatctgaggatctgaggatctgaggtcacaggac

SEQ ID NO: 148036 - DNA, 120 bp, Artificial Sequence
  ENSG00000105339_41 (sequence is synthesized)
cagttctgcttgttcacatacagtcggtctcatcatttggagattccgtatttgcaaattcgaccacctgctaatatttacttgtaactcccaaaacagatactcgtggtattttcttgg

SEQ ID NO: 148037 - DNA, 120 bp, Artificial Sequence
  ENSG00000105339_42 (sequence is synthesized)
tgatccacagacatccacgtgcacagacgggggaaaaacttgagtcacctgatatggattttctgggccaacaagtgtcctctcctcggcctgattggtgccacagttttcacatttttt

SEQ ID NO: 148038 - DNA, 120 bp, Artificial Sequence
  ENSG00000105339_43 (sequence is synthesized)
gcttttcgttggtgattttgccatttaagaaagcctcaagcatggagctccctaagcacaaggaggcggtgacgtgtcttgcagagaaaatgcatgtgtgagatgagcttggttcaggcc

SEQ ID NO: 148039 - DNA, 120 bp, Artificial Sequence
  ENSG00000105339_44 (sequence is synthesized)
gcagtgacagtgctggcggccgtgggtttcgtgttaatgaatcaatcatacgtagtcaataaggtgtctgtgaacagagcacgcggagaacaaggttatgcactgatgggtggatgacaa

SEQ ID NO: 148040 - DNA, 120 bp, Artificial Sequence
  ENSG00000105339_45 (sequence is synthesized)
cgtcagggccagaggctcccaggaccctgagccggcgtgtcccctaggagcagtggttccatatccgctaattcagcacgtgcagtaaatgtatagaatatgacttcaccagtatcgaga

SEQ ID NO: 148041 - DNA, 120 bp, Artificial Sequence
  ENSG00000105339_46 (sequence is synthesized)
gcattctgagagtgtgggcagagagaattatgtggcctcatcctcccccaaggctgtgcttgcagcccgggcaccttcccactttctagctctggagaggttggattttgcttttgtaaa

SEQ ID NO: 148042 - DNA, 120 bp, Artificial Sequence
  ENSG00000105339_47 (sequence is synthesized)
cacatgaatccttatgataaaagtctgtcagtcaaaaatacatttataaattatttaatgccagtcctcatgtaacctcaggtatcttcagcttgtggagaataaatctggtttaataaa

SEQ ID NO: 148043 - DNA, 120 bp, Artificial Sequence
  ENSG00000105339_48 (sequence is synthesized)
ttttataaaatgatagcaggaggagagatcctgctcttgagtcctcacaacctgtgggtccaactgcagccaggccctgagtgcggtcgtggaggtgacgctggagggaggggagcgctt

SEQ ID NO: 148044 - DNA, 120 bp, Artificial Sequence
  ENSG00000105339_49 (sequence is synthesized)
aggctttttgcaaacagccgggctgtacttgcttctggtgaagcctgtgatgcagtctggatttcagtcagccatcacctttcttctcttcgccttcctttgtctgcattgggaggagtg

SEQ ID NO: 148045 - DNA, 120 bp, Artificial Sequence
  ENSG00000105339_50 (sequence is synthesized)
ggaaggaggagggcggtttctggcctggcctttcacctggcttttctgatttctgactcttaccttggtgtggattattccttctacctggaaggtttctgaaaaatgtttaggaaaact

SEQ ID NO: 148046 - DNA, 120 bp, Artificial Sequence
  ENSG00000105339_51 (sequence is synthesized)
attacaggcgtgagccaccgcgcccagtcggagaactacctttattattgttcttgcatcttaaaaaattccctaaggccttaaagccaagcgatggtcctgcacaggcaaggctggttt

SEQ ID NO: 148047 - DNA, 120 bp, Artificial Sequence
  ENSG00000105339_52 (sequence is synthesized)
agccaagcgatggtcctgcacaggcaaggctggtttctgcttgcttgggctgtggaatcgctgggctctcctccccagccaagggcacctgagcagctgttctgttggcaactgtcctct

SEQ ID NO: 148048 - DNA, 120 bp, Artificial Sequence
  ENSG00000105339_53 (sequence is synthesized)
atgccaagtaccagctgcagcccttctgcagaccgaatgccttcctgtccctcagtttgctcatctgtaaagtaggaataaggctgataccttctcagtgggtggtggagattgaatagt

SEQ ID NO: 148049 - DNA, 120 bp, Artificial Sequence
  ENSG00000105339_54 (sequence is synthesized)
ttgcatatggagcatgcttagaatggtaactgattctctgtcacagctgacttgcatctgggaggcaggaagtaagaatgtgggctgacattctcattagggacagtaggacgccttcgt

SEQ ID NO: 148050 - DNA, 120 bp, Artificial Sequence
  ENSG00000105339_55 (sequence is synthesized)
tcatccatgagatgtttactgagaaactgccatgtgccagccacggtgagctacagtagctcacattttctagtcacagtcggacctggttcatataaaacataacaagcttattttata

SEQ ID NO: 148051 - DNA, 120 bp, Artificial Sequence
  ENSG00000105339_56 (sequence is synthesized)
acaattaaaaaatcttcaaacagttttaacattatattctaaaggtagtcattttccctgtcgaggaaatctgaatttcatcctgattcctcttacgccttatagttgttttcccagatt

SEQ ID NO: 148052 - DNA, 120 bp, Artificial Sequence
  ENSG00000105339_57 (sequence is synthesized)
taaggggactgtaagaggcatgtcagatacacaaatgttttatgtgatcacctgctgagtggtcatagaagccagaaaggcagtcaagccacagccgcagcccatagtaaatgctcggcc

SEQ ID NO: 148053 - DNA, 120 bp, Artificial Sequence
  ENSG00000105339_58 (sequence is synthesized)
agtagatccccctcttgctgttggccttcagtttatgcttttttccacacctgcttttccagacttccttctagaattccaaagaaatgtaaataaatataaggaaagggagatggaagt

SEQ ID NO: 148054 - DNA, 120 bp, Artificial Sequence
  ENSG00000105339_59 (sequence is synthesized)
cccccgggacagtctccgaagtctcgagcaggttgcttataaaaagggagtcaaacatctttctgctcttcttgatccagaggtcctgtccattttcgtgcctccttttatcagtaaaga

SEQ ID NO: 148055 - DNA, 120 bp, Artificial Sequence
  ENSG00000105339_60 (sequence is synthesized)
gactgcgcggctgaggcgcccgagtgcggtactggcggcgggcggcgggcagccatggcggaggccgcgtcgccgcacttgtcgctgccctcggggctgctggagctctgcgcgctgctg

SEQ ID NO: 148056 - DNA, 120 bp, Artificial Sequence
  ENSG00000105339_61 (sequence is synthesized)
ctacagtaggccttcttctgtatctggctttattcagacagcaggatgtttatagtattcatcgctgacgttctgagtatcaatatcaatagctcgttccttcttgcagggtaatagtcc

SEQ ID NO: 148057 - DNA, 120 bp, Artificial Sequence
  ENSG00000105339_62 (sequence is synthesized)
attgtgtgcatatggaacatgctcatccttcccctgccccaagtgggcactgggttcactctgcttaactgtttgaaaaaccgtcagactgttttctgaagtggcggcagcagcttccac

SEQ ID NO: 148058 - DNA, 120 bp, Artificial Sequence
  ENSG00000105339_63 (sequence is synthesized)
gccacccgcagtctcaggcttcatttcttcacatcctcacccaaactggttctcacctgtttttactgacaccgtccccgcgggagtgaagtggcgtcttgtggtttggatctgtggctc

SEQ ID NO: 148059 - DNA, 120 bp, Artificial Sequence
  ENSG00000105339_64 (sequence is synthesized)
cctcatggctgatggtgctgagcactctgtcgtgtgcccggtgcccgctgacgcctccctgggagcagcgcctgtgcaggcccctgcccactgttccgctcactttcagggccggtagcg

SEQ ID NO: 148060 - DNA, 120 bp, Artificial Sequence
  ENSG00000105339_65 (sequence is synthesized)
acgtggttgggtgcaagccaacggttgtccttcttcccctcatctgttatttgttctgttcttcctttcttgccctcttttgtattgaatatttttatgttcaatttaatcttctttact

SEQ ID NO: 148061 - DNA, 120 bp, Artificial Sequence
  ENSG00000105339_66 (sequence is synthesized)
gtttttaagcattatatttttgttttatttttcagtggttgctctaagaattgcaatatgcaaccttaaccgatcaccctcctccttaactaactatgatactgcttcatggatagggta

SEQ ID NO: 148062 - DNA, 120 bp, Artificial Sequence
  ENSG00000105339_67 (sequence is synthesized)
agaagcttacaacagtatcaagtgtggtactcccaataatacattctttaagatttttgcttaagcagtcaatgatctttcaagaaagttaagaaaaattaagaaactgcccatatattt

SEQ ID NO: 148063 - DNA, 120 bp, Artificial Sequence
  ENSG00000105339_68 (sequence is synthesized)
acgttttctggtgagcctcatttcttcttaaagacccagggttctagcttgcattttttcccagtagacctcacctgtgcattcctcaggcgccaggtggcacgtggtgatcccccccat

SEQ ID NO: 148064 - DNA, 120 bp, Artificial Sequence
  ENSG00000105339_69 (sequence is synthesized)
caccacgctggaaagagcagtgaggccggctctggtgctggcgtcttatgttgccaatgacactgcctggccccatcctagctccttccttccacaggcacaggtaacagcatcatggtc

SEQ ID NO: 148065 - DNA, 120 bp, Artificial Sequence
  ENSG00000105339_70 (sequence is synthesized)
tgccctggccgcatccccatgctcccgagagccagccgcacgccctcgtgccctcctgccttcgcctctcagggttcccctcctaacaggcacgtgcagggttggtgccaacgggcccac

SEQ ID NO: 148066 - DNA, 120 bp, Artificial Sequence
  ENSG00000105339_71 (sequence is synthesized)
aggtcaccatgtgctggtttcatggtgtggtccaagcactccacagcgcattcccccaaactggatggcttcaaatgacagaacttaattttctcacagttctcgacgctggaggtccaa

SEQ ID NO: 148067 - DNA, 120 bp, Artificial Sequence
  ENSG00000105339_72 (sequence is synthesized)
aaccaaggtgtcggcagagccgcttccctcgggggctcggggggagcgtgcactccaggcccttctctcccccacccgctcatgtggccgccgtccttggcgtgccctggctgtggacgt

SEQ ID NO: 148068 - DNA, 120 bp, Artificial Sequence
  ENSG00000105339_73 (sequence is synthesized)
ccacacccgcaggccggagttgggtgttttgggcttccctgctctgagcgactcttcacagtcacaggatttggaattcggcaggggcagtactgctttccttccacagggttgagatga

SEQ ID NO: 148069 - DNA, 120 bp, Artificial Sequence
  ENSG00000105339_74 (sequence is synthesized)
tttttctagggattgttgtaccttaatttactttgggccaaattgatagctttgatgatatcaaatgacaattgcatagtaatgaagggaaccatgggccggtggtgtgtagaggaggca

SEQ ID NO: 148070 - DNA, 120 bp, Artificial Sequence
  ENSG00000105339_75 (sequence is synthesized)
tccacgctgctcaagggtggcacaagacaggaagacgccttagaaaatgggcaaagaccatgaacgcggaactcacagaaagggaacagttcaccaggttatgaagaggtgtgtagcccc

SEQ ID NO: 148071 - DNA, 120 bp, Artificial Sequence
  ENSG00000105339_76 (sequence is synthesized)
actaatcctcagagaaatgccggggacgatggcacccactacagtggcagtgctaggaggaacagatggggccacagcgggagggttgctgttattacaggaagttcccggtcacagggc

SEQ ID NO: 148072 - DNA, 120 bp, Artificial Sequence
  ENSG00000105339_77 (sequence is synthesized)
agagggggactgggtcctttctaagattccagtgccctgtggcttttagactagccatctgatgctatacccactggtttacatagcataaaccagcatagtcaaaccaaagcccgtggg

SEQ ID NO: 148073 - DNA, 120 bp, Artificial Sequence
  ENSG00000105339_78 (sequence is synthesized)
gtgatctcagctgagactggccacaaagcttgaaatgcctcctgcctagccccttctagaaaacactggctgagccctggtataaacaatcaatatttgtcttaagtaagagaagaaata

SEQ ID NO: 148074 - DNA, 120 bp, Artificial Sequence
  ENSG00000105339_79 (sequence is synthesized)
tatgacataaaatccaaattcatccgtgatctaaactcttcatgtcactttggaaaaaggcattttggaaggattgtcctgtgtgttgcaacaaggtctccggtgaactgatcttagtga

SEQ ID NO: 148075 - DNA, 120 bp, Artificial Sequence
  ENSG00000105339_80 (sequence is synthesized)
tgtgttcatccatattcgacagtaggatacaagctattccacagcctcactcggtttctgtaaacagggggtcttaactttcacctggagttttcaaattaaatgtaagcttgttccaaa

SEQ ID NO: 148076 - DNA, 120 bp, Artificial Sequence
  ENSG00000105339_81 (sequence is synthesized)
ataaaaataaaaaaaaataacagccacaaactagggagaacgaaaaacagacacttcccacaagagggcatggggatggccagttcaagccatcaggctcattagcaattagagaaatgc

SEQ ID NO: 148077 - DNA, 120 bp, Artificial Sequence
  ENSG00000105339_82 (sequence is synthesized)
aattaaaccacaatttaaaagccaaaagctccacacccttagaatggccgaaattaaaaagatggacggacgccagcaagtgttgggaaagacgcggagcccgctgcacatgagggtgtg

SEQ ID NO: 148078 - DNA, 120 bp, Artificial Sequence
  ENSG00000105339_83 (sequence is synthesized)
gggggcaccatggcccctgccgccgtctctccagctgccctccctccctgcctccctccctctgtgtccacctgctcctcttccagttccctctgcctggctgtttcctctagtgaatgc

SEQ ID NO: 148079 - DNA, 120 bp, Artificial Sequence
  ENSG00000105339_84 (sequence is synthesized)
tcactcagctggcaggtcctggcttagcaaagctcacaggcattcggctctgcatctgcctgcggctctgaccctgtctttgtggccctctcaccagccagctgccccccttgactctga

SEQ ID NO: 148080 - DNA, 120 bp, Artificial Sequence
  ENSG00000105339_85 (sequence is synthesized)
gctcccagagggcagggaagcctctgcctgggcacgtctttgtacgtacagcacctaacatgggcctggcgcttaggagggcccaggaggcacctgagtaagggcaccagtcacctgctg

SEQ ID NO: 148081 - DNA, 120 bp, Artificial Sequence
  ENSG00000105339_86 (sequence is synthesized)
gtctcttatggggatgctggtcgtactggattaaccagtgtgaccacatctgaactatctgcagactctacttccaaagaagctcacattctgaggttcagaggatatggatttgggggg

SEQ ID NO: 148082 - DNA, 120 bp, Artificial Sequence
  ENSG00000105339_87 (sequence is synthesized)
acactgttcaacccattacagtctgccctctggccccctaaatccacatctgttccacatgcaaaatacaccccctccatcactacatcccccgaagtcccagtccctccagtgtcagtt

SEQ ID NO: 148083 - DNA, 120 bp, Artificial Sequence
  ENSG00000105339_88 (sequence is synthesized)
ctgagccccaaatctccaagtgaagccaaagccctccgatgtgggtgagccgtgggcgggtcccacctggggcagaaccaacccctcttgcaccgtgaacctgcgcagctagaacaggct

SEQ ID NO: 148084 - DNA, 120 bp, Artificial Sequence
  ENSG00000105339_89 (sequence is synthesized)
tcatccgaaaagggagaaattggaaggaaagctggacttccaggccccgagcaagtcggagacacggcgggggtggggcggaattcgtttagtgttttcccccataacttaattggggta

SEQ ID NO: 148085 - DNA, 120 bp, Artificial Sequence
  ENSG00000105339_90 (sequence is synthesized)
taattgatgaataaaaattatatatatctaaggtatacaaggtgatatttcagtatacattgtgaaataatcacaagctaattaccatatctgtcacctcacacaggtggctgttgtttg

SEQ ID NO: 148086 - DNA, 120 bp, Artificial Sequence
  ENSG00000105339_91 (sequence is synthesized)
gtgagaacacttaagatgcaccccagcacttttccagcacgcagtgcagtcttcttccccagaggcccctcggccattaggttctaagcccgagaagggtcctgtgcacctgccaggcgg

SEQ ID NO: 148087 - DNA, 120 bp, Artificial Sequence
  ENSG00000105339_92 (sequence is synthesized)
ccctgaccctcaggcggcagaggccctgtccaggaaggacatagatttggaggcacacgcgtcaattctgggtagccgggcaaagccctggtgctcttgggaggggcttctttccctgct

SEQ ID NO: 148088 - DNA, 120 bp, Artificial Sequence
  ENSG00000105339_93 (sequence is synthesized)
tggccgaggagaaagcagttaacaacagttcccttttgtgtcatcatgctggagaatgagccacggcaaatcgctgaattggtgctgttcttgcttcttgcaaagcacagtcatttgaga

SEQ ID NO: 148089 - DNA, 120 bp, Artificial Sequence
  ENSG00000105339_94 (sequence is synthesized)
ccttctgccttgaccagagggacgagccccatggagagtgagcaggaaccttactgttcaaatcaatgactcgtaattcaaatcccagcactttagtggtttacttcttaaaatataact

SEQ ID NO: 148090 - DNA, 120 bp, Artificial Sequence
  ENSG00000105339_95 (sequence is synthesized)
catgcatgtttgttgactgtctgtcaccagcgcccaggaagtgacagaatgccaagcctgtacatggtccccttttattcactaactgatgatcttcattacttgaaggtaaacagcgtt

SEQ ID NO: 148091 - DNA, 120 bp, Artificial Sequence
  ENSG00000105339_96 (sequence is synthesized)
ttcactaatctctagtttcctcttctgtaaaatgtagatggttatttccaccttttgtttgctgaaatgaatgggtggtcgccagacacatgcccttggaagacaggaagaaaggaggtg

SEQ ID NO: 148092 - DNA, 120 bp, Artificial Sequence
  ENSG00000105339_97 (sequence is synthesized)
ttttctccgcctcctggtcgatgttatgtgtgtttattcagcaactgacctttcatagtgtgattggcaacagatatcctcctgctagacattaaagcaaacacatatttaacttgaaaa

SEQ ID NO: 148093 - DNA, 120 bp, Artificial Sequence
  ENSG00000105339_98 (sequence is synthesized)
caccgggggccaggggtggtagggggcagctctttgtgcctctccaggtgagccaagggaccagggggctggaggtggtgggggggcagctctctgttcctctcctggtgagccggggga

SEQ ID NO: 148094 - DNA, 120 bp, Artificial Sequence
  ENSG00000105339_99 (sequence is synthesized)
tcctctctgtgactggtaacatacggtaatggcatggtaggaaagggatgaagccacactgtcggaagtaaggttgatgttcaggattttcattttgtttagtttttcacaaaaaggcat

SEQ ID NO: 148095 - DNA, 120 bp, Artificial Sequence
  ENSG00000105339_100 (sequence is synthesized)
aaaggcatatattaggaaaaactcttttcctagctgagaatattaggaggctgctgtttgttccaatgagttttattgacattttaaagatgaccttggctgggtgtggtggctcacacc

SEQ ID NO: 148096 - DNA, 120 bp, Artificial Sequence
  ENSG00000105339_101 (sequence is synthesized)
cagcatattgggagactaagatgggaggactgcttgagccgaggggtttgagacaagcctagggaacatagcaataccctgtctctaaaaaacaatttaaaaactagttgggcatggtgg

SEQ ID NO: 148097 - DNA, 83 bp, Artificial Sequence
  ENSG00000105339_102 (sequence is synthesized)
gaggatggcttaagcctcacactccagcctaggttacagagcaggaccctgtcatcttgttttgtagaatctgtaactgtctc

SEQ ID NO: 148098 - DNA, 120 bp, Artificial Sequence
  ENSG00000105339_103 (sequence is synthesized)
ggaccctgtcatcttgttttgtagaatctgtaactgtctccctgctgatggtgagtagaaaggctgaggacgtaaagaacttttgaaaaatcagaaagacatcgtatagaacccagtggg

SEQ ID NO: 148099 - DNA, 120 bp, Artificial Sequence
  ENSG00000105339_104 (sequence is synthesized)
ctctcattatcaaaggatgcttttgtgatgttgggggctgtagcccaagttcagacatggtcagtcccagtgggcacttgtgcacggagccgtttcttttgagtctcataaagttacagt

SEQ ID NO: 148100 - DNA, 120 bp, Artificial Sequence
  ENSG00000105339_105 (sequence is synthesized)
agccattctgtgaatacagaatttgaactgaagtgtgacttcaaagtatttaacatgaagtcgctccagattgtgttacctgcccgagcagaccccgaaagccccatcctggacctggac

SEQ ID NO: 148101 - DNA, 120 bp, Artificial Sequence
  ENSG00000105339_106 (sequence is synthesized)
accaggacttccccttccaaaatatacctccctttgtgccacctgtcaggcactaccgcagacctggggccactctgctgtcacccagcagcttggtgactttgcttttggtgaaaggtc

SEQ ID NO: 148102 - DNA, 120 bp, Artificial Sequence
  ENSG00000105339_107 (sequence is synthesized)
ccatcagactgcacggcggccgcctgtggtgctgtaagtccggcccctgccatcagagcgggcaccctacctccctgctctgggaaaaggatgctgaacgagagcagaaagcctctttcc

SEQ ID NO: 148103 - DNA, 120 bp, Artificial Sequence
  ENSG00000105339_108 (sequence is synthesized)
tttgcttcacgcctttccagtctttattttaaactcgggttccctttctgtggtcgcagcaacctttactccacctgcactgctgctcctgggggctccccaggcctccctctgcctttc

SEQ ID NO: 148104 - DNA, 120 bp, Artificial Sequence
  ENSG00000105341_0 (sequence is synthesized)
agcaagatggcggctccctgggcgtccctgcgcctggtcgcccccatgtggaatgggcgtatcaggggcatccatcgcctgggtgcggcagtggccccagagggcaatcagaagaagaaa

SEQ ID NO: 148105 - DNA, 120 bp, Artificial Sequence
  ENSG00000105341_1 (sequence is synthesized)
aggacaatactccagttcctgaccaactatttctacgatgtggaggctctgagggattacttgctccaaagggagatgtacaaggtgcatgagaaaaatcgatcttacacctggctggag

SEQ ID NO: 148106 - DNA, 120 bp, Artificial Sequence
  ENSG00000105341_2 (sequence is synthesized)
aagcaacatggtccatacggcgcaggtgcctttttcatcctgaagcagggaggcgcagtcaagtttcgagacaaggagtggatcaggccagataagtatggccatttctctcaggagttc

SEQ ID NO: 148107 - DNA, 120 bp, Artificial Sequence
  ENSG00000105341_3 (sequence is synthesized)
tggaatttctgtgaagtgcctgtcgaagctgtggatgccggtgactgtgacatcaactacgagggcctggataacctcctccgcctgaaggagctccagtccttgtcgctgcagcgctgc

SEQ ID NO: 148108 - DNA, 120 bp, Artificial Sequence
  ENSG00000105341_4 (sequence is synthesized)
tgccacgtggacgactggtgtctcagccgcctctacccactggccgactcgttgcaggagctctcgctggccggttgcccccgcatctccgaacggggcctcgcctgcctccaccacctc

SEQ ID NO: 148109 - DNA, 120 bp, Artificial Sequence
  ENSG00000105341_5 (sequence is synthesized)
cagaacctccgcaggctggacatctcggacctccctgccgtgtccaaccctggcctcactcagatattggtggaggagatgctgcccaattgcgaggttgtgggagtcgactgggctgag

SEQ ID NO: 148110 - DNA, 120 bp, Artificial Sequence
  ENSG00000105341_6 (sequence is synthesized)
ggcctgaagtcagggccggaggagcagcctcgggacacagccagccctgtccctgcctagcctttagccctgtccccactcacgtggcttctcagcgggctgcatggaatgtctggtagc

SEQ ID NO: 148111 - DNA, 120 bp, Artificial Sequence
  ENSG00000105341_7 (sequence is synthesized)
tggcttccatttgtcttcactcaacgtcagggtgggggagtggtgctggccaatcacaggagagagcgtgagttcccagtatttattcctggctgcccttggctaaaggtcacagctcct

SEQ ID NO: 148112 - DNA, 120 bp, Artificial Sequence
  ENSG00000105341_8 (sequence is synthesized)
gtcaccctgtcaggcagccctttccatgcccctgttcaggcctggggaggtaaaggctcaggctgttagtagccgcagagagccacactcaccttgtcaggagactcttctcaaactgtc

SEQ ID NO: 148113 - DNA, 120 bp, Artificial Sequence
  ENSG00000105341_9 (sequence is synthesized)
cttatgtgagtgcactgccatttcttgcagggaccctgactgacacaggggctactactgacactttacagggatggttctcccccgtgcagggccgctgtgcccactgcaggacatgca

SEQ ID NO: 148114 - DNA, 120 bp, Artificial Sequence
  ENSG00000105341_10 (sequence is synthesized)
gcatccttcgccccactccactcactaaaggccagcgcaccccaggccccatagtattgctggttatggatttattgactttatgttccaaattcagctttttcagttggctgttttttg

SEQ ID NO: 148115 - DNA, 120 bp, Artificial Sequence
  ENSG00000105341_11 (sequence is synthesized)
aaaggggataagctttgtcagtagagggcaccaaacaggcattataggaggaaaggcgcctccttcgtggttcttgttggttgtgcttctgcctctggacgccgcagtgcatgtggcttc

SEQ ID NO: 148116 - DNA, 120 bp, Artificial Sequence
  ENSG00000105341_12 (sequence is synthesized)
cccagcacccagctcctgaagcaccaggcggtcagcagctgcccttggcaccctccagccctcagaagttgcgtaggagacacagcgcctccactgaggcacctctctgggaataacgtt

SEQ ID NO: 148117 - DNA, 120 bp, Artificial Sequence
  ENSG00000105341_13 (sequence is synthesized)
ccccagcaccccaaatggatttccagtcaattcagaagcattttaccagtgaagccctcattattccagttcactgttaaagccagtaattctctatattaaactttccctgttcaagtt

SEQ ID NO: 148118 - DNA, 120 bp, Artificial Sequence
  ENSG00000105341_14 (sequence is synthesized)
tatcgacgctgttgcagaacagcaggagctggagttgcatatttgcaattaacacagtgggcttcatgtgcctggacagctataaagattttattttaggaagctaaggttgaaatttgg

SEQ ID NO: 148119 - DNA, 120 bp, Artificial Sequence
  ENSG00000105341_15 (sequence is synthesized)
ctacgagggcctggataacctccgtgagtgcggtggggtggagatgggacaggcctctatgttttccctttggtgatgggctccagaaaggctcctggtgccatcccaccctctccccac

SEQ ID NO: 148120 - DNA, 120 bp, Artificial Sequence
  ENSG00000105341_16 (sequence is synthesized)
aaggagctaatggacaggcaagggtggggcctgtaggataagagagcttggaagggattgttcgaggatgtgggatttggtcttagaagaccgaaggatgaattccctgcgcctggtcgc

SEQ ID NO: 148121 - DNA, 120 bp, Artificial Sequence
  ENSG00000105341_17 (sequence is synthesized)
aggaagtggggaggggcaatgttaggcagttctcatatccccctgcatccatcacaaacctagagtatttatggtagatgagcagtcacagtgagtctctggaagaattaaatgactcct

SEQ ID NO: 148122 - DNA, 120 bp, Artificial Sequence
  ENSG00000105341_18 (sequence is synthesized)
cacaatggctcttcatgctgcgatctagctttcaactccaaactggtcttgagatctcacctcagtctctaaccttgacatctaacctcttcacccactctcttacctgaccctaatttt

SEQ ID NO: 148123 - DNA, 120 bp, Artificial Sequence
  ENSG00000105341_19 (sequence is synthesized)
taaaaatgacgtggtcagcttttcagccccctcattccctgtttttaggaggtagtgagtggaagctggaagaataagaaagcttggggagactgcaattgcagtcaggaaagaaagtcc

SEQ ID NO: 148124 - DNA, 120 bp, Artificial Sequence
  ENSG00000105341_20 (sequence is synthesized)
aagagagcttggaagggattgttcgaggatgtgggatttggtcttagaagaccgaaggatgaatgtttcgagacaaggagtggatcaggccagataagtatggccatttctctcaggagt

SEQ ID NO: 148125 - DNA, 120 bp, Artificial Sequence
  ENSG00000105341_21 (sequence is synthesized)
ctccctatacacacacacatgcacgcatgcacgcacgcacacacacacacgcacgcacacacactgtcctgtaaggttgaaatttggggccagtacctccctacacacacacacacacac

SEQ ID NO: 148126 - DNA, 88 bp, Artificial Sequence
  ENSG00000105341_22 (sequence is synthesized)
acgcacacgctgtctgtgctgtccttatactggcttatctccctatacacacacacacacacacacacacgctgtcctgtacctccct

SEQ ID NO: 148127 - DNA, 120 bp, Artificial Sequence
  ENSG00000105341_23 (sequence is synthesized)
acacacacacacacacacacacgctgtcctgtacctccctacacacacacacacacatgctgtccttacactggcttacctccctatacacacacacacacacacacgcacacactgtcc

SEQ ID NO: 148128 - DNA, 120 bp, Artificial Sequence
  ENSG00000105341_24 (sequence is synthesized)
aaaggtactctgccgggaagaacaccccatcttctcctagggaaagattgtggagtcctggggtttgttttgtttttcaattttttgttttaagagacagcgtctcgctctgtcacccag

SEQ ID NO: 148129 - DNA, 87 bp, Artificial Sequence
  ENSG00000105341_25 (sequence is synthesized)
agcctcggcccggctaacattttattttttgtggatataaggttgccctatttctttgtggagataaaggctcccctatgttgccca

SEQ ID NO: 148130 - DNA, 120 bp, Artificial Sequence
  ENSG00000105341_26 (sequence is synthesized)
ggctggtctcgaactcctggcttcaagcgatgctttcgcctcggcctccacaaagtgctgggttcacaggtgcgtgagcccgacctgtgtctcgttttgaagctcagggagagggcgctg

SEQ ID NO: 148131 - DNA, 120 bp, Artificial Sequence
  ENSG00000105341_27 (sequence is synthesized)
cgacctgtgtctcgttttgaagctcagggagagggcgctgtgagcaatccctaaaccctttaagagtaaaaagtgcgtgcacctttaagaggacggttagaaaacgcggggcgtggccac

SEQ ID NO: 148132 - DNA, 120 bp, Artificial Sequence
  ENSG00000105341_28 (sequence is synthesized)
aggagaataagttcgcgctgaaccaggagcgtgggataagaccggccccttccggttacgaaaccttagcaagatggcggctccctgggcggtaagtgaccggagttcctagagccccaa

SEQ ID NO: 148133 - DNA, 120 bp, Artificial Sequence
  ENSG00000105341_29 (sequence is synthesized)
gccacgagagcagaaagccgtgaggcagcaggctaagcctggcaagccccgtactgggagtgcaaacctgtggctagtgggggccaggaaggatctgtgagggtcgcaggcggaggagac

SEQ ID NO: 148134 - DNA, 120 bp, Artificial Sequence
  ENSG00000105341_30 (sequence is synthesized)
gctttagcgagcgagaggaggcagggacttggctgagagtatccaatggggatgagggagtggctgccgaagagcgacgcgactaaccaatcagagggagggatgacacaaggagctaat

SEQ ID NO: 148135 - DNA, 120 bp, Artificial Sequence
  ENSG00000105341_31 (sequence is synthesized)
ggacaggcaagggtggggcctgtaggataagagagcttggaagggattgttcgaggatgtgggatttggtcttagaagaccgaaggatgaatgtaaggaaagttagtgggagattgacga

SEQ ID NO: 148136 - DNA, 120 bp, Artificial Sequence
  ENSG00000105341_32 (sequence is synthesized)
atttttacagaaaactcaaaagcatgatgggtgggggaaccaagaggtcaatttggaggttctaagggcatgatctgggtgaaattaagaggagaatttgagatattctttcagaggatt

SEQ ID NO: 148137 - DNA, 120 bp, Artificial Sequence
  ENSG00000105341_33 (sequence is synthesized)
taaaatcaaggaatgaatttagggaaaattaaagaggttggcagctttaaacttttgaggaaaataagggtttgggtaaaattatcgagataatttgaaaaaaaaaaagaatttggttaa

SEQ ID NO: 148138 - DNA, 120 bp, Artificial Sequence
  ENSG00000105341_34 (sequence is synthesized)
agcaaagagaaattggggtagattaagaggagaccttgaaagcaaaattgaagagtttgggggcttcttcccattggccacacccctcgactttcttactctcctcttcaaagctcatgc

SEQ ID NO: 148139 - DNA, 85 bp, Artificial Sequence
  ENSG00000105341_35 (sequence is synthesized)
cacccctcgactttcttactctcctcttcaaagctcatgctttttatacccttctcggttgctgttcgaagaagaagaattgtct

SEQ ID NO: 148140 - DNA, 120 bp, Artificial Sequence
  ENSG00000105352_0 (sequence is synthesized)
acagaaggaggaaggtcagcagccccgacagccgacagtcacagcagctctgacaagagcgttcctggagcccagctcctctccacagaggacaagcaggcagcagagaccatgggcccc

SEQ ID NO: 148141 - DNA, 120 bp, Artificial Sequence
  ENSG00000105352_1 (sequence is synthesized)
ccctcagccgctccccgtggagggcacaggccctggcaggggctcctgatcacagcctcacttttaaccttctggcacccgcccaccactgtccagttcactattgaagccctgccgtcc

SEQ ID NO: 148142 - DNA, 120 bp, Artificial Sequence
  ENSG00000105352_2 (sequence is synthesized)
agtgctgcagagggaaaggatgttcttctactggcctgcaatatttcagaaactattcaagcctattattggcacaaggggaaaacggcagaagggagccctctcattgctggttatata

SEQ ID NO: 148143 - DNA, 120 bp, Artificial Sequence
  ENSG00000105352_3 (sequence is synthesized)
acagacattcaagcaaatatcccaggggccgcatacagtggtcgagagacagtataccccaatggatccctgctgttccaaaacatcaccctggaggacgcaggatcctacaccctacga

SEQ ID NO: 148144 - DNA, 120 bp, Artificial Sequence
  ENSG00000105352_4 (sequence is synthesized)
accataaatgccagttacgactctgaccaagcaactggccagctccacgtacaccaaaacaacgtcccaggccttcctgtgggggccgtcgctggcatcgtgactggggtcctggttggg

SEQ ID NO: 148145 - DNA, 120 bp, Artificial Sequence
  ENSG00000105352_5 (sequence is synthesized)
tctggtggccgccctggtgtgttttctgcttctctccaggactggaagggccagcatccagcgtgacctcagggagcagccgcccccagcctccacccctggccatggtccctctcacag

SEQ ID NO: 148146 - DNA, 120 bp, Artificial Sequence
  ENSG00000105352_6 (sequence is synthesized)
atccaccttctcggcccctctacccagccccagaacagccactcccatctatgaggaattgctatactctgatgcaaacatttactgccagatcgaccacaaagcagatgtggtctctta

SEQ ID NO: 148147 - DNA, 120 bp, Artificial Sequence
  ENSG00000105352_7 (sequence is synthesized)
ggttcctctgggagctgctcttgtgggttgatggagcgtccccgaagctcccagccctggggacggggaaggacatggagcctgagccagagaaccagctctgagtcctgaggagacaca

SEQ ID NO: 148148 - DNA, 120 bp, Artificial Sequence
  ENSG00000105352_8 (sequence is synthesized)
ggcctggggacagggagggatgggagtccctgctgaatatctggagaccctgacaggttgccctgggctctgggtgggccgggacaaaggcctctcatcaccacaggaagcgggggcttg

SEQ ID NO: 148149 - DNA, 120 bp, Artificial Sequence
  ENSG00000105352_9 (sequence is synthesized)
caaggaaagtgaatgggcctgtggcccacccggggtcaccaggaaaggatctgaataaagaggacccttcctctcattggctctttttctgctcacgggaacttagcagaaactcacctg

SEQ ID NO: 148150 - DNA, 120 bp, Artificial Sequence
  ENSG00000105352_10 (sequence is synthesized)
tgtgggccatggatgttctggtcccgcaggctccaggggacccaggatctgcccccaccagcacctggctgagctcagattcaggaaaatgcagtgaaaatgagaacaggtggtggtgag

SEQ ID NO: 148151 - DNA, 120 bp, Artificial Sequence
  ENSG00000105355_0 (sequence is synthesized)
ggtttccaagctggttttgaagtcgcggcagctgttcctgggacgtccggttgaccgcgcgtctgctgcagagaccatgtctgccgacggggcagaggctgatggcagcacccaggtgac

SEQ ID NO: 148152 - DNA, 120 bp, Artificial Sequence
  ENSG00000105355_1 (sequence is synthesized)
agtggaagaaccggtacagcagcccagtgtggtggaccgtgtggccagcatgcctctgatcagctccacctgcgacatggtgtccgcagcctatgcctccaccaaggagagctacccgca

SEQ ID NO: 148153 - DNA, 120 bp, Artificial Sequence
  ENSG00000105355_2 (sequence is synthesized)
catcaagactgtctgcgacgcagcagagaagggagtgaggaccctcacggcggctgctgtcagcggggctcagccgatcctctccaagctggagccccagattgcatcagccagcgaata

SEQ ID NO: 148154 - DNA, 120 bp, Artificial Sequence
  ENSG00000105355_3 (sequence is synthesized)
cgcccacagggggctggacaagttggaggagaacctccccatcctgcagcagcccacggagaaggtcctggcggacaccaaggagcttgtgtcgtctaaggtgtcgggggcccaagagat

SEQ ID NO: 148155 - DNA, 120 bp, Artificial Sequence
  ENSG00000105355_4 (sequence is synthesized)
ggtgtctagcgccaaggacacggtggccacccaattgtcggaggcggtggacgcgacccgcggtgctgtgcagagcggcgtggacaagacaaagtccgtagtgaccggcggcgtccaatc

SEQ ID NO: 148156 - DNA, 120 bp, Artificial Sequence
  ENSG00000105355_5 (sequence is synthesized)
ggtcatgggctcccgcttgggccagatggtgttgagtggggtcgacacggtgctggggaagtcggaggagtgggcggacaaccacctgccccttacggatgccgaactggcccgcatcgc

SEQ ID NO: 148157 - DNA, 120 bp, Artificial Sequence
  ENSG00000105355_6 (sequence is synthesized)
cacatccctggatggctttgacgtcgcgtccgtgcagcagcagcggcaggaacagagctacttcgtacgtctgggctccctgtcggagaggctgcggcagcacgcctatgagcactcgct

SEQ ID NO: 148158 - DNA, 120 bp, Artificial Sequence
  ENSG00000105355_7 (sequence is synthesized)
gggcaagcttcgagccaccaagcagagggcacaggaggctctgctgcagctgtcgcaggtcctaagcctgatggaaactgtcaagcaaggcgttgatcagaagctggtggaaggccagga

SEQ ID NO: 148159 - DNA, 120 bp, Artificial Sequence
  ENSG00000105355_8 (sequence is synthesized)
gaagctgcaccagatgtggctcagctggaaccagaagcagctccagggccccgagaaggagccgcccaagccagagcaggtcgagtcccgggcgctcaccatgttccgggacattgccca

SEQ ID NO: 148160 - DNA, 120 bp, Artificial Sequence
  ENSG00000105355_9 (sequence is synthesized)
gcagcaggcccgccgccaggtggaggacctccaggccacgttttccagcatccactccttccaggacctgtccagcagcattctggcccagagccgtgagcgtgtcgccagcgcccgcga

SEQ ID NO: 148161 - DNA, 120 bp, Artificial Sequence
  ENSG00000105355_10 (sequence is synthesized)
ggccctggaccacatggtggaatatgtggcccagaacacacctgtcacgtggctcgtgggaccctttgcccctggaatcactgagaaagccccggaggagaagaagtagggggagaggag

SEQ ID NO: 148162 - DNA, 120 bp, Artificial Sequence
  ENSG00000105355_11 (sequence is synthesized)
aggactcagcgggccccgtctctataatgcagctgtgctctggagtcctcaacccggggctcatttcaaacttattttctagccactcctcccagctcttctgtgctgtccacttgggaa

SEQ ID NO: 148163 - DNA, 120 bp, Artificial Sequence
  ENSG00000105355_12 (sequence is synthesized)
gctaaggctctcaaaacgggcatcacccagttgacccatctctcagcctctctgagcttggaagaagcctgttctgagcctcaccctatcagtcagtagagagagatgtccagaaaaaat

SEQ ID NO: 148164 - DNA, 120 bp, Artificial Sequence
  ENSG00000105355_13 (sequence is synthesized)
cctatcagtcagtagagagagatgtccagaaaaaatatctttcaggaaagttctcccctgcagaattttttttccttgttaaatatcaggaatataggccgggtgcggtggctcacacct

SEQ ID NO: 148165 - DNA, 65 bp, Artificial Sequence
  ENSG00000105355_14 (sequence is synthesized)
agccgggcatggtagcaggtgtctgttatcccagttaggaggctgaggcaagagaatctcttgaa

SEQ ID NO: 148166 - DNA, 120 bp, Artificial Sequence
  ENSG00000105355_15 (sequence is synthesized)
aaaaaaaatcagggatatagttcatatcccacttctttgtttacaccgatgtccctgaatatcagcctgtagctaatggacttgggatttctggtctaagtgggcctcctggggatgggg

SEQ ID NO: 148167 - DNA, 120 bp, Artificial Sequence
  ENSG00000105355_16 (sequence is synthesized)
tggtacactgagcttctgagcctcattgtagagtagaaaggtactggggcctgtgtggtaagccttgttgaaatgctctggtattcagtattgccttaataaacttcacccacaactgca

SEQ ID NO: 148168 - DNA, 120 bp, Artificial Sequence
  ENSG00000105355_17 (sequence is synthesized)
tccaagctggttttgaagtcgcggcagctgttcctgggacgtccggttgaccgcggcctggcagtgggacctggggcccttggaattttggaagtccagtcttagcatgctctgaagttg

SEQ ID NO: 148169 - DNA, 120 bp, Artificial Sequence
  ENSG00000105355_18 (sequence is synthesized)
attctggggaggtcttgggcaaagcctgcccacttccctcgggtgggcgtggcgacgaggtggcttaaaagtaggaaggcctatccgttaactgctttggggttcttgtcccggctaggc

SEQ ID NO: 148170 - DNA, 120 bp, Artificial Sequence
  ENSG00000105355_19 (sequence is synthesized)
ctggcagtgggacctggggcccttggaattttggaagtccagtcttagcatgctctgaagttgctggatggctgggtctggcctggagctccccttctggagccagcggcaaggcaggtc

SEQ ID NO: 148171 - DNA, 120 bp, Artificial Sequence
  ENSG00000105355_20 (sequence is synthesized)
acccccaggggtttcatagggtgttgacatctgccatggccacccttgcttaaaccagttccaggaagtcatggtggacagaggggacgggaggaagctgcctgagtcctaagtgggact

SEQ ID NO: 148172 - DNA, 120 bp, Artificial Sequence
  ENSG00000105355_21 (sequence is synthesized)
tgagaatcggtcgaggccaggagtttgatgcctgcctacctggccccctgcccaggtgagctcaggctccaaaggaggtgaggagaagcacagatttaggcaatgatcactgggagcgtc

SEQ ID NO: 148173 - DNA, 120 bp, Artificial Sequence
  ENSG00000105357_0 (sequence is synthesized)
ctctttctccccaggccgaagcctcgggacggccctggaagccgaccatggcagccgtgaccatgtcggtgcccgggcggaaggcgccccccaggccgggcccagtgcccgaggcggccc

SEQ ID NO: 148174 - DNA, 120 bp, Artificial Sequence
  ENSG00000105357_1 (sequence is synthesized)
agccgttcctgttcacgccccgcgggcccagcgcgggtggcgggcctggctcgggcacctccccgcaggtggagtggacggcccggcgtctcgtgtgggtgccttcggagcttcacgggt

SEQ ID NO: 148175 - DNA, 120 bp, Artificial Sequence
  ENSG00000105357_2 (sequence is synthesized)
tcgaggcggcggcgctgcgggacgaaggcgaggaggaggcggaggtggagctggcggagagcgggaggcggctgcgactgccgcgggaccagatccagcgcatgaacccgcccaagttca

SEQ ID NO: 148176 - DNA, 120 bp, Artificial Sequence
  ENSG00000105357_3 (sequence is synthesized)
gcaaggccgaggacatggccgagctgacctgcctcaacgaggcctcggtcctgcacaacctccgggagcggtactactccggcctcatctacacgtactccggccttttctgtgtggtca

SEQ ID NO: 148177 - DNA, 120 bp, Artificial Sequence
  ENSG00000105357_4 (sequence is synthesized)
tcaacccgtacaagcagcttcccatctacacagaagccattgtggagatgtaccggggcaagaagcgccacgaggtgccaccccacgtgtacgcagtgaccgagggggcctatcggagca

SEQ ID NO: 148178 - DNA, 120 bp, Artificial Sequence
  ENSG00000105357_5 (sequence is synthesized)
tgctgcaggatcgtgaggaccagtccattctctgcactggagagtctggagctgggaagacggaaaacaccaagaaggtcatccagtacctcgcccacgtggcgtcgtctccaaagggca

SEQ ID NO: 148179 - DNA, 120 bp, Artificial Sequence
  ENSG00000105357_6 (sequence is synthesized)
ggaaggagccgggtgtccccgcctccgtcagcaccgtgtcttatggtgagctggagcggcagctgcttcaggccaaccccatcctagaggcctttggcaatgccaagacagtgaagaatg

SEQ ID NO: 148180 - DNA, 120 bp, Artificial Sequence
  ENSG00000105357_7 (sequence is synthesized)
acaactcctcccgattcggcaaattcatccgcatcaactttgatgttgccgggtacatcgtgggcgccaacattgagacctacctgctggagaagtcgcgggccatccgccaggccaagg

SEQ ID NO: 148181 - DNA, 120 bp, Artificial Sequence
  ENSG00000105357_8 (sequence is synthesized)
acgagtgcagcttccacatcttctaccagctgctggggggcgctggagagcagctcaaagccgacctcctcctcgagccctgctcccactaccggttcctgaccaacgggccgtcatcct

SEQ ID NO: 148182 - DNA, 120 bp, Artificial Sequence
  ENSG00000105357_9 (sequence is synthesized)
ctcccggccaggagcgggaactcttccaggagacgctggagtcgctgcgggtcctgggattcagccacgaggaaatcatctccatgctgcggatggtctcagcagttctccagtttggca

SEQ ID NO: 148183 - DNA, 120 bp, Artificial Sequence
  ENSG00000105357_10 (sequence is synthesized)
acattgccttgaagagagaacggaacaccgatcaagccaccatgcctgacaacacagctgcacagaagctctgccgcctcttgggactgggggtgacggatttctcccgagccttgctca

SEQ ID NO: 148184 - DNA, 120 bp, Artificial Sequence
  ENSG00000105357_11 (sequence is synthesized)
cccctcgcatcaaagttggccgagactatgtgcagaaagcccagactaaggaacaggctgacttcgcgctggaggccctggccaaggccacctacgagcgcctcttccgctggctggttc

SEQ ID NO: 148185 - DNA, 120 bp, Artificial Sequence
  ENSG00000105357_12 (sequence is synthesized)
tgcgcctcaaccgggccttggaccgcagcccccgccaaggcgcctccttcctgggcatcctggacatcgcgggctttgagatcttccagctgaactccttcgagcagctctgcatcaact

SEQ ID NO: 148186 - DNA, 120 bp, Artificial Sequence
  ENSG00000105357_13 (sequence is synthesized)
acaccaacgagaagctgcagcagctcttcaaccacaccatgttcgtgctggagcaggaggagtaccagcgtgagggcatcccctggaccttcctcgactttggcctcgacctgcagccct

SEQ ID NO: 148187 - DNA, 120 bp, Artificial Sequence
  ENSG00000105357_14 (sequence is synthesized)
gcatcgacctcatcgagcggccggccaacccccctggactcctggccctgctggatgaggagtgctggttcccgaaggccacagacaagtcgtttgtggagaaggtagcccaggagcagg

SEQ ID NO: 148188 - DNA, 120 bp, Artificial Sequence
  ENSG00000105357_15 (sequence is synthesized)
gcggccaccccaagttccagcggccgaggcacctgcgggatcaggccgacttcagtgttctccactacgcgggcaaggtcgactacaaggccaacgagtggctgatgaaaaacatggacc

SEQ ID NO: 148189 - DNA, 120 bp, Artificial Sequence
  ENSG00000105357_16 (sequence is synthesized)
ctctgaatgacaacgtcgcagccttgctccaccagagcacagaccggctgacggcagagatctggaaagacgtggagggcatcgtggggctggaacaggtgagcagcctgggcgacggcc

SEQ ID NO: 148190 - DNA, 120 bp, Artificial Sequence
  ENSG00000105357_17 (sequence is synthesized)
caccaggtggccgcccccgtcggggtatgttccggacagtgggacagctctacaaggagtccctgagccgcctcatggccacactcagcaacaccaaccccagttttgtccgctgcattg

SEQ ID NO: 148191 - DNA, 120 bp, Artificial Sequence
  ENSG00000105357_18 (sequence is synthesized)
tccccaaccacgagaagagggccgggaagctggagccacggctggtgctggaccagcttcgctgcaacggggtcctggagggcatccgcatctgtcgccagggcttccccaaccgcatcc

SEQ ID NO: 148192 - DNA, 120 bp, Artificial Sequence
  ENSG00000105357_19 (sequence is synthesized)
tcttccaggagttccggcagcgatacgagatcctgacacccaatgccatccccaagggcttcatggatgggaagcaggcctgtgaaaagatgatccaggcgctggaactggaccccaacc

SEQ ID NO: 148193 - DNA, 120 bp, Artificial Sequence
  ENSG00000105357_20 (sequence is synthesized)
tctaccgcgtgggacagagcaagatcttcttccgggctggggtcctggcccagctggaagaggagcgagacctgaaggtcaccgacatcatcgtctccttccaggcagctgcccggggat

SEQ ID NO: 148194 - DNA, 120 bp, Artificial Sequence
  ENSG00000105357_21 (sequence is synthesized)
acctggctcgcagggccttccagaagcgccagcagcagcagagcgccctgagggtgatgcagcggaactgcgcggcctacctcaagctgagacactggcagtggtggcggctgtttacca

SEQ ID NO: 148195 - DNA, 120 bp, Artificial Sequence
  ENSG00000105357_22 (sequence is synthesized)
aggtgaagccactgctgcaggtgacgcggcaggatgaggtgctgcaggcacgggcccaggagctgcagaaagtgcaggagctacagcagcagagcgcccgcgaagttggggagctccagg

SEQ ID NO: 148196 - DNA, 120 bp, Artificial Sequence
  ENSG00000105357_23 (sequence is synthesized)
gccgagtggcacagctggaagaggagcgcgcccgcctggcagagcaattgcgagcagaggcagaactgtgtgcagaggccgaggagacgcgggggaggctggcagcccgcaagcaggagc

SEQ ID NO: 148197 - DNA, 120 bp, Artificial Sequence
  ENSG00000105357_24 (sequence is synthesized)
tggagctggtggtgtcagagctggaggctcgcgtgggcgaggaggaggagtgcagccgtcaaatgcaaaccgagaagaagaggctgcagcagcacatacaggagctagaggcccaccttg

SEQ ID NO: 148198 - DNA, 120 bp, Artificial Sequence
  ENSG00000105357_25 (sequence is synthesized)
aggctgaggagggtgcgcggcagaagctgcagctggagaaggtgacgacagaggcaaaaatgaagaaatttgaagaggacctgctgctcctggaagaccagaattccaagctgagcaagg

SEQ ID NO: 148199 - DNA, 120 bp, Artificial Sequence
  ENSG00000105357_26 (sequence is synthesized)
agcggaagctgctggaagatcgtctggccgagttctcatcccaggcagctgaggaggaggagaaggtcaagagcctcaataagctacggctcaaatatgaggccacaatcgcagacatgg

SEQ ID NO: 148200 - DNA, 120 bp, Artificial Sequence
  ENSG00000105357_27 (sequence is synthesized)
aggaccgcctacggaaggaggagaagggtcgccaggagctggagaagctgaagcggaggctggatggggagagctcagagctgcaggagcagatggtggagcagcaacagcgggcagagg

SEQ ID NO: 148201 - DNA, 120 bp, Artificial Sequence
  ENSG00000105357_28 (sequence is synthesized)
gaaatccctgcgggaggctcaagcagccctggccgaggcccaggaggacctggagtctgagcgtgtggccaggaccaaggcggagaagcagcgccgggacctgggcgaggagctggaggc

SEQ ID NO: 148202 - DNA, 120 bp, Artificial Sequence
  ENSG00000105357_29 (sequence is synthesized)
gctgcggggcgagctggaggacacgctggactccaccaacgcacagcaggagctccggtccaagagggaacaggaggtgacggagctgaagaagactctggaggaggagactcgcatcca

SEQ ID NO: 148203 - DNA, 120 bp, Artificial Sequence
  ENSG00000105357_30 (sequence is synthesized)
cgaggcggcagtgcaggagctgaggcagcgccacggccaggccctgggggagctggcggagcagctggagcaggcccggaggggcaaaggtgcatgggagaagacccggctggccctgga

SEQ ID NO: 148204 - DNA, 120 bp, Artificial Sequence
  ENSG00000105357_31 (sequence is synthesized)
ggccgaggtgtccgagctgcgggcagaactgagcagcctgcagactgcacgtcaggagggtgagcagcggaggcgccgcctggagttacagctgcaggaggtgcagggccgggctggtga

SEQ ID NO: 148205 - DNA, 120 bp, Artificial Sequence
  ENSG00000105357_32 (sequence is synthesized)
tggggagagggcacgagcggaggctgctgagaagctgcagcgagcccaggctgaactggagaatgtgtctggggcgctgaacgaggctgagtccaaaaccatccgtcttagcaaggagct

SEQ ID NO: 148206 - DNA, 120 bp, Artificial Sequence
  ENSG00000105357_33 (sequence is synthesized)
gagcagcacagaagcccagctgcacgatgcccaggagctgctgcaggaggagaccagggcgaaattggccttggggtcccgggtgcgagccatggaggctgaggcagccgggctgcgtga

SEQ ID NO: 148207 - DNA, 120 bp, Artificial Sequence
  ENSG00000105357_34 (sequence is synthesized)
gcagctggaggaggaggcagctgccagggaacgggcgggccgtgaactgcagactgcccaggcccagctttccgagtggcggcggcgccaggaggaggaggcaggggcactggaggcagg

SEQ ID NO: 148208 - DNA, 120 bp, Artificial Sequence
  ENSG00000105357_35 (sequence is synthesized)
ggaggaggcacggcgccgggcagcccgggaggccgaggccctgacccagcgcctggcagaaaagacagagaccgtggatcggctggagcggggccgccgccggctgcagcaggagctgga

SEQ ID NO: 148209 - DNA, 120 bp, Artificial Sequence
  ENSG00000105357_36 (sequence is synthesized)
cgacgccaccatggacctggagcagcagcggcagcttgtgagcaccctggagaagaagcagcgcaagtttgaccagcttctggcagaggagaaggcagctgtacttcgggcagtggagga

SEQ ID NO: 148210 - DNA, 120 bp, Artificial Sequence
  ENSG00000105357_37 (sequence is synthesized)
acgtgagcgggccgaggcagagggccgggagcgtgaggctcgggccctgtcactgacacgggcactggaggaggagcaggaggcacgtgaggagctggagcggcagaaccgggccctgcg

SEQ ID NO: 148211 - DNA, 120 bp, Artificial Sequence
  ENSG00000105357_38 (sequence is synthesized)
ggctgagctggaggcactgctgagcagcaaggatgacgtcggcaagagcgtgcatgagctggaacgagcctgccgggtagcagaacaggcagccaatgatctgcgagcacaggtgacaga

SEQ ID NO: 148212 - DNA, 120 bp, Artificial Sequence
  ENSG00000105357_39 (sequence is synthesized)
actggaggatgagctgacagcggccgaggatgccaagctgcgtctggaggtgactgtgcaggctctcaagactcagcatgagcgtgacctgcagggccgtgatgaggctggtgaagagag

SEQ ID NO: 148213 - DNA, 120 bp, Artificial Sequence
  ENSG00000105357_40 (sequence is synthesized)
gcggaggcagctggccaagcagctgagagatgcagaggtggagcgggatgaggagcggaagcagcgcactctggccgtggctgcccgcaagaagctggagggagagctggaggagctgaa

SEQ ID NO: 148214 - DNA, 120 bp, Artificial Sequence
  ENSG00000105357_41 (sequence is synthesized)
ggctcagatggcctctgccggccagggcaaggaggaggcggtgaagcagcttcgcaagatgcaggcccagatgaaggagctatggcgggaggtggaggagacacgcacctcccgggagga

SEQ ID NO: 148215 - DNA, 120 bp, Artificial Sequence
  ENSG00000105357_42 (sequence is synthesized)
gatcttctcccagaatcgggaaagtgaaaagcgcctcaagggcctggaggctgaggtgctgcggctgcaggaggaactggccgcctcggaccgtgctcggcggcaggcccagcaggaccg

SEQ ID NO: 148216 - DNA, 120 bp, Artificial Sequence
  ENSG00000105357_43 (sequence is synthesized)
ggatgagatggcagatgaggtggccaatggtaaccttagcaaggcagccattctggaggagaagcgtcagctggaggggcgcctggggcagttggaggaagagctggaggaggagcagag

SEQ ID NO: 148217 - DNA, 120 bp, Artificial Sequence
  ENSG00000105357_44 (sequence is synthesized)
caactcggagctgctcaatgaccgctaccgcaagctgctcctgcaggtagagtcactgaccacagagctgtcagctgagcgcagtttctcagccaaggcagagagcgggcggcagcagct

SEQ ID NO: 148218 - DNA, 120 bp, Artificial Sequence
  ENSG00000105357_45 (sequence is synthesized)
ggaacggcagatccaggagctacggggacgcctgggtgaggaggatgctggggcccgtgcccgccacaagatgaccattgctgcccttgagtctaagttggcccaggctgaggagcagct

SEQ ID NO: 148219 - DNA, 120 bp, Artificial Sequence
  ENSG00000105357_46 (sequence is synthesized)
agagcaagagaccagagagcgcatcctctctggaaagctggtgcgcagagctgagaagcggcttaaagaggtggtgctccaggtggaggaggagcggagggtggctgaccagctccggga

SEQ ID NO: 148220 - DNA, 120 bp, Artificial Sequence
  ENSG00000105357_47 (sequence is synthesized)
ccagctggagaagggaaaccttcgagtcaagcagctgaagcggcagctggaggaggccgaggaggaggcatcccgggctcaggccggccgccggaggctgcagcgtgagctggaagatgt

SEQ ID NO: 148221 - DNA, 120 bp, Artificial Sequence
  ENSG00000105357_48 (sequence is synthesized)
cacagagtcggccgagtccatgaaccgtgaagtgaccacactgaggaaccggcttcgacgcggccccctcaccttcaccacccgcacggtgcgccaggtcttccgactagaggagggcgt

SEQ ID NO: 148222 - DNA, 120 bp, Artificial Sequence
  ENSG00000105357_49 (sequence is synthesized)
ggcatccgacgaggaggcagaggaagcacagcctgggtctgggccatccccggagcctgaggggtccccaccagcccacccccagtgaccctaccctgtccccagatgcactaacagatg

SEQ ID NO: 148223 - DNA, 120 bp, Artificial Sequence
  ENSG00000105357_50 (sequence is synthesized)
gggcccagcccccttcctccctggaccccacgggcccctgtcccaggaaccccgccctctgacttcttgccctttggaaatggtgcagcactctggcatttatcacccccacctgggtcc

SEQ ID NO: 148224 - DNA, 120 bp, Artificial Sequence
  ENSG00000105357_51 (sequence is synthesized)
cctgcaacctcccatcaaaggatgacccctaaacacagaggagcggggcaggcagggaggcaatgactggagctaccttgcttgttgggggactgggtacagttggcaagctgtgtttcc

SEQ ID NO: 148225 - DNA, 120 bp, Artificial Sequence
  ENSG00000105357_52 (sequence is synthesized)
atcagctccctgtcctcctttcttccctcgttattgatctatagacattaggaagggagtgagacggctcctccaccatcctcagccagtgcaacccattccctctgcttctctctctct

SEQ ID NO: 148226 - DNA, 120 bp, Artificial Sequence
  ENSG00000105357_53 (sequence is synthesized)
ctctctctctccctccctctccttccctaccctctcaccatctttcttggcctctctgagggtctctctgtgcatctttttaggaatctcgctctcactctctacgtagccactctcctt

SEQ ID NO: 148227 - DNA, 120 bp, Artificial Sequence
  ENSG00000105357_54 (sequence is synthesized)
cccccatttctgcgtccacccctgaactcctgagcgacagaagccccaggcctccaccagccttgaacccttgcaaaggggcaggacaaggggacccctctcactcctgctgctgcccat

SEQ ID NO: 148228 - DNA, 120 bp, Artificial Sequence
  ENSG00000105357_55 (sequence is synthesized)
gctctgccctcccttctggttgctctgagggttcggagcttccctctgggactaaaggagtgtcctttaccctcccagcctccaggctctggcagaaataaactccaacccgactggacc

SEQ ID NO: 148229 - DNA, 120 bp, Artificial Sequence
  ENSG00000105357_56 (sequence is synthesized)
gacagatgtccctgaaggcccgagggacaccagccgctatgccaggctccaaagaacccgaggcaaaccaacgctggtcccggtctttgaggactccccggcccagtgagggagaccgac

SEQ ID NO: 148230 - DNA, 120 bp, Artificial Sequence
  ENSG00000105357_57 (sequence is synthesized)
gctcctgctcacgctcgcttccgaagctccgtggcttctctctcgcgcggcttctcctcactccggcgggtgactccggctttgctgaggctcctcctggttcctgacgacgctgccgac

SEQ ID NO: 148231 - DNA, 120 bp, Artificial Sequence
  ENSG00000105357_58 (sequence is synthesized)
atcgcgggctttgagatcttccaggtccacccttgtgctgggagggggatgccaacttcctcactccggtcctggtcctttctgaagccctgggtctctccccttctccctggtctctgt

SEQ ID NO: 148232 - DNA, 80 bp, Artificial Sequence
  ENSG00000105357_59 (sequence is synthesized)
tctgaagccctgggtctctccccttctccctggtctctgtccccctctctctctctgagtctctgttcccccctctgtct

SEQ ID NO: 148233 - DNA, 120 bp, Artificial Sequence
  ENSG00000105357_60 (sequence is synthesized)
ccccgccctgcgctggaccgcggaggtcgctgcacctgaagagaacggggattcccgcgccctcaccccatctccccgctccggtcggcgcccccagaccatggcagccgtgaccatgtc

SEQ ID NO: 148234 - DNA, 120 bp, Artificial Sequence
  ENSG00000105357_61 (sequence is synthesized)
agagtttaacttcttccctcactttggctgcctcagctccctacaagggcccttcctagatgccagaatttataaattgcgaagtcattgattccaaccctctgctgatgtgccaagtgc

SEQ ID NO: 148235 - DNA, 120 bp, Artificial Sequence
  ENSG00000105357_62 (sequence is synthesized)
caggatggtatctgcactcacttccagtccagcacctgcacgttgcttcttgtgatgggagctcattgactccagaaaatgtgggataggaaggctgaacgataagaaatgaggtcagat

SEQ ID NO: 148236 - DNA, 120 bp, Artificial Sequence
  ENSG00000105357_63 (sequence is synthesized)
catgtatgttccctccctgaagagagaggtggtagggtctggggaggatctcagtgaagttggtctggacagtgggtttatgggaagagagaactggacaagaaaaagaccctgtggggc

SEQ ID NO: 148237 - DNA, 120 bp, Artificial Sequence
  ENSG00000105357_64 (sequence is synthesized)
ctggaatgccaggctgaggggctggaaccttgtcccgggggtactggggagccatgaaaggattgtgagcaggagggtctgggtcagctctgggtataggaagacctttctgaggccatg

SEQ ID NO: 148238 - DNA, 120 bp, Artificial Sequence
  ENSG00000105357_65 (sequence is synthesized)
taggagacaacctggaggggagagactggaggtcagggtagaggctggcatgagggatttaggagaaaagaacaaggcctaaacagagagcagaggatggggcagagagagtcagggggc

SEQ ID NO: 148239 - DNA, 120 bp, Artificial Sequence
  ENSG00000105357_66 (sequence is synthesized)
accacactgaggaaccggcttcggtatggtcatcccacgtacaggcctgacgggtggggagcaccctaactccataaaccccagggacgcgaggccgtgccaggggcaacaacaggggga

SEQ ID NO: 148240 - DNA, 120 bp, Artificial Sequence
  ENSG00000105357_67 (sequence is synthesized)
aatgggatccacgggggtgtggggctgtgggagcagcggctgtgttgcgggagagccaaatccaggtaacttctttcttcccacacccatttctccctgtcatctctgtgccctcctttc

SEQ ID NO: 148241 - DNA, 120 bp, Artificial Sequence
  ENSG00000105357_68 (sequence is synthesized)
cccattgcttctgcccgtctccctccatttctcttgatctcatccctctcttcccccttattttgttctctctcttcctatctctctctctctccccctcatctctctctctcctccccc

SEQ ID NO: 148242 - DNA, 120 bp, Artificial Sequence
  ENSG00000105357_69 (sequence is synthesized)
ttttacatatgatgctatcatggctccatgttaatttttgtgaatataaatatccaagtattccaacactgctctccactgacttgtttttgcatatctattgaaagtcatttttcttct

SEQ ID NO: 148243 - DNA, 120 bp, Artificial Sequence
  ENSG00000105357_70 (sequence is synthesized)
gcgatctgcctgcctcagcctcccaatatgctggaattacaagcataagccactgcaccagccttttcttcttatttgaagttattttgcctcttctagttcctttgcatttccgtatgt

SEQ ID NO: 148244 - DNA, 120 bp, Artificial Sequence
  ENSG00000105357_71 (sequence is synthesized)
ccgtatgtattttagaatcagtttgtcaatttctaccccaaaacaaaaagccttccaatttggaactgtgttgaatctatacaacggttttggaagaactgacatcataacaatattgag

SEQ ID NO: 148245 - DNA, 120 bp, Artificial Sequence
  ENSG00000105357_72 (sequence is synthesized)
ttttctcaccgaggaagagggtatatacgtccattgaaataccttagaaatgttttttagttttcaatgtacatctttcacatctgctgccagatgtatttctaagtatttcatggtttt

SEQ ID NO: 148246 - DNA, 120 bp, Artificial Sequence
  ENSG00000105357_73 (sequence is synthesized)
atggctattttaagtgatgttgctttcatttccatttttgattgctagtatatagaaacaatagatttttgtatattgatcttgtatcctacaatcttggctaaactcacttactagtgc

SEQ ID NO: 148247 - DNA, 120 bp, Artificial Sequence
  ENSG00000105357_74 (sequence is synthesized)
taatatagtttttatatatttcattggattttctacatagatgatcatgttttctgtgaacaaaggcagttttacttctttctttaccttttctttacccttctaggactccaaatgctt

SEQ ID NO: 148248 - DNA, 120 bp, Artificial Sequence
  ENSG00000105357_75 (sequence is synthesized)
gtatgtatgactgcttggtacttttttcaggttgttaaagttccattaatttctgttacaatcttctttctttttctttctttgctctgtttggataatttatattgacctgctttcaag

SEQ ID NO: 148249 - DNA, 120 bp, Artificial Sequence
  ENSG00000105357_76 (sequence is synthesized)
tttactgattctcctgatgtgtccagtctgctactaatttcatccagtgacttttttatttcagatatttcatttttcagttctggcatttctatgtggttctattttacagtttcaaat

SEQ ID NO: 148250 - DNA, 120 bp, Artificial Sequence
  ENSG00000105357_77 (sequence is synthesized)
ccctcctcaaataactgcctcttcacccattgtatctgtctcgttctgaaacttatcatgaagtccttgtgtgcacgttctaatatgtaggtcatctgtgggtctatttgtatggactga

SEQ ID NO: 148251 - DNA, 120 bp, Artificial Sequence
  ENSG00000105357_78 (sequence is synthesized)
tttttctcttaactatgagttctgttctcttttcttttttgcatgttttataagtttatttgccaattactgtgtcttaaaaaaaaacagtaaaggttgaagtacatttaaaaatatata

SEQ ID NO: 148252 - DNA, 120 bp, Artificial Sequence
  ENSG00000105357_79 (sequence is synthesized)
tatgtgtattttttctactgccactcttaagaggaaggaatgccctttcttctgttgaacatatagagttagggactgatcagtttgatccattcaagagttaagctggtttgggacacg

SEQ ID NO: 148253 - DNA, 120 bp, Artificial Sequence
  ENSG00000105357_80 (sequence is synthesized)
gttgcaactttaatccctctacctccctcttgtgtctctgcctttgtctgtctctttctctctctttctctgttcctggctgctccctcttcccgttcccttgtacactcctttcagcta

SEQ ID NO: 148254 - DNA, 120 bp, Artificial Sequence
  ENSG00000105364_0 (sequence is synthesized)
agtggccttgacctcccgcggcgtgggaggctgcgcggcgatgctgcagttcgtccgggccggggcgcgggcctggcttcggcctaccggcagccagggcctgagttccctggcggaaga

SEQ ID NO: 148255 - DNA, 120 bp, Artificial Sequence
  ENSG00000105364_1 (sequence is synthesized)
ggcagcgcgtgcgaccgagaacccggagcaggtggcgagcgagggtctcccggagcccgtgctgcgcaaagtcgagctcccggtacccactcatcgacgcccagtgcaggcctgggtcga

SEQ ID NO: 148256 - DNA, 120 bp, Artificial Sequence
  ENSG00000105364_2 (sequence is synthesized)
gtccttgcggggcttcgagcaggagcgcgtgggcctggccgacctgcaccccgatgttttcgccaccgcgcccaggctggacatactgcaccaggttgctatgtggcagaagaacttcaa

SEQ ID NO: 148257 - DNA, 120 bp, Artificial Sequence
  ENSG00000105364_3 (sequence is synthesized)
gagaattagctatgccaagaccaagacgagagccgaggtgcggggcggtggccggaagccttggccgcagaaaggcactgggcgggcccggcatggcagcatccgctctccgctctggcg

SEQ ID NO: 148258 - DNA, 120 bp, Artificial Sequence
  ENSG00000105364_4 (sequence is synthesized)
aggaggaggtgttgcccatggcccccggggccccacaagttactactacatgctgcccatgaaggtgcgggcgctgggtctcaaagtggcactgaccgtcaagctggcccaggacgacct

SEQ ID NO: 148259 - DNA, 120 bp, Artificial Sequence
  ENSG00000105364_5 (sequence is synthesized)
agagctgcccaccggagacccacagtacctgacagagctggcgcactaccgccgctggggggactccgtactcctcgtggacttaacacacgaggagatgccacagagcatcgtggaggc

SEQ ID NO: 148260 - DNA, 120 bp, Artificial Sequence
  ENSG00000105364_6 (sequence is synthesized)
cacctctaggcttaagaccttcaacttgatcccggctgttggcctaaatgtgcacagcatgctcaagcaccagacgctggtcctgacgctgcccaccgtcgccttcctggaggacaagct

SEQ ID NO: 148261 - DNA, 120 bp, Artificial Sequence
  ENSG00000105364_7 (sequence is synthesized)
gctctggcaggactcacgttacagacccctctaccccttcagcctgccctacagcgacttcccccgacccctaccccacgctacccagggcccagcggccaccccgtaccactgttgatg

SEQ ID NO: 148262 - DNA, 120 bp, Artificial Sequence
  ENSG00000105364_8 (sequence is synthesized)
tgaagcacctcttctgagccaggccgagcccctggccgacttgggagcctcaggcccacgcccacccttcgaggaaggtgtcacctggaccccttcattccacggaggaagctgaggcca

SEQ ID NO: 148263 - DNA, 120 bp, Artificial Sequence
  ENSG00000105364_9 (sequence is synthesized)
cagggagcggccatcgccattgggaaggggcgactccacggaaagcccagacgggcttctgcatccattccctctttttgtttttaaaataaattgtatttttgaatcaaggaggataaa

SEQ ID NO: 148264 - DNA, 120 bp, Artificial Sequence
  ENSG00000105364_10 (sequence is synthesized)
gtcgcgttccccagtgttacggagggtccttgaggcaggagtgaaaattgggtctgggggttagtcctggggtggaggtctgggcacgccgggtcggaccccctccatcttcggttttgc

SEQ ID NO: 148265 - DNA, 120 bp, Artificial Sequence
  ENSG00000105364_11 (sequence is synthesized)
acctctaggcttaagaccttcaacttgatcccggctgttggtgagcaaagagcccaggcccctagagtgcgcatgtgcaggctccgctgttagaatcacagcggttcaaatccggcatct

SEQ ID NO: 148266 - DNA, 120 bp, Artificial Sequence
  ENSG00000105364_12 (sequence is synthesized)
ggtcgctgagtggcctcaggcagtgaccacgctcccggacccaaccttcagcttgcccaaagcaataatctttcctaaagaagtgcttggctggggatggtggctcacgcttgtaatccc

SEQ ID NO: 148267 - DNA, 90 bp, Artificial Sequence
  ENSG00000105364_13 (sequence is synthesized)
tcccagtactttgggaggccaaggcagtctgggcaatatagtgaggctcccatctgtactaaaaataaaaaagttaggcgtggcggctga

SEQ ID NO: 148268 - DNA, 120 bp, Artificial Sequence
  ENSG00000105364_14 (sequence is synthesized)
ggggctgagccaggcggatagcttgagctcagggggccaaggctgcagtgagtcatgatcgcaccactgcacccaaacctggggagagagctagactcttgtctcaaaaaaaaaaaaaaa

SEQ ID NO: 148269 - DNA, 120 bp, Artificial Sequence
  ENSG00000105364_15 (sequence is synthesized)
gggaaagtgctgtatttctacagcctccgtttctccacctgtcaaaggggaatgatgacagtttcccctgctgtagcgctgtgtgagattgaagcctgagaggtgacatcatctaagggt

SEQ ID NO: 148270 - DNA, 120 bp, Artificial Sequence
  ENSG00000105364_16 (sequence is synthesized)
tagggagacagaattctggagcccgactgattaggttcaaatcctgccttcccctcttgtccctcagtgtccctattttgtcagcggtcgggaggttgctgtgatgaataaatgacttaa

SEQ ID NO: 148271 - DNA, 120 bp, Artificial Sequence
  ENSG00000105364_17 (sequence is synthesized)
ggctgaattgggccagagaggtctcattggctgaattcctgcaccggctcgtcggaggcgggacccaaagtaggctaggcctacggaagctgggtcttcttgctgtgagcgcggagtcgc

SEQ ID NO: 148272 - DNA, 120 bp, Artificial Sequence
  ENSG00000105364_18 (sequence is synthesized)
gtaaggcaaccggggtggctccaggaggggcggcgacagagaggtctgacccttgaccctaacctctgacccccgcaatcgctccaggtctcccggagcccgtgctgcgcaaagtcgagc

SEQ ID NO: 148273 - DNA, 120 bp, Artificial Sequence
  ENSG00000105364_19 (sequence is synthesized)
agcccatcgctgggttttctctggactgctcggctggggcctcatctgtctcctgaactattcaccgatgggtccatttttggttctcttttttttgtttgtttttgagatggagatgga

SEQ ID NO: 148274 - DNA, 120 bp, Artificial Sequence
  ENSG00000105364_20 (sequence is synthesized)
ttctgatcactcactgatgtgggcattgtggtgggtgagaggatatagcagggaccacgaggacaaaacaggcaaggtccggctgtgtgcaagtggctcaggcctgtaatcccagcactg

SEQ ID NO: 148275 - DNA, 120 bp, Artificial Sequence
  ENSG00000105364_21 (sequence is synthesized)
gaagctgaggtgggtgggttgcttggggccaggaaagaccagcctgggaaacagcaagacccagtctctaccccttcccccacaaccccaagaaaaagatgggcaaagtccctattctaa

SEQ ID NO: 148276 - DNA, 120 bp, Artificial Sequence
  ENSG00000105364_22 (sequence is synthesized)
tgaaggtcacagtgtcatgggaggagaagtgaaggtgagtcagatggtcatacgtaatgtgtaattatgagcatgtcccagagaatgggacgttcaaccttgggtctactgtagaagcta

SEQ ID NO: 148277 - DNA, 120 bp, Artificial Sequence
  ENSG00000105364_23 (sequence is synthesized)
accagatcaaggaggcagtggggctagtgtggagataacaggaacagggtgtgcaaaggccctgtggcagggaccacaaggaagccagtgttgccacagaggccagtgggagcagtgggg

SEQ ID NO: 148278 - DNA, 120 bp, Artificial Sequence
  ENSG00000105364_24 (sequence is synthesized)
aggagtctgggttttgtgccaagaacattgaagaatccattaccagtcagggtcttatccatccaccccagaggtctggccagtcctccccctgctcacaccttccctggctccccatca

SEQ ID NO: 148279 - DNA, 120 bp, Artificial Sequence
  ENSG00000105364_25 (sequence is synthesized)
catgagcctaagtcaagtcctgtccctcaacccacgcccctcgctggcttccccacctctctcaggatgaaagcccaagtcatcagggtggcacgtcaggccctgcacgatgtgccccgt

SEQ ID NO: 148280 - DNA, 120 bp, Artificial Sequence
  ENSG00000105364_26 (sequence is synthesized)
cacctccctgccctcccgtcatttgccctgggtctcccccaccagaatgggagccaggagtcccagccaggcacaggaccgagcctggctctcggtcagcaggtgatgagctgggagcag

SEQ ID NO: 148281 - DNA, 120 bp, Artificial Sequence
  ENSG00000105364_27 (sequence is synthesized)
ctccttggccagaggcttacaggcaacaagcggccaggcagggtctggccccgggctgctgggctcacaaagtcacactagaccacagtgacgatctctgtaagcacaaagggactccga

SEQ ID NO: 148282 - DNA, 120 bp, Artificial Sequence
  ENSG00000105364_28 (sequence is synthesized)
gggcgcgggcctggcttcggcctaccggcagccaggtgaggccaggggctggaggcgtggtcgaaggatgaaatttgggggtgtccaggggtcgtctctcactttcgcccaacccttgca

SEQ ID NO: 148283 - DNA, 120 bp, Artificial Sequence
  ENSG00000105364_29 (sequence is synthesized)
ccgtactcctcgtggacttgtgagggcacagggcagagcaggggcagggggccctgagctccgtactctgagggttcaacccccactccctggcctctcttacagaacacacgaggagat

SEQ ID NO: 148284 - DNA, 120 bp, Artificial Sequence
  ENSG00000105366_0 (sequence is synthesized)
agtttctgagagaagaaccctgaggaacagacgttccctggcggccctggcgccttcaaacccagacatgctgctgctgctgctgctgctgcccctgctctgggggacaaaggggatgga

SEQ ID NO: 148285 - DNA, 120 bp, Artificial Sequence
  ENSG00000105366_1 (sequence is synthesized)
gggagacagacaatatggggatggttacttgctgcaagtgcaggagctggtgacggtgcaggagggcctgtgtgtccatgtgccctgctccttctcctacccccaggatggctggactga

SEQ ID NO: 148286 - DNA, 120 bp, Artificial Sequence
  ENSG00000105366_2 (sequence is synthesized)
ctctgacccagttcatggctactggttccgggcaggagacagaccataccaagacgctccagtggccacaaacaacccagacagagaagtgcaggcagagacccagggccgattccaact

SEQ ID NO: 148287 - DNA, 120 bp, Artificial Sequence
  ENSG00000105366_3 (sequence is synthesized)
ccttggggacatttggagcaacgactgctccctgagcatcagagacgccaggaagagggataaggggtcatatttctttcggctagagagaggaagcatgaaatggagttacaaatcaca

SEQ ID NO: 148288 - DNA, 120 bp, Artificial Sequence
  ENSG00000105366_4 (sequence is synthesized)
gttgaattacaaaactaagcagctgtctgtgtttgtgacagccctgacccataggcctgacatcctcatcctagggaccctagagtctggccactccaggaacctgacctgctctgtgcc

SEQ ID NO: 148289 - DNA, 120 bp, Artificial Sequence
  ENSG00000105366_5 (sequence is synthesized)
ctgggcctgtaagcaggggacaccccccatgatctcctggattggggcctccgtgtcctccccgggccccactactgcccgctcctcagtgctcacccttaccccaaagccccaggacca

SEQ ID NO: 148290 - DNA, 120 bp, Artificial Sequence
  ENSG00000105366_6 (sequence is synthesized)
cggcaccagcctcacctgtcaggtgaccttgcctgggacaggtgtgaccacgaccagtaccgtccgcctcgatgtgtcctaccctccttggaacttgaccatgactgtcttccaaggaga

SEQ ID NO: 148291 - DNA, 120 bp, Artificial Sequence
  ENSG00000105366_7 (sequence is synthesized)
tgccacagcatccacagccctgggaaatggctcatctctttcagtccttgagggccagtctctgcgcctggtctgtgctgtcaacagcaatccccctgccaggctgagctggacccgggg

SEQ ID NO: 148292 - DNA, 120 bp, Artificial Sequence
  ENSG00000105366_8 (sequence is synthesized)
gagcctgaccctgtgcccctcacggtcctcaaaccctgggctgctggagctgcctcgagtgcacgtgagggatgaaggggaattcacctgccgagctcagaacgctcagggctcccagca

SEQ ID NO: 148293 - DNA, 120 bp, Artificial Sequence
  ENSG00000105366_9 (sequence is synthesized)
catttccctgagcctctccctgcagaatgagggcacaggcacctcaagacctgtatcacaagtgacactggcagcagtcgggggagctggagccacagccctggccttcctgtccttctg

SEQ ID NO: 148294 - DNA, 120 bp, Artificial Sequence
  ENSG00000105366_10 (sequence is synthesized)
catcatcttcatcatagtgaggtcctgcaggaagaaatcggcaaggccagcagcgggcgtgggggatacaggcatggaagatgcaaaggccatcaggggctcggcctctcagggacccct

SEQ ID NO: 148295 - DNA, 120 bp, Artificial Sequence
  ENSG00000105366_11 (sequence is synthesized)
gactgaatcctggaaagatggcaaccccctgaagaagcctcccccagctgttgccccctcgtcaggggaggaaggagagctccattatgcaaccctcagcttccataaagtgaagcctca

SEQ ID NO: 148296 - DNA, 120 bp, Artificial Sequence
  ENSG00000105366_12 (sequence is synthesized)
agagactcaggcctgtttgaggaatcacaacccctccagcaaagaagtcagaggctgattctcatagaacaagaaccctctagagccccatgctatgcagtaggtcaccagggctccctc

SEQ ID NO: 148297 - DNA, 120 bp, Artificial Sequence
  ENSG00000105366_13 (sequence is synthesized)
ctcctgtctaaccaaaacttggaccaatgtctcccctttccccggctaccagggacccatccctgcctctagcttctactacccaccattctcctctcgacctctctgaggttgactatt

SEQ ID NO: 148298 - DNA, 120 bp, Artificial Sequence
  ENSG00000105366_14 (sequence is synthesized)
ttagattccacatagagatgaggtcatgtggtacttgcctctctgtgtgtggctcattttacacaaaaaaatatcccctaggttcatccatgttctctcaaatgacagaatcaagcactg

SEQ ID NO: 148299 - DNA, 76 bp, Artificial Sequence
  ENSG00000105366_15 (sequence is synthesized)
ggttcatccatgttctctcaaatgacagaatcaagcactgaatatttttttttctttgtcaatctctgctcactgc

SEQ ID NO: 148300 - DNA, 120 bp, Artificial Sequence
  ENSG00000105366_16 (sequence is synthesized)
gggatttcaggcatgagccaccgcacccagcttgcattgaatattttcaaggagctaaaagaagattttaaatggtctcacaaaaacagataaatatttgcacagatgggtgtgctaatc

SEQ ID NO: 148301 - DNA, 120 bp, Artificial Sequence
  ENSG00000105366_17 (sequence is synthesized)
gataaatatttgcacagatgggtgtgctaatcattgtgccttgatggttccacgatgtatccgggtgtggaaatctcactgggtctctctcaaggccactcggctactcaggacagggct

SEQ ID NO: 148302 - DNA, 120 bp, Artificial Sequence
  ENSG00000105366_18 (sequence is synthesized)
ggaatttaaagcctgtccgattctgaggtctcttctctcatctagcactgagtcaagcaatcagcaggctgggcaccccttagccataagttttcaggaaataaattccttgagggcatt

SEQ ID NO: 148303 - DNA, 120 bp, Artificial Sequence
  ENSG00000105366_19 (sequence is synthesized)
gacttttacaaaagagggagcagcaatggcctagagtctcaggaacaagacaggtgcactgaggagatgaaggccgggaccccctgcccaacctgtatggcgggtctgtacttattttgt

SEQ ID NO: 148304 - DNA, 80 bp, Artificial Sequence
  ENSG00000105366_20 (sequence is synthesized)
cccctgcccaacctgtatggcgggtctgtacttattttgtttacccccaatttaaaacgtttttttttattgcaggttgt

SEQ ID NO: 148305 - DNA, 89 bp, Artificial Sequence
  ENSG00000105366_21 (sequence is synthesized)
catgggggtggttcccccatgctgttctgatagtgagtgagttatcacgagatctgatggttttgtaagtggtggtttcccctgctctt

SEQ ID NO: 148306 - DNA, 78 bp, Artificial Sequence
  ENSG00000105366_22 (sequence is synthesized)
tcttgcctgccaccatgtaagatgtgcctgcgccatgtggaactgtgagtcaattacacctctttcatttataaatta

SEQ ID NO: 148307 - DNA, 120 bp, Artificial Sequence
  ENSG00000105366_23 (sequence is synthesized)
gattgtaagtttcctgaggcctcccccgccatgtggaactgtgagtcaattacacctctttcatttataaattactcagtctcaggtatttcttaatagcagtgtgaaaacaggctaaca

SEQ ID NO: 148308 - DNA, 120 bp, Artificial Sequence
  ENSG00000105366_24 (sequence is synthesized)
tgaaaacaggctaacacattgttctttgaaatttaaaaatagcgttagcttttcagttgaatcacgcagctcttacatgtgccatgccatgagtgttgccaaacatgcacccctgtgtaa

SEQ ID NO: 148309 - DNA, 120 bp, Artificial Sequence
  ENSG00000105369_0 (sequence is synthesized)
tccactcacagcctgaagcatacccggcaggggctgtccccaggcccaacaagcaaagggcccagtagcgagggccactggagcccatctccggggggctgggcaggaagtagggtgggg

SEQ ID NO: 148310 - DNA, 120 bp, Artificial Sequence
  ENSG00000105369_1 (sequence is synthesized)
tttggggtagggatctggtaccctgggactgctgcaactcaaactaaccaacccactgggagaagatgcctgggggtccaggagtcctccaagctctgcctgccaccatcttcctcctct

SEQ ID NO: 148311 - DNA, 120 bp, Artificial Sequence
  ENSG00000105369_2 (sequence is synthesized)
tcctgctgtctgctgtctacctgggccctgggtgccaggccctgtggatgcacaaggtcccagcatcattgatggtgagcctgggggaagacgcccacttccaatgcccgcacaatagca

SEQ ID NO: 148312 - DNA, 120 bp, Artificial Sequence
  ENSG00000105369_3 (sequence is synthesized)
gcaacaacgccaacgtcacctggtggcgcgtcctccatggcaactacacgtggccccctgagttcttgggcccgggcgaggaccccaatggtacgctgatcatccagaatgtgaacaaga

SEQ ID NO: 148313 - DNA, 120 bp, Artificial Sequence
  ENSG00000105369_4 (sequence is synthesized)
gccatgggggcatatacgtgtgccgggtccaggagggcaacgagtcataccagcagtcctgcggcacctacctccgcgtgcgccagccgccccccaggcccttcctggacatgggggagg

SEQ ID NO: 148314 - DNA, 120 bp, Artificial Sequence
  ENSG00000105369_5 (sequence is synthesized)
gcctgggacgctgctgctgttcaggaaacgatggcagaacgagaagctcgggttggatgccggggatgaatatgaagatgaaaacctttatgaaggcctgaacctggacgactgctccat

SEQ ID NO: 148315 - DNA, 120 bp, Artificial Sequence
  ENSG00000105369_6 (sequence is synthesized)
gtatgaggacatctcccggggcctccagggcacctaccaggatgtgggcagcctcaacataggagatgtccagctggagaagccgtgacacccctactcctgccaggctgcccccgcctg

SEQ ID NO: 148316 - DNA, 120 bp, Artificial Sequence
  ENSG00000105369_7 (sequence is synthesized)
ctgtgcacccagctccagtgtctcagctcacttccctgggacattctcctttcagcccttctgggggcttccttagtcatattcccccagtggggggtgggagggtaacctcactcttct

SEQ ID NO: 148317 - DNA, 120 bp, Artificial Sequence
  ENSG00000105369_8 (sequence is synthesized)
ccaggccaggcctccttggactcccctgggggtgtcccactcttcttccctctaaactgccccacctcctaacctaatccccccgccccgctgcctttcccaggctcccctcaccccagc

SEQ ID NO: 148318 - DNA, 120 bp, Artificial Sequence
  ENSG00000105369_9 (sequence is synthesized)
gggtaatgagcccttaatcgctgcctctaggggagctgattgtagcagcctcgttagtgtcaccccctcctccctgatctgtcagggccacttagtgataataaattcttcccaactgca

SEQ ID NO: 148319 - DNA, 120 bp, Artificial Sequence
  ENSG00000105369_10 (sequence is synthesized)
cgctggggacactcggtttatctttgaagtggggatagagccagtaccttcaatgtgggtttcaaaccggcttggacagagggacggacattctcctctgcagagtggggtctctggggg

SEQ ID NO: 148320 - DNA, 120 bp, Artificial Sequence
  ENSG00000105369_11 (sequence is synthesized)
gtctggggccttgcaggaggtgggcggggccaggaggctagggagggcaagaggggccagggctctgagccatactacctccttgcagagccgccccccaggcccttcctggacatgggg

SEQ ID NO: 148321 - DNA, 120 bp, Artificial Sequence
  ENSG00000105370_0 (sequence is synthesized)
tggcagaaggagggctcgggcaggctctgccactcagatcaccatgtacagcttcatgggtggtggcctgttctgtgcctgggtggggaccatcctcctggtggtggccatggcaacaga

SEQ ID NO: 148322 - DNA, 120 bp, Artificial Sequence
  ENSG00000105370_1 (sequence is synthesized)
ccactggatgcagtaccggctgtcagggtccttcgcccaccagggcctgtggcggtactgcctgggcaacaagtgctacctgcagacagacagcatcggtgagccccccggccagggtcc

SEQ ID NO: 148323 - DNA, 120 bp, Artificial Sequence
  ENSG00000105370_2 (sequence is synthesized)
aggccgcgcctggggaaagagcagggcggacctcggggcccaaggacacctgtattccagatggagaactctgcggctcaaagagggaaagggagcaacccaagcatactggaatgccac

SEQ ID NO: 148324 - DNA, 120 bp, Artificial Sequence
  ENSG00000105370_3 (sequence is synthesized)
ccgggccttcatgatcctgtctgccctatgcgccatctccggcatcatcatgggcatcatggccttcgctcatcagcctaccttctcccgcatctcccggcccttctctgctggcatcat

SEQ ID NO: 148325 - DNA, 120 bp, Artificial Sequence
  ENSG00000105370_4 (sequence is synthesized)
tcgtgttggccttggccatctacactggagtcaccgtcagcttcctgggccgccgctttggggactggcgcttttcctggtcctacatcctgggctgggtggcagtgctcatgacgttct

SEQ ID NO: 148326 - DNA, 120 bp, Artificial Sequence
  ENSG00000105370_5 (sequence is synthesized)
tcgcagggattttctacatgtgcgcctaccgggtgcatgaatgccggcgcctgtctacaccccgctgagcccaaatgtgtcccccaacttcatctggaagttaaagtgaggccactgaag

SEQ ID NO: 148327 - DNA, 120 bp, Artificial Sequence
  ENSG00000105370_6 (sequence is synthesized)
aggaggaggagggtctagaggcctgaaatcctggttcctaggggaatgagggggctcagttctggactgtgggtttgtggggggaggctgactcctggtcctaggctggaaggaggaaga

SEQ ID NO: 148328 - DNA, 120 bp, Artificial Sequence
  ENSG00000105370_7 (sequence is synthesized)
atagggcccatgggagggagctgagaagactcaagtccccgtctgcctggcaggttgttagaaaaatggactatccattagagcaactttctggggcctaataaaactgatgtgaaacta

SEQ ID NO: 148329 - DNA, 120 bp, Artificial Sequence
  ENSG00000105371_0 (sequence is synthesized)
atctctagagccggccctggctctctggcgcggggccccttagtccgggctttttgccatggggtctctgttccctctgtcgctgctgttttttttggcggccgcctacccgggagttgg

SEQ ID NO: 148330 - DNA, 120 bp, Artificial Sequence
  ENSG00000105371_1 (sequence is synthesized)
gagcgcgctgggacgccggactaagcgggcgcaaagccccaagggtagccctctcgcgccctccgggacctcagtgcccttctgggtgcgcatgagcccggagttcgtggctgtgcagcc

SEQ ID NO: 148331 - DNA, 120 bp, Artificial Sequence
  ENSG00000105371_2 (sequence is synthesized)
ggggaagtcagtgcagctcaattgcagcaacagctgtccccagccgcagaattccagcctccgcaccccgctgcggcaaggcaagacgctcagagggccgggttgggtgtcttaccagct

SEQ ID NO: 148332 - DNA, 120 bp, Artificial Sequence
  ENSG00000105371_3 (sequence is synthesized)
gctcgacgtgagggcctggagctccctcgcgcactgcctcgtgacctgcgcaggaaaaacacgctgggccacctccaggatcaccgcctacaaaccgccccacagcgtgattttggagcc

SEQ ID NO: 148333 - DNA, 120 bp, Artificial Sequence
  ENSG00000105371_4 (sequence is synthesized)
tccggtcttaaagggcaggaaatacactttgcgctgccacgtgacgcaggtgttcccggtgggctacttggtggtgaccctgaggcatggaagccgggtcatctattccgaaagcctgga

SEQ ID NO: 148334 - DNA, 120 bp, Artificial Sequence
  ENSG00000105371_5 (sequence is synthesized)
cgcgcgcctcaatctcgacggcctggtggtccgcaacagctcggcacccattacactgatgctcgcttggagccccgcgcccacagctttggcctccggttccatcgctgcccttgtagg

SEQ ID NO: 148335 - DNA, 120 bp, Artificial Sequence
  ENSG00000105371_6 (sequence is synthesized)
gatcctcctcactgtgggcgctgcgtacctatgcaagtgcctagctatgaagtcccaggcgtaaagggggatgttctatgccggctgagcgagaaaaagaggaatatgaaacaatctggg

SEQ ID NO: 148336 - DNA, 120 bp, Artificial Sequence
  ENSG00000105371_7 (sequence is synthesized)
atgcaaaaaatacacaaattagcctggtgtggtggcccgcacctgtggtcccagctacccgggaggctgagttgggaggatcctttgagccctgaaagtcgaggttgcagtgagccttga

SEQ ID NO: 148337 - DNA, 85 bp, Artificial Sequence
  ENSG00000105371_8 (sequence is synthesized)
cgaccctgtctccaaaaataaaataaaaataaaaataaatattggcgggggaaccctctggaatcaataaaggcttccttaacca

SEQ ID NO: 148338 - DNA, 120 bp, Artificial Sequence
  ENSG00000105371_9 (sequence is synthesized)
tccgcaacagctcggcacccattacactgatgctcggtgaggcacccctgtaaccctggggactaggaggaagggggcagagagagttatgaccccgagagggcgcacagaccaagcgtg

SEQ ID NO: 148339 - DNA, 120 bp, Artificial Sequence
  ENSG00000105372_0 (sequence is synthesized)
gtcagcgccgtccgggaaccgagcgtgggccccggggggcagcggcgggatgcctggagttactgtaaaagacgtgaaccagcaggagttcgtcagagctctggcagccttcctcaaaaa

SEQ ID NO: 148340 - DNA, 120 bp, Artificial Sequence
  ENSG00000105372_1 (sequence is synthesized)
gtccgggaagctgaaagtccccgaatgggtggataccgtcaagctggccaagcacaaagagcttgctccctacgatgagaactggttctacacgcgagctgcttccacagcgcggcacct

SEQ ID NO: 148341 - DNA, 120 bp, Artificial Sequence
  ENSG00000105372_2 (sequence is synthesized)
gggggacgtcagagaaacggcgtcatgcccagccacttcagccgaggctccaagagtgtggcccgccgggtcctccaagccctggaggggctgaaaatggtggaaaaggaccaagatggc

SEQ ID NO: 148342 - DNA, 120 bp, Artificial Sequence
  ENSG00000105372_3 (sequence is synthesized)
ggccgcaaactgacacctcagggacaaagagatctggacagaatcgccggacaggtggcagctgccaacaagaagcattagaacaaaccatgctgggttaataaattgcctcattcgtaa

SEQ ID NO: 148343 - DNA, 85 bp, Artificial Sequence
  ENSG00000105372_4 (sequence is synthesized)
tctggtttgggtctcttgattgttcttcaggggcatgaggaagaggcgcttcctcccttcccttgggtgagggggcccagggtga

SEQ ID NO: 148344 - DNA, 120 bp, Artificial Sequence
  ENSG00000105372_5 (sequence is synthesized)
gcgcttcctcccttcccttgggtgagggggcccagggtgattgggtggctgtttacccggcagccagtcgggccttcccaggtcaaacagttcccatctgggtttggaggaaggacccag

SEQ ID NO: 148345 - DNA, 120 bp, Artificial Sequence
  ENSG00000105372_6 (sequence is synthesized)
gggcccttgtggctcactcccccacatcctgtctttgcaattgtcagaaagtgagaaacgaaaggatggctgtgagctgtgacctcagctgggcctgggctgcagaggtggcttccgctg

SEQ ID NO: 148346 - DNA, 120 bp, Artificial Sequence
  ENSG00000105372_7 (sequence is synthesized)
cactaactttcctgggcctggggcctgcacaggctgaatggtccttgagccttcactctgcatctgagcggtcttgggcccgctgagtggcagtggcaggaagtcggtggaagcagatcc

SEQ ID NO: 148347 - DNA, 120 bp, Artificial Sequence
  ENSG00000105372_8 (sequence is synthesized)
ctgtgcagaagttgaattaccagggcggccacacacgggctgcacaacctttgcagtcgtgcacggcaagtgggatgtggcctccgcccatgattgggcacctggtcaggctgggagatc

SEQ ID NO: 148348 - DNA, 120 bp, Artificial Sequence
  ENSG00000105372_9 (sequence is synthesized)
caaatagcacccagtgggcagctgtccgacccctggaggggcaagccaggaaagaaacttagggcccgctgtgaccagatgtccctcccagttgggaagactaaactggtttggccaata

SEQ ID NO: 148349 - DNA, 120 bp, Artificial Sequence
  ENSG00000105372_10 (sequence is synthesized)
tctcccaggattcccctgtccaaattattcctgggatctgacccatttcctggaaaggggcgagcctgggttttgaagttcaaactagagtttaaatcacaactctgcccctaatcccac

SEQ ID NO: 148350 - DNA, 120 bp, Artificial Sequence
  ENSG00000105372_11 (sequence is synthesized)
gtaaccctgtgcaccttatcctctgagccttcgtctcctcgtgtgtaagcctgctaactcctgagagactggacaagatgccgtggagagccttggctctgagtagctctgctgctggac

SEQ ID NO: 148351 - DNA, 89 bp, Artificial Sequence
  ENSG00000105372_12 (sequence is synthesized)
ccgtggagagccttggctctgagtagctctgctgctggacagttcagttggcagtccccaaacgtaaggcgtaagagtttaagaagtat

SEQ ID NO: 148352 - DNA, 78 bp, Artificial Sequence
  ENSG00000105372_13 (sequence is synthesized)
tcaacactttgggaggccgagacgggctgatcacctgaggttgggagcaataccaaaattagttgggcatggtggcgc

SEQ ID NO: 148353 - DNA, 79 bp, Artificial Sequence
  ENSG00000105372_14 (sequence is synthesized)
gaggctgaggcagaagaatcgctcgaaccccggaggcggaggttgcagtgggttgagatcgagcaattgcagaatcaat

SEQ ID NO: 148354 - DNA, 120 bp, Artificial Sequence
  ENSG00000105372_15 (sequence is synthesized)
ccctttcccctggctggcagcgcggaggccgcacggtaagcgggggctccgagctggaccgggcgcgaggcggcagggccggacgccgaagcctcagagcgcgtgcctgagggccccgag

SEQ ID NO: 148355 - DNA, 120 bp, Artificial Sequence
  ENSG00000105372_16 (sequence is synthesized)
agctgggtgacccctggcacaaaccatacttccctgtctcctctgagctctttcccgccccaagagggagagaaacccttggttgtgtcaccacttgctttgtgtgatgtgacattcgat

SEQ ID NO: 148356 - DNA, 120 bp, Artificial Sequence
  ENSG00000105372_17 (sequence is synthesized)
aacttggtactccaagtttttatgacattctaagagctttgtgagaggaggacctgtggctttgagcctcaggggaaaccagagacagatgaatgttcatattttgcttacaggtggttt

SEQ ID NO: 148357 - DNA, 120 bp, Artificial Sequence
  ENSG00000105372_18 (sequence is synthesized)
aatcctttctatatacacggaggcagactccctgggtttggatccatcttttacatctggctgtgtgtcctctggcaagttggttaacctgcctgtgcactctctcatccccaaaatggg

SEQ ID NO: 148358 - DNA, 120 bp, Artificial Sequence
  ENSG00000105372_19 (sequence is synthesized)
ctatatacacggaggcagactccctgggtttggatccatcttttacatctggctgtgtgtcctctgcttccacagcgcggcacctgtacctccggggtggcgctggggttggctccatga

SEQ ID NO: 148359 - DNA, 120 bp, Artificial Sequence
  ENSG00000105372_20 (sequence is synthesized)
ttagcttccacagcgcggcacctgtacctccggggtggcgctggggttggctccatgaccaagatctatgggggacgtcagagaaacggcgtcatgcccagccacttcagccgaggctcc

SEQ ID NO: 148360 - DNA, 120 bp, Artificial Sequence
  ENSG00000105372_21 (sequence is synthesized)
tcagcctcccaagtacctgggactacaggacctgctgaagatggagatgtgggagtccagtttggtgtcctggtgtgcgtctgagagcagctgctgaattgggatgtctggaaacacttc

SEQ ID NO: 148361 - DNA, 120 bp, Artificial Sequence
  ENSG00000105372_22 (sequence is synthesized)
tgtctggaaacacttcttgtaggttggaggctgctccatctctggctcctgcatggggctgggcacccacttgtgctatgatagtagaaagaatgagatctgggaggcatcacagaagtg

SEQ ID NO: 148362 - DNA, 120 bp, Artificial Sequence
  ENSG00000105372_23 (sequence is synthesized)
ctttgactcagtaggtcaggatgggaccaccggtctggactttgctgagctgtgatgactcctaaggagccgtgcttggttggtctgccccgtgctcagatccagagggaccctccctct

SEQ ID NO: 148363 - DNA, 120 bp, Artificial Sequence
  ENSG00000105372_24 (sequence is synthesized)
cggtctagcaggaacacagctgccctcccttgaccatgaactcacagtagagtggagaggggtggcctcctttacagttccaggtagggggtgattcctggacaggggttcctgagagga

SEQ ID NO: 148364 - DNA, 120 bp, Artificial Sequence
  ENSG00000105372_25 (sequence is synthesized)
gtgggttgccatcccaagaatgcacacagcagaggagcagaaggcctctagcatggaggaactggaggagaacccatttgtgacagcaacttgctcgcaattggccctcatgagtaccag

SEQ ID NO: 148365 - DNA, 120 bp, Artificial Sequence
  ENSG00000105372_26 (sequence is synthesized)
ctacggcggtctgcatttgtgcagctccacatcaaaagctggggctggaaccttggtctccagggggtgaggaaaaagcttccacagcgcggcacctgtacctccggggtggcgctgggg

SEQ ID NO: 148366 - DNA, 120 bp, Artificial Sequence
  ENSG00000105373_0 (sequence is synthesized)
cttcctttgacaagatggcggcaggaggcagtggcgttggtgggaagcgcagctcgaaaagcgatgccgattctggtttcctggggctgcggcccacttcggtggacccagcgctgaggc

SEQ ID NO: 148367 - DNA, 120 bp, Artificial Sequence
  ENSG00000105373_1 (sequence is synthesized)
ggcggcggcgaggcccaagaaataagaagcggggctggcggcggcttgctcaggagccgctggggctggaggttgaccagttcctggaagacgtgcggctacaggagcgcacgagcggtg

SEQ ID NO: 148368 - DNA, 120 bp, Artificial Sequence
  ENSG00000105373_2 (sequence is synthesized)
gcttgttgtcagaggccccaaatgaaaaactcttcttcgtggacactggctccaaggaaaaagggctgacaaagaagagaaccaaagtccagaagaagtcactgcttctcaagaaacccc

SEQ ID NO: 148369 - DNA, 120 bp, Artificial Sequence
  ENSG00000105373_3 (sequence is synthesized)
ttcgggttgacctcatcctcgagaacacatccaaagtccctgcccccaaagacgtcctcgcccaccaggtccccaacgccaagaagctcaggcggaaggagcagctatgggagaagctgg

SEQ ID NO: 148370 - DNA, 120 bp, Artificial Sequence
  ENSG00000105373_4 (sequence is synthesized)
ccaagcagggcgagctgccccgggaggtgcgcagggcccaggcccggctcctcaacccttctgcaacaagggccaagcccgggccccaggacaccgtagagcggcccttctacgacctct

SEQ ID NO: 148371 - DNA, 120 bp, Artificial Sequence
  ENSG00000105373_5 (sequence is synthesized)
gggcctcagacaaccccctggacaggccgttggttggccaggatgagtttttcctggagcagaccaagaagaaaggagtgaagcggccagcacgcctgcacaccaagccgtcccaggcac

SEQ ID NO: 148372 - DNA, 120 bp, Artificial Sequence
  ENSG00000105373_6 (sequence is synthesized)
gctctcagcggcccacgaggtggagttgcagcggcagaaggaggcggagaagctggagcggcagctggccctgcccgccacggagcaggccgccacccaggagtccacattccaggagct

SEQ ID NO: 148373 - DNA, 120 bp, Artificial Sequence
  ENSG00000105373_7 (sequence is synthesized)
gtgcgaggggctgctggaggagtcggatggtgagggggagccaggccagggcgaggggccggaggctggggatgccgaggtctgtcccacgcccgcccgcctggccaccacagagaagaa

SEQ ID NO: 148374 - DNA, 120 bp, Artificial Sequence
  ENSG00000105373_8 (sequence is synthesized)
gacggagcagcagcggcggcgggagaaggctgtgcacaggctgcgggtacagcaggccgcgttgcgggccgcccggctccggcaccaggagctgttccggctgcgcgggatcaaggccca

SEQ ID NO: 148375 - DNA, 120 bp, Artificial Sequence
  ENSG00000105373_9 (sequence is synthesized)
ggtggccctgaggctggcggagctggcgcggcggcagaggcggcggcaggcgcggcgggaggctgaggctgacaagccccgaaggctggggcggctcaagtaccaggcacctgacatcga

SEQ ID NO: 148376 - DNA, 120 bp, Artificial Sequence
  ENSG00000105373_10 (sequence is synthesized)
cgtgcagctgagctcggagctgacagactcgctcaggaccctgaagcccgagggcaacatccttcgagaccggttcaagagcttccagaggaggaatatgatcgagcctcgagagagagc

SEQ ID NO: 148377 - DNA, 120 bp, Artificial Sequence
  ENSG00000105373_11 (sequence is synthesized)
caagttcaaacgcaagtacaaggtgaagctggtggagaagcgggcgttccgtgagatccagttgtagctgccatcagatgccggagactcgcccttcaataaaaaatctcttctagctga

SEQ ID NO: 148378 - DNA, 120 bp, Artificial Sequence
  ENSG00000105373_12 (sequence is synthesized)
cgagggcaacatccttcgagaccggttcaagagcttccagaggaggaatatgatcgagcctcgagagagagccaagtaaggggcggccggggctgctgtggggcgagggcatctgggatt

SEQ ID NO: 148379 - DNA, 120 bp, Artificial Sequence
  ENSG00000105373_13 (sequence is synthesized)
gtccctgctccaggttcaaacgcaagtacaaggtgaagctggtggagaagcgggcgttccgtgagatccagttgtagctgccatcagatgccggagactcgcccttcaataaaaaatctc

SEQ ID NO: 148380 - DNA, 120 bp, Artificial Sequence
  ENSG00000105373_14 (sequence is synthesized)
tgggggctcctgtcccggggaccgccgaggaaatggagagcatgggcaggggactcagcatgggaagctggagagcttgatagagttaccagatttagcagataaatatacaggacgctc

SEQ ID NO: 148381 - DNA, 65 bp, Artificial Sequence
  ENSG00000105373_15 (sequence is synthesized)
gattctcctgcctcagctccttagtagctgggattacaggcgggcgccaccacgctcggcagtcc

SEQ ID NO: 148382 - DNA, 120 bp, Artificial Sequence
  ENSG00000105373_16 (sequence is synthesized)
tcctttgaagaccaccaggtacactgccccgtccaggcctccctcctcagtgggctctgcctcttggtcaggccttcactagcttcctccctgtgctgggaactccaatgacccagacag

SEQ ID NO: 148383 - DNA, 120 bp, Artificial Sequence
  ENSG00000105373_17 (sequence is synthesized)
tgtgtgttgtgcactgcacgagagtacagtgtgaaagggagtgctttgtgggtgctttggtgacctcccagcagagtcgtgcgtcctgaaggggcggccgtttcccactcgtgcttttcc

SEQ ID NO: 148384 - DNA, 120 bp, Artificial Sequence
  ENSG00000105373_18 (sequence is synthesized)
tttcctgagttgtgaggcttcaggaaaggaagccttcagctttggtctcttccactttctgaacccgtccagacacagttttgtcctggtgatcaaggcccttggggtctagaatcagtc

SEQ ID NO: 148385 - DNA, 120 bp, Artificial Sequence
  ENSG00000105373_19 (sequence is synthesized)
cttcccttgcctgagcttcagggtcacctttttgaaatgtggagggattgggggggagcctttggtgcctcttccatgctgggactgtcccagcagctcccctcgctgtatccacagacc

SEQ ID NO: 148386 - DNA, 120 bp, Artificial Sequence
  ENSG00000105373_20 (sequence is synthesized)
cacctggcccagcctggggggtcaggaagggctcccgggaggaggggtcgcctgagccgaggcagaggctgagggaggggtttgcagtgggaggaggggagtgggttttccaggtggtgg

SEQ ID NO: 148387 - DNA, 120 bp, Artificial Sequence
  ENSG00000105373_21 (sequence is synthesized)
gaacagcactgcaaaggcacagagttgagagagaccgtggcgccttccaggaagcctgtggggcagagatgaaaaaggctgtggtgacacggtggcacactggcagccaagtgacagtta

SEQ ID NO: 148388 - DNA, 120 bp, Artificial Sequence
  ENSG00000105373_22 (sequence is synthesized)
tatatgggcgaggctagctcagcgatgggaaagtctagctggagccactgtgcatttagcgggcatctgttgagcacagatgctgtggacaaaggggacaaaaacccctcccttggccgg

SEQ ID NO: 148389 - DNA, 69 bp, Artificial Sequence
  ENSG00000105373_23 (sequence is synthesized)
atggtgaaaccctgtctctactaaatacagaaaattagcagggcatggcagcacgcatctgtggtccca

SEQ ID NO: 148390 - DNA, 120 bp, Artificial Sequence
  ENSG00000105373_24 (sequence is synthesized)
actgcagcctgtgtaacagagcgagactcaaaaaacaagcacaaccctccctcaaggaacagcccttctcatggggtcacgtgactggagagatgctgagatgtttgcggtagatgcagg

SEQ ID NO: 148391 - DNA, 120 bp, Artificial Sequence
  ENSG00000105373_25 (sequence is synthesized)
accgcttgtccgaatcgttttcagcattcataagaaggagatagctagccaggaacagaggcagcttcctcatctggtagagaaaagtgtctgcggaaaaaagcaacagtgtgctcatgg

SEQ ID NO: 148392 - DNA, 120 bp, Artificial Sequence
  ENSG00000105373_26 (sequence is synthesized)
ttgaaagcgtgagggtgccgctcactgccatctgttcctggaccagatgtgggagggggcgtggagatcagacattcacttttagatttgtacagaactacttcgtagagataaaattca

SEQ ID NO: 148393 - DNA, 120 bp, Artificial Sequence
  ENSG00000105373_27 (sequence is synthesized)
cttaaccatacggtcagcctagttagagtatgtgattcagtggcttttagtgaccattgtgtaaccatccccgcagtcaattttagaacattttcactgtccgtaaaggaaacctcacac

SEQ ID NO: 148394 - DNA, 120 bp, Artificial Sequence
  ENSG00000105373_28 (sequence is synthesized)
caccattgcactccagtctgggcaacaagacagaaactctatctcaaaaaaaaaatgtgaagcgtgcaggtcagactgccttcacagacgtgcagagcaggtgtgagggcgagggtttga

SEQ ID NO: 148395 - DNA, 120 bp, Artificial Sequence
  ENSG00000105373_29 (sequence is synthesized)
ggtgccctctggctctgtgcagggtgggtgtgctggtagacggggtgtggggaggaaagcctgggccggggcgggatccacgggcactggatgagggacagatgggaggtaagagggtct

SEQ ID NO: 148396 - DNA, 120 bp, Artificial Sequence
  ENSG00000105373_30 (sequence is synthesized)
agtctcagtgtcccaggaggggttcagggacccatcctcactcccgcccctcagaccctgctctcagcggcccacgaggtggagttgcagcggcagaaggaggcggagaagctggagcgg

SEQ ID NO: 148397 - DNA, 120 bp, Artificial Sequence
  ENSG00000105373_31 (sequence is synthesized)
cagctggccctgcccgccacggagcaggccgccacccaggtgagccccgcacctgcccactccctcccctccccgggcctcctacccacccctgacactgcaccccgcctccccaggagt

SEQ ID NO: 148398 - DNA, 120 bp, Artificial Sequence
  ENSG00000105373_32 (sequence is synthesized)
ccgtgccccccaggggctatgggcgacaccatggctgcccctgggctgggccagtggggccaatgcccaggggctgagggcacgggatgctgggatgagatcccagggtgaggggccagg

SEQ ID NO: 148399 - DNA, 120 bp, Artificial Sequence
  ENSG00000105373_33 (sequence is synthesized)
ctaaggtttgagtccgggaccctaagaaggcctttccttccagctggtccctgttgcagtcccggtcacctttaggactagagggaccttcctgaagctcagaaccaaccctgtccctcc

SEQ ID NO: 148400 - DNA, 120 bp, Artificial Sequence
  ENSG00000105373_34 (sequence is synthesized)
cctgctcggaacctgctgtggctccccagtgcccctgaggaagcccagctcctctgtcagccacacgcctgggccgacccggccgtggggctccagccagttgtgctcatgagcggactg

SEQ ID NO: 148401 - DNA, 120 bp, Artificial Sequence
  ENSG00000105373_35 (sequence is synthesized)
tgccttctccctctgatccagcctttgccctcgctgtccccttttctgtgtcgtcaccagcccacttcccgtgactcctctaagcccagcttagagatggccataggttggtggctgtca

SEQ ID NO: 148402 - DNA, 120 bp, Artificial Sequence
  ENSG00000105373_36 (sequence is synthesized)
tcccaacactgagccccagcagctgagggccaggctgagtccctggtgcccacaggctgccctggggggagactgcatggggctgagccctgccaggaccccgaggagaggtccaggccc

SEQ ID NO: 148403 - DNA, 120 bp, Artificial Sequence
  ENSG00000105374_0 (sequence is synthesized)
ctttcttgggctctaaggacccaggagtctgggtgcacagcctccttctctctgagattcaagagtctgatcagcagcctcttcctcctccaggacccagaagccctgagcttatcccca

SEQ ID NO: 148404 - DNA, 120 bp, Artificial Sequence
  ENSG00000105374_1 (sequence is synthesized)
tggagctctgccggtccctggccctgctggggggctccctgggcctgatgttctgcctgattgctttgagcaccgatttctggtttgaggctgtgggtcccacccactcagctcactcgg

SEQ ID NO: 148405 - DNA, 120 bp, Artificial Sequence
  ENSG00000105374_2 (sequence is synthesized)
gcctctggccaacagggcatggggacatcatatcaggctacatccacgtgacgcagaccttcagcattatggctgttctgtgggccctggtgtccgtgagcttcctggtcctgtcctgct

SEQ ID NO: 148406 - DNA, 120 bp, Artificial Sequence
  ENSG00000105374_3 (sequence is synthesized)
ttgctgcagccatctccatggtggtggccatggcggtgtacaccagcgagcggtgggaccagcctccacacccccagatccagaccttcttctcctggtccttctacctgggctgggtct

SEQ ID NO: 148407 - DNA, 120 bp, Artificial Sequence
  ENSG00000105374_4 (sequence is synthesized)
cagctatcctcttgctctgtacaggtgccctgagcctgggtgctcactgtggcggtccccgtcctggctatgaaaccttgtgagcagaaggcaagagcggcaagatgagttttgagcgtt

SEQ ID NO: 148408 - DNA, 120 bp, Artificial Sequence
  ENSG00000105374_5 (sequence is synthesized)
gtattccaaaggcctcatctggagcctcgggaaagtctggtcccacatctgcccgcccttccagcccttccccagcccctcctcttgtttcttcattcattcaacaaaatttggctggaa

SEQ ID NO: 148409 - DNA, 120 bp, Artificial Sequence
  ENSG00000105376_0 (sequence is synthesized)
acaccccacccgccgcgccgcgcggagccgtcctctagcccagctcctcggctcgcgctctcctcgcctcctgtgctttccccgccgcggcgatgccagggccttcgccagggctgcgcc

SEQ ID NO: 148410 - DNA, 120 bp, Artificial Sequence
  ENSG00000105376_1 (sequence is synthesized)
gggcgctactcggcctctgggctgctctgggcctggggctcttcggcctctcagcggtctcgcaggagcccttctgggcggacctgcagcctcgcgtggcgttcgtggagcgcgggggct

SEQ ID NO: 148411 - DNA, 120 bp, Artificial Sequence
  ENSG00000105376_2 (sequence is synthesized)
cgctgtggctgaattgcagcaccaactgccctcggccggagcgcggtggcctggagacctcgctgcgccgaaacgggacccagaggggtttgcgttggttggcgcggcagctggtggaca

SEQ ID NO: 148412 - DNA, 120 bp, Artificial Sequence
  ENSG00000105376_3 (sequence is synthesized)
ttcgcgagccggagactcagcccgtctgcttcttccgctgcgcgcggcgcacactacaggcgcgtgggctcattcgcactttccagcgaccagatcgcgtagagctgatgccgctgcctc

SEQ ID NO: 148413 - DNA, 120 bp, Artificial Sequence
  ENSG00000105376_4 (sequence is synthesized)
cctggcagccggtgggcgagaacttcaccctgagctgtagggtccccggcgccgggccccgtgcgagcctcacgctgaccctgctgcggggcgcccaggagctgatccgccgcagcttcg

SEQ ID NO: 148414 - DNA, 120 bp, Artificial Sequence
  ENSG00000105376_5 (sequence is synthesized)
ccggtgaaccaccccgagcgcggggcgcggtgctcacagccacggtactggctcggagggaggaccatggagccaatttctcgtgtcgcgccgagctggacctgcggccgcacggactgg

SEQ ID NO: 148415 - DNA, 120 bp, Artificial Sequence
  ENSG00000105376_6 (sequence is synthesized)
gactgtttgaaaacagctcggcccccagagagctccgaaccttctccctgtctccggatgccccgcgcctcgctgctccccggctcttggaagttggctcggaaaggcccgtgagctgca

SEQ ID NO: 148416 - DNA, 120 bp, Artificial Sequence
  ENSG00000105376_7 (sequence is synthesized)
ctctggacggactgtttccagcctcagaggccagggtctacctcgcactgggggaccagaatctgagtcctgatgtcaccctcgaaggggacgcattcgtggccactgccacagccacag

SEQ ID NO: 148417 - DNA, 120 bp, Artificial Sequence
  ENSG00000105376_8 (sequence is synthesized)
ctagcgcagagcaggagggtgccaggcagctggtctgcaacgtcaccctggggggcgaaaaccgggagacccgggagaacgtgaccatctacagcttcccggcaccactcctgaccctga

SEQ ID NO: 148418 - DNA, 120 bp, Artificial Sequence
  ENSG00000105376_9 (sequence is synthesized)
gcgaacccagcgtctccgaggggcagatggtgacagtaacctgcgcagctggggcccaagctctggtcacactggagggagttccagccgcggtcccggggcagcccgcccagcttcagc

SEQ ID NO: 148419 - DNA, 120 bp, Artificial Sequence
  ENSG00000105376_10 (sequence is synthesized)
taaatgccaccgagaacgacgacagacgcagcttcttctgcgacgccaccctcgatgtggacggggagaccctgatcaagaacaggagcgcagagcttcgtgtcctatacgctccccggc

SEQ ID NO: 148420 - DNA, 120 bp, Artificial Sequence
  ENSG00000105376_11 (sequence is synthesized)
tagacgattcggactgccccaggagttggacgtggcccgagggcccagagcagacgctgcgctgcgaggcccgcgggaacccagaaccctcagtgcactgtgcgcgctccgacggcgggg

SEQ ID NO: 148421 - DNA, 120 bp, Artificial Sequence
  ENSG00000105376_12 (sequence is synthesized)
gtcactcgggcgctctcaggcacttaccgctgcaaggcggccaatgatcaaggcgaggcggtcaaggacgtaacgctaacggtggagtacgcaccagcgctggacagcgtgggctgccca

SEQ ID NO: 148422 - DNA, 120 bp, Artificial Sequence
  ENSG00000105376_13 (sequence is synthesized)
gaacgcattacttggctggagggaacagaagcctcgctgagctgtgtggcgcacggggtaccgccgcctgatgtgatctgcgtgcgctctggagaactcggggccgtcatcgaggggctg

SEQ ID NO: 148423 - DNA, 120 bp, Artificial Sequence
  ENSG00000105376_14 (sequence is synthesized)
ttgcgtgtggcccgggagcatgcgggcacttaccgctgcgaagccaccaaccctcggggctctgcggccaaaaatgtggccgtcacggtggaatatggccccaggtttgaggagccgagc

SEQ ID NO: 148424 - DNA, 120 bp, Artificial Sequence
  ENSG00000105376_15 (sequence is synthesized)
tgccccagcaattggacatgggtggaaggatctgggcgcctgttttcctgtgaggtcgatgggaagccacagccaagcgtgaagtgcgtgggctccgggggcgccactgagggggtgctg

SEQ ID NO: 148425 - DNA, 120 bp, Artificial Sequence
  ENSG00000105376_16 (sequence is synthesized)
ctgccgctggcacccccagaccctagtcccagagctcccagaatccctagagtcctggcacccggtatctacgtctgcaacgccaccaaccgccacggctccgtggccaaaacagtcgtc

SEQ ID NO: 148426 - DNA, 120 bp, Artificial Sequence
  ENSG00000105376_17 (sequence is synthesized)
gtgagcgcggagtcgccaccggagatggatgaatctacctgcccaagtcaccagacgtggctggaaggggctgaggcttccgcgctggcctgcgccgcccggggtcgcccttccccagga

SEQ ID NO: 148427 - DNA, 120 bp, Artificial Sequence
  ENSG00000105376_18 (sequence is synthesized)
gtgcgctgctctcgggaaggcatcccatggcctgagcagcagcgcgtgtcccgagaggacgcgggcacttaccactgtgtggccaccaatgcgcatggcacggactcccggaccgtcact

SEQ ID NO: 148428 - DNA, 120 bp, Artificial Sequence
  ENSG00000105376_19 (sequence is synthesized)
gtgggcgtggaataccggccagtggtggccgaacttgctgcctcgccccctggaggcgtgcgcccaggaggaaacttcacgttgacctgccgcgcggaggcctggcctccagcccagatc

SEQ ID NO: 148429 - DNA, 120 bp, Artificial Sequence
  ENSG00000105376_20 (sequence is synthesized)
agctggcgcgcgcccccgggggccctcaacatcggcctgtcgagcaacaacagcacactgagcgtggcaggcgccatgggaagccacggcggcgagtacgagtgcgcagccaccaacgcg

SEQ ID NO: 148430 - DNA, 120 bp, Artificial Sequence
  ENSG00000105376_21 (sequence is synthesized)
gccggtccgtggctatgggtcgccgtgggcggcgcggcggggggcgcggcgctgctggccgcgggggccggcctggccttctacgtgcagtccaccgcctgcaagaagggcgagtacaac

SEQ ID NO: 148431 - DNA, 120 bp, Artificial Sequence
  ENSG00000105376_22 (sequence is synthesized)
gtgcagtccaccgcctgcaagaagggcgagtacaacgtgcaggaggccgagagctcaggcgaggccgtgtgtctgaacggagcgggcggcggcgctggcggggcggcaggcgcggagggc

SEQ ID NO: 148432 - DNA, 120 bp, Artificial Sequence
  ENSG00000105376_23 (sequence is synthesized)
ggcggcggggggcgcggccgagtcgccggcggagggcgaggtcttcgccatacagctgacatcggcgtgagcccgctcccctctccccgcgggccgggggacgccccccagactcacacg

SEQ ID NO: 148433 - DNA, 120 bp, Artificial Sequence
  ENSG00000105376_24 (sequence is synthesized)
ctcacacgggggcttatttattgctttatttatttacttattcatttatttatgtattcaactccaagggcgtcacccccattttctacccatcccctcaataaagtttttataaaggaa

SEQ ID NO: 148434 - DNA, 120 bp, Artificial Sequence
  ENSG00000105376_25 (sequence is synthesized)
ttcggcctctcaggtaagagccccgctctggttcggggtggacagggcgggggcggagtccctggacctgagaaacggcctcctgtccctcccagctctgccctcgcctcgctcccacgc

SEQ ID NO: 148435 - DNA, 120 bp, Artificial Sequence
  ENSG00000105376_26 (sequence is synthesized)
ctctgcccccacctcgagcctgagtcttctccccttccccctcctccccaacacacacccgagccccagcttcctgactcctcgatagcccctacccgcttcgagatcctaggtgttctt

SEQ ID NO: 148436 - DNA, 120 bp, Artificial Sequence
  ENSG00000105376_27 (sequence is synthesized)
acggactggcatcttccccactcgcggtccgcgaagactccatctctccaactaccctgactcagaggcgctgttcccgctccacccagagccctggcaaccgggtccctcagctgttcc

SEQ ID NO: 148437 - DNA, 120 bp, Artificial Sequence
  ENSG00000105376_28 (sequence is synthesized)
cgcggttccttccatgagcccagccttgcgtcccggctccgtgttcttcaccgggtgtagggtccttcctgatccttgacccagcctcgtctctcctttgcccttgccgcaaacgcactc

SEQ ID NO: 148438 - DNA, 120 bp, Artificial Sequence
  ENSG00000105376_29 (sequence is synthesized)
tcctcgtatcccggcattctgccaggaccctgagaactggttcatcccccatcccccatcccgggtccccttctctcagccttgctgtgttcatccaagaacccacctttcctctcctct

SEQ ID NO: 148439 - DNA, 120 bp, Artificial Sequence
  ENSG00000105376_30 (sequence is synthesized)
acgccctccccccatgctttcccgccgctccatcggcgctttggagaccatggctctctgctaccacgtcccagagacaccctcgaggtttagactctgggagtgcgcctttaaaccgga

SEQ ID NO: 148440 - DNA, 120 bp, Artificial Sequence
  ENSG00000105376_31 (sequence is synthesized)
tcctccccgccctctgagaacccttgactcgacataggggcgctaagatgtcagggagttggctccccaggctcagcccgcgtttccctgggcagcggtctcgcaggagcccttctgggc

SEQ ID NO: 148441 - DNA, 120 bp, Artificial Sequence
  ENSG00000105379_0 (sequence is synthesized)
gcagagaggggcgcggggggcgggggtggtggggcttctggactgagccgctgagggtgcgggctgaccctgtaagtggctgcggcgggaagatggcggagctgcgcgtgctcgtagctg

SEQ ID NO: 148442 - DNA, 120 bp, Artificial Sequence
  ENSG00000105379_1 (sequence is synthesized)
tcaagagggtcatcgactacgccgtgaagatccgagtgaagcctgacaggaccggtgtggtcacggatggtgtgaagcactccatgaaccccttctgtgagatcgcggtggaggaggctg

SEQ ID NO: 148443 - DNA, 120 bp, Artificial Sequence
  ENSG00000105379_2 (sequence is synthesized)
tgcggctcaaggagaagaagctggtgaaggaggtcatcgccgtcagctgtgggcctgcacagtgccaggagacgattcgtaccgccctggccatgggtgcagaccgaggtatccacgtgg

SEQ ID NO: 148444 - DNA, 120 bp, Artificial Sequence
  ENSG00000105379_3 (sequence is synthesized)
agctggcagagaaggagaaggtggacctggtgctgctgggcaaacaggccatcgatgatgactgtaaccagacagggcagatgacagctggatttcttgactggccacagggcacattcg

SEQ ID NO: 148445 - DNA, 120 bp, Artificial Sequence
  ENSG00000105379_4 (sequence is synthesized)
cctcccaggtgacgctggagggggacaagttgaaagtggagcgggagatcgatgggggcctggagaccctgcgcctgaagctgccagctgtggtgacagctgacctgaggctcaacgagc

SEQ ID NO: 148446 - DNA, 120 bp, Artificial Sequence
  ENSG00000105379_5 (sequence is synthesized)
cccgctacgccacgctgcccaacatcatgaaagccaagaagaagaagatcgaggtgatcaagcctggggacctgggtgtggacctgacctccaagctctctgtgatcagtgtggaggacc

SEQ ID NO: 148447 - DNA, 120 bp, Artificial Sequence
  ENSG00000105379_6 (sequence is synthesized)
cgccccagcgcacggccggcgtcaaggtggagaccactgaggacctggtggccaagctgaaggagattgggcggatttgagcccctcccagagatggcaataaaactgactctcaacatc

SEQ ID NO: 148448 - DNA, 120 bp, Artificial Sequence
  ENSG00000105379_7 (sequence is synthesized)
ctgctgagggccaggccctcatccctcaaacttcatttctgcctcaaggcctttgcatttgctgttctctcctcctggaacactgttccctcggattgcctcatggctttcttgttcccc

SEQ ID NO: 148449 - DNA, 120 bp, Artificial Sequence
  ENSG00000105379_8 (sequence is synthesized)
gcgagagcccatctaaaaaaaaaaaaaaaagaaattagaaacagggtctttgcagatgtgattaaattaagcatcttgagatgggggcattatcctggattatttaggtgggccctgaat

SEQ ID NO: 148450 - DNA, 120 bp, Artificial Sequence
  ENSG00000105379_9 (sequence is synthesized)
gccatctcaagagtccttataagagagagacagagggagactagacacgcagagagaggagaaggccacgtgaagacagagctgaggatgctggcattgaagataaagcgatgcagccac

SEQ ID NO: 148451 - DNA, 120 bp, Artificial Sequence
  ENSG00000105379_10 (sequence is synthesized)
aagccagggagtgtcagcagaagctggaggaggcaagaaacgtgttcctcccggggcctgcagaccccttggtctcaccctggtgacactgactttggacttctggcctccagagctgta

SEQ ID NO: 148452 - DNA, 120 bp, Artificial Sequence
  ENSG00000105379_11 (sequence is synthesized)
agattctaagccaccaaatatatggtgatttgttacggcagccgagagaaactaataggagagtggttagtggttcacgctacaccctggtctacaccggaagcctctctccctggcaca

SEQ ID NO: 148453 - DNA, 120 bp, Artificial Sequence
  ENSG00000105379_12 (sequence is synthesized)
tgatggtgtccccaggatccagctcagagccaggcacacagtggggcccaggagagacaaaaatgatgtgcagaagcaaatgggtggggtttgccacccacctcccttacctcccttgtc

SEQ ID NO: 148454 - DNA, 120 bp, Artificial Sequence
  ENSG00000105379_13 (sequence is synthesized)
tgtttagcaaagaggtctttcatgctggtgttttccaaattaggttgtgaccatgtgtgatcatgacatccaggcagagggctggcatttttccgaaaaagggtagaaaatgtcagagta

SEQ ID NO: 148455 - DNA, 120 bp, Artificial Sequence
  ENSG00000105379_14 (sequence is synthesized)
tggtgtgtgtgtaggcagggtcagtattggtcactgacccttacactgcagtggcatttgtgaaataggtcagggtcactggtcacgttgtctaaggtgttatccgagctcgtttcacaa

SEQ ID NO: 148456 - DNA, 120 bp, Artificial Sequence
  ENSG00000105379_15 (sequence is synthesized)
ccaagagaattaaagagcatagaccacccaaaaggtgaggttggagcgaaagtttaataagcaaaagaagaaagctctccacagaggagagggaagcccaagcgggttgccatttttaca

SEQ ID NO: 148457 - DNA, 69 bp, Artificial Sequence
  ENSG00000105379_16 (sequence is synthesized)
acagaggagagggaagcccaagcgggttgccatttttacagttgattccaaaagctttttttttaaaaa

SEQ ID NO: 148458 - DNA, 120 bp, Artificial Sequence
  ENSG00000105379_17 (sequence is synthesized)
cagcaaaagacaccaaaagcttttataagaaactcctttcatctctgtagctgtttgagtatcttatctgtaaagctatctgcataactctccgttatctatgtagttgtgggtacgtct

SEQ ID NO: 148459 - DNA, 120 bp, Artificial Sequence
  ENSG00000105379_18 (sequence is synthesized)
ttaggcaagcacaaagctccgcttctcttgtttctgtaaccgtgggtttgttttaggtaagctccgcccctccccgtgcaagttcccacagagaccaccatgtacgtgcctgaaaagggg

SEQ ID NO: 148460 - DNA, 120 bp, Artificial Sequence
  ENSG00000105379_19 (sequence is synthesized)
agggaacttttcctgggagcctgtcagtcacgcaaagaacaaaaggcttctgtgctgggcagcttgagttttccccaggctgctctattgttgcctgtagctgtgatttttcaggcaggc

SEQ ID NO: 148461 - DNA, 120 bp, Artificial Sequence
  ENSG00000105379_20 (sequence is synthesized)
tgctcctctgaggaccacccttaactgtctacctaactggtttttccttttcttctcctcatttgtatttatgtatcagtgtattatgtatttatatacacttggagatacagtaaaatg

SEQ ID NO: 148462 - DNA, 120 bp, Artificial Sequence
  ENSG00000105379_21 (sequence is synthesized)
tacctctcactgtgggttaccataaatactgtaaatttgagaaacactctttcaggcctgagaggagcagtgacaacagtagggatgatcaagtcagatgtccctggtacccaggaatgg

SEQ ID NO: 148463 - DNA, 120 bp, Artificial Sequence
  ENSG00000105379_22 (sequence is synthesized)
ctggatgagagaaggagacagggtgacctgcccctgcctacaaactctaacccagttctgtccctggagctgtgtgaccccggacaaggccctgcccctttccaggctgtcgttgtcctc

SEQ ID NO: 148464 - DNA, 120 bp, Artificial Sequence
  ENSG00000105379_23 (sequence is synthesized)
tgctcacctcagccctccaaaatttaagttttgatatgtgttacatccatgaaatcatcaccacaatcatgataatgtgtcttgaattctcagtatttatttatttttatttttttgagg

SEQ ID NO: 148465 - DNA, 65 bp, Artificial Sequence
  ENSG00000105379_24 (sequence is synthesized)
ctcagtatttatttatttttatttttttgaggtggagtcttgttctgtaatttaagcgattctcc

SEQ ID NO: 148466 - DNA, 120 bp, Artificial Sequence
  ENSG00000105379_25 (sequence is synthesized)
caggcatgaaccactgcgcctggccaaattatcagtatttaaatttaaataaaatgtaaaaattcattcctcagctgcactggctggacagccacacgcagccagtggctactggatggg

SEQ ID NO: 148467 - DNA, 120 bp, Artificial Sequence
  ENSG00000105379_26 (sequence is synthesized)
ctactggatgggacaacacattcaaaaccattatcctgttttatcttcaaagcatttaccactgtctgactagcttctccaacgtgcgcccttcttgctctcatatcatgtgtcttattt

SEQ ID NO: 148468 - DNA, 120 bp, Artificial Sequence
  ENSG00000105379_27 (sequence is synthesized)
tcttcttattccttctgattggaaatgatctcatttgtgtgtgtgtgtttttccctggtgactggttgtcttccctggcagaatatgagcccacccaagctggtgcttcactggtcgtgt

SEQ ID NO: 148469 - DNA, 120 bp, Artificial Sequence
  ENSG00000105379_28 (sequence is synthesized)
tcacagtgtgtctccaggggcaggttcataagggcactaggaggaggttgtgaatgaagggaggtgatgttcacactaagacctgaaaaatgtgtccagttaataagtggacagggacaa

SEQ ID NO: 148470 - DNA, 120 bp, Artificial Sequence
  ENSG00000105379_29 (sequence is synthesized)
aggtcgttagacaaagaggagtgtaggtggcatcagttaccaggggaggaaatgttgattcaggactgagaggcaaagggacctggctagaggacggggtcccagaaggtggtttaagga

SEQ ID NO: 148471 - DNA, 120 bp, Artificial Sequence
  ENSG00000105379_30 (sequence is synthesized)
ctggtgtggacacacacagttctgttgtctgcccagcggaggggcctcacggggggccgttgggagccagattgtcagcttttggatttaccagctgtgggtggcagtgggcgtgtaact

SEQ ID NO: 148472 - DNA, 120 bp, Artificial Sequence
  ENSG00000105379_31 (sequence is synthesized)
cagcatcttgctgcctcagtttctctcatctgtaaagtggggataataacatttacctcataaagttcctgcgaggattcgatgacttgatacatcagttgcttagcacagggctcagca

SEQ ID NO: 148473 - DNA, 120 bp, Artificial Sequence
  ENSG00000105379_32 (sequence is synthesized)
ctcagtacatgttccctgtcaggaaggcagggaggcctcactggcagcatcaggacatgggacatcaggacatacaccgtggctctcagggaaaggaaaaagaccctctcccaggtgtac

SEQ ID NO: 148474 - DNA, 120 bp, Artificial Sequence
  ENSG00000105379_33 (sequence is synthesized)
ccagcgggcactgagggcctgggggtggcaagcacattgccagcccagtgccccccggtggtcgcacgtggggagggaaggatccaaaggaggtctcgtgcacaggaagccgtcacctgg

SEQ ID NO: 148475 - DNA, 120 bp, Artificial Sequence
  ENSG00000105379_34 (sequence is synthesized)
agtttggctgatagagagagtttgctgggtcatctctgccaatactgagagttcatgggggctgctttggctagcagggagggcttgctggtatctaggccagtagaaagccttcgctgg

SEQ ID NO: 148476 - DNA, 120 bp, Artificial Sequence
  ENSG00000105379_35 (sequence is synthesized)
gcagcagaaggtgttccctttgtcattccagccagtggaacaagttcactgggtcatctaggttcattagggagggtccccttggtaatttttgccaatgtgaagttaccatgtagatca

SEQ ID NO: 148477 - DNA, 120 bp, Artificial Sequence
  ENSG00000105379_36 (sequence is synthesized)
tcttagttaactaggaagggtgcatggggtctcttggctaacaggtagagttcactaatcatcatggccagtagatgggttcgctgggtcatcttggccaatattaacagtttagtgggt

SEQ ID NO: 148478 - DNA, 120 bp, Artificial Sequence
  ENSG00000105379_37 (sequence is synthesized)
catctccgccaatagagaatattcatctcagccaacagggagggttcactggatcatctcaactaatggggagggttcaatgagtcatttcagccattacagagtgttcactacatcatc

SEQ ID NO: 148479 - DNA, 120 bp, Artificial Sequence
  ENSG00000105379_38 (sequence is synthesized)
tcagcctatagggagggttcagcgcatcatctcagcctatagggagggttcagcgcatcatctcaacctatagggagggttctgcgcatcatctcagtctatagggagggttcagcacat

SEQ ID NO: 148480 - DNA, 120 bp, Artificial Sequence
  ENSG00000105379_39 (sequence is synthesized)
catctcagtctatagggagggttcagcgcatcatctcaacctatagggagggttctgcgcatcatctcagcctatagggagggttcagcgcatcatctcagtctataggcagggttcagc

SEQ ID NO: 148481 - DNA, 120 bp, Artificial Sequence
  ENSG00000105379_40 (sequence is synthesized)
gcatcatctcagcctatagggagggttcagcgcatcatctcagcctatagggagggttcagcgcatcatctcagcctatagggagggttctgcgcatcatctcagtctatagggagggtt

SEQ ID NO: 148482 - DNA, 120 bp, Artificial Sequence
  ENSG00000105379_41 (sequence is synthesized)
cagcgcatcatctcagcctatagggagggttcagcgcatcatctcagcctatagggagggttcagcgcatcatctcagcctatagggagggttcagcgcatcatctcagcctatagggag

SEQ ID NO: 148483 - DNA, 120 bp, Artificial Sequence
  ENSG00000105379_42 (sequence is synthesized)
ggttcagcgcatcatctcagcctatagggagggttcagcgcatcatctcagtctatagggagggttcagtgcatcatctcagcctattgggagccttcagcatgccatctcaaccaaaag

SEQ ID NO: 148484 - DNA, 120 bp, Artificial Sequence
  ENSG00000105383_0 (sequence is synthesized)
ctgctcacacaggaagccctggaagctgcttcctcagacatgccgctgctgctactgctgcccctgctgtgggcaggggccctggctatggatccaaatttctggctgcaagtgcaggag

SEQ ID NO: 148485 - DNA, 120 bp, Artificial Sequence
  ENSG00000105383_1 (sequence is synthesized)
tcagtgacggtacaggagggtttgtgcgtcctcgtgccctgcactttcttccatcccataccctactacgacaagaactccccagttcatggttactggttccgggaaggagccattata

SEQ ID NO: 148486 - DNA, 120 bp, Artificial Sequence
  ENSG00000105383_2 (sequence is synthesized)
tccagggactctccagtggccacaaacaagctagatcaagaagtacaggaggagactcagggcagattccgcctccttggggatcccagtaggaacaactgctccctgagcatcgtagac

SEQ ID NO: 148487 - DNA, 120 bp, Artificial Sequence
  ENSG00000105383_3 (sequence is synthesized)
gccaggaggagggataatggttcatacttctttcggatggagagaggaagtaccaaatacagttacaaatctccccagctctctgtgcatgtgacagacttgacccacaggcccaaaatc

SEQ ID NO: 148488 - DNA, 120 bp, Artificial Sequence
  ENSG00000105383_4 (sequence is synthesized)
ctcatccctggcactctagaacccggccactccaaaaacctgacctgctctgtgtcctgggcctgtgagcagggaacacccccgatcttctcctggttgtcagctgcccccacctccctg

SEQ ID NO: 148489 - DNA, 120 bp, Artificial Sequence
  ENSG00000105383_5 (sequence is synthesized)
ggccccaggactactcactcctcggtgctcataatcaccccacggccccaggaccacggcaccaacctgacctgtcaggtgaagttcgctggagctggtgtgactacggagagaaccatc

SEQ ID NO: 148490 - DNA, 120 bp, Artificial Sequence
  ENSG00000105383_6 (sequence is synthesized)
cacagaacccaacaactggtatctttccaggagatggctcagggaaacaagagaccagagcaggagtggttcatggggccattggaggagctggtgttacagccctgctcgctctttgtc

SEQ ID NO: 148491 - DNA, 120 bp, Artificial Sequence
  ENSG00000105383_7 (sequence is synthesized)
tctgcctcatcttcttcatagtgaagacccacaggaggaaagcagccaggacagcagtgggcaggaatgacacccaccctaccacagggtcagcctccccgaaacaccagaagaagtcca

SEQ ID NO: 148492 - DNA, 120 bp, Artificial Sequence
  ENSG00000105383_8 (sequence is synthesized)
agttacatggccccactgaaacctcaagctgttcaggtgccgcccctactgtggagatggatgaggagctgcattatgcttccctcaactttcatgggatgaatccttccaaggacacct

SEQ ID NO: 148493 - DNA, 120 bp, Artificial Sequence
  ENSG00000105383_9 (sequence is synthesized)
ccaccgaatactcagaggtcaggacccagtgaggaacccacaagagcatcaggctcagctagaagatccacatcctctacaggtcggggaccaaaggctgattcttggagatttaacacc

SEQ ID NO: 148494 - DNA, 120 bp, Artificial Sequence
  ENSG00000105383_10 (sequence is synthesized)
ccacaggcaatgggtttatagacattatgtgagtttcctgctatattaacatcatcttagactttgcaagcagagagtcgtggaatcaaatctgtgctctttcatttgctaagtgtatga

SEQ ID NO: 148495 - DNA, 120 bp, Artificial Sequence
  ENSG00000105383_11 (sequence is synthesized)
tgtcacacaagctccttaaccttccatgtctccattttcttctctgtgaagtaggtataagaagtcctatctcatagggatgctgtgagcattaaataaaggtacacatggaaaacacca

SEQ ID NO: 148496 - DNA, 120 bp, Artificial Sequence
  ENSG00000105383_12 (sequence is synthesized)
gtacgttgaggccaacagatcaggagatgatggccattgaaaagatagtttcttggccgggcacagtgtttcacacctgcaatcccagcacctttggaggccaaggcgggcggatcacga

SEQ ID NO: 148497 - DNA, 120 bp, Artificial Sequence
  ENSG00000105383_13 (sequence is synthesized)
ctcggtgctcataatcaccccacggccccaggaccacggcaccaacctgacctgtcaggtgaagttcgctggagctggtgtgactacggagagaaccatccagctcaacgtcacctggaa

SEQ ID NO: 148498 - DNA, 120 bp, Artificial Sequence
  ENSG00000105383_14 (sequence is synthesized)
agcctgggtgacagagagagactctgtcccaaaaagaaaaaaaaaatagtttcttattcaccgttcccgagagggcacaccacaccatgcaaggccatatggagaagcaccagggtcagt

SEQ ID NO: 148499 - DNA, 120 bp, Artificial Sequence
  ENSG00000105383_15 (sequence is synthesized)
caggaagcagagggagcaaggagaaaatgggacaagagccttcactgtggctttcatggaaaagaatgggcaagacagggtaagcaagctaggcaggtttaggattggctacttagaaca

SEQ ID NO: 148500 - DNA, 120 bp, Artificial Sequence
  ENSG00000105383_16 (sequence is synthesized)
atttcagcagactctggggtataggagttgtctctagttgtctggtacatggccctgggtttattaaggaggattgtggtctggagtgtaagagctcaataaaggatccagctggtagtg

SEQ ID NO: 148501 - DNA, 120 bp, Artificial Sequence
  ENSG00000105383_17 (sequence is synthesized)
tgggctttagattgactggtttgcacatgaaaggtgcacttgtatgcaagtcctttattagctctagaaatctactatccttgggaaaggcagtctctcaagggtcagtaatgccccaga

SEQ ID NO: 148502 - DNA, 120 bp, Artificial Sequence
  ENSG00000105383_18 (sequence is synthesized)
tgtcaaaacatcagaaacacttggttgacacacccctaaacatacttctcctgatgggttctccatctcgctgatggcactcttgtccccattacccaaccagagacatggccccctcct

SEQ ID NO: 148503 - DNA, 120 bp, Artificial Sequence
  ENSG00000105383_19 (sequence is synthesized)
gtcccagtcctccatctcttcctgtgccagtatgctacgatgcatgtctgagcttcctctgaacacggcttaacacaaccactcctgagccgagagcccctcttactccttattctgctg

SEQ ID NO: 148504 - DNA, 120 bp, Artificial Sequence
  ENSG00000105383_20 (sequence is synthesized)
cagcctcacctcccatttctcctctccagaacattagcatcacctccctaaaaggtcattgtcccatcattcccaagtttgaaatgcactgcttctctacactcctgaaagattggcatt

SEQ ID NO: 148505 - DNA, 120 bp, Artificial Sequence
  ENSG00000105383_21 (sequence is synthesized)
ccaacaacttggtctggcatttggagcaggaaaaccagagtccccttcagtgctatgctcccccaacattagccactcaatcacctcaagcagggcaagctttctcatctcagaatcatt

SEQ ID NO: 148506 - DNA, 120 bp, Artificial Sequence
  ENSG00000105383_22 (sequence is synthesized)
gctgggctgtcccctcctcctcatatgcctaatagctacctgcccaactccagtgcatccttcaagctctgattttttttttaatttatttaactctgactaaagtgaacaccacagtaa

SEQ ID NO: 148507 - DNA, 120 bp, Artificial Sequence
  ENSG00000105383_23 (sequence is synthesized)
agtttttgaacacagggtcaaccagcacccattcattctgaaatatctatataatcccatttgccaattgctctaggtccttgtgccattctgtatttttataaacacacagtttacaaa

SEQ ID NO: 148508 - DNA, 120 bp, Artificial Sequence
  ENSG00000105383_24 (sequence is synthesized)
tataaaatattcctcctatcgggggcttaacatttattggggaaagggatgaaaataatgaacaaataagcagtgcaaatatacatgaaataggcatgaaataagtgctatggcaggaaa

SEQ ID NO: 148509 - DNA, 120 bp, Artificial Sequence
  ENSG00000105383_25 (sequence is synthesized)
tgaaatgggagaacggattggacagtcctgggggccaaagaatggcctttgggcaaacacctgcagaaagaaagtgagtacagtatgagcagtagagaatcatcaaggaagcagcaagta

SEQ ID NO: 148510 - DNA, 120 bp, Artificial Sequence
  ENSG00000105383_26 (sequence is synthesized)
ccatggctctgaggccggaacacatctgatgttttagagaaacaaagtaggacagtgtggataaggcagagttacgtgttgggggtggagtgtggactgaacaatggtaggtaggaaatg

SEQ ID NO: 148511 - DNA, 120 bp, Artificial Sequence
  ENSG00000105383_27 (sequence is synthesized)
aggttgaagagacataggagctgcaaatattgcaggatcctaagtccatcatagttattgatgcgtttagagcagaagagtgacatgaactgacactcattttagtgggagtcactctgg

SEQ ID NO: 148512 - DNA, 120 bp, Artificial Sequence
  ENSG00000105383_28 (sequence is synthesized)
aatagaagatacacagataatcaagccaagagatgactgactcagacttagtcccaagtaagaataatgaatctgatgtggagaaattgggttccggatacatcttgaaggtggagtcaa

SEQ ID NO: 148513 - DNA, 120 bp, Artificial Sequence
  ENSG00000105383_29 (sequence is synthesized)
cagtatttgcaagtggagtgatggagtgcatgcaaggcatgagcaaagatagctcacgggctctgctcgataagtgtctcagatgtcataggtgggtccacagatatcatagatgtcatg

SEQ ID NO: 148514 - DNA, 120 bp, Artificial Sequence
  ENSG00000105383_30 (sequence is synthesized)
gatgtccaagaagaccccatagatgtcatagatgtctatagatgccaatgatgatgttcatgtggttaactcagaattcaaacttaaaaaatcaaattgccaatgattaaaattgccatc

SEQ ID NO: 148515 - DNA, 120 bp, Artificial Sequence
  ENSG00000105383_31 (sequence is synthesized)
cttgaaggagaagtctattttcaagtgtatatcaaacattattttggttaccgtaagtttgaggtgcctctgagacatccatgtggagatgacaagtagcaggcaagtgtctggagctca

SEQ ID NO: 148516 - DNA, 120 bp, Artificial Sequence
  ENSG00000105383_32 (sequence is synthesized)
gaagagggctccacgtgggagacacagaggttgggagcttccctatcaacatccaataatcgatgaatctacaaagaagagaaggggtccacagacacagccctggaaccctccagcatt

SEQ ID NO: 148517 - DNA, 120 bp, Artificial Sequence
  ENSG00000105383_33 (sequence is synthesized)
taatgttagggagatgaggtgtaaatggtgagaaagctgagaatgaataggagccaatgaccaggaaattgcaggctgtagtgttggtggccaagggaagatggggcttcatggaggaga

SEQ ID NO: 148518 - DNA, 120 bp, Artificial Sequence
  ENSG00000105383_34 (sequence is synthesized)
ggttggtcatttgtttcaaatgctggtaagtctggtaagatggaatctgagaaatggctatttgaatgtagctaagtggtatgacagcaaagcagatctgatttttctgctggaggaaga

SEQ ID NO: 148519 - DNA, 120 bp, Artificial Sequence
  ENSG00000105383_35 (sequence is synthesized)
tctcttgactagagagagttcaagagagaatgggaggagaagaggcagaaactgtgagttgaaggactcttttgagaaacactgccccaaatctagaaccaagaaatgggcctgcaccag

SEQ ID NO: 148520 - DNA, 120 bp, Artificial Sequence
  ENSG00000105383_36 (sequence is synthesized)
caaatggttgtaccctgtagacttgccatttctccagcatctgctcctgtgtctcttatgataccatgttccctgtttgtgtagggctttgcaccacttgaactaactgcattcccatag

SEQ ID NO: 148521 - DNA, 120 bp, Artificial Sequence
  ENSG00000105383_37 (sequence is synthesized)
cttcccctaccacaccatgagctccacaaggaaaagcctgggttttattagacctccatcattctactctctcctgttcatctgcacactgtcacaatttgcaattaccagtctgtttct

SEQ ID NO: 148522 - DNA, 120 bp, Artificial Sequence
  ENSG00000105383_38 (sequence is synthesized)
gtcttcatcccctgcagtactggaaatcacagggcccctgctctgctctgctccctcctgaggatccagtgcccagcacataggaggtcccagagacctgggaccgagttcagggtcaac

SEQ ID NO: 148523 - DNA, 120 bp, Artificial Sequence
  ENSG00000105383_39 (sequence is synthesized)
agatgtgtgactttggaaattacctaagctctctgagacctagtttcctggtctgtaaaatggattaaaataatagatgccaaagatgatgtcagtgtagctgcccagaatttttccaca

SEQ ID NO: 148524 - DNA, 120 bp, Artificial Sequence
  ENSG00000105383_40 (sequence is synthesized)
ttagtctctgtgagtattcaagagaattgcgaatcaatcaatacgtgctacatgtgttagataatgaataagtagagccttaattaattaacatttgatgaaagaatgaaagagtgaata

SEQ ID NO: 148525 - DNA, 120 bp, Artificial Sequence
  ENSG00000105383_41 (sequence is synthesized)
aatgttctgtcagagtcaaatttacttcattgaccctctttgccttctcctggtccccctcctcactgccctgctctaacccccttctttcctctccataagaaacaccagaagaagtcc

SEQ ID NO: 148526 - DNA, 120 bp, Artificial Sequence
  ENSG00000105383_42 (sequence is synthesized)
gccactgtttgaaccacttcctgaatctgtagccaaaaattggaagcaacccaaatgtccatcaactaatgaaggaataaacaaaatctggtacattcctgcaatgcatatcattcagac

SEQ ID NO: 148527 - DNA, 120 bp, Artificial Sequence
  ENSG00000105383_43 (sequence is synthesized)
ataaagatgggccgaagtacagatacatgctacaacgtgtatgaacttcgaaagcatcacaccaagtgaaagaagccagacactaaagatcacgtaccatatgattccattgatatgaaa

SEQ ID NO: 148528 - DNA, 120 bp, Artificial Sequence
  ENSG00000105383_44 (sequence is synthesized)
tgtctagaataggaaatacatttctggaggcagaaagcaggtcggcggttgccaggggcttcgaggagggcagtgactgcttagtgagtacatgctttccttttggggcaatgaaaatgt

SEQ ID NO: 148529 - DNA, 120 bp, Artificial Sequence
  ENSG00000105383_45 (sequence is synthesized)
ttagaaccaaacagaggttgtggttacacaacgttgtgtatgtactgaatgccaccgagttgttcactttaacatgttcattgtatgtaacgtgattttacatcaataaaaaaaaataat

SEQ ID NO: 148530 - DNA, 120 bp, Artificial Sequence
  ENSG00000105383_46 (sequence is synthesized)
ctactgctgcccctgctgtgggcaggtgagtggctgtggggagaggggttgtcgggctgggccgagctgaccctcgtttccccacaggggccctggctatggatccaaatttctggctgc

SEQ ID NO: 148531 - DNA, 120 bp, Artificial Sequence
  ENSG00000105383_47 (sequence is synthesized)
gagtgatggggcatcctggcatccagtctgtcctgcagacacctcctcccaatgtggcccaccgtcatgccccattcagcatttccagaactgagcttattgtctttcctcctgtttaac

SEQ ID NO: 148532 - DNA, 120 bp, Artificial Sequence
  ENSG00000105388_0 (sequence is synthesized)
ctcagggcagagggaggaaggacagcagaccagacagtcacagcagccttgacaaaacgttcctggaactcaagctcttctccacagaggaggacagagcagacagcagagaccatggag

SEQ ID NO: 148533 - DNA, 120 bp, Artificial Sequence
  ENSG00000105388_1 (sequence is synthesized)
tctccctcggcccctccccacagatggtgcatcccctggcagaggctcctgctcacagcctcacttctaaccttctggaacccgcccaccactgccaagctcactattgaatccacgccg

SEQ ID NO: 148534 - DNA, 120 bp, Artificial Sequence
  ENSG00000105388_2 (sequence is synthesized)
ttcaatgtcgcagaggggaaggaggtgcttctacttgtccacaatctgccccagcatctttttggctacagctggtacaaaggtgaaagagtggatggcaaccgtcaaattataggatat

SEQ ID NO: 148535 - DNA, 120 bp, Artificial Sequence
  ENSG00000105388_3 (sequence is synthesized)
gtaataggaactcaacaagctaccccagggcccgcatacagtggtcgagagataatataccccaatgcatccctgctgatccagaacatcatccagaatgacacaggattctacacccta

SEQ ID NO: 148536 - DNA, 120 bp, Artificial Sequence
  ENSG00000105388_4 (sequence is synthesized)
cacgtcataaagtcagatcttgtgaatgaagaagcaactggccagttccgggtatacccggagctgcccaagccctccatctccagcaacaactccaaacccgtggaggacaaggatgct

SEQ ID NO: 148537 - DNA, 120 bp, Artificial Sequence
  ENSG00000105388_5 (sequence is synthesized)
gtggccttcacctgtgaacctgagactcaggacgcaacctacctgtggtgggtaaacaatcagagcctcccggtcagtcccaggctgcagctgtccaatggcaacaggaccctcactcta

SEQ ID NO: 148538 - DNA, 120 bp, Artificial Sequence
  ENSG00000105388_6 (sequence is synthesized)
ttcaatgtcacaagaaatgacacagcaagctacaaatgtgaaacccagaacccagtgagtgccaggcgcagtgattcagtcatcctgaatgtcctctatggcccggatgcccccaccatt

SEQ ID NO: 148539 - DNA, 120 bp, Artificial Sequence
  ENSG00000105388_7 (sequence is synthesized)
tcccctctaaacacatcttacagatcaggggaaaatctgaacctctcctgccacgcagcctctaacccacctgcacagtactcttggtttgtcaatgggactttccagcaatccacccaa

SEQ ID NO: 148540 - DNA, 120 bp, Artificial Sequence
  ENSG00000105388_8 (sequence is synthesized)
gagctctttatccccaacatcactgtgaataatagtggatcctatacgtgccaagcccataactcagacactggcctcaataggaccacagtcacgacgatcacagtctatgcagagcca

SEQ ID NO: 148541 - DNA, 120 bp, Artificial Sequence
  ENSG00000105388_9 (sequence is synthesized)
cccaaacccttcatcaccagcaacaactccaaccccgtggaggatgaggatgctgtagccttaacctgtgaacctgagattcagaacacaacctacctgtggtgggtaaataatcagagc

SEQ ID NO: 148542 - DNA, 120 bp, Artificial Sequence
  ENSG00000105388_10 (sequence is synthesized)
ctcccggtcagtcccaggctgcagctgtccaatgacaacaggaccctcactctactcagtgtcacaaggaatgatgtaggaccctatgagtgtggaatccagaacgaattaagtgttgac

SEQ ID NO: 148543 - DNA, 120 bp, Artificial Sequence
  ENSG00000105388_11 (sequence is synthesized)
tctaacccacctgcacagtattcttggctgattgatgggaacatccagcaacacacacaagagctctttatctccaacatcactgagaagaacagcggactctatacctgccaggccaat

SEQ ID NO: 148544 - DNA, 120 bp, Artificial Sequence
  ENSG00000105388_12 (sequence is synthesized)
aactcagccagtggccacagcaggactacagtcaagacaatcacagtctctgcggagctgcccaagccctccatctccagcaacaactccaaacccgtggaggacaaggatgctgtggcc

SEQ ID NO: 148545 - DNA, 120 bp, Artificial Sequence
  ENSG00000105388_13 (sequence is synthesized)
ttcacctgtgaacctgaggctcagaacacaacctacctgtggtgggtaaatggtcagagcctcccagtcagtcccaggctgcagctgtccaatggcaacaggaccctcactctattcaat

SEQ ID NO: 148546 - DNA, 120 bp, Artificial Sequence
  ENSG00000105388_14 (sequence is synthesized)
gtcacaagaaatgacgcaagagcctatgtatgtggaatccagaactcagtgagtgcaaaccgcagtgacccagtcaccctggatgtcctctatgggccggacacccccatcatttccccc

SEQ ID NO: 148547 - DNA, 120 bp, Artificial Sequence
  ENSG00000105388_15 (sequence is synthesized)
ccagactcgtcttacctttcgggagcgaacctcaacctctcctgccactcggcctctaacccatccccgcagtattcttggcgtatcaatgggataccgcagcaacacacacaagttctc

SEQ ID NO: 148548 - DNA, 120 bp, Artificial Sequence
  ENSG00000105388_16 (sequence is synthesized)
tttatcgccaaaatcacgccaaataataacgggacctatgcctgttttgtctctaacttggctactggccgcaataattccatagtcaagagcatcacagtctctgcatctggaacttct

SEQ ID NO: 148549 - DNA, 120 bp, Artificial Sequence
  ENSG00000105388_17 (sequence is synthesized)
cctggtctctcagctggggccactgtcggcatcatgattggagtgctggttggggttgctctgatatagcagccctggtgtagtttcttcatttcaggaagactgacagttgttttgctt

SEQ ID NO: 148550 - DNA, 120 bp, Artificial Sequence
  ENSG00000105388_18 (sequence is synthesized)
cttccttaaagcatttgcaacagctacagtctaaaattgcttctttaccaaggatatttacagaaaagactctgaccagagatcgagaccatcctagccaacatcgtgaaaccccatctc

SEQ ID NO: 148551 - DNA, 120 bp, Artificial Sequence
  ENSG00000105388_19 (sequence is synthesized)
gagcaagactccatctcaaaaagaaaagaaaagaagactctgacctgtactcttgaatacaagtttctgataccactgcactgtctgagaatttccaaaactttaatgaactaactgaca

SEQ ID NO: 148552 - DNA, 120 bp, Artificial Sequence
  ENSG00000105388_20 (sequence is synthesized)
ttccaaaactttaatgaactaactgacagcttcatgaaactgtccaccaagatcaagcagagaaaataattaatttcatgggactaaatgaactaatgaggataatattttcataatttt

SEQ ID NO: 148553 - DNA, 120 bp, Artificial Sequence
  ENSG00000105388_21 (sequence is synthesized)
ttatttgaaattttgctgattctttaaatgtcttgtttcccagatttcaggaaactttttttcttttaagctatccacagcttacagcaatttgataaaatatacttttgtgaacaaaaa

SEQ ID NO: 148554 - DNA, 120 bp, Artificial Sequence
  ENSG00000105388_22 (sequence is synthesized)
tggcccaggctgccagcccaaatccacagggccagaggcaggatttctcagtccctctcaggttcaagtacacagaccctcaaccctggacatccagactgtctgtgactttctgcccca

SEQ ID NO: 148555 - DNA, 120 bp, Artificial Sequence
  ENSG00000105388_23 (sequence is synthesized)
gaaaaacctgggcagaccaagtcttgaccaagaataggaggggaggggctgcttctgtcctgggaggctcagggtccacaccctatgatgggagaaacaggtgaatatctcagactcagg

SEQ ID NO: 148556 - DNA, 120 bp, Artificial Sequence
  ENSG00000105388_24 (sequence is synthesized)
ctcagtagatacaagaggggtttggctgagactttaggattgtgattcagcttagagggacactgtggtccttccatagaccaggaacttccacttccctctgacaatatcacctgtggc

SEQ ID NO: 148557 - DNA, 120 bp, Artificial Sequence
  ENSG00000105392_0 (sequence is synthesized)
ccttcagcctctgctgtctggccgctctgtctaggtcctgggccacgggagagccccgtccctcctttctgaaggccccctgacttgggcctcagtgtccccgaagatcatgatggcgta

SEQ ID NO: 148558 - DNA, 120 bp, Artificial Sequence
  ENSG00000105392_1 (sequence is synthesized)
tatgaacccggggccccactattctgtcaacgccttggccctaagtggccccagtgtggatctgatgcaccaggctgtgccctacccaagcgcccccaggaagcagcggcgggagcgcac

SEQ ID NO: 148559 - DNA, 120 bp, Artificial Sequence
  ENSG00000105392_2 (sequence is synthesized)
caccttcacccggagccaactggaggagctggaggcactgtttgccaagacccagtacccagacgtctatgcccgtgaggaggtggctctgaagatcaatctgcctgagtccagggttca

SEQ ID NO: 148560 - DNA, 120 bp, Artificial Sequence
  ENSG00000105392_3 (sequence is synthesized)
ggtttggttcaagaaccggagggctaaatgcaggcagcagcgacagcagcagaaacagcagcagcagcccccagggggccaggccaaggcccggcctgccaagaggaaggcgggcacgtc

SEQ ID NO: 148561 - DNA, 120 bp, Artificial Sequence
  ENSG00000105392_4 (sequence is synthesized)
cccaagaccctccacagatgtgtgtccagaccctctgggcatctcagattcctacagtccccctctgcccggcccctcaggctccccaaccacggcagtggccactgtgtccatctggag

SEQ ID NO: 148562 - DNA, 120 bp, Artificial Sequence
  ENSG00000105392_5 (sequence is synthesized)
cccagcctcagagtcccctttgcctgaggcgcagcgggctgggctggtggcctcagggccgtctctgacctccgccccctatgccatgacctacgccccggcctccgctttctgctcttc

SEQ ID NO: 148563 - DNA, 120 bp, Artificial Sequence
  ENSG00000105392_6 (sequence is synthesized)
cccctccgcctatgggtctccgagctcctatttcagcggcctagacccctacctttctcccatggtgccccagctagggggcccggctcttagccccctctctggcccctccgtgggacc

SEQ ID NO: 148564 - DNA, 120 bp, Artificial Sequence
  ENSG00000105392_7 (sequence is synthesized)
ttccctggcccagtcccccacctccctatcaggccagagctatggcgcctacagccccgtggatagcttggaattcaaggaccccacgggcacctggaaattcacctacaatcccatgga

SEQ ID NO: 148565 - DNA, 120 bp, Artificial Sequence
  ENSG00000105392_8 (sequence is synthesized)
ccctctggactacaaggatcagagtgcctggaagtttcagatcttgtagaggacgcagtctccatctctctccatcgggcctcgggaccctttctcttctgaatctgcttccctgcagtt

SEQ ID NO: 148566 - DNA, 120 bp, Artificial Sequence
  ENSG00000105392_9 (sequence is synthesized)
tagatcccgggatggcattcctgagaaagcaacccgaaccagctgtccttctgacagctcggtgttcagcttacagagaccacccctttcctccacagggagaggctcctccctctcctg

SEQ ID NO: 148567 - DNA, 120 bp, Artificial Sequence
  ENSG00000105392_10 (sequence is synthesized)
ggacagctcacaggtcctagtgattctctcaaccctaacaccgtctggcacgattgtgaccgctgaagtacaccacgagctccaggcttcagaaagtggtgctgagaacttgctccaaga

SEQ ID NO: 148568 - DNA, 120 bp, Artificial Sequence
  ENSG00000105392_11 (sequence is synthesized)
agaagtcaaaccaaacttgcagttgatttggggtcatgtttaggtcagaatcaccgtgcccttgaacaagcaggtaggggggcttgataacttaactttccacgtggacagaattttttt

SEQ ID NO: 148569 - DNA, 67 bp, Artificial Sequence
  ENSG00000105392_12 (sequence is synthesized)
ggcttgataacttaactttccacgtggacagaatttttttttttgttttgtttttgttttgcagaca

SEQ ID NO: 148570 - DNA, 120 bp, Artificial Sequence
  ENSG00000105392_13 (sequence is synthesized)
gcaacctccacctcccgggttgaagcgttgctcctgcctcaatctcccaattagctgggattacaggtgtgctccatcatgcccggctaatttttctattattagtagagacagggtttt

SEQ ID NO: 148571 - DNA, 120 bp, Artificial Sequence
  ENSG00000105392_14 (sequence is synthesized)
ccattgtgcctggccctacacgtggacacttctttagcatatggttagggacctttctagaaattccaaagacagactttaagaagccccgtcgggaaaccttaggccaatgatgtggtt

SEQ ID NO: 148572 - DNA, 120 bp, Artificial Sequence
  ENSG00000105392_15 (sequence is synthesized)
caggcttacatggtaggtttaggggaccgtttgagagacaaagatctacattcatatatgtagctatacatatatgtactttttcttcttagtttctttttaaagacattttatcactca

SEQ ID NO: 148573 - DNA, 120 bp, Artificial Sequence
  ENSG00000105392_16 (sequence is synthesized)
ttcgctcattagcacattgggaatgtgtgtatttggtagggaaatgaaaggcaccttgcctgttccatctctactccttttttcttttgttttaggattttctaaaggtgagacactggt

SEQ ID NO: 148574 - DNA, 120 bp, Artificial Sequence
  ENSG00000105392_17 (sequence is synthesized)
ggaactggggtagctgcttgggacgtaccacctatagttgtggctatttcacagagaagcagcagctagacagactcccatctgtaaataaacaagagataggaagagggggaaatagat

SEQ ID NO: 148575 - DNA, 81 bp, Artificial Sequence
  ENSG00000105392_18 (sequence is synthesized)
gatggtgggattggaaaatagagcttggcttgaggacattttcctggggtggcaccattatttcttgaaatagaatcttac

SEQ ID NO: 148576 - DNA, 120 bp, Artificial Sequence
  ENSG00000105392_19 (sequence is synthesized)
tcctggggtggcaccattatttcttgaaatagaatcttacttatggtgacactggcaagcacttgtgagaacctgaagacggattgaggtcatttgatgctcagaagttgggtgctgggt

SEQ ID NO: 148577 - DNA, 120 bp, Artificial Sequence
  ENSG00000105392_20 (sequence is synthesized)
ccctgccttctcagtccgagttctcctttcatttttgggtggggaggcgggttccaagagcccttcattggtggagttcacaaggcaaggtgtaaaaaaaaaagtagggcaggaagacag

SEQ ID NO: 148578 - DNA, 120 bp, Artificial Sequence
  ENSG00000105392_21 (sequence is synthesized)
tggtgtgctggcagaggtctaacaatgggctctccaaggaagaggaaaaggttggttgtggagtgtttgtcagtttccgtggtgtaaatactcccaccacggctgacttcaagctagcaa

SEQ ID NO: 148579 - DNA, 120 bp, Artificial Sequence
  ENSG00000105392_22 (sequence is synthesized)
ccggaggtcactgaactaagagttgggaagagatagggcacaatatatgcttacgagttggtacacaccgtcagcagcagccagggtcaggagaaaggcgagatgtgaagagaggccggg

SEQ ID NO: 148580 - DNA, 120 bp, Artificial Sequence
  ENSG00000105392_23 (sequence is synthesized)
aggtatcagatgacgtttccagcactagaccagaagaggtgcacacagcctagaccccctgaggggtacaccctgatctctagagcccacaaagaggtttttattcaacataaaacgtgt

SEQ ID NO: 148581 - DNA, 90 bp, Artificial Sequence
  ENSG00000105392_24 (sequence is synthesized)
tagagcccacaaagaggtttttattcaacataaaacgtgttcatctctcataggcctgagtcatgctgggttctgggacattaagcccag

SEQ ID NO: 148582 - DNA, 120 bp, Artificial Sequence
  ENSG00000105392_25 (sequence is synthesized)
aattgctggaacccgggaggcggaggttgaagagagcagagattgtgccactgtgctctagcctgggtcacaagagcgaaactccgtctcaataataacaacaacaaaaataacccagga

SEQ ID NO: 148583 - DNA, 120 bp, Artificial Sequence
  ENSG00000105392_26 (sequence is synthesized)
acccaggagtggctcaagagtccagtgtgggatgaaaatataaacagaggaagacaacatatgtcactggggaggctgggggagctagacaaaattcacacgggaggggcagggatgaga

SEQ ID NO: 148584 - DNA, 120 bp, Artificial Sequence
  ENSG00000105392_27 (sequence is synthesized)
caatattgtgccctgggtctgtgcaaacgttgggaccagaatccactataagtttcattcttcggagacacggaagctctgcactggaggccgggactcaggcgtggaagagaatcttct

SEQ ID NO: 148585 - DNA, 120 bp, Artificial Sequence
  ENSG00000105392_28 (sequence is synthesized)
ccttattcaccggggaggctgtgtcttgtgcaaacaagtcatagaaacttgatgggagttggggagggactgaaggatgcatgcaaggttctgggaaggagtgagaagtagtgaaggcca

SEQ ID NO: 148586 - DNA, 120 bp, Artificial Sequence
  ENSG00000105392_29 (sequence is synthesized)
aggggcccccatcacaggccgatggggtaagacttcgagagagcctgatcctggggtcttctgagactccaccaggagccggagagggcagggagccaaatccagctaggaggttacaga

SEQ ID NO: 148587 - DNA, 120 bp, Artificial Sequence
  ENSG00000105392_30 (sequence is synthesized)
ttgcttttcctgggctgggctcctgagtgttggttcttccagctgtgcacaggggatttcaaacgttctacgtcctaaagccaggaagagtgacaaggcaggtggggacagaaggaagaa

SEQ ID NO: 148588 - DNA, 120 bp, Artificial Sequence
  ENSG00000105392_31 (sequence is synthesized)
gccaggagcctccctgagaaggtgtcaccttatctgtcctcctcttccccacacactggcctctgggtcccccttctctgtccacccacagagtgaaaccaattaaaatgttggatctca

SEQ ID NO: 148589 - DNA, 120 bp, Artificial Sequence
  ENSG00000105392_32 (sequence is synthesized)
gccacgggagagccccgtccctcctttctgaaggcgcccccaggaagcagcggcgggagcgcaccaccttcacccggagccaactggaggagctggaggcactgtttgccaagacccagt

SEQ ID NO: 148590 - DNA, 120 bp, Artificial Sequence
  ENSG00000105392_33 (sequence is synthesized)
aagagttgctgacaccttctctgtcccgctggaagttattttctcctccctctccctgtacagctgaccttccttccctgctgcagggccagggggtctgttccaggactggattctccc

SEQ ID NO: 148591 - DNA, 120 bp, Artificial Sequence
  ENSG00000105392_34 (sequence is synthesized)
gggaaaaagagaaggaggaacagagattggagctgcagaggataagcgaggacagagggacagagatgaggctggagttacagggacaggtggacaggcagaaagacagcaaagggaggg

SEQ ID NO: 148592 - DNA, 120 bp, Artificial Sequence
  ENSG00000105392_35 (sequence is synthesized)
acagacagacaggaacagaaggacatggaggctgagggagaggggagaaagagcaagatagacagggagacacagagaaaaagaataagagagaccaaggggataatgcaggtttatcaa

SEQ ID NO: 148593 - DNA, 120 bp, Artificial Sequence
  ENSG00000105392_36 (sequence is synthesized)
cagagacagggacggagaggagcagatggagaatgaaagagtggtattcaggaaagtaggcagaaatgccacagcctaaggcccacaggaaaagaaactgaggtacagagaagccagaca

SEQ ID NO: 148594 - DNA, 82 bp, Artificial Sequence
  ENSG00000105392_37 (sequence is synthesized)
gcccacaggaaaagaaactgaggtacagagaagccagacaaagaccaatggtgtgtagagagatggtgagtgctgggtttgt

SEQ ID NO: 148595 - DNA, 120 bp, Artificial Sequence
  ENSG00000105392_38 (sequence is synthesized)
tgggcaacatagagcgactccatctctacgaaaataaaaaaattagctgggcatcgtggtatgtgcctgtaaagtctcagctactggggaggctgaggagggaggatcccttgagcacag

SEQ ID NO: 148596 - DNA, 120 bp, Artificial Sequence
  ENSG00000105392_39 (sequence is synthesized)
aaacaccctttctaataagtctgcctattttcagtgctggaagcagcccctgccacctccgcccccaaaaagaggagaatatcatgtctgacaacacagagacagagaggccacagacaa

SEQ ID NO: 148597 - DNA, 120 bp, Artificial Sequence
  ENSG00000105392_40 (sequence is synthesized)
gacttgaccaagtcaaagagagagaaacaggggaaactgaggcagaaaccgagaccaatgaggcactacagagataaactagctgtcggacagactgttgtggagagaaagggggaccca

SEQ ID NO: 148598 - DNA, 120 bp, Artificial Sequence
  ENSG00000105392_41 (sequence is synthesized)
ggagagggatcccgaaagctccgtgcctctcttttttcagacgatctctcaggaccatctgacagtgctctccttcctctttgatgcctctctcttgggatactagctgaagctggagag

SEQ ID NO: 148599 - DNA, 120 bp, Artificial Sequence
  ENSG00000105392_42 (sequence is synthesized)
acaccagttagacctaaggaaggacttccctgaggagtaggggcttatggtcaccggcaggagctggggcctcccttccccatcagccctaattgccaagatgtcatggggggaagagga

SEQ ID NO: 148600 - DNA, 120 bp, Artificial Sequence
  ENSG00000105392_43 (sequence is synthesized)
ggggattaagcagacgggtgcccctccccctcccagccaatgtcacctcctggtgcccagtcgagtcccccaccttggccgggattaccctccgagttccaggccatgacaaatgacatc

SEQ ID NO: 148601 - DNA, 120 bp, Artificial Sequence
  ENSG00000105392_44 (sequence is synthesized)
actcccggcccaggcttaaaatctccccatgtgaggggatgtgtttccttcagcctctgctgtctggccgctctgtctaggtcctgggccacgggagagccccgtccctcctttctgaag

SEQ ID NO: 148602 - DNA, 120 bp, Artificial Sequence
  ENSG00000105393_0 (sequence is synthesized)
tctgcttgttctgcagcccgctgaactacatttcccaggaggcgtcggggctgcgccgtacaacttccggctgtaaagatggcggcttcctagtgagtcggcggctgatttagaaggagg

SEQ ID NO: 148603 - DNA, 120 bp, Artificial Sequence
  ENSG00000105393_1 (sequence is synthesized)
ttcaggctacggtgagccgaaggggaggattctggcttcccctgtccgtgttccatctagccacacaggagccatggaagtggcagagcccagcagccccactgaagaggaggaggagga

SEQ ID NO: 148604 - DNA, 120 bp, Artificial Sequence
  ENSG00000105393_2 (sequence is synthesized)
agaggagcactcggcagagcctcggccccgcactcgctccaatcctgaaggggctgaggaccgggcagtaggggcacaggccagcgtgggcagccgcagcgagggtgagggtgaggccgc

SEQ ID NO: 148605 - DNA, 120 bp, Artificial Sequence
  ENSG00000105393_3 (sequence is synthesized)
cagtgctgatgatgggagcctcaacacttcaggagccggccctaagtcctggcaggtgcccccgccagcccctgaggtccaaattcggacaccaagggtcaactgtccagagaaagtgat

SEQ ID NO: 148606 - DNA, 120 bp, Artificial Sequence
  ENSG00000105393_4 (sequence is synthesized)
tatctgcctggacctgtcagaggaaatgtcactgccaaagctggagtcgttcaacggctccaaaaccaacgccctcaatgtctcccagaagatgattgagatgttcgtgcggacaaaaca

SEQ ID NO: 148607 - DNA, 120 bp, Artificial Sequence
  ENSG00000105393_5 (sequence is synthesized)
caagatcgacaaaagccacgagtttgcactggtggtggtgaacgatgacacggcctggctgtctggcctgacctccgacccccgcgagctctgtagctgcctctatgatctggagacggc

SEQ ID NO: 148608 - DNA, 120 bp, Artificial Sequence
  ENSG00000105393_6 (sequence is synthesized)
tcagcctcatccagcagaaaactgagcttccggtcacagagaacgtgcagacgattcccccgccatatgtggtccgcaccatccttgtctacagccgtccaccttgccagccccagttct

SEQ ID NO: 148609 - DNA, 120 bp, Artificial Sequence
  ENSG00000105393_7 (sequence is synthesized)
ccttgacggagcccatgaagaaaatgttccagtgcccatatttcttctttgacgttgtttacatccacaatggcactgaggagaaggaggaggagatgagttggaaggatatgtttgcct

SEQ ID NO: 148610 - DNA, 120 bp, Artificial Sequence
  ENSG00000105393_8 (sequence is synthesized)
tcatgggcagcctggataccaagggtaccagctacaagtatgaggtggcactggctgggccagccctggagttgcacaactgcatggcgaaactgttggcccaccccctgcagcggcctt

SEQ ID NO: 148611 - DNA, 120 bp, Artificial Sequence
  ENSG00000105393_9 (sequence is synthesized)
gccagagccatgcttcctacagcctgctggaggaggaggatgaagccattgaggttgaggccactgtctgaaccatccctgtacatctgcaccttcttgtgcaaggaagtccttggccta

SEQ ID NO: 148612 - DNA, 120 bp, Artificial Sequence
  ENSG00000105393_10 (sequence is synthesized)
aagccttggttctcaaactgggttccttgggacctccggggtgggggggttccaggaggcacgtagggtaccttgcagggtcctaggagggaaacccaggattccaggagggatcccagg

SEQ ID NO: 148613 - DNA, 120 bp, Artificial Sequence
  ENSG00000105393_11 (sequence is synthesized)
aactgtgggcacccattttctgtgtctcccagcccatttccactcctagtttgtcatggataatttttgttcttccctgtgtgatttttgccatcaaaataaaaatttgagactcgttaa

SEQ ID NO: 148614 - DNA, 120 bp, Artificial Sequence
  ENSG00000105393_12 (sequence is synthesized)
gtacaacttccggctgtaaagatggcggcttcctagtgagtcggcggctgatttagaaggaggttcaggctacgccacacaggagccatggaagtggcagagcccagcagccccactgaa

SEQ ID NO: 148615 - DNA, 120 bp, Artificial Sequence
  ENSG00000105393_13 (sequence is synthesized)
gtacaacttccggctgtaaagatggcggcttcctagtgagtcggcggctgatttagaaggaggttcaggctacggtgagccgaaggagccatggaagtggcagagcccagcagccccact

SEQ ID NO: 148616 - DNA, 120 bp, Artificial Sequence
  ENSG00000105393_14 (sequence is synthesized)
cccctgcagaaaatgttccagtgcccatatttcttctttgacgttgtttacatccacaatggcactgaggagaaggaggaggagatgagttggaagtagagacggggtttcaccatgttg

SEQ ID NO: 148617 - DNA, 120 bp, Artificial Sequence
  ENSG00000105393_15 (sequence is synthesized)
gcctgcagccatgaggatggtggttagacaccaggagggacttccaaccacagaggctggggtgcctagaggtaagttcccagagtctgaggcagaaatgggggagctatagtcatgggg

SEQ ID NO: 148618 - DNA, 120 bp, Artificial Sequence
  ENSG00000105393_16 (sequence is synthesized)
ttctttacttcccctgcagaaaatgttccagtgcccatatttcttctttgacgttgtttacatccacaatggcactgaggagaaggaggaggagatgagttggaaggtgagaggctgcag

SEQ ID NO: 148619 - DNA, 120 bp, Artificial Sequence
  ENSG00000105393_17 (sequence is synthesized)
caggtgtgagtagcaggcgggtgtggacaggatgtcttggaacacacctgcactgggtctgggggtctctacctccatttgatacccctggaaccctggttggggtaggtcatggcattg

SEQ ID NO: 148620 - DNA, 120 bp, Artificial Sequence
  ENSG00000105393_18 (sequence is synthesized)
gtcattgaacagccgtttcccagttgtctgctgtgactgatggggtggcagccattgggacgatggtccaggcaacatgttgagtcctgcctcccccatctccaacgttccctgcgttcc

SEQ ID NO: 148621 - DNA, 63 bp, Artificial Sequence
  ENSG00000105393_19 (sequence is synthesized)
tgagtcctgcctcccccatctccaacgttccctgcgttcctttctttcttgcttgcttgcttg

SEQ ID NO: 148622 - DNA, 120 bp, Artificial Sequence
  ENSG00000105393_20 (sequence is synthesized)
ccaccttcaccttctccttagcacccccaccagatctggaaggacttttcagcctcatccagcagaaaactgagcttccggtcacagagaacgtgcagacgattcccccgccatatgtgg

SEQ ID NO: 148623 - DNA, 120 bp, Artificial Sequence
  ENSG00000105397_0 (sequence is synthesized)
agctggggtgggtggaaggttgaagagctaacaggggtctctgggctgagacttgggagctgacagattgtcccctttccagctgagccacctgccgggagcatgcctctgcgccactgg

SEQ ID NO: 148624 - DNA, 120 bp, Artificial Sequence
  ENSG00000105397_1 (sequence is synthesized)
gggatggccaggggcagtaagcccgttggggatggagcccagcccatggctgccatgggaggcctgaaggtgcttctgcactgggctggtccaggcggcggggagccctgggtcactttc

SEQ ID NO: 148625 - DNA, 120 bp, Artificial Sequence
  ENSG00000105397_2 (sequence is synthesized)
agtgagtcatcgctgacagctgaggaagtctgcatccacattgcacataaagttggtatcactcctccttgcttcaatctctttgccctcttcgatgctcaggcccaagtctggttgccc

SEQ ID NO: 148626 - DNA, 120 bp, Artificial Sequence
  ENSG00000105397_3 (sequence is synthesized)
ccaaaccacatcctagagatccccagagatgcaagcctgatgctatatttccgcataaggttttatttccggaactggcatggcatgaatcctcgggaaccggctgtgtaccgttgtggg

SEQ ID NO: 148627 - DNA, 120 bp, Artificial Sequence
  ENSG00000105397_4 (sequence is synthesized)
cccccaggaaccgaggcatcctcagatcagacagcacaggggatgcaactcctggacccagcctcatttgagtacctctttgagcagggcaagcatgagtttgtgaatgacgtggcatca

SEQ ID NO: 148628 - DNA, 120 bp, Artificial Sequence
  ENSG00000105397_5 (sequence is synthesized)
ctgtgggagctgtcgaccgaggaggagatccaccactttaagaatgagagcctgggcatggcctttctgcacctctgtcacctcgctctccgccatggcatccccctggaggaggtggcc

SEQ ID NO: 148629 - DNA, 120 bp, Artificial Sequence
  ENSG00000105397_6 (sequence is synthesized)
aagaagaccagcttcaaggactgcatcccgcgctccttccgccggcatatccggcagcacagcgccctgacccggctgcgccttcggaacgtcttccgcaggttcctgcgggacttccag

SEQ ID NO: 148630 - DNA, 120 bp, Artificial Sequence
  ENSG00000105397_7 (sequence is synthesized)
ccgggccgactctcccagcagatggtcatggtcaaatacctagccacactcgagcggctggcaccccgcttcggcacagagcgtgtgcccgtgtgccacctgaggctgctggcccaggcc

SEQ ID NO: 148631 - DNA, 120 bp, Artificial Sequence
  ENSG00000105397_8 (sequence is synthesized)
gagggggagccctgctacatccgggacagtggggtggcccctacagaccctggccctgagtctgctgctgggcccccaacccacgaggtgctggtgacaggcactggtggcatccagtgg

SEQ ID NO: 148632 - DNA, 120 bp, Artificial Sequence
  ENSG00000105397_9 (sequence is synthesized)
tggccagtagaggaggaggtgaacaaggaggagggttctagtggcagcagtggcaggaacccccaagccagcctgtttgggaagaaggccaaggctcacaaggcagtcggccagccggca

SEQ ID NO: 148633 - DNA, 120 bp, Artificial Sequence
  ENSG00000105397_10 (sequence is synthesized)
gacaggccgcgggagccactgtgggcctacttctgtgacttccgggacatcacccacgtggtgctgaaagagcactgtgtcagcatccaccggcaggacaacaagtgcctggagctgagc

SEQ ID NO: 148634 - DNA, 120 bp, Artificial Sequence
  ENSG00000105397_11 (sequence is synthesized)
ttgccttcccgggctgcggcgctgtccttcgtgtcgctggtggacggctatttccgcctgacggccgactccagccactacctgtgccacgaggtggctcccccacggctggtgatgagc

SEQ ID NO: 148635 - DNA, 120 bp, Artificial Sequence
  ENSG00000105397_12 (sequence is synthesized)
atccgggatgggatccacggacccctgctggagccatttgtgcaggccaagctgcggcccgaggacggcctgtacctcattcactggagcaccagccacccctaccgcctgatcctcaca

SEQ ID NO: 148636 - DNA, 120 bp, Artificial Sequence
  ENSG00000105397_13 (sequence is synthesized)
gtggcccagcgtagccaggcaccagacggcatgcagagcttgcggctccgaaagttccccattgagcagcaggacggggccttcgtgctggagggctggggccggtccttccccagcgtt

SEQ ID NO: 148637 - DNA, 120 bp, Artificial Sequence
  ENSG00000105397_14 (sequence is synthesized)
cgggaacttggggctgccttgcagggctgcttgctgagggccggggatgactgcttctctctgcgtcgctgttgcctgccccaaccaggagaaacctccaatctcatcatcatgcggggg

SEQ ID NO: 148638 - DNA, 120 bp, Artificial Sequence
  ENSG00000105397_15 (sequence is synthesized)
gctcgggccagccccaggacactcaacctcagccagctcagcttccaccgggttgaccagaaggagatcacccagctgtcccacttgggccagggcacaaggaccaacgtgtatgagggc

SEQ ID NO: 148639 - DNA, 120 bp, Artificial Sequence
  ENSG00000105397_16 (sequence is synthesized)
ggagggcagcggggaccctgaggagggcaagatggatgacgaggaccccctcgtgcctggcagggaccgtgggcaggagctacgagtggtgctcaaagtgctggaccctagtcaccatga

SEQ ID NO: 148640 - DNA, 120 bp, Artificial Sequence
  ENSG00000105397_17 (sequence is synthesized)
catcgccctggccttctacgagacagccagcctcatgagccaggtctcccacacgcacctggccttcgtgcatggcgtctgtgtgcgcggccctgaaaatatcatggtgacagagtacgt

SEQ ID NO: 148641 - DNA, 120 bp, Artificial Sequence
  ENSG00000105397_18 (sequence is synthesized)
ggagcacggacccctggatgtgtggctgcggagggagcggggccatgtgcccatggcttggaagatggtggtggcccagcagctggccagcgccctcagctacctggagaacaagaacct

SEQ ID NO: 148642 - DNA, 120 bp, Artificial Sequence
  ENSG00000105397_19 (sequence is synthesized)
ggttcatggtaatgtgtgtggccggaacatcctgctggcccggctggggttggcagagggcaccagccccttcatcaagctgagtgatcctggcgtgggcctgggcgccctctccaggga

SEQ ID NO: 148643 - DNA, 120 bp, Artificial Sequence
  ENSG00000105397_20 (sequence is synthesized)
ggagcgggtggagaggatcccctggctggcccccgaatgcctaccaggtggggccaacagcctaagcaccgccatggacaagtgggggtttggcgccaccctcctggagatctgctttga

SEQ ID NO: 148644 - DNA, 120 bp, Artificial Sequence
  ENSG00000105397_21 (sequence is synthesized)
cggagaggcccctctgcagagccgcagtccctccgagaaggagcatttctaccagaggcagcaccggctgcccgagccctcctgcccacagctggccacactcaccagccagtgtctgac

SEQ ID NO: 148645 - DNA, 120 bp, Artificial Sequence
  ENSG00000105397_22 (sequence is synthesized)
ctatgagccaacccagaggccatcattccgcaccatcctgcgtgacctcacccggctgcagccccacaatcttgctgacgtcttgactgtgaacccggactcaccggcgtcggaccctac

SEQ ID NO: 148646 - DNA, 120 bp, Artificial Sequence
  ENSG00000105397_23 (sequence is synthesized)
ggttttccacaagcgctatttgaaaaagatccgagatctgggcgagggtcacttcggcaaggtcagcttgtactgctacgatccgaccaacgacggcactggcgagatggtggcggtgaa

SEQ ID NO: 148647 - DNA, 120 bp, Artificial Sequence
  ENSG00000105397_24 (sequence is synthesized)
agccctcaaggcagactgcggcccccagcaccgctcgggctggaagcaggagattgacattctgcgcacgctctaccacgagcacatcatcaagtacaagggctgctgcgaggaccaagg

SEQ ID NO: 148648 - DNA, 120 bp, Artificial Sequence
  ENSG00000105397_25 (sequence is synthesized)
cgagaagtcgctgcagctggtcatggagtacgtgcccctgggcagcctccgagactacctgccccggcacagcatcgggctggcccagctgctgctcttcgcccagcagatctgcgaggg

SEQ ID NO: 148649 - DNA, 120 bp, Artificial Sequence
  ENSG00000105397_26 (sequence is synthesized)
catggcctatctgcacgcgcagcactacatccaccgagacctagccgcgcgcaacgtgctgctggacaacgacaggctggtcaagatcggggactttggcctagccaaggccgtgcccga

SEQ ID NO: 148650 - DNA, 120 bp, Artificial Sequence
  ENSG00000105397_27 (sequence is synthesized)
aggccacgagtactaccgcgtgcgcgaggatggggacagccccgtgttctggtatgccccagagtgcctgaaggagtataagttctactatgcgtcagatgtctggtccttcggggtgac

SEQ ID NO: 148651 - DNA, 120 bp, Artificial Sequence
  ENSG00000105397_28 (sequence is synthesized)
cctgtatgagctgctgacgcactgtgactccagccagagcccccccacgaaattccttgagctcataggcattgctcagggtcagatgacagttctgagactcactgagttgctggaacg

SEQ ID NO: 148652 - DNA, 120 bp, Artificial Sequence
  ENSG00000105397_29 (sequence is synthesized)
aggggagaggctgccacggcccgacaaatgtccctgtgaggtctatcatctcatgaagaactgctgggagacagaggcgtcctttcgcccaaccttcgagaacctcatacccattctgaa

SEQ ID NO: 148653 - DNA, 120 bp, Artificial Sequence
  ENSG00000105397_30 (sequence is synthesized)
gacagtccatgagaagtaccaaggccaggccccttcagtgttcagcgtgtgctgaggcacaatggcagccctgcctgggaggactggaccaggcagtggctgcagagggagcctcctgct

SEQ ID NO: 148654 - DNA, 120 bp, Artificial Sequence
  ENSG00000105397_31 (sequence is synthesized)
ccctgctccaggatgaaaccaagagggggatgtcagcctcacccacaccgtgtgccttactcctgtctagagaccccacctctgtgaacttatttttctttcttggccgtgagcctaacc

SEQ ID NO: 148655 - DNA, 120 bp, Artificial Sequence
  ENSG00000105397_32 (sequence is synthesized)
atgatcttgagggacccaacatttgtaggggcactaatccagcccttaaatcccccagcttccaaacttgaggcccaccatctccaccatctggtaataaactcatgttttctctgctgg

SEQ ID NO: 148656 - DNA, 120 bp, Artificial Sequence
  ENSG00000105397_33 (sequence is synthesized)
aagcagtagctacccgcgggagcggggaggggtccgggttcgagcttgtgttcccccggaagggtgagtctggacgcgggcgcggaaggagcgcggccggaggtcctcaggaagaagccg

SEQ ID NO: 148657 - DNA, 120 bp, Artificial Sequence
  ENSG00000105397_34 (sequence is synthesized)
cggggactggctgcgcttgacaggctgcacttggatgggagcacctggtgcctcgggactgctccgatgcccgggtctgtgctgaatgtgtaatatgcggaactatattgaaacattaca

SEQ ID NO: 148658 - DNA, 120 bp, Artificial Sequence
  ENSG00000105397_35 (sequence is synthesized)
accatcttttgatggcaacaccctgaggacctcccttttccagatggggaaactgaggcccagaattgctaagtggcttgcttgagttgacacagggagctccaggactcaccctcagct

SEQ ID NO: 148659 - DNA, 80 bp, Artificial Sequence
  ENSG00000105397_36 (sequence is synthesized)
tttcattgcctcttgaaaagagcttgtcttgtttatactgtagaaattccttgagctcataggcattgctcagggtcaga

SEQ ID NO: 148660 - DNA, 120 bp, Artificial Sequence
  ENSG00000105397_37 (sequence is synthesized)
gtagaattatgccaacaagcctggctaggaagggcagcctaggcagagtgcatggcctgtgcaaaggctgaggcttcagtgtattaaggagctgtggtctacaggaggggcaggagggaa

SEQ ID NO: 148661 - DNA, 120 bp, Artificial Sequence
  ENSG00000105397_38 (sequence is synthesized)
gcttggggcaggaggctgactgtgacactccagctctgcataatcactggacctgggtcccagtcctggttctacggctgtgagcacgtcctcccactttgtggagcctcagttgcctca

SEQ ID NO: 148662 - DNA, 120 bp, Artificial Sequence
  ENSG00000105397_39 (sequence is synthesized)
gggccctccccgcagtgggggcccctccaagaaatccagaggacagaatcagagctcaaagctgcatcccttctggcctcgtgacttcaagtctctctgggctaccagcaggtgggccac

SEQ ID NO: 148663 - DNA, 120 bp, Artificial Sequence
  ENSG00000105397_40 (sequence is synthesized)
tcgctggggctcaatgtagtcccagcctttttaggtccttgtggaagtcacttgtgcctggcacacagaaggcaagtaagagacttgatttcagttttaggcagagtgaccagggcagcg

SEQ ID NO: 148664 - DNA, 120 bp, Artificial Sequence
  ENSG00000105397_41 (sequence is synthesized)
atgggagacgcccaggctgcagagtggggaagaagggctgaggatgcgcctcacccagcagtggggtcagacaaggcttcccaaaggaggttcatgagtgtggtggttttattttgagac

SEQ ID NO: 148665 - DNA, 120 bp, Artificial Sequence
  ENSG00000105397_42 (sequence is synthesized)
ccggcgagtcctagagacttgagggggcgtggttagagcgtgggtgtggccttgtgggcggggccagtctggcctagccaattagagactctcaaccccaggctgcagtacgcggttctt

SEQ ID NO: 148666 - DNA, 120 bp, Artificial Sequence
  ENSG00000105397_43 (sequence is synthesized)
ctacaccccaacctatgcctatttctcaactctcacctgtactctgatcccgggctacaccttgaccttcaacctagaccccaacccctaacgatattccagcccataacttacatccca

SEQ ID NO: 148667 - DNA, 120 bp, Artificial Sequence
  ENSG00000105397_44 (sequence is synthesized)
ttttgcttggtgccacgtgccatccggccctctccagcggccgggtagccaccggcctgacctgactgtcccccagccctcctggctgctcaggtcctgccgccgcccccggccgaaccc

SEQ ID NO: 148668 - DNA, 120 bp, Artificial Sequence
  ENSG00000105397_45 (sequence is synthesized)
cgggagccaccagcagctccctcaagtgagaatggggttctggatgggtccatcccacctgagaactgggtctagtgtgcgcgggtcttggccttccctcccgaccttggaggggctctg

SEQ ID NO: 148669 - DNA, 66 bp, Artificial Sequence
  ENSG00000105397_46 (sequence is synthesized)
cctgggtcactttcagtgagtcatcgctgacagctgaggaagtctgcatccacattgcacataaag

SEQ ID NO: 148670 - DNA, 120 bp, Artificial Sequence
  ENSG00000105397_47 (sequence is synthesized)
taggcgtgagccactgcgcccggccgacaggtatcactcctccttgcttcaatctctttgccctcttcgatgctcaggcccaagtctggttgcccccaaaccacatcctagagatcccca

SEQ ID NO: 148671 - DNA, 120 bp, Artificial Sequence
  ENSG00000105397_48 (sequence is synthesized)
agctgcaggtgggggagggggcctcagagggagtgtgaaggcagacattgggtctggggggtctttggggctgacggtagcaaatgacgtgactcctgacctcgtttctcacctgatcca

SEQ ID NO: 148672 - DNA, 120 bp, Artificial Sequence
  ENSG00000105397_49 (sequence is synthesized)
ccttcatcatacctcgggtggtgaaggtggcaagagaatttatttccaggcttggaaatgtacccagccctttggccagaaaccagcagtgcaattggctccatcctagctgcaagggag

SEQ ID NO: 148673 - DNA, 120 bp, Artificial Sequence
  ENSG00000105398_0 (sequence is synthesized)
agcctccagcggtggctacagttgaaaccctcacaccacgcaggaagaggtcatcatcatgtcggacgatttcttatggtttgaaggcatagctttccctactatgggtttcagatccga

SEQ ID NO: 148674 - DNA, 120 bp, Artificial Sequence
  ENSG00000105398_1 (sequence is synthesized)
aaccttaagaaaagtacgtgatgagttcgtgataagggatgaagatgtaataatattgacttaccccaaatcaggaacaaactggttggctgagattctctgcctgatgcactccaaggg

SEQ ID NO: 148675 - DNA, 120 bp, Artificial Sequence
  ENSG00000105398_2 (sequence is synthesized)
ggatgccaagtggatccaatctgtgcccatctgggagcgatcaccctgggtagagagtgagattgggtatacagcactcagtgaaacggagagtccacgtttattctcctcccacctccc

SEQ ID NO: 148676 - DNA, 120 bp, Artificial Sequence
  ENSG00000105398_3 (sequence is synthesized)
catccagttattccccaagtctttcttcagttccaaggccaaggtgatttatctcatgagaaatcccagagatgttttggtgtctggttattttttctggaaaaacatgaagtttattaa

SEQ ID NO: 148677 - DNA, 120 bp, Artificial Sequence
  ENSG00000105398_4 (sequence is synthesized)
gaaaccaaagtcatgggaagaatattttgaatggttttgtcaaggaactgtgctatatgggtcatggtttgaccacattcatggctggatgcccatgagagaggagaaaaacttcctgtt

SEQ ID NO: 148678 - DNA, 120 bp, Artificial Sequence
  ENSG00000105398_5 (sequence is synthesized)
actgagttatgaggagctgaaacaggacacaggaagaaccatagagaagatctgtcaattcctgggaaagacgttagaacccgaagaactgaacttaattctcaagaacagctcctttca

SEQ ID NO: 148679 - DNA, 120 bp, Artificial Sequence
  ENSG00000105398_6 (sequence is synthesized)
gagcatgaaagaaaacaagatgtccaattattccctcctgagtgttgattatgtagtggacaaagcacaacttctgagaaaaggtgtatctggggactggaaaaatcacttcacagtggc

SEQ ID NO: 148680 - DNA, 120 bp, Artificial Sequence
  ENSG00000105398_7 (sequence is synthesized)
agaatgacattgattctcctgtccttgtacatgtacctgactggggtcattgtgtaagacttattattttatcctgaaaccttaaatatcaaacctctgcatctctgatcccttccttgt

SEQ ID NO: 148681 - DNA, 66 bp, Artificial Sequence
  ENSG00000105398_8 (sequence is synthesized)
cttaaatatcaaacctctgcatctctgatcccttccttgttaaaagttaccagggcgggcggatca

SEQ ID NO: 148682 - DNA, 82 bp, Artificial Sequence
  ENSG00000105398_9 (sequence is synthesized)
ccatctctactaaaaatacaaaaaccaaaaaaaattagccaggcgcaggggggtgggggaggatcacggggtcaggagatcg

SEQ ID NO: 148683 - DNA, 82 bp, Artificial Sequence
  ENSG00000105398_10 (sequence is synthesized)
gtctcaaaaagaaagaagtgactagggttcagagaaccagggttcaaagcccagggatgcaaaggttgcagtgagttgagtc

SEQ ID NO: 148684 - DNA, 120 bp, Artificial Sequence
  ENSG00000105398_11 (sequence is synthesized)
ttcaaagcccagggatgcaaaggttgcagtgagttgagtcatgggatcccagacttttttaaatgtttgcaatgtttcccgtttacagaatgctacaagaataatgtacgtactacctaa

SEQ ID NO: 148685 - DNA, 120 bp, Artificial Sequence
  ENSG00000105398_12 (sequence is synthesized)
aaggatgtctaaatgtttgttaataaaaataagaaatagctacagtgacagattttagagcaaaaattagtaataaaaataagaaataaaattacaggagcaattaaggttccatttctt

SEQ ID NO: 148686 - DNA, 120 bp, Artificial Sequence
  ENSG00000105398_13 (sequence is synthesized)
ttcatcacatgtatctccacaatttattattgctctgatcttaaggagtgtaatttgcaatctaattttatcctcttactctgtgttgttaaaccatatacaataaacggtgtttatgga

SEQ ID NO: 148687 - DNA, 120 bp, Artificial Sequence
  ENSG00000105401_0 (sequence is synthesized)
agtctccactgctgccgccgtcgccgccacccgagccggagcgggctgggccgccaaggcaagatggtggactacagcgtgtgggaccacattgaggtgtctgatgatgaagacgagacg

SEQ ID NO: 148688 - DNA, 120 bp, Artificial Sequence
  ENSG00000105401_1 (sequence is synthesized)
caccccaacatcgacacggccagtctcttccgctggcggcatcaggcccgggtggaacgcatggagcagttccagaaggagaaggaggaactggacaggggctgccgcgagtgcaagcgc

SEQ ID NO: 148689 - DNA, 120 bp, Artificial Sequence
  ENSG00000105401_2 (sequence is synthesized)
aaggtggccgagtgccagaggaaactgaaggagctggaggtggccgagggcggcaaggcagagctggagcgcctgcaggccgaggcacagcagctgcgcaaggaggagcggagctgggag

SEQ ID NO: 148690 - DNA, 120 bp, Artificial Sequence
  ENSG00000105401_3 (sequence is synthesized)
cagaagctggaggagatgcgcaagaaggagaagagcatgccctggaacgtggacacgctcagcaaagacggcttcagcaagagcatggtaaataccaagcccgagaagacggaggaggac

SEQ ID NO: 148691 - DNA, 120 bp, Artificial Sequence
  ENSG00000105401_4 (sequence is synthesized)
tcagaggaggtgagggagcagaaacacaagaccttcgtggaaaaatacgagaaacagatcaagcactttggcatgcttcgccgctgggatgacagccaaaagtacctgtcagacaacgtc

SEQ ID NO: 148692 - DNA, 120 bp, Artificial Sequence
  ENSG00000105401_5 (sequence is synthesized)
cacctggtgtgcgaggagacagccaattacctggtcatttggtgcattgacctagaggtggaggagaaatgtgcactcatggagcaggtggcccaccagacaatcgtcatgcaatttatc

SEQ ID NO: 148693 - DNA, 120 bp, Artificial Sequence
  ENSG00000105401_6 (sequence is synthesized)
ctaagattaagacagccgatcgccagtacatggagggcttcaacgacgagctggaagccttcaaggagcgtgtgcggggccgtgccaagctgcgcatcgagaaggccatgaaggagtacg

SEQ ID NO: 148694 - DNA, 120 bp, Artificial Sequence
  ENSG00000105401_7 (sequence is synthesized)
aggaggaggagcgcaagaagcggctcggccccggcggcctggaccccgtcgaggtctacgagtccctccctgaggaactccagaagtgcttcgatgtgaaggacgtgcagatgctgcagg

SEQ ID NO: 148695 - DNA, 120 bp, Artificial Sequence
  ENSG00000105401_8 (sequence is synthesized)
acgccatcagcaagatggaccccaccgacgcaaagtaccacatgcagcgctgcattgactctggcctctgggtccccaactctaaggccagcgaggccaaggagggagaggaggcaggtc

SEQ ID NO: 148696 - DNA, 120 bp, Artificial Sequence
  ENSG00000105401_9 (sequence is synthesized)
ctggggacccattactggaagctgttcccaagacgggcgatgagaaggatgtcagtgtgtgacctgccccagctaccaccgccacctgcttccaggcccctatgtgccccttttcagaaa

SEQ ID NO: 148697 - DNA, 120 bp, Artificial Sequence
  ENSG00000105401_10 (sequence is synthesized)
acagatagatgccatctcgcccgctcctgacttcctctacttgcgctgctcggcccagcctggggggcccgcccagccctccctggcctctccactgtctccactctccagcgcccattc

SEQ ID NO: 148698 - DNA, 120 bp, Artificial Sequence
  ENSG00000105401_11 (sequence is synthesized)
aagtctctgctttgagtcaaggggcttcactgcctgcagccccccatcagcattatgccaaaggcccgggggtccggggaagggcagaggtcaccaggctggtctaccaggtagttgggg

SEQ ID NO: 148699 - DNA, 120 bp, Artificial Sequence
  ENSG00000105401_12 (sequence is synthesized)
agggtccccagccaaggggccggctctcgtcactgggctctgttttcactgttcgtctgctgtctgtgtcttctatttggcaaacagcaatgatcttccaataaaagatttcagatgctc

SEQ ID NO: 148700 - DNA, 88 bp, Artificial Sequence
  ENSG00000105401_13 (sequence is synthesized)
atgcaccttccgggctcaagtgatcctcctacttctgcctcctgagtagctgggaccacaggcccgggtggaacgcatggagcagttc

SEQ ID NO: 148701 - DNA, 120 bp, Artificial Sequence
  ENSG00000105401_14 (sequence is synthesized)
ggaaaaatacgagaaacagatcaagcactttggtgagtggggcttgtgggttatggggggcaaggtcgaggcaggccctttgcctccagggccctccagcaccttgccagcatcttccca

SEQ ID NO: 148702 - DNA, 120 bp, Artificial Sequence
  ENSG00000105401_15 (sequence is synthesized)
ctgaagccggctggtgaaagtgcccctccaaggcttctccaaggagtaaggggggtcgtgtcaccttggcacacacccacatatattgagcacctactgtatcccagtatccagcagata

SEQ ID NO: 148703 - DNA, 120 bp, Artificial Sequence
  ENSG00000105401_16 (sequence is synthesized)
aatgctgagctttgagcgcatgtccttcgtgactgtcactgttactgtgactgagtccagcctcagtttccttatccaaaccacattttctctcaatatcagctcacaaaatgcgtggga

SEQ ID NO: 148704 - DNA, 120 bp, Artificial Sequence
  ENSG00000105401_17 (sequence is synthesized)
gtggatgggatgggcgctgcgaccacggcccgcccggccgcgctcgaggcgctccgcagccttgccccagcccactccccctctcaccctaccacagagcatggtaaataccaagcccga

SEQ ID NO: 148705 - DNA, 120 bp, Artificial Sequence
  ENSG00000105401_18 (sequence is synthesized)
ggaccccggtggtgtagttgaagagtgtggtggggggcggggagctgagggatggacgggggccacgtgggaggggggacaggcttggggggccgggcggatgaaacaccccaccggtcc

SEQ ID NO: 148706 - DNA, 120 bp, Artificial Sequence
  ENSG00000105401_19 (sequence is synthesized)
cgtacctggaggaacagggctatccttaccgagattagggagaccaaggacaaggcaggctgggaggtggccatgttgagttagaggtgcccatgcagggacactgaggacatgagtgtc

SEQ ID NO: 148707 - DNA, 120 bp, Artificial Sequence
  ENSG00000105401_20 (sequence is synthesized)
tcagatctgcagtagagcagggctcccaagcaggtggtctttggcaaatgccagatgaggtccccggcgggggagcccaggccttggggagcccttcatgtaggtcaggaatagacttgg

SEQ ID NO: 148708 - DNA, 120 bp, Artificial Sequence
  ENSG00000105401_21 (sequence is synthesized)
caccggcgcggtacctgcagcgggcggcggcagagtgtgtgggatctcctgtctgtgcgtcggaggatagtgatggaagacaccctgtggcggataccgcagctgccggcccaccgctct

SEQ ID NO: 148709 - DNA, 120 bp, Artificial Sequence
  ENSG00000105401_22 (sequence is synthesized)
atacatcgctgcctcttctaaagcgcttctgccagaggtaaactgaggaaggtcccaggtagccgcggagcgcacccccgtgcccttttcagggcggggtttcccgcgctcggcggaagc

SEQ ID NO: 148710 - DNA, 120 bp, Artificial Sequence
  ENSG00000105402_0 (sequence is synthesized)
gcgcgccggtgcgacgtcaacgcagccgggcgagttttaccgatctgtgttccgcggcccggccgcggctgagtcttcccagggtcagggtcaggcgctttgctgagtccctttgtggcc

SEQ ID NO: 148711 - DNA, 120 bp, Artificial Sequence
  ENSG00000105402_1 (sequence is synthesized)
gccatggacaattccgggaaggaagcggaggcgatggcgctgttggccgaggcggagcgcaaagtgaagaactcgcagtccttcttctctggcctctttggaggctcatccaaaatagag

SEQ ID NO: 148712 - DNA, 120 bp, Artificial Sequence
  ENSG00000105402_2 (sequence is synthesized)
gaagcatgcgaaatctacgccagagcagcaaacatgttcaaaatggccaaaaactggagtgctgctggaaacgcgttctgccaggctgcacagctgcacctgcagctccagagcaagcac

SEQ ID NO: 148713 - DNA, 120 bp, Artificial Sequence
  ENSG00000105402_3 (sequence is synthesized)
gacgcagccacctgctttgtggacgctggcaacgcattcaagaaagccgacccccaagaggccattaactgtttgatgcgagcaatcgagatctacacagacatgggccgattcacgatt

SEQ ID NO: 148714 - DNA, 120 bp, Artificial Sequence
  ENSG00000105402_4 (sequence is synthesized)
gcggccaagcaccacatctccattgctgagatctatgagacagagttggtggacatcgagaaggccattgcccactacgagcagtctgcagactactacaaaggcgaggagtccaacagc

SEQ ID NO: 148715 - DNA, 120 bp, Artificial Sequence
  ENSG00000105402_5 (sequence is synthesized)
tcagccaacaagtgtctgctgaaggtggctggttacgctgcgctgctggagcagtatcagaaggccattgacatctacgaacaggtggggaccaatgccatggacagccccctcctcaag

SEQ ID NO: 148716 - DNA, 120 bp, Artificial Sequence
  ENSG00000105402_6 (sequence is synthesized)
gctttctctgattcccgggaatgcaagttgatgaaaaaattgctagaggcccacgaggagcagaatgtggacagctacaccgagtcggtgaaggaatacgactccatctcccggctggac

SEQ ID NO: 148717 - DNA, 120 bp, Artificial Sequence
  ENSG00000105402_7 (sequence is synthesized)
cagtggctcaccaccatgctgctgcgcatcaagaagaccatccagggcgatgaggaggacctgcgctaagccccacccagccccccagtgcccgtcttcctgtcccatctgctcagagag

SEQ ID NO: 148718 - DNA, 120 bp, Artificial Sequence
  ENSG00000105402_8 (sequence is synthesized)
aggtggggccgagacttgctggagagcttccctcctttcccatctggggagtgccgcgggccacagtgggcaggtggcaccgggggtcagcatgcaggggcgccagaggcccaggctgct

SEQ ID NO: 148719 - DNA, 120 bp, Artificial Sequence
  ENSG00000105402_9 (sequence is synthesized)
ggccggacagtcaccctctgttctcgctacatcccttgccccctgtccatttatttaagcccccataggtgcccttcacccccaaaaccagctgtacagaatctttgatacagacctatt

SEQ ID NO: 148720 - DNA, 120 bp, Artificial Sequence
  ENSG00000105402_10 (sequence is synthesized)
tgctaggggtgctgccggggatttggggtcagcatctggccccctatctcctgaccagctgagtcatgaggccggtttctctctctctcccacttttgtcccccagccaagctctaaagc

SEQ ID NO: 148721 - DNA, 120 bp, Artificial Sequence
  ENSG00000105402_11 (sequence is synthesized)
acatgtagccgctgagacctgctgtttctgctgggggcaggctcctcttcccccagccccgggagcctcccccagcttcctgcagccccgacctctcaggttagaccctgggccctggag

SEQ ID NO: 148722 - DNA, 120 bp, Artificial Sequence
  ENSG00000105402_12 (sequence is synthesized)
cttaggggattctccccaccccagccccacacctgctccttccctaatgctttgaggttttcttggttggaagctgcagctggcccaagaaagaaaataaaaaacaacacttttgcatga

SEQ ID NO: 148723 - DNA, 120 bp, Artificial Sequence
  ENSG00000105402_13 (sequence is synthesized)
agcccccttcctgcctgccccagccccgcagggaccgccaccacttcccctcactactcctccccacacagctcagccaacaagtgtctgctgaaggtggctggttacgctgcgctgctg

SEQ ID NO: 148724 - DNA, 120 bp, Artificial Sequence
  ENSG00000105402_14 (sequence is synthesized)
gagcagtatcagaaggccattgacatctacgaacaggtggggacaggtggggatggcggcttccaccctgccccctctcagggcctgtgcctcctcctaagccccggcaccttgttctgg

SEQ ID NO: 148725 - DNA, 120 bp, Artificial Sequence
  ENSG00000105402_15 (sequence is synthesized)
gtggacatcgagaaggtgagtggcagcagggccctgcatgggctggcagccaggaccagtgctgctctctcttcttcccaccaggggagtcctctggtgtctgagtgccgagaagggggc

SEQ ID NO: 148726 - DNA, 120 bp, Artificial Sequence
  ENSG00000105402_16 (sequence is synthesized)
atggggcgccggcagagcttggagaatggggtctggctgtgtcccaggcaggcagggcggagggtgtggaagcttcacggaggcctcctctcccttccctgccctcccctggaacccatc

SEQ ID NO: 148727 - DNA, 120 bp, Artificial Sequence
  ENSG00000105402_17 (sequence is synthesized)
ccagcaagtcacagtctgcagagtcagccctctcaccagatttcctggggctcagggattccgtccccttcttcccagccccttgagagtgtgtggcagcgctggcagctctgagcgcct

SEQ ID NO: 148728 - DNA, 120 bp, Artificial Sequence
  ENSG00000105402_18 (sequence is synthesized)
gctggcaacgcattcaagaaagccgacccccaagtcccttttagatccccagaggtctttctgaattggacaaaacctacagaccccactccccagaggagtgcttatggaccccactgt

SEQ ID NO: 148729 - DNA, 120 bp, Artificial Sequence
  ENSG00000105402_19 (sequence is synthesized)
ttacatgtcagaaggaggggttggactccctgaaagcccagccacagacctgagacaaagagcctctgtccagatgcctccccacggagggagtttggagtcccatccagaccgtgagcc

SEQ ID NO: 148730 - DNA, 120 bp, Artificial Sequence
  ENSG00000105402_20 (sequence is synthesized)
ccttgagaggagcccagccccggcgcttcttggtagcaccctcttctcaggcgaacatggcctgggtgaccatggagacccccacggtgaccaggaactttcagatgcccaggctgaagc

SEQ ID NO: 148731 - DNA, 120 bp, Artificial Sequence
  ENSG00000105402_21 (sequence is synthesized)
tgctaaaatggtgttcttaaaaaataccccctgagagctcatttctgtctgctagaaaatgcctcccactcatgcttttctctctcctccaaataacttgtcaaaaaaaagcctttccca

SEQ ID NO: 148732 - DNA, 120 bp, Artificial Sequence
  ENSG00000105402_22 (sequence is synthesized)
aatttaaaatcttgcaagagatagtacaacaaaggtagcccagttcttcctcagtgccatcctggtgtgttcaggttttttggcaaaacctttgaggagctggtgggtggcaggactagg

SEQ ID NO: 148733 - DNA, 120 bp, Artificial Sequence
  ENSG00000105402_23 (sequence is synthesized)
ttaaagggactgagcagagggctcccgactgctgagctacgaggaagagggggcagtggagagcacactgagggctcagtgttgatgacatccagcctcctcgtgccagaggtccaggtc

SEQ ID NO: 148734 - DNA, 120 bp, Artificial Sequence
  ENSG00000105402_24 (sequence is synthesized)
ctcctggtgcaggagcagaagctgctcaggatcctgcagagatggtggcagagcccaggtagaacctggcaccctgttgcctccaagaccacctcagatgctggtttggccgcctcccat

SEQ ID NO: 148735 - DNA, 120 bp, Artificial Sequence
  ENSG00000105402_25 (sequence is synthesized)
gcctccttcccctttgccagcagctcagtccttcaagagcagggccttggcaggtctgtcttaaaacaccgtgggagtctggccatcatcctggcctagcactgctgtgccctgtccctg

SEQ ID NO: 148736 - DNA, 120 bp, Artificial Sequence
  ENSG00000105402_26 (sequence is synthesized)
atgtcatccccccaccctgtcttcagcctggctgaatgttctccacctacgactccatgccgtgccagcaccgtctctctccctggctgtgcccctcccacacccctcgcagagcttcct

SEQ ID NO: 148737 - DNA, 120 bp, Artificial Sequence
  ENSG00000105402_27 (sequence is synthesized)
ggaggggcccagagtgaggctggctaaagaacccagagggagggaatgggaagaagtgccaagaggcccagggtggccgtgggcaccccaccccatggcccgatggtcctcatccacagt

SEQ ID NO: 148738 - DNA, 120 bp, Artificial Sequence
  ENSG00000105402_28 (sequence is synthesized)
ggagtttttttaccattgcctggcagaagcacggagtccaggatttcctggtgtccctggctcacggcctggggtggtggccccacacaccccacacacacacaccccacagagccctgc

SEQ ID NO: 148739 - DNA, 120 bp, Artificial Sequence
  ENSG00000105402_29 (sequence is synthesized)
cctgctgtgggcaccggtggtgggcaaaagcttgggctttgtcagaccaggttcccattcccaccccatgtctcaccgtgccctgggcaggtcactgcccctctctggatctgtttcctc

SEQ ID NO: 148740 - DNA, 120 bp, Artificial Sequence
  ENSG00000105402_30 (sequence is synthesized)
actttgaaaagggggctcaccgtcatttgaccctctcagggtcctcaagaagcaccagccccaggcctggcatggaggatgtgctcatttgtcccctgccccagctgagccaggtgggag

SEQ ID NO: 148741 - DNA, 120 bp, Artificial Sequence
  ENSG00000105402_31 (sequence is synthesized)
gaggcagtgggtgcctatctggggaaccttccccctccacccacctctccctgcagccatctctgcagccaggctggtgctgagctcagctacgggaaggtactgacagacacagagcca

SEQ ID NO: 148742 - DNA, 120 bp, Artificial Sequence
  ENSG00000105402_32 (sequence is synthesized)
ggtgacacctgaggctgggggaggggtgcaagagctgactcaatatcacccgacatccccaagtcccctcagctgctaggccagtagctctgaggaccctcttgttactaactcatcttc

SEQ ID NO: 148743 - DNA, 120 bp, Artificial Sequence
  ENSG00000105402_33 (sequence is synthesized)
tagccgttgcttctgggtccgccgattacaggatgtatgtgtcttcaaactgccggatttaggttgtgttctctccccttcctcctcatctgccccctttttgccaccgtttccactgtc

SEQ ID NO: 148744 - DNA, 120 bp, Artificial Sequence
  ENSG00000105402_34 (sequence is synthesized)
agggagggagtgtcacatggggtccccccagcgtgcacggagccctgggtgatggccgagaaaaaggcaggcagctggccccctgggagagaggggcgggcgccgcctctcatgttccca

SEQ ID NO: 148745 - DNA, 120 bp, Artificial Sequence
  ENSG00000105402_35 (sequence is synthesized)
ccgcctgccgccgctctgcccaccgccatgccagcctcccgttggtcctgacagccaggctgcctccttcccactgtctcaggctctcagaaggcccacgaacacctggctacagcctcc

SEQ ID NO: 148746 - DNA, 120 bp, Artificial Sequence
  ENSG00000105402_36 (sequence is synthesized)
acccccacccagccaccatcacaccctgatcttggtcgctcacgcactggccgctgacctctccaagctggtccctggctccctgcccttggggtcctgggttaacagggcctcacctcg

SEQ ID NO: 148747 - DNA, 120 bp, Artificial Sequence
  ENSG00000105402_37 (sequence is synthesized)
ggacatgaaccagctcccagctggccccccagtgcctggcagtggctctggccctctggctgcttgccctgagctcaccagtgccacttctccatggctacaggtggggaccaatgccat

SEQ ID NO: 148748 - DNA, 120 bp, Artificial Sequence
  ENSG00000105402_38 (sequence is synthesized)
ggctgtgggactctggtttgatgaaatgagcacttcatgtggctgaaagggatgggcaggttggacacactgaatccgcagtgcagagggaaggaatgctcacatcccagctcccaaaat

SEQ ID NO: 148749 - DNA, 120 bp, Artificial Sequence
  ENSG00000105402_39 (sequence is synthesized)
tgtcagaagctcgtccaggagccagctgtcccaggtgtctgctggtggcccgccgctttccagacatggaggggacttaaccccgtgagtccatgttgctgcctgggggaggccattaac

SEQ ID NO: 148750 - DNA, 120 bp, Artificial Sequence
  ENSG00000105402_40 (sequence is synthesized)
acctctcgatcttcttcacacctcaggtcttcttcatacctcctcacaggcgtggctgaggggtgggaacttgaagggtcataggtcagcaggcaggcacgcaggaggtcatgagtcgca

SEQ ID NO: 148751 - DNA, 120 bp, Artificial Sequence
  ENSG00000105404_0 (sequence is synthesized)
acagcagctctacccctcacgacgcagacatggcagcgcagaaggaccagcagaaagatgccgaggcggaagggctgagcggcacgaccctgctgccgaagctgattccctccggtgcag

SEQ ID NO: 148752 - DNA, 120 bp, Artificial Sequence
  ENSG00000105404_1 (sequence is synthesized)
gccgggagtggctggagcggcgccgcgcgaccatccggccctggagcaccttcgtggaccagcagcgcttctcacggccccgcaacctgggagagctgtgccagcgcctcgtacgcaacg

SEQ ID NO: 148753 - DNA, 120 bp, Artificial Sequence
  ENSG00000105404_2 (sequence is synthesized)
tggagtactaccagagcaactatgtgttcgtgttcctgggcctcatcctgtactgtgtggtgacgtcccctatgttgctggtggctctggctgtctttttcggcgcctgttacattctct

SEQ ID NO: 148754 - DNA, 120 bp, Artificial Sequence
  ENSG00000105404_3 (sequence is synthesized)
tctttggccgagaggtgagcccagcgcatcagtatgctctggctggaggcatctccttccccttcttctggctggctggtgcgggctcggccgtcttctgggtgctgggagccaccctgg

SEQ ID NO: 148755 - DNA, 120 bp, Artificial Sequence
  ENSG00000105404_4 (sequence is synthesized)
tggtcatcggctcccacgctgccttccaccagattgaggctgtggacggggaggagctgcagatggaacccgtgtgaggtgtcttctgggacctgccggcctcccgggccagctgcccca

SEQ ID NO: 148756 - DNA, 120 bp, Artificial Sequence
  ENSG00000105404_5 (sequence is synthesized)
cccctgcccatgcctgtcctgcacggctctgctgctcgggcccacagcgccgtcccatcacaagcccggggagggatcccgcctttgaaaataaagctgttatgggtgtcattcaggaaa

SEQ ID NO: 148757 - DNA, 120 bp, Artificial Sequence
  ENSG00000105404_6 (sequence is synthesized)
aaaacagctcaaaaaacacatccacaggtcagatttggcccttgggccaccagtttgagaccctggtctgcgcgagggttgcagcaggagagccctagtctagggagcaggaagccggga

SEQ ID NO: 148758 - DNA, 120 bp, Artificial Sequence
  ENSG00000105404_7 (sequence is synthesized)
tcccaggaacttcctggaggatgtggggcagagggcagagggtggggctgaggcaggcgaggacggtgtgctgtgttctggagggcagtggggacagcaggggaacagggtgaccccagg

SEQ ID NO: 148759 - DNA, 120 bp, Artificial Sequence
  ENSG00000105404_8 (sequence is synthesized)
acctggagggccttggcatgaggagtttggattcgatcccgagaacctggagcttgtacggattgttggggggcagcaggggttactctgggagagggcatggagagtcggaacagcacc

SEQ ID NO: 148760 - DNA, 120 bp, Artificial Sequence
  ENSG00000105404_9 (sequence is synthesized)
cctcagaccccaaatccaagtccttcaaaacccaagtccgcccaagcctagatgtacactagatcccccaaacctgatcccttaaaatctcagacacaaccgatccttccatcgagtctc

SEQ ID NO: 148761 - DNA, 120 bp, Artificial Sequence
  ENSG00000105404_10 (sequence is synthesized)
agccccctcaaattgctattcctcaaacccaggatccacctggctgctgtgccttaaacctactccttttcaaaccacatgactcctcccctctctctcctccccttgccgctctctgcg

SEQ ID NO: 148762 - DNA, 120 bp, Artificial Sequence
  ENSG00000105404_11 (sequence is synthesized)
gccaacatcagctgcaggtgcccacactggacaccaggtggccaccttacactggcctagatctgttcccgtttcttttcctgctttctggggtgtgaccagaaagaacttggaacttag

SEQ ID NO: 148763 - DNA, 120 bp, Artificial Sequence
  ENSG00000105404_12 (sequence is synthesized)
cgacgcagacatggcagcgcagaaggaccagcagaaagatgccgaggcggaagggctgagcggcacgtgagcgagctggctctaggccctcggaccagagacccgggagtccgggccccc

SEQ ID NO: 148764 - DNA, 120 bp, Artificial Sequence
  ENSG00000105404_13 (sequence is synthesized)
ggccccctcctccctcctccctcgagagcctggagtcccagccccgagccgcagaagtgttggccccggtctcctctaatgggaccctggagtctgggcccctagtcccctccctgcctg

SEQ ID NO: 148765 - DNA, 120 bp, Artificial Sequence
  ENSG00000105404_14 (sequence is synthesized)
ctgtacaggaatctggggtcccgggagggagtccaggcacccttagtccccttcttttgcgggggtctggggctccatcccggtccaccactgacccggccccaccccccgcaggaccct

SEQ ID NO: 148766 - DNA, 120 bp, Artificial Sequence
  ENSG00000105409_0 (sequence is synthesized)
agcctctgtgcggtgggaccaacggacggacggacggacgcgcgcacctaccgaggcgcgggcgctgcagaggctcccagcccaagcctgagcctgagcccgccccgaggtccccgcccc

SEQ ID NO: 148767 - DNA, 120 bp, Artificial Sequence
  ENSG00000105409_1 (sequence is synthesized)
gcccgcctggctctctcgccgcggagccgccaagatgggggacaagaaagatgacaaggactcacccaagaagaacaagggcaaggagcgccgggacctggatgacctcaagaaggaggt

SEQ ID NO: 148768 - DNA, 120 bp, Artificial Sequence
  ENSG00000105409_2 (sequence is synthesized)
ggctatgacagagcacaagatgtcagtggaagaggtctgccggaaatacaacacagactgtgtgcagggtttgacccacagcaaagcccaggagatcctggcccgggatgggcctaacgc

SEQ ID NO: 148769 - DNA, 120 bp, Artificial Sequence
  ENSG00000105409_3 (sequence is synthesized)
actcacgccaccgcctaccaccccagagtgggtcaagttttgccggcagctcttcgggggcttctccatcctgctgtggatcggggctatcctctgcttcctggcctacggtatccaggc

SEQ ID NO: 148770 - DNA, 120 bp, Artificial Sequence
  ENSG00000105409_4 (sequence is synthesized)
gggcaccgaggacgacccctctggtgacaacctgtacctgggcatcgtgctggcggccgtggtgatcatcactggctgcttctcctactaccaggaggccaagagctccaagatcatgga

SEQ ID NO: 148771 - DNA, 120 bp, Artificial Sequence
  ENSG00000105409_5 (sequence is synthesized)
gtccttcaagaacatggtgccccagcaagccctggtgatccgggaaggtgagaagatgcaggtgaacgctgaggaggtggtggtcggggacctggtggagatcaagggtggagaccgagt

SEQ ID NO: 148772 - DNA, 120 bp, Artificial Sequence
  ENSG00000105409_6 (sequence is synthesized)
gccagctgacctgcggatcatctcagcccacggctgcaaggtggacaactcctccctgactggcgaatccgagccccagactcgctctcccgactgcactcacgacaaccccttggagac

SEQ ID NO: 148773 - DNA, 120 bp, Artificial Sequence
  ENSG00000105409_7 (sequence is synthesized)
tcggaacatcaccttcttttccaccaactgtgtggaaggcacggctcggggcgtggtggtggccacgggcgaccgcactgtcatgggccgtatcgccaccctggcatcagggctggaggt

SEQ ID NO: 148774 - DNA, 120 bp, Artificial Sequence
  ENSG00000105409_8 (sequence is synthesized)
gggcaagacgcccatcgccatcgagattgagcacttcatccagctcatcaccggcgtggctgtcttcctgggtgtctccttcttcatcctctccctcattctcggatacacctggcttga

SEQ ID NO: 148775 - DNA, 120 bp, Artificial Sequence
  ENSG00000105409_9 (sequence is synthesized)
ggctgtcatcttcctcatcggcatcatcgtggccaatgtcccagagggtctgctggccactgtcactgtgtgtctgacgctgaccgccaagcgcatggcccggaagaactgcctggtgaa

SEQ ID NO: 148776 - DNA, 120 bp, Artificial Sequence
  ENSG00000105409_10 (sequence is synthesized)
gaacctggaggctgtagaaaccctgggctccacgtccaccatctgctcagataagacagggaccctcactcagaaccgcatgacagtcgcccacatgtggtttgacaaccagatccacga

SEQ ID NO: 148777 - DNA, 120 bp, Artificial Sequence
  ENSG00000105409_11 (sequence is synthesized)
ggctgacaccactgaggaccagtcagggacctcatttgacaagagttcgcacacctgggtggccctgtctcacatcgctgggctctgcaatcgcgctgtcttcaagggtggtcaggacaa

SEQ ID NO: 148778 - DNA, 120 bp, Artificial Sequence
  ENSG00000105409_12 (sequence is synthesized)
catccctgtgctcaagagggatgtggctggggatgcgtctgagtctgccctgctcaagtgcatcgagctgtcctctggctccgtgaagctgatgcgtgaacgcaacaagaaagtggctga

SEQ ID NO: 148779 - DNA, 120 bp, Artificial Sequence
  ENSG00000105409_13 (sequence is synthesized)
gattcccttcaattccaccaacaaataccagctctccatccatgagaccgaggaccccaacgacaaccgatacctgctggtgatgaagggtgcccccgagcgcatcctggaccgctgctc

SEQ ID NO: 148780 - DNA, 120 bp, Artificial Sequence
  ENSG00000105409_14 (sequence is synthesized)
ttgagctcggtggcctgggcgagcgcgtgcttggtttctgccattattacctgcccgaggagcagttccccaagggctttgccttcgactgtgatgacgtgaacttcaccacggacaacc

SEQ ID NO: 148781 - DNA, 120 bp, Artificial Sequence
  ENSG00000105409_15 (sequence is synthesized)
tctgctttgtgggcctcatgtccatgatcgacccaccccgggcagccgtccctgacgcggtgggcaagtgtcgcagcgcaggcatcaaggtcatcatggtcaccggcgatcaccccatca

SEQ ID NO: 148782 - DNA, 120 bp, Artificial Sequence
  ENSG00000105409_16 (sequence is synthesized)
cggccaaggccattgccaagggtgtgggcatcatctctgagggcaacgagactgtggaggacatcgccgcccggctcaacattcccgtcagccaggttaacccccgggatgccaaggcct

SEQ ID NO: 148783 - DNA, 120 bp, Artificial Sequence
  ENSG00000105409_17 (sequence is synthesized)
gcgtgatccacggcaccgacctcaaggacttcacctccgagcaaatcgacgagatcctgcagaatcacaccgagatcgtcttcgcccgcacatccccccagcagaagctcatcattgtgg

SEQ ID NO: 148784 - DNA, 120 bp, Artificial Sequence
  ENSG00000105409_18 (sequence is synthesized)
agggctgtcagagacagggtgcaattgtggctgtgaccggggatggtgtgaacgactcccccgctctgaagaaggccgacattggggtggccatgggcatcgctggctctgacgtctcca

SEQ ID NO: 148785 - DNA, 120 bp, Artificial Sequence
  ENSG00000105409_19 (sequence is synthesized)
agcaggcagctgacatgatcctgctggacgacaactttgcctccatcgtcacaggggtggaggagggccgcctgatcttcgacaacctaaagaagtccattgcctacaccctgaccagca

SEQ ID NO: 148786 - DNA, 120 bp, Artificial Sequence
  ENSG00000105409_20 (sequence is synthesized)
atatcccggagatcacgcccttcctgctgttcatcatggccaacatcccgctgcccctgggcaccatcaccatcctctgcatcgatctgggcactgacatggtccctgccatctcactgg

SEQ ID NO: 148787 - DNA, 120 bp, Artificial Sequence
  ENSG00000105409_21 (sequence is synthesized)
cgtacgaggctgccgaaagcgacatcatgaagagacagcccaggaacccgcggacggacaaattggtcaatgagagactcatcagcatggcctacgggcagattggaatgatccaggctc

SEQ ID NO: 148788 - DNA, 120 bp, Artificial Sequence
  ENSG00000105409_22 (sequence is synthesized)
tcggtggcttcttctcttactttgtgatcctggcagaaaatggcttcttgcccggcaacctggtgggcatccggctgaactgggatgaccgcaccgtcaatgacctggaagacagttacg

SEQ ID NO: 148789 - DNA, 120 bp, Artificial Sequence
  ENSG00000105409_23 (sequence is synthesized)
ggcagcagtggacatacgagcagaggaaggtggtggagttcacctgccacacggccttctttgtgagcatcgttgtcgtccagtgggccgatctgatcatctgcaagacccggaggaact

SEQ ID NO: 148790 - DNA, 120 bp, Artificial Sequence
  ENSG00000105409_24 (sequence is synthesized)
cggtcttccagcagggcatgaagaacaagatcctgatcttcgggctgtttgaggagacggccctggctgccttcctgtcctactgccccggcatggacgtggccctgcgcatgtaccctc

SEQ ID NO: 148791 - DNA, 120 bp, Artificial Sequence
  ENSG00000105409_25 (sequence is synthesized)
tcaagcccagctggtggttctgtgccttcccctacagtttcctcatcttcgtctacgacgaaatccgcaaactcatcctgcgcaggaacccagggggttgggtggagaaggaaacctact

SEQ ID NO: 148792 - DNA, 120 bp, Artificial Sequence
  ENSG00000105409_26 (sequence is synthesized)
actgacctcagccccaccacatcgcccatctcttccccgtcccccaggcccaggaccgcccctgtcagtccccccaattttgtattctggggggaggagccctctcttcctgtggcccca

SEQ ID NO: 148793 - DNA, 120 bp, Artificial Sequence
  ENSG00000105409_27 (sequence is synthesized)
ccttggcccccaccccctccactatctcctgccgcccccactctggctggcttctctcccctgccccaaacctctctcctctctcttttctgtgtcagtttctctccctctcctcacccc

SEQ ID NO: 148794 - DNA, 120 bp, Artificial Sequence
  ENSG00000105409_28 (sequence is synthesized)
tctatccattcctcccgccccagccacctccctgggctcttttttactccccttcagccccccggctgatgccatctctggttctggacaattatcaaatatatcagtggggagagagaa

SEQ ID NO: 148795 - DNA, 120 bp, Artificial Sequence
  ENSG00000105409_29 (sequence is synthesized)
ggtctgagggaggaggggctgggatcctggacccctgagtctgagggaggaggggctagaggcctggacccgtgtgtctgggggaggaggggctgggatctggacccctgggtccggaga

SEQ ID NO: 148796 - DNA, 120 bp, Artificial Sequence
  ENSG00000105409_30 (sequence is synthesized)
ggcctggatcacagtattcttgtgaaagacaacttgggcctgactcagagggcctcattaacaaagcaaacaatcaaagaaagaaacaaacaaaaatcttgagaaacactggcaagccgt

SEQ ID NO: 148797 - DNA, 120 bp, Artificial Sequence
  ENSG00000105409_31 (sequence is synthesized)
aaagagccaacaatcctattgcaaaattaagaagtgcacgctcatgatgaaaagttgaagagtacatcaagttaaaaaataaaataatgaggctgggtgcactggctcacgctgtaatcc

SEQ ID NO: 148798 - DNA, 120 bp, Artificial Sequence
  ENSG00000105409_32 (sequence is synthesized)
gctcccctcgccctgctggatggctctgccacctggttcccactcttctctctcttcccatctctccgggcacccactctgtcttctcacgggtctctgtctgtgtggtttccttgtctc

SEQ ID NO: 148799 - DNA, 120 bp, Artificial Sequence
  ENSG00000105409_33 (sequence is synthesized)
tctccctctctgtccctctctctgctgggcggctcgccttgcctgtctctctccatctcttactctgtctctttctttccttctttgtctctccaggttgggtggagaaggaaacctact

SEQ ID NO: 148800 - DNA, 120 bp, Artificial Sequence
  ENSG00000105409_34 (sequence is synthesized)
tgaccttgtgcggttgcatgtgcacagttgcatgacaagaaagatgacaaggactcacccaagaagaacaagggcaaggagcgccgggacctggatgacctcaagaaggaggtggctatg

SEQ ID NO: 148801 - DNA, 120 bp, Artificial Sequence
  ENSG00000105409_35 (sequence is synthesized)
aggtctgccggaaatacaacacagactgtgtgcaggtgtggccaggctgtgggctgggaccctgggaactagggaggaggagctgggggctaggacccctgggtctgagggaggaggggc

SEQ ID NO: 148802 - DNA, 120 bp, Artificial Sequence
  ENSG00000105409_36 (sequence is synthesized)
gtgtgtgtgtgtgtgtgtgtgcaggctccgcagtgtcgcagcctggggctgcagtgtgtgtgtgtgcagcccctcatgtaggggagcaggcatgggaggctgggaggaggagaggaacag

SEQ ID NO: 148803 - DNA, 120 bp, Artificial Sequence
  ENSG00000105409_37 (sequence is synthesized)
gagagccacggtggggagactgagtgcacagctgagggtgtgcgtgtgcaactgtgtagtggggagcgtgcatgcctggctgtgtccttgcctctgtgtccgtgtgtccttgtctgtctg

SEQ ID NO: 148804 - DNA, 120 bp, Artificial Sequence
  ENSG00000105409_38 (sequence is synthesized)
caaaaaaaaaatcgacagacccttagattcaaacacaaccattacagaaagagggactcaagcacaaacaggggagactcagacacaccaaccctcataaccaacctagggtcagacaca

SEQ ID NO: 148805 - DNA, 120 bp, Artificial Sequence
  ENSG00000105409_39 (sequence is synthesized)
caaatacagacccccactgacacaaagctcccttcccagactccaggcgagcagggactggtggagagtggcttgggcggcccctgatcaacatccccacatctccccacagctgtacct

SEQ ID NO: 148806 - DNA, 120 bp, Artificial Sequence
  ENSG00000105409_40 (sequence is synthesized)
acatggtgccccaggtgaagggtgcccagcaaggggccagacgggggtgttagtgtatgggctgggggccgggcccagtgacccccaggcagagggagtctgggaggtgacattactcca

SEQ ID NO: 148807 - DNA, 120 bp, Artificial Sequence
  ENSG00000105409_41 (sequence is synthesized)
tcttttccaccaactgtgtggaaggtgaggcgggtgcagagaagacacacagctggggcagacacagggatgtgtcccagggggtcaggcctccagaacctccctgagccaccccacctc

SEQ ID NO: 148808 - DNA, 120 bp, Artificial Sequence
  ENSG00000105419_0 (sequence is synthesized)
aggctctggagggacccaggagctgccgccggcctcagcccatggcccggaggtatgatgagctgccgcactacccaggcatcgtggatggccccgcagccctggctagcttcccagaga

SEQ ID NO: 148809 - DNA, 120 bp, Artificial Sequence
  ENSG00000105419_1 (sequence is synthesized)
cagtgcccgcagtaccagggccctatggcccgcaccggcctccccagcccctgcccccaggcttggacagcgacggcctgaagagggagaaggatgagatctatggacacccgctcttcc

SEQ ID NO: 148810 - DNA, 120 bp, Artificial Sequence
  ENSG00000105419_2 (sequence is synthesized)
ccctcttggccctggtctttgagaaatgtgaactggctacatgctctccccgtgacggggccggagctgggctggggacaccccctggaggtgacgtctgctcctctgattccttcaacg

SEQ ID NO: 148811 - DNA, 120 bp, Artificial Sequence
  ENSG00000105419_3 (sequence is synthesized)
aggacatcgctgcctttgccaagcaggttcgctctgagaggcccctcttctcctccaacccagaactggacaatctgatgatccaggccatccaggtgctgcggttccacctgctggagc

SEQ ID NO: 148812 - DNA, 120 bp, Artificial Sequence
  ENSG00000105419_4 (sequence is synthesized)
tggagaaggtccacgacctgtgcgacaacttctgtcaccgctacatcacctgcctcaagggaaagatgcccatcgacctggtcatcgaggatcgggacggcggctgcagggaggacttcg

SEQ ID NO: 148813 - DNA, 120 bp, Artificial Sequence
  ENSG00000105419_5 (sequence is synthesized)
aggactacccagcctcctgccccagcctcccagaccagaataatatgtggattcgagaccatgaggatagtgggtctgtacatttggggaccccaggtccatccagtgggggcctggcct

SEQ ID NO: 148814 - DNA, 120 bp, Artificial Sequence
  ENSG00000105419_6 (sequence is synthesized)
cccagagtggggacaactccagtgaccaaggagacgggctggacaccagcgtggcctctcccagttctggtggagaagatgaggacttggaccaggagcgacggcgaaacaagaagaggg

SEQ ID NO: 148815 - DNA, 120 bp, Artificial Sequence
  ENSG00000105419_7 (sequence is synthesized)
catgcgagcctggttgttccagcacctctcgagacgctcagaagcgccggttctcccagacgtctgcctgggcctgggctccccatcccccggaccccggtgggccagaccttggggttc

SEQ ID NO: 148816 - DNA, 120 bp, Artificial Sequence
  ENSG00000105419_8 (sequence is synthesized)
agactgcggccggccaggcaggcagagtgactcttgctggtggctgcagcacccgtacccctcggaggagcagaagaaacagctggcgcaggacacggggctcaccatcctgcaagtcaa

SEQ ID NO: 148817 - DNA, 120 bp, Artificial Sequence
  ENSG00000105419_9 (sequence is synthesized)
caactggttcattaacgcccggagacgcatcgtgcaacctatgatcgatcaatccaaccgcacagggcagggtgcagccttcagcccagagggccagcccatcgggggctataccgagac

SEQ ID NO: 148818 - DNA, 120 bp, Artificial Sequence
  ENSG00000105419_10 (sequence is synthesized)
gcagccacacgtggccgtccggcctccgggatcagtggggatgagtttgaacttggaaggagaatggcattatctatagaggctgatgcaggagaggtgtgagggtctaagggctgggga

SEQ ID NO: 148819 - DNA, 120 bp, Artificial Sequence
  ENSG00000105419_11 (sequence is synthesized)
ttgtgcaattctcaaacctccattagacctcaggactccaagagtgggcacttccagagtagtgggtcagcctgggtccctgtactgtgggttctctgaggcttgatgggaagatattca

SEQ ID NO: 148820 - DNA, 120 bp, Artificial Sequence
  ENSG00000105419_12 (sequence is synthesized)
tccatccatccatccatccatcctcctcctccatgtatccatccatctacccactcactcacccatccatatctttatccatccgttactcaattactcattcacccgcaatccatccat

SEQ ID NO: 148821 - DNA, 120 bp, Artificial Sequence
  ENSG00000105419_13 (sequence is synthesized)
ttcacccgcaatccatccatccaaacctagtccacccacctacccactcattacccatctgaccacacattcacccactcactccattcatctctccactcgccaacccactcatccatc

SEQ ID NO: 148822 - DNA, 120 bp, Artificial Sequence
  ENSG00000105419_14 (sequence is synthesized)
tacctccacactgaccaaccacccacacatctacccatttatctgtgcattcacccacctccctacccaggcttccacccacctacccatcaactcacccatccatccacccacacatcc

SEQ ID NO: 148823 - DNA, 120 bp, Artificial Sequence
  ENSG00000105419_15 (sequence is synthesized)
ggaccccacctccaaaggcccctctgctcaatgcctacctccctagggccctgctgggacatgggggcctgagtgcccatccaagggctctcaaggacaccggcaaggcctccaggccct

SEQ ID NO: 148824 - DNA, 120 bp, Artificial Sequence
  ENSG00000105419_16 (sequence is synthesized)
gagccccacttctgccttcacctctgcctgggacccgagctgggctcctgggccttggtccccagaagatggcggctagggcctcgccgccaggacagagaagggacggggtggctgggc

SEQ ID NO: 148825 - DNA, 120 bp, Artificial Sequence
  ENSG00000105419_17 (sequence is synthesized)
agtcagggaaggagggtcgcccggatccgacattttggagagattccttcactctcctgtcccccctacctcccttctctaatttcttcttttttttaatgataaagtcttaaaaacacg

SEQ ID NO: 148826 - DNA, 120 bp, Artificial Sequence
  ENSG00000105419_18 (sequence is synthesized)
gctgccagcacccctgagccgccgccggaccctccgtcgccccgggccgccccccgccccctgcggtccccggtgtgtccgtctcgggacggttcgattccctccagagccggggaaggg

SEQ ID NO: 148827 - DNA, 80 bp, Artificial Sequence
  ENSG00000105419_19 (sequence is synthesized)
ttcgattccctccagagccggggaagggacggggggggcccagaggagggggcctcgggcgccccgcctgcgcctgctgc

SEQ ID NO: 148828 - DNA, 120 bp, Artificial Sequence
  ENSG00000105419_20 (sequence is synthesized)
ttatctgccaactgtgaaatgaaatagaagacagggaggcttcgtatgtgtactttgtgtacaacaatgcgcggttcctacaggaggtgtccatggatctccctctctgtctgtctctct

SEQ ID NO: 148829 - DNA, 120 bp, Artificial Sequence
  ENSG00000105419_21 (sequence is synthesized)
ctctgtctctgtcactgtcttctcacgccactttctccatctcttttccctcccagccagaccctgccgtctctccctctgggtcctcctgcccacatgtcaggaatctctgcctggacg

SEQ ID NO: 148830 - DNA, 120 bp, Artificial Sequence
  ENSG00000105419_22 (sequence is synthesized)
gggtcctcactccccaccgaggcagctccaggggacctggagggcttcaagcttgggggctcagacacctggggaccacagtatgatgagctgccgcactacccaggcatcgtggatggc

SEQ ID NO: 148831 - DNA, 120 bp, Artificial Sequence
  ENSG00000105419_23 (sequence is synthesized)
aggaggcgtggtcaccagaactggagagaggagcagattgcttgacagcggctaagatttttggtagaagaatacagttaatctaaaaccacttggcagatttaacccaacgttaaactg

SEQ ID NO: 148832 - DNA, 120 bp, Artificial Sequence
  ENSG00000105419_24 (sequence is synthesized)
ccggcctctctcttccctcccaggttcgctctgagaggcccctcttctcctccaacccagaactggacaatctgggaaagatgcccatcgacctggtcatcgaggatcgggacggcggct

SEQ ID NO: 148833 - DNA, 120 bp, Artificial Sequence
  ENSG00000105419_25 (sequence is synthesized)
ggagttgaagcagaatgccgcccccgtccctgagcacccccgccctgcccccgtgggtggccccccccagtaccccggtgcccccccaggtccacgacctgtgcgacaacttctgtcacc

SEQ ID NO: 148834 - DNA, 120 bp, Artificial Sequence
  ENSG00000105419_26 (sequence is synthesized)
tcttccctcccaggttcgctctgagaggcccctcttctcctccaacccagaactggacaatctggtgagacccgagccctcccccacaccccctcctccaatgggtctccttccctgacg

SEQ ID NO: 148835 - DNA, 120 bp, Artificial Sequence
  ENSG00000105419_27 (sequence is synthesized)
ccccatccctggggttggtggggggggtgcagagagaaggccacctggtccatgtccccaaaccgtcatgattgttgcccacgtgccgtgtggtacagcctagagtctgagaacgggacc

SEQ ID NO: 148836 - DNA, 120 bp, Artificial Sequence
  ENSG00000105419_28 (sequence is synthesized)
catggcccgagttcaaatcccagctctgccactcaccagctctgtgacccagggcaagtcactctgcatctccgtgccttggtgtcccgtctgtgaagtgtggctggtagtaatgtctgt

SEQ ID NO: 148837 - DNA, 120 bp, Artificial Sequence
  ENSG00000105419_29 (sequence is synthesized)
cttggagggctgctgtgggggtttaatgagtgaatgcgattcaagtgcgtggaacagcacctggcacagaatagggctcaaaaagtgtctgatgttccatccgtcagaagatcagcacct

SEQ ID NO: 148838 - DNA, 120 bp, Artificial Sequence
  ENSG00000105419_30 (sequence is synthesized)
aaaagtgtctgatgttccatccgtcagaagatcagcacctatgccaaagtgagcgcagggactgctgcccaaggagaggaggctgggtgcggcagctcacgcctgtaatgccagcacttt

SEQ ID NO: 148839 - DNA, 120 bp, Artificial Sequence
  ENSG00000105419_31 (sequence is synthesized)
agaccagcctgggcaacgtagcgagaccccacctctacaaaaacatttaattagcggggtgtggtggcatgcacctgtggtctcagctactttggaggctgaggcgggaggatcgcttga

SEQ ID NO: 148840 - DNA, 120 bp, Artificial Sequence
  ENSG00000105419_32 (sequence is synthesized)
gccccaagaggtcgaggctgtagtgacccttgatcagctccactgcataccagcccaggcaacagggcaagaccctgtctctcatagagagctagagaaagagaaagaaagaaagaaaaa

SEQ ID NO: 148841 - DNA, 120 bp, Artificial Sequence
  ENSG00000105419_33 (sequence is synthesized)
actctcctcctcctttctgcctctctgtccccctctctctgtccctggtctcccccctctttctgcctctctatccccctctctctgccctcccccacccgcagtctctctcctctgttc

SEQ ID NO: 148842 - DNA, 120 bp, Artificial Sequence
  ENSG00000105419_34 (sequence is synthesized)
ctgggcttcctcctccatctcagccgcccgcacctcaccgtccccccttttttctgctctcctccgtccttcccttcgctctacttttgttccaagccgcccctgcctctccagggctag

SEQ ID NO: 148843 - DNA, 120 bp, Artificial Sequence
  ENSG00000105419_35 (sequence is synthesized)
gagtgggacaggggtgggagaggtggtctcaccaggctgctggccccacggagcctgtctccctggggatgggaacggggatagaagacaggggaggaggcgcgcgcccgttttgggggt

SEQ ID NO: 148844 - DNA, 120 bp, Artificial Sequence
  ENSG00000105419_36 (sequence is synthesized)
tccgggtaggctgtgaggaccgcttttggtgagagtgccttgagcagcggggagcagttggattcaacttcagggcacaggagaagttaggagaagagggagagggaaagagtgggacac

SEQ ID NO: 148845 - DNA, 120 bp, Artificial Sequence
  ENSG00000105419_37 (sequence is synthesized)
acagaaccagggtgcccagccaggcgagggtccgaggcaggaacgttctagcctcttcccgtgcgagtcctgctgcctctttgagcctccgtgtcttcatcactgaggaagggatttgac

SEQ ID NO: 148846 - DNA, 120 bp, Artificial Sequence
  ENSG00000105419_38 (sequence is synthesized)
ggagcgcggctgccagcacccctgagccgccgccggaccctccgtcgccccgggccgccccccgccccctgcggtccccgtatgatgagctgccgcactacccaggcatcgtggatggcc

SEQ ID NO: 148847 - DNA, 120 bp, Artificial Sequence
  ENSG00000105419_39 (sequence is synthesized)
ttccccaaggtggccaccaacatcatgcgagcctggttgttccagcacctctcggcgggggctggcaggcatgtaattgccccaagcctgaggctcccttggtctccatcctggggagcg

SEQ ID NO: 148848 - DNA, 120 bp, Artificial Sequence
  ENSG00000105426_0 (sequence is synthesized)
gagatcggaggtcgctgccaagcatggcgcccacctggggccctggcatggtgtctgtggttggtcccatgggcctccttgtggtcctgctcgttggaggctgtgcagcagaagagcccc

SEQ ID NO: 148849 - DNA, 120 bp, Artificial Sequence
  ENSG00000105426_1 (sequence is synthesized)
ccaggtttatcaaagaacccaaggaccagatcggcgtgtcggggggtgtggcctctttcgtgtgtcaggccacgggtgaccccaagccacgagtgacctggaacaagaagggcaagaagg

SEQ ID NO: 148850 - DNA, 120 bp, Artificial Sequence
  ENSG00000105426_2 (sequence is synthesized)
tcaactctcagcgctttgagacgattgagtttgatgagagtgcaggggcagtgctgaggatccagccgctgaggacaccgcgggatgaaaacgtgtacgagtgtgtggcccagaactcgg

SEQ ID NO: 148851 - DNA, 120 bp, Artificial Sequence
  ENSG00000105426_3 (sequence is synthesized)
ttggggagatcacagtccatgccaagcttactgtcctccgagaggaccagctgccctctggcttccccaacatcgacatgggcccacagttgaaggtggtggagcggacacggacagcca

SEQ ID NO: 148852 - DNA, 120 bp, Artificial Sequence
  ENSG00000105426_4 (sequence is synthesized)
ccatgctctgtgcagccagcggcaaccctgaccctgagatcacctggttcaaggacttcctgcctgtggatcctagtgccagcaatggacgcatcaaacagctgcgatcaggagccctgc

SEQ ID NO: 148853 - DNA, 120 bp, Artificial Sequence
  ENSG00000105426_5 (sequence is synthesized)
agattgaaagcagtgaggaaaccgaccagggcaaatatgagtgtgtggccaccaacagcgccggcgtgcgctactcctcacctgccaacctctacgtgcgagtccgccgcgtggccccgc

SEQ ID NO: 148854 - DNA, 120 bp, Artificial Sequence
  ENSG00000105426_6 (sequence is synthesized)
gcttctccatcctgcccatgagccacgagatcatgccagggggcaacgtgaacatcacctgcgtggccgtgggctcgcccatgccatacgtgaagtggatgcagggggccgaggacctga

SEQ ID NO: 148855 - DNA, 120 bp, Artificial Sequence
  ENSG00000105426_7 (sequence is synthesized)
cccccgaggatgacatgcccgtgggtcggaacgtgctggaactcacagatgtcaaggactcggccaactacacctgcgtggccatgtccagcctgggcgtcattgaggcggttgctcaga

SEQ ID NO: 148856 - DNA, 120 bp, Artificial Sequence
  ENSG00000105426_8 (sequence is synthesized)
tcacggtgaaatctctccccaaagctcccgggactcccatggtgactgagaacacagccaccagcatcaccatcacgtgggactcgggcaacccagatcctgtgtcctattacgtcatcg

SEQ ID NO: 148857 - DNA, 120 bp, Artificial Sequence
  ENSG00000105426_9 (sequence is synthesized)
aatataaatccaagagccaagacgggccgtatcagattaaagaggacatcaccaccacacgttacagcatcggcggcctgagccccaactcggagtacgagatctgggtgtcggccgtca

SEQ ID NO: 148858 - DNA, 120 bp, Artificial Sequence
  ENSG00000105426_10 (sequence is synthesized)
actccatcggccaggggccccccagcgagtccgtggtcacccgcacaggcgagcaggccccggccagcgcgccgcggaacgtgcaagcccggatgctcagcgcgaccaccatgattgtgc

SEQ ID NO: 148859 - DNA, 120 bp, Artificial Sequence
  ENSG00000105426_11 (sequence is synthesized)
agtgggaggagccggtggagcccaacggcctgatccgcggctaccgcgtctactacaccatggaaccggagcaccccgtgggcaactggcagaagcacaacgtggacgacagcctgctga

SEQ ID NO: 148860 - DNA, 120 bp, Artificial Sequence
  ENSG00000105426_12 (sequence is synthesized)
ccaccgtgggcagcctgctggaggacgagacctacaccgtgcgggtgctcgccttcacctccgtcggcgacgggcccctctcggaccccatccaggtcaagacgcagcagggagtgccgg

SEQ ID NO: 148861 - DNA, 120 bp, Artificial Sequence
  ENSG00000105426_13 (sequence is synthesized)
gccagcccatgaacctgcgggccgaggccaggtcggagaccagcatcacgctgtcctggagccccccgcggcaggagagtatcatcaagtacgagctcctcttccgggaaggcgaccatg

SEQ ID NO: 148862 - DNA, 120 bp, Artificial Sequence
  ENSG00000105426_14 (sequence is synthesized)
gccgggaggtgggaaggaccttcgacccgacgacttcctacgtggtggaggacctgaagcccaacacggagtacgccttccgcctggcggcccgctcgccgcagggcctgggcgccttca

SEQ ID NO: 148863 - DNA, 120 bp, Artificial Sequence
  ENSG00000105426_15 (sequence is synthesized)
cccccgtggtgcggcagcgcacgctgcagtccaaaccgtcagccccccctcaagacgttaaatgtgtcagcgtgcgctccacggccattttggtaagttggcgcccgccgccgccggaaa

SEQ ID NO: 148864 - DNA, 120 bp, Artificial Sequence
  ENSG00000105426_16 (sequence is synthesized)
cgcacaacggggccctggtgggctacagcgtccgctaccgaccgctgggctcagaggacccggaacccaaggaggtgaacggcatccccccgaccaccactcagatcctgctggaggcct

SEQ ID NO: 148865 - DNA, 120 bp, Artificial Sequence
  ENSG00000105426_17 (sequence is synthesized)
tggagaagtggacccagtaccgcatcacgactgtcgctcacacagaggtgggaccagggcccgagagctcgcccgtggtcgtccgcaccgacgaggatgtgcccagcgcgccgccgcgga

SEQ ID NO: 148866 - DNA, 120 bp, Artificial Sequence
  ENSG00000105426_18 (sequence is synthesized)
aggtggaggcggaggcgctcaacgccacggccatccgcgtgctgtggcgctcgcccgcgcccggccggcagcacggccagatccgcggctaccaggtccactacgtgcgcatggagggcg

SEQ ID NO: 148867 - DNA, 120 bp, Artificial Sequence
  ENSG00000105426_19 (sequence is synthesized)
ccgaggcccgcgggccgccgcgcatcaaggacgtcatgctggccgatgcccaggagatggtcatcacaaacttgcagcctgagaccgcgtactccatcacggtagccgcctacaccatga

SEQ ID NO: 148868 - DNA, 120 bp, Artificial Sequence
  ENSG00000105426_20 (sequence is synthesized)
agggcgatggcgctcgcagcaaacccaaggtggttgtgaccaagggagcagtgctgggccgcccaaccctgtcggtgcagcagacccccgagggcagcctgctggcacgctgggagcccc

SEQ ID NO: 148869 - DNA, 120 bp, Artificial Sequence
  ENSG00000105426_21 (sequence is synthesized)
cggctggcaccgcggaggaccaggtgctgggctaccgcctgcagtttggccgtgaggactcgacgcccctggccaccctggagttcccgccctccgaggaccgctacacggcatcaggcg

SEQ ID NO: 148870 - DNA, 120 bp, Artificial Sequence
  ENSG00000105426_22 (sequence is synthesized)
tgcacaagggggccacgtatgtgttccggcttgcggcccggagccgcggcggcctgggcgaggaggcagccgaggtcctgagcatcccggaggacacgccccgtggccacccgcagattc

SEQ ID NO: 148871 - DNA, 120 bp, Artificial Sequence
  ENSG00000105426_23 (sequence is synthesized)
tggaggcggccggcaacgcctcggccgggaccgtccttctccgctggctgccacccgtgcccgccgagcgcaacggggccatcgtcaaatacacggtggccgtgcgggaggccggtgccc

SEQ ID NO: 148872 - DNA, 120 bp, Artificial Sequence
  ENSG00000105426_24 (sequence is synthesized)
cacacgcgccggggccctggccccttcagcccccccgtccgctaccggacgttcctgcgggaccaagtctcgcccaagaacttcaaggtgaaaatgatcatgaagacatcagttctgctc

SEQ ID NO: 148873 - DNA, 120 bp, Artificial Sequence
  ENSG00000105426_25 (sequence is synthesized)
agctgggagttccctgacaactacaactcacccacaccctacaagatccagtacaatgggctcacactggatgtggatggccgtaccaccaagaagctcatcacgcacctcaagccccac

SEQ ID NO: 148874 - DNA, 120 bp, Artificial Sequence
  ENSG00000105426_26 (sequence is synthesized)
accttctacaactttgtgctgaccaatcgcggcagcagcctgggcggcctccagcagacggtcaccgcctggactgccttcaacctgctcaacggcaagcccagcgtcgcccccaagcct

SEQ ID NO: 148875 - DNA, 120 bp, Artificial Sequence
  ENSG00000105426_27 (sequence is synthesized)
gatgctgacggcttcatcatggtgtatcttcctgacggccagagccccgtgcctgtccagagctatttcattgtgatggtgccactgcgcaagtctcgtggaggccaattcctgaccccg

SEQ ID NO: 148876 - DNA, 120 bp, Artificial Sequence
  ENSG00000105426_28 (sequence is synthesized)
ctgggtagcccagaggacatggatctggaagagctcatccaggacatctcacggctacagaggcgcagcctgcggcactcgcgtcagctggaggtgccccggccctatattgcagctcgc

SEQ ID NO: 148877 - DNA, 120 bp, Artificial Sequence
  ENSG00000105426_29 (sequence is synthesized)
ttctctgtgctgccacccacgttccatcccggcgaccagaagcagtatggcggcttcgataaccggggcctggagcccggccaccgctatgtcctcttcgtgcttgccgtgcttcagaag

SEQ ID NO: 148878 - DNA, 120 bp, Artificial Sequence
  ENSG00000105426_30 (sequence is synthesized)
agcgagcctacctttgcagccagtcccttctcagaccccttccagctggataacccggacccccagcccatcgtggatggcgaggaggggcttatctgggtgatcgggcctgtgctggcc

SEQ ID NO: 148879 - DNA, 120 bp, Artificial Sequence
  ENSG00000105426_31 (sequence is synthesized)
gtggtcttcataatctgcattgtcattgctatcctgctctacaagaacaaacccgacagtaaacgcaaggactcagaaccccgcaccaaatgcctcctgaacaatgccgacctcgcccct

SEQ ID NO: 148880 - DNA, 120 bp, Artificial Sequence
  ENSG00000105426_32 (sequence is synthesized)
caccaccccaaggaccctgtggaaatgagacgcattaacttccagactccaggcatgcttagccacccgccaattcccatcgcagacatggcggagcacacggagcggctcaaggccaac

SEQ ID NO: 148881 - DNA, 120 bp, Artificial Sequence
  ENSG00000105426_33 (sequence is synthesized)
gacagcctcaagctctcccaggagtatgagtccatcgaccctggacagcagttcacatgggaacattccaacctggaagtgaacaagccgaagaaccgctatgccaacgtcatcgcctat

SEQ ID NO: 148882 - DNA, 120 bp, Artificial Sequence
  ENSG00000105426_34 (sequence is synthesized)
gaccactcccgtgtcatcctccagcccattgaaggcatcatgggcagtgattacatcaatgccaactacgtggacggctaccggtgtcagaacgcgtacattgccacgcaggggccgctg

SEQ ID NO: 148883 - DNA, 120 bp, Artificial Sequence
  ENSG00000105426_35 (sequence is synthesized)
cctgagacctttggggacttctggcgtatggtgtgggagcagcggtcggcgaccatcgtcatgatgacgcggctggaggagaagtcacggatcaagtgtgatcagtattggcccaacaga

SEQ ID NO: 148884 - DNA, 120 bp, Artificial Sequence
  ENSG00000105426_36 (sequence is synthesized)
ggcacggagacctacggcttcatccaggtcacgttgctagataccatcgagctggccacattctgcgtcaggacattctctctgcacaagaatggctccagtgagaaacgcgaggtccgc

SEQ ID NO: 148885 - DNA, 120 bp, Artificial Sequence
  ENSG00000105426_37 (sequence is synthesized)
cagttccagtttacggcgtggccggaccatggcgtgcccgaatacccaacgcccttcctggctttcctgcggagagtcaagacctgcaacccgccagatgccggccccatcgtggttcac

SEQ ID NO: 148886 - DNA, 120 bp, Artificial Sequence
  ENSG00000105426_38 (sequence is synthesized)
tgcagtgccggtgtgggccgcacaggctgctttatcgtcatcgacgccatgcttgagcggatcaagccagagaagacagtcgatgtctatggccacgtgacgctcatgaggtcccagcgc

SEQ ID NO: 148887 - DNA, 120 bp, Artificial Sequence
  ENSG00000105426_39 (sequence is synthesized)
aactacatggtgcagacggaggaccagtacagcttcatccacgaggccctgctggaggccgtgggctgtggcaacacagaagtgcccgcacgcagcctctatgcctacatccagaagctg

SEQ ID NO: 148888 - DNA, 120 bp, Artificial Sequence
  ENSG00000105426_40 (sequence is synthesized)
gcccaggtggagcctggcgaacacgtcactggcatggaactcgagttcaagcggctggctaactccaaggcccacacgtcacgcttcatcagtgccaatctgccttgtaacaagttcaag

SEQ ID NO: 148889 - DNA, 120 bp, Artificial Sequence
  ENSG00000105426_41 (sequence is synthesized)
aaccgcctggtgaacatcatgccctatgagagcacacgggtctgtctgcaacccatccggggtgtggagggctctgactacatcaacgccagcttcattgatggctacaggcagcagaag

SEQ ID NO: 148890 - DNA, 120 bp, Artificial Sequence
  ENSG00000105426_42 (sequence is synthesized)
gcctacatcgcgacacaggggccgctggcggagaccacggaagacttctggcgcatgctgtgggagaacaattcgacgatcgtggtgatgctgaccaagctgcgggagatgggccgggag

SEQ ID NO: 148891 - DNA, 120 bp, Artificial Sequence
  ENSG00000105426_43 (sequence is synthesized)
aagtgtcaccagtactggccggccgagcgctctgcccgctaccagtactttgtggtagatccgatggcagaatacaacatgcctcagtatatcctgcgagagttcaaggtcacagatgcc

SEQ ID NO: 148892 - DNA, 120 bp, Artificial Sequence
  ENSG00000105426_44 (sequence is synthesized)
cgggatggccagtcccggactgtccggcagttccagttcacagactggccggaacagggtgtgccaaagtcgggggagggcttcatcgacttcattggccaagtgcataagactaaggag

SEQ ID NO: 148893 - DNA, 120 bp, Artificial Sequence
  ENSG00000105426_45 (sequence is synthesized)
cagtttggccaggacggccccatctctgtccactgcagtgccggcgtgggcaggacgggcgtcttcatcacgcttagcatcgtgctggagcggatgcggtatgaaggcgtggtggacatc

SEQ ID NO: 148894 - DNA, 120 bp, Artificial Sequence
  ENSG00000105426_46 (sequence is synthesized)
tttcagacggtgaagatgctacgaacccagcggccggccatggtgcagacagaggatgagtaccagttctgttaccaggcggcactggagtacctcggaagctttgaccactatgcaacc

SEQ ID NO: 148895 - DNA, 120 bp, Artificial Sequence
  ENSG00000105426_47 (sequence is synthesized)
taaagccatggttccccccaggcccgacaccactggccccggatgcctctgcccctcccgggcggacctcctgaggcctggacccccagtgggcagggcaggaggtggcagcggcagcag

SEQ ID NO: 148896 - DNA, 120 bp, Artificial Sequence
  ENSG00000105426_48 (sequence is synthesized)
ctgtgtttctgcaccatttccgaggacgacgcagcccctcgagcccccccaccggccccggccgccccagcgacctccctggcaccggccgccgccttcaaatacttggcacattcctcc

SEQ ID NO: 148897 - DNA, 120 bp, Artificial Sequence
  ENSG00000105426_49 (sequence is synthesized)
ggcccgcgggccgccgcgcatcaaggacgtcatgctggccgatgcccagtgggagacggatgacacggccgaatatgagatggtcatcacaaacttgcagcctgagaccgcgtactccat

SEQ ID NO: 148898 - DNA, 120 bp, Artificial Sequence
  ENSG00000105426_50 (sequence is synthesized)
gtgagcaaataggagtgctccccagaaccagaggagggtggggcacagaccatagacggacccctcgtcctcccccagcggtggtagggggacccggggggctcctccccgctctgcagc

SEQ ID NO: 148899 - DNA, 120 bp, Artificial Sequence
  ENSG00000105426_51 (sequence is synthesized)
agcccggccggcgcgcgcacgccgcgagccgctggcgctcgggctccgctcggatcccatgcaacagccacgatgtgaagcggggcagagccgggggagcccagcccagccagcctccag

SEQ ID NO: 148900 - DNA, 82 bp, Artificial Sequence
  ENSG00000105426_52 (sequence is synthesized)
caggaagtagctagagcggtcatctgggggattgagagatgaagtcagctggacttcctgggttgagtgggaacttggagaa

SEQ ID NO: 148901 - DNA, 69 bp, Artificial Sequence
  ENSG00000105426_53 (sequence is synthesized)
cagttggggtgtcctgtttagatgggggattgagagatgaagtcagctggacttcctgggttgagtggg

SEQ ID NO: 148902 - DNA, 120 bp, Artificial Sequence
  ENSG00000105426_54 (sequence is synthesized)
attccatcccatcaccccatgatccttccccattgtcccatgaccagcccccgcaggaccctcccctgctccatgtgaccctccctctgcctcctccatgaaggtctcctggatttcccc

SEQ ID NO: 148903 - DNA, 120 bp, Artificial Sequence
  ENSG00000105426_55 (sequence is synthesized)
taacagtctcagggcccagcgcctactggtggggatttattgtgcctttgcaagaaagaaaggaattgagagactagaatcatcctaatttataatcttcatcatgtgcttctgatgaca

SEQ ID NO: 148904 - DNA, 120 bp, Artificial Sequence
  ENSG00000105426_56 (sequence is synthesized)
aaaggctgatccaactcagatgggttcaagcgagaaaggtaattgatgtgcagaattaaaattccatggagtggctggcttcaggttcagctggatccaggggctcattgaattttctca

SEQ ID NO: 148905 - DNA, 120 bp, Artificial Sequence
  ENSG00000105426_57 (sequence is synthesized)
gccccatgtcctccccgacttgacttgacagcagggagggcttcctggaaaaggagggaggagttgtctcagagaatcatcactaaaggtctctgttgtacacatggggaaaccgaagtt

SEQ ID NO: 148906 - DNA, 120 bp, Artificial Sequence
  ENSG00000105426_58 (sequence is synthesized)
cagagaggttaagccacttgatcaaggtcacacagcatgggaatggcagagctagggctcaaagcaggccagtggcttggcttctcctcttaacccctatcttcaactcagcaagatttg

SEQ ID NO: 148907 - DNA, 120 bp, Artificial Sequence
  ENSG00000105426_59 (sequence is synthesized)
gggtagaggctgcctgtgtccagttcaatgaggatagcaattgtagtggccccatggggcacatcccagggctgagataagcctccttgtggtgtcgataggcagggggacaaacaggaa

SEQ ID NO: 148908 - DNA, 120 bp, Artificial Sequence
  ENSG00000105426_60 (sequence is synthesized)
aagcccttgatggccggcacaccctcacctttcttctttttttcccccttctcacctgtgtctgctttcgggaacagcaaacccgacaggtaagaaccagccctcccccgtggaggcttc

SEQ ID NO: 148909 - DNA, 120 bp, Artificial Sequence
  ENSG00000105426_61 (sequence is synthesized)
aggcaagaggaagaggacagggaatgggctgatagtgtgcccacaggagaggggatgcccggctgcccccacagcttgtacacgtagctgtacttggtcctggaaaccctagtcatacgg

SEQ ID NO: 148910 - DNA, 120 bp, Artificial Sequence
  ENSG00000105426_62 (sequence is synthesized)
gtccatggtccttttcttaccatgcattcctggggcctgaattgtgttcacacatgaacatgtgccactactaactggactgttccgcttgcttctcctaaagtaaacgcaaggactcag

SEQ ID NO: 148911 - DNA, 120 bp, Artificial Sequence
  ENSG00000105426_63 (sequence is synthesized)
gggcggaccgagggacgcggggagcggctgcggcgggccctgtggaggcctcgcggggcctgggcccgatctccgagccgcgggacgttgccccatctgacgctcggctcgaggcctctc

SEQ ID NO: 148912 - DNA, 120 bp, Artificial Sequence
  ENSG00000105426_64 (sequence is synthesized)
ctgtgactggggacttcgcagaaggcggaggaggcaacaggaccgcagagggggcagacgttgccccatctgacgctcggctcgaggcctctctgtgagggaccggggggccatccccct

SEQ ID NO: 148913 - DNA, 120 bp, Artificial Sequence
  ENSG00000105427_0 (sequence is synthesized)
aagtcagtgcccgtgtctccacacgtctgcctccatcactgccatcgcgatcctgcagctatgtcctaccctgtgaccagtcagccccagtgcgccaccaccagctgctaccagacccag

SEQ ID NO: 148914 - DNA, 120 bp, Artificial Sequence
  ENSG00000105427_1 (sequence is synthesized)
ctcagtgactggcacacaggtctcacggactgctgcaacgacatgcctgtctgtctgtgcggcacttttgctcctctgtgccttgcctgccgcatctccgacgactttggcgagtgctgc

SEQ ID NO: 148915 - DNA, 120 bp, Artificial Sequence
  ENSG00000105427_2 (sequence is synthesized)
gcgctaccacatccagggctccgtcgggcacgactgggcggccctcaccttttgtctgccctgcgccctctgccagatggcgcgggaactgaagatccgagagtaaggaagttccctgtc

SEQ ID NO: 148916 - DNA, 120 bp, Artificial Sequence
  ENSG00000105427_3 (sequence is synthesized)
ttccccgtccttttccaccagtctcgcctctggccttctctggccactcctgggagggactgcctcaccacccctgtcccgctgccagaaatacacccacaataaaaacctgaaaaccaa

SEQ ID NO: 148917 - DNA, 120 bp, Artificial Sequence
  ENSG00000105427_4 (sequence is synthesized)
cctccatcactgccatcgcgatcctgcagccacttctgccgtccccaacgccacctcctcagggccagcaagatgcagtttgagatgcacgacaacgtgaaaggcaaagctatgtcctac

SEQ ID NO: 148918 - DNA, 120 bp, Artificial Sequence
  ENSG00000105428_0 (sequence is synthesized)
ctggtctccatgtcatctgccagaaaggccacctgcgccagcacctcctgagaccggccttcaaagacacgacgcatgccgctctgccgtccggagcacttaatgcctagagccagcagg

SEQ ID NO: 148919 - DNA, 120 bp, Artificial Sequence
  ENSG00000105428_1 (sequence is synthesized)
gtcccagtggccgcgtcactgcctctgagccacgcggtcattccaactcaactgccctcgcgtcctggccacaggccccctgggagaccccggagatgcccaaaggcctcatgcctgccg

SEQ ID NO: 148920 - DNA, 120 bp, Artificial Sequence
  ENSG00000105428_2 (sequence is synthesized)
cctccagtgggacctagcagcacacagacagcgaagcgggtgaccatggggtggccacggccgggccgagccctcgtggcagtcaaagccttgctggtcttgtcgctgctccaggtgccc

SEQ ID NO: 148921 - DNA, 120 bp, Artificial Sequence
  ENSG00000105428_3 (sequence is synthesized)
gcgcaggcagtggtacgggccgtgctggaagacaactcgagctcggtggactttgcggatctgccggcgctgttcggcgtccccctggcccccgagggcatacggggctacctgatggag

SEQ ID NO: 148922 - DNA, 120 bp, Artificial Sequence
  ENSG00000105428_4 (sequence is synthesized)
gtcaagccagccaacgcgtgccatcccatcgaggccccgcgactgggcaaccgctctctgggcgccatcgtgctgatccgccgctacgactgcaccttcgacctcaaggtgctgaacgcc

SEQ ID NO: 148923 - DNA, 120 bp, Artificial Sequence
  ENSG00000105428_5 (sequence is synthesized)
cagcgcgccggcttcgaggcggccatcgtgcacaacgtccactccgacgacctcgtgagcatgacccacgtctacgaggacttgaggggccagatcgccatcccctcagtgttcgtgagc

SEQ ID NO: 148924 - DNA, 120 bp, Artificial Sequence
  ENSG00000105428_6 (sequence is synthesized)
gaggccgcctcgcaggacctgcgggtcatcctgggctgcaacaagtcggcccacgcgctgctcctgcccgacgacccaccgtgccacgacctgggctgtcaccccgtgctgaccgtgtcc

SEQ ID NO: 148925 - DNA, 120 bp, Artificial Sequence
  ENSG00000105428_7 (sequence is synthesized)
tgggtgctgggctgtaccctggccctggtcgtatcagccttctttgtcctgaaccacctgtggctctgggcccaggcctgctgcagccacagacggccggtgaagacgtctacctgccag

SEQ ID NO: 148926 - DNA, 120 bp, Artificial Sequence
  ENSG00000105428_8 (sequence is synthesized)
aaggcccaggtccgcaccttcacgtggcacaacgacctgtgtgccatctgcctggatgagtatgaggagggcgaccaactcaagatcctgccctgctcccacacctaccactgcaaatgc

SEQ ID NO: 148927 - DNA, 120 bp, Artificial Sequence
  ENSG00000105428_9 (sequence is synthesized)
attgacccctggttctcccaagccccccggcgctcctgccccgtgtgcaaacagtcggtggccgccacagaagacagctttgactccaccacctacagcttcagggacgaggacccctcc

SEQ ID NO: 148928 - DNA, 120 bp, Artificial Sequence
  ENSG00000105428_10 (sequence is synthesized)
ctaccgggccaccggccccccatctgggccattcaagtccagctacgctcccggaggctggagctgctgggccgcgccagtccccactgccactgcagcaccacgtccctggaggcagag

SEQ ID NO: 148929 - DNA, 120 bp, Artificial Sequence
  ENSG00000105428_11 (sequence is synthesized)
tataccactgtctcctcagcccctcctgaggcccctggtcagtaaagatctagggcagggaggggggtgcaatgaggaatgtttctggtctgaaaagaataaagtgggtttgaaagcgga

SEQ ID NO: 148930 - DNA, 120 bp, Artificial Sequence
  ENSG00000105429_0 (sequence is synthesized)
ggccgctctggcccaagcgtcccctcgtctctctgatctggcccatccggcttcggagggaggcgagggtgggtgagcaaagggattgggtctgtggggtccaggcccgaacccctgaag

SEQ ID NO: 148931 - DNA, 120 bp, Artificial Sequence
  ENSG00000105429_1 (sequence is synthesized)
acgggctccgcccccggcacccgctcgcgccccgcccccggctggaggagtctctcctggaccatccgaacctagcctgtcccggcccgcagcctctatggaggctcctgccgggccgta

SEQ ID NO: 148932 - DNA, 120 bp, Artificial Sequence
  ENSG00000105429_2 (sequence is synthesized)
gagcccttcgccccctggggacccacccgtctataaggtccgtttggcctgcagcagcctgagtccgtaatgctgggcactgttcatgggatcggccccctatggagccctgtgtctata

SEQ ID NO: 148933 - DNA, 120 bp, Artificial Sequence
  ENSG00000105429_3 (sequence is synthesized)
ggggactcctacggtccctagggttcggccccgtccataatgactccatatacagggccttccatcgctctatagggctcagccctcggcttccagagcctgtcagcagtggccgtaccc

SEQ ID NO: 148934 - DNA, 120 bp, Artificial Sequence
  ENSG00000105429_4 (sequence is synthesized)
ttcgccgggactgccgggtctccgggacctcttcgatctacaaggtcatgttatgcctatagaggtcgcatttgcagggcctcaccccgggtagagggtcctctccaggtttttacggcc

SEQ ID NO: 148935 - DNA, 120 bp, Artificial Sequence
  ENSG00000105429_5 (sequence is synthesized)
tgtccccgctctaagggtcagtgcaggaggcggcgatggccctgggcaaggttctggccatggcactggttttggccttggccgtgctggggtcgctgtcccctggggcccgggcggggg

SEQ ID NO: 148936 - DNA, 120 bp, Artificial Sequence
  ENSG00000105429_6 (sequence is synthesized)
actgcaaggggcagcggcaggtgctgcgggaggcgccaggcttcgtgacggatggtgcgggcaactacagcgtcaatggcaactgcgagtggctcatcgaggccccaagcccccagcacc

SEQ ID NO: 148937 - DNA, 120 bp, Artificial Sequence
  ENSG00000105429_7 (sequence is synthesized)
ggatcctgctggacttccttttcctggacacagagtgcacgtatgactacctgttcgtgtatgacggtgactccccgcgagggccgctgcttgccagtctaagtgggagcacccgacctc

SEQ ID NO: 148938 - DNA, 120 bp, Artificial Sequence
  ENSG00000105429_8 (sequence is synthesized)
cgcccatcgaagcttcctcaggcaagatgctgctgcacctcttcagtgatgccaactacaacctgctgggctttaacgcctcattccgcttctccctgtgcccgggtggctgccagagcc

SEQ ID NO: 148939 - DNA, 120 bp, Artificial Sequence
  ENSG00000105429_9 (sequence is synthesized)
acgggcagtgccagccaccgggtgtgtgtgcctgcgagccgggctgggggggtcctgactgtggcctgcaggagtgctcagcctactgtggcagccacggcacctgcgcctcgcccctgg

SEQ ID NO: 148940 - DNA, 120 bp, Artificial Sequence
  ENSG00000105429_10 (sequence is synthesized)
gaccatgccgctgtgagcctggcttcttgggacgtgcctgtgacctgcacctgtgggagaaccagggggctgggtggtggcacaacgtgagtgccagggaccctgccttctctgcccgta

SEQ ID NO: 148941 - DNA, 120 bp, Artificial Sequence
  ENSG00000105429_11 (sequence is synthesized)
ttggggcagctggcgccttcctgtccccaccagggctgctggcagttttcggaggccaggacctcaacaatgccctgggtgacctcgtcctatacaacttctccgccaacacctgggagt

SEQ ID NO: 148942 - DNA, 120 bp, Artificial Sequence
  ENSG00000105429_12 (sequence is synthesized)
cttgggacctgagtcctgccccggctgcccgtcactcccatgtggccgtggcctgggccggctccctggtactgatgggtggtgagctggctgacggctcgctcaccaacgacgtgtggg

SEQ ID NO: 148943 - DNA, 120 bp, Artificial Sequence
  ENSG00000105429_13 (sequence is synthesized)
ccttcagtccactgggcaggggccactgggagctcctggcaccacctgcctccagctcctcggggcccccaggcctggcaggtcacgcggctgccctggtggatgatgtctggctatatg

SEQ ID NO: 148944 - DNA, 120 bp, Artificial Sequence
  ENSG00000105429_14 (sequence is synthesized)
tgtctggaggccgcaccccgcacgacctcttctcctctggcctcttccgtttccgccttgacagcaccagcgggggctattgggagcaggtgattccggcaggcggacggccccctgctg

SEQ ID NO: 148945 - DNA, 120 bp, Artificial Sequence
  ENSG00000105429_15 (sequence is synthesized)
ccactggccactccatggtgttccatgccccctcccgtgccctgctggtccatggtggacaccggccctccactgcccggttctctgtgcgagtgaactccactgagcttttccacgtgg

SEQ ID NO: 148946 - DNA, 120 bp, Artificial Sequence
  ENSG00000105429_16 (sequence is synthesized)
atcggcatgtgtggacgacgctgaaggggcgggatgggcttcagggcccaagggagcgagccttccacacagccagtgttctgggcaattacatggtggtctatgggggcaatgtgcaca

SEQ ID NO: 148947 - DNA, 120 bp, Artificial Sequence
  ENSG00000105429_17 (sequence is synthesized)
cccattaccaggaggaaaagtgctacgaagatggcatcttcttctaccaccttggctgccatcaatgggtgtcaggagctgagcttgccccgccaggaacccctgagggccgagcagcgc

SEQ ID NO: 148948 - DNA, 120 bp, Artificial Sequence
  ENSG00000105429_18 (sequence is synthesized)
ctcccagtggtcggtactcacatgtagctgcggtgcttggtggcagcgtcctgttggtggctggggggtacagcggccggccccgtggggacttgatggcgtacaaggtgcccccctttg

SEQ ID NO: 148949 - DNA, 120 bp, Artificial Sequence
  ENSG00000105429_19 (sequence is synthesized)
tgttccaggcacctgcccctgactaccacttggactactgctccatgtacacagaccacagcgtctgctcccgggacccggaatgcagttggtgccaaggagcctgccaagctgcacccc

SEQ ID NO: 148950 - DNA, 120 bp, Artificial Sequence
  ENSG00000105429_20 (sequence is synthesized)
ctcctgggacccccttgggggcttgtccagccgccagctgcctgggcctgggccgcctcctgggtgactgccaggcctgcctggccttcagcagccccacagcccctccacggggacctg

SEQ ID NO: 148951 - DNA, 120 bp, Artificial Sequence
  ENSG00000105429_21 (sequence is synthesized)
gcaccctgggctggtgcgtgcacaatgagagctgcctccctaggcctgagcaggcccgctgccgaggggagcagatctcaggcactgtgggctggtgggggcctgcgcctgtcttcgtca

SEQ ID NO: 148952 - DNA, 120 bp, Artificial Sequence
  ENSG00000105429_22 (sequence is synthesized)
cgtccctggaggcctgcgtcacccagagcttcctgcctggcctgcacttgctcacctttcagcagccgcccaatacctcccagcctgacaaggaggaggtggggcgctgggtggctcatc

SEQ ID NO: 148953 - DNA, 120 bp, Artificial Sequence
  ENSG00000105429_23 (sequence is synthesized)
aggagaaggagacgcggcggctgcagcgccctgggtctgctcgcctcttccctctgcctgggcgggaccacaagtatgcagtagagatccagggccagctcaatggctcggcaggccctg

SEQ ID NO: 148954 - DNA, 120 bp, Artificial Sequence
  ENSG00000105429_24 (sequence is synthesized)
ggcacagcgagctaactctgctgtgggatcggactggtgtgccaggaggcagcgagatctccttcttcttcctggagccctaccgctcgtcgtcctgcacctcctattcttcctgcctgg

SEQ ID NO: 148955 - DNA, 120 bp, Artificial Sequence
  ENSG00000105429_25 (sequence is synthesized)
gctgcttggcagaccagggctgtggctggtgcctgaccagtgccacctgccacctgcgccagggcggagcccattgcggggatgacggggctggtgggtccctgctggtgctggtgccta

SEQ ID NO: 148956 - DNA, 120 bp, Artificial Sequence
  ENSG00000105429_26 (sequence is synthesized)
ccctctgcccactctgcgaggagcatcgggactgccacgcctgcacccaggaccccttctgtgagtggcatcagagcaccagccgcaaaggggacgcggcatgcagccggcggggccggg

SEQ ID NO: 148957 - DNA, 120 bp, Artificial Sequence
  ENSG00000105429_27 (sequence is synthesized)
gtcggggtgccctgaagagtccagaggagtgtcccccgctctgcagccagcgactgacctgtgaggactgcctggccaactctagccagtgcgcctggtgccagtccacccacacctgct

SEQ ID NO: 148958 - DNA, 120 bp, Artificial Sequence
  ENSG00000105429_28 (sequence is synthesized)
tcctgtttgctgcctacttggcccggtacccacacgggggctgtcgaggctgggacgacagtgtacactcggagccacggtgccggagctgcgatggcttcctgacctgccatgagtgtc

SEQ ID NO: 148959 - DNA, 120 bp, Artificial Sequence
  ENSG00000105429_29 (sequence is synthesized)
tgcagagccacgagtgtggctggtgtggcaatgaggacaaccccacactgggacggtgcctacagggggacttctcagggcccctcggtgggggtaactgctccctgtgggtgggggagg

SEQ ID NO: 148960 - DNA, 120 bp, Artificial Sequence
  ENSG00000105429_30 (sequence is synthesized)
gcctggggcttcccgtggccctccctgcccgctgggcatacgcccgctgtcctgacgtggatgagtgtcgcctgggcctggcccggtgccacccgcgggcgacctgcctgaacacgcccc

SEQ ID NO: 148961 - DNA, 120 bp, Artificial Sequence
  ENSG00000105429_31 (sequence is synthesized)
tcagctacgagtgtcactgccagcggggctaccagggtgatggcatctcacactgcaaccgcacgtgcttggaggactgtggccatggtgtgtgcagtggccccccggactttacctgcg

SEQ ID NO: 148962 - DNA, 120 bp, Artificial Sequence
  ENSG00000105429_32 (sequence is synthesized)
tgtgtgacctaggctggacatcagacctgccccctcccacacccgccccgggtccgccagccccccgctgctcccgggactgtggctgcagcttccacagccactgccgcaagcggggcc

SEQ ID NO: 148963 - DNA, 120 bp, Artificial Sequence
  ENSG00000105429_33 (sequence is synthesized)
ctggcttctgcgacgagtgccaggactggacatggggggagcactgcgaacgatgccggcccggcagcttcggcaacgccacaggctctaggggctgccggccctgccagtgcaacgggc

SEQ ID NO: 148964 - DNA, 120 bp, Artificial Sequence
  ENSG00000105429_34 (sequence is synthesized)
acggggacccacgccgtggccactgcgacaacctcagtgggctctgcttctgccaggaccacaccgagggtgcccactgccagctctgctccccaggctattatggggatccccgggccg

SEQ ID NO: 148965 - DNA, 120 bp, Artificial Sequence
  ENSG00000105429_35 (sequence is synthesized)
gtggttcctgctttcgggagtgtgggggtcgcgccctcctcaccaacgtgtcctcagtggcactgggctcacgccgggtcggggggctgctgcctccaggtggcggggctgcaagagccg

SEQ ID NO: 148966 - DNA, 120 bp, Artificial Sequence
  ENSG00000105429_36 (sequence is synthesized)
ggcctggcctgtcctactgtgtgtgggttgtctcggccactgaggagctacagccctgtgctcccgggaccctctgtcccccactcaccctcaccttctcccccgacagcagcaccccct

SEQ ID NO: 148967 - DNA, 120 bp, Artificial Sequence
  ENSG00000105429_37 (sequence is synthesized)
gcacgctgagctacgtcctggcgtttgatggattcccacgcttcctggacactggtgttgtccagtcggaccgcagcctcatagctgccttctgcggccagcgacgggacaggcccctca

SEQ ID NO: 148968 - DNA, 120 bp, Artificial Sequence
  ENSG00000105429_38 (sequence is synthesized)
ctgttcaggccctgtctgggctgctcgtgctgcactgggaggccaatggctcctcatcctggggcttcaatgcttcggtgggctctgcccgctgtgggtcagggggccccgggagctgtc

SEQ ID NO: 148969 - DNA, 120 bp, Artificial Sequence
  ENSG00000105429_39 (sequence is synthesized)
ccgtcccccaggaatgcgtgccccaggacggtgctgcaggtgcggggctctgccgatgtcctcagggctgggctggcccacactgccgcatggctctgtgtcctgagaactgcaatgccc

SEQ ID NO: 148970 - DNA, 120 bp, Artificial Sequence
  ENSG00000105429_40 (sequence is synthesized)
acactggggcaggaacttgtaaccagagcctgggtgtgtgcatctgtgccgagggcttcgggggccccgactgcgccaccaagctggatggcgggcagctggtctgggagaccctcatgg

SEQ ID NO: 148971 - DNA, 120 bp, Artificial Sequence
  ENSG00000105429_41 (sequence is synthesized)
acagccgcctctcagccgacactgccagccgcttcctgcaccgcctgggccacaccatggtggatggacccgatgccaccttgtggatgtttgggggcctgggcctgccccaggggctgc

SEQ ID NO: 148972 - DNA, 120 bp, Artificial Sequence
  ENSG00000105429_42 (sequence is synthesized)
tgggaaacctgtacaggtactcagtgagtgagcggcggtggacacagatgctggcgggagccgaggacgggggcccaggcccatcgccccgctccttccatgcagccgcatatgtgcccg

SEQ ID NO: 148973 - DNA, 120 bp, Artificial Sequence
  ENSG00000105429_43 (sequence is synthesized)
ctggccgtggtgccatgtatctgctggggggacttaccgctggaggcgtcacccgtgatttctgggtcctcaacctcaccaccctgcaatggcggcaggagaaggccccccagaccgtgg

SEQ ID NO: 148974 - DNA, 120 bp, Artificial Sequence
  ENSG00000105429_44 (sequence is synthesized)
agctgccagccgttgctggtcacacccttactgcccgccgaggcctgtctctgctcctggtgggcggttactccccggaaaatggcttcaaccagcagctgctggagtaccagctggcaa

SEQ ID NO: 148975 - DNA, 120 bp, Artificial Sequence
  ENSG00000105429_45 (sequence is synthesized)
tctctatggtcactctgctgtctaccacgaggccaccgactccctctacgtgtttggggggttccgattccatgtggagctggcggccccatcccccgagctctactccctgcactgtcc

SEQ ID NO: 148976 - DNA, 120 bp, Artificial Sequence
  ENSG00000105429_46 (sequence is synthesized)
tgaccgcacctggagtctgctggccccttctcagggggcaaagcgagatcgtatgaggaatgtgcgtggctcatctcggggtctgggccaagttcctggggagcagcctgggtcatgggg

SEQ ID NO: 148977 - DNA, 120 bp, Artificial Sequence
  ENSG00000105429_47 (sequence is synthesized)
gttccgggaagtcaggaagaagatggctctgtgggctgctcttgctggtacaggaggtttcctggaggaaatctcacctcacctgaaggagccccgcccccggcttttccacgcctcagc

SEQ ID NO: 148978 - DNA, 120 bp, Artificial Sequence
  ENSG00000105429_48 (sequence is synthesized)
cctgttaggggacaccatggtggttcttggggggcgctcggaccctgacgagttcagcagcgacgttctgctctaccaggtcaactgcaatgcctggcttctgcccgacctcacccgctc

SEQ ID NO: 148979 - DNA, 120 bp, Artificial Sequence
  ENSG00000105429_49 (sequence is synthesized)
ggcctctgtggggcccccaatggaggagtctgtggcccatgctgtggcagcagtcgggagccgcctgtatatctctgggggtttcgggggagtggccctgggccgcctgctggcactgac

SEQ ID NO: 148980 - DNA, 120 bp, Artificial Sequence
  ENSG00000105429_50 (sequence is synthesized)
cctgccccctgacccctgccgcctgctgtcctcacctgaagcttgtaaccagtctggggcctgcacctggtgccatggggcctgcttgtccggggatcaggcccacaggctgggctgcgg

SEQ ID NO: 148981 - DNA, 120 bp, Artificial Sequence
  ENSG00000105429_51 (sequence is synthesized)
gggctccccctgctccccaatgcctcgctccccggaggaatgtcgacgtctccggacctgcagtgagtgcctggcccgccatcctcggaccctgcaacctggagatggagaggcgtccac

SEQ ID NO: 148982 - DNA, 120 bp, Artificial Sequence
  ENSG00000105429_52 (sequence is synthesized)
cccccgctgtaagtggtgtaccaactgccccgaaggtgcttgcattggacgcaatgggtcctgcacctctgagaatgactgtcggatcaaccagcgagaggtcttctgggcagggaactg

SEQ ID NO: 148983 - DNA, 120 bp, Artificial Sequence
  ENSG00000105429_53 (sequence is synthesized)
ctccgaggctgcgtgcggggctgctgactgcgagcagtgcacgcgggagggcaagtgcatgtggacgcggcagttcaagaggacaggggagacccgccgcatcctctccgtgcagcccac

SEQ ID NO: 148984 - DNA, 120 bp, Artificial Sequence
  ENSG00000105429_54 (sequence is synthesized)
ctatgactggacgtgcttcagccactctctgctgaatgtgtcccccatgccggtggaatcatcacccccactgccctgccccaccccttgtcacctcctacccaactgtacctcctgcct

SEQ ID NO: 148985 - DNA, 120 bp, Artificial Sequence
  ENSG00000105429_55 (sequence is synthesized)
ggactctaagggagcagatgggggctggcagcactgtgtttggagcagcagcctgcagcagtgtctgagcccttcctacctgcccctgcgatgtatggccggaggctgtgggcggctgct

SEQ ID NO: 148986 - DNA, 120 bp, Artificial Sequence
  ENSG00000105429_56 (sequence is synthesized)
ccggggacctgagagctgctccctgggctgtgctcaggcaactcagtgcgccttgtgcctgcggcgcccccattgcggctggtgtgcctgggggggccaggatgggggtggccgctgcat

SEQ ID NO: 148987 - DNA, 120 bp, Artificial Sequence
  ENSG00000105429_57 (sequence is synthesized)
ggagggtggactcagcggcccccgtgatgggctgacatgtgggcgtccgggggcctcctgggccttcctgtcctgcccccctgaggacgagtgtgcaaacgggcaccacgactgcaacga

SEQ ID NO: 148988 - DNA, 120 bp, Artificial Sequence
  ENSG00000105429_58 (sequence is synthesized)
gacgcagaattgccacgaccagccccacggctatgagtgcagctgcaagaccggctataccatggacaacatgacagggctgtgccgccctgtgtgcgcccagggctgcgtgaacggctc

SEQ ID NO: 148989 - DNA, 120 bp, Artificial Sequence
  ENSG00000105429_59 (sequence is synthesized)
atgtgtggagcccgaccactgccgctgccactttggctttgtgggccgcaactgctccacggaatgccgctgcaaccgccacagtgaatgcgctggtgttggggcgcgtgaccactgctt

SEQ ID NO: 148990 - DNA, 120 bp, Artificial Sequence
  ENSG00000105429_60 (sequence is synthesized)
gctctgccgcaaccacaccaagggcagccactgtgagcagtgcctcccgctgtttgtgggttcagctgtcggaggcgggacctgccggccctgccacgccttttgtcgtggaaatagcca

SEQ ID NO: 148991 - DNA, 120 bp, Artificial Sequence
  ENSG00000105429_61 (sequence is synthesized)
catctgcatctccaggaaggagttacaaatgtccaagggagagccaaagaagtactcactggacccagaggagattgaaaactgggtgacagagggtcctagtgaagacgaggccgtgtg

SEQ ID NO: 148992 - DNA, 120 bp, Artificial Sequence
  ENSG00000105429_62 (sequence is synthesized)
cgtgaactgccagaataacagctatggggagaaatgcgagagctgcctgcagggctacttcctcctggacgggaagtgcaccaaatgccagtgtaatggccacgcggacacatgtaacga

SEQ ID NO: 148993 - DNA, 120 bp, Artificial Sequence
  ENSG00000105429_63 (sequence is synthesized)
gcaggatgggacgggctgtccatgtcagaataacacagagacgggcacatgccagggcagctcccccagtgaccgtcgagactgctacaagtaccagtgcgccaagtgccgggaatcatt

SEQ ID NO: 148994 - DNA, 120 bp, Artificial Sequence
  ENSG00000105429_64 (sequence is synthesized)
tcacgggagtccgctgggcggccagcagtgctaccgcctcatctcggtggagcaggagtgctgcctggaccccacgtcccagaccaactgcttccatgagcccaaacgccgggcgctagg

SEQ ID NO: 148995 - DNA, 120 bp, Artificial Sequence
  ENSG00000105429_65 (sequence is synthesized)
ccccggccgcactgtcctctttggcgtgcagcccaaattcaccaacgtggacatccgcctgacgctggacgtgaccttcggggccgtggacctctatgtctccacctcctatgacacctt

SEQ ID NO: 148996 - DNA, 120 bp, Artificial Sequence
  ENSG00000105429_66 (sequence is synthesized)
cgtggtccgtgtggcccctgacactggcgtccatactgtacacatccagccacccccagccccaccacctccaccaccccctgcagatggtgggccccggggggctggggatccaggagg

SEQ ID NO: 148997 - DNA, 120 bp, Artificial Sequence
  ENSG00000105429_67 (sequence is synthesized)
agcaggggccagcagtgggccgggcgccccagcagagccacgggtacgggaggtatggccgcggggcctgattacctacgtgacggtgacggagccgtcggcagtgctggtggtccgcgg

SEQ ID NO: 148998 - DNA, 120 bp, Artificial Sequence
  ENSG00000105429_68 (sequence is synthesized)
cgtgcgggaccggctggtcatcacctacccacacgagcaccatgccctcaagtcgagccgcttctacctgctgctgctgggcgtgggagacccaagtgggcccggcgccaacggctcagc

SEQ ID NO: 148999 - DNA, 120 bp, Artificial Sequence
  ENSG00000105429_69 (sequence is synthesized)
cgactcgcagggcctgctcttcttccggcaggaccaggcccacattgacctgtttgtcttcttctccgtcttcttctcctgcttcttcctcttcctctcactctgtgtgctcctctggaa

SEQ ID NO: 149000 - DNA, 120 bp, Artificial Sequence
  ENSG00000105429_70 (sequence is synthesized)
ggccaagcaggctctggaccagcggcaggagcagcgccggcacttgcaggagatgaccaagatggccagccgccccttcgccaaggtcaccgtctgcttcccacctgaccctactgcccc

SEQ ID NO: 149001 - DNA, 120 bp, Artificial Sequence
  ENSG00000105429_71 (sequence is synthesized)
ggcctccgcctggaagccggctgggctcccacctcccgccttccgccgctctgagcccttcctggcacccctgctgctgacaggggccggtgggccctggggacccatgggagggggctg

SEQ ID NO: 149002 - DNA, 120 bp, Artificial Sequence
  ENSG00000105429_72 (sequence is synthesized)
ctgcccaccagccatccccgccaccactgctgggctgcgagctgggcccatcactctcgagcccacagaagatggcatggctggcgtggccacactgctgctccagctgcctggcgggcc

SEQ ID NO: 149003 - DNA, 120 bp, Artificial Sequence
  ENSG00000105429_73 (sequence is synthesized)
ccatgcacccaacggcgcctgcctggggtcagccctcgtcacactgcggcacaggctgcacgagtactgtgggggtggtgggggtgctgggggcagtgggcatgggactggtgcgggccg

SEQ ID NO: 149004 - DNA, 120 bp, Artificial Sequence
  ENSG00000105429_74 (sequence is synthesized)
gaagggactgttgagccaggacaacctcaccagcatgtccctctgacatgcccagggttctcatccacagcagctgggtcacctgatagggccgccctggacttggggtccctccacctg

SEQ ID NO: 149005 - DNA, 120 bp, Artificial Sequence
  ENSG00000105429_75 (sequence is synthesized)
ggggcccctggacactgtctacttggagaccactggcccccttcccccagggttgcccagatggggcctcctttgttctgcattcagcagctatttatcgagtacctactctgtcaggca

SEQ ID NO: 149006 - DNA, 120 bp, Artificial Sequence
  ENSG00000105429_76 (sequence is synthesized)
ctgtcataggcgtggggcaaagcaggaaccaagagacgaggttccctgatctcatgggacttaggttctggtgaagggagacaatcagtgcacatgcacacaccccacacgcatacacac

SEQ ID NO: 149007 - DNA, 120 bp, Artificial Sequence
  ENSG00000105429_77 (sequence is synthesized)
atgaacacatgcacatgtgcacacacaagtaagatggcttcagagagggagaagcactgtgaggcctccagaggatgtggcagtgagggacgatggggtgaagtcagctgggcattcaaa

SEQ ID NO: 149008 - DNA, 120 bp, Artificial Sequence
  ENSG00000105429_78 (sequence is synthesized)
gaagctagactgagaacgcctgagaagaaccagctacgggaagagctttgggaagcaaaggcagaggccctggggtgggagcaggcttgttttattggaaggaccagaaaactggtaagt

SEQ ID NO: 149009 - DNA, 120 bp, Artificial Sequence
  ENSG00000105429_79 (sequence is synthesized)
gtgacccagatcaagtgtgaggagatgaggctggggatagtcaggggctggatcacccagggccttgtgggccccacatagggttttgggttttattctcagggcaatgggaagctgttg

SEQ ID NO: 149010 - DNA, 120 bp, Artificial Sequence
  ENSG00000105429_80 (sequence is synthesized)
ggttttattctcagggcaatgggaagctgttggatggtttgatgaaggggagtgacaggatccgatgtacctatttaagaatttaagagggtcgggtgcggtggctcatgcctataatcc

SEQ ID NO: 149011 - DNA, 63 bp, Artificial Sequence
  ENSG00000105429_81 (sequence is synthesized)
tgagctcagattgcgttttaagaggtcactcagttgtgctgtggagaatggaccggagggaca

SEQ ID NO: 149012 - DNA, 120 bp, Artificial Sequence
  ENSG00000105429_82 (sequence is synthesized)
ggtcactcagttgtgctgtggagaatggaccggagggacaagaggggcagcagggatggtgggctggagtagggtgctggcaatgagggagtctggctcagatgtgggatgtgtatggaa

SEQ ID NO: 149013 - DNA, 120 bp, Artificial Sequence
  ENSG00000105429_83 (sequence is synthesized)
gaatataaatgatggtgtggatgtcagggtgagggaggagacaaaaccacgatgacccctagctttgtggcctgaactgtgggtggctgaggggatcgttaattgaatggggcagactga

SEQ ID NO: 149014 - DNA, 120 bp, Artificial Sequence
  ENSG00000105429_84 (sequence is synthesized)
ggcttgtgaggaagatcagagtctggttcttgacatgagatgcccttcagacatctcttcactcaggtccaactagggatacagaaacactgaatatttcaacagcagaaattgaatggg

SEQ ID NO: 149015 - DNA, 120 bp, Artificial Sequence
  ENSG00000105429_85 (sequence is synthesized)
gggattgatagcgctggcgagggaagcagctggaaagagacagatggcaccctgagacagcccagaggtgaataggacccccaggctgcagggataaagctcagtggtggtgttacctca

SEQ ID NO: 149016 - DNA, 120 bp, Artificial Sequence
  ENSG00000105429_86 (sequence is synthesized)
ccggggaccagggtcacacagcaaagctggaacaacagaggcgtgttgtgggggagcctcagaggggacaaaacctctgcctgagatcccaccccaggtgggcatgggggccactgaggt

SEQ ID NO: 149017 - DNA, 120 bp, Artificial Sequence
  ENSG00000105429_87 (sequence is synthesized)
tggggatgaaaatgccggtaccgtcagtgcacagccctgttccagacagtgctgcctggaagatttctgggctctcctgaggcgccaccccgcacctgagccacctccttggactcctgt

SEQ ID NO: 149018 - DNA, 120 bp, Artificial Sequence
  ENSG00000105429_88 (sequence is synthesized)
cctctaccccttgaggacctccctcccttctaccctagctgtcttcttgaacttgggactctcctttcccaagacttccatcactagctcctggagggactggactttgcatcttccctt

SEQ ID NO: 149019 - DNA, 120 bp, Artificial Sequence
  ENSG00000105429_89 (sequence is synthesized)
cgcgtggagcctcagtgtgagaggccctagccaatgcgtgcatgtcagaggtggtggggaccacatcagaagaagaggggggtgatgaaattaacaaataaaaagtatggggaaaaccca

SEQ ID NO: 149020 - DNA, 120 bp, Artificial Sequence
  ENSG00000105429_90 (sequence is synthesized)
gtgtccctggtctaccgtggcttcatctacccaatgctgcctggagggccaggtggaccaggggctgaggacgtggccgtgtggacgcgggcccagcgcctacacgtcctggcccggatg

SEQ ID NO: 149021 - DNA, 120 bp, Artificial Sequence
  ENSG00000105429_91 (sequence is synthesized)
tggactcctgggtctgagggaggagggggttggtccaggcctttctatgatcacactgtccttccttggccagattgaaaactgggtgacagagggtcctagtgaagacgaggccgtgtg

SEQ ID NO: 149022 - DNA, 120 bp, Artificial Sequence
  ENSG00000105429_92 (sequence is synthesized)
gtcacccacatagcccaaaaccatggaaacagccagtggctttgatggtgtcatggtgggtggagatgatggggtgctttaggggctctgggcctgcctggcgctttccccacccccaac

SEQ ID NO: 149023 - DNA, 120 bp, Artificial Sequence
  ENSG00000105438_0 (sequence is synthesized)
cttcccggctccagctccgccgccagctccagcctttgctccccctcccaaagtcccctccccggagcggagcgcacctagggtccctcttccgtccccccagcccagctacccgttcag

SEQ ID NO: 149024 - DNA, 120 bp, Artificial Sequence
  ENSG00000105438_1 (sequence is synthesized)
accagcagcctcggggggcacccccccgccagcctgcctccctcccgctcagccctgccagggttccccagccatgaatctcttccgattcctgggagacctctcccacctcctcgccat

SEQ ID NO: 149025 - DNA, 120 bp, Artificial Sequence
  ENSG00000105438_2 (sequence is synthesized)
catcttgctactgctcaaaatctggaagtcccgctcgtgcgccggaatttcagggaagagccaggtcctgtttgctgtggtgttcactgcccgatatctggacctcttcaccaactacat

SEQ ID NO: 149026 - DNA, 120 bp, Artificial Sequence
  ENSG00000105438_3 (sequence is synthesized)
ctcactctacaacacgtgtatgaaggtggtctacatagcctgctccttcaccacggtctggttgatttatagcaagttcaaagctacttacgatgggaaccatgacacgttcagagtgga

SEQ ID NO: 149027 - DNA, 120 bp, Artificial Sequence
  ENSG00000105438_4 (sequence is synthesized)
gttcctggtcgttcccacagccattctggcgttcctggtcaatcatgacttcacccctctggagatcctctggaccttctccatctacctggagtcagtggccatcttgccgcagctgtt

SEQ ID NO: 149028 - DNA, 120 bp, Artificial Sequence
  ENSG00000105438_5 (sequence is synthesized)
catggtgagcaagaccggcgaggcggagaccatcaccagccactacttgtttgcgctaggcgtttaccgcacgctctatctcttcaactggatctggcgctaccatttcgagggcttctt

SEQ ID NO: 149029 - DNA, 120 bp, Artificial Sequence
  ENSG00000105438_6 (sequence is synthesized)
agccccggtcctctccatctctctcctcggcagcagcgggaggcagaggaaggcggcagaagatgaagagctttcccatccaggggtgacttttttaagaacccacctcttgtgctcccc

SEQ ID NO: 149030 - DNA, 120 bp, Artificial Sequence
  ENSG00000105438_7 (sequence is synthesized)
atcccgcctcctgccgggtttcagggggacagtggaggatccaggtcttggggagctcaggacttgggctgtttgtagttttttgccttttagacaagaaaaaaaaatctttccactctt

SEQ ID NO: 149031 - DNA, 120 bp, Artificial Sequence
  ENSG00000105438_8 (sequence is synthesized)
tagtttttgattctgatgactcgtttttcttctactctgtggccccaatttttataaagtgtttttgagtgtcctatgggccggggcagggtccaagatcttttcccttccccaggcccc

SEQ ID NO: 149032 - DNA, 120 bp, Artificial Sequence
  ENSG00000105438_9 (sequence is synthesized)
tcggctccctcccagatcccacccccagccccactggttgccaaacactaaatctgccgacacccatctgccccacctcctgccatggccatgaaccgcgacccccactaaatttctaga

SEQ ID NO: 149033 - DNA, 120 bp, Artificial Sequence
  ENSG00000105438_10 (sequence is synthesized)
ttggggatagggagaaagggaggcccaggaaggtctcccctgattttttttcatagtaatttttttccccagagtttgaattttttggtcttctcctggttttttggcaaattagggggg

SEQ ID NO: 149034 - DNA, 120 bp, Artificial Sequence
  ENSG00000105438_11 (sequence is synthesized)
cccggggctcaagtgcgggaagggggctggcccgaggatcccatggctctcacaccatgtttttgtacagaactgatggttgaatctttgttctcttgaaataaacagaagaaaatgaaa

SEQ ID NO: 149035 - DNA, 120 bp, Artificial Sequence
  ENSG00000105438_12 (sequence is synthesized)
cacagccattctggcgttcctggtcaatcatgacttcacccctctggaggaagataggcctgggtggccagatgtgctgatcttttcaacagaagccataattcaggagttttcagatcc

SEQ ID NO: 149036 - DNA, 120 bp, Artificial Sequence
  ENSG00000105438_13 (sequence is synthesized)
cactctacaacacgtgtatgaaggtagaggctccaccccacctctctggcccccactgaggcagaggagccgggtgtgggtcccagactcctaggtctgagggaggaggggctgggggcc

SEQ ID NO: 149037 - DNA, 87 bp, Artificial Sequence
  ENSG00000105438_14 (sequence is synthesized)
ctcctgggtctgagggaggaggggccgggggcctggactcttgggtctgagggaagaagggactgttgggggtctggactcctgggt

SEQ ID NO: 149038 - DNA, 120 bp, Artificial Sequence
  ENSG00000105438_15 (sequence is synthesized)
agactgcgggaggaccctgaggggccaggggtagccatgaggcctagtctgggacggagcctcgggctggagtagcttcgggggcctgggctgccccctggctgtggtccgtgggaaagg

SEQ ID NO: 149039 - DNA, 120 bp, Artificial Sequence
  ENSG00000105438_16 (sequence is synthesized)
gccctgctcaggcggggcgggctggggaggcctccggggacagctgcactccagagctgcctccaggctggtcccgggcgccctgccttagtttattgcccatgcagcccacccccagct

SEQ ID NO: 149040 - DNA, 90 bp, Artificial Sequence
  ENSG00000105438_17 (sequence is synthesized)
ttctctgtctctggaccacaggaatttcagggaagagccaggtcctgtttgctgtggtgttcactgcccgatatctggacctcttcacca

SEQ ID NO: 149041 - DNA, 120 bp, Artificial Sequence
  ENSG00000105438_18 (sequence is synthesized)
cacagccattctggcgttcctggtcaatcatgacttcacccctctggaggtaggcgccttgctgtgactccttatttggggggatggttgtggcagagtagctatgacaggagaccctct

SEQ ID NO: 149042 - DNA, 120 bp, Artificial Sequence
  ENSG00000105443_0 (sequence is synthesized)
agcgctgaggactggcgctgaggaggcggcggtggctcccggggcgtttgagcgggctcacccgagcccgcgggccaacgcggatccaggcccgactggcgggaccgccccggattcccc

SEQ ID NO: 149043 - DNA, 120 bp, Artificial Sequence
  ENSG00000105443_1 (sequence is synthesized)
gcgggccttcctagccgccatggaggacggcgtctatgaacccccagacctgactccggaggagcggatggagctggagaacatccggcggcggaagcaggagctgctggtggagattca

SEQ ID NO: 149044 - DNA, 120 bp, Artificial Sequence
  ENSG00000105443_2 (sequence is synthesized)
gcgcctgcgggaggagctcagtgaagccatgagcgaggtggaggggctggaggccaatgagggcagtaagaccttgcaacggaaccggaagatggcaatgggcaggaagaagttcaacat

SEQ ID NO: 149045 - DNA, 120 bp, Artificial Sequence
  ENSG00000105443_3 (sequence is synthesized)
ggaccccaagaaggggatccagttcttggtggagaatgaactgctgcagaacacacccgaggagatcgcccgcttcctgtacaagggcgaggggctgaacaagacagccatcggggacta

SEQ ID NO: 149046 - DNA, 120 bp, Artificial Sequence
  ENSG00000105443_4 (sequence is synthesized)
cctgggggagagggaagaactgaacctggcagtgctccatgcttttgtggatctgcatgagttcaccgacctcaatctggtgcaggccctcaggcagtttctatggagctttcgcctacc

SEQ ID NO: 149047 - DNA, 120 bp, Artificial Sequence
  ENSG00000105443_5 (sequence is synthesized)
cggagaggcccagaaaattgaccggatgatggaggccttcgcccagcgatactgcctgtgcaaccctggggttttccagtccacagacacgtgctatgtgctgtccttcgccgtcatcat

SEQ ID NO: 149048 - DNA, 120 bp, Artificial Sequence
  ENSG00000105443_6 (sequence is synthesized)
gctcaacaccagtctccacaatcccaatgtccgggacaagccgggcctggagcgctttgtggccatgaaccggggcatcaacgagggcggggacctgcctgaggagctgctcaggaacct

SEQ ID NO: 149049 - DNA, 120 bp, Artificial Sequence
  ENSG00000105443_7 (sequence is synthesized)
gtacgacagcatccgaaatgagcccttcaagattcctgaggatgacgggaatgacctgacccacaccttcttcaacccggaccgggagggctggctcctgaagctggggggccgggtgaa

SEQ ID NO: 149050 - DNA, 120 bp, Artificial Sequence
  ENSG00000105443_8 (sequence is synthesized)
gacgtggaagcggcgctggtttatcctcacagacaactgcctctactactttgagtacaccacggacaaggagccccgaggaatcatccccctggagaatctgagcatccgagaggtgga

SEQ ID NO: 149051 - DNA, 120 bp, Artificial Sequence
  ENSG00000105443_9 (sequence is synthesized)
cgacccccggaaaccgaactgctttgaactttacatccccaacaacaaggggcagctcatcaaagcctgcaaaactgaggcggacggccgagtggtggagggaaaccacatggtgtaccg

SEQ ID NO: 149052 - DNA, 120 bp, Artificial Sequence
  ENSG00000105443_10 (sequence is synthesized)
gatctcggcccccacgcaggaggagaaggacgagtggatcaagtccatccaggcggctgtgagtgtggaccccttctatgagatgctggcagcgagaaagaagcggatttcagtcaagaa

SEQ ID NO: 149053 - DNA, 120 bp, Artificial Sequence
  ENSG00000105443_11 (sequence is synthesized)
gaagcaggagcagccctgaccccctgcccccaactccattatttattacggagctgccccgcctgggtggccggacccctgggccttggggctgtggatcctggttccctgtttggaaaa

SEQ ID NO: 149054 - DNA, 120 bp, Artificial Sequence
  ENSG00000105443_12 (sequence is synthesized)
ttcaccacctctagctcctcactgttctttgtaattaacacgctgttggtaatcttattaattatttaaccacttggcctgctgaccccctcatttcttggggttgacagagtcgaggtg

SEQ ID NO: 149055 - DNA, 120 bp, Artificial Sequence
  ENSG00000105443_13 (sequence is synthesized)
ctccgtggagccagcctgtttccctggacaggggcctggacccgcctgtctctgggtgctgcctgggctgtcccggtgggtctgttctggtttcaccccgagcccagcaggagtggagta

SEQ ID NO: 149056 - DNA, 120 bp, Artificial Sequence
  ENSG00000105443_14 (sequence is synthesized)
aagggagaaggttaatatggtgggagtctggagttggaattggccggggacagagtttagaatgcagggattcagggtcaaggtctagcattcattctagaagttacttgacagccatca

SEQ ID NO: 149057 - DNA, 120 bp, Artificial Sequence
  ENSG00000105443_15 (sequence is synthesized)
gccagttacgctacagccatcagctagttcccatcgttgctttcatggggcttgaggtctttgaggggcaggagatgaagctggtgaggttgtgagctgggccagggctttgaggacaac

SEQ ID NO: 149058 - DNA, 120 bp, Artificial Sequence
  ENSG00000105443_16 (sequence is synthesized)
ctggagctggaagaacatgcgaccacctcagggagggtcagggaaggatgagtggggaggtggcccatgtcctgcaagggccttgctgatgggatgtcctgaagggctgggcagccttag

SEQ ID NO: 149059 - DNA, 120 bp, Artificial Sequence
  ENSG00000105443_17 (sequence is synthesized)
atcgggctaagagggcaggactgtgggccagtgccagagccaggcttgtctgttctcaaaggatcagcctcctttggaggacattttgtgtcaaggatagggctgaggacctgcgttctg

SEQ ID NO: 149060 - DNA, 120 bp, Artificial Sequence
  ENSG00000105443_18 (sequence is synthesized)
gtctttcctgggattcttgacagccaaagaaattcgaggatcgcctctatgaaggtgaagtcttggcatgtggggtacccctgaatcctgggctaaggtctgtgaccttttgccctccag

SEQ ID NO: 149061 - DNA, 120 bp, Artificial Sequence
  ENSG00000105443_19 (sequence is synthesized)
ttggggtatgtgtggtgtccccaaagaacaagggctcgtggatcccgagcagggtgcgatggcggattgggaggtcccatgtcactctcccatgcccgcctttgaagctgaggcgctctt

SEQ ID NO: 149062 - DNA, 120 bp, Artificial Sequence
  ENSG00000105443_20 (sequence is synthesized)
tagttaacaaactacaagtcccagcagggaccgggacgcgggtgggagaggcgcctgtggccccgaggcgtgccgcgagttgtagtccctcctgcccgctgtgttcgcttttgagctctc

SEQ ID NO: 149063 - DNA, 120 bp, Artificial Sequence
  ENSG00000105443_21 (sequence is synthesized)
cgatgggatgcggcgcttcggaatttcgggctttgatccctgtcccgcccttggccacaggcacctgccggcctgaaggcccccgcggtgggggtaccctgcgcccctccgcgggaaggt

SEQ ID NO: 149064 - DNA, 120 bp, Artificial Sequence
  ENSG00000105443_22 (sequence is synthesized)
ggactacagttatcggcaggctgtgcggcgccaaagccacggtgacccagacccgaggtttttccgggcgtcgcagtttcccgagactccgtggcggcgtttgtcttctttttcttagtc

SEQ ID NO: 149065 - DNA, 120 bp, Artificial Sequence
  ENSG00000105443_23 (sequence is synthesized)
agatcccgtacttttgtggagggtagaggaggctttgaccgccgcggccccgggggctggtgggaaatggagttccaaatgagaaaatagaattccccacttctctttcccacaggtgcc

SEQ ID NO: 149066 - DNA, 120 bp, Artificial Sequence
  ENSG00000105443_24 (sequence is synthesized)
agggaaacggagtcatcgacccaagaaggtcgtgggagatgaggtcccagggtaaacagcgggtcccgccactatgtcaccctttcctgccgcctccccggatgaactgcatgcagggcg

SEQ ID NO: 149067 - DNA, 120 bp, Artificial Sequence
  ENSG00000105443_25 (sequence is synthesized)
gcatgcagggcggccggctccgtggcaggcagaggcaggaagaggcgcggagcccgctggtggcgaagaggggagtgcggcgggaggggagggcagaggcaggcggccggtcgcgtgggg

SEQ ID NO: 149068 - DNA, 120 bp, Artificial Sequence
  ENSG00000105443_26 (sequence is synthesized)
caggagggcctctggctggattcttagcagatggaagccgtgcaagggcaggaggcaggggcctgacgtgtttggattgaggttgcaggaggggcccctggctgcttcagggagaataat

SEQ ID NO: 149069 - DNA, 120 bp, Artificial Sequence
  ENSG00000105443_27 (sequence is synthesized)
ttggaggcgagcggggaggtgagaggaagctgtgcggtgcaggatggcgtggctgtggaggtggagaacgttgggccacgctaggagtcttgaaagaggagccaaaaggacttgctgaga

SEQ ID NO: 149070 - DNA, 120 bp, Artificial Sequence
  ENSG00000105443_28 (sequence is synthesized)
gccgccgcagctggtgaatgacggtgccatgactgaggtggtcgaaagggagtatttaaggggaaatcaggcattccgttttgaccaaattaagctggagatgcctgtggaacattccag

SEQ ID NO: 149071 - DNA, 120 bp, Artificial Sequence
  ENSG00000105443_29 (sequence is synthesized)
ccaggctgcatcacgtcacactgaccttcagcattgcccacagtccatcttcccccaggacctgaggattttgcgtccggctccctcctcgcccaggacccccaagctcccagcacgctt

SEQ ID NO: 149072 - DNA, 86 bp, Artificial Sequence
  ENSG00000105443_30 (sequence is synthesized)
tttgttttgttttgttttgtttttgagagggagtctcactttgtgccctagactggagtgcaatggcgcgcaagcgattcccctgc

SEQ ID NO: 149073 - DNA, 61 bp, Artificial Sequence
  ENSG00000105443_31 (sequence is synthesized)
cagcccacttcttttgggtggcaatggtttggatatcgtttgtcctcactaaaattcatgt

SEQ ID NO: 149074 - DNA, 120 bp, Artificial Sequence
  ENSG00000105443_32 (sequence is synthesized)
caatggtttggatatcgtttgtcctcactaaaattcatgttgagattcgagccccagtgtggcaggtgttgggatgtggggcctcataaggagctgtgtggtcttggaggtggagtcctc

SEQ ID NO: 149075 - DNA, 120 bp, Artificial Sequence
  ENSG00000105443_33 (sequence is synthesized)
atggatagattaatgcctgccttaaggggtgagtgagtgctcacccttgggaatttgggaatttggttttctctcccttgcttccttcagcaccatgtgatctctgtgcacacagctgca

SEQ ID NO: 149076 - DNA, 120 bp, Artificial Sequence
  ENSG00000105443_34 (sequence is synthesized)
tccttctgccctcccccagaagcagcagcagcctcagggatgagggaggtcctcagtgagtgcacctgcccagtcttgaaccttccagccatcagaatctgagccaaatcaacctcttcc

SEQ ID NO: 149077 - DNA, 120 bp, Artificial Sequence
  ENSG00000105443_35 (sequence is synthesized)
tttataaagacccagcctcaggtcttctgtcagagcaacacaaaatggactcagcacggatcaaattgtgtctcccccacccccacaaaaaactttatattaaaatcctaacccccagca

SEQ ID NO: 149078 - DNA, 120 bp, Artificial Sequence
  ENSG00000105443_36 (sequence is synthesized)
atacctacaccggctttttgtacgactgttggccctggagaacgatcctttggtggcgagggcggggaggacgaaagcgcccactgtggattggacagtgtcaaaaagaggggcggtccc

SEQ ID NO: 149079 - DNA, 120 bp, Artificial Sequence
  ENSG00000105443_37 (sequence is synthesized)
gctgaaaataaaatcaggcctgtgtgctgggcctggcctgtagtaagtacttcccaaccccttctcttgacccacaaatgttgatggagcccttctgtgccaggccctgagctgggctga

SEQ ID NO: 149080 - DNA, 120 bp, Artificial Sequence
  ENSG00000105443_38 (sequence is synthesized)
ggaggcagtgagaggcagctgacattgtcctttcgtgggagaagagttcactcaggcttctttccactgcgttaacccagcccgagggagccaaacccctggaatctattccccttggca

SEQ ID NO: 149081 - DNA, 120 bp, Artificial Sequence
  ENSG00000105443_39 (sequence is synthesized)
agaactcccagggttccaggcaggactgaccccgcactccgaggcatcaggcccagagcacttggctgatccaggtgccatccttcccgaaacaccacccacaggcagaaaagagccaaa

SEQ ID NO: 149082 - DNA, 120 bp, Artificial Sequence
  ENSG00000105443_40 (sequence is synthesized)
caggccaggaaacctgtcccagattctggcttccagctgtggagggaatagccagggctggtgcagatgagtcgggaaacccagcagagatggaggggggagtcttcgtcataacacgtg

SEQ ID NO: 149083 - DNA, 120 bp, Artificial Sequence
  ENSG00000105443_41 (sequence is synthesized)
gcactggcacattcaaggtcggttagcatggatcagacaggatcgtagcatgatgaggggttagcacaaggactagagtggttctcagccctggctgtacatgagatttgcctgggcaac

SEQ ID NO: 149084 - DNA, 120 bp, Artificial Sequence
  ENSG00000105443_42 (sequence is synthesized)
tcgaaaactccggtggctgggccatagactcctgaagtcaggctctcaggagcagaagggccatcagtcatcgtttaagctcctcgggtgctcccaatgcatagtcaaggttgagagcta

SEQ ID NO: 149085 - DNA, 120 bp, Artificial Sequence
  ENSG00000105443_43 (sequence is synthesized)
ctggcctggagccgtgcctggtaacagtaggtgccacctgcgtgttagatgtggtttataatggagacacggtgcacagctgctccagagagacacatctgggcagttacagtccagcac

SEQ ID NO: 149086 - DNA, 120 bp, Artificial Sequence
  ENSG00000105443_44 (sequence is synthesized)
agcagtggaggcttcccgcggcagcaggagagcccacaggaagctttcagctcagtgaagggagtcaaggtcaggcttcttggaaggaggttggacagggcagctttggcctctgagtct

SEQ ID NO: 149087 - DNA, 120 bp, Artificial Sequence
  ENSG00000105443_45 (sequence is synthesized)
gggcacaggggcccacccctgtaatttcagcactttgggaggacaaggcaggaggattgttagaggtcaggagtttgagaccaacctgggcaatataatgataccccccatctctacaaa

SEQ ID NO: 149088 - DNA, 85 bp, Artificial Sequence
  ENSG00000105443_46 (sequence is synthesized)
aaataaaaaaattagccaggcatggtgatgtgggaggattgtttgagctcaagtggtcgaggcttcagtgagtcatggttgcccc

SEQ ID NO: 149089 - DNA, 120 bp, Artificial Sequence
  ENSG00000105443_47 (sequence is synthesized)
gtctctataaaataaaacatgcaaatcactgtccagccaacaccccagtccagatccctgcattcgatccaagggaggcagactgctgggggaaattgagagtcctcgaggtgcccctgg

SEQ ID NO: 149090 - DNA, 120 bp, Artificial Sequence
  ENSG00000105443_48 (sequence is synthesized)
attggtgagactggatcatgtgaccatacctgaaacaactgctgaggccggaaggtcgggattcctcgtggaccagttcctaacacagggactgagagtggggacaggctcccaccagcc

SEQ ID NO: 149091 - DNA, 120 bp, Artificial Sequence
  ENSG00000105443_49 (sequence is synthesized)
ctctcaaggatcatgggagcttgagaaccgtgggtagaccatggctgtgcataggcactgggtggccatctgggagctgtggggaccgctgggcccttgtgggagcttaggagttgtggg

SEQ ID NO: 149092 - DNA, 120 bp, Artificial Sequence
  ENSG00000105443_50 (sequence is synthesized)
ggtcatttggaagcctagggtgcacaggactggacatcagatgattggaggccatctgtggacgtctgggaatcagggatttatagagatctggggtgcttgggaagcatctctggatgt

SEQ ID NO: 149093 - DNA, 120 bp, Artificial Sequence
  ENSG00000105443_51 (sequence is synthesized)
ctgggggatgtgggggctgtgtctggatacctggggagcatggggatcatttgagagaggtgacagtaggtagcatacatgtttgcggcatttctcccaactgtacaaaggtctggccta

SEQ ID NO: 149094 - DNA, 120 bp, Artificial Sequence
  ENSG00000105443_52 (sequence is synthesized)
agcagggttcccaagccagatattcctcccaagagtgtgttctgagcatcccccaccctgggggcaggcctgtgtgggagtccagcaggaaacttcaccctcggcagtgggcagctgtgg

SEQ ID NO: 149095 - DNA, 120 bp, Artificial Sequence
  ENSG00000105443_53 (sequence is synthesized)
agtgacaaaccttactcaagaaaaaaacagaaacaagcaaaacagaaacaaaaactagggaactgagtgtgtcctgcaccataaaagttcagggttatggcctccttcaggtatggctat

SEQ ID NO: 149096 - DNA, 120 bp, Artificial Sequence
  ENSG00000105443_54 (sequence is synthesized)
atccaggagctcaaatggtggtcagaaagtcgactttctttgcctcttgtatttgccactgtgtcagcattgctctctgcagacccgcttacctgataacaagcctcaaccaacccccag

SEQ ID NO: 149097 - DNA, 120 bp, Artificial Sequence
  ENSG00000105443_55 (sequence is synthesized)
ccctcccgaccccgctggtccctccgcaggaggacatttgtgggcctgggccctggactcagcttccgcacacacctgctgcctgaactgaggcaaatgattcgacctctctgaacctca

SEQ ID NO: 149098 - DNA, 120 bp, Artificial Sequence
  ENSG00000105443_56 (sequence is synthesized)
tcagtcgtagacttgtcgcgccgcttttgttgggcgctggacgggcttccggcggggcccgaaagccgggcgttccaggccattgtttgggctgagcctgtttccggtggcggcgggagg

SEQ ID NO: 149099 - DNA, 120 bp, Artificial Sequence
  ENSG00000105443_57 (sequence is synthesized)
ggcgggatggagtggtggaggcgaggccggggcggaaccattcccgctggaggggcgggcgagcccagcgcctgccggggccggggaggggcgcttgggttgcggggaggggagaaatct

SEQ ID NO: 149100 - DNA, 120 bp, Artificial Sequence
  ENSG00000105443_58 (sequence is synthesized)
tggggggcgggggccttcgatgtcccgccccaccttcccaactctcctgagctgtcatcagttcccccggctgtagtgacttttcatggacccagtagtccggataaccaggtccccagc

SEQ ID NO: 149101 - DNA, 120 bp, Artificial Sequence
  ENSG00000105443_59 (sequence is synthesized)
accattgcaaatccagcctggacgacagagcgagacagtctcaaaaaaacaaaacaaaacaaaaactgctcctgtgagcagtaactttcccatttcccagaggctcacgcctcagtttgg

SEQ ID NO: 149102 - DNA, 120 bp, Artificial Sequence
  ENSG00000105443_60 (sequence is synthesized)
ttctgagccccacctaaggctgcccagccccagggacatctctgaccaaagggcctctgttccctttgtgccagttagagggaccccttccttaaaagatggaaatacaggagtggagat

SEQ ID NO: 149103 - DNA, 120 bp, Artificial Sequence
  ENSG00000105443_61 (sequence is synthesized)
tggtgatggtggttgctactccatgcctaataaaagccattcttactgtcattgtttaaccctgggcccacaaggaagccagcagcaggtcattttgccacaggaaggtgtaggcccgag

SEQ ID NO: 149104 - DNA, 120 bp, Artificial Sequence
  ENSG00000105443_62 (sequence is synthesized)
tgagtctccaggctggagtccagagagtccaagagagtgccctgaggtcacacagccagtttgtgcaggagctgagatgggccctcacacccacctcagaccaagggctgggggttttgc

SEQ ID NO: 149105 - DNA, 120 bp, Artificial Sequence
  ENSG00000105443_63 (sequence is synthesized)
cttctgtcctgtgggggcctcctccagggcagaggcacttttaccatgtcaagggaggatgctcctggcctaggacagaccctagggggtaggctggggccctgtaccgaagcaaggggt

SEQ ID NO: 149106 - DNA, 120 bp, Artificial Sequence
  ENSG00000105443_64 (sequence is synthesized)
tttcaaggctgccacccggggctcatggcccttggcctctctgggagggaggagccccggccatccccaccctcgtggatgtaactggttttcttccctctctctccctcccctcctctc

SEQ ID NO: 149107 - DNA, 120 bp, Artificial Sequence
  ENSG00000105443_65 (sequence is synthesized)
tgcgtctttccctctctcctgtgtttgcctctctgtcctgcccctgcgcacccctccctgtgcccaccctgtttctgtcgcctgcggctcttgggggtgctccattctcccgccttccct

SEQ ID NO: 149108 - DNA, 120 bp, Artificial Sequence
  ENSG00000105443_66 (sequence is synthesized)
tctcctgcacctggtcctgcctgctttctcgctgtctgccccaggaggtaggtacacgacctgtctttgtctcccatcactagacgaggggagggggctgccctggcgccctggcgccct

SEQ ID NO: 149109 - DNA, 120 bp, Artificial Sequence
  ENSG00000105443_67 (sequence is synthesized)
ggcctcctgcccacaggaggagggggctgggggctcaggctcctgggctgggactgacagactcagaaaatgtggagccccaagctgggggtggacgattcctggagccccaacatgcct

SEQ ID NO: 149110 - DNA, 120 bp, Artificial Sequence
  ENSG00000105443_68 (sequence is synthesized)
ggccctgcttgtctgtctcccccaacgcagcggctttgtctaggccccaggagccccacctctaccgctcttgctctgcttctcacgcccctcccatctcccagaggccctgtccccctg

SEQ ID NO: 149111 - DNA, 120 bp, Artificial Sequence
  ENSG00000105447_0 (sequence is synthesized)
gtcagcagcgagagggttcgaagatggcggcgcgcaagggtcggcggcgcacgtgtgaaaccggggaacccatggaagccgagtccggcgacacaagttccgagggcccggcccaggtct

SEQ ID NO: 149112 - DNA, 120 bp, Artificial Sequence
  ENSG00000105447_1 (sequence is synthesized)
acctgcccggccgggggccgccgctacgcgaaggggaggagctggtcatggacgaggaggcctatgtgctctaccaccgagcgcagactggcgccccctgtctcagctttgacatagtcc

SEQ ID NO: 149113 - DNA, 120 bp, Artificial Sequence
  ENSG00000105447_2 (sequence is synthesized)
gggatcacctgggagacaaccggacagagcttcctcttacactttacttgtgtgctgggacccaggctgagagcgcccagagcaacagactgatgatgcttcggatgcacaatctgcatg

SEQ ID NO: 149114 - DNA, 120 bp, Artificial Sequence
  ENSG00000105447_3 (sequence is synthesized)
ggacaaagcccccaccctcagagggcagtgatgaagaagaagaggaggaagatgaagaggatgaagaagagcggaaacctcagctggagctggccatggtgccccactatggtggcatca

SEQ ID NO: 149115 - DNA, 120 bp, Artificial Sequence
  ENSG00000105447_4 (sequence is synthesized)
accgagttcgggtgtcatggctgggtgaagagcctgtggctggggtgtggtcagagaagggccaggtggaggtgtttgcgctgcggcggcttctgcaggtggtggaggagccccaggccc

SEQ ID NO: 149116 - DNA, 120 bp, Artificial Sequence
  ENSG00000105447_5 (sequence is synthesized)
tggcagccttcctccgggatgagcaggcccaaatgaagcccatcttctccttcgctggacacatgggcgagggctttgcccttgactggtccccccgggtgaccggtcgcctgctgaccg

SEQ ID NO: 149117 - DNA, 120 bp, Artificial Sequence
  ENSG00000105447_6 (sequence is synthesized)
gtgactgtcaaaagaacatccacctctggacacctacggacggcggctcctggcacgtggaccagcggccattcgtgggccacacacgctctgtggaggacctgcagtggtcaccgactg

SEQ ID NO: 149118 - DNA, 120 bp, Artificial Sequence
  ENSG00000105447_7 (sequence is synthesized)
agaacacggtgtttgcctcctgctcagctgacgcctccatccgcatctgggacatccgggcagcccccagcaaggcctgcatgctcaccacagccaccgcccatgatggggacgtcaatg

SEQ ID NO: 149119 - DNA, 120 bp, Artificial Sequence
  ENSG00000105447_8 (sequence is synthesized)
tcatcagctggagccgccgggagcccttcctgctcagtggcggggatgatggggccctcaagatctgggaccttcggcagttcaagtctggttccccagtggccaccttcaagcagcacg

SEQ ID NO: 149120 - DNA, 120 bp, Artificial Sequence
  ENSG00000105447_9 (sequence is synthesized)
tggcccccgtgacctccgtcgagtggcacccccaggacagcggggtctttgcagcctcgggtgcagaccaccagatcacacagtgggacctggcagtggagcgggaccctgaggcgggcg

SEQ ID NO: 149121 - DNA, 120 bp, Artificial Sequence
  ENSG00000105447_10 (sequence is synthesized)
acgtggaggccgaccccggactggccgacctcccgcagcagctgctgttcgtgcaccagggcgagaccgagctgaaggagctgcactggcacccgcagtgcccagggctcctggtcagca

SEQ ID NO: 149122 - DNA, 120 bp, Artificial Sequence
  ENSG00000105447_11 (sequence is synthesized)
cggcgctgtcaggcttcaccatcttccgcaccatcagcgtctgaggcgtcccactggctctgatcttgcttcctgcttggaaactgaagtcgaattgggctcccctggaaggggttcatt

SEQ ID NO: 149123 - DNA, 120 bp, Artificial Sequence
  ENSG00000105447_12 (sequence is synthesized)
caggtctgttgactgagactggccggcctgtgggctgccgtgatggattctgtttgacgtattgttctctagaaggcctggctctgatccagtgacccctctcaccaaagaactcggttt

SEQ ID NO: 149124 - DNA, 120 bp, Artificial Sequence
  ENSG00000105447_13 (sequence is synthesized)
aaccagggctctgtaagaccactcccacccagagacttgtgtggcctggtgtggcctgtgtgtcggattccttcctgtcagctgtgacccatttgacctgtgtccccagaacccagtttt

SEQ ID NO: 149125 - DNA, 120 bp, Artificial Sequence
  ENSG00000105447_14 (sequence is synthesized)
attacaggcgtgagccaccgcgtccggctcaggacccagttttggctgctggttcccagcaggggactcgggggatatacagtggctgcaccaaattggaggtgtgggttcctccaacac

SEQ ID NO: 149126 - DNA, 120 bp, Artificial Sequence
  ENSG00000105447_15 (sequence is synthesized)
caccaaattggaggtgtgggttcctccaacacaatttgcttctgcccgttgtcttcctgccagctgggtttggccaggatttctccgtgtgggggctacatgcgaccctctcccctcctc

SEQ ID NO: 149127 - DNA, 120 bp, Artificial Sequence
  ENSG00000105447_16 (sequence is synthesized)
cctgactttagaggctggtgctgtgtcgggaggaaggtcagggctcctgagcagcaataaaggaccaggaagaggcctgaggtgtatttgagactctggtcctttggccacagccctatg

SEQ ID NO: 149128 - DNA, 120 bp, Artificial Sequence
  ENSG00000105447_17 (sequence is synthesized)
aggaaacggggtgtggggggagtttgggggtggggaggaatttggcaccagctgcccccaggccgctaggctgggggaggccactgggagtccagtgcaacccaaccttccgcccactgg

SEQ ID NO: 149129 - DNA, 120 bp, Artificial Sequence
  ENSG00000105447_18 (sequence is synthesized)
gtgccgccgcgttctgccttctctaagtgtccttccatctggaactcactctggcttagtgaaaggggcctcatccctgacccccaccagcttatgaaggcttcatctcagggaactctg

SEQ ID NO: 149130 - DNA, 120 bp, Artificial Sequence
  ENSG00000105447_19 (sequence is synthesized)
gaccccccatttctccctccgtccatctcccctttatcacgtttctttctttcttctctgtgtccccctctttcagagtctcccgtcccccactgccagtctccctgccccctagtcgct

SEQ ID NO: 149131 - DNA, 120 bp, Artificial Sequence
  ENSG00000105447_20 (sequence is synthesized)
ccccctctgcggctctgagctagccccacccccggcccccctccatccagcctctgatccatctgtggactccgaggtcgggtgcccgtcacacggcccctgggaccaaggacagactac

SEQ ID NO: 149132 - DNA, 120 bp, Artificial Sequence
  ENSG00000105447_21 (sequence is synthesized)
agcccctcagcacccacagaggcttcccctcagccctagccgaggagcccccagcggagggcatgggggtgggccgccccaacaggtacgtgcctccatgcaaggcaccgctgagccatc

SEQ ID NO: 149133 - DNA, 120 bp, Artificial Sequence
  ENSG00000105447_22 (sequence is synthesized)
ccctcctgctctgctgcgtcgcccccatccacccctgccccagcatccctgtcctcagcttgtccccttcaagaaggccttgtcttcccatcagtgacaggctcagcgccaggagaatcc

SEQ ID NO: 149134 - DNA, 120 bp, Artificial Sequence
  ENSG00000105447_23 (sequence is synthesized)
acccccaggttcagtgcctccaactctcaccccatccccattttatgcattttctcactggcttccatcctttcagagaaaccctctcagtctgtctgtctctgtctctgtctctctccc

SEQ ID NO: 149135 - DNA, 120 bp, Artificial Sequence
  ENSG00000105447_24 (sequence is synthesized)
ccatctctgtctctcccatctctctctgcctctctctgtcttcacaatttcatctccccatgtcgccatttcttaaaacatttcttttctccttttcgttttcccaattgccctgtccgc

SEQ ID NO: 149136 - DNA, 120 bp, Artificial Sequence
  ENSG00000105447_25 (sequence is synthesized)
tccccccctctctctgggtctctgtccccctctgtctctgagtctctatcctctcaaggtctctgttcccctctctctgggtctctgtcctctctcaaggtctctgtccctttctctctg

SEQ ID NO: 149137 - DNA, 120 bp, Artificial Sequence
  ENSG00000105447_26 (sequence is synthesized)
ctgtcctctctcaaggtctctgtccctttctctctggatcaatgtccctttcctgctgccctctctgggtctctgtccccctctctctcagggtccctgtcctgcttggtccctgtactt

SEQ ID NO: 149138 - DNA, 120 bp, Artificial Sequence
  ENSG00000105447_27 (sequence is synthesized)
tttcttggggcaccctctcaacacccctcctcctgcctatctctgcatctctttgtctttctgtagtctctgctttccaacctgctgtccagcccccaccagtaggtggggagtggtggg

SEQ ID NO: 149139 - DNA, 120 bp, Artificial Sequence
  ENSG00000105447_28 (sequence is synthesized)
gaacacccctggtttcggaagagtgagagtgttgatttgggagggtgagggtggggcctgggggcggggcttcttggcctcagattagacagtgactttgacacgaagttgaagcacctt

SEQ ID NO: 149140 - DNA, 120 bp, Artificial Sequence
  ENSG00000105447_29 (sequence is synthesized)
aagccctgtatctcctttatatggaaacattaagctgctctcgcaggtcaggtggaggatccctttccctcccgccctgcttttgctaggggaggggggtgccctgagcctgagtcgcag

SEQ ID NO: 149141 - DNA, 120 bp, Artificial Sequence
  ENSG00000105447_30 (sequence is synthesized)
ccagcctgggagctgggccatgttggccgcagatggccccctggtgaaggttcccgttggctttgggaagtagacaacgggtctgcctcacggggctgaggtgggactggaggatttcga

SEQ ID NO: 149142 - DNA, 120 bp, Artificial Sequence
  ENSG00000105447_31 (sequence is synthesized)
gggcagaactctgggaaggaaagaaaggcttaggacccaaccagcattccccctggcactgcgggggcctggccagctcatggcgttccctgagcctgttccccaactgtgaaagggggt

SEQ ID NO: 149143 - DNA, 120 bp, Artificial Sequence
  ENSG00000105447_32 (sequence is synthesized)
gatgatcttcacctcccggcatcctgagcggccaaggtgagcagtggggtctgagagtccagtgggggctgtgggcatgtcgggagctcatcacgaggcctcgtacataccaggtgtgtt

SEQ ID NO: 149144 - DNA, 120 bp, Artificial Sequence
  ENSG00000105447_33 (sequence is synthesized)
tgaaaccagagtgctcttgagaagactgtggtttgtcactcgggccgtggctcccaggaggcctgggtgggaggctagcttttgccactcctctccccactggctgagagacctgcgaca

SEQ ID NO: 149145 - DNA, 120 bp, Artificial Sequence
  ENSG00000105447_34 (sequence is synthesized)
agggactaacctcagccccagttggcttttctgtgaaaagccaggtcccttcatcaaagggctttggtgagagatgggcaagtgggggtgagaggcccaggctggggcctggggagcaca

SEQ ID NO: 149146 - DNA, 120 bp, Artificial Sequence
  ENSG00000105447_35 (sequence is synthesized)
ggtcagtgtcagtgcccacctgcccccccagcccacgggggtggttcctgagggtggagtcagtgctgagtggggatccccaggctggggagggctgcaggtgtagatgctgcatcctga

SEQ ID NO: 149147 - DNA, 120 bp, Artificial Sequence
  ENSG00000105447_36 (sequence is synthesized)
tgttgacctccaggccgcccccttgggcaacgagcctatttcccctttttgggagaacagtctctaacatgcagggttgtcaggggtgagatagagtcaaggttggggtacactgtgggc

SEQ ID NO: 149148 - DNA, 120 bp, Artificial Sequence
  ENSG00000105447_37 (sequence is synthesized)
actggacacagccaggctggtcccctcacctcagccttgcctctgtcaagtgggcctaatgaaccctcgcgaatggccaggctgcctgcgtggttgtgggaagcaggtgcagggctttgg

SEQ ID NO: 149149 - DNA, 120 bp, Artificial Sequence
  ENSG00000105447_38 (sequence is synthesized)
gagacccagttggtgccaaacttgacattgtctcatggtcttctttccaaatggagtgtgccaggccctgccaagaagcccctgaggatccccaggttccagcacaaattatttaacccc

SEQ ID NO: 149150 - DNA, 120 bp, Artificial Sequence
  ENSG00000105447_39 (sequence is synthesized)
tggaatggtttgtcctgatccagccagttcctgggaagttccccaccacagggccaagcgtttggtaacgttgcagtgaaccctgaaggcaatgaggggtgcgggtccatgcccagccct

SEQ ID NO: 149151 - DNA, 120 bp, Artificial Sequence
  ENSG00000105447_40 (sequence is synthesized)
ttcctttggtccaccctgacaggctgctgcgattccctccatttcttttcttcctttattttttatttttaattatttatttattttttagagacagggttttgctgtcttccccaggct

SEQ ID NO: 149152 - DNA, 77 bp, Artificial Sequence
  ENSG00000105447_41 (sequence is synthesized)
ttattttttagagacagggttttgctgtcttccccaggctggttctcaaacccctggcctcacgcattcctcctgag

SEQ ID NO: 149153 - DNA, 120 bp, Artificial Sequence
  ENSG00000105447_42 (sequence is synthesized)
aggctggggtctaagagaagtgatttcataccggaggcggttgatccatgagggaggtggggactgagctcttactgtcccgtcttaactcgtaaaccccgccttccatccccaggcgcc

SEQ ID NO: 149154 - DNA, 120 bp, Artificial Sequence
  ENSG00000105464_0 (sequence is synthesized)
cccccgccatccccccaacagaacagggtcatgaaaagaggccgcccggcggggcccgcaggcgatgcgcggcgccggtggcccccgcggccctcggggccccgctaagatgctgctgct

SEQ ID NO: 149155 - DNA, 80 bp, Artificial Sequence
  ENSG00000105464_1 (sequence is synthesized)
gggccccgctaagatgctgctgctgctggcgctggcctgcgccagcccgttcccggaggaggcgccggggccgggcgggg

SEQ ID NO: 149156 - DNA, 80 bp, Artificial Sequence
  ENSG00000105464_2 (sequence is synthesized)
caacgtggcgctcgtgttctcggggcccgcgtacgcggccgaggcggcacgcctgggcccggccgtggcggcggcggtgc

SEQ ID NO: 149157 - DNA, 120 bp, Artificial Sequence
  ENSG00000105464_3 (sequence is synthesized)
caacggctcggacccgcgcagcctcgtgctgcagctctgcgacctgctgtcggggttgcgcgtgcacggcgtggtcttcgaagacgactcgcgcgcgcccgccgtcgcgcccatcctcga

SEQ ID NO: 149158 - DNA, 120 bp, Artificial Sequence
  ENSG00000105464_4 (sequence is synthesized)
cttcctgtcggcgcagacctcgctgcccatcgtggccgtgcacggcggcgccgcgctcgtgctcacgcccaaggagaagggctccaccttcctgcagctgggctcttccaccgagcaaca

SEQ ID NO: 149159 - DNA, 120 bp, Artificial Sequence
  ENSG00000105464_5 (sequence is synthesized)
gcttcaggtcatctttgaggtgctggaggagtatgactggacgtcctttgtagccgtgaccactcgtgcccctggccaccgggccttcctgtcctacattgaggtgctgactgacggtag

SEQ ID NO: 149160 - DNA, 120 bp, Artificial Sequence
  ENSG00000105464_6 (sequence is synthesized)
tctggtgggctgggagcaccgcggagcgctgacgctggaccctggggcgggcgaggccgtgctcagtgcccagctccgcagtgtcagcgcgcagatccgcctgctcttctgcgcccgaga

SEQ ID NO: 149161 - DNA, 120 bp, Artificial Sequence
  ENSG00000105464_7 (sequence is synthesized)
ggaggccgagcccgtgttccgcgcagctgaggaggctggcctcactggatctggctacgtctggttcatggtggggccccagctggctggaggcgggggctctggggcccctggtgagcc

SEQ ID NO: 149162 - DNA, 120 bp, Artificial Sequence
  ENSG00000105464_8 (sequence is synthesized)
ccctcttctgccaggaggcgcccccctgcctgccgggctgtttgcagtgcgctcggctggctggcgggatgacctggctcggcgagtggcagctggcgtggccgtagtggccagaggtgc

SEQ ID NO: 149163 - DNA, 120 bp, Artificial Sequence
  ENSG00000105464_9 (sequence is synthesized)
ccaggccctgctgcgtgattatggtttccttcctgagctcggccacgactgtcgcgcccagaaccgcacccaccgcggcgagagtctgcataggtacttcatgaacatcacgtgggataa

SEQ ID NO: 149164 - DNA, 120 bp, Artificial Sequence
  ENSG00000105464_10 (sequence is synthesized)
ccgggattactccttcaatgaggacggcttcctagtgaacccctccctggtggtcatctccctcaccagagacaggacgtgggaggtggtgggcagctgggagcagcagacgctccgcct

SEQ ID NO: 149165 - DNA, 120 bp, Artificial Sequence
  ENSG00000105464_11 (sequence is synthesized)
caagtacccgctgtggtcccgctatggtcgcttcctgcagccagtggacgacacgcagcacctcacggtggccacgctggaggaaaggccgtttgtcatcgtggagcctgcagaccctat

SEQ ID NO: 149166 - DNA, 120 bp, Artificial Sequence
  ENSG00000105464_12 (sequence is synthesized)
cagcggcacctgcatccgagactccgtcccctgccggagccagctcaaccgaacccacagccctccaccggatgccccccgcccggaaaagcgctgctgcaagggtttctgcatcgacat

SEQ ID NO: 149167 - DNA, 120 bp, Artificial Sequence
  ENSG00000105464_13 (sequence is synthesized)
tctgaagcggctggcgcataccatcggcttcagctacgacctctacctggtcaccaatggcaagcacggaaagaagatcgatggcgtctggaacggcatgatcggggaggtgttctacca

SEQ ID NO: 149168 - DNA, 120 bp, Artificial Sequence
  ENSG00000105464_14 (sequence is synthesized)
gcgcgcagacatggccatcggctccctcaccatcaacgaggagcgctccgagatcgtggacttctccgtccccttcgtggagaccggcatcagcgtcatggtggcgcgcagcaatggcac

SEQ ID NO: 149169 - DNA, 120 bp, Artificial Sequence
  ENSG00000105464_15 (sequence is synthesized)
ggtgtccccctcggccttcctcgagccctacagccccgccgtgtgggtgatgatgttcgtcatgtgcctcactgtggtcgccgtcactgttttcatcttcgagtacctcagtcctgttgg

SEQ ID NO: 149170 - DNA, 120 bp, Artificial Sequence
  ENSG00000105464_16 (sequence is synthesized)
ttacaaccgcagcctggccacgggcaagcgccctggcggttcaaccttcaccattgggaaatccatctggctgctctgggccctggtgttcaataattcggtgcccgtggagaacccccg

SEQ ID NO: 149171 - DNA, 120 bp, Artificial Sequence
  ENSG00000105464_17 (sequence is synthesized)
gggaaccaccagcaaaatcatggtgctggtgtgggccttcttcgccgtcatcttcctcgccagctacacagccaacctggccgccttcatgatccaggaggagtacgtggatactgtgtc

SEQ ID NO: 149172 - DNA, 120 bp, Artificial Sequence
  ENSG00000105464_18 (sequence is synthesized)
tgggctcagtgaccgcaagttccagaggccccaggagcagtacccgcccctgaagtttgggaccgtgcccaacggctccacggagaagaacatccgcagcaactatcccgacatgcacag

SEQ ID NO: 149173 - DNA, 120 bp, Artificial Sequence
  ENSG00000105464_19 (sequence is synthesized)
ctacatggtgcgctacaaccagccccgcgtagaggaagcgctcactcagctcaaggcagggaagctggacgccttcatctacgatgctgcagtgctcaattacatggcccgcaaggacga

SEQ ID NO: 149174 - DNA, 120 bp, Artificial Sequence
  ENSG00000105464_20 (sequence is synthesized)
gggctgcaagcttgtcaccatcggctccggcaaggtcttcgccacgacaggctatggcatcgccctgcacaagggctcccgctggaagcggcccatcgacctggcgttgctgcagttcct

SEQ ID NO: 149175 - DNA, 120 bp, Artificial Sequence
  ENSG00000105464_21 (sequence is synthesized)
acaatgacaaaatcgaggtgatgagcagcaagctggacatcgacaacatggcgggcgtcttctacatgctcctggtggccatgggcctgtccctgctggtcttcgcctgggagcacctgg

SEQ ID NO: 149176 - DNA, 120 bp, Artificial Sequence
  ENSG00000105464_22 (sequence is synthesized)
tgtactggcgcctgcggcactgcctggggcccacccaccgcatggacttcctgctggccttctccaggggcatgtacagctgctgcagcgctgaggccgccccaccgcccgccaagcccc

SEQ ID NO: 149177 - DNA, 80 bp, Artificial Sequence
  ENSG00000105464_23 (sequence is synthesized)
gccgcggccggctcccgggcccgcacctttcgtgccccgcgagcgcgcctcagtggaccgctggcgccggaccaagggcg

SEQ ID NO: 149178 - DNA, 80 bp, Artificial Sequence
  ENSG00000105464_24 (sequence is synthesized)
cggggccgccggggggcgcgggcctggccgacggcttccaccgctactacggccccatcgagccgcagggcctaggcctc

SEQ ID NO: 149179 - DNA, 120 bp, Artificial Sequence
  ENSG00000105464_25 (sequence is synthesized)
ggcgcccgctgtccccgccggccgctcagcccccgcagaagccgccgccctcctatttcgccatcgtacgcgacaaggagccagccgagccccccgccggcgccttccccggcttcccgt

SEQ ID NO: 149180 - DNA, 80 bp, Artificial Sequence
  ENSG00000105464_26 (sequence is synthesized)
gccgccactctgccgcttggccttcgaggacgagagcccgccggcgcccgcgcggtggccgcgctcggaccccgagagcc

SEQ ID NO: 149181 - DNA, 80 bp, Artificial Sequence
  ENSG00000105464_27 (sequence is synthesized)
caggcggaggagccccggccgctccgcccccgtgccgcgccgcgccgcccccgtgcccttacctcgatctcgagccgtcg

SEQ ID NO: 149182 - DNA, 120 bp, Artificial Sequence
  ENSG00000105464_28 (sequence is synthesized)
agccgtcgccgtcggactcggaggactcggagagcctgggcggcgcgtcgctgggcggcctggagccctggtggttcgccgacttcccttacccgtatgccgagcgcctcgggccgccgc

SEQ ID NO: 149183 - DNA, 120 bp, Artificial Sequence
  ENSG00000105464_29 (sequence is synthesized)
ccggccgctactggtcggtcgacaagctcgggggctggcgcgccgggagctgggactacctgcccccgcgcagcggtccggccgcctggcactgtcggcactgcgccagcctggagctgc

SEQ ID NO: 149184 - DNA, 120 bp, Artificial Sequence
  ENSG00000105464_30 (sequence is synthesized)
cctggcactgtcggcactgcgccagcctggagctgctgccgccgccgcgccatctcagctgctcgcacgatggcctggacggcggctggtgggcgccaccgcctccaccctgggccgccg

SEQ ID NO: 149185 - DNA, 80 bp, Artificial Sequence
  ENSG00000105464_31 (sequence is synthesized)
accaccacaggcaccggcgcgccgctgggggctgggacctcccgccgcccgcgcccacctcgcgctcgctcgaggacctc

SEQ ID NO: 149186 - DNA, 120 bp, Artificial Sequence
  ENSG00000105464_32 (sequence is synthesized)
ctcgctcgaggacctcagctcgtgccctcgcgccgcccctgcgcgcaggcttaccgggccctcccgccacgctcgcaggtgtccgcacgccgcgcactgggggccgccgctgcccacagc

SEQ ID NO: 149187 - DNA, 120 bp, Artificial Sequence
  ENSG00000105464_33 (sequence is synthesized)
cagcttcccaccggagacaccggggcggggacctgggcacccgcaggggctcggcgcacttctctagcctcgagtccgaggtatgacgcggccccgggggccccaccgcccccttggtca

SEQ ID NO: 149188 - DNA, 120 bp, Artificial Sequence
  ENSG00000105464_34 (sequence is synthesized)
gcgcaggccacggcccgagggggcgcccgcagtggacaggacccgcgtgggttgggaaggaaagcagtggaactggccggaccccgcctggagcagcgtcctgcgccccctggttctgga

SEQ ID NO: 149189 - DNA, 120 bp, Artificial Sequence
  ENSG00000105464_35 (sequence is synthesized)
ggaaccgcaagccggagaggatttggtccctcaactatcacccagcctgagaacgagggggcgggggccttggagcccaccggacttttttttaaacccgacaagggctttttaacgtca

SEQ ID NO: 149190 - DNA, 120 bp, Artificial Sequence
  ENSG00000105464_36 (sequence is synthesized)
gtcaccagatggggcgggaggtggggggttcacgccactcccgcgtcccacctccacgcccggggccgtggcccccacatcactgtgcagctccccggccccagccgcgcctccggggaa

SEQ ID NO: 149191 - DNA, 120 bp, Artificial Sequence
  ENSG00000105464_37 (sequence is synthesized)
gtttttaacctttcatccattgggactcaaaactgtgagacgcgttcgccaaactgtgaccccagaccttggccccgccacacagaaacccctgacccagactgtgacatccgactccta

SEQ ID NO: 149192 - DNA, 120 bp, Artificial Sequence
  ENSG00000105464_38 (sequence is synthesized)
aaatggtcatccgactccagactgtgacccctgaccccaaactgtgacccgaaccccagactgtgccccgaccagactgtgacccttgacatcaaaccgtgacaccccctcctcctcttc

SEQ ID NO: 149193 - DNA, 120 bp, Artificial Sequence
  ENSG00000105464_39 (sequence is synthesized)
caccctcggtcgcttttccctactctgacctaggacacgtccccaacggaagccccgccttcccttgcaccgcgatgaacccaacctccctgaagccaaaacttcccaccctgccgcacc

SEQ ID NO: 149194 - DNA, 120 bp, Artificial Sequence
  ENSG00000105464_40 (sequence is synthesized)
tccggaccaccccacttgccaccaagcacatcctctccaaatccaacccttatttgcgacccttcagtgatgacccagcagacctccaaaaagcctcctctgcccagatctccagccggg

SEQ ID NO: 149195 - DNA, 120 bp, Artificial Sequence
  ENSG00000105464_41 (sequence is synthesized)
tctggggctgggttgcggaggggagggtctgggagtccacacttctccaccaacttcccttcccactctcttattccacattgcagtgtttggaataaaccatgtttttatgcctcctca

SEQ ID NO: 149196 - DNA, 120 bp, Artificial Sequence
  ENSG00000105467_0 (sequence is synthesized)
gaggtggcgctagggaccaggaggggtgggggtggcgaaaggaagggcgggccctcaggtgacgcagattggccctccagagaaggggcggccccttctcaggtgccgtcacccccaaac

SEQ ID NO: 149197 - DNA, 120 bp, Artificial Sequence
  ENSG00000105467_1 (sequence is synthesized)
ctcagcactgccattccaggtccttaaaggggagaccgcgattctaagaagcagccaagcccagggctggcctgaagcccccggacggcagtgcccagcaggcagcgcccagcaccctgg

SEQ ID NO: 149198 - DNA, 120 bp, Artificial Sequence
  ENSG00000105467_2 (sequence is synthesized)
ctcccacctcccagtggccccaaaggaaaacagctgccatgcacatccccaaaagcctccaggagctggccaacagcgaagccgtgcagtttctgagaaggcccaagaccatcacgcggg

SEQ ID NO: 149199 - DNA, 120 bp, Artificial Sequence
  ENSG00000105467_3 (sequence is synthesized)
tcttcgaaggggtcttctccctgatcgtcttctcctccctgctgaccgacggctaccagaacaagatggagtctccgcagctccactgcattctcaacagcaacagcgtggcctgcagct

SEQ ID NO: 149200 - DNA, 120 bp, Artificial Sequence
  ENSG00000105467_4 (sequence is synthesized)
cacccgcttcaagacagccttccagctcctggacttcatcctggctgttctctgggcagttgtctggttcatgggtttctgcttcctggccaaccaatggcagcattcgccgcccaaaga

SEQ ID NO: 149201 - DNA, 120 bp, Artificial Sequence
  ENSG00000105467_5 (sequence is synthesized)
gttcctcctggggagcagcagtgcccaggcagccatcgccttcaccttcttctccatccttgtctggatattccaggcctacctggcattccaggacctccgaaatgatgctccagtccc

SEQ ID NO: 149202 - DNA, 120 bp, Artificial Sequence
  ENSG00000105467_6 (sequence is synthesized)
ttacaagcgcttcctggatgagggtggcatggtgctgaccaccctccccttgccctctgccaacagccctgtgaacatgcccaccactggccccaacagcctgagttatgctagctctgc

SEQ ID NO: 149203 - DNA, 120 bp, Artificial Sequence
  ENSG00000105467_7 (sequence is synthesized)
cctgtccccctgtctgaccgctccaaagtccccccggcttgctatgatgcctgacaactaaatatccttatccaaatcaataaagagagaatcctccctccagaagggtttctaaaaaca

SEQ ID NO: 149204 - DNA, 120 bp, Artificial Sequence
  ENSG00000105467_8 (sequence is synthesized)
ggaagagtgagggaagcggagactctgcagggcctccaaggccaggcttcagggctgggactcagtcctgaggcactggggagccatgaggggctgtggcagggaggggcagggtcttct

SEQ ID NO: 149205 - DNA, 120 bp, Artificial Sequence
  ENSG00000105467_9 (sequence is synthesized)
ccagcccagtccctctcctgacctgcccagcccaagtcagccttcagcacgcgcttttctgcccacagatattccaggcctacctggcattccaggacctccgaaatgatgctccagtcc

SEQ ID NO: 149206 - DNA, 120 bp, Artificial Sequence
  ENSG00000105472_0 (sequence is synthesized)
agagacgaggagaggaacaggaagagagaagctgggagaatcgggaacctgggggctagtgacctgcacacagggcaggggcactcggcagttcccagaggccacccctcccaccccaga

SEQ ID NO: 149207 - DNA, 120 bp, Artificial Sequence
  ENSG00000105472_1 (sequence is synthesized)
catccagacatctggaactttgggtgccaagagtccagcttaatgcaggcagcctggcttttgggggctttggtggtcccccagctcttgggctttggccatggggctcggggagcagag

SEQ ID NO: 149208 - DNA, 120 bp, Artificial Sequence
  ENSG00000105472_2 (sequence is synthesized)
agggagtgggagggaggctggggaggtgcccaggaggaggagcgggagagggaggccctgatgctgaagcatctgcaggaagccctaggactgcctgctgggaggggggatgagaatcct

SEQ ID NO: 149209 - DNA, 120 bp, Artificial Sequence
  ENSG00000105472_3 (sequence is synthesized)
gccggaactgttgagggaaaagaggactgggagatggaggaggaccagggggaggaagaggaggaggaagcaacgccaaccccatcctccggccccagcccctctcccacccctgaggac

SEQ ID NO: 149210 - DNA, 120 bp, Artificial Sequence
  ENSG00000105472_4 (sequence is synthesized)
atcgtcacttacatcctgggccgcctggccggcctggacgcaggcctgcaccagctgcacgtccgtctgcacgcgttggacacccgcgtggtcgagctgacccaggggctgcggcagctg

SEQ ID NO: 149211 - DNA, 120 bp, Artificial Sequence
  ENSG00000105472_5 (sequence is synthesized)
gtcgcgccgagcgcgagcacggccgcttggagggctgcctgaaggggctgcgcctgggccacaagtgcttcctgctctcgcgcgacttcgaagctcaggcggcggcgcaggcgcggtgca

SEQ ID NO: 149212 - DNA, 120 bp, Artificial Sequence
  ENSG00000105472_6 (sequence is synthesized)
cggcgcggggcgggagcctggcgcagccggcagaccgccagcagatggaggcgctcactcggtacctgcgcgcggcgctcgctccctacaactggcccgtgtggctgggcgtgcacgatc

SEQ ID NO: 149213 - DNA, 120 bp, Artificial Sequence
  ENSG00000105472_7 (sequence is synthesized)
ggcgcgccgagggcctctacctcttcgaaaacggccagcgcgtgtccttcttcgcctggcatcgctcaccccgccccgagctcggcgcccagcccagcgcctcgccgcatccgctcagcc

SEQ ID NO: 149214 - DNA, 120 bp, Artificial Sequence
  ENSG00000105472_8 (sequence is synthesized)
cggaccagcccaacggtggcacgctcgagaactgcgtggcgcaggcctctgacgacggctcctggtgggaccacgactgccagcggcgtctctactacgtctgcgagttccccttctagc

SEQ ID NO: 149215 - DNA, 120 bp, Artificial Sequence
  ENSG00000105472_9 (sequence is synthesized)
ggggccggtaccccgcctccctgcccatcccaccacccggcctttccctgcgccgtgcccaccctcctccggaatctcccttcccttcctggccacgaatggcagcgtcctccccgaccc

SEQ ID NO: 149216 - DNA, 120 bp, Artificial Sequence
  ENSG00000105472_10 (sequence is synthesized)
ccagtctgggcgcttctgggagggctcttgcggtgccggcactcctccttgttagtgtctttccttgaaggggcgggcaccaggctaggtccggtgccaataaatccttgtggaatctga

SEQ ID NO: 149217 - DNA, 120 bp, Artificial Sequence
  ENSG00000105479_0 (sequence is synthesized)
cccagaactccctgtaggaattgccaaggggagaaggaaggaagggtgtttctacagagatgacagaatgtggctagagtaggctttctcaaccttggtactgttgactcttggggtggg

SEQ ID NO: 149218 - DNA, 120 bp, Artificial Sequence
  ENSG00000105479_1 (sequence is synthesized)
ataattctttgttgtgggggcagtcctgtgtgtcgtaggatgccaagcagtgtccatggcttctactcactggataccagtagccccctcccttctccacaagtcatgacaatgacaaat

SEQ ID NO: 149219 - DNA, 73 bp, Artificial Sequence
  ENSG00000105479_2 (sequence is synthesized)
tagccccctcccttctccacaagtcatgacaatgacaaatgtctctaggctgaaggaggatcacttgagccca

SEQ ID NO: 149220 - DNA, 70 bp, Artificial Sequence
  ENSG00000105479_3 (sequence is synthesized)
cacagtgagacctcatctctacaaaaataaaataaaattagccaggtgtgatggcgtgcatgcgaggtgg

SEQ ID NO: 149221 - DNA, 120 bp, Artificial Sequence
  ENSG00000105479_4 (sequence is synthesized)
agattgtgccactgcgctagagcctgggggacagagcgagaccctgtctagaaaaaaataagtctccagacattgccaaatgtttttggaaggcagaatcacccgctgattgaaaactac

SEQ ID NO: 149222 - DNA, 120 bp, Artificial Sequence
  ENSG00000105479_5 (sequence is synthesized)
tgggcctttggagatggggagcatacgggcaagactggagagtggattgggagctgagtaggctgcagcgacaatgcaaagtgatggaaggggagaggcgggcctacagcaaggaagtcc

SEQ ID NO: 149223 - DNA, 120 bp, Artificial Sequence
  ENSG00000105479_6 (sequence is synthesized)
accagcgcatcaacaagcaacttgaggagatccggcgcttggaggaggtacggggcgatctccaggtgcagatcagcgcagcccagaaccaggtcaagcggcttcgggacagtcagcggc

SEQ ID NO: 149224 - DNA, 120 bp, Artificial Sequence
  ENSG00000105479_7 (sequence is synthesized)
tggagaacatggaccgcctgctgaagggccgggcccaggtgcaggcggagatcgaggagctgcaggagcagaccagggccctggacaagcagatccaggagtgggagacgcggatcttta

SEQ ID NO: 149225 - DNA, 120 bp, Artificial Sequence
  ENSG00000105479_8 (sequence is synthesized)
cccacagtaagaatgtcaggtccccgggattcatcctggatcagaaggtcaagatcaggcgaaggatcaggatcctagaaaaccagttggacagggtcacctgtcactttgacaaccagc

SEQ ID NO: 149226 - DNA, 120 bp, Artificial Sequence
  ENSG00000105479_9 (sequence is synthesized)
tggtacggaatgcggccctgcgggaggagctggatctgctgcggatcgacaggaaccgctatctgaacgtggaccgcaagctgaagaaggagatccaccacctgcatcacctggtcagca

SEQ ID NO: 149227 - DNA, 120 bp, Artificial Sequence
  ENSG00000105479_10 (sequence is synthesized)
cccttatcctctcctccacctctgcctacgccgtcagggaggaggcgaaggccaagatgggcttgctgcgggagcgcgcggagaaagaggaggcccagagcgagatggaggcgcaggtcc

SEQ ID NO: 149228 - DNA, 120 bp, Artificial Sequence
  ENSG00000105479_11 (sequence is synthesized)
tgcagcggcagatcttgcacctggagcagctgcaccacttcctcaagctcaagaacaacgaccggcagccggatcccgatgtcctggagaagcgtgaaaagcaggccggggaggtggccg

SEQ ID NO: 149229 - DNA, 120 bp, Artificial Sequence
  ENSG00000105479_12 (sequence is synthesized)
agggcgtctggaagacctcccaggagaggctggtgctttgctacgaggacgccctgaataaactgtcccagctgatgggggagagtgaccctgacctgttggtgcagaagtatctggaga

SEQ ID NO: 149230 - DNA, 120 bp, Artificial Sequence
  ENSG00000105479_13 (sequence is synthesized)
ttggtgagcgcacgtgccagcaaggatgaccagcatttgctgcaggagcagcagcagaaggtgttgcagcagcgcatggacaaggtgcactcggaggctgagcgccttgaggcccgcttc

SEQ ID NO: 149231 - DNA, 120 bp, Artificial Sequence
  ENSG00000105479_14 (sequence is synthesized)
caggatgtgcggggacagctggagaagctcaaggctgatatccagctcctcttcaccaaggcccattgcgacagcagcatgatcgatgacctccttggggtcaagaccagcatgggagac

SEQ ID NO: 149232 - DNA, 120 bp, Artificial Sequence
  ENSG00000105479_15 (sequence is synthesized)
cgggacatgggcctcttcctgagcctcattgagaagcggctggtggagctcctgacagtgcaggccttcctacatgcccagagcttcacctccctggccgacgctgccctcctagtgctg

SEQ ID NO: 149233 - DNA, 120 bp, Artificial Sequence
  ENSG00000105479_16 (sequence is synthesized)
ggccagagcctggaggaccttccgaagaagatggccccacttcagccccctgacactctagaagaccccccgggttttgaggccagcgatgactaccccatgagcagggaggagctgctg

SEQ ID NO: 149234 - DNA, 120 bp, Artificial Sequence
  ENSG00000105479_17 (sequence is synthesized)
agccaagtggagaagctggtggagctccaggagcaggcggaggcgcagcgccagaaggacctggccgccgccgccgcgaagctggacggcaccctgagcgtggacctggccagcacccag

SEQ ID NO: 149235 - DNA, 120 bp, Artificial Sequence
  ENSG00000105479_18 (sequence is synthesized)
agggccggctccagtaccgtcctggtgcccaccaggcacccccatgccatccccgggtccattttgagccacaagactagcagagaccgtggctctcttggccacgtcacttttggcggc

SEQ ID NO: 149236 - DNA, 120 bp, Artificial Sequence
  ENSG00000105479_19 (sequence is synthesized)
ctcagctccagcactgggcatttgcccagccacatcacgcacggtgaccccaacactggccacgtgaccttcggctccaccagtgcctcgagtgggggccacgtgaccttcagacccgtc

SEQ ID NO: 149237 - DNA, 120 bp, Artificial Sequence
  ENSG00000105479_20 (sequence is synthesized)
agcgccagcagctacctgggctccactggatacgtggggtccagcaggggcggagaaaacacagagggtggtgtggagagcggaggcacagcgtctgattcgagcggaggcctcgggtcc

SEQ ID NO: 149238 - DNA, 120 bp, Artificial Sequence
  ENSG00000105479_21 (sequence is synthesized)
agcagagaccacgtctccagcaccggccctgcctccagcactggcccgggctcctccaccagcaaagactcccggggctaacacgaggggcacgcagcccccaccctgccctggctctct

SEQ ID NO: 149239 - DNA, 120 bp, Artificial Sequence
  ENSG00000105479_22 (sequence is synthesized)
gtggggtctttttttgtgtctctacttcccctgtttgccttgtgggtctctgtctttttctcccagtggcaggcctctgtctttttgccccttcaactgttttcatctgcccttcatcac

SEQ ID NO: 149240 - DNA, 120 bp, Artificial Sequence
  ENSG00000105479_23 (sequence is synthesized)
cgcctcacctgtgtctcccggttcctttctctctgctcctgacactgcttttccctctgactcctgatctcctgttctctgggcttcctggtcagtgtctgtccgtcttgtctccatatc

SEQ ID NO: 149241 - DNA, 120 bp, Artificial Sequence
  ENSG00000105479_24 (sequence is synthesized)
tgccccttccctgtctgctgagccctggccccctgtggatcccccacctcctgtttccggctctctctcctcatctccatctcccaggctctccacgcatcctgtgtccctgtctctgta

SEQ ID NO: 149242 - DNA, 120 bp, Artificial Sequence
  ENSG00000105479_25 (sequence is synthesized)
gctccttactccccaagagccccccagtgctgacaggtgtgggaaaagtcagggcgaagacgccaggttcagcatgggaaaatgggactgtggaaataaagtatatgtgtggagagctgg

SEQ ID NO: 149243 - DNA, 120 bp, Artificial Sequence
  ENSG00000105479_26 (sequence is synthesized)
gttgagcgctccttctccgcgcaactcccggcttcgacaccgccttccttcctatgaatccttaatttaacgtggtcacagtcagcttaagaccggcacctctcgggctccgtcttgtag

SEQ ID NO: 149244 - DNA, 120 bp, Artificial Sequence
  ENSG00000105479_27 (sequence is synthesized)
gacctcggcctggcttcgagggcttccatacaggtcaccgcaggctctttcaactcccgccgcttccaggcccgcgtaaccagaccacaacactgaacttggagcaccaagaacaggtca

SEQ ID NO: 149245 - DNA, 120 bp, Artificial Sequence
  ENSG00000105479_28 (sequence is synthesized)
ctctgtttctctccttacccatatctaccgttctccccgcctgcatctccccatctcccttgctattgccgagtctctggctttccctctctgccttgctgtgtatttctgtgtcccacc

SEQ ID NO: 149246 - DNA, 120 bp, Artificial Sequence
  ENSG00000105479_29 (sequence is synthesized)
tgccgtatcttcccacacctctttgtctctgtgactcctctctgttcgtctctctgccttggtttctgtgtggccttcctcatcttcactttctttggccttctgtatgcctctctgtct

SEQ ID NO: 149247 - DNA, 120 bp, Artificial Sequence
  ENSG00000105479_30 (sequence is synthesized)
ctgttctctctgtctctgtttctctgtctccctctctctgggccccgccttgcccaactctcccagtcgaggagcgcaactttgctgagttcaacttcatcaacgagcagaacttggagc

SEQ ID NO: 149248 - DNA, 120 bp, Artificial Sequence
  ENSG00000105479_31 (sequence is synthesized)
caccctgtttggccaggatgcctttgggacgcttggcagggagcgcccgctccgaggagggaagcgaggcatttctggagggaatggtggattgggagctgagtaggctgcagcgacaat

SEQ ID NO: 149249 - DNA, 120 bp, Artificial Sequence
  ENSG00000105479_32 (sequence is synthesized)
actgaacttggagcaccaagaacaggagccccaccctgtttggccaggatgcctttgggacgcttggcagggagcgcccgctccgaggagggaagcgaggcatttctggagggaatgggt

SEQ ID NO: 149250 - DNA, 120 bp, Artificial Sequence
  ENSG00000105479_33 (sequence is synthesized)
aattcattcattctttatatcattcacccattcttttccagcccccagctttcccaagttccaggtcctgtagggagggagggagagtgtctgtccaggagcgccctctggtgggaacag

SEQ ID NO: 149251 - DNA, 120 bp, Artificial Sequence
  ENSG00000105483_0 (sequence is synthesized)
tgaccaagaggaacagaacacagagcagcctggcagtgtccaagcaacaagcctccgctcctccttcctgcaccctggggctcctgaaactcacatgggtaaaaaagatacagtaaagac

SEQ ID NO: 149252 - DNA, 120 bp, Artificial Sequence
  ENSG00000105483_1 (sequence is synthesized)
ataaataccacatttgacaaatggaaaaaaaggagtgtccagaaaagagtagcagcagtgaggaagagctgccgagacgggtatacagggagctaccctgtgtttctgagaccctttgtg

SEQ ID NO: 149253 - DNA, 120 bp, Artificial Sequence
  ENSG00000105483_2 (sequence is synthesized)
acatctcacattttttccaagaagatgatgagacagaggcagagccattattgttccgtgctgttcctgagtgtcaactatctgggggggacattcccagtgtatcagaagagcaggaat

SEQ ID NO: 149254 - DNA, 120 bp, Artificial Sequence
  ENSG00000105483_3 (sequence is synthesized)
cttcagagggacaagattcaggagacatttgctcagaagagaatcaaatagtttcctcttatgcttctaaagtctgttttgagatcgaagaagattataaaaatcgtcagtttctggggc

SEQ ID NO: 149255 - DNA, 120 bp, Artificial Sequence
  ENSG00000105483_4 (sequence is synthesized)
ctgaaggaaatgtggatgttgagttgattgataagagcacaaacagatacagcgtttggttccccactgctggctggtatctgtggtcagccacaggcctcggcttcctggtaagggatg

SEQ ID NO: 149256 - DNA, 120 bp, Artificial Sequence
  ENSG00000105483_5 (sequence is synthesized)
aggtcacagtgacgattgcgtttggttcctggagtcagcacctggccctggacctgcagcaccatgaacagtggctggtgggcggccccttgtttgatgtcactgcagagccagaggagg

SEQ ID NO: 149257 - DNA, 120 bp, Artificial Sequence
  ENSG00000105483_6 (sequence is synthesized)
ctgtcgccgaaatccacctcccccacttcatctccctccaagcaggtgaggtggacgtctcctggtttctcgttgcccattttaagaatgaagggatggtcctggagcatccagcccggg

SEQ ID NO: 149258 - DNA, 120 bp, Artificial Sequence
  ENSG00000105483_7 (sequence is synthesized)
tggagcctttctatgctgtcctggaaagccccagcttctctctgatgggcatcctgctgcggatcgccagtgggactcgcctctccatccccatcacttccaacacattgatctattatc

SEQ ID NO: 149259 - DNA, 120 bp, Artificial Sequence
  ENSG00000105483_8 (sequence is synthesized)
acccccaccccgaagatattaagttccacttgtaccttgtccccagcgacgccttgctaacaaaggcgatagatgatgaggaagatcgcttccatggtgtgcgcctgcagacttcgcccc

SEQ ID NO: 149260 - DNA, 120 bp, Artificial Sequence
  ENSG00000105483_9 (sequence is synthesized)
caatggaacccctgaactttggttccagttatattgtgtctaattctgctaacctgaaagtaatgcccaaggagttgaaattgtcctacaggagccctggagaaattcagcacttctcaa

SEQ ID NO: 149261 - DNA, 120 bp, Artificial Sequence
  ENSG00000105483_10 (sequence is synthesized)
aattctatgctgggcagatgaaggaacccattcaacttgagattactgaaaaaagacatgggactttggtgtgggatactgaggtgaagccagtggatctccagcttgtagctgcatcag

SEQ ID NO: 149262 - DNA, 120 bp, Artificial Sequence
  ENSG00000105483_11 (sequence is synthesized)
cccctcctcctttctcaggtgcagcctttgtgaaggagaaccaccggcaactccaagccaggatgggggacctgaaaggggtgctcgatgatctccaagacaatgaggttcttactgaga

SEQ ID NO: 149263 - DNA, 120 bp, Artificial Sequence
  ENSG00000105483_12 (sequence is synthesized)
atgagaaggagctggtggagcaggaaaagacacggcagagcaagaatgaggccttgctgagcatggtggagaagaaaggggacctggccctggacgtgctcttcagaagcattagtgaaa

SEQ ID NO: 149264 - DNA, 120 bp, Artificial Sequence
  ENSG00000105483_13 (sequence is synthesized)
gggacccttacctcgtgtcctatcttagacagcagaatttgtaaaatgagtcagttaggtagtctggaagagagaatccagcgttctcattggaaatggataaacagaaatgtgatcatt

SEQ ID NO: 149265 - DNA, 120 bp, Artificial Sequence
  ENSG00000105483_14 (sequence is synthesized)
gatttcagtgttcaagacagaagaagactgggtaacatctatcacacaggctttcaggacagacttgtaacctggcatgtacctattgactgtatcctcatgcattttcctcaagaatgt

SEQ ID NO: 149266 - DNA, 120 bp, Artificial Sequence
  ENSG00000105483_15 (sequence is synthesized)
ctgaagaaggtagtaatattccttttaaattttttccaaccattgcttgatatatcactattttatccattgacatgattcttgaagacccaggataaaggacatccggataggtgtgtt

SEQ ID NO: 149267 - DNA, 120 bp, Artificial Sequence
  ENSG00000105483_16 (sequence is synthesized)
tatgaaggatggggcctggaaaggcaacttttcctgattaatgtgaaaaataattcctatggacactccgtttgaagtatcaccttctcataactaaaagcagaaaagctaacaaaagct

SEQ ID NO: 149268 - DNA, 120 bp, Artificial Sequence
  ENSG00000105483_17 (sequence is synthesized)
tctcagctgaggacactcaaggcatacatgatgacagtcttttttttttttgtatgttaggactttaacactttatctatggctactgttattagaacaatgtaaatgtatttgctgaaa

SEQ ID NO: 149269 - DNA, 120 bp, Artificial Sequence
  ENSG00000105483_18 (sequence is synthesized)
gagagcacaaaaatgggagaaaatgcaaacatgagcagaaaatattttcccactggtgtgtagcctgctacaaggagttgttgggttaaatgttcatggtcaactccaaggaatactgag

SEQ ID NO: 149270 - DNA, 120 bp, Artificial Sequence
  ENSG00000105483_19 (sequence is synthesized)
atgaaatgtggtaaatcaactccacagaaccaccaaaaagaaaatgagggtaattcagcttattctgagacagacattcctggcaatgtaccatacaaaaaataagccaactctgacatt

SEQ ID NO: 149271 - DNA, 120 bp, Artificial Sequence
  ENSG00000105483_20 (sequence is synthesized)
tggattctaccatagactctgtcattttgtagccatttcagctgtcttttgattaatgttttcgtggcacacatatttccatccttttatgtttaatctgtttaaaacaagttcctagta

SEQ ID NO: 149272 - DNA, 120 bp, Artificial Sequence
  ENSG00000105483_21 (sequence is synthesized)
ctgatagtctcttttaactggaagatttcaattacttacgttaatgtaattattaatatgttaggatttatcctcagtcagccagtttgttatgtcttttctattctactgttatcacat

SEQ ID NO: 149273 - DNA, 120 bp, Artificial Sequence
  ENSG00000105483_22 (sequence is synthesized)
ttgtaccacttaaagtggaatctaggcactttatcaccatttagatcctattaccttttctcatctaggatatagttatcttctacataatctttctgtatcttaaaacccatcaataaa

SEQ ID NO: 149274 - DNA, 120 bp, Artificial Sequence
  ENSG00000105483_23 (sequence is synthesized)
ttattatatattttctacttttaatcactcagaagatttaaaaaactcatgagaagagtaatctgttatgtttttccagatatttaccatttctgttgctcttccttcattattttccaa

SEQ ID NO: 149275 - DNA, 120 bp, Artificial Sequence
  ENSG00000105483_24 (sequence is synthesized)
atttcgttctgcaaatttccacttcctctgatagacgttttttagttcttttagagtggttctgataggtacagattctcttattttttgcttcctctgaggacatctttttctcacctt

SEQ ID NO: 149276 - DNA, 120 bp, Artificial Sequence
  ENSG00000105483_25 (sequence is synthesized)
cattctcagtgatgttttttgcttgtagtatttttagttgacattgttttctgttcagcagtttccttttagcttccgtatttcctgatgagaaatctgcagtcattcaaattgttgttt

SEQ ID NO: 149277 - DNA, 120 bp, Artificial Sequence
  ENSG00000105483_26 (sequence is synthesized)
ccctgtatgtagtgtgtcatttttctgtcagatttcaaggtatttatctttagtttttagccatttcattatgttggggatgagtttccttgttttattccctttggaatttgctccaat

SEQ ID NO: 149278 - DNA, 120 bp, Artificial Sequence
  ENSG00000105483_27 (sequence is synthesized)
tcataaatttgcagttttatgtcttttaccaaacttagaggttttcagcctaatttctaaaaatactttttattagcctgattttcatctttataggaaatagtttaagtgatgacaagt

SEQ ID NO: 149279 - DNA, 120 bp, Artificial Sequence
  ENSG00000105483_28 (sequence is synthesized)
tccaatagcttatatgcccagaaggccttcaaaataagaattttgaaagaatacagaaaacaaacttttatatccttctcatgtcttctactgtaaaattcatatgctttgctactctaa

SEQ ID NO: 149280 - DNA, 120 bp, Artificial Sequence
  ENSG00000105483_29 (sequence is synthesized)
acctagtttgaaatcaacagtcttgagaatagatgaaaattttgatgaatagtggaattcttttaaatggaaacctcttacatgtgattttccttgccatctagaaataaaccatagtat

SEQ ID NO: 149281 - DNA, 120 bp, Artificial Sequence
  ENSG00000105483_30 (sequence is synthesized)
ttatgttgaatcaatcaatattatattttgtttttttcctcctcttctgagactcttattgtggaaatgttagacttttatgttttcctaaatgtccctgatattctacttatttagaac

SEQ ID NO: 149282 - DNA, 120 bp, Artificial Sequence
  ENSG00000105483_31 (sequence is synthesized)
atcttttcattttttccattattctgattgggtaattttaatttgtctattttcaaatttgctggagtgttcacctgttgttatctgtgtcgtcccactgagtgcattcaccacctttta

SEQ ID NO: 149283 - DNA, 120 bp, Artificial Sequence
  ENSG00000105483_32 (sequence is synthesized)
aattttggtcactgtatgtatcagttctaaaatttccattttgttctctatattttaaatttcttgccttatattctattttcctgcaaatgtgtcagcatttgcttgtttgagcttttt

SEQ ID NO: 149284 - DNA, 61 bp, Artificial Sequence
  ENSG00000105483_33 (sequence is synthesized)
ttcctgcaaatgtgtcagcatttgcttgtttgagctttttttttttcaagacagggtctca

SEQ ID NO: 149285 - DNA, 62 bp, Artificial Sequence
  ENSG00000105483_34 (sequence is synthesized)
cccaaagtgctgggattacaggccactacacctggcactaggctggagtgcagtggtgtgat

SEQ ID NO: 149286 - DNA, 60 bp, Artificial Sequence
  ENSG00000105483_35 (sequence is synthesized)
gtctcccacacgcccggctaatttttttttaaaaatatttttagtagagacagggtttca

SEQ ID NO: 149287 - DNA, 120 bp, Artificial Sequence
  ENSG00000105483_36 (sequence is synthesized)
gcctggcctcatttgagtatttttataatgtctcttttaaagtctttgtcagataatttcactgtacatgttattcagtgtttggtgtccactgagttgtcatttgccagacaagtggag

SEQ ID NO: 149288 - DNA, 120 bp, Artificial Sequence
  ENSG00000105483_37 (sequence is synthesized)
atttttgcagctcatccttgtattctcagtagttccgatatgtaccctcgaaatgtgaatgttatcttatgagactctgttttatttgtatccaacagaagatgtttattatttatttgg

SEQ ID NO: 149289 - DNA, 120 bp, Artificial Sequence
  ENSG00000105483_38 (sequence is synthesized)
ctttctgtgaactgaggtcttaatatcagctcattttaaaagtctttgcagtggtattcggatctatcctgtgtgtgcctatgagattgggtgcagtgtatcctgttagctccattctca

SEQ ID NO: 149290 - DNA, 120 bp, Artificial Sequence
  ENSG00000105483_39 (sequence is synthesized)
gggcgtttgaatgtgaattaggaccagcgcaatgaatgctcaagttggggttgggcgttagaattcataaaagtctttatatgctcagattctgcagctccatcctcttcatgattgtga

SEQ ID NO: 149291 - DNA, 120 bp, Artificial Sequence
  ENSG00000105483_40 (sequence is synthesized)
tcgtaaggacagtggaattttgcagttgtctataccttatcttgaagtagaactaaattgttacatttgaagaatgtacttcataaatttacaaaaataaaaaaataggttaatgttatt

SEQ ID NO: 149292 - DNA, 120 bp, Artificial Sequence
  ENSG00000105483_41 (sequence is synthesized)
cttccggtcgccatgatggctgtgggcggtaaacgcggttagtgcaagcatctgggccatcttcaatggtaaaaaagatacagtaaagacataaataccacatttgacaaatggaaaaaa

SEQ ID NO: 149293 - DNA, 120 bp, Artificial Sequence
  ENSG00000105483_42 (sequence is synthesized)
agcttacttccctcagttctcagaaagcccacctcctctgcgagcgttatttcaaaagaagttgagaaccagagaaaccgacctaaggggattctcccatttggcccgtcctaccctaaa

SEQ ID NO: 149294 - DNA, 120 bp, Artificial Sequence
  ENSG00000105483_43 (sequence is synthesized)
gaacatagatgcatccaaactcattagactacaaggatcacggaaactgttggttgacaatagcatacgggaactgcaatacacaaaaactggaattttttttcaggctgaggcctgtgt

SEQ ID NO: 149295 - DNA, 120 bp, Artificial Sequence
  ENSG00000105483_44 (sequence is synthesized)
caaattgtgactccagaacatgaagaaatattccaaaaaggacggggcatgttgactgaacacagaagacaaacatgcatgacctcagcctaatcgtgagaaaacatcaaagaaatccaa

SEQ ID NO: 149296 - DNA, 120 bp, Artificial Sequence
  ENSG00000105483_45 (sequence is synthesized)
attgataaacattctgtaaaatagttgaccatgttccgcaaaaatgtcacaatcacaaaagacaagggaagaataagaaacggtcacagactggaggaatctaaggagggataacaaggt

SEQ ID NO: 149297 - DNA, 120 bp, Artificial Sequence
  ENSG00000105483_46 (sequence is synthesized)
aaagggacttggacgcgaaagcgctggtggcgctcagccggctgggagttgtagctttctggctgctacagcaggagatacaggtggccaatgggtgagctggctggagggtcatggatg

SEQ ID NO: 149298 - DNA, 120 bp, Artificial Sequence
  ENSG00000105483_47 (sequence is synthesized)
ggctaaaatgagatcactcctggccaacgcatggaaggacacctggcgtgcatcagctctcagccgttcttaccgtctgtctcgatctctcagcagtattcagcacaagtctacatggct

SEQ ID NO: 149299 - DNA, 120 bp, Artificial Sequence
  ENSG00000105483_48 (sequence is synthesized)
gaccccaataacaaccctggacaccaaggcccaaatgaggacaccgaggcacacacggcttcagttgcttgcctggagtcacccatgcgatttgcaataccaggtaagcagtgtcatgtg

SEQ ID NO: 149300 - DNA, 120 bp, Artificial Sequence
  ENSG00000105483_49 (sequence is synthesized)
gtcatgtgacttgctttggccaatcaagtgtgagtgggagggagctgcggcatcgcatccaaggagaagccttcgcagccaccgctgccagatatggatggagtctcactctgtcgccca

SEQ ID NO: 149301 - DNA, 120 bp, Artificial Sequence
  ENSG00000105483_50 (sequence is synthesized)
tcggcctcccaaagtgctgagattacagctcccagaagctggcagcctggccctggcagcctggccttcaccccccgccaggaggccagaggagttttctcagggggatttgaccagccc

SEQ ID NO: 149302 - DNA, 120 bp, Artificial Sequence
  ENSG00000105483_51 (sequence is synthesized)
gccagaggagttttctcagggggatttgaccagccccagaggaagaacgaaagatggtgacatctggcactccccaacgtataaagcaagatgcaaaacagcatgtacaggccgggtgtg

SEQ ID NO: 149303 - DNA, 120 bp, Artificial Sequence
  ENSG00000105483_52 (sequence is synthesized)
tgtaatcccagcacttcaggaggccaagttcctcagtgtactggacacatttcaagtgctcagtagccacttgtggctgggggtgcagaatcacagaacgtttccatcctggaagaaagt

SEQ ID NO: 149304 - DNA, 120 bp, Artificial Sequence
  ENSG00000105483_53 (sequence is synthesized)
ctggaagaaagttctactgggcagcactaccctagaaggtaagctctctgcggacagagaccacgtgggtctggtttgctgctgcatccccaatgcctcggtaagtacttattgaatgaa

SEQ ID NO: 149305 - DNA, 120 bp, Artificial Sequence
  ENSG00000105483_54 (sequence is synthesized)
tgaacggatgaatggaggaaaggagtgaagggatgagagggcggatgaaggcatgaatgacccacgagtcttcagcgcggctttcccccgccccctcccccggcctgcctctctcgagac

SEQ ID NO: 149306 - DNA, 120 bp, Artificial Sequence
  ENSG00000105483_55 (sequence is synthesized)
cccaccttggcctcggggtcggtgcggaagaggccctcgagcacgtgcagggcgtccaggacgccgtggtcgcggcccttgcagtaggacagcaggcggcgcacgtcggctggggccacg

SEQ ID NO: 149307 - DNA, 120 bp, Artificial Sequence
  ENSG00000105483_56 (sequence is synthesized)
aactgcttggagatcttgttggtggtgcgcaccggcaggcaggcgttggccagcaggtggcccgggcggaagtagtaggcgaactccagcgggcaggccgggtgtgagtgggtcagctgg

SEQ ID NO: 149308 - DNA, 120 bp, Artificial Sequence
  ENSG00000105483_57 (sequence is synthesized)
cactccgtcaccacgaggcggtcccgcagcgggctcagcttgacgatgatgaaggcggggcagccgggctggggaggcctgtgggaggaaccaccaccgccctggtcacatcactctgct

SEQ ID NO: 149309 - DNA, 120 bp, Artificial Sequence
  ENSG00000105483_58 (sequence is synthesized)
agaatatgccagctgtgtgacctggggcaagtcacttcaagtctctatgcctcagtttcctcataggttacaaggaaggtcctactcatcataccttcctcataggatcgtcatgagcat

SEQ ID NO: 149310 - DNA, 120 bp, Artificial Sequence
  ENSG00000105483_59 (sequence is synthesized)
gaaaagagttaatataggtaaagcacctacacagtgtctggaatatggcaagcagtaagtgttcactaaaattctatacctaccacccttagttctgtcaaaagtgagtgaatgttttat

SEQ ID NO: 149311 - DNA, 120 bp, Artificial Sequence
  ENSG00000105483_60 (sequence is synthesized)
tgtatttaccttaactttttttagaaataaaaaatttcagatagtcctgtatctgcttctggtttagcaataacatcaaaagttgaggccttctgtgaacgctgccctaacagattatct

SEQ ID NO: 149312 - DNA, 120 bp, Artificial Sequence
  ENSG00000105483_61 (sequence is synthesized)
tccttccctctgtccccagaggcagccactatcaaaattatctattagcattccatgtatatttttatgcacccataaacaatgggaggtatgtttctgtgtgttaaaagcattgtatac

SEQ ID NO: 149313 - DNA, 120 bp, Artificial Sequence
  ENSG00000105483_62 (sequence is synthesized)
gtgaaaaaggactcaaactcattagtcatcaaagacataacaaattaaaaccctaaggaaatgccactacacatcagcagaatggtcaaacaaaagagactgataacatcaagtgttgat

SEQ ID NO: 149314 - DNA, 120 bp, Artificial Sequence
  ENSG00000105483_63 (sequence is synthesized)
gaggacgtggagcaactggaactctcacccatcactgatgggaacgtgaaatggcacaagcactttggaaaacttcatggcagtatctactaaagcaaattttatgtctctcctgtgacc

SEQ ID NO: 149315 - DNA, 120 bp, Artificial Sequence
  ENSG00000105483_64 (sequence is synthesized)
cagtggtgccactcaagacaaatgggcatctaaagctgtgtacgagaatgttcatagcagcactatgtgtattcgccaaatacttgaaacctaaatatccaacaatagagtgagaaaata

SEQ ID NO: 149316 - DNA, 120 bp, Artificial Sequence
  ENSG00000105483_65 (sequence is synthesized)
agttgtggtatattcctaaaataaaacactaatcagcaccaagaatgaacacaccattacaacctccaacaacacggatgaatctcacaaacctaccaagtgaaagaagccagacatgaa

SEQ ID NO: 149317 - DNA, 120 bp, Artificial Sequence
  ENSG00000105483_66 (sequence is synthesized)
agagaaactgatataattcccatttatataaagttcaacagcaggcaaagttaacctctatcgttaggaggctagatagtggttacccttaagtggttaaccctgtgagggggcaccagg

SEQ ID NO: 149318 - DNA, 120 bp, Artificial Sequence
  ENSG00000105483_67 (sequence is synthesized)
aggtttcttgggactggacatattctgtttcttgttctgggtgctggttacctctgattttttttttgggaaaattcattcagtttcacacatatgatgtgtgtacttttctggatgtgt

SEQ ID NO: 149319 - DNA, 76 bp, Artificial Sequence
  ENSG00000105483_68 (sequence is synthesized)
cagtttcacacatatgatgtgtgtacttttctggatgtgtgttacattttttaaaagtctacttcgaaaaaacttt

SEQ ID NO: 149320 - DNA, 78 bp, Artificial Sequence
  ENSG00000105483_69 (sequence is synthesized)
tatatatatatattagccaggcgtgctggctaataataggctaatgggattacacctgtaattccagctacttgggag

SEQ ID NO: 149321 - DNA, 120 bp, Artificial Sequence
  ENSG00000105483_70 (sequence is synthesized)
aacgccaacctttgaatccccctcctgcgcgctgagcggctcgtaaccatggagaccgaagcaggtttcccgcgtccgcctcctcacccagagactgcagccccggcgcccagacccttt

SEQ ID NO: 149322 - DNA, 120 bp, Artificial Sequence
  ENSG00000105483_71 (sequence is synthesized)
ggacaaggagatccaagcgggccccacaatgctcagcgggtaaagagctcctccccactcctctcccgccagcagacgaaggaaacaccccgcagcctgcacatgctcagatggagctct

SEQ ID NO: 149323 - DNA, 120 bp, Artificial Sequence
  ENSG00000105483_72 (sequence is synthesized)
gggcccgcgggttctactgcgcaggccctcacactcagcaaagggacttggacgcgaaagcgctggtggcgctcagccggctgggagttgtagctttctggctgctacagcaggagatac

SEQ ID NO: 149324 - DNA, 120 bp, Artificial Sequence
  ENSG00000105483_73 (sequence is synthesized)
aggtggccaatgggtgagctggctggaggtaggaacaaggttaaggaagctgggatcttcgtgcagactggatcgtcactatagcaacaatgaaacatcgggaagggctagttctgctag

SEQ ID NO: 149325 - DNA, 120 bp, Artificial Sequence
  ENSG00000105483_74 (sequence is synthesized)
gcagtctgccattttcattctttcatctttttttttaactcaaagcttactttgcaacaggcactgttctaggcactggggatacaatggaaaacaaaatagagcttctattttggcggg

SEQ ID NO: 149326 - DNA, 120 bp, Artificial Sequence
  ENSG00000105483_75 (sequence is synthesized)
tttctcaggagtgaggatgtggcctggatgctgcccaatcttgcctagaactggctgcacctgcttgtgccttaacccttggttaccctaaatccctgttatccagactcattgggactg

SEQ ID NO: 149327 - DNA, 120 bp, Artificial Sequence
  ENSG00000105483_76 (sequence is synthesized)
acttaataactgtgaacacgtgtcactggaaaaagcagtatgttaataagtaactgggctgctttgggaaaaatggaaatgcaggcgatgttagaacactggtacacacactaattcatt

SEQ ID NO: 149328 - DNA, 120 bp, Artificial Sequence
  ENSG00000105483_77 (sequence is synthesized)
catcctcacaaagccctatagacaggtactattatgacccctcaactgtaacataggctggaaggtcacatgacaaggaagtagtggagctgggatttgaacccaggcagtctggcttca

SEQ ID NO: 149329 - DNA, 120 bp, Artificial Sequence
  ENSG00000105483_78 (sequence is synthesized)
tacttgataagcttaatcacaatgccaaagtggtaaatagctgtgtggcataatttcaggtagtgataagtgctgtgaaggataaagcaaagaaaggggcagggatggctctttagagag

SEQ ID NO: 149330 - DNA, 120 bp, Artificial Sequence
  ENSG00000105483_79 (sequence is synthesized)
actacttagggatggctttcaggaagaggtggcatttgagcaggggcccgagggattgatgtgacttgtgataaaagaaaaacttcagacgaattaaatttaaagaagtttaattggcta

SEQ ID NO: 149331 - DNA, 120 bp, Artificial Sequence
  ENSG00000105483_80 (sequence is synthesized)
cgtgaagcccctgatgagggagttgaaagaacacatgcagaagtctgtcatcctgctttcaccacacagatacaagagacataaataacctcaagggcatagactgctgaaaagtgtaga

SEQ ID NO: 149332 - DNA, 120 bp, Artificial Sequence
  ENSG00000105483_81 (sequence is synthesized)
ccagtagaaatgtaggtgcattggttccagtcctcagcaaatggtgcctcccaccaaagctgtccagcctggcttcccagaaagtcttatggaatttggtgtatacgtttagtcatgaca

SEQ ID NO: 149333 - DNA, 120 bp, Artificial Sequence
  ENSG00000105483_82 (sequence is synthesized)
aggaacattcttgtgcctttctttgtctggattcaaagaagcgaaactgcatattctggtcactctcagctctcattcgatatctgtatcccaacagcacctgtgcaattcagcctccag

SEQ ID NO: 149334 - DNA, 120 bp, Artificial Sequence
  ENSG00000105483_83 (sequence is synthesized)
ggggctcctgaaactcacatggtaagcgctgcagaaacgcagcaggtggtgactttaggggaggacaggccaaatgggagaatccccttaagcttcggtttctctagttctcaacttctt

SEQ ID NO: 149335 - DNA, 120 bp, Artificial Sequence
  ENSG00000105483_84 (sequence is synthesized)
taagggacatctatttgttgggaaaaaattaaagatttggaattttgctccattggtttatgtacattcataagaagcaaagacatgcaggttatttgcataaaaattagtatatatgtt

SEQ ID NO: 149336 - DNA, 120 bp, Artificial Sequence
  ENSG00000105483_85 (sequence is synthesized)
ccagcttgtagctgcatcagcccctcctcctttctcaggtaagtgaaatgtttacattaaagccaagggtatgtatgagacatcaaggggtctttgagtgacagtggaaggtatccaagt

SEQ ID NO: 149337 - DNA, 90 bp, Artificial Sequence
  ENSG00000105483_86 (sequence is synthesized)
catcaaggggtctttgagtgacagtggaaggtatccaagtgacatggcaccagaacgttactggcagcaaatccgtatatagaagacaga

SEQ ID NO: 149338 - DNA, 120 bp, Artificial Sequence
  ENSG00000105483_87 (sequence is synthesized)
ccaccccgaagatattaagttccacttgtaccttgtccccagcgacgccttgctaacaaagacactattttagaggctgaggatacatcagtgaacaaaagaggcaaaaacatgacaacc

SEQ ID NO: 149339 - DNA, 120 bp, Artificial Sequence
  ENSG00000105483_88 (sequence is synthesized)
aaagatattacatggaatgctataggaaaaatatatgtgcatatgataagaactataacaaataaagaaggttaagaaaattaatccagtggcgatagatgatgaggaagatcgcttcca

SEQ ID NO: 149340 - DNA, 120 bp, Artificial Sequence
  ENSG00000105483_89 (sequence is synthesized)
gggagaatgaatgagcttatgcaatactagcaatgaatccagaaatttttgaaacaaaccttaagcaatgaggttttcttccatggaggtgtctagagaacctatacacaaaaaggcaat

SEQ ID NO: 149341 - DNA, 120 bp, Artificial Sequence
  ENSG00000105483_90 (sequence is synthesized)
gagcaatgcaatcgaagaccagtgggttattggttaagctgttactcaatacataaaaccaacctaattctctaggaaactggctgatgatgaggctgaaggccacagtggggtcctgag

SEQ ID NO: 149342 - DNA, 120 bp, Artificial Sequence
  ENSG00000105483_91 (sequence is synthesized)
ccagtctaagagaactttctgtgatgacgggagtgttccattctctgctacacagtgttatagccgtgagtgatatgtagctgttgagcacttgaaatatggatagtgcaactgagaaac

SEQ ID NO: 149343 - DNA, 120 bp, Artificial Sequence
  ENSG00000105483_92 (sequence is synthesized)
taaagtttacctaagtttaattcatacaaatttaaatagcatatccgggtagcggctactctacgggacagtgcagctctagttttcaataacatcgtcttcatcttcatcaactgattc

SEQ ID NO: 149344 - DNA, 120 bp, Artificial Sequence
  ENSG00000105483_93 (sequence is synthesized)
tctatcgtctgctgaatggataagagaatatgtgatgtctccatacggtggaatattattcagccatgaaagcaaaggagggtaaaaaagatacagtaaagacataaataccacatttga

SEQ ID NO: 149345 - DNA, 120 bp, Artificial Sequence
  ENSG00000105483_94 (sequence is synthesized)
atcatttaatttagactaatggttgtgttgaacaacttggttgcaaaagccctgaaaatggaaccgtcagctctcatgatctgggatgcgctgtctgcagttcagcgctgggttcctccc

SEQ ID NO: 149346 - DNA, 120 bp, Artificial Sequence
  ENSG00000105483_95 (sequence is synthesized)
actttctaaacccctcctcagcaggcagactccagcatgcacatgcaccaggaaagagaatataaaatggcatgtttactcttgctgctttgcctgtagctacccgaatccatagcaaaa

SEQ ID NO: 149347 - DNA, 120 bp, Artificial Sequence
  ENSG00000105483_96 (sequence is synthesized)
tgtgtagccgcagacagcaaccagtcttaggatgtcagcccaggggtctctccatgcttggcttgcccacagaatccttccgagaaaagcgctgtaaagcctttctcttcatcccacttc

SEQ ID NO: 149348 - DNA, 120 bp, Artificial Sequence
  ENSG00000105483_97 (sequence is synthesized)
cagagaatttgatggagttggttgccttgctccagaaggtatcacctgtgttagggcaggtttctctccagaggcatgacgaaccattggctcacgctgtatgtcatagaacccatattg

SEQ ID NO: 149349 - DNA, 120 bp, Artificial Sequence
  ENSG00000105483_98 (sequence is synthesized)
gctaatattggaatcacctgtgaggctttgaaagcgccgatgctttggtgccacctccagacttctgattcaattgatgtgggctgtgacctggtattgggtggtttttaaagcttccca

SEQ ID NO: 149350 - DNA, 120 bp, Artificial Sequence
  ENSG00000105483_99 (sequence is synthesized)
ggtgtggtcaagtttggaattaccttggaatataaatgcatacattttacgcattggtgaattactgcttcagtctttgattccgacatcgtatgataccaatcggagcaatcaatttaa

SEQ ID NO: 149351 - DNA, 120 bp, Artificial Sequence
  ENSG00000105483_100 (sequence is synthesized)
gccagagaatctggctgtgtccacattgaacgtgggcataatacaaagagaagaaggagagatgtcaagacacatttggctcaagggagtgtgttatctctattatttataaatgtggat

SEQ ID NO: 149352 - DNA, 120 bp, Artificial Sequence
  ENSG00000105486_0 (sequence is synthesized)
agacgtctgcgcgcgaatgccgtggcgcgaacttgggactgcagaggcgcgcctggcggatctgagtgtgttgcccgggcagcggcgcgcgggaccaacgcaaggagcagctgacagacg

SEQ ID NO: 149353 - DNA, 120 bp, Artificial Sequence
  ENSG00000105486_1 (sequence is synthesized)
aagaaaagtgctggacaggaagggagaattctgacgccaacatgcagcgaagtatcatgtcatttttccaccccaagaaagagggtaaagcaaagaagcctgagaaggaggcatccaata

SEQ ID NO: 149354 - DNA, 120 bp, Artificial Sequence
  ENSG00000105486_2 (sequence is synthesized)
gcagcagagagacggagccccctccaaaggcggcactgaaggagtggaatggagtggtgtccgagagtgactctccggtgaagaggccagggaggaaggcggcccgggtcctgggcagcg

SEQ ID NO: 149355 - DNA, 120 bp, Artificial Sequence
  ENSG00000105486_3 (sequence is synthesized)
aaggggaagaggaggatgaagcccttagccctgctaaaggccagaagcctgccctggactgctcacaggtctccccgccccgtcctgccacatctcctgagaacaatgcttccctctctg

SEQ ID NO: 149356 - DNA, 120 bp, Artificial Sequence
  ENSG00000105486_4 (sequence is synthesized)
acacctctcccatggacagttccccatcagggattccgaagcgtcgcacagctcggaagcagctcccgaaacggaccattcaggaagtcctggaagagcagagtgaggacgaggacagag

SEQ ID NO: 149357 - DNA, 120 bp, Artificial Sequence
  ENSG00000105486_5 (sequence is synthesized)
aagccaagaggaagaaggaggaggaagaagaggagaccccgaaagaaagcctcacagaggctgaagtggccacagagaaggaaggagaagacggggaccagcccaccacgcctcccaagc

SEQ ID NO: 149358 - DNA, 120 bp, Artificial Sequence
  ENSG00000105486_6 (sequence is synthesized)
ccctaaagacctccaaagcagagaccccgacggaaagcgtttcagagcctgaggtggccacgaagcaggaactgcaggaggaggaagagcagaccaagcctccccgcagagctcccaaga

SEQ ID NO: 149359 - DNA, 120 bp, Artificial Sequence
  ENSG00000105486_7 (sequence is synthesized)
cgctcagcagcttcttcaccccccggaagccagcagtcaaaaaagaagtgaaggaagaggagccaggggctccaggaaaggagggagctgctgagggacccctggatccatctggttaca

SEQ ID NO: 149360 - DNA, 120 bp, Artificial Sequence
  ENSG00000105486_8 (sequence is synthesized)
atcctgccaagaacaactatcatcccgtggaagatgcctgctggaaaccgggccagaaggttccttacctggctgtggcccggacgtttgagaagatcgaggaggtgtctgctcggctcc

SEQ ID NO: 149361 - DNA, 120 bp, Artificial Sequence
  ENSG00000105486_9 (sequence is synthesized)
ggatggtggagacgctgagcaacttgctgcgctccgtggtggccctgtcgcctccagacctcctccctgtcctctacctcagcctcaaccaccttgggccaccccagcagggcctggagc

SEQ ID NO: 149362 - DNA, 120 bp, Artificial Sequence
  ENSG00000105486_10 (sequence is synthesized)
ttggcgtgggtgatggtgtccttctcaaggcagtggcccaggccacaggtcggcagctggagtccgtccgggctgaggcagccgagaaaggcgacgtggggctggtggccgagaacagcc

SEQ ID NO: 149363 - DNA, 120 bp, Artificial Sequence
  ENSG00000105486_11 (sequence is synthesized)
gcagcacccagaggctcatgctgccaccacctccgctcactgcctccggggtcttcagcaagttccgcgacatcgccaggctcactggcagtgcttccacagccaagaagatagacatca

SEQ ID NO: 149364 - DNA, 120 bp, Artificial Sequence
  ENSG00000105486_12 (sequence is synthesized)
tcaaaggcctctttgtggcctgccgccactcagaagcccggttcatcgctaggtccctgagcggacggctgcgccttgggctggcagagcagtcggtgctggctgccctctcccaggcag

SEQ ID NO: 149365 - DNA, 120 bp, Artificial Sequence
  ENSG00000105486_13 (sequence is synthesized)
ctcacgcccccgggccaagaattcccaccagccatggtggatgctgggaagggcaagacagcagaggccagaaagacgtggctggaggagcaaggcatgatcctgaagcagacgttctgc

SEQ ID NO: 149366 - DNA, 120 bp, Artificial Sequence
  ENSG00000105486_14 (sequence is synthesized)
gaggttcccgacctggaccgaattatccccgtgctgctggagcacggcctggaacgtctcccggagcactgcaagctgagcccagggattcccctgaaaccaatgttggcccatcccacc

SEQ ID NO: 149367 - DNA, 120 bp, Artificial Sequence
  ENSG00000105486_15 (sequence is synthesized)
cggggcatcagcgaggtcctgaaacgctttgaggaggcagctttcacctgcgaatacaaatatgacgggcagagggcacagatccacgccctggaaggcggggaggtgaagatcttcagc

SEQ ID NO: 149368 - DNA, 120 bp, Artificial Sequence
  ENSG00000105486_16 (sequence is synthesized)
aggaatcaggaagacaacactgggaagtacccggacatcatcagccgcatccccaagattaaactcccatcggtcacatccttcatcctggacaccgaagccgtggcttgggaccgggaa

SEQ ID NO: 149369 - DNA, 120 bp, Artificial Sequence
  ENSG00000105486_17 (sequence is synthesized)
aagaagcagatccagccattccaagtgctcaccacccgcaaacgcaaggaggtggatgcgtctgagatccaggtgcaggtgtgtttgtacgccttcgacctcatctacctcaatggagag

SEQ ID NO: 149370 - DNA, 120 bp, Artificial Sequence
  ENSG00000105486_18 (sequence is synthesized)
tccctggtacgtgagcccctttcccggcgccggcagctgctccgggagaactttgtggagacagagggcgagtttgtcttcgccacctccctggacaccaaggacatcgagcagatcgcc

SEQ ID NO: 149371 - DNA, 120 bp, Artificial Sequence
  ENSG00000105486_19 (sequence is synthesized)
gagttcctggagcagtcagtgaaagactcctgcgaggggctgatggtgaagaccctggatgttgatgccacctacgagatcgccaagagatcgcacaactggctcaagctgaagaaggac

SEQ ID NO: 149372 - DNA, 120 bp, Artificial Sequence
  ENSG00000105486_20 (sequence is synthesized)
taccttgatggcgtgggtgacaccctggacctggtggtgatcggcgcctacctgggccgggggaagcgggccggccggtacgggggcttcctgctggcctcctacgacgaggacagtgag

SEQ ID NO: 149373 - DNA, 120 bp, Artificial Sequence
  ENSG00000105486_21 (sequence is synthesized)
gagctgcaggccatatgcaagcttggaactggcttcagtgatgaggagctggaggagcatcaccagagcctcaaggcgctggtgctgcccagcccacgcccttacgtgcggatagatggc

SEQ ID NO: 149374 - DNA, 120 bp, Artificial Sequence
  ENSG00000105486_22 (sequence is synthesized)
gctgtgattcccgaccactggctggaccccagcgctgtgtgggaggtgaagtgcgctgacctctccctctctcccatctaccctgctgcgcggggcctggtggatagtgacaagggcatc

SEQ ID NO: 149375 - DNA, 120 bp, Artificial Sequence
  ENSG00000105486_23 (sequence is synthesized)
tcccttcgcttccctcggtttattcgagtccgtgaagacaagcagccggagcaggccaccaccagtgctcaggtggcctgtttgtaccggaagcaaagtcagattcagaaccaacaaggc

SEQ ID NO: 149376 - DNA, 120 bp, Artificial Sequence
  ENSG00000105486_24 (sequence is synthesized)
gaggactcaggctctgaccctgaagatacctactaagccctcgccctcctagggcctgggtacagggcatgagttggacggaccccagggttattattgcctttgctttttagcaaatct

SEQ ID NO: 149377 - DNA, 120 bp, Artificial Sequence
  ENSG00000105486_25 (sequence is synthesized)
gctgtggcaggctgtggattttgagagtcaggggaggggtgtgtgtgtgagggggtggcttactccggagtctgggattcatcccgtcatttctttcaataaataattattggatagcta

SEQ ID NO: 149378 - DNA, 120 bp, Artificial Sequence
  ENSG00000105486_26 (sequence is synthesized)
ctcgcgggggcgcttccaccgattcctcctctttccctgccagtcactcctcagaccctcagccacacccgctcatccagggcgagggaaagcgcgggcattttcccagtgtgctctgcg

SEQ ID NO: 149379 - DNA, 120 bp, Artificial Sequence
  ENSG00000105486_27 (sequence is synthesized)
ggagggctcgccccacttcaccccttttcccgccctcctcccattcgggagactacgactcccagtgtcctccgcgcgacggcggcggtgcggacggtgcccaggtcccgcccctaggct

SEQ ID NO: 149380 - DNA, 120 bp, Artificial Sequence
  ENSG00000105486_28 (sequence is synthesized)
ctattctgcagtcgtgagagagcaaagcacagagaaattaagtaacctgcccaaggtcacacagccaggaagcaggagggattgaagggtgcggcctgcactggggcagtgactgtgtgc

SEQ ID NO: 149381 - DNA, 120 bp, Artificial Sequence
  ENSG00000105486_29 (sequence is synthesized)
aggcagagaaggggagagggcccagagccttccagaggctacatcagtgggtgtgagctctccgggatgggagcacacgagccagcgaggtcagatacaccaagccctttgcctccccag

SEQ ID NO: 149382 - DNA, 120 bp, Artificial Sequence
  ENSG00000105486_30 (sequence is synthesized)
agggatgacccggggacccaggttcctgtgtccctctgccctccaaaggttgtcaccccaatgtctgtgatcaaatgtggctcacttccctgttctaattgtgggaggagggacgcagag

SEQ ID NO: 149383 - DNA, 120 bp, Artificial Sequence
  ENSG00000105486_31 (sequence is synthesized)
gagggaggggaggcaaccagattccttgcaaggatgtgagccagacattgcacatgctgcgtgggttccaatcacatggcctttcccacctggaaggaaggccgggggctgtagtcccca

SEQ ID NO: 149384 - DNA, 120 bp, Artificial Sequence
  ENSG00000105486_32 (sequence is synthesized)
gtgggaggctaggtccccttctaaaacgtgggaggcttcgtgactgaatagcaagaaagcagaatggtcctggggcccattagcagttctcctctccatgttccccctctaatccattgc

SEQ ID NO: 149385 - DNA, 120 bp, Artificial Sequence
  ENSG00000105486_33 (sequence is synthesized)
ttgctgacttcctacagccagcgtggctgggggcacgttccccaagccatttctaccaagtgggtgagcgttagacacagggaggtgcagggactcgccacaagcacacacagctggaga

SEQ ID NO: 149386 - DNA, 120 bp, Artificial Sequence
  ENSG00000105486_34 (sequence is synthesized)
aaattcatccaggccgcgagagaagggagacacgcagccacaactgtcaccctcgacacccccacccgcgctctcccctgaaggtcggcagctggagtccgtccgggctgaggcagccga

SEQ ID NO: 149387 - DNA, 120 bp, Artificial Sequence
  ENSG00000105486_35 (sequence is synthesized)
attcaggacaggggagcagccaacacaggatgtgctgttgggtctgctatgtgttgggcagctggagcttagttttgtgggattctctggggaacggtgtaaatgctccagagtgacccc

SEQ ID NO: 149388 - DNA, 120 bp, Artificial Sequence
  ENSG00000105486_36 (sequence is synthesized)
ctgatggcagaagcaggagggaaggagattagactcccgggggtatttcctattgcacaacccagaccgaggggtgctcacatccccctgtgaaggatccgttctccccagtttttattt

SEQ ID NO: 149389 - DNA, 120 bp, Artificial Sequence
  ENSG00000105486_37 (sequence is synthesized)
actttttctggttctatgagcaactcttgcttcatatagaaaaacaggctgggatagaaagatgtcaggaatgtgtgtcagtgagagattgagattagctacaaatagtggtggctcaca

SEQ ID NO: 149390 - DNA, 120 bp, Artificial Sequence
  ENSG00000105486_38 (sequence is synthesized)
taagaaaagaatttttttgttatgaaatgagaagtgtggagggggcagtctgatgccattagggattcaggttcctcctctccccacatttttttttgtccccacattttttttttctgc

SEQ ID NO: 149391 - DNA, 120 bp, Artificial Sequence
  ENSG00000105486_39 (sequence is synthesized)
catgtgcctctggcctcatcatcacaatgtggctgcaggagttccagccctcatggccatgcctgctccacgcaccagggaagagcaaagggggttggaccctgagtcagcctcagccag

SEQ ID NO: 149392 - DNA, 120 bp, Artificial Sequence
  ENSG00000105486_40 (sequence is synthesized)
tgaacaccttctgctcaagttctgttgctcatcactttgctccatggctcacccctagctgcaaggaattctgggaaatgtaaagtgatttactttttttcaagttaaagtttttcttaa

SEQ ID NO: 149393 - DNA, 120 bp, Artificial Sequence
  ENSG00000105486_41 (sequence is synthesized)
agctgtgcacattttggactagattttcttacgtatttcctatattcccctctccaacaaatttgggtcttttgccacagaaacagaacaaaatatcacctagaatcgtaccacccagag

SEQ ID NO: 149394 - DNA, 120 bp, Artificial Sequence
  ENSG00000105486_42 (sequence is synthesized)
acacgcagtagtgacatttgagggaatgttttatttacatttttgcaaagttgtgatccttctctatgagtaattttcttttctgcctttttaccctggaagtactttgttttcagtgtt

SEQ ID NO: 149395 - DNA, 120 bp, Artificial Sequence
  ENSG00000105486_43 (sequence is synthesized)
gtatatgcccttaagcaatatggcaacaggacctgaatgcccgcacaagagttttcaagtgctgtgccccatagcacatagtgctgtgtcctgaaccagctccccgtggctgtgtgggga

SEQ ID NO: 149396 - DNA, 120 bp, Artificial Sequence
  ENSG00000105486_44 (sequence is synthesized)
ctgtttttttcccttcctccctctccccagccctccaacacttggccttgactttgagattccagaccctctgttcctctcttcctctgctcactgcaggcgctggtgctgcccagccca

SEQ ID NO: 149397 - DNA, 120 bp, Artificial Sequence
  ENSG00000105486_45 (sequence is synthesized)
ggggaagaggaggatgaagcccttagccctgctaaaggccaggtaggtccccatcaccctgcccatttttaccagaagaaactaattcccattaacctttggaacagagtgcagcagctg

SEQ ID NO: 149398 - DNA, 120 bp, Artificial Sequence
  ENSG00000105486_46 (sequence is synthesized)
ttcaggagaattctggagaaattgcccgggagaggtagatgtgtttcctggttgtgtcgggggcagacacaacctggtcctaattgcccctgccctaggacctcgggtgggctccttcac

SEQ ID NO: 149399 - DNA, 120 bp, Artificial Sequence
  ENSG00000105486_47 (sequence is synthesized)
cggagggcggcgggtgcgccgaatgcttggggcctatgcttcgccatgtcggggtgtctgcagaggagtgggcgtggggacgctgaggctgccgagagcgcggtggagacggaagagcgc

SEQ ID NO: 149400 - DNA, 120 bp, Artificial Sequence
  ENSG00000105486_48 (sequence is synthesized)
accgcacccggccaacaggcagcatttcttgagcacttactgtgcccgggtactgttccaagcactttgtcaacttgtttaatccttatgacaacccatcgttcggccccgtcatgtgga

SEQ ID NO: 149401 - DNA, 120 bp, Artificial Sequence
  ENSG00000105486_49 (sequence is synthesized)
acaaaaaacaaaactgatgagatgcccgtaaagtgttaattcaagctccagcaaggccgcagccccccgtctgatgctcctgaagtcaccgactctaaatggtgtcgggccctcttgcca

SEQ ID NO: 149402 - DNA, 120 bp, Artificial Sequence
  ENSG00000105486_50 (sequence is synthesized)
gtgactagccccatgctttaagctctcagaatccttctgacatcagggttcttccctctcaaggctttccacgaaccctgtcactagttgtgacccgcacatgtcctgttcgcctcacat

SEQ ID NO: 149403 - DNA, 120 bp, Artificial Sequence
  ENSG00000105486_51 (sequence is synthesized)
ggaagagcagagtgaggacgaggacagagaagccaagaggaagaaggaggaggaaggttcaatgggatttttttgccatctgaccgttctgtctatcgtcagaagaggagaccccgaaag

SEQ ID NO: 149404 - DNA, 120 bp, Artificial Sequence
  ENSG00000105492_0 (sequence is synthesized)
actcccttccccttctctgctcatgcagggagcccaggaagcctccgcctcagagatgctaccgctgctgctgcccctgctgtgggcaggggccctggctcaggagcggagattccagct

SEQ ID NO: 149405 - DNA, 120 bp, Artificial Sequence
  ENSG00000105492_1 (sequence is synthesized)
ggaggggccagagtcactgacggtgcaggagggtctgtgcgtcctcgtaccctgcagattgcccactacccttccagcctcgtactatggttatggctactggttcctggaaggggctga

SEQ ID NO: 149406 - DNA, 120 bp, Artificial Sequence
  ENSG00000105492_2 (sequence is synthesized)
tgttccagtggccacaaacgacccagacgaagaagtgcaggaggagacccggggccgattccacctcctctgggatcccagaaggaagaactgctccctgagcatcagagatgcccggag

SEQ ID NO: 149407 - DNA, 120 bp, Artificial Sequence
  ENSG00000105492_3 (sequence is synthesized)
gagggacaatgctgcatacttctttcggttgaagtccaaatggatgaaatacggttatacatcttccaagctctctgtgcgtgtgatggccctgacccacaggcccaacatctccatccc

SEQ ID NO: 149408 - DNA, 120 bp, Artificial Sequence
  ENSG00000105492_4 (sequence is synthesized)
agggaccctggagtctggccatcccagcaatctgacctgctctgtgccctgggtctgtgagcaggggacgccccccatcttctcctggatgtcagctgcccccacctccctgggccccag

SEQ ID NO: 149409 - DNA, 120 bp, Artificial Sequence
  ENSG00000105492_5 (sequence is synthesized)
gaccacccagtcctcggtgctcacaatcaccccacggccccaggaccacagcaccaacctcacctgtcaggtgacgttccctggagccggtgtgaccatggagagaaccatccagctcaa

SEQ ID NO: 149410 - DNA, 120 bp, Artificial Sequence
  ENSG00000105492_6 (sequence is synthesized)
tgtctcctatgctccacagaaagtggccatcagcatcttccaaggaaacagcgcagccttcaaaatcctgcaaaacacctcgtccctccctgtcctggagggccaggctctgcggctgct

SEQ ID NO: 149411 - DNA, 120 bp, Artificial Sequence
  ENSG00000105492_7 (sequence is synthesized)
ctgtgatgctgacggcaacccccctgcacacctgagctggttccagggcttccccgccctgaacgccacccccatctccaataccggggtcctggagctgcctcaagtagggtctgcaga

SEQ ID NO: 149412 - DNA, 120 bp, Artificial Sequence
  ENSG00000105492_8 (sequence is synthesized)
agaaggagatttcacctgccgtgctcagcatcctctgggctccctgcaaatctctctgagtctctttgtgcattggaaaccagaaggcagggctggtggtgtcctgggagcagtctgggg

SEQ ID NO: 149413 - DNA, 120 bp, Artificial Sequence
  ENSG00000105492_9 (sequence is synthesized)
agctagcatcacaaccctggttttcctctgtgtttgcttcatcttcagagtgaagactagaaggaagaaagcagcccagccagtgcaaaacacggatgatgtgaaccccgtcatggtctc

SEQ ID NO: 149414 - DNA, 120 bp, Artificial Sequence
  ENSG00000105492_10 (sequence is synthesized)
aggctccaggggtcatcagcaccagttccagacaggcatagtttcagaccaccctgctgaggctggccccatctcagaagatgagcaggagctccactacgctgtcctacacttccacaa

SEQ ID NO: 149415 - DNA, 120 bp, Artificial Sequence
  ENSG00000105492_11 (sequence is synthesized)
ggtgcaacctcaggaaccaaaggtcaccgacactgagtactcagaaatcaagatacacaagtgaggaattgtccaaagccataaccttgattggagagaacatggtacctctcagtgtat

SEQ ID NO: 149416 - DNA, 120 bp, Artificial Sequence
  ENSG00000105492_12 (sequence is synthesized)
tggttactagggctgccacagcaatgtaccacaaaccgagtgacataaacacagaactttattttcgtatagtttcagatgttagaggtctgagaacaaggtgttatcagggttggtccc

SEQ ID NO: 149417 - DNA, 120 bp, Artificial Sequence
  ENSG00000105492_13 (sequence is synthesized)
ttctaaggcctctcttgttggcttgtagatggctgtctcctccttgtgtcttcacatggtctttcctctgagtgtgtttgtgtcctaatcttctcttcttataaagacactagtcatatt

SEQ ID NO: 149418 - DNA, 120 bp, Artificial Sequence
  ENSG00000105492_14 (sequence is synthesized)
ggattagggcctccccatgacctaatttaaataaattaactatttaaagaccctccaaatacagtaaccttctgagatattgagatttaggacttccaacatatgaattttagaagggaa

SEQ ID NO: 149419 - DNA, 120 bp, Artificial Sequence
  ENSG00000105492_15 (sequence is synthesized)
ttgttgtaaatggactatataaataccttcgtatatatggcagaccacaggacttctgtccaagagaactgagttcaactccatctatgccagctattgagcaagtcgctttatgtccct

SEQ ID NO: 149420 - DNA, 120 bp, Artificial Sequence
  ENSG00000105492_16 (sequence is synthesized)
gctctgtaaggcagggaaataatttccatctaaccagattattgtgaaaggtcaaagaaagcatacagctaacatacagctttgttagctgtaaaacagctaacaaaggccctgacacaa

SEQ ID NO: 149421 - DNA, 120 bp, Artificial Sequence
  ENSG00000105492_17 (sequence is synthesized)
ctgtaaaacagctaacaaaggccctgacacaaaggttttcataaagtctgtatatttttgtaaatgaatgccttgtatctggctttggctagctttttttttttttttttttttctgaga

SEQ ID NO: 149422 - DNA, 120 bp, Artificial Sequence
  ENSG00000105492_18 (sequence is synthesized)
cggctttgattagctgttttaacagacggtttctgctggcaatttcttctaaggctgaaaaggagtaggcccagaggccacagcaccaggtgtctgtgtcaccccctgttcagaactctt

SEQ ID NO: 149423 - DNA, 120 bp, Artificial Sequence
  ENSG00000105492_19 (sequence is synthesized)
cacgactccccaaaataaggtttccatccatcatctttctgctcaaggctctctacatgatcttgtccatccagatttccccagatcaattcctcaccagtcaccaataccccatgtcca

SEQ ID NO: 149424 - DNA, 120 bp, Artificial Sequence
  ENSG00000105492_20 (sequence is synthesized)
tttccacagcttcctcttacaaatcccagtctccactattccagtgaaattgaagaaagcatttaatgaagaccaactattaaggaaaattcttaagagtagccatgaaaaataaaaaga

SEQ ID NO: 149425 - DNA, 66 bp, Artificial Sequence
  ENSG00000105492_21 (sequence is synthesized)
taaggaaaattcttaagagtagccatgaaaaataaaaagatagattacacttaaaagaccacagtt

SEQ ID NO: 149426 - DNA, 72 bp, Artificial Sequence
  ENSG00000105492_22 (sequence is synthesized)
ccatctctactaaaatacaaaaattagctcggtgtggtggcacttgcctgtaatcccaggtacttctgcagg

SEQ ID NO: 149427 - DNA, 120 bp, Artificial Sequence
  ENSG00000105492_23 (sequence is synthesized)
gggcaacagagcgagactccaactcagaaaaagcaaaacaaaacaaacaaacaagcaaaaaaccacaattagactgacagctgacttttttaggagcaatattggaaggctaaatgcaat

SEQ ID NO: 149428 - DNA, 120 bp, Artificial Sequence
  ENSG00000105492_24 (sequence is synthesized)
cttttttaggagcaatattggaaggctaaatgcaatagaaagatgtctttgatggcttaagagaaataaatgttgttttagaaagcctactcaatgaaaacacattttaagactgaaagt

SEQ ID NO: 149429 - DNA, 120 bp, Artificial Sequence
  ENSG00000105492_25 (sequence is synthesized)
gaaatatagatattttaaggaaaaccaaaatatgtgagtgttaataaagaaaagatttctcaaataaattctaaaacatataattcaggtattaggaaagtgatcccagattagattttt

SEQ ID NO: 149430 - DNA, 120 bp, Artificial Sequence
  ENSG00000105492_26 (sequence is synthesized)
gagatccaaaaaaaatgaaaacctaggaaagtagcaaatatgtgagcaaaatgaaacaaatacttgttgtaaaaatgatggtttgtagaggggtcaaacatcaaatgtaatattgaaata

SEQ ID NO: 149431 - DNA, 120 bp, Artificial Sequence
  ENSG00000105492_27 (sequence is synthesized)
aggggtcaaacatcaaatgtaatattgaaataccaatattatatagcccagaaactataataacataaagttcagaagagtgtaaatagaatttatattacataaagtctttatattttt

SEQ ID NO: 149432 - DNA, 120 bp, Artificial Sequence
  ENSG00000105492_28 (sequence is synthesized)
gcgggacacagtctcttctcctctgctcttctttgggcaggtctctgggtctcaaagtttccgtctgctctgtgcagagggagtggagctccgagggcttgtggcttcgcagttcctctt

SEQ ID NO: 149433 - DNA, 120 bp, Artificial Sequence
  ENSG00000105492_29 (sequence is synthesized)
aatctctctgagtctctttgtgcattgtgagtgtggggggaggtgcgcgagagtgtgggcagctgggcgagagctccatagtattcagagaagaggcccctgctaagtcctgtcctccct

SEQ ID NO: 149434 - DNA, 120 bp, Artificial Sequence
  ENSG00000105492_30 (sequence is synthesized)
ccccagacccctcacaactgctgggaccctcctacctctgggaggcttagagtccacactgcagtggctcctccctgcactggcagcttggggaggagattctggagggatgggaacagc

SEQ ID NO: 149435 - DNA, 120 bp, Artificial Sequence
  ENSG00000105492_31 (sequence is synthesized)
agccatggctccttcacagtcacccccagccagccggacccttggtcaacagctccctgagcccctgccagggattcagctcaagtctcaggctcagctttgaggcccagaacatcccag

SEQ ID NO: 149436 - DNA, 120 bp, Artificial Sequence
  ENSG00000105492_32 (sequence is synthesized)
tcctcagtcttgcagttgggggaagggggagtcatggagagagaagaggctggttccgggttcacagggcagtgaaatgggaaaccagaaggcagggctggtggtgtcctgggagcagtc

SEQ ID NO: 149437 - DNA, 120 bp, Artificial Sequence
  ENSG00000105497_0 (sequence is synthesized)
gaccatttagcttctgttgttaagtggatctaagcctatgtcgcttactggacgctgaagtgattgggaatattagcagtgggggttctgtagggtcaggaaggggcggctggctttggg

SEQ ID NO: 149438 - DNA, 120 bp, Artificial Sequence
  ENSG00000105497_1 (sequence is synthesized)
ggagtgatgaggggcttgttgggggtgggggtgcgtgataaagggatttctcggctgaagacgaggctgtgaggcttctgcagaacccccaggtcaggccacatcattgaggctgcagga

SEQ ID NO: 149439 - DNA, 120 bp, Artificial Sequence
  ENSG00000105497_2 (sequence is synthesized)
tctctcttcatagcccagtacgactctccgccgtgtccctggttggaaaatccaaacacctatccagcttctggctcctgggaaaagtggagttgtcagcaagagagaccgagagtagaa

SEQ ID NO: 149440 - DNA, 120 bp, Artificial Sequence
  ENSG00000105497_3 (sequence is synthesized)
gcccagagtggagatgcctgctgatgtgaatttatcccagaagcctcaggtcctgggtccagagaagcaggatggatcttgcgaggcatcagtgtcatttgaggacgtgaccgtggactt

SEQ ID NO: 149441 - DNA, 120 bp, Artificial Sequence
  ENSG00000105497_4 (sequence is synthesized)
cagcagggaggagtggcagcaactggaccctgcccagagatgcctgtaccgggatgtgatgctggagctctatagccatctcttcgcagtggggtatcacattcccaacccagaggtcat

SEQ ID NO: 149442 - DNA, 120 bp, Artificial Sequence
  ENSG00000105497_5 (sequence is synthesized)
cttcagaatgctaaaagaaaaggagccgcgtgtggaggaggctgaagtctcacatcagaggtgtcaagaaagggagtttgggcttgaaatcccacaaaaggagatttctaagaaagcttc

SEQ ID NO: 149443 - DNA, 120 bp, Artificial Sequence
  ENSG00000105497_6 (sequence is synthesized)
atttcaaaaggatatggtaggtgagttcacaagagatggttcatggtgttccattttagaagaactgaggctggatgctgaccgcacaaagaaagatgagcaaaatcaaattcaacccat

SEQ ID NO: 149444 - DNA, 120 bp, Artificial Sequence
  ENSG00000105497_7 (sequence is synthesized)
gagtcacagtgctttcttcaacaagaaaacattgaacacagaaagcaattgtgaatataaggaccctgggaaaatgattcgcacgaggccccaccttgcttcttcacagaaacaacctca

SEQ ID NO: 149445 - DNA, 120 bp, Artificial Sequence
  ENSG00000105497_8 (sequence is synthesized)
gaaatgttgcttatttacagaaagtttgaagctgaacctagaagtgaacggtcagaatgaaagcaatgacacagaacagcttgatgacgttgttgggtctggtcagctattcagccatag

SEQ ID NO: 149446 - DNA, 120 bp, Artificial Sequence
  ENSG00000105497_9 (sequence is synthesized)
ctcttctgatgcctgcagcaagaatattcatacaggagagacattttgcaaaggtaaccagtgtagaaaagtctgtggccataaacagtcactcaagcaacatcaaattcatactcagaa

SEQ ID NO: 149447 - DNA, 120 bp, Artificial Sequence
  ENSG00000105497_10 (sequence is synthesized)
gaaaccagatggatgttctgaatgtggggggagcttcacccagaagtcacacctctttgcccaacagagaattcatagtgtaggaaacctccatgaatgtggcaaatgtggaaaagcctt

SEQ ID NO: 149448 - DNA, 120 bp, Artificial Sequence
  ENSG00000105497_11 (sequence is synthesized)
catgccacaactaaaactcagtgtatatctgacagatcatacaggtgatataccctgtatatgcaaggaatgtgggaaggtctttattcagagatcagaattgcttacgcaccagaaaac

SEQ ID NO: 149449 - DNA, 120 bp, Artificial Sequence
  ENSG00000105497_12 (sequence is synthesized)
acacactagaaagaagccctataaatgccatgactgtggaaaagcctttttccagatgttatctctcttcagacatcagagaactcacagtagagaaaaactctatgaatgcagtgaatg

SEQ ID NO: 149450 - DNA, 120 bp, Artificial Sequence
  ENSG00000105497_13 (sequence is synthesized)
tggcaaaggcttctcccaaaactcaaccctcattatacatcagaaaattcatactggtgagagacagtatgcatgcagtgaatgtgggaaagcctttacccagaagtcaacactcagctt

SEQ ID NO: 149451 - DNA, 120 bp, Artificial Sequence
  ENSG00000105497_14 (sequence is synthesized)
gcaccagagaatccactcagggcagaagtcctatgtgtgtatcgaatgcgggcaggccttcatccagaaggcacacctgattgtccatcaaagaagccacacaggagaaaaaccttatca

SEQ ID NO: 149452 - DNA, 120 bp, Artificial Sequence
  ENSG00000105497_15 (sequence is synthesized)
gtgccacaactgtgggaaatccttcatttccaagtcacagcttgatatacatcatcgaattcatacaggggagaaaccttatgaatgcagtgactgtggaaaaaccttcacccaaaagtc

SEQ ID NO: 149453 - DNA, 120 bp, Artificial Sequence
  ENSG00000105497_16 (sequence is synthesized)
acacctgaatatacaccagaaaattcatactggagaaagacaccatgtatgcagtgaatgcgggaaagccttcaaccagaagtcaatactcagcatgcatcagagaattcacaccggaga

SEQ ID NO: 149454 - DNA, 120 bp, Artificial Sequence
  ENSG00000105497_17 (sequence is synthesized)
gaagccttacaaatgcagtgaatgtgggaaagccttcacttctaagtctcaattcaaagagcatcagcgaattcacacgggtgagaaaccctatgtgtgcactgaatgtgggaaggcctt

SEQ ID NO: 149455 - DNA, 120 bp, Artificial Sequence
  ENSG00000105497_18 (sequence is synthesized)
caacggcaggtcaaatttccataaacatcaaataactcacactagagagaggccttttgtctgttacaaatgtgggaaggcttttgtccagaaatcagagttgattacccatcaaagaac

SEQ ID NO: 149456 - DNA, 120 bp, Artificial Sequence
  ENSG00000105497_19 (sequence is synthesized)
tcacatgggagagaaaccctatgaatgccttgactgtgggaaatcgttcagtaagaaaccacaactcaaggtgcatcagcgaattcacacgggagaaagaccttatgtgtgttctgaatg

SEQ ID NO: 149457 - DNA, 120 bp, Artificial Sequence
  ENSG00000105497_20 (sequence is synthesized)
tggaaaggccttcaacaacaggtcaaacttcaataaacaccaaacaactcataccagagacaaatcttacaaatgcagttattctgtgaaaggctttaccaagcaatgaattcctagtgc

SEQ ID NO: 149458 - DNA, 120 bp, Artificial Sequence
  ENSG00000105497_21 (sequence is synthesized)
atcagcatattcataaatgaaatatactccgagtttcttgaagaagagaaaatcttctcagaatcaggtctaattatatgttattgaattcatgcttcagaaaaactctagggatgcact

SEQ ID NO: 149459 - DNA, 120 bp, Artificial Sequence
  ENSG00000105497_22 (sequence is synthesized)
gcatgtgtgaacacatgataaaaaagtcatgctttattttagtgagggcaattacagagaaaagagtaagcagaaatgtccttctgagtactggcctcattaaggattataaattttctc

SEQ ID NO: 149460 - DNA, 120 bp, Artificial Sequence
  ENSG00000105497_23 (sequence is synthesized)
cccgggaagaaaccctgactaacgcattgagaaaagcctttctgtaaagaatggtacaagacaggttgttactcgattatttatagtaaaatatgtgggaaattatatcaatgataaccc

SEQ ID NO: 149461 - DNA, 120 bp, Artificial Sequence
  ENSG00000105497_24 (sequence is synthesized)
tgtttattgtgggatatcaatatttttaaagtgccaacacagtcatgataggacaatattttatgtgtgtgtgtgcgccttatgtatataagcatatatataatatataagcatattatt

SEQ ID NO: 149462 - DNA, 120 bp, Artificial Sequence
  ENSG00000105497_25 (sequence is synthesized)
atatacaggttgagtatcccttctccaaaatgcctgggatcagaagcattttggatttcagatacttacagattttggaatatttgcattatatttattggttgagcatccctaatctga

SEQ ID NO: 149463 - DNA, 120 bp, Artificial Sequence
  ENSG00000105497_26 (sequence is synthesized)
aaatccaagattaaatgctccaattagcatttcctttgagcgtcatgttagagttcaaaaagtttcagattttgggttttcagattaggaatacccaacctgtatgtacgtatatttctg

SEQ ID NO: 149464 - DNA, 120 bp, Artificial Sequence
  ENSG00000105497_27 (sequence is synthesized)
tatgtatgtatgtatgtatgccctcagtgcagtggggtttgctgcagaattcactgcatagcaggagatgtaagcagatgagttattttttaagagaatctaatctaattgtttttataa

SEQ ID NO: 149465 - DNA, 120 bp, Artificial Sequence
  ENSG00000105497_28 (sequence is synthesized)
aaattattccctattgaatatttatataatgaggttgtatcaacaatgattaactcctttattatacatacacatgaatgtgcatttttggtaaatgcataaatgagattctataatgtt

SEQ ID NO: 149466 - DNA, 120 bp, Artificial Sequence
  ENSG00000105497_29 (sequence is synthesized)
tactgatctttatattacagattttctcttcttttaggattagctcagcttgccccccctttccatctccaccatctatagtgagcctctccataattagtgccaaccattagtctcgtt

SEQ ID NO: 149467 - DNA, 120 bp, Artificial Sequence
  ENSG00000105497_30 (sequence is synthesized)
catatttttacaccaggagtcaacaaactgtggccattggccaaatatggcctcccaactgtttttttaaaataaagttttattggaacacagccatgttcatttggacatgtattgtct

SEQ ID NO: 149468 - DNA, 120 bp, Artificial Sequence
  ENSG00000105497_31 (sequence is synthesized)
gggcttcttttgtgctgcactggcagaattgagtagttttggcggagatcaaatagcccccaagctggaaactgaaaatatctactctctggctctttacagaaaatgtttgccagcaca

SEQ ID NO: 149469 - DNA, 120 bp, Artificial Sequence
  ENSG00000105497_32 (sequence is synthesized)
tgatacacacacaaacacacacacatacacacatattactatgttcatcatcatatacctgtgtaagtactctttcattgatttataaaactcagatctcttacgtgtgtggatggtatt

SEQ ID NO: 149470 - DNA, 120 bp, Artificial Sequence
  ENSG00000105497_33 (sequence is synthesized)
tttttcattctacaatccatgatggattgtacacacgtgtattctatgaggttgacctgccataatttatttagccattcccacagttttgattacttatttcctccccacacacatttt

SEQ ID NO: 149471 - DNA, 120 bp, Artificial Sequence
  ENSG00000105497_34 (sequence is synthesized)
ttgctaaaaaacggagagggaactgttatcaatacttccgagaagcagaccagcataatcttttaagtgcacaggcccaggagccaggttcctgcatttgattcctggctccactctcta

SEQ ID NO: 149472 - DNA, 120 bp, Artificial Sequence
  ENSG00000105497_35 (sequence is synthesized)
ccctctgcatctgctgagcaagttatttggtctcatctattctggttttctcatctacaaaagggagatgatgatagtaccctacccccatgcatttggtgtgagaagtgtgtgtgtgtt

SEQ ID NO: 149473 - DNA, 120 bp, Artificial Sequence
  ENSG00000105497_36 (sequence is synthesized)
aaacccttggaactgcatggacagaccaagtgctgatgaattttagcgggcctcgtatccctgagcctgcctggttcccttgtgctgggtgtgggactgtggtgggagatttctgtcagc

SEQ ID NO: 149474 - DNA, 120 bp, Artificial Sequence
  ENSG00000105497_37 (sequence is synthesized)
tggaagtcttttccagaagggtgttagagatgggcacccatggctttagtctccataccccttcaaggttgataggggcccacacagctggtcaggaaccagcacagacctcaggctgtg

SEQ ID NO: 149475 - DNA, 120 bp, Artificial Sequence
  ENSG00000105497_38 (sequence is synthesized)
tctaaaacaaggtgactgcacatgcaggagcctgtgctgggccctggagagcaaatctgttctgtgtctcactggcctctccctgtccaggggcgtagtatcagtgaccatgtcccacct

SEQ ID NO: 149476 - DNA, 120 bp, Artificial Sequence
  ENSG00000105497_39 (sequence is synthesized)
cctgagaaaggtggaagagtctcacctggggagtccaggtacaagggctggccggccgtagatgactggtgtggggtggaaaggctgcagaggcctctccatggtggtgaggggtggaaa

SEQ ID NO: 149477 - DNA, 120 bp, Artificial Sequence
  ENSG00000105497_40 (sequence is synthesized)
tagtgtgcacctgggtcctgggagtggcaccctgaccagtttcagggaggaaggtggcagggccctaggacaagtgtgttaaaaacttgagcccacagtgtagacacactggttccaaag

SEQ ID NO: 149478 - DNA, 120 bp, Artificial Sequence
  ENSG00000105497_41 (sequence is synthesized)
acccctcaggatgtgcctcccttctcagatctgggctttccctgttcctaagcatcacctggggggatcactctgggtcctcatctccagccacatgttcactcctcacgtgggcctccc

SEQ ID NO: 149479 - DNA, 120 bp, Artificial Sequence
  ENSG00000105497_42 (sequence is synthesized)
taactgtccccctcagggcaagcccttcctccccacttccagaaagctgctcgttccctggccatcccacacctctgacctcgtgccacttccggggcctgttggctttaacaacttagt

SEQ ID NO: 149480 - DNA, 120 bp, Artificial Sequence
  ENSG00000105497_43 (sequence is synthesized)
ttcctccctacctcgcaaccccctctgtctagagtgctcacctccctcccagcctctgtctcatactattttttctttcctctcagtaccaagcgctgggacaagccagtctgtactcaa

SEQ ID NO: 149481 - DNA, 120 bp, Artificial Sequence
  ENSG00000105497_44 (sequence is synthesized)
tgcctgtgggataatagacggaggaatctggagtttggttgggtgattagctttggaattgatgggtcccagggagctatctaaagttttcagtcacatgagggcatgctcacagatctg

SEQ ID NO: 149482 - DNA, 120 bp, Artificial Sequence
  ENSG00000105497_45 (sequence is synthesized)
tgaaaagatctgttggctcagagaactaagagatgaataaatgttagtccaatggcctcatcatgagatgagaggtcaagagttttgagtttccagagggagaagctactattctaggca

SEQ ID NO: 149483 - DNA, 120 bp, Artificial Sequence
  ENSG00000105497_46 (sequence is synthesized)
gcttgtatgaactaactcgtttattcctcacagccattgtaggaaataatctaacctcataaaccccattttagagatgaggaaacaggcttagagaatttgacgtaaactcaagaccga

SEQ ID NO: 149484 - DNA, 120 bp, Artificial Sequence
  ENSG00000105497_47 (sequence is synthesized)
aaatctaggaacaagaaaagcctggatttgaaccaagctatctgatgccagtgttttaactctcaaccattgtactactttacctcctcatgaccttttttttttttttcttgtgagatg

SEQ ID NO: 149485 - DNA, 120 bp, Artificial Sequence
  ENSG00000105497_48 (sequence is synthesized)
gtgcccatgacctttttattgttgggcagtgaaagccatggtgaaatgaagaatgtcctactgtcatgtgatgtgatcagaaaacatactgcccagagtcccctgcccccacccccaaaa

SEQ ID NO: 149486 - DNA, 120 bp, Artificial Sequence
  ENSG00000105497_49 (sequence is synthesized)
ccagtacttgatccatcctttgactgttgtggcgattggcacaaaggttgggcacagtagtagttaggctcatgggctctggagccaacctacctggatgctacacatcccagctctgcc

SEQ ID NO: 149487 - DNA, 120 bp, Artificial Sequence
  ENSG00000105497_50 (sequence is synthesized)
cctcgctagtttggtggcaagcaacttaacctctctgccttaatttctccagcagcacaatgggaataataatagatctcgccttgtggctcctttgcagattacatgcgttaattatgt

SEQ ID NO: 149488 - DNA, 120 bp, Artificial Sequence
  ENSG00000105497_51 (sequence is synthesized)
aaagtcaagcattagaatggtggctgtccaccatgagtacaacacaaatgctcgttcttaatgattcaacaaacatggaatttcattaaatctgaaataaaggtattttgagaaattgaa

SEQ ID NO: 149489 - DNA, 120 bp, Artificial Sequence
  ENSG00000105497_52 (sequence is synthesized)
caggatgcagcaggtctgggctccctgctcctgagtcagtcttgagcctcctgtcaagcgaggaccacagaggctgatgtttccacattcataggctatctgtgttctagaggaaaccat

SEQ ID NO: 149490 - DNA, 120 bp, Artificial Sequence
  ENSG00000105497_53 (sequence is synthesized)
gggtcaagaaagaagaaactgtagtccctggtctgatcagaagccccagtcataggatggaaaagctgactctttcctgctaagcactggttctgctccttcatccaccactgggtcttt

SEQ ID NO: 149491 - DNA, 120 bp, Artificial Sequence
  ENSG00000105497_54 (sequence is synthesized)
gaaaaatttcaagtggtcccccccaccaaattccttgcttggtccatggggtttggcccgtttttcctctgttctcataaggtgcggcaaaatctccttcctttgtaatttaaatagtca

SEQ ID NO: 149492 - DNA, 120 bp, Artificial Sequence
  ENSG00000105497_55 (sequence is synthesized)
cagggaggtagagtgagaagaggcttttaaggaccatgtgaagaggcttttaaacactttttcctgtttaaaaaggtgaacaaaaaatgctggaaaacagtgtttccagattgcccacag

SEQ ID NO: 149493 - DNA, 120 bp, Artificial Sequence
  ENSG00000105497_56 (sequence is synthesized)
atagaaatagtcaggatttggtaacaagaaatcagaattcttggtatagtcaagatttcctgaaatcctaaattattctgtgtatctcttgatgctttatttacaagtctttaaatagta

SEQ ID NO: 149494 - DNA, 120 bp, Artificial Sequence
  ENSG00000105497_57 (sequence is synthesized)
tgtgactataatagtaaacagtgtaccattgttctgtgatgggtttataaccaaatttacagagatgttctgttttttaaaaaaagtataataaatatgtgtgttattatcctgaaccaa

SEQ ID NO: 149495 - DNA, 120 bp, Artificial Sequence
  ENSG00000105499_0 (sequence is synthesized)
agctgaaaaagctggagcaaccaagcagggcctacaagccgaggagggctgtttaaaggcgcaggggccattttacctccaggttggccctgctcaggaccaggaggaaacacctccagc

SEQ ID NO: 149496 - DNA, 120 bp, Artificial Sequence
  ENSG00000105499_1 (sequence is synthesized)
ccgcgacctcctcccacagggggaaaaggaaagcaggaggaccacagaagctttggcaccgaggatccccgcagtcttcacccgcggagattccggctgaaggagctgtccagcgactac

SEQ ID NO: 149497 - DNA, 120 bp, Artificial Sequence
  ENSG00000105499_2 (sequence is synthesized)
accgctaagcgcagggagcccaagcctccgcaccggattccggagcacaagctccaccgcgcatgcgcacacgccccagacccaggctcaggaggactgagaattttctgaccgcagtgc

SEQ ID NO: 149498 - DNA, 120 bp, Artificial Sequence
  ENSG00000105499_3 (sequence is synthesized)
accatgggaagctctgaagtttccataattcctgggctccagaaagaagaaaaggcggccgtggagagacgaagacttcatgtgctgaaagctctgaagaagctaaggattgaggctgat

SEQ ID NO: 149499 - DNA, 120 bp, Artificial Sequence
  ENSG00000105499_4 (sequence is synthesized)
gaggccccagttgttgctgtgctgggctcaggcggaggactgcgggctcacattgcctgccttggggtcctgagtgagatgaaagaacagggcctgttggatgccgtcacgtacctcgca

SEQ ID NO: 149500 - DNA, 120 bp, Artificial Sequence
  ENSG00000105499_5 (sequence is synthesized)
ggggtctctggatccacttgggcaatatcttctctctacaccaatgatggtgacatggaagctctcgaggctgacctgaaacatcgatttacccgacaggagtgggacttggctaagagc

SEQ ID NO: 149501 - DNA, 120 bp, Artificial Sequence
  ENSG00000105499_6 (sequence is synthesized)
ctacagaaaaccatccaagcagcgaggtctgagaattactctctgaccgacttctgggcctacatggttatctctaagcaaaccagagaactgccggagtctcatttgtccaatatgaag

SEQ ID NO: 149502 - DNA, 120 bp, Artificial Sequence
  ENSG00000105499_7 (sequence is synthesized)
aagcccgtggaagaagggacactaccctacccaatatttgcagccattgacaatgacctgcaaccttcctggcaggaggcaagagcaccagagacctggttcgagttcacccctcaccac

SEQ ID NO: 149503 - DNA, 120 bp, Artificial Sequence
  ENSG00000105499_8 (sequence is synthesized)
gctggcttctctgcactgggggcctttgtttccataacccacttcggaagcaaattcaagaagggaagactggtcagaactcaccctgagagagacctgactttcctgagaggtttatgg

SEQ ID NO: 149504 - DNA, 120 bp, Artificial Sequence
  ENSG00000105499_9 (sequence is synthesized)
ggaagtgctcttggtaacactgaagtcattagggaatacatttttgaccagttaaggaatctgaccctgaaaggtttatggagaagggctgttgctaatgctaaaagcattggacacctt

SEQ ID NO: 149505 - DNA, 120 bp, Artificial Sequence
  ENSG00000105499_10 (sequence is synthesized)
ctggctgactgagatgctcgagaattggaccaggacctccctggaaaagcaggagcagccccatgaggaccccgaaaggaaaggctcactcagtaacttgatggattttgtgaagaaaac

SEQ ID NO: 149506 - DNA, 120 bp, Artificial Sequence
  ENSG00000105499_11 (sequence is synthesized)
aggcatttgcgcttcaaagtgggaatgggggaccactcacaacttcctgtacaaacacggtggcatccgggacaagataatgagcagccggaagcacctccacctggtggatgctggttt

SEQ ID NO: 149507 - DNA, 120 bp, Artificial Sequence
  ENSG00000105499_12 (sequence is synthesized)
agccatcaacactcccttcccactcgtgctgcccccgacgcgggaggttcacctcatcctctccttcgacttcagtgccggagatcctttcgagaccatccgggctaccactgactactg

SEQ ID NO: 149508 - DNA, 120 bp, Artificial Sequence
  ENSG00000105499_13 (sequence is synthesized)
ccgccgccacaagatcccctttccccaagtagaagaggctgagctggatttgtggtccaaggcccccgccagctgctacatcctgaaaggagaaactggaccagtggtgatgcattttcc

SEQ ID NO: 149509 - DNA, 120 bp, Artificial Sequence
  ENSG00000105499_14 (sequence is synthesized)
cctgttcaacatagatgcctgtggaggtgatattgaggcatggagtgacacatacgacacattcaagcttgctgacacctacactctagatgtggtggtgctactcttggcattagccaa

SEQ ID NO: 149510 - DNA, 120 bp, Artificial Sequence
  ENSG00000105499_15 (sequence is synthesized)
gaagaatgtcagggaaaacaagaagaagatccttagagagttgatgaacgtggccgggctctactacccgaaggatagtgcccgaagttgctgcttggcatagatgagcctcagcttcca

SEQ ID NO: 149511 - DNA, 120 bp, Artificial Sequence
  ENSG00000105499_16 (sequence is synthesized)
gggcactgtgggcctgttggtctactagggccctgatgtccacctggccttcctgttcttcactcccttcagccacacgcttcatggccttgagttcaccttggctgtcctaacagggcc

SEQ ID NO: 149512 - DNA, 120 bp, Artificial Sequence
  ENSG00000105499_17 (sequence is synthesized)
aatcaccagtgaccagctagactgtgattttgatagcgtcattcagaagaaggcgtccaaggagctgaaggtggtgaaatttgtcctgcaggtccctcgggagatcctggagctggagca

SEQ ID NO: 149513 - DNA, 120 bp, Artificial Sequence
  ENSG00000105499_18 (sequence is synthesized)
tgagtgtctgacaatcagaagcatcatgtccaatgtccagatggccagaatgaatgtgatagttcagaccaatgccttccactgctcctttatgactgcacttctagccagtagctctgc

SEQ ID NO: 149514 - DNA, 120 bp, Artificial Sequence
  ENSG00000105499_19 (sequence is synthesized)
acaagttagctctgtagaagtaagaacttgggcttaaatcatgggctatctctccacagccaagtggagctctgagaatacaacaagtgctcaataaatgcttgctgattgactgatgga

SEQ ID NO: 149515 - DNA, 120 bp, Artificial Sequence
  ENSG00000105499_20 (sequence is synthesized)
aataagtaaattatatggagagacaaggagaggcgagagcaggtatccggtgaaaaattctgagagtgaagtagcgtggatgagggacaatgaagacagttggtcgctgaagccactgcc

SEQ ID NO: 149516 - DNA, 120 bp, Artificial Sequence
  ENSG00000105499_21 (sequence is synthesized)
ttcctgagatgacccaggtacagccagtctcacccccagacatccaacctctcacctctgtgatgacccggtgtccaggcacagacacacccagagtcctcctgaccagctcatcagcag

SEQ ID NO: 149517 - DNA, 120 bp, Artificial Sequence
  ENSG00000105499_22 (sequence is synthesized)
ctcaccaaggaaaggaaatcaaggtgtactctcttcagactctagatttcccttcctcctccttttattcatgttacataaattcctgtttttatctctgttggatgaaatcagtctatt

SEQ ID NO: 149518 - DNA, 120 bp, Artificial Sequence
  ENSG00000105499_23 (sequence is synthesized)
ctctggtttcctttgtctacaatttaaagagggagccgactattaacttgatgtctctgagctattgttggccaagctccccttagatgggattaatgaagaagcctccttttccaaggt

SEQ ID NO: 149519 - DNA, 120 bp, Artificial Sequence
  ENSG00000105499_24 (sequence is synthesized)
gatagctcagaagcaacttgaagaatgagtgacaatgagcctaccaagtggaaatgtggggaaagtcagccagagttcatctactgacttcagtctggcagatgagaggcttgggtttac

SEQ ID NO: 149520 - DNA, 120 bp, Artificial Sequence
  ENSG00000105499_25 (sequence is synthesized)
ccctccggtgggtaatggagagagatggaatgtgccacacgaagcctcactatgactttctataatgcctggctcctgtgctgaaatgagaacatgcatcctagccggccatggtggctc

SEQ ID NO: 149521 - DNA, 120 bp, Artificial Sequence
  ENSG00000105499_26 (sequence is synthesized)
gtaggtggggacacagagccaaaccatatctctgtgaaaggaaaatgaaatctcaggaccccaattcactatgccaaaaggaaaaacttaagctgtggctgggcactgtggctcatgtct

SEQ ID NO: 149522 - DNA, 120 bp, Artificial Sequence
  ENSG00000105499_27 (sequence is synthesized)
aggatcgcttgagcccaggagttcaagatctgcctgggcaacatagtgagaccaagtctctacaaataattttaaaaattagctgggtgtggtagcacaagcctatagtctcagctactc

SEQ ID NO: 149523 - DNA, 82 bp, Artificial Sequence
  ENSG00000105499_28 (sequence is synthesized)
gaggtgggaggattgccgaccaccccactccaggctgggcgacagagcaagaccttgcctctaaaaaaaaaaaaaaaaaaaa

SEQ ID NO: 149524 - DNA, 83 bp, Artificial Sequence
  ENSG00000105499_29 (sequence is synthesized)
cagagcaagaccttggaaagcttaattaagctgagtcatgcaagaaactgtctttccttttgttcctaagccacagataaaag

SEQ ID NO: 149525 - DNA, 120 bp, Artificial Sequence
  ENSG00000105499_30 (sequence is synthesized)
aggcatgagccaccgcacccggccatctctcactttttagatgtcttccttctccataggtccgattatcacccaaatgctggcagctctccagacattccagtttctcttttgagctca

SEQ ID NO: 149526 - DNA, 120 bp, Artificial Sequence
  ENSG00000105499_31 (sequence is synthesized)
tggcagctctccagacattccagtttctcttttgagctcatctctctcctgagatccagacctccttaccctatttcctaagcataaaatgcactcacttgttcagcaactgtgtcctga

SEQ ID NO: 149527 - DNA, 120 bp, Artificial Sequence
  ENSG00000105499_32 (sequence is synthesized)
ggattttgtgaagaaaacaggcatttgcgcttcaaagtgggaatgggggaccactcacaacttcctgtacaaacacgtccccagaagcagctgatcctctttcttcctgggcaccacagg

SEQ ID NO: 149528 - DNA, 120 bp, Artificial Sequence
  ENSG00000105499_33 (sequence is synthesized)
cccgcttctgcgtcctgcctgcccattcataccagtttgaactgcaacagcctagctcctcacctgtgcacctccttccccgggtgtgcacgtctccagccccgagcgcgtgtcttcctg

SEQ ID NO: 149529 - DNA, 120 bp, Artificial Sequence
  ENSG00000105499_34 (sequence is synthesized)
cctgcaggggacatgaccagatgtcccactggtacagtttggatatttgttcccttccacatctcatgttggaatgtaatcccccaatgtaaattagttcaaccattgtaggagacagtg

SEQ ID NO: 149530 - DNA, 89 bp, Artificial Sequence
  ENSG00000105499_35 (sequence is synthesized)
cccccaatgtaaattagttcaaccattgtaggagacagtgtggaattcctcaaggatctagatccagaaatactatttggcccagcagt

SEQ ID NO: 149531 - DNA, 73 bp, Artificial Sequence
  ENSG00000105499_36 (sequence is synthesized)
ggagcccaagcctccgcaccggattccggagcacaagctccaccgcgcatgcgcacacgccccagacccaggc

SEQ ID NO: 149532 - DNA, 120 bp, Artificial Sequence
  ENSG00000105499_37 (sequence is synthesized)
cgagcacccgcggtcggccacatccaacgaacttctgtgcatgtcggtttcctcagctgtaaaattgggctaacgatggctccaccaggagttgttctgtggattaaattaatacttgtt

SEQ ID NO: 149533 - DNA, 88 bp, Artificial Sequence
  ENSG00000105499_38 (sequence is synthesized)
agcccaagcctccgcaccggattccggagcacaagctccaccgcgcatgcgcacacgccccagacccaggctcagagcacctccacct

SEQ ID NO: 149534 - DNA, 120 bp, Artificial Sequence
  ENSG00000105499_39 (sequence is synthesized)
tttaatggaaattttccgtttcctctgtgtgtcgccctctccatgaggcaggtgttcctgtgaaggacctccttgcacacatctttccccagtcttcatcgtccacacttaaaatgccca

SEQ ID NO: 149535 - DNA, 120 bp, Artificial Sequence
  ENSG00000105499_40 (sequence is synthesized)
agagggagggagaggtagtaagggatggaacagcacggagtggaatggaagaatgtttccctgccctccccttggggagcccaggaagagggaagggctcaggattgcagaaaacagggt

SEQ ID NO: 149536 - DNA, 120 bp, Artificial Sequence
  ENSG00000105499_41 (sequence is synthesized)
gctcagcttagacgagagaagagggaagtcccagaagtgaccagaggacatgcacttgctttgcatggatcaagaaaacctttaagaggccaacatggtggctcacgcttgtaatcccag

SEQ ID NO: 149537 - DNA, 120 bp, Artificial Sequence
  ENSG00000105499_42 (sequence is synthesized)
tggtttgggaggctgaggtgggaggatcgcctgaaaccagaagttggagaccaccctgggcaacatagtgagatcccatctcaaaacaacaacattaaaaaacaaaacaaaacaaaaaaa

SEQ ID NO: 149538 - DNA, 120 bp, Artificial Sequence
  ENSG00000105499_43 (sequence is synthesized)
tgtggttttttccaacgctgcttctcgagctctctggtactagctgggtgtcctacaattctgagcaattctgacgctggctacctggagttcacatcagattccacaggtgaaaggggc

SEQ ID NO: 149539 - DNA, 120 bp, Artificial Sequence
  ENSG00000105499_44 (sequence is synthesized)
tcagtcccaaaaaactgctcccacttcagacacgagttgcaattacctagccgctggtgcttctgaccgactggcaatagtttggggtttcccacagcttccgcctcatgttcaataatt

SEQ ID NO: 149540 - DNA, 120 bp, Artificial Sequence
  ENSG00000105499_45 (sequence is synthesized)
cacagcttccgcctcatgttcaataatttactggaatagctcacagaactcaggaacacactttacttacaattgctggtgtattacaaaagatgggccaggtgtggtggctcacgcctg

SEQ ID NO: 149541 - DNA, 120 bp, Artificial Sequence
  ENSG00000105499_46 (sequence is synthesized)
ggagattcacagtacttttcctactcatggcagaagagagacctgtgtgtaattgttctagcaactgcttttcctgacatttattctcatataattgggcagccaggatgaccacagagt

SEQ ID NO: 149542 - DNA, 120 bp, Artificial Sequence
  ENSG00000105499_47 (sequence is synthesized)
ccaacagccagaagagtgccgggtgcccactaattgcttcataaatatttatggaatggaagaaagatctttcttcctgctgcagatccctgcagtgctttatgccagtctgctggtgct

SEQ ID NO: 149543 - DNA, 120 bp, Artificial Sequence
  ENSG00000105501_0 (sequence is synthesized)
atctttctatcccagatgctccacagaacctcgccatcagcatcttcttcagaaatggcacaggcacagccccctgaggatctcactcatgactgaaacatcatttgaggggtgatcacc

SEQ ID NO: 149544 - DNA, 120 bp, Artificial Sequence
  ENSG00000105501_1 (sequence is synthesized)
tccagatcctcagctggacaagcctcacatcgtctgggggcctcagtatcttcacctgcggcgtccagtcggggtgggagcagaatggcttcccagcccccgcctcaccccaacagcacg

SEQ ID NO: 149545 - DNA, 120 bp, Artificial Sequence
  ENSG00000105501_2 (sequence is synthesized)
tgatgcccaagttccccttctgtgcgcgtccacagctctcactcaccctccggcttcctgtcggggctttctcagccccaccccacgtttggacatttggagcatttccttccctgacag

SEQ ID NO: 149546 - DNA, 120 bp, Artificial Sequence
  ENSG00000105501_3 (sequence is synthesized)
ccggacctgggactgggctggggccctggcggatggagacatgctgcccctgctgctgctgcccctgctgtggggggggtccctgcaggagaagccagtgtacgagctgcaagtgcagaa

SEQ ID NO: 149547 - DNA, 120 bp, Artificial Sequence
  ENSG00000105501_4 (sequence is synthesized)
gtcggtgacggtgcaggagggcctgtgcgtccttgtgccctgctccttctcttacccctggagatcctggtattcctctcccccactctacgtctactggttccgggacggggagatccc

SEQ ID NO: 149548 - DNA, 120 bp, Artificial Sequence
  ENSG00000105501_5 (sequence is synthesized)
atactacgctgaggttgtggccacaaacaacccagacagaagagtgaagccagagacccagggccgattccgcctccttggggatgtccagaagaagaactgctccctgagcatcggaga

SEQ ID NO: 149549 - DNA, 120 bp, Artificial Sequence
  ENSG00000105501_6 (sequence is synthesized)
tgccagaatggaggacacgggaagctatttcttccgcgtggagagaggaagggatgtaaaatatagctaccaacagaataagctgaacttggaggtgacagccctgatagagaaacccga

SEQ ID NO: 149550 - DNA, 120 bp, Artificial Sequence
  ENSG00000105501_7 (sequence is synthesized)
catccactttctggagcctctggagtccggccgccccacaaggctgagctgcagccttccaggatcctgtgaagcgggaccacctctcacattctcctggacggggaatgccctcagccc

SEQ ID NO: 149551 - DNA, 120 bp, Artificial Sequence
  ENSG00000105501_8 (sequence is synthesized)
cctggaccccgagaccacccgctcctcggagctcaccctcacccccaggcccgaggaccatggcaccaacctcacctgtcagatgaaacgccaaggagctcaggtgaccacggagagaac

SEQ ID NO: 149552 - DNA, 120 bp, Artificial Sequence
  ENSG00000105501_9 (sequence is synthesized)
cctcataccttccggtcctggagggccaggctctgcggctgctctgtgatgctcccagcaacccccctgcacacctgagctggttccagggctcccctgccctgaacgccacccccatct

SEQ ID NO: 149553 - DNA, 120 bp, Artificial Sequence
  ENSG00000105501_10 (sequence is synthesized)
ccaataccgggatcttggagcttcgtcgagtaaggtctgcagaagaaggaggcttcacctgccgcgctcagcacccgctgggcttcctgcaaatttttctgaatctctcagtttactccc

SEQ ID NO: 149554 - DNA, 120 bp, Artificial Sequence
  ENSG00000105501_11 (sequence is synthesized)
tcccacagttgctgggcccctcctgctcctgggaggctgagggtctgcactgcagatgctcctttcgagcccggccggccccctccctgtgctggcggcttgaggagaagccgctggagg

SEQ ID NO: 149555 - DNA, 120 bp, Artificial Sequence
  ENSG00000105501_12 (sequence is synthesized)
ggaacagcagccagggctcattcaaggtcaactccagctcagctgggccctgggccaacagctccctgatcctccacggggggctcagctccgacctcaaagtcagctgcaaggcctgga

SEQ ID NO: 149556 - DNA, 120 bp, Artificial Sequence
  ENSG00000105501_13 (sequence is synthesized)
acatctatgggtcccagagcggctctgtcctgctgctgcaagggagatcgaacctcgggacaggagtggttcctgcagcccttggtggtgctggtgtcatggccctgctctgtatctgtc

SEQ ID NO: 149557 - DNA, 120 bp, Artificial Sequence
  ENSG00000105501_14 (sequence is synthesized)
tgtgcctcatcttctttttaatagtgaaagcccgcaggaagcaagcagctgggagaccagagaaaatggatgatgaagaccccattatgggtaccatcacctcgggttccaggaagaagc

SEQ ID NO: 149558 - DNA, 120 bp, Artificial Sequence
  ENSG00000105501_15 (sequence is synthesized)
cctggccagacagccccggagatcaagcatctcctcctggggatgcccctcccttggaagaacaaaaggagctccattatgcctcccttagtttttctgagatgaagtcgagggagccta

SEQ ID NO: 149559 - DNA, 120 bp, Artificial Sequence
  ENSG00000105501_16 (sequence is synthesized)
aggaccaggaggccccaagcaccacggagtactcggagatcaagacaagcaagtgaggatttgcccagagttcagtcctggctggaggagccacagcctgtctgggggaaaggacaagtc

SEQ ID NO: 149560 - DNA, 120 bp, Artificial Sequence
  ENSG00000105501_17 (sequence is synthesized)
agggaccacttgctgaagcacgaagagcccttgtggcaatgttaacattaactgatgtttaagtgctccaagcagatggaattagagaggtgggctcaaatctaggccctggcactgtca

SEQ ID NO: 149561 - DNA, 120 bp, Artificial Sequence
  ENSG00000105501_18 (sequence is synthesized)
tcaagcaattcactgcatccctctgtgcctcagtttcccattctgtaaatcagagatcatgcatgctacctcaaaggttgttgtgaacattaaagaaatcaacacatggaaatcaaccaa

SEQ ID NO: 149562 - DNA, 120 bp, Artificial Sequence
  ENSG00000105507_0 (sequence is synthesized)
acagctctaagacaccgggaccgaaggagaagccaagagaggcaggaagaggtggcaaaggagtgctggagaagataaggaggctgagctccgacagggagcagggaggaggggccatct

SEQ ID NO: 149563 - DNA, 120 bp, Artificial Sequence
  ENSG00000105507_1 (sequence is synthesized)
tgagactggtgccctgcgagctccaccccacccctccatgcagttccccatgggccccgcctgcatcttcttgaggaaaggcattgctgagaaacagcgggaaagaccactgggacaaga

SEQ ID NO: 149564 - DNA, 120 bp, Artificial Sequence
  ENSG00000105507_2 (sequence is synthesized)
tgagattgaagagctgcgggaagcatttcttgagttcgataaggaccgagatgggttcatctcttgtaaggatctggggaatctcatgaggacgatgggttacatgcccacggagatgga

SEQ ID NO: 149565 - DNA, 120 bp, Artificial Sequence
  ENSG00000105507_3 (sequence is synthesized)
actgattgagctcggccagcaaatccgcatgaacctgggtggccgtgtagactttgatgactttgtggagctgatgacccccaaattgcttgcagaaacagctgggatgatcggtgtcca

SEQ ID NO: 149566 - DNA, 120 bp, Artificial Sequence
  ENSG00000105507_4 (sequence is synthesized)
ggagatgcgggatgccttcaaggagtttgacacgaatggagatggggagatcaccctggtggagctacagcaggccatgcagagactcctgggggagcggctcaccccccgggagatctc

SEQ ID NO: 149567 - DNA, 120 bp, Artificial Sequence
  ENSG00000105507_5 (sequence is synthesized)
tgaggttgtccgggaggctgatgttaatggagacggcacagttgactttgaagagtttgtgaagatgatgtctcgctgaggaggtcctggaagctccagaccctctccacctggtcaaca

SEQ ID NO: 149568 - DNA, 120 bp, Artificial Sequence
  ENSG00000105507_6 (sequence is synthesized)
tggagcaagcgcttgtggagaaccaaagcccaaaagccccagatccccttaaagcagagagggagggcaggcgggagggagggcattggcatgcggcgctgtgcatggggtgagacccag

SEQ ID NO: 149569 - DNA, 120 bp, Artificial Sequence
  ENSG00000105507_7 (sequence is synthesized)
agtctgtggatggaaataggaagcgtgggagggtccagttgccacccccaaaaattccaatgattcttgacatcttttcacttcacgtagtcctaagtccctgtgacctgccagagtctc

SEQ ID NO: 149570 - DNA, 120 bp, Artificial Sequence
  ENSG00000105507_8 (sequence is synthesized)
ttccccagcttccccttgggtgaaaatagtctcttctcctgttgggtatcaaaaggttcagaacgtagtctctactcttcccctgcctgcatcaactgttgcaaatcccgtttctctctc

SEQ ID NO: 149571 - DNA, 120 bp, Artificial Sequence
  ENSG00000105507_9 (sequence is synthesized)
ccggtaaggggacaaattatactttattcaggtgatggttacatgaacagcccagacttcaccactacgcaatatatccatgtaacaaaaccgcacttgtactccctaaatctatagaaa

SEQ ID NO: 149572 - DNA, 120 bp, Artificial Sequence
  ENSG00000105507_10 (sequence is synthesized)
tacaaaatgaaataaaaaggatgcaaatcagtcacagagctggaaacagagttgttgttgaggctgggcttggaaatggctcgtgcaagtggcattcaaagtcaactccttccttttcct

SEQ ID NO: 149573 - DNA, 82 bp, Artificial Sequence
  ENSG00000105507_11 (sequence is synthesized)
gtctcccctcccacatcccttcctttgtgtaagatactcaggggactgaattaaaccacaaatctggattatcaaggtttag

SEQ ID NO: 149574 - DNA, 120 bp, Artificial Sequence
  ENSG00000105507_12 (sequence is synthesized)
ggactgaattaaaccacaaatctggattatcaaggtttagagctagctgatccttggggaattaatcccctgaaaaaatgtcatcatgcaaagagagagatgacaggatcccccaaatcc

SEQ ID NO: 149575 - DNA, 120 bp, Artificial Sequence
  ENSG00000105507_13 (sequence is synthesized)
ccagttcagccaggttgttgcaaagtctttcctagaagcctcctacctccgcgctggtctgtcctggaccacccagaggctgtgtctctgttagatgggtcgtctgttccgtccctcacg

SEQ ID NO: 149576 - DNA, 120 bp, Artificial Sequence
  ENSG00000105507_14 (sequence is synthesized)
tcctgacatcgatctgtgccatgaaacagaaaagagagattcctcctgacctccgcccaaagcaagacactccagcaatgcaaaggttaaaataaaagtcaaaataaagaattaacttca

SEQ ID NO: 149577 - DNA, 120 bp, Artificial Sequence
  ENSG00000105507_15 (sequence is synthesized)
aggcattgctgagaaacagcgggaaagaccactgggacaagatgagattgaaggtaacaccgtcttccccagttgcttccacgttgccatccacccacctgacctgccctcagtcccttt

SEQ ID NO: 149578 - DNA, 120 bp, Artificial Sequence
  ENSG00000105507_16 (sequence is synthesized)
ctcaactgtaattttgtagaactctttctcgtggcagttgaaggacttcccaaagtatttcgaaggcatatccatcctcaagtatctccaagactcaggagtgaaaacaaatgagtttct

SEQ ID NO: 149579 - DNA, 120 bp, Artificial Sequence
  ENSG00000105509_0 (sequence is synthesized)
cggagagaagagagagcccggccagacccactgcgatgagacagcaggacgcgcccaagcccactcctgcagcctgccgctgctccggcctggcccggagggtgctgaccatcgccttcg

SEQ ID NO: 149580 - DNA, 120 bp, Artificial Sequence
  ENSG00000105509_1 (sequence is synthesized)
ccctgctcatcctgggcctcatgacctgggcctacgccgccggggtgccgctggcctccgatcgctacggcctcctggccttcggcctctacggggccttcctttcagcgcacctggtgg

SEQ ID NO: 149581 - DNA, 120 bp, Artificial Sequence
  ENSG00000105509_2 (sequence is synthesized)
cgcagagcctcttcgcgtacctggagcaccggcgggtggcggcggcggcgcgggggccgctggatgcagccaccgcgcgcagtgtggcgctgaccatctccgcctaccaggaggaccccg

SEQ ID NO: 149582 - DNA, 120 bp, Artificial Sequence
  ENSG00000105509_3 (sequence is synthesized)
cgtacctgcgccagtgcctggcgtccgcccgcgccctgctgtacccgcgcgcgcggctgcgcgtcctcatggtggtggatggcaaccgcgccgaggacctctacatggtcgacatgttcc

SEQ ID NO: 149583 - DNA, 120 bp, Artificial Sequence
  ENSG00000105509_4 (sequence is synthesized)
gcgaggtcttcgctgacgaggaccccgccacgtacgtgtgggacggcaactaccaccagccctgggaacccgcggcggcgggcgcggtgggcgccggagcctatcgggaggtggaggcgg

SEQ ID NO: 149584 - DNA, 120 bp, Artificial Sequence
  ENSG00000105509_5 (sequence is synthesized)
aggatcctgggcggctggcagtggaggcgctggtgaggactcgcaggtgcgtgtgcgtggcgcagcgctggggcggcaagcgcgaggtcatgtacacagccttcaaggcgctcggagatt

SEQ ID NO: 149585 - DNA, 120 bp, Artificial Sequence
  ENSG00000105509_6 (sequence is synthesized)
cggtggactacgtgcaggtctgtgactcggacacaaggttggaccccatggcactgctggagctcgtgcgggtactggacgaggacccccgggtaggggctgttggtggggacgtgcgga

SEQ ID NO: 149586 - DNA, 120 bp, Artificial Sequence
  ENSG00000105509_7 (sequence is synthesized)
tccttaaccctctggactcctgggtcagcttcctaagcagcctgcgatactgggtagccttcaatgtggagcgggcttgtcagagctacttccactgtgtatcctgcatcagcggtcctc

SEQ ID NO: 149587 - DNA, 120 bp, Artificial Sequence
  ENSG00000105509_8 (sequence is synthesized)
tacaaccagaagttcctgggtacccactgtacttttggggatgaccggcacctcaccaaccgcatgctcagcatgggttatgctaccaagtacacctccaggtcccgctgctactcagag

SEQ ID NO: 149588 - DNA, 120 bp, Artificial Sequence
  ENSG00000105509_9 (sequence is synthesized)
acgccctcgtccttcctgcggtggctgagccagcagacacgctggtccaagtcgtacttccgtgagtggctgtacaacgcgctctggtggcaccggcaccatgcgtggatgacctacgag

SEQ ID NO: 149589 - DNA, 120 bp, Artificial Sequence
  ENSG00000105509_10 (sequence is synthesized)
gcggtggtctccggcctgttccccttcttcgtggcggccactgtgctgcgtctgttctacgcgggccgcccttgggcgctgctgtgggtgctgctgtgcgtgcagggcgtggcactggcc

SEQ ID NO: 149590 - DNA, 120 bp, Artificial Sequence
  ENSG00000105509_11 (sequence is synthesized)
aaggcggccttcgcggcctggctgcggggctgcctgcgcatggtgcttctgtcgctctacgcgcccctctacatgtgtggcctcctgcctgccaagttcctggcgctagtcaccatgaac

SEQ ID NO: 149591 - DNA, 120 bp, Artificial Sequence
  ENSG00000105509_12 (sequence is synthesized)
cagagtggctggggcacctcgggccggcggaagctggccgctaactacgtccctctgctgcccctggcgctctgggcgctgctgctgcttgggggcctggtccgcagcgtagcacacgag

SEQ ID NO: 149592 - DNA, 120 bp, Artificial Sequence
  ENSG00000105509_13 (sequence is synthesized)
gccagggccgactggagcggcccttcccgcgcagccgaggcctaccacttggccgcgggggccggcgcctacgtgggctactgggtggccatgttgacgctgtactgggtgggcgtgcgg

SEQ ID NO: 149593 - DNA, 120 bp, Artificial Sequence
  ENSG00000105509_14 (sequence is synthesized)
aggctttgccggcggcggaccgggggctaccgcgtccaggtgtgagtccagccacgcggatgccgcctcaagggtcttcaggggaggccagaggagagctgctgggccccgagccacgaa

SEQ ID NO: 149594 - DNA, 120 bp, Artificial Sequence
  ENSG00000105509_15 (sequence is synthesized)
cttgctgggtggttctctgggcctcagtttccctcctctgcaaaacgagggggtcagcccaagattcttcagtctggactatattgggactgggacttctgggtctccagggagggtatt

SEQ ID NO: 149595 - DNA, 120 bp, Artificial Sequence
  ENSG00000105509_16 (sequence is synthesized)
tattggtcagggtgtgggatctgaggagtggagggaaagggtcctgctttctcctcgttcttatttaatctccatttctactgtgtgatcaggatgtaataaagaattttatttattttc

SEQ ID NO: 149596 - DNA, 120 bp, Artificial Sequence
  ENSG00000105514_0 (sequence is synthesized)
cttctgggcggagcccgcgcgggatccgggtggctgcaggctgctggcttctgcggctgcggggtcggggtcgcggccagggccaagccgcagcgagttcacaggcggaacccctgcagg

SEQ ID NO: 149597 - DNA, 120 bp, Artificial Sequence
  ENSG00000105514_1 (sequence is synthesized)
cggcgccccctacgcgaggtcacccctgggaaggagcgcagcccacccggcccctccgcatccgagcaggacgcccgtctcctctccctgaggatttcaggtctccctgtcccaggaggc

SEQ ID NO: 149598 - DNA, 120 bp, Artificial Sequence
  ENSG00000105514_2 (sequence is synthesized)
ttgtgccaagatggcatcagctggagacacccaggcaggcccacgggatgcagcagatcagaacttcgactatatgttcaaactgctactgataggcaacagcagtgtgggcaagacttc

SEQ ID NO: 149599 - DNA, 120 bp, Artificial Sequence
  ENSG00000105514_3 (sequence is synthesized)
cttcctgttccgatacgcggacgactccttcactcccgccttcgtcagtactgtgggcatcgatttcaaggtcaagaccgtctaccgccatgacaagaggatcaagctgcagatctggga

SEQ ID NO: 149600 - DNA, 120 bp, Artificial Sequence
  ENSG00000105514_4 (sequence is synthesized)
cacagcgggccaggagcgctaccgcaccatcaccacggcctactaccggggagccatgggcttcctgctcatgtatgacatcgccaatcaggaatcctttgccgctgtgcaggactgggc

SEQ ID NO: 149601 - DNA, 120 bp, Artificial Sequence
  ENSG00000105514_5 (sequence is synthesized)
cacgcaaatcaagacctactcctgggacaacgcccaggtcatcctggtggggaacaagtgtgacctggaggacgaacgtgttgtgcctgctgaggatggccggaggctcgccgacgacct

SEQ ID NO: 149602 - DNA, 120 bp, Artificial Sequence
  ENSG00000105514_6 (sequence is synthesized)
tggtttcgagttctttgaagccagtgccaaggagaacatcaatgtgaagcaggtcttcgagcgcctggtggatgtcatctgcgagaagatgaacgagtccctggaacccagctccagctc

SEQ ID NO: 149603 - DNA, 120 bp, Artificial Sequence
  ENSG00000105514_7 (sequence is synthesized)
aggcagcaacgggaaaggcccggccgtgggggatgctccagccccccagcccagcagctgcagctgctagagatggcccccaaccccccacccacccctctcctgcctcggcagggactg

SEQ ID NO: 149604 - DNA, 120 bp, Artificial Sequence
  ENSG00000105514_8 (sequence is synthesized)
tgatcgaggcgtgagccacagtggttatctccaagctcagggcaatcccttccctcctgtcaactgctccccgactcctgcatggctcattccttcacaatgtcgccgtggctgccaggt

SEQ ID NO: 149605 - DNA, 120 bp, Artificial Sequence
  ENSG00000105514_9 (sequence is synthesized)
tcctcaggcagccccggtgggaggctgcggaccatggggactcagctctgcatggcaggcagaggcccagggacactgacgtgcatgagcttgctgctttccagggtgtgttgagggtgg

SEQ ID NO: 149606 - DNA, 120 bp, Artificial Sequence
  ENSG00000105514_10 (sequence is synthesized)
ccatgggtgacacgtcccactctttctgatggaggggcatccgtggtgccttctagcttagaaccattttccaggtctcttctgggttgggcaggactgatattcccaagctggtggaag

SEQ ID NO: 149607 - DNA, 120 bp, Artificial Sequence
  ENSG00000105514_11 (sequence is synthesized)
atggttcatcttcctcgcacagtgtgggttcttggagttcatccagggaaggcggcgcctctttctcaggtcctgcaggctggtctctgagcctgcccccacgaactttctggattccaa

SEQ ID NO: 149608 - DNA, 120 bp, Artificial Sequence
  ENSG00000105514_12 (sequence is synthesized)
ggtgggatggtgatccctttgacccctgcagaccctctacttgcgaaaagcagcattgaagcagccttttcccattgtagaagggacagggagtcagatcccctcaaccccccggcttca

SEQ ID NO: 149609 - DNA, 120 bp, Artificial Sequence
  ENSG00000105514_13 (sequence is synthesized)
gggaccccagaagtgccttccaagcttcccccaagatccacatcacccacgaccctgccactgtttttgctgtgttcaccacatctctgatcctgaagtgaattctggaactatggacca

SEQ ID NO: 149610 - DNA, 120 bp, Artificial Sequence
  ENSG00000105514_14 (sequence is synthesized)
cattagactgggcagagattcgcccaacccctagcactccggctctgggctttcggccagaagttaattaacctcagagccaggagcctggggctggggcctccctcccaggccctgttt

SEQ ID NO: 149611 - DNA, 120 bp, Artificial Sequence
  ENSG00000105514_15 (sequence is synthesized)
agctgtttagctggttgtgttttaagcaagttcttgcccaatcatgcatcctgctagaaaaggaaatgaagcaacgttcccagccaccgcaggcagttgtcggcgactttctgatgtaag

SEQ ID NO: 149612 - DNA, 120 bp, Artificial Sequence
  ENSG00000105514_16 (sequence is synthesized)
cacctgggctccgacttgaggggggcccttcaagacccaatgtccatttcccaatccttgtcatcggcagggcccagggatgtgacaatttttgctaatggaggagtcacttcttttttt

SEQ ID NO: 149613 - DNA, 120 bp, Artificial Sequence
  ENSG00000105514_17 (sequence is synthesized)
agtgcagtggtgcaatcatagctcaccacagcctcaaactaggggtcacttctaagggatgctgggggttgggcggaaggggtgaggaggtaggattgagtaacttgctgtcactgcttg

SEQ ID NO: 149614 - DNA, 120 bp, Artificial Sequence
  ENSG00000105514_18 (sequence is synthesized)
cttgtactttgtagacagcctgagagtggcaggaccttatgtgaatgggggggatggactgtgatcagtgccggggagtctctgaagctggggtccccacctccaggggcttctgctcag

SEQ ID NO: 149615 - DNA, 120 bp, Artificial Sequence
  ENSG00000105514_19 (sequence is synthesized)
aggttacgtgtgcagtttgaagatgtacatcttgacctccggtttagaggcactttctgcccatcagattccaaactctaggggcgcagcaccttttctttgctcccaaacaccaaccaa

SEQ ID NO: 149616 - DNA, 120 bp, Artificial Sequence
  ENSG00000105514_20 (sequence is synthesized)
caccccttcacaggaccagcactgttaggatggctaagtggatgttttatgttcccacgtccctgactctgtttcagaggttgtgtctgctctcccagcccctgaagccaaaatgacttc

SEQ ID NO: 149617 - DNA, 120 bp, Artificial Sequence
  ENSG00000105514_21 (sequence is synthesized)
ctgcagctttcatgagctcagcctcttccctggggtatgtgtgagggggaaagcctggttcaagtttagatttatttctagggagccctggtttcttcataccagaggctacccttagaa

SEQ ID NO: 149618 - DNA, 86 bp, Artificial Sequence
  ENSG00000105514_22 (sequence is synthesized)
gggagccctggtttcttcataccagaggctacccttagaactttggagtggggtatctttttttcatttgtttttttgatggtggc

SEQ ID NO: 149619 - DNA, 60 bp, Artificial Sequence
  ENSG00000105514_23 (sequence is synthesized)
aggcaccgaggcttgtctcaaactgacttcaagtgatccacttgcttcggcctcccaaag

SEQ ID NO: 149620 - DNA, 84 bp, Artificial Sequence
  ENSG00000105514_24 (sequence is synthesized)
gagggtatcttttataccaacaaattagatgactgaggtgtaatggacaaatcctatgcacaaagtgagggtatctgaatatgt

SEQ ID NO: 149621 - DNA, 120 bp, Artificial Sequence
  ENSG00000105514_25 (sequence is synthesized)
ggacaaatcctatgcacaaagtgagggtatctgaatatgtgggcgggagtcaaaaatttttagctactttaacactaaagtcaaactaaagtagcttcaaaaagacttctcaagatgcag

SEQ ID NO: 149622 - DNA, 120 bp, Artificial Sequence
  ENSG00000105514_26 (sequence is synthesized)
tcaaaaagacttctcaagatgcagtatggcctgctgaggtttttttgttttttttttttttaagacagagagtcgctcgtcgcccaggccgcagtgcagtagcatgatctcagctcactg

SEQ ID NO: 149623 - DNA, 120 bp, Artificial Sequence
  ENSG00000105514_27 (sequence is synthesized)
ggactacaggcacctgccaccacgcccatctaagttttgcatttttagtagcgacggtttcaccttgttggccaggctggttttgttggccaattgtctctaaactgctgtcaaaaaaag

SEQ ID NO: 149624 - DNA, 120 bp, Artificial Sequence
  ENSG00000105514_28 (sequence is synthesized)
gccaattgtctctaaactgctgtcaaaaaaaggaatggatcagattgtcttgaatagggcagagctaacctgtaatcacctgtgtgatgagaaacagctttgactgcattttactcctga

SEQ ID NO: 149625 - DNA, 120 bp, Artificial Sequence
  ENSG00000105514_29 (sequence is synthesized)
cctggcctaagctttctgtttacataagatttttcaagaattcaacttcaagtagcagccgagagagctgcctcaggattctctcaaaaactgggaataatatgggaacatttgtttctt

SEQ ID NO: 149626 - DNA, 120 bp, Artificial Sequence
  ENSG00000105514_30 (sequence is synthesized)
ctaaaaataaggcaaatgttacattgaatgatttggggggtgaggtttaattggaaatggtctctggggactgaaaactgatgtttttgcagattacctcagggaaacggaggtttgttg

SEQ ID NO: 149627 - DNA, 120 bp, Artificial Sequence
  ENSG00000105514_31 (sequence is synthesized)
agtttacagacacattaaaccaaaggccgtgggaaaacccctctccagctccaggggattggtcaggaccacccactaaccagtgccttccttcttaacattcacttttagcagcttgtg

SEQ ID NO: 149628 - DNA, 120 bp, Artificial Sequence
  ENSG00000105514_32 (sequence is synthesized)
tttattttacatgggcagttttgatgggaaattgccatgaccacaggggtttggagttctgctttttttttttcttcttctttttcgggggactgggggactcctcccaagatcacattt

SEQ ID NO: 149629 - DNA, 120 bp, Artificial Sequence
  ENSG00000105514_33 (sequence is synthesized)
tagcatctttctctcctactccatttagaaaaataagtaacaggtgaaatgtggtctcagtgttaacgggataattctgctaccggctcctccctgatgattctgaaatacactactgaa

SEQ ID NO: 149630 - DNA, 120 bp, Artificial Sequence
  ENSG00000105514_34 (sequence is synthesized)
cgagctctggctggtcctttctatcctggatgtggttcttctgtgtagcaattccttgatgtccagtttggaaagatgtactcttctcaacaagaaaaacttaaatccgtcgtgcccaaa

SEQ ID NO: 149631 - DNA, 120 bp, Artificial Sequence
  ENSG00000105514_35 (sequence is synthesized)
gggaaacccacgaggggacgcggccgaggagggtcgctgtccacccgggggcgtgggagtgaggtaccagattcagcccatttggccccgacgcctctgttctcggaatccgggtgctgc

SEQ ID NO: 149632 - DNA, 120 bp, Artificial Sequence
  ENSG00000105516_0 (sequence is synthesized)
gcacacctctcggtgcagattgcaaagcgccttccgttgcgagagctgcagattttgcaagagccaggctcgcccaccttgtagaaggagcgccttgagtcccctctcaccctcggttgc

SEQ ID NO: 149633 - DNA, 120 bp, Artificial Sequence
  ENSG00000105516_1 (sequence is synthesized)
aaagagccgaccgcttgatctggacaccccctcgcccagattgcatgatctcccgggaccctcttgagttgcacgtttctgcaccgaggacctcaaatccccgtcgctcctaggatttgc

SEQ ID NO: 149634 - DNA, 120 bp, Artificial Sequence
  ENSG00000105516_2 (sequence is synthesized)
agcgttctggatactggagggttgcaggctacactcgcccgcccctgggcagacactcgtccaaaccactggagtgtgctggtgactggcaggccagcccttcgcctctccatgaacccg

SEQ ID NO: 149635 - DNA, 120 bp, Artificial Sequence
  ENSG00000105516_3 (sequence is synthesized)
caggtgccaggcgatggcgcggcctgtgagcgacaggaccccggcccctctgctgctgggcggcccggccgggacaccccctggcgggggagcgctgcttgggttgcggagccttctgca

SEQ ID NO: 149636 - DNA, 120 bp, Artificial Sequence
  ENSG00000105516_4 (sequence is synthesized)
gagccttctgcaggggaccagcaagcccaaagagccggccagctgtctcctgaaggaaaaggagcgcaaggcggccctgcctgcagccacaacccctgggccaggcctggagactgcggg

SEQ ID NO: 149637 - DNA, 120 bp, Artificial Sequence
  ENSG00000105516_5 (sequence is synthesized)
gctggggcagtggtgggcggagggtccccgcgggggcgcccggggccggtgcccgccccgggtctgttggcgccactgctgtgggagcgcacgctgccgttcggcgatgtggagtacgta

SEQ ID NO: 149638 - DNA, 120 bp, Artificial Sequence
  ENSG00000105516_6 (sequence is synthesized)
cgatgtggagtacgtagacctggacgccttcctgctggagcacgggctcccgcccagcccgccgccccccggtggcccgtcgccggagccgtcgcccgcgcggacgcccgcaccctcccc

SEQ ID NO: 149639 - DNA, 120 bp, Artificial Sequence
  ENSG00000105516_7 (sequence is synthesized)
gttcgtgcggctcggcttccccccgctcctctcctgggcacgcccccgcccgggctgccctcgggaccgccagcggccaccgcgcaggcctgacctctcgggacacacccagccctgtgg

SEQ ID NO: 149640 - DNA, 120 bp, Artificial Sequence
  ENSG00000105516_8 (sequence is synthesized)
ccctgtggacccagacaccgtggaggtgttgatgacctttgaacccgacccagctgatcttgccctatcaagcattcctggccacgagacctttgaccctcgaagacatcgcttctcaga

SEQ ID NO: 149641 - DNA, 120 bp, Artificial Sequence
  ENSG00000105516_9 (sequence is synthesized)
aagccccagccaatcatgaagaaggcaagaaaaatccaggtgccggaggagcagaaggatgagaaatactggagccggcggtacaagaacaacgaggcagccaagcggtcccgtgacgcc

SEQ ID NO: 149642 - DNA, 120 bp, Artificial Sequence
  ENSG00000105516_10 (sequence is synthesized)
cggcggctcaaggagaaccagatatcggtgcgggcggccttcctggagaaggagaacgccctgctgcggcaggaagttgtggccgtgcgccaggagctgtcccactaccgcgccgtgctg

SEQ ID NO: 149643 - DNA, 120 bp, Artificial Sequence
  ENSG00000105516_11 (sequence is synthesized)
tcccgataccaggcccagcacggggccctgtgaggctgccccacatccccacctggcggagctctcctccgccttgctgagacttacgccctgttcccttcctgccctgtggcccacggg

SEQ ID NO: 149644 - DNA, 120 bp, Artificial Sequence
  ENSG00000105516_12 (sequence is synthesized)
ccggccagctgggtgccccagggacgtgataatgcagataaatacatttatatttttaagaaaaagcgagcctcccccctcccttgcgggggcggggagggttctctgtgtgtgtccccg

SEQ ID NO: 149645 - DNA, 120 bp, Artificial Sequence
  ENSG00000105516_13 (sequence is synthesized)
gcacgtcagggaccctatcctcccaccgcctccgttaacacgatcctgaataaatcttgagaaccccagagccagctgttgtggaagaagagggcagctccctggcatactggctgcagc

SEQ ID NO: 149646 - DNA, 120 bp, Artificial Sequence
  ENSG00000105516_14 (sequence is synthesized)
ccgtgggcagctccgggctgtcgtccatagagggcaggcgctgctggaagtgctggagtctgagtcctcccgcgggctgtcggatggaggaagggcagaaggtctgagaggaatgaagcg

SEQ ID NO: 149647 - DNA, 120 bp, Artificial Sequence
  ENSG00000105516_15 (sequence is synthesized)
actgcctttattgcatagaccttttcaattgctttttagattggggacggaggacgcgcatgagacgaacaggggatatgaatttccccgcccccacccgcggggagaggaacattagtg

SEQ ID NO: 149648 - DNA, 120 bp, Artificial Sequence
  ENSG00000105516_16 (sequence is synthesized)
caaatcctagcgccggccccggggaacctgcccctcctgggctgattggccagctaaatggaggcaccggagtggatggggcgaggctgcgggccctgaccggccgactcactgaggcct

SEQ ID NO: 149649 - DNA, 120 bp, Artificial Sequence
  ENSG00000105516_17 (sequence is synthesized)
accccagccagtacattccaggtcctgtcattgggcgacgcgtaaaatagactccgccctcagccatcctggccgggtaggagcaggtggcaagcgtcaggactgagccctgccccgtaa

SEQ ID NO: 149650 - DNA, 120 bp, Artificial Sequence
  ENSG00000105516_18 (sequence is synthesized)
aggtgagcagagctggatgtgggagatagacttggctggagacatgccccacagccagggaggggccttttctcacagtcaagcctgggcttctccttgggattagtgctcagcctctcc

SEQ ID NO: 149651 - DNA, 120 bp, Artificial Sequence
  ENSG00000105516_19 (sequence is synthesized)
tggcctgcagccacagattagtcctccttggccacggggcacaagggggcaggggcctgaggtttataaagacagtgtcaactgggcgaggggcctcactcgtgtaatcccagcatttta

SEQ ID NO: 149652 - DNA, 62 bp, Artificial Sequence
  ENSG00000105516_20 (sequence is synthesized)
actgggcgaggggcctcactcgtgtaatcccagcattttagggggctgaggcaggaggatct

SEQ ID NO: 149653 - DNA, 120 bp, Artificial Sequence
  ENSG00000105516_21 (sequence is synthesized)
gccgggggaacgtgagggcgccgatggcgggggcctgggaggaagggaggaggagggaagcaggcgtcagcacgtgactcggccctgaacctgtgtccttagctggccccggctggctgg

SEQ ID NO: 149654 - DNA, 120 bp, Artificial Sequence
  ENSG00000105516_22 (sequence is synthesized)
cctggctgcggcctcgaattctgtgtccagttgtcgagaggtgtcgtgggagggggccagattcggtgtctcttaatgggtcagggaccaatggatccatgggggaggagagacttggaa

SEQ ID NO: 149655 - DNA, 120 bp, Artificial Sequence
  ENSG00000105516_23 (sequence is synthesized)
ccctaaattccaggaagcctgcccaatgagattttgtgggtttttctgtgggacttggggacaaacgatgtggatactcgtgaagccagaactggaagtccggaacaccagagttattta

SEQ ID NO: 149656 - DNA, 120 bp, Artificial Sequence
  ENSG00000105516_24 (sequence is synthesized)
ctggggagtggactgacccccgaatctgggcccataatcgatggaactgggataggactggagcccctaggtcctttacaggggcaaaggcaaaggagaggcacagaattctgtttaccc

SEQ ID NO: 149657 - DNA, 120 bp, Artificial Sequence
  ENSG00000105516_25 (sequence is synthesized)
aggacataagagactggcagcccaggtccctgggtcccccagtggggcgtgctgcagccccgggtcccagagttcttcagaagggaaaacgttagggatgttgtttctggatcctccaat

SEQ ID NO: 149658 - DNA, 120 bp, Artificial Sequence
  ENSG00000105516_26 (sequence is synthesized)
tggggctggggccaagcttcctatattcctaggagaggcctgggatcccagaatcgtggtagcccagtggcgggggttctgggaaggtccaggaggccgatgctccccggagagcagggg

SEQ ID NO: 149659 - DNA, 120 bp, Artificial Sequence
  ENSG00000105516_27 (sequence is synthesized)
gttgggaatctttggaggttgagtggaactaagtgactggaagagcaagaggaaagatgtttccctttgggcacattgaggtctccagggacggactgcaggtcggggattcctgggcac

SEQ ID NO: 149660 - DNA, 120 bp, Artificial Sequence
  ENSG00000105516_28 (sequence is synthesized)
acctgctccaggtccgacctccgggccgaaccagggccctacccttcccagcggcacattcctgcgccacgtgagtcctcccatccctcctccgcgcttcgcgcaggcgccttcaagcgc

SEQ ID NO: 149661 - DNA, 120 bp, Artificial Sequence
  ENSG00000105516_29 (sequence is synthesized)
cagtgcagtagattctttttctctggacagtctggggtctaagcttaggtcgtggattcggtaagtaggattcaggctagactgtgcatctgaagtcctgaggttttagaagcaatagcc

SEQ ID NO: 149662 - DNA, 120 bp, Artificial Sequence
  ENSG00000105516_30 (sequence is synthesized)
ggccttttggctaagatcaagtgtagaagcaatagccctgattcgtgtgttacctagggcaagtcagttatgactgggactcagtttccttgtttgtaaaggtggatatggctccatgat

SEQ ID NO: 149663 - DNA, 120 bp, Artificial Sequence
  ENSG00000105516_31 (sequence is synthesized)
gatatggctccatgatctctaagcatctttatggcttaggggaaccttcatttttctcgttattttggagacggagtctcgctctgttgtccgggctggagtgcagtggtatgatctcag

SEQ ID NO: 149664 - DNA, 120 bp, Artificial Sequence
  ENSG00000105516_32 (sequence is synthesized)
tcaagcaattctccagcctcagcctccctagtagctgggcttaccggcacccgccactacacctgggcaattttcgtacttttagtaaagatgaggtttctccatgttggccatgctggt

SEQ ID NO: 149665 - DNA, 87 bp, Artificial Sequence
  ENSG00000105516_33 (sequence is synthesized)
ttcgtacttttagtaaagatgaggtttcttaaaggtgattcgccgcctcggcttcccaaactgctggggttacaggcgtgagccact

SEQ ID NO: 149666 - DNA, 120 bp, Artificial Sequence
  ENSG00000105516_34 (sequence is synthesized)
tcatattttatattagggagattaatccctggccgaatttatgctagatcccagaaggactttccatgtggctatgataccacagcaaaaagtagcttcaggaaaccccctccttaaaat

SEQ ID NO: 149667 - DNA, 120 bp, Artificial Sequence
  ENSG00000105516_35 (sequence is synthesized)
cagctctgctaggtctacttgtagagacttggagcttctcctattacttgggtccagagctccaccaggcacacttgcaaaggacagtcttcctttggcaatgggatatcagcctgtggc

SEQ ID NO: 149668 - DNA, 120 bp, Artificial Sequence
  ENSG00000105516_36 (sequence is synthesized)
ctgtctctccttactcagcaggcctttgatctctgatgtgggacttcctttggagtgattgcatttggctaggatgaagactgtgccagcccctttaggccttgtttcctgggcctggac

SEQ ID NO: 149669 - DNA, 120 bp, Artificial Sequence
  ENSG00000105516_37 (sequence is synthesized)
ttctcactggtgggagacttcaggcttctgttagcagccagtgccactttctgatttggggtgatttgagcagtcattgcatctttgcatgattttgttttttgccattactggagtctt

SEQ ID NO: 149670 - DNA, 120 bp, Artificial Sequence
  ENSG00000105516_38 (sequence is synthesized)
atgattttgttttttgccattactggagtcttccctagcaagagttgcttgggcttctgttacaagactttgtcattccgggccaggcgcgttggctcacgcctgtaatcctagcacttt

SEQ ID NO: 149671 - DNA, 67 bp, Artificial Sequence
  ENSG00000105516_39 (sequence is synthesized)
acatggtgaaacctcgcctctactaaaagtacaaaaatgttccgggtgtggtgatcaggagaccatc

SEQ ID NO: 149672 - DNA, 67 bp, Artificial Sequence
  ENSG00000105516_40 (sequence is synthesized)
tcatctgtagtcccagctacttgggaggctaatgtaggaaaatcgcttgaacccaggagacggaggt

SEQ ID NO: 149673 - DNA, 71 bp, Artificial Sequence
  ENSG00000105516_41 (sequence is synthesized)
actccatctcaaaaaaaaaaaaaaagaacaaaaattagccggacatggtagcgggcacctataatcccagc

SEQ ID NO: 149674 - DNA, 120 bp, Artificial Sequence
  ENSG00000105516_42 (sequence is synthesized)
agcgagactccatctcaaaaacaaacaagactttgccatacccttgcgtaacacatagctacttgaagcacctaggactggcctggaagtcagatctacaccagtggtttctccttctag

SEQ ID NO: 149675 - DNA, 120 bp, Artificial Sequence
  ENSG00000105516_43 (sequence is synthesized)
tggtttctccttctagagggccctgttgctagggactggatttaccctcacaagcaggaactgggctttaattaaatagtggagtagagagcatctttctgagccccgtggtccttggtt

SEQ ID NO: 149676 - DNA, 120 bp, Artificial Sequence
  ENSG00000105516_44 (sequence is synthesized)
actaaggaggagtcttccttaggaaccaacttccaggatgggaggactttaggtataatcctctggggaggtctcaggatagtcccctttcctaagagacagctcttctctcagtcaggt

SEQ ID NO: 149677 - DNA, 120 bp, Artificial Sequence
  ENSG00000105516_45 (sequence is synthesized)
cctactggggaggaggctattctctggcctcagttcaaggccagcaggtcagaggctggccacagtcattgaaaccacttagacctcacttttgtttgccaaggatggatgaggttgcct

SEQ ID NO: 149678 - DNA, 120 bp, Artificial Sequence
  ENSG00000105516_46 (sequence is synthesized)
tggcaaccaggtcagaaggccccagctctgcgaggattttatgggacaccaaaccccatcaccagggcaccaagctttccttagcaaccaggatctggaaaggcaatgtgcagggcaggg

SEQ ID NO: 149679 - DNA, 120 bp, Artificial Sequence
  ENSG00000105516_47 (sequence is synthesized)
cagtgctcttcattgggagaagccctcagaccatgaaggccttgttgctagggaacaagcatccttagcaagcaagagctaactgcatgcaggcctttatcatgtggggagggctggggt

SEQ ID NO: 149680 - DNA, 120 bp, Artificial Sequence
  ENSG00000105516_48 (sequence is synthesized)
ccgctttgcagagtggagacttgaagcgagttgcttgagggtggggggtctatctcatgcctttactgttgctaggggcccaatctccttagcaaccagggccctagaaaggcagaccct

SEQ ID NO: 149681 - DNA, 120 bp, Artificial Sequence
  ENSG00000105516_49 (sequence is synthesized)
tgggtacctatcccagcagagacctggtgtggtttaggccccgctgctggggctcccttcctctctcgctgggacctgggtccctctggacctcagtgctctccccctcttctcctgcag

SEQ ID NO: 149682 - DNA, 120 bp, Artificial Sequence
  ENSG00000105518_0 (sequence is synthesized)
gaaacccacgaggggacgcggccgaggagggtcgctgtccacccgggggcgtgggagtgaggtaccagattcagcccatttggccccgacgcctctgttctcggaatccgggtgctgcgg

SEQ ID NO: 149683 - DNA, 120 bp, Artificial Sequence
  ENSG00000105518_1 (sequence is synthesized)
attgaggtcccggttcctaacggtgggatcggtgtcctcgggatgagatttggcgtttcctcggggctttggtgggatcggtgtcctcaggatgagatttagggtttcctcggggctttc

SEQ ID NO: 149684 - DNA, 120 bp, Artificial Sequence
  ENSG00000105518_2 (sequence is synthesized)
gggatcttcacctaatatccggtattattttatgagaggagtggtcttggctgtcagaactggatccctggggtgatatttgggaattagtggagtgatctctgaagacctagggctatg

SEQ ID NO: 149685 - DNA, 120 bp, Artificial Sequence
  ENSG00000105518_3 (sequence is synthesized)
atctggagctgctgtggctgaaatttggggcctctgaagtggcatggagattgaggtccagagagcctgagatcttgagggctgacatttggagagatggggtcgagggttgtctttggg

SEQ ID NO: 149686 - DNA, 120 bp, Artificial Sequence
  ENSG00000105518_4 (sequence is synthesized)
ccttgactgctttgggcctttctcactctcattcccgggatgctttgccagaatctctgctggattggccgtaaccctgtccccgagcgggctcacagggtctgaaggccacgcatgagg

SEQ ID NO: 149687 - DNA, 120 bp, Artificial Sequence
  ENSG00000105518_5 (sequence is synthesized)
aaggcgggaacctaggaggcctgattaagatggtccatctactggtcttgtcaggtgcctggggcatgcaaatgtgggtgaccttcgtctcaggcttcctgcttttccgaagccttcccc

SEQ ID NO: 149688 - DNA, 120 bp, Artificial Sequence
  ENSG00000105518_6 (sequence is synthesized)
gacataccttcggactagtgcagagcaaactcttccccttctacttccacatctccatgggctgtgccttcatcaacctctgcatcttggcttcacagcatgcttgggctcagctcacat

SEQ ID NO: 149689 - DNA, 120 bp, Artificial Sequence
  ENSG00000105518_7 (sequence is synthesized)
tctgggaggccagccagctttacctgctgttcctgagccttacgctggccactgtcaacgcccgctggctggaaccccgcaccacagctgccatgtgggccctgcaaaccgtggagaagg

SEQ ID NO: 149690 - DNA, 120 bp, Artificial Sequence
  ENSG00000105518_8 (sequence is synthesized)
agcgaggcctgggtggggaggtaccaggcagccaccagggtcccgatccctaccgccagctgcgagagaaggaccccaagtacagtgctctccgccagaatttcttccgctaccatgggc

SEQ ID NO: 149691 - DNA, 120 bp, Artificial Sequence
  ENSG00000105518_9 (sequence is synthesized)
tgtcctctctttgcaatctgggctgcgtcctgagcaatgggctctgtctcgctggccttgccctggaaataaggagcctctagcatgggccctgcatgctaataaatgcttcttcagaaa

SEQ ID NO: 149692 - DNA, 120 bp, Artificial Sequence
  ENSG00000105518_10 (sequence is synthesized)
cagcttggatgtcatgggtacctggggtggggatggaaataagaggggaaccgggaagtgccctaacacccctgtggtccccataccctgcaggcttcctgcttttccgaagccttcccc

SEQ ID NO: 149693 - DNA, 120 bp, Artificial Sequence
  ENSG00000105518_11 (sequence is synthesized)
atctacgacccgattggcttcgggctcagctgggaggcgggacgaattattggttgggggaaacccacgaggggacgcggccgaggagggtcgctgtccacccgggggcgtgggagtgag

SEQ ID NO: 149694 - DNA, 120 bp, Artificial Sequence
  ENSG00000105519_0 (sequence is synthesized)
acaacacagctaacacaaggccccgcaggcaggactctgggacagacgcaggccagctgcccagagcccagaccaagcatggacgccgtggatgccaccatggagaaactccgggcacag

SEQ ID NO: 149695 - DNA, 120 bp, Artificial Sequence
  ENSG00000105519_1 (sequence is synthesized)
tgcctgtcccgcggggcctcgggcatccagggcctggccaggtttttccgccaactagaccgggacgggagcagatccctggacgctgatgagttccggcagggtctggccaaactcggg

SEQ ID NO: 149696 - DNA, 120 bp, Artificial Sequence
  ENSG00000105519_2 (sequence is synthesized)
ctggtgctggaccaggcggaggcagagggtgtgtgcaggaagtgggaccgcaatggcagcgggacgctggatctggaggagttccttcgggcgctgcggccccccatgtcccaggcccgg

SEQ ID NO: 149697 - DNA, 120 bp, Artificial Sequence
  ENSG00000105519_3 (sequence is synthesized)
gaggctgtcatcgcagctgcatttgccaagctggaccgcagtggggacggcgtcgtgacggtggacgacctccgcggggtgtacagtggccgtgcccaccccaaggtgcgcagtggggag

SEQ ID NO: 149698 - DNA, 120 bp, Artificial Sequence
  ENSG00000105519_4 (sequence is synthesized)
tggaccgaggacgaggtgctgcgccgcttcctggacaacttcgactcctctgagaaggacgggcaggtcacactggcggaattccaggactactacagcggcgtgagtgcctccatgaac

SEQ ID NO: 149699 - DNA, 120 bp, Artificial Sequence
  ENSG00000105519_5 (sequence is synthesized)
acggatgaggagttcgtggccatgatgaccagtgcctggcagctgtgagcagctccggctcagccctgctgccctggcctgtcactccccacccctgccggagacctcccttccctgggc

SEQ ID NO: 149700 - DNA, 120 bp, Artificial Sequence
  ENSG00000105519_6 (sequence is synthesized)
aggcggaggtgggacaaaggtcctaacaggagtcactggctcaggaccccagggagaaacgctctccccacccacgccatgctgaccagagatcttgcagcccctgtggatgcccccgcc

SEQ ID NO: 149701 - DNA, 120 bp, Artificial Sequence
  ENSG00000105519_7 (sequence is synthesized)
gaggtcccccgatccccgcacccggactgctgctccctgcccctcccttgcgggtcccccaggaagccaggtgaccccaggtgggaggctgtgtgtggaggccatcctggaaggaagttt

SEQ ID NO: 149702 - DNA, 120 bp, Artificial Sequence
  ENSG00000105519_8 (sequence is synthesized)
agacctgcccaggtgtggagcgaggggcacaggggcatcctaacctcagaaactgaaataaagcctttgaaaaaaaaatctgtaaaacatcaacccccaatcagaagatggcaaatgggg

SEQ ID NO: 149703 - DNA, 120 bp, Artificial Sequence
  ENSG00000105519_9 (sequence is synthesized)
aataaaaatagcaggtaacatgtccagcgggcccagtatctacattctggtgagcggcccgaggctgggagctctgggcgggggcagaccggcggggccttgcagcaggggtgggggtaa

SEQ ID NO: 149704 - DNA, 120 bp, Artificial Sequence
  ENSG00000105519_10 (sequence is synthesized)
agtgcgggtggtggtggagagaacagggctgtggctggaccccagcactggtgacacgctgggtgggagcatgaggccccaggctgctggaggtcctcgcccggggaggtggaggccgtt

SEQ ID NO: 149705 - DNA, 120 bp, Artificial Sequence
  ENSG00000105519_11 (sequence is synthesized)
cctggtcaggggcttcctgaggcccctggggcatgcagaggccagggttttagttaaaagtttaatgtagttcccaaatacatttcatatgacaatcttacataaatgttccaaaacaca

SEQ ID NO: 149706 - DNA, 120 bp, Artificial Sequence
  ENSG00000105519_12 (sequence is synthesized)
atgcagtgccacagggatctggctctgtcccaggccctgtggggctggcagttgagtaagcagtcaggctgggcgcacccatccctcccccactccccactgcccagcacagtgcattca

SEQ ID NO: 149707 - DNA, 120 bp, Artificial Sequence
  ENSG00000105519_13 (sequence is synthesized)
tcgggcatccagggcctggccaggtgagctgtcccctctcaccttcctgaccccggcccctgagaccactgttccaaccgtgtcccctgcctccaggtttttccgccaactagaccggga

SEQ ID NO: 149708 - DNA, 120 bp, Artificial Sequence
  ENSG00000105519_14 (sequence is synthesized)
gccctgggcatggggcgacagaggatgctgagatgcggagacggggactcctccctaagagctgctgttaagaggcgcctgctggggcatacagccccagtgctctgcacagcgtcttgg

SEQ ID NO: 149709 - DNA, 120 bp, Artificial Sequence
  ENSG00000105519_15 (sequence is synthesized)
gccccgcaggcaggactctgggacagacgcaggccaggtgagcatctgaacaaggggcagtcggccagggtgggcttgcgggagtccccaccttgacctctctcccttccagctgcccag

SEQ ID NO: 149710 - DNA, 88 bp, Artificial Sequence
  ENSG00000105519_16 (sequence is synthesized)
caggcatgagccaccgcgcccagcccacctggggcatttttgttgctgtacaatagaaacaagttctctatatgttccccaggctggt

SEQ ID NO: 149711 - DNA, 120 bp, Artificial Sequence
  ENSG00000105519_17 (sequence is synthesized)
gatttcaggcatgagccgcagtggccggtcagaacctggggcccttttgaactttgattcctcagcaattttgtcagccctggctcgggctgagaagcccctgtgaagccagagagggaa

SEQ ID NO: 149712 - DNA, 120 bp, Artificial Sequence
  ENSG00000105519_18 (sequence is synthesized)
agggacctgtccagggtcacacaggaatcatgcgtcaagcctccccagccacggacttgtctccatccagggcatttcagcccctgcagggcagtggcctgcccctcctccttggagcca

SEQ ID NO: 149713 - DNA, 120 bp, Artificial Sequence
  ENSG00000105520_0 (sequence is synthesized)
atgcaaatgagacgcccggaggccccgcccctccctccacctcggagtctgcgcggcgcggccaggcccggccgaccgcgtctcggtcttcgcgtctgccagcctggctggcagtccgtc

SEQ ID NO: 149714 - DNA, 120 bp, Artificial Sequence
  ENSG00000105520_1 (sequence is synthesized)
tgtccatcccgccgcgccggggcagtctaggcggagcgggggctcaggcggcggcggcctcgacgcgagtgagtgtcgtggttggggtgctggacccagagtgcctaccctcgcctgcct

SEQ ID NO: 149715 - DNA, 120 bp, Artificial Sequence
  ENSG00000105520_2 (sequence is synthesized)
gggcctcagtttccacatctgcacaatgggggtgaccatccctgccctgctggctgccaggagcggctgtgagtcttcaggcgtggatgcagcctgggggaagccatagggcgctttcac

SEQ ID NO: 149716 - DNA, 120 bp, Artificial Sequence
  ENSG00000105520_3 (sequence is synthesized)
aggcctggccttcaccatggcgggagggagaccgcatctgaagaggagtttctccatcatcccctgctttgtcttcgtggagtcggtgctgctgggcattgtgatcctgcttgcttaccg

SEQ ID NO: 149717 - DNA, 120 bp, Artificial Sequence
  ENSG00000105520_4 (sequence is synthesized)
cctggagttcacggacaccttccctgtgcacacccagggattcttctgctatgacagtacctacgccaagccctacccagggcctgaggctgccagccgagtgcctcctgctcttgtcta

SEQ ID NO: 149718 - DNA, 120 bp, Artificial Sequence
  ENSG00000105520_5 (sequence is synthesized)
cgcactggtcactgccgggcccaccctcacgatcctgctgggagagctggcgcgtgcctttttccctgcaccaccttcagccgtcccagtcatcggggagagcaccatcgtgtctggggc

SEQ ID NO: 149719 - DNA, 120 bp, Artificial Sequence
  ENSG00000105520_6 (sequence is synthesized)
ctgctgccgcttcagccccccagtgcggaggctggtccgcttcctgggggtctactccttcggcctcttcaccacgaccatcttcgccaacgcggggcaggtggtgaccggcaatcccac

SEQ ID NO: 149720 - DNA, 120 bp, Artificial Sequence
  ENSG00000105520_7 (sequence is synthesized)
gccacacttcctgtccgtgtgccgccccaactacacggccctgggctgcctgccaccttctccggatcggccaggtcccgaccgctttgtcactgaccagggtgcctgcgctggcagtcc

SEQ ID NO: 149721 - DNA, 120 bp, Artificial Sequence
  ENSG00000105520_8 (sequence is synthesized)
cagcctcgtggccgccgcgcgccgcgccttcccctgcaaggatgcggccctctgcgcctacgcggtcacctacacagcgatgtacgtgactctcgtgttccgcgtgaagggctcccgcct

SEQ ID NO: 149722 - DNA, 120 bp, Artificial Sequence
  ENSG00000105520_9 (sequence is synthesized)
ggtcaaaccctcgctctgcctggccttgctgtgcccggccttcctggtgggcgtggtccgcgtggccgagtaccgaaaccactggtcggacgtgctggctggcttcctgacaggggcggc

SEQ ID NO: 149723 - DNA, 120 bp, Artificial Sequence
  ENSG00000105520_10 (sequence is synthesized)
catcgccacctttttggtcacctgcgttgtgcataactttcagagccggccaccctctggccgaaggctctctccctgggaggacctgggccaagcccccaccatggatagccccctcga

SEQ ID NO: 149724 - DNA, 120 bp, Artificial Sequence
  ENSG00000105520_11 (sequence is synthesized)
atccccagctgtgtctcctccagggccccagccatgtgttcgtcgccccgtgtgccccgtcctcgattgaggtctgagccgacgcccttgcccctgcccctacccctgccagcgcccacc

SEQ ID NO: 149725 - DNA, 120 bp, Artificial Sequence
  ENSG00000105520_12 (sequence is synthesized)
cccagccagggcccctcgccttcctcccctggacctggggggccaggcgggggtggtggacgtggccggaagctgctgctgcccacgcccctgctgcgggacctgtacaccctgagtgga

SEQ ID NO: 149726 - DNA, 120 bp, Artificial Sequence
  ENSG00000105520_13 (sequence is synthesized)
ctctatccctcccccttccaccgggacaacttcagcccttacctgtttgccagccgtgaccacctgctgtgaggcccgaccacccacccagaatctgcccagtccccacttcttccctgc

SEQ ID NO: 149727 - DNA, 120 bp, Artificial Sequence
  ENSG00000105520_14 (sequence is synthesized)
cacgcgtgtgtgtgcgtgtgccacgtgagtgccaaagtcccctgccccccaagccagccagacccagacattagaagatggctagaaggacatttaggagacatctgcctctctggccct

SEQ ID NO: 149728 - DNA, 120 bp, Artificial Sequence
  ENSG00000105520_15 (sequence is synthesized)
ctgagatatcccgatgggcacaaatggaaggtgcgcacttgcccctactattgcccttttaagggccaaagcttgaccccattggccattgcctggctaatgagaacccctggttctcag

SEQ ID NO: 149729 - DNA, 120 bp, Artificial Sequence
  ENSG00000105520_16 (sequence is synthesized)
aattttaaccaaaaggagttggctccaaccaatgggagccttcccctcacttcttagaatcctcctgcaagagggcaactccagccagtgttcagcgactgaacagccaataggagccct

SEQ ID NO: 149730 - DNA, 120 bp, Artificial Sequence
  ENSG00000105520_17 (sequence is synthesized)
tggtttccagaatttctagagtgggtgggcatgattccagtcaatgggggaccgcccgtgtctaagcatgtgcaaaggagaggagggagatgaggtcattgtttgtcattgagtcttctc

SEQ ID NO: 149731 - DNA, 120 bp, Artificial Sequence
  ENSG00000105520_18 (sequence is synthesized)
tcagaatcagcgagcccagctgtagggtggggggcaggctcccccatggcagggtccttggggtaccccttttcctctcagcccctccctgtgtgcggcctctccacctctcacccactc

SEQ ID NO: 149732 - DNA, 120 bp, Artificial Sequence
  ENSG00000105520_19 (sequence is synthesized)
tctcctaatcccctacttaagtagggcttgccccacttcagaggttttggggttcagggtgctgtgtctccccttgcctgtgcccaggtcatcccaaacccttctgttatttattagggc

SEQ ID NO: 149733 - DNA, 120 bp, Artificial Sequence
  ENSG00000105520_20 (sequence is synthesized)
tgtgggaagggtttttcttctttttcttggaacctgcccctgttcttcacactgccccccatgcctcagcctcatacagatgtgccatcatggggggcatgggtggagcagaggggctcc

SEQ ID NO: 149734 - DNA, 120 bp, Artificial Sequence
  ENSG00000105520_21 (sequence is synthesized)
ctcaccccgggcaggcaaaggcagtgggtagaggaggcactgcccccctttcctgccccctcctcatctttaataaagacctggcttctcatctttaataaagacctgtttgtaacagaa

SEQ ID NO: 149735 - DNA, 120 bp, Artificial Sequence
  ENSG00000105520_22 (sequence is synthesized)
gagacaatgaagacctcctaggaggcaggtgggccggtaagggtgggtgaggggatgggctggaaggccagaagactccatcttggtcttgcccacagatcctgctgggagagctggcgc

SEQ ID NO: 149736 - DNA, 120 bp, Artificial Sequence
  ENSG00000105520_23 (sequence is synthesized)
ctcccggctggagagggtggtgggtggagggggccaaggagacaggaaggaagtcaggcaagaggtgggggtctcagaaccatggggaagtggagggatcacccatctctgtggacatag

SEQ ID NO: 149737 - DNA, 120 bp, Artificial Sequence
  ENSG00000105520_24 (sequence is synthesized)
gtcctgggcggacagccccaaagaatgaaagggagcacccccgtcttcttcccagggggacacggttaatcatgagaactgtggttgtcttttccatggggctcttcacctgatgagctc

SEQ ID NO: 149738 - DNA, 120 bp, Artificial Sequence
  ENSG00000105520_25 (sequence is synthesized)
cttgtggctgtggccggtagggcccagggggccactagccccttccgtctgtctctttgtctcaggaacccgaggtctgcaggccgcattcgacaccggcacggctcaccccatccagtg

SEQ ID NO: 149739 - DNA, 120 bp, Artificial Sequence
  ENSG00000105523_0 (sequence is synthesized)
tgtcagaacagtgtggcaggggctgctgcagggagccatttggacatctgcagggccccgccggaggcctcggatggccacgtagggtctgcctatcaggagaacccccagatgatcaca

SEQ ID NO: 149740 - DNA, 120 bp, Artificial Sequence
  ENSG00000105523_1 (sequence is synthesized)
gtccccagagacagccagacccccggggacccagcctctcacagtcagtcctcccacccgagtgaccccgatggcggcctcccagctggcggcgctggaaggagtggactccggtcccag

SEQ ID NO: 149741 - DNA, 120 bp, Artificial Sequence
  ENSG00000105523_2 (sequence is synthesized)
ggtgcccggggccagccccggctttctatattccgagggccagcggctggcactggaggctctgttgagcaagggcgcggaggcgttccagacctgcgtgcagcgcgaggagctgtggcc

SEQ ID NO: 149742 - DNA, 120 bp, Artificial Sequence
  ENSG00000105523_3 (sequence is synthesized)
cttcctcagtgcggatgaggttcagggcttggcagcggcagctgaagactggacagtggccaagcaggagcccagcgggatggcagagggagccaccaccaccgatgtggacgcgggcag

SEQ ID NO: 149743 - DNA, 120 bp, Artificial Sequence
  ENSG00000105523_4 (sequence is synthesized)
cctgagctactggcctgggcagtcggagcagccggcgcccgtcctgcggctgggctggccagtggactctgcgtggaaaggcatcacccgggcgcagctgtacacccagcctcctggaga

SEQ ID NO: 149744 - DNA, 120 bp, Artificial Sequence
  ENSG00000105523_5 (sequence is synthesized)
gggtcagccgcccctcaaggagctggtgcggctggagatccaggctgcccacaagctggtggccgtggtcatggacgtcttcactgacccagacctgcttttggacttggtggatgctgc

SEQ ID NO: 149745 - DNA, 120 bp, Artificial Sequence
  ENSG00000105523_6 (sequence is synthesized)
cacgcgccgctgggtacctgtctacctgctcctggaccgccagcagctgcctgccttcctggaactggcccagcagctgggggtgaacccctggaacacggagaacgtggatgtccgtgt

SEQ ID NO: 149746 - DNA, 120 bp, Artificial Sequence
  ENSG00000105523_7 (sequence is synthesized)
cgtgcggggctgcagcttccagagccgctggcgacggcaggtgagcggcaccgtgcgggagaagtttgtgctgctggacggcgagagggtcatctcaggatcctacagcttcacgtggag

SEQ ID NO: 149747 - DNA, 120 bp, Artificial Sequence
  ENSG00000105523_8 (sequence is synthesized)
acgcctgcaccgaggcctggtgaccctgctgactggtgaaattgttgacgccttcagccttgagttccggacgctgtacgcggcctcctgcccgctcccacctgcgcccccccagaaacc

SEQ ID NO: 149748 - DNA, 80 bp, Artificial Sequence
  ENSG00000105523_9 (sequence is synthesized)
ctcggtcataggtggcctgcagcggggccgcagcccgcaccgcgtgtcccgccgccgctccgtggcccccgcgtcgcctc

SEQ ID NO: 149749 - DNA, 120 bp, Artificial Sequence
  ENSG00000105523_10 (sequence is synthesized)
ccgcgtctcccctgctaccccggggccggcactcagtgacattctaaggagtgtgcagcgcgcccggacccccagcggccccccggcccggcccagccgctccatgtgggacctaagccg

SEQ ID NO: 149750 - DNA, 120 bp, Artificial Sequence
  ENSG00000105523_11 (sequence is synthesized)
cctgtcccagctgtctggctccagtgatggggacaacgagctcaagaaatcctggggctccaaggacactccagccaaggctctgatgaggcagcggggcactggaggaggcccctgggg

SEQ ID NO: 149751 - DNA, 120 bp, Artificial Sequence
  ENSG00000105523_12 (sequence is synthesized)
ggaagtggactcccgacctccgtggggcggtgccctgcccctgccccccgcccaccgcctccgctatctgtccccagcccgaaggcggttcggtggggatgctacattcaaacttcaaga

SEQ ID NO: 149752 - DNA, 120 bp, Artificial Sequence
  ENSG00000105523_13 (sequence is synthesized)
gcccagaggcgtcaggccgtcagactgggccccccgggcaggacttggggggcaaccctgaacaggagcccaagccaaatctgctggcccacccaaggagcagtgccggacaactgtcgg

SEQ ID NO: 149753 - DNA, 120 bp, Artificial Sequence
  ENSG00000105523_14 (sequence is synthesized)
ctcagagccctctgcctcaatgccctgccttggacaaggcttctggcctcggcgtctgtcaagcagaagggatgtttgtcacttgttctgcaacttgggccgggagtggtggctcatgcc

SEQ ID NO: 149754 - DNA, 65 bp, Artificial Sequence
  ENSG00000105523_15 (sequence is synthesized)
tgcctgtaatccctgcactttgggaggctaaggtgggagggttgcttttaaaaaaacaaattagt

SEQ ID NO: 149755 - DNA, 120 bp, Artificial Sequence
  ENSG00000105523_16 (sequence is synthesized)
gaagccgggaagcaccgcagaagtagaagccggggagccacagcctacgttctcggaaaaagcaggcactggaagggaggccattgagcccggcactagccggtgtggccccggctttct

SEQ ID NO: 149756 - DNA, 120 bp, Artificial Sequence
  ENSG00000105523_17 (sequence is synthesized)
ctccctggattccaggtcgaggcctgatgagtgaggccagaagccgggaagcaccgcagaagtagaagccggggagccacagcctacgttctcggaaaaagcaggcactggaagggaggc

SEQ ID NO: 149757 - DNA, 120 bp, Artificial Sequence
  ENSG00000105523_18 (sequence is synthesized)
ccccgaggttgggtcaggagcctcaaggggataactgaggcttgggagggagacagggcgagatagagactggcccctgtccgggaagaagcgtccgggccccaggcaggggcagccagc

SEQ ID NO: 149758 - DNA, 120 bp, Artificial Sequence
  ENSG00000105523_19 (sequence is synthesized)
ctgaggagggtggctggttaggtggcactcacacctagatgggctgtgaagatcatagacctgtcccatagtaatggagacccctgtagcgcatttcaccctccactgcagcagctggaa

SEQ ID NO: 149759 - DNA, 120 bp, Artificial Sequence
  ENSG00000105538_0 (sequence is synthesized)
agtgctgggagccgtggcagaggcaagagcagtggaactgacccaggccagtggagccagggcctccgggtgtgccggacccgaagcaggggccatgctgtctggtgaacggaaggaggg

SEQ ID NO: 149760 - DNA, 120 bp, Artificial Sequence
  ENSG00000105538_1 (sequence is synthesized)
cggaagcccccgcttcgggaagcttcatctccccgtgggcctgtggatcaattcccccaggaagcagctggcgaagctggggcggcgctggcccagcgcagcctctgtcaagtcttcttc

SEQ ID NO: 149761 - DNA, 120 bp, Artificial Sequence
  ENSG00000105538_2 (sequence is synthesized)
gtcggacacggggagccgcagcagcgagccgctacctccgcccccgccgcacgtggagctgcggcgagtgggcgctgtcaaggcggccgggggagcctccggtagccgcgccaagcgcat

SEQ ID NO: 149762 - DNA, 120 bp, Artificial Sequence
  ENSG00000105538_3 (sequence is synthesized)
gcatctcccagctcttccggggctcggggaccgggaccacggggtccagcggcgcaggaggccctgggaccccggggggcgcgcagcgctgggccagcgagaagaagctgccggagctgg

SEQ ID NO: 149763 - DNA, 120 bp, Artificial Sequence
  ENSG00000105538_4 (sequence is synthesized)
gggcgtggcccccgagcccccgctggctacccgcgccacggcgcctccgggggtcctcaagatcttcggcgccggactggcatcgggcgccaactacaagagcgtgctggccacggcgcg

SEQ ID NO: 149764 - DNA, 120 bp, Artificial Sequence
  ENSG00000105538_5 (sequence is synthesized)
ctccacggcgcgcgagctcgtggccgaggcgctagagcgctacggcctagcaggcagccccggcggtggccccggcgagagcagctgcgtggacgccttcgctttgtgcgacgctctggg

SEQ ID NO: 149765 - DNA, 120 bp, Artificial Sequence
  ENSG00000105538_6 (sequence is synthesized)
gctttgtgcgacgctctgggccggcccgcggcggcgggcgtgggaagcggcgagtggcgggcggagcacctgcgcgtgctgggcgactccgagcgcccgctgctggtgcaggagctgtgg

SEQ ID NO: 149766 - DNA, 120 bp, Artificial Sequence
  ENSG00000105538_7 (sequence is synthesized)
gcggcgcttcgagttgcgcggccgcgaggaggcgcggcgcctggagcaggaggccttcggggccgcggacagcgaaggcaccggcgccccttcgtggcggccacagaagaaccgctcccg

SEQ ID NO: 149767 - DNA, 120 bp, Artificial Sequence
  ENSG00000105538_8 (sequence is synthesized)
ggcggcgtcgggtggggcagcgctggccagtcctggcccggggaccggatcaggggccccagctgggtctggaggcaaggagcgctcagaaaacttgtctttgcggcgcagcgtgtcgga

SEQ ID NO: 149768 - DNA, 120 bp, Artificial Sequence
  ENSG00000105538_9 (sequence is synthesized)
gcttagccttcaggggcggcggcggcggcagcaggagcggagacagcaggcacttagcatggccccaggggcagccgacgcccaaatcggaactgcagaccccggggacttcgatcagtt

SEQ ID NO: 149769 - DNA, 120 bp, Artificial Sequence
  ENSG00000105538_10 (sequence is synthesized)
gactcagtgcctcatccaggcccccagcaaccgcccctacttcctgctgctccagggctaccaggacgcccaggactttgtggtgtatgtgatgacgcgagagcagcacgtgtttgggcg

SEQ ID NO: 149770 - DNA, 120 bp, Artificial Sequence
  ENSG00000105538_11 (sequence is synthesized)
aggtgggaactcgtctggccgcggggggtccccggctccctatgtggacaccttcctcaacgccccggacatcctgccgcgtcactgcacagtgcgcgcgggccctgagcacccggccat

SEQ ID NO: 149771 - DNA, 120 bp, Artificial Sequence
  ENSG00000105538_12 (sequence is synthesized)
ggtgcgcccgtcccggggcgccccagtcacgcacaacgggtgcctcctgctgcgggaggctgagctgcacccgggcgacctcctggggctgggcgagcacttcctgttcatgtacaagga

SEQ ID NO: 149772 - DNA, 120 bp, Artificial Sequence
  ENSG00000105538_13 (sequence is synthesized)
tgggccttctcctgtcgcctgtgcggccgcggcctgcaggagcgcggcgaggcactggccgcctacctggacggccgtgagccagtcctgcgcttccggccgcgcgaggaggaggcgctg

SEQ ID NO: 149773 - DNA, 120 bp, Artificial Sequence
  ENSG00000105538_14 (sequence is synthesized)
ctgggcgagatcgtgcgcgccgcagccgccggctcgggagacctgccgcccctcgggcccgccacgctgctggcgctgtgcgtgcagcattccgcccgtgagctggagctgggccacctg

SEQ ID NO: 149774 - DNA, 120 bp, Artificial Sequence
  ENSG00000105538_15 (sequence is synthesized)
ccacgactgctgggccgcctggcccggctcatcaaggaggccgtctgggaaaagattaaggaaattggagaccgtcagccagaaaaccaccctgagggggtccccgaggtgcccctgact

SEQ ID NO: 149775 - DNA, 120 bp, Artificial Sequence
  ENSG00000105538_16 (sequence is synthesized)
cctgaagctgtgtctgtggagctgcggccactcatgctgtggatggccaacaccacggagctgcttagctttgtgcaggagaaggtgctggaaatggagaaggaggctgaccaagaggac

SEQ ID NO: 149776 - DNA, 120 bp, Artificial Sequence
  ENSG00000105538_17 (sequence is synthesized)
ccacagctctgcaatgacttggaattatgtgatgaggccatggccctcctggatgaggtcatcatgtgtaccttccagcagtctgtctactacctcaccaagactctctattcaacgctg

SEQ ID NO: 149777 - DNA, 120 bp, Artificial Sequence
  ENSG00000105538_18 (sequence is synthesized)
cctgctctcctggatagtaaccctttcacagctggtgcagagctgccggggcctggcgcggagctgggggccatgcctccaggattgagacctaccctgggcgtgttccaggcagccttg

SEQ ID NO: 149778 - DNA, 120 bp, Artificial Sequence
  ENSG00000105538_19 (sequence is synthesized)
gagctgaccagccagtgcgagctgcaccctgacctcgtgtctcagacttttggctacttgttcttcttctccaacgcatcccttctcaactcgctgatggaacgaggtcaaggccggcct

SEQ ID NO: 149779 - DNA, 120 bp, Artificial Sequence
  ENSG00000105538_20 (sequence is synthesized)
ttctatcaatggtcccgagctgttcaaatccgaaccaacctggacctcgtcttggactggctacagggagctgggctgggcgacattgccactgagttcttccggaaactctccatggct

SEQ ID NO: 149780 - DNA, 120 bp, Artificial Sequence
  ENSG00000105538_21 (sequence is synthesized)
gtgaacctgctctgtgtgccccgcacttccctgctcaaggcttcatggagcagcctaagaaccgaccaccccaccttgacccccgcccagctgcaccatctgctcagccactatcagctg

SEQ ID NO: 149781 - DNA, 120 bp, Artificial Sequence
  ENSG00000105538_22 (sequence is synthesized)
ggccctggccgcgggccgccagccgcgtgggaccctccccctgcagagcgggaggctgtggacacaggggacatcttcgaaagcttctcctcgcacccgcccctcatcctccccctgggg

SEQ ID NO: 149782 - DNA, 120 bp, Artificial Sequence
  ENSG00000105538_23 (sequence is synthesized)
agctcgcgcctgcgcctcactggtccagtgacggacgatgccttgcaccgtgaactccgtaggctccgccgcctcctctgggatcttgagcagcaggagctgccagccaattatcgccat

SEQ ID NO: 149783 - DNA, 120 bp, Artificial Sequence
  ENSG00000105538_24 (sequence is synthesized)
gggcctcccgtggccacgtctccttgagaaccaataccaaacgagcgcgcgaaccttgaaatgtcacgggcttctacggacaggagcccgcctgagcgcaaagctttctgggagttgtag

SEQ ID NO: 149784 - DNA, 120 bp, Artificial Sequence
  ENSG00000105538_25 (sequence is synthesized)
ttcttatcccgcgtggaatgttgggagattgagttttcgggaagtagcggatgggacggtgggagcatgggcttaggatgtgaatgccagggagcaataaaggtatccgtggtatcggca

SEQ ID NO: 149785 - DNA, 120 bp, Artificial Sequence
  ENSG00000105538_26 (sequence is synthesized)
ttggggcttaggcgggacgggggctggttgctggtggtggcttggagtggcctgaagtggctccgaattggggttagggccttctgcaggcatttcagactgccttggaggaggtggggt

SEQ ID NO: 149786 - DNA, 120 bp, Artificial Sequence
  ENSG00000105538_27 (sequence is synthesized)
gtgtagcggggtctgcggagtagtagatcctgaggagcgtttgtggagtccagtggaatgggcaggagtccgcaggggcctaagggattcgccctgtgtggcaccggcgccccttcgtgg

SEQ ID NO: 149787 - DNA, 120 bp, Artificial Sequence
  ENSG00000105538_28 (sequence is synthesized)
attacccttgaccttaacaccacttcttggcattctcagggtttctggcttatggtgggcttgatgccctatgtgcaagaatgagagaggatcttttgggacagctaactatcagtctct

SEQ ID NO: 149788 - DNA, 120 bp, Artificial Sequence
  ENSG00000105538_29 (sequence is synthesized)
aagttcctctagcagcctggattgtgaagccctttcctccttcacttcctgtacattcctgccaagtgtgcgtttatttcttctgtttctgacctcatttcctgtccttggcctgatctc

SEQ ID NO: 149789 - DNA, 120 bp, Artificial Sequence
  ENSG00000105538_30 (sequence is synthesized)
attttccactggcaaactgccatcccactcccacttcctgactctccattctttttctttcctttgggaattcaggatgaataattctttgactgaaagggaactctttgtccagtatcc

SEQ ID NO: 149790 - DNA, 120 bp, Artificial Sequence
  ENSG00000105538_31 (sequence is synthesized)
tttgtcctccttgagctgtctctgctgagaactacaagtcccacaatgcacaagaggtgatcttaaaatactcgagaaacttgtatacccttctatcaagtagggatttgctcacggaga

SEQ ID NO: 149791 - DNA, 120 bp, Artificial Sequence
  ENSG00000105538_32 (sequence is synthesized)
ccctttgggtgttgactgtagaatggactacaactcccagaagactttggtggagctccccactatcttcatgctctattaccctgaagcttcctgggagttgtagtccaatcacttgtt

SEQ ID NO: 149792 - DNA, 120 bp, Artificial Sequence
  ENSG00000105549_0 (sequence is synthesized)
agacacatttgggtgccgggagagtgaggccgcgggggctgggaagggaccggtgtatgggggacagcaggcgaaggtcactcgggaaccagcccagctctgaggctgcgggcaggtcgg

SEQ ID NO: 149793 - DNA, 120 bp, Artificial Sequence
  ENSG00000105549_1 (sequence is synthesized)
aaagggagcaggacggcgacccccgtggcctccagagctctgtgtacgagagccggcgggtcacagaccccgaacgccaggacctggacaatgcagagctgggaccagaagacccagaag

SEQ ID NO: 149794 - DNA, 120 bp, Artificial Sequence
  ENSG00000105549_2 (sequence is synthesized)
aggagcttccccccgaggaggtggccggggaggagttcccggagaccctggatcccaaagaggcactttctgagttggagagagtcctggacaaggacttggaagaggacattcctgaaa

SEQ ID NO: 149795 - DNA, 120 bp, Artificial Sequence
  ENSG00000105549_3 (sequence is synthesized)
tcagccggctgtccatcagccagaagctccccagcaccaccatgaccaaagcaaggaagaggaggaggcggaggaggctcatggagctggcagagcccaagataaactggcaagtcctga

SEQ ID NO: 149796 - DNA, 120 bp, Artificial Sequence
  ENSG00000105549_4 (sequence is synthesized)
aagacaggaagggacgctgtggtaaggggtatgcctggatctccccatgtaagatgagcttgcacttctgtctctgctggccctctgtgtactggaccgagcggttccttgaggacacca

SEQ ID NO: 149797 - DNA, 120 bp, Artificial Sequence
  ENSG00000105549_5 (sequence is synthesized)
ccctcaccatcacagtgcccgcggtgtcccgccgcgtggaggaactgtctcggcccaagagattctacctggaatattacaacaacaacaggacgactcctgtctggcccattcctcggt

SEQ ID NO: 149798 - DNA, 120 bp, Artificial Sequence
  ENSG00000105549_6 (sequence is synthesized)
gtgtcccaggtatccagggcagcccaaatggcagtccccagctcgcggatcctccagttgtcaaagccgaaggccccagccaccctcttggaagagtgggaccccgtgccaaaacccaag

SEQ ID NO: 149799 - DNA, 120 bp, Artificial Sequence
  ENSG00000105549_7 (sequence is synthesized)
ccacatgtgtcagaccataaccgcctccttcacttggccaggcccaaagctcagtcggacaagtgcgttcctgaccgagatcctcgctgggaggtgctggatgtcaccaagaaggtggtg

SEQ ID NO: 149800 - DNA, 120 bp, Artificial Sequence
  ENSG00000105549_8 (sequence is synthesized)
gccagcccccggatcatctccctggccaagcccaaagtgcgcaagggcctcaacgagggatacgacaggcgtcccctcgcctctatgagcttgccacccccaaaagcatcaccagaaaag

SEQ ID NO: 149801 - DNA, 120 bp, Artificial Sequence
  ENSG00000105549_9 (sequence is synthesized)
tgtgatcaacccaggcctggcctctaagacctccgctcccagtaaacaccctcaggcaccctaaccctgtgtatgtgattattctgagctttttggcctggagaagggagggcgggctag

SEQ ID NO: 149802 - DNA, 120 bp, Artificial Sequence
  ENSG00000105549_10 (sequence is synthesized)
aaggccaaaagaaggatgaggaggacaataatatttatttttgcatccaacctgcgacttgtccagctgtttattttccgagtcactttcattgaccatctcgagcgccttctgaatctc

SEQ ID NO: 149803 - DNA, 73 bp, Artificial Sequence
  ENSG00000105549_11 (sequence is synthesized)
agtcactttcattgaccatctcgagcgccttctgaatctcttcagtccagacttattcgtccattcctgaggg

SEQ ID NO: 149804 - DNA, 120 bp, Artificial Sequence
  ENSG00000105549_12 (sequence is synthesized)
gcgagcagtggagctgcggttggtccaggccttcgtggtgccaaagtcctccctcagagacccctcgagggaaaggagaggcgggtgggcagggtgagtgcagacaaaaggcgcttgagc

SEQ ID NO: 149805 - DNA, 120 bp, Artificial Sequence
  ENSG00000105549_13 (sequence is synthesized)
ctctgcacccttcccgggctcctcctgtccccactgctcggctcccctcccccagctgccaccacatccagcaaacttagggtaggtggggttggccagttaaggaggtggccagacact

SEQ ID NO: 149806 - DNA, 120 bp, Artificial Sequence
  ENSG00000105550_0 (sequence is synthesized)
ctgtcagctgaggatccagccgaaagaggagccaggcactcaggccacctgagtctactcacctggacaactggaatctggcaccaattctaaaccactcagcttctccgagctcacacc

SEQ ID NO: 149807 - DNA, 120 bp, Artificial Sequence
  ENSG00000105550_1 (sequence is synthesized)
ccggagatcacctgaggacccgagccattgatggactcggacgagaccgggttcgagcactcaggactgtgggtttctgtgctggctggtcttctgctgggagcctgccaggcacacccc

SEQ ID NO: 149808 - DNA, 120 bp, Artificial Sequence
  ENSG00000105550_2 (sequence is synthesized)
atccctgactccagtcctctcctgcaattcgggggccaagtccggcagcggtacctctacacagatgatgcccagcagacagaagcccacctggagatcagggaggatgggacggtgggg

SEQ ID NO: 149809 - DNA, 120 bp, Artificial Sequence
  ENSG00000105550_3 (sequence is synthesized)
gggagttattcaaatcttgggagtcaagacatccaggttcctgtgccagcggccagatggggccctgtatggatcgctccactttgaccctgaggcctgcagcttccgggagctgcttct

SEQ ID NO: 149810 - DNA, 120 bp, Artificial Sequence
  ENSG00000105550_4 (sequence is synthesized)
tgaggacggatacaatgtttaccagtccgaagcccacggcctcccgctgcacctgccagggaacaagtccccacaccgggaccctgcaccccgaggaccagctcgcttcctgccactacc

SEQ ID NO: 149811 - DNA, 120 bp, Artificial Sequence
  ENSG00000105550_5 (sequence is synthesized)
aggcctgccccccgcactcccggagccacccggaatcctggccccccagccccccgatgtgggctcctcggaccctctgagcatggtgggaccttcccagggccgaagccccagctacgc

SEQ ID NO: 149812 - DNA, 120 bp, Artificial Sequence
  ENSG00000105550_6 (sequence is synthesized)
ttcctgaagccagaggctgtttactatgacatctcctctttatttattaggttatttatcttatttatttttttatttttcttacttgagataataaagagttccagaggaggataagaa

SEQ ID NO: 149813 - DNA, 120 bp, Artificial Sequence
  ENSG00000105550_7 (sequence is synthesized)
acagatgaggttgaggttggcccacggccaggtgagaggcttccaaggcaggatacttgtgtctcagatgcggtcgcttctttcatacagcaattgccgccttgctgaggatcaaggaac

SEQ ID NO: 149814 - DNA, 120 bp, Artificial Sequence
  ENSG00000105550_8 (sequence is synthesized)
ctcagtgtcagatcacgccctccccccaaacttagaaattcagatggggcgcagaaatttctcttgttctgcgtgatctgcatagatggtccaagaggtggtttttccaggagcccagca

SEQ ID NO: 149815 - DNA, 120 bp, Artificial Sequence
  ENSG00000105550_9 (sequence is synthesized)
cccctcctccctccgactcagacccaggagtctggccctccattgaaaggaccccaggttacatcatccattcaggctgcccttgccacgatggaattctgtagctcctgccaaatgggt

SEQ ID NO: 149816 - DNA, 120 bp, Artificial Sequence
  ENSG00000105552_0 (sequence is synthesized)
acagttacgcgccgcacggatcatggccgcagccgctctggggcagatctgggcacgaaagcttctctctgtcccttggcttctgtgtggtcccagaagatatgcctcctccagtttcaa

SEQ ID NO: 149817 - DNA, 120 bp, Artificial Sequence
  ENSG00000105552_1 (sequence is synthesized)
ggctgcagacctgcagctggaaatgacacagaagcctcataagaagcctggccccggcgagcccctggtgtttgggaagacatttaccgaccacatgctgatggtggaatggaatgacaa

SEQ ID NO: 149818 - DNA, 120 bp, Artificial Sequence
  ENSG00000105552_2 (sequence is synthesized)
gggctggggccagccccgaatccagcccttccagaacctcacgctgcacccagcctcctccagcctccactactccctgcagctgtttgagggcatgaaggcgttcaaaggcaaagacca

SEQ ID NO: 149819 - DNA, 120 bp, Artificial Sequence
  ENSG00000105552_3 (sequence is synthesized)
gcaggtgcgcctcttccgcccctggctcaacatggaccggatgctgcgctcagccatgcgcctgtgcctgccgagtttcgacaagctggagttgctggagtgcatccgccggctcatcga

SEQ ID NO: 149820 - DNA, 120 bp, Artificial Sequence
  ENSG00000105552_4 (sequence is synthesized)
agtggacaaggactgggtccccgatgccgccggcaccagcctctatgtgcggcctgtgctcattgggaacgagccctcgctgggtgtcagccagcccacgcgcgcgctcctgttcgtcat

SEQ ID NO: 149821 - DNA, 120 bp, Artificial Sequence
  ENSG00000105552_5 (sequence is synthesized)
tctctgcccagtgggtgcctacttccctggaggctccgtgaccccggtctccctcctggccgacccagccttcatccgggcctgggtgggcggggtcggcaactacaagttaggtgggaa

SEQ ID NO: 149822 - DNA, 120 bp, Artificial Sequence
  ENSG00000105552_6 (sequence is synthesized)
tgggcccaccgtgttagtgcaacaggaggcactcaagcggggctgtgaacaggtcctctggctgtatgggcccgaccaccagctcaccgaggtgggaaccatgaacatctttgtctactg

SEQ ID NO: 149823 - DNA, 120 bp, Artificial Sequence
  ENSG00000105552_7 (sequence is synthesized)
gacccacgaagatggggtgctggagctggtgacgcccccgctgaatggtgttatcctgcctggagtggtcagacagagtctactggacatggctcagacctggggtgagttccgggtggt

SEQ ID NO: 149824 - DNA, 120 bp, Artificial Sequence
  ENSG00000105552_8 (sequence is synthesized)
ggagcgcacgatcaccatgaagcagttgctgcgggccctggaggagggccgcgtgcgggaagtctttggctcgggcaccgcttgccaggtctgcccagtgcaccgaatcctgtacaaaga

SEQ ID NO: 149825 - DNA, 120 bp, Artificial Sequence
  ENSG00000105552_9 (sequence is synthesized)
caggaacctccacattcccaccatggaaaatgggcctgagctgatcctccgcttccagaaggagctgaaggagatccagtacggaatcagagcccacgagtggatgttcccggtgtgaag

SEQ ID NO: 149826 - DNA, 120 bp, Artificial Sequence
  ENSG00000105552_10 (sequence is synthesized)
ctgcaggctgtgctccagatccaccgacccgtagcatctcgtcacgccagcactcgcctccctaccaatgactcacctgaagtgcaatacgaaataaaaggccagcgggcggcgtctggg

SEQ ID NO: 149827 - DNA, 120 bp, Artificial Sequence
  ENSG00000105552_11 (sequence is synthesized)
tctctggcgcccccatgtggttgcgacactcccaaagccgtaagggccgacccaggcatcttggcccccagcccctcgtcgcgggttcaggtccgcccattactccttgtcgtgcggtca

SEQ ID NO: 149828 - DNA, 120 bp, Artificial Sequence
  ENSG00000105552_12 (sequence is synthesized)
aggatacaccttggccccgattccggatctctccgttctcaggccagacccctggtgctgccgttgatttttttttctctgtctttgctgcaattttgaaataaaatgccaaagaacaca

SEQ ID NO: 149829 - DNA, 120 bp, Artificial Sequence
  ENSG00000105552_13 (sequence is synthesized)
agttacgcgccgcacggatcatggccgcagccgctctggggcagaagcatggctgcaaggctgagcagtctagatgtcgccacccaaaggcaatctggggacccacgctctgatcacccc

SEQ ID NO: 149830 - DNA, 120 bp, Artificial Sequence
  ENSG00000105552_14 (sequence is synthesized)
ggaatccctggagcctcacaccagcaagaccacgctgcaggcccatctcccagcaactcacctagcgacaagtgaccacgcccattcacgtccatcttccagaatcagtgccaactcacc

SEQ ID NO: 149831 - DNA, 120 bp, Artificial Sequence
  ENSG00000105552_15 (sequence is synthesized)
cagctcacagggcaggccaggccaggccactctgtctctctcaacctcacgccccaacgcctccccacagggctggggaaagaggccttgtgaggtcaaaggtcaccagagagggcccag

SEQ ID NO: 149832 - DNA, 120 bp, Artificial Sequence
  ENSG00000105552_16 (sequence is synthesized)
cctgctggacacagccagacctgctcttcctactcccctctgggaggacccgcctgagcctcatgcagtgaggactgcagtggctccccaggcccctgtagctgcccctcagccccaggg

SEQ ID NO: 149833 - DNA, 120 bp, Artificial Sequence
  ENSG00000105552_17 (sequence is synthesized)
tggcctgcagccggtccgactcggcgccgctcctcccgccctggggttccgctgcagggcgcggaggaggatggcgccctttggaaaggagcacgaggctttaatgggatctgggcacga

SEQ ID NO: 149834 - DNA, 120 bp, Artificial Sequence
  ENSG00000105552_18 (sequence is synthesized)
accactggcctgcagccggtccgactcggcgccgctcctcccgccctggggttccgctgcagggcgcggaggaggatggcgccctttggaaaggagcacgaggctttaatgggaagcatg

SEQ ID NO: 149835 - DNA, 120 bp, Artificial Sequence
  ENSG00000105552_19 (sequence is synthesized)
gaattggagtcactgccaaaatgggtttgtatttcaggtaatcagagcccagttgatcgaataccttcagagaataagcacctgtactcctgggtctggcggaggaggggctggggaact

SEQ ID NO: 149836 - DNA, 120 bp, Artificial Sequence
  ENSG00000105552_20 (sequence is synthesized)
ggactcctgggtctgagggaggaggggtggggcctgtactcctggatgtaagggaggagggtctgaggcctggactccagggtctgagggaggaggggctgggggcccagacttcgggtc

SEQ ID NO: 149837 - DNA, 120 bp, Artificial Sequence
  ENSG00000105552_21 (sequence is synthesized)
tgagggaggaggcagctagagtctggactcttacttaggtctgagggaggcgggcctggggtctgcacccctgagctctgggggagcaggacctgtcggtccttggtcttctaaggcctg

SEQ ID NO: 149838 - DNA, 120 bp, Artificial Sequence
  ENSG00000105552_22 (sequence is synthesized)
tcagcacttgggtacccggaggccttcacttacctgtgtgccttccctggttgttttcttgtctgagctgatctccaggctgcgaccaaaggtctctggggtgggaggcgcttgcgtttg

SEQ ID NO: 149839 - DNA, 120 bp, Artificial Sequence
  ENSG00000105552_23 (sequence is synthesized)
actttgccgcagcatggaggagggggcgggagctgactcagctctttccagcgagccctcgtcagggcagggaggggacttggcctccttcaggaccacctgccccgtctagaatggact

SEQ ID NO: 149840 - DNA, 120 bp, Artificial Sequence
  ENSG00000105552_24 (sequence is synthesized)
gaaactgggacagaacaggcaggccagtgggacctccaagtgcaggaggtggcgagcgagctgccagggcccctgctgtgccccactcaccccctctctcacttctttctccacccagat

SEQ ID NO: 149841 - DNA, 120 bp, Artificial Sequence
  ENSG00000105552_25 (sequence is synthesized)
cgactggcgcactgggcgttggagacacagggaccagcgtgcgtgctttcggccatgcctctggatgtcacatgaaggtgacatcatcagcaccgtgcagggctcagtgctaagtgacct

SEQ ID NO: 149842 - DNA, 120 bp, Artificial Sequence
  ENSG00000105552_26 (sequence is synthesized)
ccctggtccctgaaaacaaaccatggaaggaaggaggaggggattatttttcagatggacaaaaaggctcacagatgggaaggcattgggtggaggtcagtggggaaaccaggactggtc

SEQ ID NO: 149843 - DNA, 120 bp, Artificial Sequence
  ENSG00000105552_27 (sequence is synthesized)
cctggaagcctccaggagtgaagcttacactcagctcattggcttctcgccccagaagcctcccctgatcccccaggctgggctgcgctccccatacccagctcccacagtcgtttgagc

SEQ ID NO: 149844 - DNA, 120 bp, Artificial Sequence
  ENSG00000105552_28 (sequence is synthesized)
ctccaaagcccctcacccccgtgtggactttctgtgtaaatctgtctcccagtggcctcagctcagcagggcaggaaggagacagctgggtctcctgggcaaccaaggcagagggtgggc

SEQ ID NO: 149845 - DNA, 120 bp, Artificial Sequence
  ENSG00000105552_29 (sequence is synthesized)
actggcgtgttgggacaggaatgtggccccagctgggggtgcattcaggtcctttcagccacatcctgtgaggtctcctgagggccaggccctgtgctggcagaagctggggacacagat

SEQ ID NO: 149846 - DNA, 120 bp, Artificial Sequence
  ENSG00000105552_30 (sequence is synthesized)
gagtcagccccgagccctgctctcctgggtctcccaggctggtgggagccccagtattcggagctgcatgttctctggtgaggtgacccagggcattgtgaaagccttcacagaggccag

SEQ ID NO: 149847 - DNA, 120 bp, Artificial Sequence
  ENSG00000105552_31 (sequence is synthesized)
agttggtgtcccatgagcccctggactaacagccagcctccttcagtagtaccaggaacagataatggcctttcttattgaggccctggagagtgggctttctgtgctgctctgtggcct

SEQ ID NO: 149848 - DNA, 120 bp, Artificial Sequence
  ENSG00000105552_32 (sequence is synthesized)
aaaagtgggaagagacaggagagaggggacataaccatttagggtcctgatgccaaatgaaaagtcaaggattccatctcaggggaactggggagccctgtgagagctgtgagcagggag

SEQ ID NO: 149849 - DNA, 120 bp, Artificial Sequence
  ENSG00000105552_33 (sequence is synthesized)
ggagctcccggagccctggatatgtcttcagctttggaaaccccttcctgtgatcctctgcggctcctgggtgccctggtaggagaaaccccctctccgtgggcctctgaggcccctggg

SEQ ID NO: 149850 - DNA, 120 bp, Artificial Sequence
  ENSG00000105552_34 (sequence is synthesized)
tgccctggtgggagaaactccctccctgtgatcctctgctgccccgggtgccctggtgggagaaaggccctttccatgaatcactgagaccttagccagccctctggccatctcagaggt

SEQ ID NO: 149851 - DNA, 120 bp, Artificial Sequence
  ENSG00000105552_35 (sequence is synthesized)
tggcctcccaagattccctggagccctgggctatccctttggccggagaaagcttcctcccatgagcctctggaccttggcccctctctggcaccagactgtttaatcccataaatctct

SEQ ID NO: 149852 - DNA, 120 bp, Artificial Sequence
  ENSG00000105552_36 (sequence is synthesized)
acagttacgcgccgcacggatcatggccgcagccgctctggggcagctctcctgcccacaggctggctgtcgcactgtgtttgtgtctctcatactgtgggtgtcctatccctctgggca

SEQ ID NO: 149853 - DNA, 120 bp, Artificial Sequence
  ENSG00000105556_0 (sequence is synthesized)
atggcggaggcctcctcgctggggaggcagagtcctcgcgtggtctcctgcctcgagcacagcctgtgcccaggggagccgggcttgcagacaacagcagtggtgtccatgggctctgga

SEQ ID NO: 149854 - DNA, 120 bp, Artificial Sequence
  ENSG00000105556_1 (sequence is synthesized)
gaccatcagttcaacctcgcagagatcctgtcacagaactacagtgttaggggggagtgcgaggaggcctcgaggtgcccagacaagcccaaggaggagctggagaaggacttcatctcc

SEQ ID NO: 149855 - DNA, 120 bp, Artificial Sequence
  ENSG00000105556_2 (sequence is synthesized)
cagagcaacgacatgccctttgatgagctgcttgcgctctatggctacgaggcgtcagaccccatttcagaccgggagagtgagggtggtgacgtggccccgaacctcccagacatgacc

SEQ ID NO: 149856 - DNA, 120 bp, Artificial Sequence
  ENSG00000105556_3 (sequence is synthesized)
ctggacaaagaacaaatagcgaaggatttgctttcaggggaagaagaggaagagacgcaatcatctgctgacgacctcaccccgtccgtgacctcccacgaggcctccgacctcttccct

SEQ ID NO: 149857 - DNA, 120 bp, Artificial Sequence
  ENSG00000105556_4 (sequence is synthesized)
aaccggagtggatctcgtttcctggctgatgaagacagagagcctggctcttctgcctcctccgacaccgaggaggactctcttcctgccaacaaatgtaagaaggagatcatggtggga

SEQ ID NO: 149858 - DNA, 120 bp, Artificial Sequence
  ENSG00000105556_5 (sequence is synthesized)
cctcagttccaagctgacctcagcaacctgcacttgaaccggcactgtgagaagatctacgagaacgaagaccagctgctctgggaccccagcgtcctccctgagagggaggtggaggag

SEQ ID NO: 149859 - DNA, 120 bp, Artificial Sequence
  ENSG00000105556_6 (sequence is synthesized)
ttcctgtacagggcggtgaagcggcgttggcacgagatggccgggcctcagctcccagagggagaagccgtgaaagacagtgagcaggcgctgtacgagttggtgaaatgcaacttcaat

SEQ ID NO: 149860 - DNA, 120 bp, Artificial Sequence
  ENSG00000105556_7 (sequence is synthesized)
gtggaggaggccctgcgaaggctgcggttcaacgtgaaggtgatccgagatgggctctgtgcttggagtgaagaggagtgcaggaactttgagcacggcttccgtgtgcatggaaagaac

SEQ ID NO: 149861 - DNA, 120 bp, Artificial Sequence
  ENSG00000105556_8 (sequence is synthesized)
tttcacctgatccaggccaacaaggtgcgcacacggtcagtgggcgagtgtgtcgagtactactacctgtggaagaagtcggagcgctacgactacttcgcccagcagacgcggctgggc

SEQ ID NO: 149862 - DNA, 120 bp, Artificial Sequence
  ENSG00000105556_9 (sequence is synthesized)
cggaggaagtacgtcccgtccggaaccacggacgcagaccaggacctggatggcagcgaccccgatggccccggccgtccgcgcccggagcaagacaccctgactgggatgcgcacagat

SEQ ID NO: 149863 - DNA, 120 bp, Artificial Sequence
  ENSG00000105556_10 (sequence is synthesized)
ccactgagcgtggatggcacggccggtggtctcgatgagcccggagtggcctctgatggactcccgtcctcggagccagggccgtgttccttccagcagctggatgagtcccccgctgta

SEQ ID NO: 149864 - DNA, 120 bp, Artificial Sequence
  ENSG00000105556_11 (sequence is synthesized)
cccctgtcccatcggcccccagccctggccgacccagcctcataccagccagctgtcactgctccggagccagacgccagcccaaggctggccgtggacttcgccctgcccaaggagctg

SEQ ID NO: 149865 - DNA, 120 bp, Artificial Sequence
  ENSG00000105556_12 (sequence is synthesized)
cccctcatctccagccatgtggacctcagcggggatccggaggagactgtggccccagcacaggtggctttgtcggtcaccgagtttggactcatcggcattggggacgtgaaccccttc

SEQ ID NO: 149866 - DNA, 120 bp, Artificial Sequence
  ENSG00000105556_13 (sequence is synthesized)
ctggccgcccaccccacgtgcccggcccccgggctacactcggagcccctgtcacactgtaacgtgatgacctgctgactcctggccgcgggcggcgtatgcggcccagactggacttag

SEQ ID NO: 149867 - DNA, 120 bp, Artificial Sequence
  ENSG00000105556_14 (sequence is synthesized)
cgctgccgctgggcccgcctctgtcagtcttcctgaccccttccccaccccccgggccttggggtagcacctccttctgcttcagaacacgtcaggactggggtgaggtggctgggccgt

SEQ ID NO: 149868 - DNA, 120 bp, Artificial Sequence
  ENSG00000105556_15 (sequence is synthesized)
gagcccttgcccctgtccacacagaatggacccacggccccacccagcgccgtcagcgcccggcactgccacccgggtccgggccgctgcctgcacgtgggatccgtcgggcagccgggg

SEQ ID NO: 149869 - DNA, 120 bp, Artificial Sequence
  ENSG00000105556_16 (sequence is synthesized)
acagaagagaccccgccgttgggacgcagggcagagccggccacctagtcccttccagccagcagaggcgagggaaggcgtcactgccccggcggggagacgggcaggacgccctgcccc

SEQ ID NO: 149870 - DNA, 120 bp, Artificial Sequence
  ENSG00000105556_17 (sequence is synthesized)
gcaccagcagcctccgccggggcgccctcagctccctgcttggctctgtctctccacacccggcagggccgcgggctgccccagccctgggggtcgtgggcagctgctactcagtgccaa

SEQ ID NO: 149871 - DNA, 120 bp, Artificial Sequence
  ENSG00000105556_18 (sequence is synthesized)
ccccgtggggcacagagccatatacctcgctgtccggcccccaccccagcctcgccttcccaccccatcgtctccacttcaggaaaagccgcactttacacccccacctgcctcttcccc

SEQ ID NO: 149872 - DNA, 120 bp, Artificial Sequence
  ENSG00000105556_19 (sequence is synthesized)
ctccatccctgctccccgatcctgagcggttggggtggggtccctcagcaaccccaggcgtgggtttgaggagacaggtgatttacatcccctttgctgtcctcccccggtaccaaggca

SEQ ID NO: 149873 - DNA, 120 bp, Artificial Sequence
  ENSG00000105556_20 (sequence is synthesized)
gggagcctccggaggagccggccctgctggccacgcaggggccagactccagcctgtttccccagccctgcaggtcttccttctgtgggaagcttcctagcaagatggcttggagtcctg

SEQ ID NO: 149874 - DNA, 120 bp, Artificial Sequence
  ENSG00000105556_21 (sequence is synthesized)
gtccccctcctccctggccctctcgttcgtttctgtttctgtttacacgttggagtggggtcctccgtgggcggcggcgcgccctgccccgggtgtcgtccggcctcttgtgctcgagcc

SEQ ID NO: 149875 - DNA, 120 bp, Artificial Sequence
  ENSG00000105556_22 (sequence is synthesized)
cctttccgagttggactcgaccatccctcaccccaccaaggaccacactgtgaagtgataactgccttgaacccccctttgctgttttatttattaaacttgatttgaagcccggggtgc

SEQ ID NO: 149876 - DNA, 120 bp, Artificial Sequence
  ENSG00000105556_23 (sequence is synthesized)
cttgtggtggatcgggtgggggctggggcggcaggtgtcctcgtcatctcacttgggggcctgcatgtctcttggagggtccaggataagtcgtgagcaacacgggcgagggggtgcacc

SEQ ID NO: 149877 - DNA, 120 bp, Artificial Sequence
  ENSG00000105556_24 (sequence is synthesized)
gggggcatgacgtggtgggctacgtattgttcacgtcagtaagggaattgtggccacgatgacgggatgtgaggagggcccacgtctgggtagaggtggtcggggcagcctcctagaagt

SEQ ID NO: 149878 - DNA, 120 bp, Artificial Sequence
  ENSG00000105556_25 (sequence is synthesized)
gatatttaagctgaaacatgaaggagaatgggcctcctttgctgaaagtttgccgagaggcctggcaggcgtgacagcagatgcagaggacagaggcctgggtctccaggagaagctgag

SEQ ID NO: 149879 - DNA, 120 bp, Artificial Sequence
  ENSG00000105556_26 (sequence is synthesized)
tgagggcacagagggcagaggttgggcggggtggggacagtaggtcatgaggccaagttttgttcttggtgtggaagccactttaggtctgcattgtttttttgttttgttttgcttttt

SEQ ID NO: 149880 - DNA, 120 bp, Artificial Sequence
  ENSG00000105556_27 (sequence is synthesized)
gagacatcgcgcccggctgaggtctgcattgttaatagcgccctgcagggacggtgcaggctggttgggttgcatattgtccacatcagtgagggaaatgtgggcatgcatggtgatggg

SEQ ID NO: 149881 - DNA, 120 bp, Artificial Sequence
  ENSG00000105556_28 (sequence is synthesized)
atatggggagggccggcccccagctgggaggtgactgtggcttggcctcagggactattggtgaaggaccaggaccacttgcatgatgggtgtgggagagtcaggggtcttgctggtgag

SEQ ID NO: 149882 - DNA, 120 bp, Artificial Sequence
  ENSG00000105556_29 (sequence is synthesized)
cctgtgccaggagctgtgagaaccagggccagccactcggcaacctgggtgtttggggatgggcatagaggagttttcattggagcgccgcagcctgctgacgttttcttcagatgtgca

SEQ ID NO: 149883 - DNA, 120 bp, Artificial Sequence
  ENSG00000105556_30 (sequence is synthesized)
aggtcttctgtcttccagcttgccctgcctccagcaggaaatcttcagtcctctcttggtttttttcctccaactgctttgaagatttttcagtaccactggttttgagcagtctgatga

SEQ ID NO: 149884 - DNA, 80 bp, Artificial Sequence
  ENSG00000105556_31 (sequence is synthesized)
cacgtacagtatgtagcctttgagattggcttctttcatattcactgaaggcttcgccatgtcttttcgtggcttgatgg

SEQ ID NO: 149885 - DNA, 120 bp, Artificial Sequence
  ENSG00000105556_32 (sequence is synthesized)
ttcactgaaggcttcgccatgtcttttcgtggcttgatggctcatttctttttcgcgctggatgatactccatcctgggcgtgtgctgcagcttgtttatctacgtacctattgaaggac

SEQ ID NO: 149886 - DNA, 120 bp, Artificial Sequence
  ENSG00000105556_33 (sequence is synthesized)
atcttagcttccaagcttcggcagttacgcgtaaagacatcttagcagcttccaagctttggcagttacacataaagacatcttagcagcttccaagcttcagcagttactcataaagct

SEQ ID NO: 149887 - DNA, 120 bp, Artificial Sequence
  ENSG00000105556_34 (sequence is synthesized)
gctgtaaacgcccatgtgcaggtttttgttttgacacaacttttcagcccatttggatgaataaagaaacctgattgccggaccgtgtgatgagaccgtgtttaatgagaagctgccatt

SEQ ID NO: 149888 - DNA, 120 bp, Artificial Sequence
  ENSG00000105556_35 (sequence is synthesized)
tcactcccaccagcaatgagtaagcgctcctgaggcccatgtcctccccagtgtttggtggtgtcagtattttgtgtttggccattcgaataggtgtgtagtgggatcttgttttccata

SEQ ID NO: 149889 - DNA, 120 bp, Artificial Sequence
  ENSG00000105556_36 (sequence is synthesized)
gcctttgaagatgtgtacattttcgtacctttctggcgctcttaagttcttcattcagactccgtgttgccaagagggataattttctttgagtctgaagtgccgtatttaatatatatt

SEQ ID NO: 149890 - DNA, 120 bp, Artificial Sequence
  ENSG00000105556_37 (sequence is synthesized)
gccttgtagttcctctgcagtgacattctgcctaggcttagctcttacgtggatcaaaaggccctaattcctcctcctcttttgaagtgcatttttacaggatatacggttctaagtgga

SEQ ID NO: 149891 - DNA, 120 bp, Artificial Sequence
  ENSG00000105556_38 (sequence is synthesized)
ctgtgtttttctctgcgcatgttaaggtggttctattcatgctgttttctactgttctgatgaggaattttctcattctgttttccttactgtgaaatctcttacttctgactatataca

SEQ ID NO: 149892 - DNA, 120 bp, Artificial Sequence
  ENSG00000105556_39 (sequence is synthesized)
tgattttcttttatttttggactttggccgtttgtgatgcacctgggtctagctttctaaactgagctacttcgacctgagggtgggtgcattttaacagattttgaagtcttgactgtt

SEQ ID NO: 149893 - DNA, 120 bp, Artificial Sequence
  ENSG00000105556_40 (sequence is synthesized)
caggccccctgccaggcagtcgtgatgcttgatgaagggtccttgggctgatgcaggccaagaactcatcacagatgagggcgtctgcctggcgggaagcgtcagtagccctgggggtgc

SEQ ID NO: 149894 - DNA, 120 bp, Artificial Sequence
  ENSG00000105556_41 (sequence is synthesized)
tttgttctcctccacgctggccagtgagcctggactctcagagcgatttggtttaaacaagtagggaacatgttggttcccctagcagatccagggacagcattcccagaaccggcctcc

SEQ ID NO: 149895 - DNA, 120 bp, Artificial Sequence
  ENSG00000105556_42 (sequence is synthesized)
ttcacaagcctctgtgctggctttcctgggaactgagggctcggggcccagaggtgcagcagctgcatagaagggaaggcctctttcttcaaaggtgcatccctggtcctgggtcctgtg

SEQ ID NO: 149896 - DNA, 120 bp, Artificial Sequence
  ENSG00000105556_43 (sequence is synthesized)
cccatctgtttacccaatgtctggccagagagagggttatggcctggggatcaggtggatggagaatgggagtggagagaaggggttgtataggctgcaggcagtggagaccctggggga

SEQ ID NO: 149897 - DNA, 120 bp, Artificial Sequence
  ENSG00000105556_44 (sequence is synthesized)
cggggtaagcctcatgagttttgtgcagctcagattccacattggtaagtgctaaattgtacatctttttgcaaagtgccagatgctgtcctagtagctgaaattcagtggagaccaggt

SEQ ID NO: 149898 - DNA, 120 bp, Artificial Sequence
  ENSG00000105556_45 (sequence is synthesized)
ctttcatggggctctctgagcagcacggtggtcaaggattaagccagctgctctcaaatcttctggtctcagaacctgctttgtactcttaaaaattattgagagtttcaggctgggtgc

SEQ ID NO: 149899 - DNA, 120 bp, Artificial Sequence
  ENSG00000105556_46 (sequence is synthesized)
gcgcacacggtcagtgggcgagtgtgtcgagtactactacctgtggaagaagtcggagcgctacgactacttcgcccagcagacgcggctgggccggaggaaggacgcagaccaggacct

SEQ ID NO: 149900 - DNA, 120 bp, Artificial Sequence
  ENSG00000105559_0 (sequence is synthesized)
agcagagaggaaagagaaactgggagagggaggaagggagaaagtgagaagggaaatcggaaagagaaaagggaggaaacggcagagccagagagaaagaggaagagactgagtgtgaag

SEQ ID NO: 149901 - DNA, 120 bp, Artificial Sequence
  ENSG00000105559_1 (sequence is synthesized)
gagagaggacacaggggatgactgagagacagagagagagagagagagagaatgagacagagacttaaggaagagaccctgtgagtctgacaataaaagatttggacagaaacagaaaga

SEQ ID NO: 149902 - DNA, 120 bp, Artificial Sequence
  ENSG00000105559_2 (sequence is synthesized)
ttggagagagagagagagggagagaatgagtgagagagagactggaagagacagagatcagagggagacacagaaagtgagagtggggagagaggtagtgtaaaaggaagagagagagag

SEQ ID NO: 149903 - DNA, 120 bp, Artificial Sequence
  ENSG00000105559_3 (sequence is synthesized)
agagaccgtaagagacaggagacaaagagacaaaaagtgtgagtgagcaggtgaggagagagattgagaactatgagagacagcagctaagagacaaaggaggcgggagactgcctaggt

SEQ ID NO: 149904 - DNA, 120 bp, Artificial Sequence
  ENSG00000105559_4 (sequence is synthesized)
gccgcagcacccacaccgtcctcttgcccccccgtcactgggaccccagagctggcccttgatggaggggagccgacctcgcagcagcctgagcctggccagcagcgcctccaccatctc

SEQ ID NO: 149905 - DNA, 120 bp, Artificial Sequence
  ENSG00000105559_5 (sequence is synthesized)
ctcgctcagcagcctgagccccaagaagcccacccgggcagtaaacaagatccacgcctttgggaagagaggcaatgcgctcaggagggatcccaaccttcccgtgcacatccgaggctg

SEQ ID NO: 149906 - DNA, 120 bp, Artificial Sequence
  ENSG00000105559_6 (sequence is synthesized)
gcttcataagcaggacagctcggggctccgtctctggaaacgccgctggttcgtcctctccggccattgcctcttttattacaaggacagccgcgaggagagtgtcctaggcagcgtcct

SEQ ID NO: 149907 - DNA, 120 bp, Artificial Sequence
  ENSG00000105559_7 (sequence is synthesized)
gctccccagctacaatattagaccagatgggccgggagccccccgagggcggcgcttcaccttcaccgcagagcacccgggcatgaggacctacgttttggccgctgacaccttagaaga

SEQ ID NO: 149908 - DNA, 120 bp, Artificial Sequence
  ENSG00000105559_8 (sequence is synthesized)
ttagaagacctgcggggctggctacgggcgctgggccgggcctcccgtgcggagggggacgactatgggcaacccaggtcacctgcacgaccccagcccggggagggccccggcggcccc

SEQ ID NO: 149909 - DNA, 120 bp, Artificial Sequence
  ENSG00000105559_9 (sequence is synthesized)
cccggaggtgagcagaggggaagaggggcgcatctcagaatcaccggaagtgactcgactctccagaggtcgtggtagacccaggctgctcactcccagccccacaaccgacctccactc

SEQ ID NO: 149910 - DNA, 120 bp, Artificial Sequence
  ENSG00000105559_10 (sequence is synthesized)
tggactccagatgcggagggcgaggagccccgacctgttcacccccctctctcgccctccctcgcctctgagcctcccccgtccccgttctgcccctgcgcggcgaccccctgccccctc

SEQ ID NO: 149911 - DNA, 120 bp, Artificial Sequence
  ENSG00000105559_11 (sequence is synthesized)
aggagacacagcaccccctgcccgacctcacaccccgttgagtcgcattgatgtccgacctcctctggattggggcccccaacgccagaccctctcccgaccccctactccccgccgagg

SEQ ID NO: 149912 - DNA, 120 bp, Artificial Sequence
  ENSG00000105559_12 (sequence is synthesized)
gcacactctggctcccccacttatctccagctccccccgcggccccctgggacccgggcctccatggttttattgccgggtcctcccctggagtcaactttccaccaaagcttggagaca

SEQ ID NO: 149913 - DNA, 120 bp, Artificial Sequence
  ENSG00000105559_13 (sequence is synthesized)
gatacgctgctgaccaagttgtgcgggcaggaccggcttctgcggaggctgcaggaggagatagaccagaagcaggaggagaaggagcaactagaagcagctctggagttgacccggcaa

SEQ ID NO: 149914 - DNA, 120 bp, Artificial Sequence
  ENSG00000105559_14 (sequence is synthesized)
cagctgggccaagccaccagggaggctggggctcccgggagggcctggggtcgccagcgcctcttgcaggaccggctggtcagtgtgagggccaccctctgtcacttgactcaggagcga

SEQ ID NO: 149915 - DNA, 120 bp, Artificial Sequence
  ENSG00000105559_15 (sequence is synthesized)
gagagggtttgggacacgtacagtggcctggagcaggagctgggcaccttaagagagacgctggagtacctgctgcaccttggttctccccaggacagagtgtctgctcagcagcagctg

SEQ ID NO: 149916 - DNA, 120 bp, Artificial Sequence
  ENSG00000105559_16 (sequence is synthesized)
tggatggtggaagacacgctggcaggtctgggtggcccccagaaaccgcccccacacactgagcctgactccccatctcccgtgctccagggcgaggagtcctcagagagggagagcctg

SEQ ID NO: 149917 - DNA, 120 bp, Artificial Sequence
  ENSG00000105559_17 (sequence is synthesized)
ccagagtccttggaactgagctcccctaggtcccccgagactgactgggggcggcctcctggaggcgacaaagacctcgccagccctcacttaggtcttgggtctccgagggtctcccgg

SEQ ID NO: 149918 - DNA, 120 bp, Artificial Sequence
  ENSG00000105559_18 (sequence is synthesized)
gcttccagccctgagggtcgccacctcccttccccacagctaggaaccaaggccccggtggcccggccccggatgagtgcccaggagcagctggagcggatgcgcagaaaccaggaatgt

SEQ ID NO: 149919 - DNA, 120 bp, Artificial Sequence
  ENSG00000105559_19 (sequence is synthesized)
ggacggcccttccctcgcccgacctccccccggcttctcaccctgggaaggacactgtccccagccagacgccagcctgacgtggagcaaaggcctgtcgtaggacactcgggagcccag

SEQ ID NO: 149920 - DNA, 120 bp, Artificial Sequence
  ENSG00000105559_20 (sequence is synthesized)
aaatggctcagaagctctgggtcctggagtagtccaaggaacaccaccccttacttgccgacttccgaaggtcaccgggagcgggttctcagcctctcccaagccctggctactgaggcg

SEQ ID NO: 149921 - DNA, 120 bp, Artificial Sequence
  ENSG00000105559_21 (sequence is synthesized)
tcgcagtggcacagaatgatgacaggtggaaatttggactcccagggagaccctcttcccggtgtgccgctgcctccttcggaccccacgcgccaggagacccctccccccagatctccc

SEQ ID NO: 149922 - DNA, 120 bp, Artificial Sequence
  ENSG00000105559_22 (sequence is synthesized)
ccggtggctaattcgggttccacggggttctctcgccgagggagtgggcgtggaggaggtcccaccccctgggggcccgcgtgggatgccgggatcgcccctccggtcctgccacaagac

SEQ ID NO: 149923 - DNA, 120 bp, Artificial Sequence
  ENSG00000105559_23 (sequence is synthesized)
gagggggcatggcctctgcgagtcactctgctacaatccagcttctaatccgcccaaaagcggcagccaatcggagcgcgaggacgtggtctggaggtaccgccggagatctgggaccac

SEQ ID NO: 149924 - DNA, 120 bp, Artificial Sequence
  ENSG00000105559_24 (sequence is synthesized)
tcagggcatcagggggcgtggtctggtccccattgcgggcccgggaggggaatggtttctatggccaaagtttggttttctcaacactgtctaaatttggattaaaactttgaactttta

SEQ ID NO: 149925 - DNA, 120 bp, Artificial Sequence
  ENSG00000105559_25 (sequence is synthesized)
agtcacgcactcagctctgctccaggaatgatcaatattgcacactctctgattggctccttctgaagtcccctgagctgccacctaaacaatgccagtgggcaacccaggtcacctgca

SEQ ID NO: 149926 - DNA, 120 bp, Artificial Sequence
  ENSG00000105559_26 (sequence is synthesized)
tgtgtgacttgctggggctcccgtgggggtcacagcctgtcggggagaagactggaggggaagatgccacaaagcggacattactgaggatttggacagtagaggaggattctaacccag

SEQ ID NO: 149927 - DNA, 120 bp, Artificial Sequence
  ENSG00000105559_27 (sequence is synthesized)
taggaaccaaggtaagctgtaggtccatcctgtaatccttgcatctgaccatcagggacccccacacttctgggaaacagctaggagtagagcgttctaaggccatactcagagcagaga

SEQ ID NO: 149928 - DNA, 120 bp, Artificial Sequence
  ENSG00000105559_28 (sequence is synthesized)
gagcactgcttgttaagagcattgagattgatttttgtctctgtcgcttctaagctgtgtgactttgggtcagttattaaacctctctgtgccttcattttttcttctctaaaatggggc

SEQ ID NO: 149929 - DNA, 120 bp, Artificial Sequence
  ENSG00000105559_29 (sequence is synthesized)
aaacaatctagttacaccctttaatttatttaaaaatgtacaattaaattattattgactatagtcattctgttgtgctatctaatagtaggtcttattcatccttttctttttgtacca

SEQ ID NO: 149930 - DNA, 120 bp, Artificial Sequence
  ENSG00000105568_0 (sequence is synthesized)
agcacagcgctggccgcagtctgacaggaaagggacggagccaagatggcggcggccgacggcgacgactcgctgtaccccatcgcggtgctcatagacgaactccgcaatgaggacgtt

SEQ ID NO: 149931 - DNA, 120 bp, Artificial Sequence
  ENSG00000105568_1 (sequence is synthesized)
cagcttcgcctcaacagcatcaagaagctgtccaccatcgccttggcccttggggttgaaaggacccgaagtgagcttctgcctttccttacagataccatctatgatgaagatgaggtc

SEQ ID NO: 149932 - DNA, 120 bp, Artificial Sequence
  ENSG00000105568_2 (sequence is synthesized)
ctcctggccctggcagaacagctgggaaccttcactaccctggtgggaggcccagagtacgtgcactgcctgctgccaccgctggagtcgctggccacagtggaggagacagtggtgcgg

SEQ ID NO: 149933 - DNA, 120 bp, Artificial Sequence
  ENSG00000105568_3 (sequence is synthesized)
gacaaggcagtggagtccttacgggccatctcacacgagcactcgccctctgacctggaggcgcactttgtgccgctagtgaagcggctggcgggcggcgactggttcacctcccgcacc

SEQ ID NO: 149934 - DNA, 120 bp, Artificial Sequence
  ENSG00000105568_4 (sequence is synthesized)
tcggcctgcggcctcttctccgtctgctacccccgagtgtccagtgctgtgaaggcggaacttcgacagtacttccggaacctgtgctcagatgacacccccatggtgcggcgggccgca

SEQ ID NO: 149935 - DNA, 120 bp, Artificial Sequence
  ENSG00000105568_5 (sequence is synthesized)
gcctccaagctgggggagtttgccaaggtgctggagctggacaacgtcaagagtgagatcatccccatgttctccaacctggcctctgacgagcaggactcggtgcggctgctggcggtg

SEQ ID NO: 149936 - DNA, 120 bp, Artificial Sequence
  ENSG00000105568_6 (sequence is synthesized)
gaggcgtgcgtgaacatcgcccagcttctgccccaggaggatctggaggccctggtgatgcccactctgcgccaggccgctgaagacaagtcctggcgcgtccgctacatggtggctgac

SEQ ID NO: 149937 - DNA, 120 bp, Artificial Sequence
  ENSG00000105568_7 (sequence is synthesized)
aagttcacagagctccagaaagcagtggggcctgagatcaccaagacagacctggtccctgccttccagaacctgatgaaagactgtgaggccgaggtgagggccgcagcctcccacaag

SEQ ID NO: 149938 - DNA, 120 bp, Artificial Sequence
  ENSG00000105568_8 (sequence is synthesized)
gtcaaagagttctgtgaaaacctctcagctgactgtcgggagaatgtgatcatgtcccagatcttgccctgcatcaaggagctggtgtccgatgccaaccaacatgtcaagtctgccctg

SEQ ID NO: 149939 - DNA, 120 bp, Artificial Sequence
  ENSG00000105568_9 (sequence is synthesized)
gcctcagtcatcatgggtctctctcccatcttgggcaaagacaacaccatcgagcacctcttgcccctcttcctggctcagctgaaggatgagtgccctgaggtacggctgaacatcatc

SEQ ID NO: 149940 - DNA, 120 bp, Artificial Sequence
  ENSG00000105568_10 (sequence is synthesized)
tctaacctggactgtgtgaacgaggtgattggcatccggcagctgtcccagtccctgctccctgccattgtggagctggctgaggacgccaagtggcgggtgcggctggccatcattgag

SEQ ID NO: 149941 - DNA, 120 bp, Artificial Sequence
  ENSG00000105568_11 (sequence is synthesized)
tacatgcccctcctggctggacagctgggagtggagttctttgatgagaaacttaactccttgtgcatggcctggcttgtggatcatgtatatgccatccgcgaggcagccaccagcaac

SEQ ID NO: 149942 - DNA, 120 bp, Artificial Sequence
  ENSG00000105568_12 (sequence is synthesized)
ctgaagaagctagtggaaaagtttgggaaggagtgggcccatgccacaatcatccccaaggtcttggccatgtccggagaccccaactacctgcaccgcatgactacgctcttctgcatc

SEQ ID NO: 149943 - DNA, 120 bp, Artificial Sequence
  ENSG00000105568_13 (sequence is synthesized)
aatgtgctgtctgaggtctgtgggcaggacatcaccaccaagcacatgctacccacggttctgcgcatggctggggacccggttgccaatgtccgcttcaatgtggccaagtctctgcag

SEQ ID NO: 149944 - DNA, 120 bp, Artificial Sequence
  ENSG00000105568_14 (sequence is synthesized)
aagatagggcccatcctggacaacagcaccttgcagagtgaagtcaagcccatcctagagaagctgacccaggaccaggatgtggacgtcaaatactttgcccaggaggctctgactgtt

SEQ ID NO: 149945 - DNA, 120 bp, Artificial Sequence
  ENSG00000105568_15 (sequence is synthesized)
ctgtctctcgcctgatgctggaagaggagcaaacactggcctctggtgtccaccctccaacccccacaagtccctctttggggagacactggggggcctttggctgtcactccctgtgca

SEQ ID NO: 149946 - DNA, 120 bp, Artificial Sequence
  ENSG00000105568_16 (sequence is synthesized)
tggtctgaccccaggccccttcccccagcacggttcctcctctccccagcctgggaagatgtctcactgtccacctcccaacgggctaggggagcacggggttggacaggacagtgacct

SEQ ID NO: 149947 - DNA, 120 bp, Artificial Sequence
  ENSG00000105568_17 (sequence is synthesized)
tgggaggaaggggctactccgcccacgtcagggagagatgtgagcatcccgggtcactggatcctgctgctgtaatgggaacccctcccccatttacttctccacctcccgtcctcccca

SEQ ID NO: 149948 - DNA, 120 bp, Artificial Sequence
  ENSG00000105568_18 (sequence is synthesized)
tcattggtttttttttgtgtgtcaactgtgccgtttttattttattccttttattttcccccttttcacagagaaataaaggtctagaagtagttggtcctctggccttagtcatcagct

SEQ ID NO: 149949 - DNA, 120 bp, Artificial Sequence
  ENSG00000105568_19 (sequence is synthesized)
tggaggagggggcaccaccccagagccacaacatctgcgcttttctctggagaagatcttgttacaggacccattatacccctatgtcccgaaagaatactctggggatccccccaggag

SEQ ID NO: 149950 - DNA, 120 bp, Artificial Sequence
  ENSG00000105568_20 (sequence is synthesized)
tgctgctggcctttggggtagagggtccatgaggtgctctgggtggtgtcctgtagtgcagttcagattcatagatgtcggccgagtatttggggggttaagagcaggtgccttggaacc

SEQ ID NO: 149951 - DNA, 120 bp, Artificial Sequence
  ENSG00000105568_21 (sequence is synthesized)
agactgcctgggtccaaattgtggctccttcagttaatagacgtgtgactaggagtagcttgttaagtctttatgagctcagttttgtattgtgtaaaatgagagttacagtaataccta

SEQ ID NO: 149952 - DNA, 120 bp, Artificial Sequence
  ENSG00000105568_22 (sequence is synthesized)
tacacaacatgagaagcagagttagctgtacattgccagagaaccccctgtgggccatttcctgtgttcttgaagaagacttgggcttggaccctgtccccaggaggtctcagagtaatc

SEQ ID NO: 149953 - DNA, 120 bp, Artificial Sequence
  ENSG00000105568_23 (sequence is synthesized)
aggacggtactagggagagaactgtggcaagatagatcagttatctcggtatctattctccccttcctaatgtagaagctctgatttttaactgggcagatgactacatggattcaaggt

SEQ ID NO: 149954 - DNA, 120 bp, Artificial Sequence
  ENSG00000105568_24 (sequence is synthesized)
attttcctagtgtctcttgaaattaggtgtggtattgtgaccaaattctagccaaaaagatgttgaacagaagtggtatatgcagcttctaggaagtgttcttaagggggaaggcgtcat

SEQ ID NO: 149955 - DNA, 120 bp, Artificial Sequence
  ENSG00000105568_25 (sequence is synthesized)
cccccacctttcctccttcctgcactctggaatgtggaccagatggctggagtaggagctgccacctggggccagaaaatgatcttaggcgtgaaggtcaagtaaggcaggacaagagag

SEQ ID NO: 149956 - DNA, 120 bp, Artificial Sequence
  ENSG00000105568_26 (sequence is synthesized)
aaggagcctgcctccccgaggctgtgaagagccatgccagtactgtcacctgggagaattaaactggtcaagtgcctgttcgtttagggtttcatcacttgaaggtgaccggaattctaa

SEQ ID NO: 149957 - DNA, 120 bp, Artificial Sequence
  ENSG00000105568_27 (sequence is synthesized)
ctgatggagggaggggcccagagcaccctggagaaaggagcaagggacgtatggctggtggtgtctgcatggaagggtttcacagaggaaatgatgcttgagcacattttgacccaggtg

SEQ ID NO: 149958 - DNA, 120 bp, Artificial Sequence
  ENSG00000105568_28 (sequence is synthesized)
gtggaagggaaatgtggctttgagtgacaaggtgatttcaccagctcagccttcatattaccacatccctaccctttgttagactttattgtgccctaggggatgaggctgaaggagacc

SEQ ID NO: 149959 - DNA, 120 bp, Artificial Sequence
  ENSG00000105568_29 (sequence is synthesized)
aaaaagcatctttagaaatttccatttatgccctgggcgataaactctctcccagttgagaactactgctctagaaatgtgaacacacgtgtaaccaaacgtcaaagtctgacattaaac

SEQ ID NO: 149960 - DNA, 120 bp, Artificial Sequence
  ENSG00000105568_30 (sequence is synthesized)
tttgactttccccatggttaacgctgctggtccattgtaacaagagtgcagtggaccagcagcctttgcattctcaggagcttgttagaaatgcagagcctctcgtccctgccccgacct

SEQ ID NO: 149961 - DNA, 120 bp, Artificial Sequence
  ENSG00000105568_31 (sequence is synthesized)
gctcaggcagagccttcattttaacaagatgcccaggttcatctgcacactgaagttagagaagtcctgccttaaatactaacccagtttttctctcttgagagtgaggttaatgctacg

SEQ ID NO: 149962 - DNA, 120 bp, Artificial Sequence
  ENSG00000105568_32 (sequence is synthesized)
tgggtctagggctgaggatgtgctatggctcagaggtggggtctacaattggacatgtgtatgtagacaaggctcagggatatgttgaggctgctagattgggcaagtgatggaatggga

SEQ ID NO: 149963 - DNA, 120 bp, Artificial Sequence
  ENSG00000105568_33 (sequence is synthesized)
ttattacaggaggtggaggtgcgatggatacccaggatgtgctgggtaatgaggtgatactcagcgaccacaggagtgagtatgagagacgagggtgaaggatagcttgagttattgaac

SEQ ID NO: 149964 - DNA, 120 bp, Artificial Sequence
  ENSG00000105568_34 (sequence is synthesized)
gctggcagagtcctgagttaaccaggagttgcctggtgtcttgggtcatgtgctctagaagcagagcccgagtggagactcgttcaagtgtgttactgagggagtgctctcaggagaacg

SEQ ID NO: 149965 - DNA, 120 bp, Artificial Sequence
  ENSG00000105568_35 (sequence is synthesized)
gactgaggtaactcaccttctgtgagcttcatgttggaagaatccaatcaggtgatgaatgtgatgttattaagtccattgttaggagtggttcctaatctcccaggctgcaggctttgt

SEQ ID NO: 149966 - DNA, 120 bp, Artificial Sequence
  ENSG00000105568_36 (sequence is synthesized)
ttgctccatacacctggccttctctgtagcagctgaagtttgatgctggagctgggtcagggtggagagactgtgtggagccaggactcatgaccctggcctgtttctcccgctctctag

SEQ ID NO: 149967 - DNA, 120 bp, Artificial Sequence
  ENSG00000105568_37 (sequence is synthesized)
gcctaaatcccagcagtcacactggccatctctaatggttccttccacagcactgttcttcagagcccacacacaaattttgtctccttttgtgatgactgcacttctttggctgttttt

SEQ ID NO: 149968 - DNA, 120 bp, Artificial Sequence
  ENSG00000105568_38 (sequence is synthesized)
gccaacagcctcttcactgaccccttccttccactgcattgacccagacatctggatgtggatgaggtcgagtcacttgttgcctttggctaatgcataggggcacgagtagagctctag

SEQ ID NO: 149969 - DNA, 120 bp, Artificial Sequence
  ENSG00000105568_39 (sequence is synthesized)
aatcaccatgcccttgactcagggtgcagaatctgcctatggtgcttgagctgtggttgtcgctagaggagaattaccatggctcccccgggcagatgaagatgacgaggtggtgcctca

SEQ ID NO: 149970 - DNA, 120 bp, Artificial Sequence
  ENSG00000105568_40 (sequence is synthesized)
gccccgaggagtgaactgcagggcaccgacaagattctgcctgtggccatcagggctggagggaaggaggccaggttcatctacccaagctggtggcatgaggcataaatttaaaaaaat

SEQ ID NO: 149971 - DNA, 86 bp, Artificial Sequence
  ENSG00000105568_41 (sequence is synthesized)
gggagttcgagaccatcctgaccaattcagtgaaaccctgtctttactaaaaatatgaaaaaattagctgggcgtggtggagggcg

SEQ ID NO: 149972 - DNA, 67 bp, Artificial Sequence
  ENSG00000105568_42 (sequence is synthesized)
tcgagaccatcctgaccaattcagtgaaaccctgtctttactaaaaatatgaaaaaattagctgggc

SEQ ID NO: 149973 - DNA, 120 bp, Artificial Sequence
  ENSG00000105568_43 (sequence is synthesized)
tgggccattgcactccagccagggtgacagagcaagaccccatatgaaaaaaaataataattcaggaacttgtcaaaaagagaaaatccaataaagatttagtgccaggccttgactcca

SEQ ID NO: 149974 - DNA, 120 bp, Artificial Sequence
  ENSG00000105568_44 (sequence is synthesized)
aaacctcatgcggacctgtggggtaggtactgttactatcagctccgtttcatagggctgggaagacagagagggggtcatcacttgcccaaggtcattcagctaaaacctggacccaca

SEQ ID NO: 149975 - DNA, 120 bp, Artificial Sequence
  ENSG00000105568_45 (sequence is synthesized)
caactgcagagtctgtgcttgctcctctctgccatactgcctgctgcctcaggatccccgtccccgactcccaggtacttccggaacctgtgctcagatgacacccccatggtgcggcgg

SEQ ID NO: 149976 - DNA, 86 bp, Artificial Sequence
  ENSG00000105568_46 (sequence is synthesized)
gccaagatggcggcggccgacggcgacgactcgctgtaccccatcgcggtgctcatagacgaactccgcaatgaggacgttgtcgg

SEQ ID NO: 149977 - DNA, 120 bp, Artificial Sequence
  ENSG00000105568_47 (sequence is synthesized)
tgaacattcctggttatgggatgaggtgacccaaggctctgagccgggctggtgtgggattgagaacagttagaactgcaagtccacctcccacctgctgtgtgaccttgtgcaaattac

SEQ ID NO: 149978 - DNA, 120 bp, Artificial Sequence
  ENSG00000105568_48 (sequence is synthesized)
ttcaccgctttgggtctctgtgttccataaaatatgggctaattgtagtcctggtcttgctggagggacttgtgagggactgaacgaattatgacacaaataaaaagtagaatggtgtca

SEQ ID NO: 149979 - DNA, 120 bp, Artificial Sequence
  ENSG00000105568_49 (sequence is synthesized)
aaagactgttttgacgtgcacgtcactgggacataactttttgaggctgctattcagcctcctgtactggtggtattattactactgctaatgctactcttgtttttgtagtcattttat

SEQ ID NO: 149980 - DNA, 120 bp, Artificial Sequence
  ENSG00000105568_50 (sequence is synthesized)
tcactctgttgcccaggctggagtgttgtttgttcttttacaatcacttagccagcaatcctggctttaaatcctgctccatgtgatcttagctgtctgaccctgagaggggcttttgtt

SEQ ID NO: 149981 - DNA, 120 bp, Artificial Sequence
  ENSG00000105568_51 (sequence is synthesized)
gcaggtgagttttgcttcctggccctctgctctcccgtccttctggtggttcctgcccatgaaagagaatcccagagctcagcaaggcctctgctgccctcccactgttcctctcctctc

SEQ ID NO: 149982 - DNA, 120 bp, Artificial Sequence
  ENSG00000105568_52 (sequence is synthesized)
tgttccccgagcctgtttccctgtctgtaaaatgggactccagctagtgacatgggtgcaggtgtgtggatgtgtttagccgaggaccgggcacagaggaagcgtgttataaacgtggct

SEQ ID NO: 149983 - DNA, 120 bp, Artificial Sequence
  ENSG00000105568_53 (sequence is synthesized)
gctgctgttaaagtacagtgcattggcatgttacatgatactgtgtataggagaaagtgatgaagagagaggaggagagggagtacagttttcaacagagtggtcctggaaagtgcaact

SEQ ID NO: 149984 - DNA, 120 bp, Artificial Sequence
  ENSG00000105568_54 (sequence is synthesized)
ccccgagtgtccagtgctgtgaaggcggaacttcgacagtgagtctctgcctccttggaagctccaagctcccatctcagctccaaccttctctaaagcctcagactccttttggtctag

SEQ ID NO: 149985 - DNA, 120 bp, Artificial Sequence
  ENSG00000105568_55 (sequence is synthesized)
ctggggcccaaatgcccctgaactctctccactcccactcctgcttaccacctgataggccacatcctcgagagttggtctctggacacggccacgtgtcagtttacccacctctgcccc

SEQ ID NO: 149986 - DNA, 120 bp, Artificial Sequence
  ENSG00000105568_56 (sequence is synthesized)
ttaatgattccctcgaggtcacagggtctcttggtgggtgtttgccaaattactcttgagcatcttcacatgtaaccaagcaaggcttccaggggctgactgggttgagagctgtcagaa

SEQ ID NO: 149987 - DNA, 120 bp, Artificial Sequence
  ENSG00000105576_0 (sequence is synthesized)
agagggaggcctttacgcatgccttggtggcggctttctgcacgtgtttctcagcccaggtttcagtccagcggaactggctacctcggaatcccaactgctcctttagggtgtcttccg

SEQ ID NO: 149988 - DNA, 120 bp, Artificial Sequence
  ENSG00000105576_1 (sequence is synthesized)
cgattctccgagtggagttaggcgcctgccgacacttccctaaccttggaggcccgggacttgattttcatgaatgaacggagccgggactgactttgcctacggcaaagaaggaaaaac

SEQ ID NO: 149989 - DNA, 120 bp, Artificial Sequence
  ENSG00000105576_2 (sequence is synthesized)
ggtgccctactgtcttcagacgtcgcaaggatcaagaagatttctttcttcatgaccctgcccttgccagaatttcctgcgctgttccacctcattcaacttcagcttgccttgcgccat

SEQ ID NO: 149990 - DNA, 120 bp, Artificial Sequence
  ENSG00000105576_3 (sequence is synthesized)
ggactggcagccagacgagcagggcctgcagcaggtcctgcagctgctcaaagactcacagtcgcccaacacagccactcagcgcatcgtgcaggataaactcaaacaactcaatcagtt

SEQ ID NO: 149991 - DNA, 120 bp, Artificial Sequence
  ENSG00000105576_4 (sequence is synthesized)
tcctgacttcaacaactacctgattttcgtcctgaccagactcaagtcagaagatgagccaacgcgctctctcagtggcctcatcctcaagaacaacgtgaaggcacactatcagagctt

SEQ ID NO: 149992 - DNA, 120 bp, Artificial Sequence
  ENSG00000105576_5 (sequence is synthesized)
cccaccccctgtggcagacttcatcaaacaggagtgtctcaacaacattggcgatgcctcctcgctcatccgagccaccattggcattctcatcaccaccatcgcttccaagggtgagct

SEQ ID NO: 149993 - DNA, 120 bp, Artificial Sequence
  ENSG00000105576_6 (sequence is synthesized)
gcagatgtggcccgagctgctgccccagctctgcaacctgcttaactcggaggattacaacacttgtgagggagcctttggagccctgcagaagatctgtgaagactcatcagagcttct

SEQ ID NO: 149994 - DNA, 120 bp, Artificial Sequence
  ENSG00000105576_7 (sequence is synthesized)
ggacagtgacgccctcaacaggcccctcaacatcatgatccccaagttcctgcagttcttcaagcactgcagtcccaagatccggtcccacgccatcgcctgcgtgaaccagttcatcat

SEQ ID NO: 149995 - DNA, 120 bp, Artificial Sequence
  ENSG00000105576_8 (sequence is synthesized)
ggaccgggcccaggcgctgatggacaatattgacaccttcatcgagcacctatttgccctggctgtggatgatgaccccgaggtgcggaagaatgtgtgccgtgccctggtgatgcttct

SEQ ID NO: 149996 - DNA, 120 bp, Artificial Sequence
  ENSG00000105576_9 (sequence is synthesized)
ggaagtgcggattgacaggctcatcccccacatgcacagcatcatccagtacatgctgcagaggacccaggaccatgatgagaacgttgcccttgaggcctgtgagttctggctgacgct

SEQ ID NO: 149997 - DNA, 120 bp, Artificial Sequence
  ENSG00000105576_10 (sequence is synthesized)
ggccgagcagcccatctgcaaggaagtcctggcctcccatctggtccagttgatccccatcttggtgaatgggatgaagtactcggaaattgacatcatcctgctcaagggggatgtgga

SEQ ID NO: 149998 - DNA, 120 bp, Artificial Sequence
  ENSG00000105576_11 (sequence is synthesized)
ggaggatgaggctgtccccgacagtgagcaggacatcaagccacgcttccacaagtcacgcacggtcacactgccccacgaggctgagcggcctgatggctccgaggacgcggaggatga

SEQ ID NO: 149999 - DNA, 120 bp, Artificial Sequence
  ENSG00000105576_12 (sequence is synthesized)
cgatgatgatgatgctctgtccgactggaatttgaggaagtgctcagcggctgcactggacgtcctcgccaatgtcttccgggaggaactgctgccccacctactcccactactcaaagg

SEQ ID NO: 150000 - DNA, 120 bp, Artificial Sequence
  ENSG00000105576_13 (sequence is synthesized)
cctcctcttccaccccgagtgggtggtcaaggagtcgggcatcctggtgctgggcgccattgctgagggctgcatgcagggcatggtgccctacctgcctgagctgatcccgcacctgat

SEQ ID NO: 150001 - DNA, 120 bp, Artificial Sequence
  ENSG00000105576_14 (sequence is synthesized)
ccagtgcctgtcggataagaaggccttggtccgctccatcgcctgctggacgctgagccgctatgcccactgggtggtcagccagccacccgacatgcacctcaagcccctgatgacaga

SEQ ID NO: 150002 - DNA, 120 bp, Artificial Sequence
  ENSG00000105576_15 (sequence is synthesized)
gctgctcaaacgcatcctggatggcaacaagagggtacaggaggcggcctgcagtgcttttgccaccctggaggaagaggcctgcacggagctggtgccctacctcagctacatcctgga

SEQ ID NO: 150003 - DNA, 120 bp, Artificial Sequence
  ENSG00000105576_16 (sequence is synthesized)
cacccttgtctttgcctttgggaaataccagcacaagaacctgctcatcctctatgacgccattggcaccctggccgactctgtaggccaccacctcaaccagccggaatacatccagaa

SEQ ID NO: 150004 - DNA, 120 bp, Artificial Sequence
  ENSG00000105576_17 (sequence is synthesized)
gctgatgcccccactgatccagaagtggaatgagctcaaggacgaagacaaggacctcttccccctgctggagtgtctgtcatcggtggccaccgccctgcagagtggcttcctgcctta

SEQ ID NO: 150005 - DNA, 120 bp, Artificial Sequence
  ENSG00000105576_18 (sequence is synthesized)
ctgtgagcccgtctaccagcgctgtgtcaccctggtgcagaagacactggctcaggccatgatgtacacccagcaccctgagcagtatgaggctcccgacaaggacttcatgatcgtagc

SEQ ID NO: 150006 - DNA, 120 bp, Artificial Sequence
  ENSG00000105576_19 (sequence is synthesized)
actggatctgctcagcggcctggccgagggcctgggtggtcacgtggagcagctggtggcccgcagcaacatcatgacattgctgttccagtgcatgcaggactcgatgcctgaggtccg

SEQ ID NO: 150007 - DNA, 120 bp, Artificial Sequence
  ENSG00000105576_20 (sequence is synthesized)
gcagagctcctttgccctcctgggagacctcaccaaagcctgcttcatccatgtcaagccctgtatcgccgagttcatgcccattctgggcaccaacctgaacccagagttcatctccgt

SEQ ID NO: 150008 - DNA, 120 bp, Artificial Sequence
  ENSG00000105576_21 (sequence is synthesized)
aacaacctggtggaaatcattaaccgacccaacacacccaagacactgctggaaaacacaggtcgcctgacgagtccctctgccattccagccatcaccatcggccgcttgggctacgtg

SEQ ID NO: 150009 - DNA, 120 bp, Artificial Sequence
  ENSG00000105576_22 (sequence is synthesized)
tgcccccaggaggtggcacccatgctgcagcagttcatccggccttggtgcacgtccctcaggaacatcagggacaacgaggagaaggactcagccttccgcggcatctgcatgatgatc

SEQ ID NO: 150010 - DNA, 120 bp, Artificial Sequence
  ENSG00000105576_23 (sequence is synthesized)
ggtgtcaacccggggggcgttgtgcaggactttattttcttctgcgatgctgtagcctcctgggtgagcccgaaggatgaccttcgggacatgttttataagattctccacggcttcaaa

SEQ ID NO: 150011 - DNA, 120 bp, Artificial Sequence
  ENSG00000105576_24 (sequence is synthesized)
gaccaagttggggaagataactggcagcagttctctgagcaattcccgccgctgctcaaggagaggctggcggctttctatggggtctaggtgatcatggagactgccaggtttctgtct

SEQ ID NO: 150012 - DNA, 120 bp, Artificial Sequence
  ENSG00000105576_25 (sequence is synthesized)
gcgtcgtcgtcggagggattactggggagtgcgctgcatccggaagtcgctgtgccctggttgaggggggttagggaggagtgagtgggactcaaatccagatgccttccccgtccgtcc

SEQ ID NO: 150013 - DNA, 120 bp, Artificial Sequence
  ENSG00000105576_26 (sequence is synthesized)
gtccgtccgtccatccgtccacttgccctcctggcaggtgggtggggccaccatgctcatcctacaaacggggaggtgggggggacttctggtgggcaagggcccctgggctctaatagg

SEQ ID NO: 150014 - DNA, 120 bp, Artificial Sequence
  ENSG00000105576_27 (sequence is synthesized)
gtcatctctggcagcccacttgggccagctacgtgggagggaggaattacacagctgaccgaatccggcttcggatgaggtgagggaggagcaggtcaggaggggggccctcgtagggac

SEQ ID NO: 150015 - DNA, 120 bp, Artificial Sequence
  ENSG00000105576_28 (sequence is synthesized)
gcgtacactcacacggacacacatggccacacgcatgtgcgggtgccataaccggcgaggctgggccagccgctccaccatttccccgactgcatggagacagtagaattagtgaacccc

SEQ ID NO: 150016 - DNA, 120 bp, Artificial Sequence
  ENSG00000105576_29 (sequence is synthesized)
tgagttaacccgtaaggccttccgtgtaacctgcatctagagtttaagaagcttctgctgttttgccggaattggcggtgactggggagggctgggtgggtggggggcctcaggcgggat

SEQ ID NO: 150017 - DNA, 120 bp, Artificial Sequence
  ENSG00000105576_30 (sequence is synthesized)
ctcggggcggggggaggaggatggtgaccttgggagtcgccctgtcagcacgcacatgcttgggacccactccacacactccctgccagctttgttgcagcctcagctggtggtgtctcc

SEQ ID NO: 150018 - DNA, 120 bp, Artificial Sequence
  ENSG00000105576_31 (sequence is synthesized)
gtccttatcctagcctagctcgcagggtgagaaccactggagtggctggggctggccagaggtcaccgtttctccttcctgtgtgctccagtggcttttgaagacactgggttgggacct

SEQ ID NO: 150019 - DNA, 120 bp, Artificial Sequence
  ENSG00000105576_32 (sequence is synthesized)
ttttcctgaagagagctgggtgtagccagagctactggcacctaccccgagcatctctctctgtaagcagcttcaggggcagtccgtttctctgtgcttctgaaacccccttctcacgtt

SEQ ID NO: 150020 - DNA, 120 bp, Artificial Sequence
  ENSG00000105576_33 (sequence is synthesized)
tcaggccccagttttaactcaaggcctggggcaggggcgtttaattgatgatgacagaggacacaggtttttgccagcaaaaaggaaaaccaaggcttggtggaagggaaaggtggtgtg

SEQ ID NO: 150021 - DNA, 120 bp, Artificial Sequence
  ENSG00000105576_34 (sequence is synthesized)
tcccctgttccctattccatctccctgggacttcctgctcatcatagtacccagtgagcccagagatcctactagactgggtcagcaattctagagaaccttccggaatagtctgggaac

SEQ ID NO: 150022 - DNA, 120 bp, Artificial Sequence
  ENSG00000105576_35 (sequence is synthesized)
atggtcaaggtggaaggggctcccctagagagggtgggggtgtagttacttcccagttggccagaaaactgggccttgcagacccccttagcattttttccctttttttccttccctgct

SEQ ID NO: 150023 - DNA, 120 bp, Artificial Sequence
  ENSG00000105576_36 (sequence is synthesized)
ttctacttctttggggagccccttgtgttttggagtctgactggagtctcgcatcctggggcctgctccatccatccctcctgggcgccagaccctccatccaagccctgtgtctttcca

SEQ ID NO: 150024 - DNA, 120 bp, Artificial Sequence
  ENSG00000105576_37 (sequence is synthesized)
tagtcagggtcaggccctgcatctattccaaggggcactcagtacacattccataaattagctgggtgtccctgcacgcccaccccatgaaactcgagcaggtctctggaagccatttgt

SEQ ID NO: 150025 - DNA, 120 bp, Artificial Sequence
  ENSG00000105576_38 (sequence is synthesized)
taaaaaaaaaaaaaaaagttttaaaaataccttttaattttctggtaattccagttctttgaagcatcctctgctgggtcttggggtgtgtggatggattggctgtctgatgggattggt

SEQ ID NO: 150026 - DNA, 120 bp, Artificial Sequence
  ENSG00000105576_39 (sequence is synthesized)
aacccctcgctactcaagatggggggatacaaacaccttcagggaaggggagcctggttcttctcgttttcctttttttttttttttttaaaaaaaaactatttaattttttaatttatt

SEQ ID NO: 150027 - DNA, 120 bp, Artificial Sequence
  ENSG00000105576_40 (sequence is synthesized)
tttggttgttttttgcacaatgaagtttcagcttctcaaccttctcccctacccagggctgtggacccagactggccttgagccacagtccctctttccctcctcaccctcttccccctg

SEQ ID NO: 150028 - DNA, 120 bp, Artificial Sequence
  ENSG00000105576_41 (sequence is synthesized)
cgggctcccgggtctgtccatttgttactgtgctgtgctggggattggcgccgaggtggcgtgagattccacttgtgtagaactttgttgagtaaagatcagtttcttgtgaactcctta

SEQ ID NO: 150029 - DNA, 120 bp, Artificial Sequence
  ENSG00000105576_42 (sequence is synthesized)
gggaagccggttgggcccgatcctcctggcagctagaacgggccgggcgggggaggggggaaccgagcagagcttagggggtggggcctcggagccaggccatgtcggggctcctcaaga

SEQ ID NO: 150030 - DNA, 120 bp, Artificial Sequence
  ENSG00000105576_43 (sequence is synthesized)
ggccgggcttggctggctctcattcgaagaggcagcagagacctacctggggactgctttgggcctgattaaggggaatccttagaatttggctaggccacagagggggatatctggcat

SEQ ID NO: 150031 - DNA, 120 bp, Artificial Sequence
  ENSG00000105576_44 (sequence is synthesized)
ccactgagcttgaagggcaggaacaggggacaggagagatcaggacgatcgtcttgggagggcgcatctggggaagctcagaaattggactagggcaggaggcctctgggatctggcaga

SEQ ID NO: 150032 - DNA, 120 bp, Artificial Sequence
  ENSG00000105576_45 (sequence is synthesized)
agttaagggcagagtgtcgggggaaggggactcttcagggactgtgcctgcatagaagagaccacgggggccggggcgctatcacggtctggggcggggcccctggatgtggaggcggct

SEQ ID NO: 150033 - DNA, 120 bp, Artificial Sequence
  ENSG00000105576_46 (sequence is synthesized)
gggccctcgcccagccgctgcgagggaggtggaagccttcgggctcggagccggggtcagcggcatgggccaccctgggacgagggctcttcgctgggtcccatgaggatccgccgggcc

SEQ ID NO: 150034 - DNA, 120 bp, Artificial Sequence
  ENSG00000105576_47 (sequence is synthesized)
gccgcctgtggcccgtttccacatcccccctcccgcgctcccgagcccgcgactgcgcggccgaggatggcgcagctggcggggaccccgcacttgggcgggcgtggatcggaggcctcc

SEQ ID NO: 150035 - DNA, 120 bp, Artificial Sequence
  ENSG00000105576_48 (sequence is synthesized)
aggcctccgcctgtccgccgagggcgttcccgtcgtcatgcggccaccgcggcctcaggggctccacctgggtctcacacggagccccagagacccagcgctgaccccggcccctacctc

SEQ ID NO: 150036 - DNA, 120 bp, Artificial Sequence
  ENSG00000105576_49 (sequence is synthesized)
cagtaaaagaacagccttgagccttggagggtaaagccacgtttttaaggaacaattcagagctggccaggtcatgcttaacttggatgatctctaatcgcgcgaactgctcttataccc

SEQ ID NO: 150037 - DNA, 120 bp, Artificial Sequence
  ENSG00000105576_50 (sequence is synthesized)
atttgacaagtggggaaactgaggcttcaagtggcaggaggtctcccactttgttatcggcagggcagggaggggaaaccaagacgctacagggtctccagctttttaccatctgctcct

SEQ ID NO: 150038 - DNA, 120 bp, Artificial Sequence
  ENSG00000105576_51 (sequence is synthesized)
tgagcaaccctaggcccgtcacctgtgcttctgcattggcctgcctcgggcctgctccacttacccgtgcccctgtcggcatctgtgtctagatgtacacccagcaccctgagcagtatg

SEQ ID NO: 150039 - DNA, 120 bp, Artificial Sequence
  ENSG00000105576_52 (sequence is synthesized)
gggaaataccagcacaagaacctgctcatcctctatgacgccattggcaccctggccgactctgtaggccaccacctcaaccagccgggacgtggccgtgacctcgacaggcagacagac

SEQ ID NO: 150040 - DNA, 120 bp, Artificial Sequence
  ENSG00000105576_53 (sequence is synthesized)
tttgtttcctcactggtagtggttggccagtctctagttggaactggggcgagtagtgagtgaggtggggcggccccctggcccctgtgggtggcgggggctgtgcagggctctgactgg

SEQ ID NO: 150041 - DNA, 120 bp, Artificial Sequence
  ENSG00000105576_54 (sequence is synthesized)
gcgctgggctcgggcggcccctcacctgggatccgtcacgtttcaggactttattttcttctgcgatgctgtagcctcctgggtgagcccgaaggatgaccttcgggacatgttttataa

SEQ ID NO: 150042 - DNA, 120 bp, Artificial Sequence
  ENSG00000105583_0 (sequence is synthesized)
cttcgactcgctatgtccactaacaatatgtcggacccacggaggccgaacaaagtgctgaggtacaagcccccgccgagcgaatgtaacccggccttggacgacccgacgccggactac

SEQ ID NO: 150043 - DNA, 120 bp, Artificial Sequence
  ENSG00000105583_1 (sequence is synthesized)
atgaacctgctgggcatgatcttcagcatgtgcggcctcatgcttaagctgaagtggtgtgcttgggtcgctgtctactgctccttcatcagctttgccaactctcggagctcggaggac

SEQ ID NO: 150044 - DNA, 120 bp, Artificial Sequence
  ENSG00000105583_2 (sequence is synthesized)
gcttcatgctgtccatctctgccgtggtgatgtcctatctgcagaatcctcagcccatgacgcccccatggtgataccagcctagaagggtcacattttggaccctgtctatccactagg

SEQ ID NO: 150045 - DNA, 120 bp, Artificial Sequence
  ENSG00000105583_3 (sequence is synthesized)
cctgggctttggctgctaaacctgctgccttcagctgccatcctggacttccctgaatgaggccgtctcggtgcccccagctggatagagggaacctggccctttcctagggaacaccct

SEQ ID NO: 150046 - DNA, 120 bp, Artificial Sequence
  ENSG00000105583_4 (sequence is synthesized)
aggcttacccctcctgcctcccttcccctgcctgctgctgggggagatgctgtccatgtttctaggggtattcatttgctttctcgttgaaacctgttgttaataaagtttttcactctg

SEQ ID NO: 150047 - DNA, 120 bp, Artificial Sequence
  ENSG00000105605_0 (sequence is synthesized)
tgctgcatggggtcaagcactctggtcggtcccatggagctctgcactgtagcttcccttccacaggccccgcagggcgccccctgcctctgaggatgagtcactgcagcagccgcgccc

SEQ ID NO: 150048 - DNA, 120 bp, Artificial Sequence
  ENSG00000105605_1 (sequence is synthesized)
tgaccctgctgagcagcgtgtttggtgcgtgtggcctgctcctggtaggcatcgcggtcagcactgactactggctgtacatggaagaaggcacagtgctaccgcagaaccagaccaccg

SEQ ID NO: 150049 - DNA, 120 bp, Artificial Sequence
  ENSG00000105605_2 (sequence is synthesized)
aggtcaagatggccctgcacgccggcctctggcgagtctgcttctttgcaggtcgggagaaaggtcgctgtgtggcctcagaatattttcttgaaccggagatcaatttggtgacggaaa

SEQ ID NO: 150050 - DNA, 120 bp, Artificial Sequence
  ENSG00000105605_3 (sequence is synthesized)
acacggagaatattctgaagacagtgcgcacggccacccccttccccatggtcagcctcttcctcgtgttcacggccttcgtcatcagcaacatcggccacatccgcccgcagaggacca

SEQ ID NO: 150051 - DNA, 120 bp, Artificial Sequence
  ENSG00000105605_4 (sequence is synthesized)
ggcttggttctttacatctccagcatcaacgacgaggtcatgaacaggcccagcagctctgagcagtattttcattatcgctacgggtggtcttttgccttcgccgcttcctccttccta

SEQ ID NO: 150052 - DNA, 120 bp, Artificial Sequence
  ENSG00000105605_5 (sequence is synthesized)
ctcaaagagggggccggcgtgatgtccgtgtacctgttcaccaagcgctacgcggaggaggagatgtaccgtccacacccggccttctaccgcccgcgtctcagcgactgctccgactac

SEQ ID NO: 150053 - DNA, 120 bp, Artificial Sequence
  ENSG00000105605_6 (sequence is synthesized)
tcgggccagttcctgcagcccgaggcgtggcgccgcggccggagcccctccgacatctccagcgacgtgtccatccaaatgacgcagaactaccctcccgccatcaagtacccggaccac

SEQ ID NO: 150054 - DNA, 120 bp, Artificial Sequence
  ENSG00000105605_7 (sequence is synthesized)
ctgcacatctccacctcgccctgctgaggcccgcccctcggagctccccctgcctcctcctcctcctcgtcttaggggggtctccctgcaatgcagcgcccccttccgtcctcgggactc

SEQ ID NO: 150055 - DNA, 120 bp, Artificial Sequence
  ENSG00000105605_8 (sequence is synthesized)
agactcccttatttcaatggccgcgccctcttttcccgacctctccttttcattggtccctctcactcccaaatgactcctccccttcgttggcccgcccctttcctctggcccctcctc

SEQ ID NO: 150056 - DNA, 120 bp, Artificial Sequence
  ENSG00000105605_9 (sequence is synthesized)
agcagccagaggcggtgcaagcgcccagctccccagagctccccaacctcggacctcaccgcaggggcgctgggctggagagcaggttcgggcagccgtcgggaataccgaccatcctct

SEQ ID NO: 150057 - DNA, 120 bp, Artificial Sequence
  ENSG00000105605_10 (sequence is synthesized)
tctcccttctaacctgggcttcctttttccctgcctaatctcacctcctgacctgctgggtcctccggtgcagtgggagggccggcttgctccacccgcagccccggggtggcgtaggga

SEQ ID NO: 150058 - DNA, 120 bp, Artificial Sequence
  ENSG00000105605_11 (sequence is synthesized)
agggggctggaagccacgggtacggttaacctggcccttccctccccatctcccctacttccctggaaggtcccattctttctcaccggctgggctcttttctgcttcctgaaggttacc

SEQ ID NO: 150059 - DNA, 120 bp, Artificial Sequence
  ENSG00000105605_12 (sequence is synthesized)
tgccttttagggggctcttgtctaaaggatcttcttgctttctcagctatccttggcttctttttcgtcttcctcctcctttaactctttctctcctttcctcccttcacccgttcgtcc

SEQ ID NO: 150060 - DNA, 120 bp, Artificial Sequence
  ENSG00000105605_13 (sequence is synthesized)
caagcccttgggtgcatcccgccctaggcgcacaccagacggccagaatggggaccctagggtggagggaattcccccacgccatctccgcacctgtgcccgcctctcccccctcgaggc

SEQ ID NO: 150061 - DNA, 120 bp, Artificial Sequence
  ENSG00000105605_14 (sequence is synthesized)
cccgtcgagggagggaggggcagtagcgggggtcgacaccccccccaaacctctaagtcttccattttctggctctcctcctcattgacgtccctcttcccccctcagaaccccaactct

SEQ ID NO: 150062 - DNA, 120 bp, Artificial Sequence
  ENSG00000105605_15 (sequence is synthesized)
ggcctctttcaagggcccgtccgccccgttggacagattttggggggagaggaggtcaccaggaactcgcccacccccccttattagggaaagaggggcgaggtagcacagtgctgtaca

SEQ ID NO: 150063 - DNA, 120 bp, Artificial Sequence
  ENSG00000105605_16 (sequence is synthesized)
cggaaccagaatggcccccggggtggggggaggggggcaggggagggacgggggcttttagtttgcatcttaggtgggaggggggaggggggacccgccgcagttaacctgactttacgc

SEQ ID NO: 150064 - DNA, 120 bp, Artificial Sequence
  ENSG00000105605_17 (sequence is synthesized)
agcgatttttaacgaggctggggggaggggggcactggggtggggacagggtggggtggggggcctggctctgttatttaccgtgtatcatatgtaaatatcgacagaaacttcaataaa

SEQ ID NO: 150065 - DNA, 120 bp, Artificial Sequence
  ENSG00000105605_18 (sequence is synthesized)
ctttatttcaaacacgtctccgcctgcccggagggaagggattggatagagggggcttagtctgggtctctgcttctagggttgcaggcctaaagtactgcagaatgacgttagatgggt

SEQ ID NO: 150066 - DNA, 120 bp, Artificial Sequence
  ENSG00000105605_19 (sequence is synthesized)
cgttgttaaatgacttaatcatcatcattatcaacggcagcgctttatacttcagtccgtgtaaagcatgcaggaccgtaaatgatactggtcaggatcaataaacgctttctcctggta

SEQ ID NO: 150067 - DNA, 120 bp, Artificial Sequence
  ENSG00000105607_0 (sequence is synthesized)
agttgcactgtagcctcggcagtgaaccgggaggtactaccaggtcgccgtcgttgctccgctcgctctgagagagcatggccctgagaggcgtctccgtgcggctgctgagccgcggac

SEQ ID NO: 150068 - DNA, 120 bp, Artificial Sequence
  ENSG00000105607_1 (sequence is synthesized)
ccggcctgcacgtccttcgcacgtgggtctcgtcggcggcgcagaccgagaaaggcgggagaacacagagccaactggctaagtcctcgcgtcccgagtttgactggcaggacccgctgg

SEQ ID NO: 150069 - DNA, 120 bp, Artificial Sequence
  ENSG00000105607_2 (sequence is synthesized)
tgctggaggagcagctgaccacagatgagatcctcatcagggacaccttccgcacctactgccaggagagactcatgcctcgcatcctgttggccaatcgcaacgaagtttttcatcggg

SEQ ID NO: 150070 - DNA, 120 bp, Artificial Sequence
  ENSG00000105607_3 (sequence is synthesized)
agatcatttcggagatgggggagttgggtgtgctgggccccaccatcaaaggatatggctgtgctggggtttcgtctgtggcctatgggctcctggcccgagagctggagcgggtggaca

SEQ ID NO: 150071 - DNA, 120 bp, Artificial Sequence
  ENSG00000105607_4 (sequence is synthesized)
gtggctacaggtcggcgatgagtgtccagtcctccctcgtcatgcaccctatctatgcctatggcagcgaggaacagcggcagaagtacctgccccagctggccaagggggagctcctgg

SEQ ID NO: 150072 - DNA, 120 bp, Artificial Sequence
  ENSG00000105607_5 (sequence is synthesized)
gctgcttcgggctcacagagcccaacagcggaagtgaccccagcagcatggagaccagagcccactacaactcatccaacaagagctacaccctcaatgggaccaagacctggatcacga

SEQ ID NO: 150073 - DNA, 120 bp, Artificial Sequence
  ENSG00000105607_6 (sequence is synthesized)
actcgcctatggccgatctgtttgtagtgtgggctcggtgtgaagatggctgcattcggggcttcctgctggagaaggggatgcggggtctctcggcccccaggatccagggcaagttct

SEQ ID NO: 150074 - DNA, 120 bp, Artificial Sequence
  ENSG00000105607_7 (sequence is synthesized)
agaggagaatgtgctccctggtgcatccagcctggggggtcccttcggctgcctgaacaacgcccggtacggcatcgcgtggggcgtgcttggagcttcggagttctgcttgcacacagc

SEQ ID NO: 150075 - DNA, 120 bp, Artificial Sequence
  ENSG00000105607_8 (sequence is synthesized)
ccggcagtacgccctcgacaggatgcagtttggtgtcccactggccaggaaccagctgattcagaagaagctggcagacatgctcactgagattaccctgggccttcacgcctgcctgca

SEQ ID NO: 150076 - DNA, 120 bp, Artificial Sequence
  ENSG00000105607_9 (sequence is synthesized)
gctcggccgcttgaaggaccaggacaaggctgcccccgagatggtttctctgctgaagaggaataactgtgggaaagccctggacatcgcccgccaggcccgagacatgctgggggggaa

SEQ ID NO: 150077 - DNA, 120 bp, Artificial Sequence
  ENSG00000105607_10 (sequence is synthesized)
tgggatttctgacgagtatcacgtgatccggcacgccatgaacctggaggccgtgaacacctacgaaggtacacatgacattcacgccctgatccttgggagagctatcacgggaatcca

SEQ ID NO: 150078 - DNA, 120 bp, Artificial Sequence
  ENSG00000105607_11 (sequence is synthesized)
ggcgttcacggccagcaagtgagccgctccatcaggggcccgaaactctcaagcccctttctggagagatgcctggctggaccgtaggagcgctgtgctctgagcttagaaagggaggtg

SEQ ID NO: 150079 - DNA, 120 bp, Artificial Sequence
  ENSG00000105607_12 (sequence is synthesized)
gcggatggagtgggaagtgagagacactgatttttaaatatcaaaatttcccttctgaagtcgttcagatgtgttccttaaaaagaagatggaattctctgtagagcgtctcaatccact

SEQ ID NO: 150080 - DNA, 120 bp, Artificial Sequence
  ENSG00000105607_13 (sequence is synthesized)
tttaaccatggatgagagcagactccatttaccctgaaatagcagcttctcttgagaggagagtgacatggaagcaactccgtctgctgcagctgaccccctcacactgagttcacagtg

SEQ ID NO: 150081 - DNA, 120 bp, Artificial Sequence
  ENSG00000105607_14 (sequence is synthesized)
cgccctccctccctcccatctgggggtagtgccttatgctgggtgttggagcagagtgagggagaggaaaataaagacctgcacatctgaccccaaggtgtcaggccggtttactggtaa

SEQ ID NO: 150082 - DNA, 120 bp, Artificial Sequence
  ENSG00000105607_15 (sequence is synthesized)
agttgcactgtagcctcggcagtgaaccgggaggtactaccaggtaaggaaggtgcggtagccccagccgtgggtgagaggagctccgctctgacacccccgctcctgtaggtcgccgtc

SEQ ID NO: 150083 - DNA, 86 bp, Artificial Sequence
  ENSG00000105607_16 (sequence is synthesized)
cacccctctagtagctgggattacaggatatggctgtgctggggtttcgtctgtggcctatgggctcctggcccgagagctggagc

SEQ ID NO: 150084 - DNA, 120 bp, Artificial Sequence
  ENSG00000105607_17 (sequence is synthesized)
gccccaccatcaaaggtaggaacaagtatctctccacacactgcagaaccctctgtattctgaaagcctcttcctccttccctccctccctttcttccttccttctctttcttttctttt

SEQ ID NO: 150085 - DNA, 120 bp, Artificial Sequence
  ENSG00000105607_18 (sequence is synthesized)
acctggaggccgtgaacacctacgaaggtgagctcattcattccacagctgctgctgaaacaatgactcccacagaaccatctccagaccctcaccccaccccgagttccgggtcagaaa

SEQ ID NO: 150086 - DNA, 120 bp, Artificial Sequence
  ENSG00000105607_19 (sequence is synthesized)
gttgaactgtatcctggacatgtggatgtccctggccaccgaaagtggctcagataaacaaggacaacacagaactcatgttcttgtctctgccagagaagccaccacctaccggaaacc

SEQ ID NO: 150087 - DNA, 120 bp, Artificial Sequence
  ENSG00000105607_20 (sequence is synthesized)
taagctccgaaggcagcccaggggtgaggcccgactcctagcaggctggtggacgcaagggagtgagcgaagctacacgcaggaatcaacgctccattttgttaagagacaaaagtcatc

SEQ ID NO: 150088 - DNA, 120 bp, Artificial Sequence
  ENSG00000105607_21 (sequence is synthesized)
ttcagatgacggtgtttgcaccctgtaactgatggtgatttacatgggggtccagaaccccttgcttggtgggaagacagatgtggaaaaagatacttaaaaaaaaaaaaaaagtgcaaa

SEQ ID NO: 150089 - DNA, 120 bp, Artificial Sequence
  ENSG00000105607_22 (sequence is synthesized)
cccccatctgagtcttaggctctgctgtaaaaaagaaacccagagctgctcatacaacagtgggacatgacaacggtttggcttctcagctcagacacaccatgttataggggatcacaa

SEQ ID NO: 150090 - DNA, 120 bp, Artificial Sequence
  ENSG00000105607_23 (sequence is synthesized)
acaagatggtgagtgcaccaagggctttgcagggactgtggcctggcggggtcagggctgggtgcctggtttctgttcacatttactcttggctgggccatccctgtcctcttcctcagg

SEQ ID NO: 150091 - DNA, 120 bp, Artificial Sequence
  ENSG00000105607_24 (sequence is synthesized)
cagcgccccccctgtgagtttactcatacctcaggctggagacacaggtctttgtacacagtctccacgctgtggcagacttgtttgagctctgtctccaaatggctgatctttgccatt

SEQ ID NO: 150092 - DNA, 120 bp, Artificial Sequence
  ENSG00000105607_25 (sequence is synthesized)
ttctgggtgaactcttggagcttttcctggatgatcttgttgtggtcattataaatctgatagatcctctcctctaatttctctgtcagatccgaaacctgttaaacaataagatgtgtt

SEQ ID NO: 150093 - DNA, 120 bp, Artificial Sequence
  ENSG00000105607_26 (sequence is synthesized)
cgcaggtggactctgtcccagaatccgagagctgcccgagcggggtggcagggtcgtggccagggtcagaggcactaaggcagtgagtgcgctgtgcctgcggggccggagaaaagtcac

SEQ ID NO: 150094 - DNA, 120 bp, Artificial Sequence
  ENSG00000105607_27 (sequence is synthesized)
ctgatcagtctcgcttgcagctcgcactagccggggggcgacatgggtgttggggggtagggctgatgagggtccgagaagggagggcacagtgatcttgcggactggaccgaggcgaat

SEQ ID NO: 150095 - DNA, 120 bp, Artificial Sequence
  ENSG00000105607_28 (sequence is synthesized)
ggtggggctgtcccctgagcctattctgtccctatctcaaagatagcataagtggccacctggacccccgccagaccctgggcttcacctggagatctgatccctggccagcctgactgt

SEQ ID NO: 150096 - DNA, 120 bp, Artificial Sequence
  ENSG00000105607_29 (sequence is synthesized)
ggaccttgtgtccttcctggagagaaaggtccttcctgcctggtggccctggggacctgaaccttctgctgtccctcttgtccttgatgggctgggctgaggacagccccactggtccct

SEQ ID NO: 150097 - DNA, 120 bp, Artificial Sequence
  ENSG00000105607_30 (sequence is synthesized)
cattgggagcttggctgcatcagggaatccccaccccgggctaggtttgcttggagcatcgggatgccaggatccccagtccttgttaccctcatgtgccactcccagggctgcccccga

SEQ ID NO: 150098 - DNA, 120 bp, Artificial Sequence
  ENSG00000105609_0 (sequence is synthesized)
gtgacagggagaacccagcctccagtccacactctgcgtgtttttgtgtcctgccaggcaccgtggtctcatccgcctgcacagctgagtccagtgggagctgacgccatgaccctcacc

SEQ ID NO: 150099 - DNA, 120 bp, Artificial Sequence
  ENSG00000105609_1 (sequence is synthesized)
ctctcagtcctgatttgcctcgggctgagtgtgggccccaggacctgcgtgcaggcaggcaccctccccaaacccaccctctgggctgagccagcctctgtgatagctcgggggaagccc

SEQ ID NO: 150100 - DNA, 120 bp, Artificial Sequence
  ENSG00000105609_2 (sequence is synthesized)
gtgaccctctggtgtcaggggcccctggagactgaggagtaccgtctggataaggagggactcccatgggcccggaagagacagaacccactggagcctggagccaaggccaagttccac

SEQ ID NO: 150101 - DNA, 120 bp, Artificial Sequence
  ENSG00000105609_3 (sequence is synthesized)
attccatccacggtgtatgacagtgcagggcgataccgctgctactatgagacccctgcaggctggtcagagcccagtgaccccctggagctggtggcgacaggattctatgcagaaccc

SEQ ID NO: 150102 - DNA, 120 bp, Artificial Sequence
  ENSG00000105609_4 (sequence is synthesized)
actcttttagccctgccgagtcctgtggtggcctcaggaggaaatgtgaccctccagtgtgatacactggacggacttctcacgtttgttcttgttgaggaagaacagaagctccccagg

SEQ ID NO: 150103 - DNA, 120 bp, Artificial Sequence
  ENSG00000105609_5 (sequence is synthesized)
accctgtactcacagaagctccccaaagggccatcccaggccctgttccctgtgggtcccgtgacccccagctgcaggtggaggttcagatgctattactattacaggaaaaaccctcag

SEQ ID NO: 150104 - DNA, 120 bp, Artificial Sequence
  ENSG00000105609_6 (sequence is synthesized)
gtgtggtcgaaccccagtgacctcctggagattctggtcccaggcgtgtctaggaagccctccctcctgatcccgcagggctctgtcgtggcccgcggaggcagcctgaccctgcagtgt

SEQ ID NO: 150105 - DNA, 120 bp, Artificial Sequence
  ENSG00000105609_7 (sequence is synthesized)
cgctctgatgtcggctatgacatattcgttctgtacaaggagggggaacatgacctcgtccagggctctggccagcagccccaggctgggctctcccaggccaacttcaccctgggccct

SEQ ID NO: 150106 - DNA, 120 bp, Artificial Sequence
  ENSG00000105609_8 (sequence is synthesized)
gtgagccgctcccacgggggccagtacagatgctacggtgcacacaacctctcccctaggtggtcggcccccagcgaccccctggacatcctgatcgcaggactgatccctgacataccc

SEQ ID NO: 150107 - DNA, 120 bp, Artificial Sequence
  ENSG00000105609_9 (sequence is synthesized)
gccctctcggtgcagccgggccccaaggtggcctcaggagagaacgtgaccctgctgtgtcagtcatggcatcagatagacactttctttttgaccaaggagggggcagcccatcccccg

SEQ ID NO: 150108 - DNA, 120 bp, Artificial Sequence
  ENSG00000105609_10 (sequence is synthesized)
ctgtgtctaaagtcaaagtaccagtcttatagacaccaggctgaattctccatgagtcctgtgacctcagcccagggtggaacctaccgatgctacagcgcaatcaggtcctacccctac

SEQ ID NO: 150109 - DNA, 120 bp, Artificial Sequence
  ENSG00000105609_11 (sequence is synthesized)
ctgctgtccagccctagttacccccaggagctcgtggtctcaggaccctctggggatcccagcctctcacctacaggctccacccccacacctggccctgaggaccagcccctcaccccc

SEQ ID NO: 150110 - DNA, 120 bp, Artificial Sequence
  ENSG00000105609_12 (sequence is synthesized)
acggggttggatccccagagtggtctgggaaggcacctgggggttgtgactggggtctcagtggccttcgtcctgctgctgttcctcctcctcttcctcctcctccgacatcggcatcag

SEQ ID NO: 150111 - DNA, 120 bp, Artificial Sequence
  ENSG00000105609_13 (sequence is synthesized)
tctcaatgctgccgtgaaggacacacagcccaaggacggggtggagatggatgctccggctgctgcatctgaagccccccaggatgtgacctacgcccagctgcacagcttgaccctcag

SEQ ID NO: 150112 - DNA, 120 bp, Artificial Sequence
  ENSG00000105609_14 (sequence is synthesized)
acgggaggcaactgagcctcctccatcccaggaaagggaacctccagctgaacccagcatctacgcccccctggccatccactagcccacgggggacccagatctcatactcaacagaag

SEQ ID NO: 150113 - DNA, 120 bp, Artificial Sequence
  ENSG00000105609_15 (sequence is synthesized)
gagactcagagactccagaaggcacaggagctgcccccagtggacaccaatgaaccccagccagcctggacccctaacaaagaccaccaggacatcctgggaactctgggactcactaga

SEQ ID NO: 150114 - DNA, 120 bp, Artificial Sequence
  ENSG00000105609_16 (sequence is synthesized)
ttctgcagtcaaagatgactaatatccttgcatttttgaaatgaagccacagacttctcaataaatcaatgagctgagaaaactgaaacagaaattagagcatggtataaatttggaatg

SEQ ID NO: 150115 - DNA, 120 bp, Artificial Sequence
  ENSG00000105609_17 (sequence is synthesized)
ataatgtaaatattacacattaaatgatgaaatcggaaaactacaaatgagcgaatgaattagaaaagaataaaacctacgtaattaatgaccttggcaatgacagaaagaatttagaaa

SEQ ID NO: 150116 - DNA, 120 bp, Artificial Sequence
  ENSG00000105609_18 (sequence is synthesized)
aagaacaacaaattattccaaatgaaggtgtgaggaaggggacaaaaataacaagaggagttactaatgagggctacgtgaaaactcgatgaagccaaaaaagctcattcttgagaatgt

SEQ ID NO: 150117 - DNA, 120 bp, Artificial Sequence
  ENSG00000105609_19 (sequence is synthesized)
gaattacattcacaaatcctagccacaataagcaaggaaaaaagcggggttcaggcacacatttccatatgggggtgaaacagcagacaccaccacaaatctgacacatattgcctttat

SEQ ID NO: 150118 - DNA, 86 bp, Artificial Sequence
  ENSG00000105609_20 (sequence is synthesized)
ttttttcacgacagataaacttgtgtcaaggggatttgtcttggtttttgtgtgagggtttttgttttgttttgttttgttttttg

SEQ ID NO: 150119 - DNA, 120 bp, Artificial Sequence
  ENSG00000105609_21 (sequence is synthesized)
tgctgggcttacaggcgtgagccaccacgtccagcccatacatttcaattttaaagggatgcgccctagtccttagttagtctctcctcatctctataaaatgttcagctactcacctct

SEQ ID NO: 150120 - DNA, 120 bp, Artificial Sequence
  ENSG00000105609_22 (sequence is synthesized)
ctcttgggctattgctagacatcgttttctcttccttctttctgacgcctacaatagataggacattccccctcctcattctattctcccaagtactttaaattgcaatttataaagttt

SEQ ID NO: 150121 - DNA, 120 bp, Artificial Sequence
  ENSG00000105609_23 (sequence is synthesized)
ctatgctacactctaaaaaaaattctgttttgttttctaatttcataattggtgcttcactgtgtcttgtcctcgaaggaatgagtattttgattgtgttcattaaatctgatttttcta

SEQ ID NO: 150122 - DNA, 120 bp, Artificial Sequence
  ENSG00000105609_24 (sequence is synthesized)
ggcaccgtggtctcatccgcctgcacagctgagtccagtgggagctgacgccatgaccctcaccctctcagtcctgatttgcctcggtgaggtttgaagagggggaaggaaggtccccgt

SEQ ID NO: 150123 - DNA, 120 bp, Artificial Sequence
  ENSG00000105609_25 (sequence is synthesized)
cttggagggagctcactctaaagcgaggctctggtctatcagagaatctggtctatcagaggctccgagggaggagaggaactgctggggcttccaggggcaaatccctcacagggaact

SEQ ID NO: 150124 - DNA, 120 bp, Artificial Sequence
  ENSG00000105609_26 (sequence is synthesized)
ctcttccagggctgagtgtgggccccaggacctgcgtgcaggcaggtgagtctgtccccagctgtcccaggtcccttcttctcactggggacaagggcccaaccccgggcagctgggggt

SEQ ID NO: 150125 - DNA, 120 bp, Artificial Sequence
  ENSG00000105609_27 (sequence is synthesized)
ggagatagctgttctgggctgactgatggggacgtctggagggtcctggggctgagagctggaatctgagggatggggatgtcttgggatccagcctctgattccattctaggcaccctc

SEQ ID NO: 150126 - DNA, 120 bp, Artificial Sequence
  ENSG00000105609_28 (sequence is synthesized)
tccagccctagttacccccaggagctcgtggtctcaggtgagggccctgaccctgtcctgtccaagctcaaaggctcagctcaggccctgcccccaggagagctctgggctgggatggag

SEQ ID NO: 150127 - DNA, 120 bp, Artificial Sequence
  ENSG00000105609_29 (sequence is synthesized)
tcgcggtgcgggggggagggtttgaggggggctcagccagagggagactcacccctcagaggggaggaggacaacgggggctccccaggcatgcccacacttggccccatctcctgggat

SEQ ID NO: 150128 - DNA, 120 bp, Artificial Sequence
  ENSG00000105609_30 (sequence is synthesized)
gcaaatggtgaaaggtgagcagaagaaagtttccagagaagccacgggcaggtggagggacgggtttcctcactcagcaccaaagcgcctcgctccctttctgtgcttattcccaggacc

SEQ ID NO: 150129 - DNA, 120 bp, Artificial Sequence
  ENSG00000105609_31 (sequence is synthesized)
ctctggggatcccagcctctcacctacaggctccacccccacacctggtgagtcactgaggcctctgggctcggagggagcgtggtctccccccaggcagccctgagtctccccgaggat

SEQ ID NO: 150130 - DNA, 120 bp, Artificial Sequence
  ENSG00000105609_32 (sequence is synthesized)
cctattcccctcaaagactcaagcgggagcttccctccagggagctgggcagagccagaggaggggccacaggctccccggggctctgaggctgggccggtgagggggcgggcgtcgagg

SEQ ID NO: 150131 - DNA, 120 bp, Artificial Sequence
  ENSG00000105609_33 (sequence is synthesized)
cagagagagatgttgggtgttggggcccagcctgggggaggagcagccgggctgatgtggggagcagggcagccccagccctcacctccccgtcctgacccagcaggccctgaggaccag

SEQ ID NO: 150132 - DNA, 120 bp, Artificial Sequence
  ENSG00000105609_34 (sequence is synthesized)
cccctcacccccacggggttggatccccagagtggtgagtgaggggctctgagtgggaggtgggcggagaccaggggaggcaggggtgggttctgtcgtaggttcaggctcctctggaga

SEQ ID NO: 150133 - DNA, 120 bp, Artificial Sequence
  ENSG00000105609_35 (sequence is synthesized)
tggtgaagtgcacaagcccttcccctgcctgggcctcagtttctccaagtgtaaaggagagaggcctgcattgatgggattcttcaggggactgtcctgtcccaccggcagcagtgacgg

SEQ ID NO: 150134 - DNA, 120 bp, Artificial Sequence
  ENSG00000105609_36 (sequence is synthesized)
tgacctggggcaggggaggggagcagggccgtggtttggggcattcaggctctttccctgcagctccggggctccgctcaggtgcagagaacaagggctgcgggtcagactcctgggttc

SEQ ID NO: 150135 - DNA, 120 bp, Artificial Sequence
  ENSG00000105609_37 (sequence is synthesized)
acttcccagctctgccgcatcccaccgtgggcccaggcaggtcaactttctactctgactcagtttcagcagctgtaaactggctcagtcccatccagctcacagaactgctgcgaggcg

SEQ ID NO: 150136 - DNA, 120 bp, Artificial Sequence
  ENSG00000105609_38 (sequence is synthesized)
taagcaaaatcatgggacctggccctgtacacagctcggcaggggcaccgtcctcctgctaccctcagcccttcccagatacacacagagcccctatccagacaggttctgcatgggagt

SEQ ID NO: 150137 - DNA, 120 bp, Artificial Sequence
  ENSG00000105609_39 (sequence is synthesized)
atgggaacttggcagagtgggaaacggacctggctgagctgggagtgagagcaatgcagggtccgtcctgcacaacccactccctctcccaggccctgctgtgctggggaagggaggatc

SEQ ID NO: 150138 - DNA, 120 bp, Artificial Sequence
  ENSG00000105609_40 (sequence is synthesized)
agacactaggacaggcccctcctgtcaaataggaaacaggtgtgcacctggtggggcagcaggaggacagctggggaaaacacaaagtccctggttcccttcccagacctgcttcttcca

SEQ ID NO: 150139 - DNA, 120 bp, Artificial Sequence
  ENSG00000105609_41 (sequence is synthesized)
ggctgaggagcctggggcaggcgattcccctctctgagcctcagtttgctcctctgtgaattggggggttggcaatcccatgttgcacaactgctgtgagggttggagctcatgaaggaa

SEQ ID NO: 150140 - DNA, 120 bp, Artificial Sequence
  ENSG00000105609_42 (sequence is synthesized)
cggggcaccagccagagggaaaccaaacacaaaggaaagtcagcttagaaaaactgctccagaaattcccaggtgaaaaatcgatcgagaaagaagagaataaatgtgagcatgtgtgga

SEQ ID NO: 150141 - DNA, 120 bp, Artificial Sequence
  ENSG00000105609_43 (sequence is synthesized)
agtgcttgattcttctgattttactttaaacttacgacgtatttaaagcctcagtgccagtgggcctccaggtttccttctttccgctcgagttgtgtgtgcagggcagctggttcgaat

SEQ ID NO: 150142 - DNA, 120 bp, Artificial Sequence
  ENSG00000105609_44 (sequence is synthesized)
tctcccaggcctgaccctctgtccatctctgtccagcccatttctaccgtcctgcaggggctgcggggccagagcccaaggaccagggcctgcagaagaggtaattctgcatgaagaccc

SEQ ID NO: 150143 - DNA, 120 bp, Artificial Sequence
  ENSG00000105609_45 (sequence is synthesized)
aagactcccatccacccgcacagccccctcactgcccctcacactcccgtgtcctcccccagggccagcccagttgctgacatccaggaggaaattctcagtgagtgactagaagcggag

SEQ ID NO: 150144 - DNA, 120 bp, Artificial Sequence
  ENSG00000105609_46 (sequence is synthesized)
ggcacctggggtgggcaagggagcaccaaagtttctgtagcaatgggggcaggagcacaggctggggggggtctggggccaagggggaggcggtctgaacccacactgtgggacctcagg

SEQ ID NO: 150145 - DNA, 120 bp, Artificial Sequence
  ENSG00000105609_47 (sequence is synthesized)
gacatcacagtccctccctggatctcagccaccctagtgggaacagggcaagggctggcaggacggagaagtctcagagaaccttcccaggagatgaaccccttgctctggcccagcaga

SEQ ID NO: 150146 - DNA, 120 bp, Artificial Sequence
  ENSG00000105609_48 (sequence is synthesized)
tgctgccgtgaaggacacacagcccaaggacggggtggagatggatgctccggtgaggccccgcccctgtcccgggcaccaaaggcctcctggtgccagatctaatccagcaggacttct

SEQ ID NO: 150147 - DNA, 120 bp, Artificial Sequence
  ENSG00000105609_49 (sequence is synthesized)
ctgtcctccttcccccggctctcagcatcgtcacggtggacccctccttgtccagcacgctgcctcccgcctgctgcgacctcactctcttctgctgtcctgggacctcgtgggcctcct

SEQ ID NO: 150148 - DNA, 120 bp, Artificial Sequence
  ENSG00000105609_50 (sequence is synthesized)
cccgggtccccttcctgctcctcatcctctgtttggccgtctggttgttagagctctccccaggcctcaggaggatgaggaataaatgaaccgacccggtcccccaggctccccttcatt

SEQ ID NO: 150149 - DNA, 120 bp, Artificial Sequence
  ENSG00000105609_51 (sequence is synthesized)
cattcaaccagcgagtgttcccagggagctcactgtggatggggctccccatgggagctgcagacacagcagggagcaaagccgcccccgcctcctgagctcacctcatggtgggagaca

SEQ ID NO: 150150 - DNA, 120 bp, Artificial Sequence
  ENSG00000105609_52 (sequence is synthesized)
aaatgcaaataaatgcatcgtgtccaggagtgcaacgtgctgtaaggaacataaaccagggaaagggcagagagtgtggggcagtggggccagtctgaatggaaggggagggctgtctgc

SEQ ID NO: 150151 - DNA, 120 bp, Artificial Sequence
  ENSG00000105609_53 (sequence is synthesized)
tcagctgtcatctgagaagcctggacagagtggggcacacgatcctctgatggacgagcccctgcaggcagaggaaacagccgtgcaaaggccccgaggcagcagcgagctcttgcggga

SEQ ID NO: 150152 - DNA, 120 bp, Artificial Sequence
  ENSG00000105609_54 (sequence is synthesized)
aggcccgtgaggctgcagccaaatgggcaaggtcagagtgaggagcagaggccagaaccacagggagggagcggccagaccctccacggccttagggcgtccctgagattccatcaggaa

SEQ ID NO: 150153 - DNA, 120 bp, Artificial Sequence
  ENSG00000105609_55 (sequence is synthesized)
agggatgtaatcggatcaccccgggaacagtgaggaaaattgactccaggaggtcagggggactcaaggacaccccccaccactgtctctctccagcagagcccacacgatgaagacccc

SEQ ID NO: 150154 - DNA, 120 bp, Artificial Sequence
  ENSG00000105609_56 (sequence is synthesized)
caggcagtgacgtatgccccggtgaaacactccagacctaggagagaaatggcctctcctccttccccactgtctggggaattcctggacacaaaggacagacaggcagaagaggacaga

SEQ ID NO: 150155 - DNA, 120 bp, Artificial Sequence
  ENSG00000105609_57 (sequence is synthesized)
cagatggacactgagagagtcctttcctctccaggcccccaggcctcccccacccccaccacgttccttccctctcactctcccccgctgcaggctgctgcatctgaagccccccaggat

SEQ ID NO: 150156 - DNA, 120 bp, Artificial Sequence
  ENSG00000105610_0 (sequence is synthesized)
agttcacgaggcagccgaggaagaggaggcttgaggcccagggtgggcaccagccagccatggccacagccgagaccgccttgccctccatcagcacactgaccgccctgggccccttcc

SEQ ID NO: 150157 - DNA, 120 bp, Artificial Sequence
  ENSG00000105610_1 (sequence is synthesized)
cggacacacaggatgacttcctcaagtggtggcgctccgaagaggcgcaggacatgggcccgggtcctcctgaccccacggagccgcccctccacgtgaagtctgaggaccagcccgggg

SEQ ID NO: 150158 - DNA, 120 bp, Artificial Sequence
  ENSG00000105610_2 (sequence is synthesized)
aggaagaggacgatgagaggggcgcggacgccacctgggacctggatctcctcctcaccaacttctcgggcccggagcccggtggcgcgccccagacctgcgctctggcgcccagcgagg

SEQ ID NO: 150159 - DNA, 120 bp, Artificial Sequence
  ENSG00000105610_3 (sequence is synthesized)
cctccggggcgcaatatccgccgccgcccgagactctgggcgcatatgctggcggcccggggctggtggctgggcttttgggttcggaggatcactcgggttgggtgcgccctgccctgc

SEQ ID NO: 150160 - DNA, 120 bp, Artificial Sequence
  ENSG00000105610_4 (sequence is synthesized)
ggatcactcgggttgggtgcgccctgccctgcgagcccgggctcccgacgccttcgtgggcccagccctggctccagccccggcccccgagcccaaggcgctggcgctgcaaccggtgta

SEQ ID NO: 150161 - DNA, 120 bp, Artificial Sequence
  ENSG00000105610_5 (sequence is synthesized)
acttcccgcggaccgggctttcagtgcctgcggcgtcgggcgccccctacgggctactgtccgggtaccccgcgatgtacccggcgcctcagtaccaagggcacttccagctcttccgcg

SEQ ID NO: 150162 - DNA, 120 bp, Artificial Sequence
  ENSG00000105610_6 (sequence is synthesized)
gtttgggacccgggacggtgggcactggactcggggggactgcagaggatccaggtgtgatagccgagaccgcgccatccaagcgaggccgacgttcgtgggcgcgcaagaggcaggcag

SEQ ID NO: 150163 - DNA, 120 bp, Artificial Sequence
  ENSG00000105610_7 (sequence is synthesized)
cgcacacgtgcgcgcacccgggttgcggcaagagctacaccaagagctcccacctgaaggcgcatctgcgcacgcacacaggggagaagccatacgcctgcacgtgggaaggctgcggct

SEQ ID NO: 150164 - DNA, 120 bp, Artificial Sequence
  ENSG00000105610_8 (sequence is synthesized)
ggagattcgcgcgctcggacgagctgacccgccactaccggaaacacacggggcagcgccccttccgctgccagctctgcccacgtgctttttcgcgctctgaccacctggccttgcaca

SEQ ID NO: 150165 - DNA, 120 bp, Artificial Sequence
  ENSG00000105610_9 (sequence is synthesized)
tcgcgctctgaccacctggccttgcacatgaagcgccacctttgagccctgccctggcacttggactctcctagtgactggggatgggacaagaagcctgtttggtggtctcttcacacg

SEQ ID NO: 150166 - DNA, 120 bp, Artificial Sequence
  ENSG00000105610_10 (sequence is synthesized)
ttcccacgaatggaccctctcctggactcgcgttcccaaagatccacccaaatatcaaacacggacccatagacagccctgggggagcctcttacggaaaatccgacaagccttcagcca

SEQ ID NO: 150167 - DNA, 120 bp, Artificial Sequence
  ENSG00000105610_11 (sequence is synthesized)
cagggagccacacagagatgtccaaactgtcgtgcaaacccagtgagacagaccgccaaataaacggactcagtggacactcagaccagctcccagatggccctggacagcaggagaggg

SEQ ID NO: 150168 - DNA, 120 bp, Artificial Sequence
  ENSG00000105610_12 (sequence is synthesized)
tgtgggatgaggcttcccagagaccctgggtctagaaagcggctcctgaaggtcccttattgtggctgatattaactgtcaatggttatgggtcctataaaaatgcccctcccagataaa

SEQ ID NO: 150169 - DNA, 120 bp, Artificial Sequence
  ENSG00000105612_0 (sequence is synthesized)
agtcctggcctctgatgtaacccagcgccccgcagtcccgacacagattcctggatctcagccccatagcagctatgatcccgctgctgctggcagcgctgctgtgcgtccccgccgggg

SEQ ID NO: 150170 - DNA, 120 bp, Artificial Sequence
  ENSG00000105612_1 (sequence is synthesized)
ccctgacctgctacggggactccgggcagcctgtagactggttcgtggtctacaagctgccagctcttagagggtccggggaggcggcgcagagagggctgcagtacaagtatctggacg

SEQ ID NO: 150171 - DNA, 120 bp, Artificial Sequence
  ENSG00000105612_2 (sequence is synthesized)
agagctccggaggctggcgggacggcagggcactcatcaacagcccggagggggccgtgggccgaagcctgcagccgctgtaccggagcaacaccagccagctcgccttcctgctctaca

SEQ ID NO: 150172 - DNA, 120 bp, Artificial Sequence
  ENSG00000105612_3 (sequence is synthesized)
atgaccaaccgcctcaacccagcaaggctcaggactcttccatgcgtgggcacacgaagggtgtcctgctccttgaccacgatgggggcttctggctggtccacagtgtacctaacttcc

SEQ ID NO: 150173 - DNA, 120 bp, Artificial Sequence
  ENSG00000105612_4 (sequence is synthesized)
ctccaccggcctcctctgctgcatacagctggcctcatagcgcctgtacctacgggcagaccctgctctgtgtgtcttttcccttcgctcagttctcgaagatgggcaagcagctgacct

SEQ ID NO: 150174 - DNA, 120 bp, Artificial Sequence
  ENSG00000105612_5 (sequence is synthesized)
acacctacccctgggtctataactaccagctggaagggatctttgcccaggaattccccgacttggagaatgtggtcaagggccaccacgttagccaagaaccctggaacagcagcatca

SEQ ID NO: 150175 - DNA, 120 bp, Artificial Sequence
  ENSG00000105612_6 (sequence is synthesized)
cactcacatcccaggccggggctgttttccagagctttgccaagttcagcaaatttggagatgacctgtactccggctggttggcagcagcccttggtaccaacctgcaggtccagttct

SEQ ID NO: 150176 - DNA, 120 bp, Artificial Sequence
  ENSG00000105612_7 (sequence is synthesized)
ggcacaaaactgtaggcatcctgccctctaactgctcggatatctggcaggttctgaatgtgaaccagatagctttccctggaccagccggcccaagcttcaacagcacagaggaccact

SEQ ID NO: 150177 - DNA, 120 bp, Artificial Sequence
  ENSG00000105612_8 (sequence is synthesized)
caaaagggccctggacctgcgtgggtgacatgaatcggaaccagggagaggagcaacggggtgggggcacactgtgtgcccagctgccagccctctggaaagccttccagccgctggtga

SEQ ID NO: 150178 - DNA, 120 bp, Artificial Sequence
  ENSG00000105612_9 (sequence is synthesized)
gtgaagaactaccagccctgtaatggcatggccaggaagcccagcagagcttataagatctaacccttatggccaggtgcagtggctcacgtatgtaatcccagcactttgggaagccaa

SEQ ID NO: 150179 - DNA, 120 bp, Artificial Sequence
  ENSG00000105612_10 (sequence is synthesized)
ggaggatcacttgaactcaggaattcgagaccagcctgggctacatagtgagaccacatctctactagaacttaaaaaaagttagccaggcacggtgataaatgcctgtagtcccagcca

SEQ ID NO: 150180 - DNA, 120 bp, Artificial Sequence
  ENSG00000105612_11 (sequence is synthesized)
ctgaagccagaggatcgattgaaccagggagatcatggtcacagtgaactatgattacgccaacctgggtcacatagcaagactctgtttcaaaaaaaaagggggggcgggggacgggtg

SEQ ID NO: 150181 - DNA, 80 bp, Artificial Sequence
  ENSG00000105612_12 (sequence is synthesized)
ctggccaacatggtgaaaccccatatccattaaaaatatttaaaaattagccagacatggtggcacgcgtctgtggtcct

SEQ ID NO: 150182 - DNA, 120 bp, Artificial Sequence
  ENSG00000105612_13 (sequence is synthesized)
cggcacttcagcctgggtgacagaatgagactctgtgtcaaaaaaataaaaaataaaaaatctaagggctcaggaaccagtttggacttgattttgaatcccagttcatccccttcctag

SEQ ID NO: 150183 - DNA, 120 bp, Artificial Sequence
  ENSG00000105612_14 (sequence is synthesized)
ctgtatgaccttgattgtgtgccttaaccgctctgtgacacagtctacctgtctgcaaaatgggaaacataatacctgccatcaggattgttgaggagtaaataaatggaaattggtgga

SEQ ID NO: 150184 - DNA, 120 bp, Artificial Sequence
  ENSG00000105612_15 (sequence is synthesized)
agcaaatttggagatggtgagtctcaaggttgagggttggagagctccttctctgcagacagggtgactggtgtggccatggctgagttcaagtcagcggtagagaccaggtctgtttgg

SEQ ID NO: 150185 - DNA, 120 bp, Artificial Sequence
  ENSG00000105612_16 (sequence is synthesized)
gagctataatcacatgatcagtgaacagacctgggttcaaaccctgggttttgctgtgtgatgtataacttcacctgagccttggtctactcatctgaaaaatggggatactgacatcta

SEQ ID NO: 150186 - DNA, 120 bp, Artificial Sequence
  ENSG00000105612_17 (sequence is synthesized)
atctgaaaaatggggatactgacatctacttaaaaaattgtgaatgaagtggtacctgtaagtcatttgggtgccagaggtggtgcctcactcctgtaatcccagttacttaggaggctg

SEQ ID NO: 150187 - DNA, 120 bp, Artificial Sequence
  ENSG00000105613_0 (sequence is synthesized)
gccgccgccgcctccgccgctgctgccgcacctgccaccatgtcgccgccgccgggtcatgtctgactctctctggaccgcgctttctaatttctcgatgccctccttccccggcggcag

SEQ ID NO: 150188 - DNA, 120 bp, Artificial Sequence
  ENSG00000105613_1 (sequence is synthesized)
tatgttccgccgcaccaagagctgccgcaccagtaatcggaaaagcctcatcctgaccagcacttcacccacgctaccgagaccccactccccgctgccaggtcacctaggcagcagtcc

SEQ ID NO: 150189 - DNA, 120 bp, Artificial Sequence
  ENSG00000105613_2 (sequence is synthesized)
cctggacagcccccgaaacttctcccccaacacccccgcccacttctcgtttgcctcctcccgaagggcggacggacgccggtggtctctggcctcgctcccttcatctggctatggcac

SEQ ID NO: 150190 - DNA, 120 bp, Artificial Sequence
  ENSG00000105613_3 (sequence is synthesized)
caacacgcccagttccaccgtctcgtcctcctgctcctcccaggagcgccttcaccagctgccctaccagcccacggtggacgagctccacttcctctccaaacacttcgggagcaccga

SEQ ID NO: 150191 - DNA, 120 bp, Artificial Sequence
  ENSG00000105613_4 (sequence is synthesized)
gagcatcacagacgaggatggtggccgtcgctccccagccgtgcggccccgctcacggagcctcagccccgggcgctccccctcctcctacgacaacgagatcgtgatgatgaatcacgt

SEQ ID NO: 150192 - DNA, 120 bp, Artificial Sequence
  ENSG00000105613_5 (sequence is synthesized)
ctacaaggagaggttcccgaaggccactgcgcagatggaggagaagctgcgcgactttacccgcgcctacgaacccgacagcgttctgcctctggccgatggcgtgctcagcttcatcca

SEQ ID NO: 150193 - DNA, 120 bp, Artificial Sequence
  ENSG00000105613_6 (sequence is synthesized)
ccaccagatcatcgagctggcccgggactgcctgaccaagtcccgtgacggcctcatcaccacggtctacttctatgaattgcaggagaacctggagaagctccttcaagacgcctatga

SEQ ID NO: 150194 - DNA, 120 bp, Artificial Sequence
  ENSG00000105613_7 (sequence is synthesized)
acgctctgagagcttggaggtggccttcgttactcagctggtgaagaagttgcttattatcatctcacgccctgcgaggctgctggagtgcctggaattcaaccccgaggagttctacca

SEQ ID NO: 150195 - DNA, 120 bp, Artificial Sequence
  ENSG00000105613_8 (sequence is synthesized)
cctgctggaggcggccgaaggacacgccaaggagggccaccttgtgaagacggacatcccccgctacatcatccgccagctgggcctcacccgtgacccctttccagatgtggtgcatct

SEQ ID NO: 150196 - DNA, 120 bp, Artificial Sequence
  ENSG00000105613_9 (sequence is synthesized)
ggaggaacaggacagtggtggttccaacacccctgagcaagacgatctctctgagggccgcagcagcaaggccaagaaaccgccgggggagaatgacttcgataccatcaagctcataag

SEQ ID NO: 150197 - DNA, 120 bp, Artificial Sequence
  ENSG00000105613_10 (sequence is synthesized)
caacggtgcctacggcgctgtctacctggtgcggcaccgcgacacgcggcagcgctttgccatgaaaaagatcaacaagcagaacttgatcctccgcaaccagatccagcaggcctttgt

SEQ ID NO: 150198 - DNA, 120 bp, Artificial Sequence
  ENSG00000105613_11 (sequence is synthesized)
ggagcgcgatatcctcaccttcgccgagaacccgtttgtggtcggcatgttctgctcctttgagactcggcgccacctctgcatggtcatggaatatgtggaaggcggcgactgtgccac

SEQ ID NO: 150199 - DNA, 120 bp, Artificial Sequence
  ENSG00000105613_12 (sequence is synthesized)
cctgctgaagaatattggagcgctgcccgtagagatggcccgcatgtactttgctgagacggtgctagccctggagtatttgcacaactatggcatcgtgcaccgcgacctcaagcctga

SEQ ID NO: 150200 - DNA, 120 bp, Artificial Sequence
  ENSG00000105613_13 (sequence is synthesized)
caacctccttatcacctccatgggtcacatcaagctcacagatttcggcctctccaagatggggctcatgagcctcaccaccaacttatatgaaggccacatcgagaaggacgcccgaga

SEQ ID NO: 150201 - DNA, 120 bp, Artificial Sequence
  ENSG00000105613_14 (sequence is synthesized)
gttcctggacaaacaggtgtgtgggaccccagagtacatcgcgcccgaggtcatcctgcgtcaaggctacggcaagccagtggactggtgggctatggggatcatcctctacgagttcct

SEQ ID NO: 150202 - DNA, 120 bp, Artificial Sequence
  ENSG00000105613_15 (sequence is synthesized)
ggtgggctgtgtgcccttcttcggagacacaccagaggagctatttggacaggtcatcagtgatgacatcctgtggcccgagggggatgaggccctacctacggaggcccaactcctcat

SEQ ID NO: 150203 - DNA, 120 bp, Artificial Sequence
  ENSG00000105613_16 (sequence is synthesized)
atccagcctcctgcagaccaaccctctggtcaggcttggggcaggcggcgcttttgaggtgaagcagcacagtttctttcgagacctggactggacagggctgctgaggcagaaggccga

SEQ ID NO: 150204 - DNA, 120 bp, Artificial Sequence
  ENSG00000105613_17 (sequence is synthesized)
gttcatcccccacctagagtcggaagatgacactagctactttgacacccgctcagacaggtatcaccacgtgaactcctatgacgaggatgacacgacggaggaggagcccgtggaaat

SEQ ID NO: 150205 - DNA, 120 bp, Artificial Sequence
  ENSG00000105613_18 (sequence is synthesized)
ccgccagttctcttcctgctctccgcgcttcagcaaggtgtatagcagcatggagcagctgtcgcagcacgagcccaagaccccagtagcagctgcagggagcagcaagcgggagccgag

SEQ ID NO: 150206 - DNA, 120 bp, Artificial Sequence
  ENSG00000105613_19 (sequence is synthesized)
caccaagggccccgaggagaaggtggccggcaagcgggaggggctgggcggcctgaccctgcgtgagaagacctggagagggggctctccggagatcaagcgattctccgcgtccgaggc

SEQ ID NO: 150207 - DNA, 120 bp, Artificial Sequence
  ENSG00000105613_20 (sequence is synthesized)
cggcgctgctggagcccagccgcttcagcgccccccaagaggacgaggatgaggcccggctgcgcaggcctccccggcccagctccgaccccgcgggatccctggatgcacgggccccca

SEQ ID NO: 150208 - DNA, 120 bp, Artificial Sequence
  ENSG00000105613_21 (sequence is synthesized)
aagaggagactcaaggggaaggcacctccagcgccggggactccgaggccactgaccgtccacgcccaggtgacctctgcccaccctcgaaggatggggatgcatcaggcccaagggcta

SEQ ID NO: 150209 - DNA, 120 bp, Artificial Sequence
  ENSG00000105613_22 (sequence is synthesized)
ccaatgacttggttctgcgccgggcgcggcaccagcagatgtcaggggatgtggcagtagagaagaggccttctcgaactgggggcaaagtcatcaaatcagcctcagccactgccttat

SEQ ID NO: 150210 - DNA, 120 bp, Artificial Sequence
  ENSG00000105613_23 (sequence is synthesized)
ctgtcatgattcctgcagtggacccacatggaagttcaccccttgctagtcccatgtctccacgatctctgtcctccaacccatcctcacgggactcctcacccagccgggactactcac

SEQ ID NO: 150211 - DNA, 120 bp, Artificial Sequence
  ENSG00000105613_24 (sequence is synthesized)
cagctgtcagtgggctccgctcccccatcaccatccagcgctcgggcaagaagtatggcttcacactgcgtgccatccgtgtctacatgggtgacacggatgtctatagtgtccaccaca

SEQ ID NO: 150212 - DNA, 120 bp, Artificial Sequence
  ENSG00000105613_25 (sequence is synthesized)
ttgtctggcatgtggaggaaggaggcccagcccaggaggcaggactctgtgctggggacctcatcacccacgtgaatggggagcctgtgcatggcatggtgcatcctgaggtcgtggagc

SEQ ID NO: 150213 - DNA, 120 bp, Artificial Sequence
  ENSG00000105613_26 (sequence is synthesized)
tgatccttaagagtggcaacaaggtagcagtgaccacaacgcccttcgaaaatacctctatccgcattggtcccgcaaggcgcagcagctacaaggctaaaatggctcggaggaacaagc

SEQ ID NO: 150214 - DNA, 120 bp, Artificial Sequence
  ENSG00000105613_27 (sequence is synthesized)
gaccctccgccaaggagggccaggagagcaagaagcgcagctccctcttccggaagatcacgaagcagtcgaacctgctgcatactagccgctcgctgtcgtcgctgaaccgctcgctgt

SEQ ID NO: 150215 - DNA, 120 bp, Artificial Sequence
  ENSG00000105613_28 (sequence is synthesized)
catccagcgatagtctcccgggctcgcctacgcacgggctgccggcgcgctcgcccacgcacagctaccgctccacgcctgactccgcctacctaggcgcctcatcccagagcagctccc

SEQ ID NO: 150216 - DNA, 120 bp, Artificial Sequence
  ENSG00000105613_29 (sequence is synthesized)
cagcctcgagcacgcccaactcgcctgcgtcgtcggcgtcgcaccacattcggcccagcacgctgcacggactgtcgccaaagctccatcgccagtaccgctctgcgcgatgcaagtcgg

SEQ ID NO: 150217 - DNA, 120 bp, Artificial Sequence
  ENSG00000105613_30 (sequence is synthesized)
ccggcaacatccctctatcgccgctggcacacacgccgtcccccacgcaggcgtcaccgccgccactgccgggccacacggtgggcagctcgcacactactcagagcttcccggccaaac

SEQ ID NO: 150218 - DNA, 120 bp, Artificial Sequence
  ENSG00000105613_31 (sequence is synthesized)
tgcactcatcgcctcccgtcgtgcgcccgcgccccaagagtgccgagccccctcgctcgccgctcctcaagcgcgtgcagtcggccgagaagctgggagcctctttgagtgcggacaaga

SEQ ID NO: 150219 - DNA, 120 bp, Artificial Sequence
  ENSG00000105613_32 (sequence is synthesized)
agggcgcgctgcgcaaacacagcctcgaggtgggccacccggatttccgcaaggacttccatggcgagctggcgctgcatagccttgccgagtccgacggtgagacgcccccagtcgagg

SEQ ID NO: 150220 - DNA, 120 bp, Artificial Sequence
  ENSG00000105613_33 (sequence is synthesized)
gccttggcgcgccccggcaggtcgccgtccgccgcctgggccgacaggagtcacctttgagcctgggcgcggacccgttgctgcccgagggtgcctccaggccaccagtgtcgagcaagg

SEQ ID NO: 150221 - DNA, 120 bp, Artificial Sequence
  ENSG00000105613_34 (sequence is synthesized)
agaaggaatccccggggggcgccgaggcgtgcaccccaccccgcgcgacgacccccggtggccggaccctggagcgggacgtcggctgcacgcggcatcagagcgtgcagacggaggatg

SEQ ID NO: 150222 - DNA, 120 bp, Artificial Sequence
  ENSG00000105613_35 (sequence is synthesized)
gcactggcgggatggccagggctgtggccaaggcggcgctgagcccggtgcaggaacacgagacaggccggcgcagcagctctggcgaggcgggcacacccctggtacccattgtcgtag

SEQ ID NO: 150223 - DNA, 120 bp, Artificial Sequence
  ENSG00000105613_36 (sequence is synthesized)
gtagagcctgcgcggcccggggctaaggctgtggtgcctcagcctctgggcgcggactccaaggggttgcaggaacccgcacccctggcgccttccgtgcccgaggccccccggggccgg

SEQ ID NO: 150224 - DNA, 120 bp, Artificial Sequence
  ENSG00000105613_37 (sequence is synthesized)
gctgggtgttggaggtggtggaggagcgcaccacgctgagcggtcctcgctccaagcccgcctccccaaagctctccccggagccccagacaccctccctagccccagcgaagtgcagtg

SEQ ID NO: 150225 - DNA, 120 bp, Artificial Sequence
  ENSG00000105613_38 (sequence is synthesized)
cacccagcagtgcagtgaccccagtcccacccgcatccctcttgggctcaggcaccaagcctcaagtggggctgacctcccggtgccctgctgaagctgtgcccccagcaggcctgacca

SEQ ID NO: 150226 - DNA, 120 bp, Artificial Sequence
  ENSG00000105613_39 (sequence is synthesized)
aaaaaggagtgtccagtcccgcacccccgggaccatagccaagggggtcatcggccccgcgctgtacagcctccgtatacatatgtacacatataaataaagtgcgtccgtgctgcgtga

SEQ ID NO: 150227 - DNA, 120 bp, Artificial Sequence
  ENSG00000105613_40 (sequence is synthesized)
acattcagggagctcctaccacgttccaggcactggcgtggagctgaggactcaggggtggaagtggtcccttccctaggtctgaccgactgaagaggcaggaatttcacctcgctcatt

SEQ ID NO: 150228 - DNA, 120 bp, Artificial Sequence
  ENSG00000105613_41 (sequence is synthesized)
acctcgctcatttcccttaggtctttactcaaatgtcaccttttcaggtggcttcttaggcggtccccagtcatttaaaatattaaactcggccgggctcggtggctcaggcctgtaatc

SEQ ID NO: 150229 - DNA, 66 bp, Artificial Sequence
  ENSG00000105613_42 (sequence is synthesized)
gccgtaaataaaataaaataaaataaaatattaaacttagccgggtgcggtggctcaggcctgtaa

SEQ ID NO: 150230 - DNA, 120 bp, Artificial Sequence
  ENSG00000105613_43 (sequence is synthesized)
ccgaaggtgaggtgggacccgaggcggtcacggggtgaccaggcggcctgcactctcgctcgccttatccccgcgcgccccctggcggcctcggtgcgcagcgcaggctcctggcggccg

SEQ ID NO: 150231 - DNA, 120 bp, Artificial Sequence
  ENSG00000105613_44 (sequence is synthesized)
tggcctgcctgagccgcagtctccatattgattagtcggcctgtatgtttatccatctatttatttctccagtcattgatttgtccatccattctacctatatatttattcagtcatcta

SEQ ID NO: 150232 - DNA, 120 bp, Artificial Sequence
  ENSG00000105617_0 (sequence is synthesized)
gccagtccctggacagctacgacgccatgaatatcttgcccaagaagagctggcacgtccggaacaaggacaatgtcgcccgcgtgcggcgtgacgaggcccaggcccgggaggaggaga

SEQ ID NO: 150233 - DNA, 120 bp, Artificial Sequence
  ENSG00000105617_1 (sequence is synthesized)
aggagcgtgagcggagggtgctgctggctcagcaagaggcccgtacagaattcctacggaagaaagccagacatcagaactcactgcctgagcttgaagcagcagaggcgggagccccag

SEQ ID NO: 150234 - DNA, 120 bp, Artificial Sequence
  ENSG00000105617_2 (sequence is synthesized)
gttctggccctgtggacctgtttcgggagctgctggaggaagggaaaggagtgatcagaggcaataaagagtacaaggaagaaaagcgacaggagaaagagaggcaagagaaagctctgg

SEQ ID NO: 150235 - DNA, 120 bp, Artificial Sequence
  ENSG00000105617_3 (sequence is synthesized)
gcatcctgacatacctgggccagagtgcagcggaggcacagactcaacccccttggtaccagctacccccagggcgagggggccccccgcccggcccagccccagatgagaagatcaaga

SEQ ID NO: 150236 - DNA, 120 bp, Artificial Sequence
  ENSG00000105617_4 (sequence is synthesized)
gccgtctggaccctctgcgggagatgcagaagcatctggggaagaagagacagcacggcggtgatgaaggcagtcgcagcagaaaggaaaaggaggggtctgagaagcagcgacccaagg

SEQ ID NO: 150237 - DNA, 120 bp, Artificial Sequence
  ENSG00000105617_5 (sequence is synthesized)
tcgggcagaggccctgctggcccgggtccaaggccgggcactacaggagggtcagccggaagaagacgagacggatgaccggcggcggcggtacaactcccaattcaacccccagctggc

SEQ ID NO: 150238 - DNA, 120 bp, Artificial Sequence
  ENSG00000105617_6 (sequence is synthesized)
ccggcgcccccgccagcaggaccctcaccttactcactgactcctgagggggtacaggagaggccgctgctgccagccgtcatataaaactatttattcataaatattttccaaaatgaa

SEQ ID NO: 150239 - DNA, 120 bp, Artificial Sequence
  ENSG00000105617_7 (sequence is synthesized)
aataggtttaccaaaaaatgtccctcactggggaggggaggagggggcagccctcgcccccgggcccccagggtggggctgagaggaaaacctcccggccccctccctgcttcctgggag

SEQ ID NO: 150240 - DNA, 120 bp, Artificial Sequence
  ENSG00000105617_8 (sequence is synthesized)
agggggatgccccgtggcttggggcctccctccagtcttccagggcagggccctcacctgggcagggggatcagcatgcgggggaagggggtgggtagagggaggggccggtgtcactgg

SEQ ID NO: 150241 - DNA, 120 bp, Artificial Sequence
  ENSG00000105617_9 (sequence is synthesized)
aggtcccggtcctccaggtagcggtactcaaaggtgaagccttccttcttccgctggccccacttctcgtagtcaaagtagatgtaggtgccctggccgggggagaaggcggtcagtgag

SEQ ID NO: 150242 - DNA, 120 bp, Artificial Sequence
  ENSG00000105617_10 (sequence is synthesized)
tggacgaggaggtggtctgggatctgggccggaccaacagacaaaggggacaattcttagggctgtggatgtgtcaggcaccgggccagctgccctgcacgcacacactctcatccatcc

SEQ ID NO: 150243 - DNA, 120 bp, Artificial Sequence
  ENSG00000105618_0 (sequence is synthesized)
ggtgagcgactaacgctagaaacagtggtgcgcggagaggagaggcctcgggatgtctctggcagatgagctcttagctgatctcgaagaggcagcagaagaggaggaaggaggaagcta

SEQ ID NO: 150244 - DNA, 120 bp, Artificial Sequence
  ENSG00000105618_1 (sequence is synthesized)
tggggaggaagaagaggagccagcgatcgaggatgtgcaggaggagacacagctggatctttccggggattcagtcaagaccatcgccaagctatgggatagtaagatgtttgctgagat

SEQ ID NO: 150245 - DNA, 120 bp, Artificial Sequence
  ENSG00000105618_2 (sequence is synthesized)
tatgatgaagattgaggagtatatcagcaagcaagccaaagcttcagaagtgatgggaccagtggaggccgcgcctgaataccgcgtcatcgtggatgccaacaacctgaccgtggagat

SEQ ID NO: 150246 - DNA, 120 bp, Artificial Sequence
  ENSG00000105618_3 (sequence is synthesized)
cgaaaacgagctgaacatcatccataagttcatccgggataagtactcaaagagattccctgaactggagtccttggtccccaatgcactggattacatccgcacggtcaaggagctggg

SEQ ID NO: 150247 - DNA, 120 bp, Artificial Sequence
  ENSG00000105618_4 (sequence is synthesized)
caacagcctggacaagtgcaagaacaatgagaacctgcagcagatcctcaccaatgccaccatcatggtcgtcagcgtcaccgcctccaccacccaggggcagcagctgtcggaggagga

SEQ ID NO: 150248 - DNA, 120 bp, Artificial Sequence
  ENSG00000105618_5 (sequence is synthesized)
gctggagcggctggaggaggcctgcgacatggcgctggagctgaacgcctccaagcaccgcatctacgagtatgtggagtcccggatgtccttcatcgcacccaacctgtccatcattat

SEQ ID NO: 150249 - DNA, 120 bp, Artificial Sequence
  ENSG00000105618_6 (sequence is synthesized)
cggggcatccacggccgccaagatcatgggtgtggccggcggcctgaccaacctctccaagatgcccgcctgcaacatcatgctgctcggggcccagcgcaagacgctgtcgggcttctc

SEQ ID NO: 150250 - DNA, 120 bp, Artificial Sequence
  ENSG00000105618_7 (sequence is synthesized)
ctaccacagtgacatcgtgcagtccctgccaccggatctgcggcggaaagcggcccggctggtggccgccaagtgcacactggcagcccgtgtggacagtttccacgagagcacagaagg

SEQ ID NO: 150251 - DNA, 120 bp, Artificial Sequence
  ENSG00000105618_8 (sequence is synthesized)
gaaggtgggctacgaactgaaggatgagatcgagcgcaaattcgacaagtggcaggagccgccgcctgtgaagcaggtgaagccgctgcctgcgcccctggatggacagcggaagaagcg

SEQ ID NO: 150252 - DNA, 120 bp, Artificial Sequence
  ENSG00000105618_9 (sequence is synthesized)
aggcggccgcaggtaccgcaagatgaaggagcggctggggctgacggagatccggaagcaggccaaccgtatgagcttcggagagatcgaggaggacgcctaccaggaggacctgggatt

SEQ ID NO: 150253 - DNA, 120 bp, Artificial Sequence
  ENSG00000105618_10 (sequence is synthesized)
cagcctgggccacctgggcaagtcgggcagtgggcgtgtgcggcagacacaggtaaacgaggccaccaaggccaggatctccaagacgctgcagcggaccctgcagaagcagagcgtcgt

SEQ ID NO: 150254 - DNA, 120 bp, Artificial Sequence
  ENSG00000105618_11 (sequence is synthesized)
atatggcgggaagtccaccatccgcgaccgctcctcgggcacggcctccagcgtggccttcaccccactccagggcctggagattgtgaacccacaggcggcagagaagaaggtggctga

SEQ ID NO: 150255 - DNA, 120 bp, Artificial Sequence
  ENSG00000105618_12 (sequence is synthesized)
ggccaaccagaagtatttctccagcatggctgagttcctcaaggtcaagggcgagaagagtggccttatgtccacctgaatgactgcgtgtgtccaaggtggcttcccactgaagggaca

SEQ ID NO: 150256 - DNA, 120 bp, Artificial Sequence
  ENSG00000105618_13 (sequence is synthesized)
cagaggtccagtccttctgaagggctaggatcgggttctggcagggagaacctgccctgccactggccccattgctgggactgcccagggaggaggccttggaagagtccggcctggcct

SEQ ID NO: 150257 - DNA, 120 bp, Artificial Sequence
  ENSG00000105618_14 (sequence is synthesized)
cccccaggaccgagatcaccgcccagtatgggctagagcaggtcttcatcatgccttgtcttttttaactgagaaaggagattttttgaaaagagtacaattaaaaggacattgtcaaga

SEQ ID NO: 150258 - DNA, 120 bp, Artificial Sequence
  ENSG00000105618_15 (sequence is synthesized)
aagacgctgcaggtatgggccagacccaggtggggctggggaccgagggacacaaggtggggggagcccagatcgcagcctccctgtcctccccacagcggaccctgcagaagcagagcg

SEQ ID NO: 150259 - DNA, 120 bp, Artificial Sequence
  ENSG00000105618_16 (sequence is synthesized)
tagtttcctgtttccggcttcgcttcggcccacccccacgtccaccccgaatccctgcttaaaggccttgctttcttgtctaacgccgcaaccagtcctctgagttgccaacgtctttct

SEQ ID NO: 150260 - DNA, 120 bp, Artificial Sequence
  ENSG00000105618_17 (sequence is synthesized)
tcttgtctcgacgccccgtcgtccggccacagcgattctctgcttagcaggatcggtccacagcgggacgtgagtccctttcctcctcgcggcttaccgcctctctccgcctagtgccag

SEQ ID NO: 150261 - DNA, 120 bp, Artificial Sequence
  ENSG00000105618_18 (sequence is synthesized)
tttccggggattcagtcaagaccatcgccaagctatgggatagtaagatgtttgctgagattatgatgaagattgaggagtatatcagcaagcaagccaaagcttcagaaggtgcttcct

SEQ ID NO: 150262 - DNA, 120 bp, Artificial Sequence
  ENSG00000105618_19 (sequence is synthesized)
gctccctggctgcttgtggctgggtatatctccttctcagccttttccagagccttcttttttttttgtttcaccccaacccgttcccttttccactaaatatatattgcattgtaaagc

SEQ ID NO: 150263 - DNA, 120 bp, Artificial Sequence
  ENSG00000105619_0 (sequence is synthesized)
atttgaaacaacaactttattagcacctggcactaggcggagagaggcggtaagccgcgaggaggaaagggactcacgtcccgctgtggaccgatcctgctaagcagagaatcgctgtgg

SEQ ID NO: 150264 - DNA, 120 bp, Artificial Sequence
  ENSG00000105619_1 (sequence is synthesized)
ccggacgacggggcgtcgagacaagaagaaagacgttggcaactcagaggactggttgcggcgttagacaagaaagcaaggcctttaagcagggattcggggtggacgtgggggtgggcc

SEQ ID NO: 150265 - DNA, 120 bp, Artificial Sequence
  ENSG00000105619_2 (sequence is synthesized)
gaagcgaagccggaaacaggaaactacaactcccacaaggcctagggccacgtcccgccgtcctcggctgctgagcctgatgggacaagtagttttgcgaacggcttaacctacagattg

SEQ ID NO: 150266 - DNA, 120 bp, Artificial Sequence
  ENSG00000105619_3 (sequence is synthesized)
aagaggtcggaagctctgaggcccggggcttccggaggtcgcggagatggaattggagcagagagaagggaccatggcagccgtgggctttgaggagttctcagcgccgccaggctcaga

SEQ ID NO: 150267 - DNA, 120 bp, Artificial Sequence
  ENSG00000105619_4 (sequence is synthesized)
gttggcgttgcctcccctatttggtggccacatcctggagagcgagctggagacggaagtggagtttgtgtcaggtggtctgggcggctcagggctccgggagcgagatgaagaggaaga

SEQ ID NO: 150268 - DNA, 120 bp, Artificial Sequence
  ENSG00000105619_5 (sequence is synthesized)
cccggggtcggcggcggcgccagcgggaattaaatcgcagaaagtaccaggcactaggtcggcgctgccgggagatcgagcaggtgaacgagcgggtcctgaacaggctccatcaggtgc

SEQ ID NO: 150269 - DNA, 120 bp, Artificial Sequence
  ENSG00000105619_6 (sequence is synthesized)
agaggataactcggaggctgcagcaggaacggaggttcctcatgagagtgctggactcctacggggatgactaccgggccagccagttcaccattgtgctggaggatgagggcagccagg

SEQ ID NO: 150270 - DNA, 120 bp, Artificial Sequence
  ENSG00000105619_7 (sequence is synthesized)
gcacggatgcccccaccccaggcaatgcggagaatgagcctccagagaaagagacactgtccccgcccagaaggactcctgcacccccagaacccggcagcccagcccccggtgaggggc

SEQ ID NO: 150271 - DNA, 120 bp, Artificial Sequence
  ENSG00000105619_8 (sequence is synthesized)
ccagtgggcggaagaggcggcgagtgccacgggatggacgccgagcaggaaatgcgctgactccagagctggccccggtgcagattaaggttgaggaagactttggctttgaagcagatg

SEQ ID NO: 150272 - DNA, 120 bp, Artificial Sequence
  ENSG00000105619_9 (sequence is synthesized)
aggccctggattccagttgggtttctcggggtccagacaaactgctgccctacccgaccctggccagcccagcctctgactgacgcatgcccaataaactgaccccacactcaccccggc

SEQ ID NO: 150273 - DNA, 120 bp, Artificial Sequence
  ENSG00000105639_0 (sequence is synthesized)
cacacaggaaggagccgagtgggactttcctctcgctgcctcccggctctgcccgcccttcgaaagtccagggtccctgcccgctaggcaagttgcactcatggcacctccaagtgaaga

SEQ ID NO: 150274 - DNA, 120 bp, Artificial Sequence
  ENSG00000105639_1 (sequence is synthesized)
gacgcccctgatccctcagcgttcatgcagcctcttgtccacggaggctggtgccctgcatgtgctgctgcccgctcggggccccgggcccccccagcgcctatctttctcctttgggga

SEQ ID NO: 150275 - DNA, 120 bp, Artificial Sequence
  ENSG00000105639_2 (sequence is synthesized)
ccacttggctgaggacctgtgcgtgcaggctgccaaggccagcggcatcctgcctgtgtaccactccctctttgctctggccacggaggacctgtcctgctggttccccccgagccacat

SEQ ID NO: 150276 - DNA, 120 bp, Artificial Sequence
  ENSG00000105639_3 (sequence is synthesized)
cttctccgtggaggatgccagcacccaagtcctgctgtacaggattcgcttttacttccccaattggtttgggctggagaagtgccaccgcttcgggctacgcaaggatttggccagtgc

SEQ ID NO: 150277 - DNA, 120 bp, Artificial Sequence
  ENSG00000105639_4 (sequence is synthesized)
tatccttgacctgccagtcctggagcacctctttgcccagcaccgcagtgacctggtgagtgggcgcctccccgtgggcctcagtctcaaggagcagggtgagtgtctcagcctggccgt

SEQ ID NO: 150278 - DNA, 120 bp, Artificial Sequence
  ENSG00000105639_5 (sequence is synthesized)
gttggacctggcccggatggcgcgagagcaggcccagcggccgggagagctgctgaagactgtcagctacaaggcctgcctacccccaagcctgcgcgacctgatccagggcctgagctt

SEQ ID NO: 150279 - DNA, 120 bp, Artificial Sequence
  ENSG00000105639_6 (sequence is synthesized)
cgtgacgcggaggcgtattcggaggacggtgcgcagagccctgcgccgcgtggccgcctgccaggcagaccggcactcgctcatggccaagtacatcatggacctggagcggctggatcc

SEQ ID NO: 150280 - DNA, 120 bp, Artificial Sequence
  ENSG00000105639_7 (sequence is synthesized)
agccggggccgccgagaccttccacgtgggcctccctggggcccttggtggccacgacgggctggggctgctccgcgtggctggtgacggcggcatcgcctggacccagggagaacagga

SEQ ID NO: 150281 - DNA, 120 bp, Artificial Sequence
  ENSG00000105639_8 (sequence is synthesized)
ggtcctccagcccttctgcgactttccagaaatcgtagacattagcatcaagcaggccccgcgcgttggcccggccggagagcaccgcctggtcactgttaccaggacagacaaccagat

SEQ ID NO: 150282 - DNA, 120 bp, Artificial Sequence
  ENSG00000105639_9 (sequence is synthesized)
tttagaggccgagttcccagggctgcccgaggctctgtcgttcgtggcgctcgtggacggctacttccggctgaccacggactcccagcacttcttctgcaaggaggtggcaccgccgag

SEQ ID NO: 150283 - DNA, 120 bp, Artificial Sequence
  ENSG00000105639_10 (sequence is synthesized)
gctgctggaggaagtggccgagcagtgccacggccccatcactctggactttgccatcaacaagctcaagactgggggctcacgtcctggctcctatgttctccgccgcagcccccagga

SEQ ID NO: 150284 - DNA, 120 bp, Artificial Sequence
  ENSG00000105639_11 (sequence is synthesized)
ctttgacagcttcctcctcactgtctgtgtccagaacccccttggtcctgattataagggctgcctcatccggcgcagccccacaggaaccttccttctggttggcctcagccgacccca

SEQ ID NO: 150285 - DNA, 120 bp, Artificial Sequence
  ENSG00000105639_12 (sequence is synthesized)
cagcagtcttcgagagctcctggcaacctgctgggatggggggctgcacgtagatggggtggcagtgaccctcacttcctgctgtatccccagacccaaagaaaagtccaacctgatcgt

SEQ ID NO: 150286 - DNA, 120 bp, Artificial Sequence
  ENSG00000105639_13 (sequence is synthesized)
ggtccagagaggtcacagcccacccacatcatccttggttcagccccaatcccaataccagctgagtcagatgacatttcacaagatccctgctgacagcctggagtggcatgagaacct

SEQ ID NO: 150287 - DNA, 120 bp, Artificial Sequence
  ENSG00000105639_14 (sequence is synthesized)
gggccatgggtccttcaccaagatttaccggggctgtcgccatgaggtggtggatggggaggcccgaaagacagaggtgctgctgaaggtcatggatgccaagcacaagaactgcatgga

SEQ ID NO: 150288 - DNA, 120 bp, Artificial Sequence
  ENSG00000105639_15 (sequence is synthesized)
gtcattcctggaagcagcgagcttgatgagccaagtgtcgtaccggcatctcgtgctgctccacggcgtgtgcatggctggagacagcaccatggtgcaggaatttgtacacctgggggc

SEQ ID NO: 150289 - DNA, 120 bp, Artificial Sequence
  ENSG00000105639_16 (sequence is synthesized)
catagacatgtatctgcgaaaacgtggccacctggtgccagccagctggaagctgcaggtggtcaaacagctggcctacgccctcaactatctggaggacaaaggcctgccccatggcaa

SEQ ID NO: 150290 - DNA, 120 bp, Artificial Sequence
  ENSG00000105639_17 (sequence is synthesized)
tgtctctgcccggaaggtgctcctggctcgggagggggctgatgggagcccgcccttcatcaagctgagtgaccctggggtcagccccgctgtgttaagcctggagatgctcaccgacag

SEQ ID NO: 150291 - DNA, 120 bp, Artificial Sequence
  ENSG00000105639_18 (sequence is synthesized)
gatcccctgggtggcccccgagtgtctccgggaggcgcagacacttagcttggaagctgacaagtggggcttcggcgccacggtctgggaagtgtttagtggcgtcaccatgcccatcag

SEQ ID NO: 150292 - DNA, 120 bp, Artificial Sequence
  ENSG00000105639_19 (sequence is synthesized)
tgccctggatcctgctaagaaactccaattttatgaggaccggcagcagctgccggcccccaagtggacagagctggccctgctgattcaacagtgcatggcctatgagccggtccagag

SEQ ID NO: 150293 - DNA, 120 bp, Artificial Sequence
  ENSG00000105639_20 (sequence is synthesized)
gccctccttccgagccgtcattcgtgacctcaatagcctcatctcttcagactatgagctcctctcagaccccacacctggtgccctggcacctcgtgatgggctgtggaatggtgccca

SEQ ID NO: 150294 - DNA, 120 bp, Artificial Sequence
  ENSG00000105639_21 (sequence is synthesized)
gctctatgcctgccaagaccccacgatcttcgaggagagacacctcaagtacatctcacagctgggcaagggcaactttggcagcgtggagctgtgccgctatgacccgctaggcgacaa

SEQ ID NO: 150295 - DNA, 120 bp, Artificial Sequence
  ENSG00000105639_22 (sequence is synthesized)
agcacagcgggccagaccagcagagggactttcagcgggagattcagatcctcaaagcactgcacagtgatttcattgtcaagtatcgtggtgtcagctatggcccgggccgccagagcc

SEQ ID NO: 150296 - DNA, 120 bp, Artificial Sequence
  ENSG00000105639_23 (sequence is synthesized)
tgcggctggtcatggagtacctgcccagcggctgcttgcgcgacttcctgcagcggcaccgcgcgcgcctcgatgccagccgcctccttctctattcctcgcagatctgcaagggcatgg

SEQ ID NO: 150297 - DNA, 120 bp, Artificial Sequence
  ENSG00000105639_24 (sequence is synthesized)
agtacctgggctcccgccgctgcgtgcaccgcgacctggccgcccgaaacatcctcgtggagagcgaggcacacgtcaagatcgctgacttcggcctagctaagctgctgccgcttgaca

SEQ ID NO: 150298 - DNA, 120 bp, Artificial Sequence
  ENSG00000105639_25 (sequence is synthesized)
aagactactacgtggtccgcgagccaggccagagccccattttctggtatgcccccgaatccctctcggacaacatcttctctcgccagtcagacgtctggagcttcggggtcgtcctgt

SEQ ID NO: 150299 - DNA, 120 bp, Artificial Sequence
  ENSG00000105639_26 (sequence is synthesized)
acgagctcttcacctactgcgacaaaagctgcagcccctcggccgagttcctgcggatgatgggatgtgagcgggatgtccccgccctctgccgcctcttggaactgctggaggagggcc

SEQ ID NO: 150300 - DNA, 120 bp, Artificial Sequence
  ENSG00000105639_27 (sequence is synthesized)
agaggctgccggcgcctcctgcctgccctgctgaggttcacgagctcatgaagctgtgctgggcccctagcccacaggaccggccatcattcagcgccctgggcccccagctggacatgc

SEQ ID NO: 150301 - DNA, 120 bp, Artificial Sequence
  ENSG00000105639_28 (sequence is synthesized)
tgtggagcggaagccgggggtgtgagactcatgccttcactgctcacccagagggcaaacaccactccctgtccttttcatagctcctgcccgcagacctctggattaggtctctgttga

SEQ ID NO: 150302 - DNA, 120 bp, Artificial Sequence
  ENSG00000105639_29 (sequence is synthesized)
ctggctgtgtgaccttaggcccggagctgcccctctctgggcctcagaggccttatgagggtcctctacttcaggaacacccccatgacattgcatttgggggggctcccgtggcctgta

SEQ ID NO: 150303 - DNA, 120 bp, Artificial Sequence
  ENSG00000105639_30 (sequence is synthesized)
gaatagcctgtggcctttgcaatttgttaaggttcaagacagatgggcatatgtgtcagtggggctctctgagtcctggcccaaagaagcaaggaaccaaatttaagactctcgcatctt

SEQ ID NO: 150304 - DNA, 85 bp, Artificial Sequence
  ENSG00000105639_31 (sequence is synthesized)
ccaaagaagcaaggaaccaaatttaagactctcgcatcttcccaaccccttaagccctggccccctgagtttccttttctgtctc

SEQ ID NO: 150305 - DNA, 76 bp, Artificial Sequence
  ENSG00000105639_32 (sequence is synthesized)
tctcgaactcctaaataggcatgagccactgcacccaggcttttttttttttaaatttattattattatttttaag

SEQ ID NO: 150306 - DNA, 120 bp, Artificial Sequence
  ENSG00000105639_33 (sequence is synthesized)
tcccaaagtgttggaataataggcatgagccactgcacccaggcttttttttttttaaatttattattattatttttaagagacaggatcttgctacgttgcccaggctggtcttgaact

SEQ ID NO: 150307 - DNA, 120 bp, Artificial Sequence
  ENSG00000105639_34 (sequence is synthesized)
acagtgatcctcctgccttatcctcctaaatagctgggactacagcacctagttttgagtttcctgtcttatttccaatggggacattcatgtagctttttttttttttttttttttgag

SEQ ID NO: 150308 - DNA, 120 bp, Artificial Sequence
  ENSG00000105639_35 (sequence is synthesized)
ccggccctcatgtagctttaaatgtatgatctgacttctgctccccgatctctgtttctctggaggaagccaaggacaagagcagttgctgtggctgggactctgccttttaggggagcc

SEQ ID NO: 150309 - DNA, 120 bp, Artificial Sequence
  ENSG00000105639_36 (sequence is synthesized)
cgtgtatctctttgggatcctgaaagggggcaggaaaggctggggtcccagtccaccctaatggtatctgagtgtcctagggcttcagttttcccacctgtccaatgggaccctttctgt

SEQ ID NO: 150310 - DNA, 120 bp, Artificial Sequence
  ENSG00000105639_37 (sequence is synthesized)
cctcaccctacaaggggcacaaagggatgacaccaaacctggcaggaacttttcacgcaatcaagggaaggaaaggcattcctggcagagggaacagcatgccaagcgtgagaaggctca

SEQ ID NO: 150311 - DNA, 120 bp, Artificial Sequence
  ENSG00000105639_38 (sequence is synthesized)
gagtaaggaggttaagagcccaagtattggagcctacagttttgccccttccatgcagtgtgacagtgggcaagttcctttccctctctgggtctcagttctgtcccctgcaaaatggtc

SEQ ID NO: 150312 - DNA, 120 bp, Artificial Sequence
  ENSG00000105639_39 (sequence is synthesized)
agagcttaccccttggctgtgcagggtcaactttctgactggtgagagggattctcatgcaggttaagcttctgctgctcctcctcacctgcaaagcttttctgccacttttgcctcctt

SEQ ID NO: 150313 - DNA, 120 bp, Artificial Sequence
  ENSG00000105639_40 (sequence is synthesized)
ggaaaactcttatccatctctcaaaactccagctaccacatccttgcagccttccctcatatacccccactactactgtagccctgtccttccctccagccccactctggccctggggct

SEQ ID NO: 150314 - DNA, 120 bp, Artificial Sequence
  ENSG00000105639_41 (sequence is synthesized)
ggggaagtgtctgtgtccagctgtctcccctgacctcagggttccttgggggctgggctgaggcctcagtacagagggggctctggaaatgtttgttgactgaataaaggaattcagtgg

SEQ ID NO: 150315 - DNA, 120 bp, Artificial Sequence
  ENSG00000105639_42 (sequence is synthesized)
ctctgtactgagaagaaaggctagagtgtgaggccgatgaggatcctggcccccacttggctactctctcactgtgtggcaagtcagagcactttcagagcctcagtttacccttttcca

SEQ ID NO: 150316 - DNA, 120 bp, Artificial Sequence
  ENSG00000105639_43 (sequence is synthesized)
aaatgagaatagtaatgccttatagggtgagggaagattagactcctgaacacctgtgcctatgagggctcagctcaaagccgagcacacagtcgatgctccataaatggtggtgacgtt

SEQ ID NO: 150317 - DNA, 120 bp, Artificial Sequence
  ENSG00000105639_44 (sequence is synthesized)
tccacggcgtgtgcatggctggagacagtgagagccccccacccacccaccccacccctgcctcacccaagtctaggctgttcttcccacctctgttctgagccgctatatgacagcccc

SEQ ID NO: 150318 - DNA, 120 bp, Artificial Sequence
  ENSG00000105639_45 (sequence is synthesized)
agcaacacactgggccaccctggatgggagccgtgttcattaccctttatttatgtctctccatcatcactccttggaaagcggctccaggttctcacccatatccagccccagaatgac

SEQ ID NO: 150319 - DNA, 120 bp, Artificial Sequence
  ENSG00000105639_46 (sequence is synthesized)
ctgaagtcagacaaacctggctttctaatctctgcagctttgtacaggtcacgtaacctttctgagccttggtttcattggttgggagtctaggatgggccaggagctgggacagagcct

SEQ ID NO: 150320 - DNA, 120 bp, Artificial Sequence
  ENSG00000105639_47 (sequence is synthesized)
caaaggcacagctagatgtgagccatgtcatctgcacctagtctctctccagctctcagctcttcctctgggtgaatttcactcctggacaaacccctctgatgggacaattctgagata

SEQ ID NO: 150321 - DNA, 120 bp, Artificial Sequence
  ENSG00000105639_48 (sequence is synthesized)
actgtcaggtgagagccaccaggctgtggggacggcctctgcttgggagtgagcaacgtgggctccatcggggctttgccgggctcccaccatggagttctcctgcaagctttcagggtg

SEQ ID NO: 150322 - DNA, 120 bp, Artificial Sequence
  ENSG00000105639_49 (sequence is synthesized)
ttcctatgacccagggcctcccacgaacccagccctctccacccccaggctccagctggacagacacctgacctcccccagctaaaaggcctgtggggtccctgtccgacctgtgggcgc

SEQ ID NO: 150323 - DNA, 120 bp, Artificial Sequence
  ENSG00000105639_50 (sequence is synthesized)
caatggccctcccctactctgaggtccggtcctcatacctgaccctgaatgagagtctgtgtgtgcctggtgccccaactagggccgcaccccagcccctgggctaaagcctgggtttgt

SEQ ID NO: 150324 - DNA, 120 bp, Artificial Sequence
  ENSG00000105640_0 (sequence is synthesized)
agaggacacttccttttgcgggtggcggcgaacgcggagagcacgccatgaaggcctcgggcacgctacgagagtacaaggtagtgggtcgctgcctgcccacccccaaatgccacacgc

SEQ ID NO: 150325 - DNA, 120 bp, Artificial Sequence
  ENSG00000105640_1 (sequence is synthesized)
cgcccctctaccgcatgcgaatctttgcgcctaatcatgtcgtcgccaagtcccgcttctggtactttgtatctcagttaaagaagatgaagaagtcttcaggggagattgtctactgtg

SEQ ID NO: 150326 - DNA, 120 bp, Artificial Sequence
  ENSG00000105640_2 (sequence is synthesized)
gaacttcgggatctggctgcgctatgactcccggagcggcacccacaacatgtaccgggaataccgggacctgaccaccgcaggcgctgtcacccagtgctaccgagacatgggtgcccg

SEQ ID NO: 150327 - DNA, 120 bp, Artificial Sequence
  ENSG00000105640_3 (sequence is synthesized)
gcaccgcgcccgagcccactccattcagatcatgaaggtggaggagatcgcggccagcaagtgccgccggccggctgtcaagcagttccacgactccaagatcaagttcccgctgcccca

SEQ ID NO: 150328 - DNA, 120 bp, Artificial Sequence
  ENSG00000105640_4 (sequence is synthesized)
ccgggtcctgcgccgtcagcacaagccacgcttcaccaccaagaggcccaacaccttcttctaggtgcagggccctcgtccgggtgtgccccaaataaactcaggaacgccccggtgctc

SEQ ID NO: 150329 - DNA, 120 bp, Artificial Sequence
  ENSG00000105640_5 (sequence is synthesized)
actccctttttgggtctgcaccttgtttagactgggatccacatcaccactgttttctgggacccactgagaaccgaattgaacccctgcctagtgttgggagctggcaccttttccctg

SEQ ID NO: 150330 - DNA, 120 bp, Artificial Sequence
  ENSG00000105640_6 (sequence is synthesized)
gctcacctgccagggtctgtgagacccccacacctccctgattgcacctaaacccaagaatcactgtttcttatagcggtggtttaaacagaggtgcaaacagcaagcggatcttgtcgc

SEQ ID NO: 150331 - DNA, 120 bp, Artificial Sequence
  ENSG00000105640_7 (sequence is synthesized)
ctttggggggctgtggccgtgcccctcaaagtgaatttggaggttccacaactctagtggccagtgactgcagggacccaggccttgggctatctcgcttccccaccaccaccttcccgt

SEQ ID NO: 150332 - DNA, 120 bp, Artificial Sequence
  ENSG00000105640_8 (sequence is synthesized)
gagccccgagccctcaggcagttgctgtgaccaacaggatgtgtcaggtcattgggcaggcactcaggaggtttgctgaatgcccagagcccaggcaacaccgtcaccctggccccgctc

SEQ ID NO: 150333 - DNA, 120 bp, Artificial Sequence
  ENSG00000105640_9 (sequence is synthesized)
aggcccaacaccttcttctaggtgcagggccctcgtccgggtgtgccccaaataaactcaggaacgccccggtgctcgccgcatgttttctttgcacactgcagagctcaaaggggtgct

SEQ ID NO: 150334 - DNA, 120 bp, Artificial Sequence
  ENSG00000105640_10 (sequence is synthesized)
agtgcaaacaaacaaaccctcacatcctcctgtcctggagtgggccctccaggcgcccccacccctgagctccctcttgcttggtcagttctcagccctgctggcagccctgggctatga

SEQ ID NO: 150335 - DNA, 120 bp, Artificial Sequence
  ENSG00000105640_11 (sequence is synthesized)
gctgcaggggtactgtctgtcctgggccctaaatctgtcccaactgccttgtgagacacaggcctcccaggctcccctgctgagtctggaccagggagaatctccctagatagtggggtt

SEQ ID NO: 150336 - DNA, 120 bp, Artificial Sequence
  ENSG00000105640_12 (sequence is synthesized)
ggcgttcactccctggggattctcctaagtctctggttcccaaagttttcagagtagacacaagtgggcacccgaggggcgctctctgctgcttgggggctgtttccctttcactggttg

SEQ ID NO: 150337 - DNA, 120 bp, Artificial Sequence
  ENSG00000105640_13 (sequence is synthesized)
ggggcctcttagatgacgccctcatcttgcccaaggaggtcaaggactcaccacaggtactcatctctgggaaactgcctcaggcctggaaaattccaggcatgacactaatcccaccct

SEQ ID NO: 150338 - DNA, 120 bp, Artificial Sequence
  ENSG00000105640_14 (sequence is synthesized)
ggctgagtccttctgtcaggtggaggctaagctggcattggagaagtttgagacacagccaagagctcaggctctgggagcctcccatcctttgttgcgtgaccttgggcagccctgttc

SEQ ID NO: 150339 - DNA, 120 bp, Artificial Sequence
  ENSG00000105640_15 (sequence is synthesized)
tgggccagcggcccttctggggcttgctgtcttgatctcaacatcgggttccacattgatgtgggaagtgacgctgtgcaggtgctggggtcagcctatggggccctcctttgtcccaga

SEQ ID NO: 150340 - DNA, 120 bp, Artificial Sequence
  ENSG00000105640_16 (sequence is synthesized)
tttgcgcctcttgggacatcgtgcatctcaagaattaatcagacatcgaacgggtgcggtagctcaacgcctgtaatcccatcacatcagacatcagagccccgggttgtgtttctgcct

SEQ ID NO: 150341 - DNA, 120 bp, Artificial Sequence
  ENSG00000105640_17 (sequence is synthesized)
gggtgggtggcatggtgggacaccttggttggtgctgtcttccctgggccctgtctgttaagtgaggagaggtgatggctatctggtcagtgggtggtagctaggttggcccagacaggt

SEQ ID NO: 150342 - DNA, 120 bp, Artificial Sequence
  ENSG00000105640_18 (sequence is synthesized)
tccaggagacttgagttcaggaactgcatctggggctgggttggtgtccgtggcagaagcctggacttcaggctgttgccatgggaagttcccttacctcacgctccctgaggatgcctg

SEQ ID NO: 150343 - DNA, 120 bp, Artificial Sequence
  ENSG00000105640_19 (sequence is synthesized)
aaggtaggtggggctgggaaactgaggcacaagagtctggccatagagtaggcctggagcctggggtgtgctttagaggcagagggttcagtgaggatggggctagggcacatcggcttg

SEQ ID NO: 150344 - DNA, 120 bp, Artificial Sequence
  ENSG00000105640_20 (sequence is synthesized)
ctgctctcacatctccctgtggcctctccttggcaggtgtttgagaagtcccccctgcgggtgaagaacttcgggatctggctgcgctatgactcccggagcggcacccacaacatgtac

SEQ ID NO: 150345 - DNA, 120 bp, Artificial Sequence
  ENSG00000105640_21 (sequence is synthesized)
tggcggcgaacgcggagagcacgccatgaaggcctcgggcacgctacgagagtacaagttaaagaagatgaagaagtcttcaggggagattgtctactgtgggcaggtgtttgagaagtc

SEQ ID NO: 150346 - DNA, 120 bp, Artificial Sequence
  ENSG00000105640_22 (sequence is synthesized)
ggcggccatcgtgggagccgcgtggagagagcgatgcgtgacctgggccagctcagggatcgcgggggcccaaggactccgggtcttcttcccgggggaaggaataagtcgcgcagcata

SEQ ID NO: 150347 - DNA, 120 bp, Artificial Sequence
  ENSG00000105640_23 (sequence is synthesized)
gaggccctagccccggcacctcgtcgagccgccaagtttctgttttcctttctgcaacgtggacgtggcgctacgagagtacaaggtagtgggtcgctgcctgcccacccccaaatgcca

SEQ ID NO: 150348 - DNA, 120 bp, Artificial Sequence
  ENSG00000105640_24 (sequence is synthesized)
ggattgcagttgggaaaacggaggcagccgcagctcgcgtggcaacagtgcagggatcccagggctggggagagacctgaggtcttgtcctagttctgcctggaatgggctgtgagatcc

SEQ ID NO: 150349 - DNA, 120 bp, Artificial Sequence
  ENSG00000105640_25 (sequence is synthesized)
catgctggtcactgggcctcagggtgaaagaagatgttggctggatgttttgaggtgcagagtggctgtttgacggcgactgcaaagcaattcaggactgcagcatgaagaaaggaggct

SEQ ID NO: 150350 - DNA, 120 bp, Artificial Sequence
  ENSG00000105640_26 (sequence is synthesized)
gtgggtctaagccacagctttcctggtctgaaacccttagcccaggcaaaggagaggcaggcaactcaattaatcctccctggagacctccctctcctcagttcattttgtgtataaagt

SEQ ID NO: 150351 - DNA, 120 bp, Artificial Sequence
  ENSG00000105640_27 (sequence is synthesized)
tgtggtcgggagtgtgacctacagtcaccaagaatccacatggaggccctagggtggccctgcctcctgcttcccgaatctgtggtcactagatgtaggaaagggagtgaggtggatctc

SEQ ID NO: 150352 - DNA, 120 bp, Artificial Sequence
  ENSG00000105641_0 (sequence is synthesized)
gctcccgtaagccccaaggcgacctccagctgtcagcgctgagcacagcgcccagggagagggacagacagccggctgcatgggacagcggaacccagagtgagaggggaggtggcagga

SEQ ID NO: 150353 - DNA, 120 bp, Artificial Sequence
  ENSG00000105641_1 (sequence is synthesized)
cagacagacagcaggggcggacgcagagacagacagcggggacagggaggccgacacggacatcgacagcccatagattcctaacccagggagccccggcccctctcgccgcttcccacc

SEQ ID NO: 150354 - DNA, 120 bp, Artificial Sequence
  ENSG00000105641_2 (sequence is synthesized)
ccagacggagcggggacaggctgccgagcatcctcccacccgccctccccgtcctgcctcctcggcccctgccagcttcccccgcttgagcacgcagggcgtccgaggacgcgctgggcc

SEQ ID NO: 150355 - DNA, 120 bp, Artificial Sequence
  ENSG00000105641_3 (sequence is synthesized)
tccgcacccgccctcatggaggccgtggagaccggggaacggcccaccttcggagcctgggactacggggtctttgccctcatgctcctggtgtccactggcatcgggctgtgggtcggg

SEQ ID NO: 150356 - DNA, 120 bp, Artificial Sequence
  ENSG00000105641_4 (sequence is synthesized)
ctggctcggggcgggcagcgcagcgctgaggacttcttcaccgggggccggcgcctggcggccctgcccgtgggcctgtcgctgtctgccagcttcatgtcggccgtgcaggtgctgggc

SEQ ID NO: 150357 - DNA, 120 bp, Artificial Sequence
  ENSG00000105641_5 (sequence is synthesized)
gtgccgtcggaggcctatcgctatggcctcaagttcctctggatgtgcctgggccagcttctgaactcggtcctcaccgccctgctcttcatgcccgtcttctaccgcctgggcctcacc

SEQ ID NO: 150358 - DNA, 120 bp, Artificial Sequence
  ENSG00000105641_6 (sequence is synthesized)
agcacctacgagtacctggagatgcgcttcagccgcgcagtgcggctctgcgggactttgcagtacattgtagccacgatgctgtacaccggcatcgtaatctacgcaccggccctcatc

SEQ ID NO: 150359 - DNA, 120 bp, Artificial Sequence
  ENSG00000105641_7 (sequence is synthesized)
ctgaaccaagtgaccgggctggacatctgggcgtcgctcctgtccaccggaattatctgcaccttctacacggctgtgggcggcatgaaggctgtggtctggactgatgtgttccaggtc

SEQ ID NO: 150360 - DNA, 120 bp, Artificial Sequence
  ENSG00000105641_8 (sequence is synthesized)
gtggtgatgctaagtggcttctgggttgtcctggcacgcggtgtcatgcttgtgggcgggccccgccaggtgctcacgctggcccagaaccactcccggatcaacctcatggactttaac

SEQ ID NO: 150361 - DNA, 120 bp, Artificial Sequence
  ENSG00000105641_9 (sequence is synthesized)
cctgacccgaggagccgctatacattctggacttttgtggtgggtggcacgttggtgtggctctccatgtatggcgtgaaccaggcgcaggtgcagcgctacgtggcttgccgcacagag

SEQ ID NO: 150362 - DNA, 120 bp, Artificial Sequence
  ENSG00000105641_10 (sequence is synthesized)
aagcaggccaagctggccctgctcatcaaccaggtcggcctgttcctgatcgtgtccagcgctgcctgctgtggcatcgtcatgtttgtgttctacactgactgcgaccctctcctcctg

SEQ ID NO: 150363 - DNA, 120 bp, Artificial Sequence
  ENSG00000105641_11 (sequence is synthesized)
gggcgcatctctgccccagaccagtacatgcctctgctggtgctggacatcttcgaagatctgcctggagtccccgggcttttcctggcctgtgcttacagtggcaccctcagcacagca

SEQ ID NO: 150364 - DNA, 120 bp, Artificial Sequence
  ENSG00000105641_12 (sequence is synthesized)
tccaccagcatcaatgctatggctgcagtcactgtagaagacctcatcaaacctcggctgcggagcctggcacccaggaaactcgtgattatctccaaggggctctcactcatctacgga

SEQ ID NO: 150365 - DNA, 120 bp, Artificial Sequence
  ENSG00000105641_13 (sequence is synthesized)
tcggcctgtctcaccgtggcagccctgtcctcactgctcggaggaggtgtccttcagggctccttcaccgtcatgggagtcatcagcggccccctgctgggagccttcatcttgggaatg

SEQ ID NO: 150366 - DNA, 120 bp, Artificial Sequence
  ENSG00000105641_14 (sequence is synthesized)
ttcctgccggcctgcaacacaccgggcgtcctcgcgggactaggcgcgggcttggcgctgtcgctgtgggtggccttgggcgccacgctgtacccacccagcgagcagaccatgagggtc

SEQ ID NO: 150367 - DNA, 120 bp, Artificial Sequence
  ENSG00000105641_15 (sequence is synthesized)
catcgtcggctgcccgctgcgtggctctctcagtcaacgcctctggcctcctggacccggctctcctccctgctaacgactccagcagggcccccagctcaggaatggacgccagccgac

SEQ ID NO: 150368 - DNA, 120 bp, Artificial Sequence
  ENSG00000105641_16 (sequence is synthesized)
ccgccttagctgacagcttctatgccatctcctatctctattacggtgccctgggcacgctgaccactgtgctgtgcggagccctcatcagctgcctgacaggccccaccaagcgcagca

SEQ ID NO: 150369 - DNA, 120 bp, Artificial Sequence
  ENSG00000105641_17 (sequence is synthesized)
ccctggccccgggattgttgtggtgggacctcgcacggcagacagcatcagtggcccccaaggaagaagtggccatcctggatgacaacttggtcaagggtcctgaagaactccccactg

SEQ ID NO: 150370 - DNA, 120 bp, Artificial Sequence
  ENSG00000105641_18 (sequence is synthesized)
gaaacaagaagccccctggcttcctgcccaccaatgaggatcgtctgtttttcttggggcagaaggagctggagggggctggctcttggaccccctgtgttggacatgatggtggtcgag

SEQ ID NO: 150371 - DNA, 120 bp, Artificial Sequence
  ENSG00000105641_19 (sequence is synthesized)
accagcaggagacaaacctctgaggacagggccagccgcgggactgacaccctgggatggaacctcaggatgggccaaacccagacaacgggcccatggccttgggctctgattggctgg

SEQ ID NO: 150372 - DNA, 120 bp, Artificial Sequence
  ENSG00000105641_20 (sequence is synthesized)
attgccttgtatgcaaatgagttcaggactacaataccctaccctatggggaggccctgcctccgggaggtcattttttaaatccagccccttgcttcaaccgtccccagtattagacgc

SEQ ID NO: 150373 - DNA, 75 bp, Artificial Sequence
  ENSG00000105641_21 (sequence is synthesized)
aatccagccccttgcttcaaccgtccccagtattagacgctgcagccctgacggctccccccaaataaggctggg

SEQ ID NO: 150374 - DNA, 73 bp, Artificial Sequence
  ENSG00000105641_22 (sequence is synthesized)
acaggcgtaagctaccatgcccagcctaccgtttttctcaatctataatagaaagccaccacgcccaggtaat

SEQ ID NO: 150375 - DNA, 120 bp, Artificial Sequence
  ENSG00000105641_23 (sequence is synthesized)
ctgggttacaggcgtaagctaccatgcccagcctaccgtttttctcaatctataatagaaagccaccacgcccaggtaatttttgtaattttgtatttttgtagagacggggttttgcca

SEQ ID NO: 150376 - DNA, 120 bp, Artificial Sequence
  ENSG00000105641_24 (sequence is synthesized)
ggattacaggggtgagccaccgcgccccacctctttcttattttcttcctgggattggggaggggatgattcagaccccacatggcctccaaccttggcccacacacctgccatggctcc

SEQ ID NO: 150377 - DNA, 120 bp, Artificial Sequence
  ENSG00000105641_25 (sequence is synthesized)
ccttggcccacacacctgccatggctcccatcatcctgagcatgctagcgtcccctcctcacctgacaatggaggctctcgaattgggttgtgtccccccaaaatttatgtctacccaga

SEQ ID NO: 150378 - DNA, 120 bp, Artificial Sequence
  ENSG00000105641_26 (sequence is synthesized)
acctcagaacatgagcttacttggaaatagggtctttgcaggtgtaactggttaaattaaaagaggtattactggaggaggatggatgaatccagtgactggttcctcatatgaagtaga

SEQ ID NO: 150379 - DNA, 120 bp, Artificial Sequence
  ENSG00000105641_27 (sequence is synthesized)
gaagagatgcagagaaacacatggggaagatgccacgtgaagacagaggcagtggttggatcaatgcatctacgagtcggagaacccaaggattgccagcaacaaccagaaatcaggagg

SEQ ID NO: 150380 - DNA, 120 bp, Artificial Sequence
  ENSG00000105641_28 (sequence is synthesized)
ggggcatgagatgcattatttcttagagcctttagagggaacatggccctactgacaccttgatgtcagacttctggctgctagaactgtcagagaataaatttctgttgtttgatgcca

SEQ ID NO: 150381 - DNA, 120 bp, Artificial Sequence
  ENSG00000105641_29 (sequence is synthesized)
aatgctatggctgcagtcactgtagaagacctcatcaaacctcggctgcggagcctggcacccaggaaactcgtgattatctccaaggggctctgtgagtttcagggagacctgggtggg

SEQ ID NO: 150382 - DNA, 120 bp, Artificial Sequence
  ENSG00000105642_0 (sequence is synthesized)
gaggaacacggtggtctgagctggagccacgctttctgttggagggggcagctgaaggagaacagcaagacatatccggcggccctacggactcggagagctggagggaccccggagatc

SEQ ID NO: 150383 - DNA, 120 bp, Artificial Sequence
  ENSG00000105642_1 (sequence is synthesized)
tcaaagggacaggaaaggcagcagcagccaccctctctcccagtcaagtggtcaccagcaggactgaaggggacagcccctttgcagtggctcggcgaggagacccctgcaccctagggt

SEQ ID NO: 150384 - DNA, 120 bp, Artificial Sequence
  ENSG00000105642_2 (sequence is synthesized)
cagtgcaggagcccagccgctgagccatgccgggccccgggcggcctgcagcgagcccaacccctgcacccaggtagtcatgaacagccacagctacaatggcagcgtggggcggccgct

SEQ ID NO: 150385 - DNA, 120 bp, Artificial Sequence
  ENSG00000105642_3 (sequence is synthesized)
cgctgggcagcgggccgggcgccctgggacgagaccctccggaccctgaggccggccaccccccacaacccccgcacagcccgggcctccaggtggtagtggccaagagtgagccagccc

SEQ ID NO: 150386 - DNA, 120 bp, Artificial Sequence
  ENSG00000105642_4 (sequence is synthesized)
ctcacccggcagcccccgggggcagccccaggaccaggacgatgacgaggatgatgaggaagatgaggccggcaggcagagagcctcggggaaaccctcaaatgtgggccaccgcctggg

SEQ ID NO: 150387 - DNA, 120 bp, Artificial Sequence
  ENSG00000105642_5 (sequence is synthesized)
ccaccggcgggcgctcttcgagaagcggaagcgcctcagcgactatgccctcattttcggcatgtttggcatcgtcgtcatggtgacggagaccgagctgtcctggggggtgtacaccaa

SEQ ID NO: 150388 - DNA, 120 bp, Artificial Sequence
  ENSG00000105642_6 (sequence is synthesized)
ggagtctctgtactcattcgcactcaaatgcctcatcagcctctccacggccatcctgctgggtctcgttgtcctctaccatgcccgggagatccagctgttcatggtggacaacggggc

SEQ ID NO: 150389 - DNA, 120 bp, Artificial Sequence
  ENSG00000105642_7 (sequence is synthesized)
tgatgactggcgcatcgccatgacctgcgagcgcgtgttcctcatctcgctagagctggcagtgtgcgccattcacccggtgcccggccactaccgcttcacgtggacggcgcggctggc

SEQ ID NO: 150390 - DNA, 120 bp, Artificial Sequence
  ENSG00000105642_8 (sequence is synthesized)
cttcacgtacgcgccctcggtggccgaggccgacgtggacgtgctgctgtccatccccatgttcctgcgcctctacctgctgggccgggtgatgctactgcacagcaaaatcttcacgga

SEQ ID NO: 150391 - DNA, 120 bp, Artificial Sequence
  ENSG00000105642_9 (sequence is synthesized)
cgcctcgagccgcagcatcggggccctcaacaagatcaccttcaacacgcgcttcgtcatgaagacactcatgaccatctgccccggcaccgtgctgctggtcttcagcatctcctcctg

SEQ ID NO: 150392 - DNA, 120 bp, Artificial Sequence
  ENSG00000105642_10 (sequence is synthesized)
gatcatcgcagcctggaccgtgcgcgtctgcgagaggtaccacgacaagcaggaagtgaccagcaacttcctgggggccatgtggctgatttccatcaccttcctctccattggctacgg

SEQ ID NO: 150393 - DNA, 120 bp, Artificial Sequence
  ENSG00000105642_11 (sequence is synthesized)
cgacatggtgccccacacctactgcgggaagggtgtgtgcctgctcactggcatcatgggagctggctgtaccgcgctcgtggtggctgtggtggctcggaagctggagctcaccaaggc

SEQ ID NO: 150394 - DNA, 120 bp, Artificial Sequence
  ENSG00000105642_12 (sequence is synthesized)
tgagaagcacgtgcacaacttcatgatggacactcagctcaccaagcgggtaaaaaacgccgctgctaacgttctcagggagacgtggctcatctacaaacataccaggctggtgaagaa

SEQ ID NO: 150395 - DNA, 120 bp, Artificial Sequence
  ENSG00000105642_13 (sequence is synthesized)
gccagaccaagcccgggttcggaaacaccagcgtaagttcctccaagccatccatcaggctcagaagctccggagtgtgaagatcgagcaagggaagctgaacgaccaggctaacacgct

SEQ ID NO: 150396 - DNA, 120 bp, Artificial Sequence
  ENSG00000105642_14 (sequence is synthesized)
taccgacctagccaagacccagaccgtcatgtacgaccttgtatcggagctgcacgctcagcacgaggagctggaggcccgcctggccaccctggaaagccgcttggatgcgctgggtgc

SEQ ID NO: 150397 - DNA, 120 bp, Artificial Sequence
  ENSG00000105642_15 (sequence is synthesized)
tctctacaggccctgcctggcctcatcgcccaagccatacgcccacccccgcctcccctgcctcccaggcccggccccggcccccaagaccaggcagcccggagctccccctgccggtgg

SEQ ID NO: 150398 - DNA, 120 bp, Artificial Sequence
  ENSG00000105642_16 (sequence is synthesized)
gggtgacggccctgcccgccaccagacccctaaatcttggccatcgtgtggccgccacctccgggaagccttgtacagtggcgcctcttggagttcaagaagccaacgctgagtcaggct

SEQ ID NO: 150399 - DNA, 120 bp, Artificial Sequence
  ENSG00000105642_17 (sequence is synthesized)
gagtggactgaggcctgccccgcccagactgcccaggcagagggcagggctggaccatgggtgagggcaggggagcccggagcttcctctggtcacctggtcccccgactctccccaggc

SEQ ID NO: 150400 - DNA, 120 bp, Artificial Sequence
  ENSG00000105642_18 (sequence is synthesized)
ccccggtgggcatggagcagcccggggaggggtccgtgctggttctgaataaagcaggacccgcctagtggctgcctgtgtgcatggctggaaggcactggtgatgtcccaggaggtaga

SEQ ID NO: 150401 - DNA, 120 bp, Artificial Sequence
  ENSG00000105642_19 (sequence is synthesized)
cctccagccctgggtaccaagatgaatgtgggaatcagaaaaacctgttcccatcaccggcctagcctagaatcctagcctagaagccctctctccctctgggctggagctcagtgaggg

SEQ ID NO: 150402 - DNA, 120 bp, Artificial Sequence
  ENSG00000105642_20 (sequence is synthesized)
acaactctctagggacacctgtaccagccccacctggcgctgagatccctcagacagcatggcccagccctggccagaagcatcgctccccttcaaccaaccgcgttgatggacacccac

SEQ ID NO: 150403 - DNA, 120 bp, Artificial Sequence
  ENSG00000105642_21 (sequence is synthesized)
tgtgtgccaggccccagcggggcccatgggggaggtgacctgggtgaggaaggtcatttgggtttttgtgagatttgtattgagcacctgctgtctacagagaatgtgatgatgtcaatt

SEQ ID NO: 150404 - DNA, 120 bp, Artificial Sequence
  ENSG00000105642_22 (sequence is synthesized)
accacactgattcctcatcagaacttgaccatggtgggatgggggggaaactgaggcccagagaggtgaatctacctacctgggaccacactgcgaggaaggatggtgcattcaaactgg

SEQ ID NO: 150405 - DNA, 68 bp, Artificial Sequence
  ENSG00000105642_23 (sequence is synthesized)
tgggaccacactgcgaggaaggatggtgcattcaaactggaaatcccctaggccaaagtaaagaaccg

SEQ ID NO: 150406 - DNA, 120 bp, Artificial Sequence
  ENSG00000105642_24 (sequence is synthesized)
ggaggtggaggttgcagtgagaaaaaacctggacttggtggaagggactccatggaggagccatggggacgtcaggaggaggggttatttggtgacatccaggggtcagagagacccttc

SEQ ID NO: 150407 - DNA, 120 bp, Artificial Sequence
  ENSG00000105642_25 (sequence is synthesized)
aggggtgggctacaggggagggttccagacacaagtagaatcagaaaggtccctggaggccatgggcttgggtgctgggagcaacaggcatttacttggcagatgctgagccctgggtgg

SEQ ID NO: 150408 - DNA, 120 bp, Artificial Sequence
  ENSG00000105642_26 (sequence is synthesized)
ggcgaggaggcctggctcctggggagacgacgctgtgcatagccgaggagccccaggtcctggcagcctctgataaggccatccatcgcctggctcaacgagataactaggccgtggctg

SEQ ID NO: 150409 - DNA, 120 bp, Artificial Sequence
  ENSG00000105642_27 (sequence is synthesized)
gtgcatgaatgaccagcttgggcccacgcacgagaagggtatgaggaggtgctggtcagacccgggttcgagtcctgactctgccactgctgggtgactctgagcagtggctgcccctct

SEQ ID NO: 150410 - DNA, 120 bp, Artificial Sequence
  ENSG00000105642_28 (sequence is synthesized)
ggggccttggttgtttcatctgtaaaatggggtgacagtctatttaaccagaactccctaaaaagggccaggcaactggtaggtgctcaataaatgctccttcccgcctgagggatcaca

SEQ ID NO: 150411 - DNA, 120 bp, Artificial Sequence
  ENSG00000105642_29 (sequence is synthesized)
caggtcggcggggagggggtcggctctgcggcggcgcgcgcacaccctcccggctcacacgcccttgcccggccgtgcacttgtcttcgcgctcgggcagggcgcagggactccggctgc

SEQ ID NO: 150412 - DNA, 120 bp, Artificial Sequence
  ENSG00000105642_30 (sequence is synthesized)
tccggctgcggcggccgactccggccgatctcaaagggacaggaaaggcagcagcagccaccctctctcccagtcaagtggtcaccagcaggactgaaggggacagcccctttgcagtgg

SEQ ID NO: 150413 - DNA, 120 bp, Artificial Sequence
  ENSG00000105643_0 (sequence is synthesized)
gattttctgctccggttggtgagcgcgcctgcgcgttgacggcgattttgcgttctgaggctgcagcgtcggcatcttgagctgccggttcgcgagttcgaggccaggttccgcctgtcg

SEQ ID NO: 150414 - DNA, 120 bp, Artificial Sequence
  ENSG00000105643_1 (sequence is synthesized)
tgggttcgcaccccggacgcgatgctattcgacaaggtgaaagcgttctcggtgcagttggacggcgcgaccgcgggcgtcgagcccgtgtttagcggcggccaggccgtggcgggccgg

SEQ ID NO: 150415 - DNA, 120 bp, Artificial Sequence
  ENSG00000105643_2 (sequence is synthesized)
gtgctgctggagctgtcaagcgccgcgcgtgtgggtgccctgaggctgcgcgcgcggggccgcgcccacgtgcactggaccgagtcgcgcagcgcgggctcgagcacggcttacacgcag

SEQ ID NO: 150416 - DNA, 120 bp, Artificial Sequence
  ENSG00000105643_3 (sequence is synthesized)
agctacagtgaacgcgtggaggtcgtgagccaccgcgccacgctcctggcgccagataccggggagaccacgacgctgcctcctgggcgccatgagttcctgttcagcttccagctgccc

SEQ ID NO: 150417 - DNA, 120 bp, Artificial Sequence
  ENSG00000105643_4 (sequence is synthesized)
ccgaccctggtgacatccttcgagggcaaacacggtagtgtccgctactgtatcaaggccaccctgcaccggccctgggtcccagcacgccgggcaaggaaggtgttcactgtcatcgag

SEQ ID NO: 150418 - DNA, 120 bp, Artificial Sequence
  ENSG00000105643_5 (sequence is synthesized)
cctgtggacatcaacacgccagccctgctggcacctcaagcgggggctcgggaaaaggttgcccgatcctggtactgtaaccgtggcctagtctccctttcggccaagatcgaccgcaag

SEQ ID NO: 150419 - DNA, 120 bp, Artificial Sequence
  ENSG00000105643_6 (sequence is synthesized)
ggctacaccccaggagaggtcatccctgtctttgccgagatcgacaacggctccacacgtcctgtgctgcctcgggcagccgtggtgcagacacagacgttcatggcccgaggcgcccga

SEQ ID NO: 150420 - DNA, 120 bp, Artificial Sequence
  ENSG00000105643_7 (sequence is synthesized)
aagcagaaacgggcagtggtggccagcctcgcgggcgagccggtgggccccgggcagcgggcgctgtggcagggccgggcactgcggatccccccagtgggtccttccatcctgcactgc

SEQ ID NO: 150421 - DNA, 120 bp, Artificial Sequence
  ENSG00000105643_8 (sequence is synthesized)
cgcgttctacacgtggactacgcactcaaggtctgtgtggatatcccaggaacgtccaagctgctgctggagctgccactggtgatcggcaccattcccttgcacccttttggcagccgt

SEQ ID NO: 150422 - DNA, 120 bp, Artificial Sequence
  ENSG00000105643_9 (sequence is synthesized)
tcctccagcgtgggcagccacgccagcttcctgctggactggaggctgggggccttgccggagcggcctgaggctcctcctgagtactcggaggtggtagccgacactgaggaggcagcc

SEQ ID NO: 150423 - DNA, 120 bp, Artificial Sequence
  ENSG00000105643_10 (sequence is synthesized)
gtactctgaggaggatccaaacccactcttgggggacatgaggccgcgctgcatgacttgctgaacggcacagggacccctcgaggaacaaggttgcacaccagctttcagccaccatga

SEQ ID NO: 150424 - DNA, 120 bp, Artificial Sequence
  ENSG00000105643_11 (sequence is synthesized)
ctgtggggagtggctggaccaagggctgacctccccgactgcatcaaagttggggaaccaagtctcagagtgaggcgggggcctttcggatatcacatgggacagaggaagagcccggct

SEQ ID NO: 150425 - DNA, 120 bp, Artificial Sequence
  ENSG00000105643_12 (sequence is synthesized)
ggaatctgacttacctggaccgctgtccttgtgaggcattgaatgcccagtgcagtatccgagagactgtttaataacctgtcttcccagccaattggtggtgctggaatcccctaggag

SEQ ID NO: 150426 - DNA, 120 bp, Artificial Sequence
  ENSG00000105643_13 (sequence is synthesized)
ccttcagtctgggagaaacagagccagacatagacagttccagcatcacagaaccagaagaagagacctgcaactgtgagagtccagacaggaagcagagaaggcgtccttgcggaaagg

SEQ ID NO: 150427 - DNA, 120 bp, Artificial Sequence
  ENSG00000105643_14 (sequence is synthesized)
gcattttagctgaggctttggagtacgaataggagctcagcaggcagacgaatgaggaataaaggtcagagaaggtcagagctgagtgacgtttggaatccaccccgtttattgtagaac

SEQ ID NO: 150428 - DNA, 120 bp, Artificial Sequence
  ENSG00000105643_15 (sequence is synthesized)
tgggggttcagagggcaggtgcctcagagttgaggccacacagtgaggtctggtgggtgaaaggacccaggaacgaggcgttcaggaaagcaggttgtcagagctatgtggagtctgtgg

SEQ ID NO: 150429 - DNA, 120 bp, Artificial Sequence
  ENSG00000105643_16 (sequence is synthesized)
gtggcaggggcagccgctccagcctttgaagactttgaaagccagagattcctggcgcaggcttggacttcctgggagctcctccaagtacccaggggcatcagagctgcctgggtgtta

SEQ ID NO: 150430 - DNA, 120 bp, Artificial Sequence
  ENSG00000105643_17 (sequence is synthesized)
catggcccagggaacccaggttcagggtaggacaggcaagaccagatacccaatgtgcaaagtgaaaacactgggctccctgttaaacgatgaagaattcaagacagtgacagcattacg

SEQ ID NO: 150431 - DNA, 120 bp, Artificial Sequence
  ENSG00000105643_18 (sequence is synthesized)
tcacccctggggacagaggtcagcctaaggtgacacacggggactactgtgcttccggaggctccctgtgtcctggaggagaaaagcattagagggggcagctggacaagctcccaactg

SEQ ID NO: 150432 - DNA, 120 bp, Artificial Sequence
  ENSG00000105643_19 (sequence is synthesized)
cagagtcccagccctggctggggcagggccccggcctgggactcagcatttctgatatgccttaagaattcattctgttttgtacaattattttttaaaagtaaacgtgtggagaaagaa

SEQ ID NO: 150433 - DNA, 120 bp, Artificial Sequence
  ENSG00000105643_20 (sequence is synthesized)
ccaggaagttcgccgacgacgcgcccgccctgggccaccggcgccggcccaagttcgccgggggggcccggaggaagcttgggggacgcgacgggggaacgcggaaaccccggggatctg

SEQ ID NO: 150434 - DNA, 120 bp, Artificial Sequence
  ENSG00000105643_21 (sequence is synthesized)
tctgcaggcgcgcccgggccgtgtgccttctctccgcgtgtccaaaccgtgtccccagccgcgcgccatgcgctctgggggcgtgcgcagcttcgcgctggagctggcgcggggcccggg

SEQ ID NO: 150435 - DNA, 120 bp, Artificial Sequence
  ENSG00000105643_22 (sequence is synthesized)
gccgggtgctgctggaggcggcggcgccgctgcgggtgcgagcgctcgaggtgaaggcgcgcggcggggcggccacccactggttggagggtcgcagcgtgggcgtcaacgccgtatcca

SEQ ID NO: 150436 - DNA, 120 bp, Artificial Sequence
  ENSG00000105643_23 (sequence is synthesized)
cgcagcgtgggcgtcaacgccgtatccagcgactacgcggccgcggagacctacctgcggcgtcggcagctgctgctccgagataccggggagaccacgacgctgcctcctgggcgccat

SEQ ID NO: 150437 - DNA, 120 bp, Artificial Sequence
  ENSG00000105643_24 (sequence is synthesized)
agctacagtgaacgcgtggaggtcgtgagccaccgcgccacgctcctggcgccaggtacggatggaggacccctgctccaacaccagttgtgtgcctcccaccacctggacggcggtacc

SEQ ID NO: 150438 - DNA, 120 bp, Artificial Sequence
  ENSG00000105643_25 (sequence is synthesized)
cccttggggaggtaggttgggagtattgtaggaaggggcctgcctggctgctgggcgacaccaaccaataagatggaggtcataggtgggccctggcagggagggaggcaggtgtgggaa

SEQ ID NO: 150439 - DNA, 120 bp, Artificial Sequence
  ENSG00000105643_26 (sequence is synthesized)
tgcgtgtggaatccactgggatctgcacccatttgccgtgtgactctgggcaagtgtcttgaagccctctctgagcctcagatgcctcttctgtgaaatagaccagagctagggcttacc

SEQ ID NO: 150440 - DNA, 120 bp, Artificial Sequence
  ENSG00000105643_27 (sequence is synthesized)
aagtgtgaattacacaccaaacacttggcttatacatttcatttctggctttataagatgggttgtgttcctggctctatttaacggatagttcctggattgttaaaaagaaaccaagcc

SEQ ID NO: 150441 - DNA, 120 bp, Artificial Sequence
  ENSG00000105643_28 (sequence is synthesized)
ctgcccaaagtcctccctcagctgggggtggtttggaagctccacagcgactgtggtttgcacaaagtgactcatccatgtcactttcctctacaccgacaggcacctcaagcgggggct

SEQ ID NO: 150442 - DNA, 120 bp, Artificial Sequence
  ENSG00000105643_29 (sequence is synthesized)
ggtaagctcccaccctgcttgcatgcagagggtgggtggatacacggagaggtggatgccgggtcaactctctcaccacgagtcccccggaatcccaaccaaaggacatacagcctggca

SEQ ID NO: 150443 - DNA, 120 bp, Artificial Sequence
  ENSG00000105643_30 (sequence is synthesized)
gccccagagctggcacaagccagctcctggcccctggtcccttggagcagggctctctcctgccaacctcacccaccctgtctctcgcttccagctcctcctgagtactcggaggtggta

SEQ ID NO: 150444 - DNA, 120 bp, Artificial Sequence
  ENSG00000105643_31 (sequence is synthesized)
gagagaggtcacgccgtcccgtggccacaccgcagctgtggacctgggggtgcccgagcgtcccctgcattcagctctgtggcgggacgggggctgaggatgactggagcaggcacaagg

SEQ ID NO: 150445 - DNA, 120 bp, Artificial Sequence
  ENSG00000105643_32 (sequence is synthesized)
accagtgtggagggcggtcccacccacctcctccacttctccctttgcatagcgggggaaacaggcctggaacagtcataggctctctggccctcaactggggcgagagtcccccgcccc

SEQ ID NO: 150446 - DNA, 120 bp, Artificial Sequence
  ENSG00000105643_33 (sequence is synthesized)
aaatcgggctggacatgcctcgagtcacgtcaacgaggggcggctgataccggggagaccacgacgctgcctcctgggcgccatgagttcctgttcagcttccagctgcccccgaccctg

SEQ ID NO: 150447 - DNA, 80 bp, Artificial Sequence
  ENSG00000105647_0 (sequence is synthesized)
cgcggctgcggcgacggtggccgcggtggagccacggggcgggcttggcttggtgtgacggcggctgcggcggcggtggc

SEQ ID NO: 150448 - DNA, 120 bp, Artificial Sequence
  ENSG00000105647_1 (sequence is synthesized)
ggccgcgaccaggtcggcgtcctcagctggccgagcatggtggcagcctgcacccttggctcccttgtctggtgcagccagcagagccgccagccttgggcgcccatggccctccgtgtg

SEQ ID NO: 150449 - DNA, 120 bp, Artificial Sequence
  ENSG00000105647_2 (sequence is synthesized)
agggcgtgagcggcctgccccagcctcacctgctgatggaggactcaatggcccagtgacctgacaccacaccaccaactccctcccaccagctgacgaatggtggacccagtgacgagt

SEQ ID NO: 150450 - DNA, 120 bp, Artificial Sequence
  ENSG00000105647_3 (sequence is synthesized)
ggcccttgtaagggtcatggaataatttgaagcgaggcatgagcggcccctgtggtcgcctgtgactgctggagatagaggtcccagcaccccaagccaacccagcggaccctcccagcc

SEQ ID NO: 150451 - DNA, 120 bp, Artificial Sequence
  ENSG00000105647_4 (sequence is synthesized)
ctgcttcaaccaatggggccagtggggctccaagcagccacctaaccatccagaccccaccccactcacgcggccatggcgggccctgagggcttccagtaccgcgctctgtacccgttc

SEQ ID NO: 150452 - DNA, 120 bp, Artificial Sequence
  ENSG00000105647_5 (sequence is synthesized)
cgccgggagcggccggaggacctggagctgctgcccggcgacgtgctggtagtgagccgggcggccttgcaggcgctgggcgtggccgagggtggcgagcgctgcccacagagcgtgggc

SEQ ID NO: 150453 - DNA, 120 bp, Artificial Sequence
  ENSG00000105647_6 (sequence is synthesized)
tggatgcccggcctcaacgagcgcacacggcagcgaggtgacttccctggcacctatgtggagttcctggggcccgtggccctggcccggcccggccctcgcccacggggcccccgccca

SEQ ID NO: 150454 - DNA, 120 bp, Artificial Sequence
  ENSG00000105647_7 (sequence is synthesized)
ctgcccgccaggccccgtgatggggcccctgagccaggcctcacactccccgacttgcccgagcagttctccccacctgatgtggctccccctcttctggtgaagcttgtggaggccatt

SEQ ID NO: 150455 - DNA, 120 bp, Artificial Sequence
  ENSG00000105647_8 (sequence is synthesized)
gaaaggacagggctggacagcgaatctcactaccgcccggagctgcccgcaccgcgtacagactggtccctgagcgacgtggatcagtgggacacggcagccctggctgacggcattaag

SEQ ID NO: 150456 - DNA, 120 bp, Artificial Sequence
  ENSG00000105647_9 (sequence is synthesized)
cagtgggacacggcagccctggctgacggcattaagagcttcctgctggcactgcccgcgccgctcgtgacccccgaggcctcggccgaggcgcgccgggccctgcgggaggccgcgggg

SEQ ID NO: 150457 - DNA, 80 bp, Artificial Sequence
  ENSG00000105647_10 (sequence is synthesized)
ctgcaccgcgcgctcacgctgcgcttcctgctccagcacctgggccgcgtggccagccgcgccccggccctgggtcccgc

SEQ ID NO: 150458 - DNA, 120 bp, Artificial Sequence
  ENSG00000105647_11 (sequence is synthesized)
cgcgcgccgccgccgccgtcctcgccgccgccagggggcgctcccgacgggagtgagcccagccctgacttcccggcgctgctggtggagaagctgcttcaggaacacttggaagagcag

SEQ ID NO: 150459 - DNA, 120 bp, Artificial Sequence
  ENSG00000105647_12 (sequence is synthesized)
gaggttgcgcccccagcgctgccgcctaaaccccccaaggcaaagccggcctccacagtcctggccaatggagggagcccaccctccctgcaggatgctgagtggtactggggggacatt

SEQ ID NO: 150460 - DNA, 120 bp, Artificial Sequence
  ENSG00000105647_13 (sequence is synthesized)
tcaagggaggaggtgaacgagaaactccgggacactcccgatggcaccttcctagtccgagatgcttctagcaagatccagggcgagtacacgctgaccctcaggaaaggcgggaacaat

SEQ ID NO: 150461 - DNA, 120 bp, Artificial Sequence
  ENSG00000105647_14 (sequence is synthesized)
aagctgatcaaggtcttccaccgagatgggcactatggcttctcagagccactcaccttctgctccgttgtggacctcatcaatcactaccgccacgagtctctggcccagtacaatgcc

SEQ ID NO: 150462 - DNA, 120 bp, Artificial Sequence
  ENSG00000105647_15 (sequence is synthesized)
aagctggacacacggctcctctaccctgtgtccaaataccagcaggaccagattgtcaaggaggacagcgtggaggcagtgggcgcccagcttaaggtctatcaccagcagtaccaggac

SEQ ID NO: 150463 - DNA, 120 bp, Artificial Sequence
  ENSG00000105647_16 (sequence is synthesized)
gctttatgaagagtacacacggacctcccaggagctgcagatgaagcgtactgcaattgaggccttcaatgagactatcaagatctttgaagagcagggccagactcaagagaaatgcag

SEQ ID NO: 150464 - DNA, 120 bp, Artificial Sequence
  ENSG00000105647_17 (sequence is synthesized)
caaggaatacctggagcgcttccggcgtgagggcaacgagaaagagatgcaaaggatcctgctgaactccgagcggctcaagtcccgcattgccgagatccatgagagccgcacgaagct

SEQ ID NO: 150465 - DNA, 120 bp, Artificial Sequence
  ENSG00000105647_18 (sequence is synthesized)
ggagcagcagctgcgggcccaggcctcggacaacagagagatcgacaagcgcatgaacagcctcaagccggacctcatgcagctgcgcaagatccgagaccagtacctcgtgtggctcac

SEQ ID NO: 150466 - DNA, 120 bp, Artificial Sequence
  ENSG00000105647_19 (sequence is synthesized)
ccagaaaggcgcccggcagaagaaaatcaacgagtggctggggattaaaaatgagactgaggaccagtacgcactcatggaggacgaggacgatctcccgcaccacgaggaacgcacttg

SEQ ID NO: 150467 - DNA, 120 bp, Artificial Sequence
  ENSG00000105647_20 (sequence is synthesized)
gtacgtgggcaagatcaaccgcacgcaggcagaggagatgctgagtggcaagcgggatggcaccttcctcatccgcgagagcagccagcggggctgctacgcctgctccgtggtagtgga

SEQ ID NO: 150468 - DNA, 120 bp, Artificial Sequence
  ENSG00000105647_21 (sequence is synthesized)
cggcgacaccaagcactgcgtcatctaccgcacggccaccggcttcggcttcgcggagccctacaacctgtacgggtcgctgaaggagctggtgctgcactaccagcacgcctcgctggt

SEQ ID NO: 150469 - DNA, 120 bp, Artificial Sequence
  ENSG00000105647_22 (sequence is synthesized)
gcactaccagcacgcctcgctggtgcagcacaacgacgcgctcaccgtcaccctggcgcacccagtgcgcgccccgggccccggcccgccgcctgccgcccgctgagcaccgaggacccg

SEQ ID NO: 150470 - DNA, 120 bp, Artificial Sequence
  ENSG00000105647_23 (sequence is synthesized)
ccgtctgcgccggaggctgcggcggcgggagccacggaccagaccagccacatccaggggtcctcatttctccggctctggctcttgtttggggttctctcaccctctttctctttcctt

SEQ ID NO: 150471 - DNA, 120 bp, Artificial Sequence
  ENSG00000105647_24 (sequence is synthesized)
ccctcccccattctccagatctccctctgtctccttttctctgtctttcttggcccctgtctctctccatgttgggggtcctaactcccccaccccatatctacgtgtcctccgggcatt

SEQ ID NO: 150472 - DNA, 120 bp, Artificial Sequence
  ENSG00000105647_25 (sequence is synthesized)
gccctctccatggctctggtcaccctgaccctctgccctgcccaccgcaggtcccccggggtcccggaagccccttctggctgcacctgccatgtttacagagggcccctgggctgcgcg

SEQ ID NO: 150473 - DNA, 120 bp, Artificial Sequence
  ENSG00000105647_26 (sequence is synthesized)
gccccagcctgggcaccctgatttttaagccatagacctggggtcagggcaggaaggaacttcactctgctgcttccgagaacctcggccgtgacattcggggccgggcgggacccgccc

SEQ ID NO: 150474 - DNA, 120 bp, Artificial Sequence
  ENSG00000105647_27 (sequence is synthesized)
cacagactccaacttcccctccaaaccccgaagtgaaacccgccaccgggttacccccacaagggggccgctgcgagaagttcacccacccccgaaaaaataattaaactcgcaggccag

SEQ ID NO: 150475 - DNA, 82 bp, Artificial Sequence
  ENSG00000105647_28 (sequence is synthesized)
cactttgggaggccaagacgggcggatcttttgaggtcgggagttggaggccagcctggccaaaatggcaaaaccccgcacc

SEQ ID NO: 150476 - DNA, 120 bp, Artificial Sequence
  ENSG00000105647_29 (sequence is synthesized)
actccagcctgggtaacagagggagactcctccgtctcaaaaaaataaataaataaacttgtgagctggccccaacccctcctaggaatcacagctccccgtactggtgccgccgcagtg

SEQ ID NO: 150477 - DNA, 120 bp, Artificial Sequence
  ENSG00000105647_30 (sequence is synthesized)
gccaagttgcgacactgcccacggcccctccctctgatgcagattcagggcttctcttcgatcatgttgggttttgattctgtttttccttgactgcaaaaccctctttcctctcctctt

SEQ ID NO: 150478 - DNA, 120 bp, Artificial Sequence
  ENSG00000105647_31 (sequence is synthesized)
ttgggacaagagccctggttttctacgctgcccttggccaccacactgcctgccccacgagctgggaggcaggttttgtacggtacgttgttattgatatgatataaaacatcaaacgtc

SEQ ID NO: 150479 - DNA, 120 bp, Artificial Sequence
  ENSG00000105647_32 (sequence is synthesized)
ggcagaagaaaatcaacgagtggctggggattaaaaatgagactgaggagtgagtgaccgtctggagggaggcagggagggcttcccagaggagggggccatttggggtgggtttcgaag

SEQ ID NO: 150480 - DNA, 120 bp, Artificial Sequence
  ENSG00000105647_33 (sequence is synthesized)
acctcccagcaggcgttagaagaatgacactctgatagagggaccagcttgagcagtctccgtatcagagttgagatgtgcctttacccctcacgagggccttttggggagtcccaggag

SEQ ID NO: 150481 - DNA, 120 bp, Artificial Sequence
  ENSG00000105649_0 (sequence is synthesized)
gcaggacgtcacggaggactgcaggggcctgagccgctgctgccgccgccgccgcgcagccccacatcaacgcaccggggtcctgtcaccgccaccgccaaaaaagtcaccgccgctagg

SEQ ID NO: 150482 - DNA, 120 bp, Artificial Sequence
  ENSG00000105649_1 (sequence is synthesized)
gtcgccgttgcatcggtgcagggcaagatggcatccgccacagactcgcgctatgggcagaaggagtcctcggatcagaacttcgactacatgttcaagattctcatcatcggcaacagc

SEQ ID NO: 150483 - DNA, 120 bp, Artificial Sequence
  ENSG00000105649_2 (sequence is synthesized)
agcgtgggcaagacgtccttcctcttccgctatgctgacgactcgttcacgcctgccttcgtcagcaccgtgggcatcgacttcaaggtcaagaccatctatcgcaacgacaagaggatc

SEQ ID NO: 150484 - DNA, 120 bp, Artificial Sequence
  ENSG00000105649_3 (sequence is synthesized)
aagctgcagatctgggacacagcagggcaagagcggtaccggaccatcaccaccgcatactaccggggcgctatgggcttcatcctcatgtatgacatcaccaacgaggaatccttcaat

SEQ ID NO: 150485 - DNA, 120 bp, Artificial Sequence
  ENSG00000105649_4 (sequence is synthesized)
gcagtgcaggactggtccacccagatcaagacctactcatgggacaatgcccaggtgctgctggtaggaaacaagtgtgacatggaggatgagcgggtggtgtcatcagaacgtggccgg

SEQ ID NO: 150486 - DNA, 120 bp, Artificial Sequence
  ENSG00000105649_5 (sequence is synthesized)
cagctagctgaccaccttgggttcgagttctttgaggcaagcgccaaggacaacattaacgtcaagcagacctttgagcgcctggtggatgtcatctgcgagaagatgtccgagtcgttg

SEQ ID NO: 150487 - DNA, 120 bp, Artificial Sequence
  ENSG00000105649_6 (sequence is synthesized)
gcaggtgccaccgcaccaggactgcgcctgctgagagccatcccactccctttcccctcttccctgtcttccccaccttcccccaactacccgggcctgacccggcccctaccagccacg

SEQ ID NO: 150488 - DNA, 120 bp, Artificial Sequence
  ENSG00000105649_7 (sequence is synthesized)
ggcacaagacccctgctcctgacttagcccgtcacccttatttattattgtagctatttatttatttattgaagatgtcccccaggggcccaggctcccctgcccgccccaagccctgcc

SEQ ID NO: 150489 - DNA, 120 bp, Artificial Sequence
  ENSG00000105649_8 (sequence is synthesized)
cctcctgtacatatagccctttccccactcagctgtggtgtctcgtggccccgtgaactcaccgctcaccctcctgaaccccccccccccgcctttttttaaaattcacccccatccaca

SEQ ID NO: 150490 - DNA, 120 bp, Artificial Sequence
  ENSG00000105649_9 (sequence is synthesized)
gttgtcagttgtgaagaggggccagatgacaccctaaagcaggctgatcgggcaatgggaggtggccaggcctgccagcccctcggctctgccgcggtgggccgaggccgctgttggggg

SEQ ID NO: 150491 - DNA, 120 bp, Artificial Sequence
  ENSG00000105649_10 (sequence is synthesized)
tttccctgtgtggaccatggggatcagagtctggcctgccaggctcctctccccgttttctcttttggtgggggggtgtgctgtgggtattcaccaccctgggaccccccccccccccgc

SEQ ID NO: 150492 - DNA, 120 bp, Artificial Sequence
  ENSG00000105649_11 (sequence is synthesized)
ccaccagacctgttctgacctcatgagtgtcaaacgtgccccccagttccttaggagatgtcatgacaacactacacgcacccaataaagcgaatggaccatccatgtgtgtccctgtga

SEQ ID NO: 150493 - DNA, 120 bp, Artificial Sequence
  ENSG00000105649_12 (sequence is synthesized)
gagccgctgctgccgccgccgccgcgcagccccacatcaacgcaccggggtcctgtcaccgccaccgccaaaaaagtcaccgccgctagggtcgccgttgcatcggtgcagggcaagggt

SEQ ID NO: 150494 - DNA, 120 bp, Artificial Sequence
  ENSG00000105649_13 (sequence is synthesized)
gtcctccatacaccggccgttttctggagcccttgccatcttctgcctgggcttgggcacatgaggatggagagagcccccctcacggctctgctacacccggtatccccagatggcatc

SEQ ID NO: 150495 - DNA, 120 bp, Artificial Sequence
  ENSG00000105649_14 (sequence is synthesized)
aagcagccccaacctcgtctatctctttcctgactggagtcattcacttacacactgggcatttatcagtaaggtgcccactgtgtaccggggcagaaacagcacctgtgttctcccata

SEQ ID NO: 150496 - DNA, 120 bp, Artificial Sequence
  ENSG00000105650_0 (sequence is synthesized)
aaagctacctttttctctttcaacacggtgcgagggacaccgtctcggccccgggggtctcctgagaccctgtctccctgccctccatttagcagcgatcagtggacaatttctgtcttc

SEQ ID NO: 150497 - DNA, 120 bp, Artificial Sequence
  ENSG00000105650_1 (sequence is synthesized)
tccactccaagtccttgtcttggttcttttccatgcagcgctataggggacggcagacggttttcggggctggtgtgttgggggggggtctcttcagcccctagcttcaacaccccctca

SEQ ID NO: 150498 - DNA, 120 bp, Artificial Sequence
  ENSG00000105650_2 (sequence is synthesized)
ccacgttcttctcccctgttctacccttcagcaccatctgggcatcgacagctcctcggtgtcggccccaccttgagccccagttccaccttctaccgcttcagcacctccggcgcggac

SEQ ID NO: 150499 - DNA, 120 bp, Artificial Sequence
  ENSG00000105650_3 (sequence is synthesized)
agctcctcgctgtcgcctccactcccggccctgggccggacccgggagcagacgctcctcggcgcccgctcacggggacgagtcctgctccctgctatcccagacccctttctctggcgc

SEQ ID NO: 150500 - DNA, 120 bp, Artificial Sequence
  ENSG00000105650_4 (sequence is synthesized)
atggagaacctgggggtcggcgaaggggcagaggcttgcagcaggttgagtcgctctcgcggccgccacagcatgaccagagccccgaagcacctgtggcggcaaccccggcgccccatc

SEQ ID NO: 150501 - DNA, 120 bp, Artificial Sequence
  ENSG00000105650_5 (sequence is synthesized)
cgcatccaacagcgcttctattcggatccggacaagtccgcgggctgccgcgagagggacctgagcccgcggccggagctcaggaagtcgcggctctcctggcccgtttcctcctgcagg

SEQ ID NO: 150502 - DNA, 120 bp, Artificial Sequence
  ENSG00000105650_6 (sequence is synthesized)
cgctttgacctggaaaatgggctctcgtgtgggaggagggccctggaccctcagtccagccctggcctgggccggattatgcaggctccagtcccgcacagccagcggcgcgagtccttc

SEQ ID NO: 150503 - DNA, 120 bp, Artificial Sequence
  ENSG00000105650_7 (sequence is synthesized)
ctgtaccgctcagatagcgactatgaactctcgcccaaggccatgtctcggaactcctctgtggccagcgacctacatggagaggacatgattgtgacgccctttgcccaggtcctggcc

SEQ ID NO: 150504 - DNA, 120 bp, Artificial Sequence
  ENSG00000105650_8 (sequence is synthesized)
agtctgcggaccgttcggagcaacgtggcggcccttgcccgccagcaatgcctaggagcagccaagcagggacccgtcggaaacccttcatccagcaatcagctccctcctgcagaggac

SEQ ID NO: 150505 - DNA, 120 bp, Artificial Sequence
  ENSG00000105650_9 (sequence is synthesized)
acggggcagaagctggcattggagacgctagacgagctggactggtgcctggatcagttggagacgctgcagacccggcactcggtgggggagatggcctccaacaagttcaagcggatc

SEQ ID NO: 150506 - DNA, 120 bp, Artificial Sequence
  ENSG00000105650_10 (sequence is synthesized)
ctgaaccgggagttgacccacctgtccgaaaccagccgctccgggaaccaggtgtccgagtacatctcccggaccttcctggaccagcagaccgaggtggagctgcccaaggtgaccgct

SEQ ID NO: 150507 - DNA, 120 bp, Artificial Sequence
  ENSG00000105650_11 (sequence is synthesized)
gaggaggccccacagcccatgtcccggatcagtggcctacatgggctctgccacagtgccagcctctcctcagccactgtcccacgctttggggtccagactgaccaggaggagcaactg

SEQ ID NO: 150508 - DNA, 120 bp, Artificial Sequence
  ENSG00000105650_12 (sequence is synthesized)
cgggacctgctgaagacattccagatcccagcagacacactggccacctacctgctgatgctggaaggtcactaccacgccaatgtggcctaccacaacagcctacatgccgccgacgtg

SEQ ID NO: 150509 - DNA, 120 bp, Artificial Sequence
  ENSG00000105650_13 (sequence is synthesized)
gcccagtccacgcatgtgctgctggctacgcccgccctcgaggctgtgttcacagacttggaaatcctggctgccctctttgcaagcgccatccacgacgtggaccatcctggggtctcc

SEQ ID NO: 150510 - DNA, 120 bp, Artificial Sequence
  ENSG00000105650_14 (sequence is synthesized)
aaccagtttctgattaacaccaactcagagctggcgcttatgtacaacgacgcctcggtgctggagaaccatcacctggctgtgggcttcaagctgctgcaggcagagaactgcgatatc

SEQ ID NO: 150511 - DNA, 120 bp, Artificial Sequence
  ENSG00000105650_15 (sequence is synthesized)
ttccagaacctcagcgccaagcagcgactgagtctgcgcaggatggtcattgacatggtgctggccacagacatgtccaaacacatgaacctcctggccgacctcaagaccatggtggag

SEQ ID NO: 150512 - DNA, 120 bp, Artificial Sequence
  ENSG00000105650_16 (sequence is synthesized)
accaagaaggtgacaagcctcggtgtcctcctcctggacaactattccgaccgaatccaggtcttgcagaacctggtgcactgtgctgatctgagcaaccccaccaagccgctgcccctg

SEQ ID NO: 150513 - DNA, 120 bp, Artificial Sequence
  ENSG00000105650_17 (sequence is synthesized)
taccgccagtggacggaccgcatcatggccgagttcttccagcagggagaccgcgagcgtgagtcgggcctggacatcagtcccatgtgtgacaagcatacggcctcagtggagaagtcc

SEQ ID NO: 150514 - DNA, 120 bp, Artificial Sequence
  ENSG00000105650_18 (sequence is synthesized)
caggtgggtttcattgactacattgctcacccactgtgggagacttgggctgacctggtccacccagatgcacaggacctgctggacacgctggaggacaatcgagagtggtaccagagc

SEQ ID NO: 150515 - DNA, 120 bp, Artificial Sequence
  ENSG00000105650_19 (sequence is synthesized)
aagatcccccgaagtccctcagacctcaccaaccccgagcgggacgggcctgacagattccagtttgaactgactctggaggaggcagaggaagaggatgaggaggaagaagaggagggg

SEQ ID NO: 150516 - DNA, 120 bp, Artificial Sequence
  ENSG00000105650_20 (sequence is synthesized)
gaagagacagctttagccaaagaggccttggagttgcctgacactgaactcctgtcccctgaagccggcccagaccctggggacttacccctcgacaaccagaggacttagggccagccc

SEQ ID NO: 150517 - DNA, 120 bp, Artificial Sequence
  ENSG00000105650_21 (sequence is synthesized)
tgcgtgaactgcaggggcaatggatggtaaagccctttggctcttggcaggcagactttccaggaagaggctccatgtggctcctgcttcactttcccacccatttagggagacaatcaa

SEQ ID NO: 150518 - DNA, 120 bp, Artificial Sequence
  ENSG00000105650_22 (sequence is synthesized)
gctcttagttataggtggctcccagggtctaattggaggcacctggctggggtccactctgaccctagacttgcctaaaagagctctctaaggggcagcctcttacgatgccctggtgtc

SEQ ID NO: 150519 - DNA, 120 bp, Artificial Sequence
  ENSG00000105650_23 (sequence is synthesized)
tttctcctgggcttctatccctgtgaggagaggtgctgtctgctggagcctctagtccaccctctccagtggtcactcttgagtcacatctgtcacttaattatttccttctttatcaaa

SEQ ID NO: 150520 - DNA, 120 bp, Artificial Sequence
  ENSG00000105650_24 (sequence is synthesized)
ccaagcggctctctgcaagagcatggaaatgtgagtggggaaaattttcagcaccaaagcttcactcatacccagttttgtttctgaaactacggtagggggcaggaagaggagcagaaa

SEQ ID NO: 150521 - DNA, 89 bp, Artificial Sequence
  ENSG00000105650_25 (sequence is synthesized)
tttctgaaactacggtagggggcaggaagaggagcagaaaagaagggctgggcaaggcatagtggcttatgcctgtaatcccggtaagc

SEQ ID NO: 150522 - DNA, 90 bp, Artificial Sequence
  ENSG00000105650_26 (sequence is synthesized)
aattagccaggcatggtggtgtgcacctgagaatcccagctactcagaaggttgagacaaaggaagagagctatgactgcatcactgcac

SEQ ID NO: 150523 - DNA, 88 bp, Artificial Sequence
  ENSG00000105650_27 (sequence is synthesized)
tcctgtctaaaaataaaaagaaaagagaaggaaaggaaagagacggggctctgaggccgagcacagtggcccatgcctataatcccag

SEQ ID NO: 150524 - DNA, 77 bp, Artificial Sequence
  ENSG00000105650_28 (sequence is synthesized)
aaaaaaaaaaaagccgggccgggggtggatcgcctgagatcaggagttcaaaatcagcctggccaacatagtgaaac

SEQ ID NO: 150525 - DNA, 64 bp, Artificial Sequence
  ENSG00000105650_29 (sequence is synthesized)
tttgggaggctgagtgggggtggatcgcctgagatcaggagttcaaaggctgggtgcggcggct

SEQ ID NO: 150526 - DNA, 120 bp, Artificial Sequence
  ENSG00000105650_30 (sequence is synthesized)
gcctgggcaacgacaacaacaataaaaagagggggctctgtgcccggcatgtctctgaagactgattgaacctatgcaccagttgttgctttaagtcgctttattttctgtctttggtgt

SEQ ID NO: 150527 - DNA, 120 bp, Artificial Sequence
  ENSG00000105650_31 (sequence is synthesized)
ctctggatgtaggagccccctgctttctctgtccgcagaactccatactgggtcccctacgtgttcctccttccctaggacagcaacaaaaacacacaattttccctctctagcaggtct

SEQ ID NO: 150528 - DNA, 120 bp, Artificial Sequence
  ENSG00000105650_32 (sequence is synthesized)
ctaagtctcctgattcctgaaactgcctcagactccccctagagggagggaggcccctgaggctttcttgccatcatagcctcttctgggcctcagtttcccctctgtaacctgatccta

SEQ ID NO: 150529 - DNA, 120 bp, Artificial Sequence
  ENSG00000105650_33 (sequence is synthesized)
gtacttggataaactccgacgaggtgtggggggttgttgtctgtgacctccctgaaatatcttagacatttggggtactgagcatttatctggggttaaataaaatctttacatcttaag

SEQ ID NO: 150530 - DNA, 120 bp, Artificial Sequence
  ENSG00000105650_34 (sequence is synthesized)
gcctccacgcagtcctggcgatgcagggcccccccgcgcccgccccggtccccgggcccggctcccctcggggatccccgcgcggctcccccgggctcttcaggaagcttttggtgaatc

SEQ ID NO: 150531 - DNA, 120 bp, Artificial Sequence
  ENSG00000105650_35 (sequence is synthesized)
ttcgacgtgatcagacccaactcagacccggtcatacttggaccgaatgctgccaaatcccccacctctacccagatctgagcctacgcggggtgccgacccagctcgtggacggggata

SEQ ID NO: 150532 - DNA, 120 bp, Artificial Sequence
  ENSG00000105650_36 (sequence is synthesized)
cggtgacctttgacccaaaagtcttggccgggaccagccggacactggccctcggccgggagctccgagtctcaggcggtcccggttgtcttcctgtcggtgccgcttccgcctgccctt

SEQ ID NO: 150533 - DNA, 120 bp, Artificial Sequence
  ENSG00000105650_37 (sequence is synthesized)
ggaagacctgaattgagggggttttcgaggcagggcgttcgggagtcccaggctgagcgcgcgcctgcgcccggcagctgcttgcgctgcatcctctaagcactcggtccacccctctgg

SEQ ID NO: 150534 - DNA, 120 bp, Artificial Sequence
  ENSG00000105650_38 (sequence is synthesized)
gttcgaatccctgcctttccagaaacgactgtgacctcgtggggagggatgggggcaaggctggggttcggagtggggcttgtgggcgccgactgtggctggcatcctgcgcttggtccg

SEQ ID NO: 150535 - DNA, 120 bp, Artificial Sequence
  ENSG00000105650_39 (sequence is synthesized)
aatgcctaggagcagccaagtaggtagagggcggggcggggcgggggcggggccggcagagacaaggtgggcggaaagcgggctgcaaattgaggctggggctccggcgcctccaggtgg

SEQ ID NO: 150536 - DNA, 120 bp, Artificial Sequence
  ENSG00000105650_40 (sequence is synthesized)
gtttgaggggcggggcctggtggacttgggggcggggcgagatgggcggagcagccacgcctgaggctgctgtaccgcaggcagggacccgtcggaaacccttcatccagcaatcagctc

SEQ ID NO: 150537 - DNA, 120 bp, Artificial Sequence
  ENSG00000105650_41 (sequence is synthesized)
cctcctgcaggtaaagtacctgttccttccctcccccgctgaggacagctgggagcttcctttccatagtgacctccccagtccatgagccccttatactggggctaattgtagccccgc

SEQ ID NO: 150538 - DNA, 120 bp, Artificial Sequence
  ENSG00000105650_42 (sequence is synthesized)
ccctgcaaaaacaataacgccctcggggatggaccccaccacactcatattacagatgaggaggctgaggcccagagatctcatggtcacacaggcactcggggaacagatctggaactt

SEQ ID NO: 150539 - DNA, 120 bp, Artificial Sequence
  ENSG00000105650_43 (sequence is synthesized)
gggtccaggagtcctgggtggcccccgtgggaacagtttcagggtccagatgaagagacgaagtcgcgagaggcgtggggtccctgagcgggggggttgggcaggcccctgactgcctcg

SEQ ID NO: 150540 - DNA, 73 bp, Artificial Sequence
  ENSG00000105650_44 (sequence is synthesized)
acctcggacagggtctttactccgaacttactttggttcctgtagaaagggaaataggttgattctggggttt

SEQ ID NO: 150541 - DNA, 120 bp, Artificial Sequence
  ENSG00000105650_45 (sequence is synthesized)
ctggggtttggcaaaattcaggtcctgaggccaggccccagcaggtgaaatcggcttctctgagcttcaccctggcccatccgcagaccagcagaccgaggtggagctgcccaaggtgac

SEQ ID NO: 150542 - DNA, 120 bp, Artificial Sequence
  ENSG00000105650_46 (sequence is synthesized)
accccctccggatccggcctctccttcccaccgcctaccacctcctcccaacaggtcctggccagtctgcggaccgttcggagcaacgtggcggcccttgcccgccagcaatgcctagga

SEQ ID NO: 150543 - DNA, 120 bp, Artificial Sequence
  ENSG00000105655_0 (sequence is synthesized)
ccgcgctgtccgccgccgctgcctgagtcgactctgcgccgcccgccgcgatggaggccgccgcccagttcttcgtcgagagcccggacgtggtctacggccccgaggccatcgaggcgc

SEQ ID NO: 150544 - DNA, 120 bp, Artificial Sequence
  ENSG00000105655_1 (sequence is synthesized)
aatacgagtaccggacgacgcgcgtcagccgcgagggtggcgttctcaaggtgcaccccacgtccacgcgcttcaccttccggaccgcccggcaggtgccccggctcggggtcatgcttg

SEQ ID NO: 150545 - DNA, 120 bp, Artificial Sequence
  ENSG00000105655_2 (sequence is synthesized)
tcggctggggcgggaacaacggctccacactcaccgccgcggtgctggccaatcgactgcgtttgtcctggcccacgcgcagcggccgcaaggaggccaactactacggctcgctgactc

SEQ ID NO: 150546 - DNA, 120 bp, Artificial Sequence
  ENSG00000105655_3 (sequence is synthesized)
aggcgggcaccgtgagcctgggcctggacgccgagggccaggaggtgttcgtacccttcagcgcggtgctgcccatggtggcgcccaacgacctcgtgttcgatggctgggacatctcgt

SEQ ID NO: 150547 - DNA, 120 bp, Artificial Sequence
  ENSG00000105655_4 (sequence is synthesized)
cgctgaacctggccgaggcgatgcggcgcgcgaaggtgctggactgggggctgcaggagcaactgtggccgcacatggaggccctgcggccccggccttctgtttacatccccgaattca

SEQ ID NO: 150548 - DNA, 120 bp, Artificial Sequence
  ENSG00000105655_5 (sequence is synthesized)
tcgcggccaaccagagcgcgcgcgcggacaacctcatcccaggctcgcgtgcgcagcagctggagcagatccgcagggacatccgagacttccggtctagcgcggggctggacaaagtca

SEQ ID NO: 150549 - DNA, 120 bp, Artificial Sequence
  ENSG00000105655_6 (sequence is synthesized)
tagtgctgtggacggcgaacacggagcgcttctgtgaggtgattccaggcctcaacgacacagccgagaacctgctgcgcaccattgagctcggtctggaggtgtcgccctccacgctct

SEQ ID NO: 150550 - DNA, 120 bp, Artificial Sequence
  ENSG00000105655_7 (sequence is synthesized)
tcgccgtggccagcatcctggagggctgtgccttcctcaatgggtctccgcagaacaccctggtgcccggagctcttgagctcgcgtggcagcaccgggtttttgtgggcggagatgact

SEQ ID NO: 150551 - DNA, 120 bp, Artificial Sequence
  ENSG00000105655_8 (sequence is synthesized)
tcaagtcaggccagaccaaagtcaagtccgtgcttgtggacttcctcattggctccggcctcaagaccatgtccatcgtgagttacaaccacctgggcaacaacgatggggagaacctat

SEQ ID NO: 150552 - DNA, 120 bp, Artificial Sequence
  ENSG00000105655_9 (sequence is synthesized)
gaagagcctgaccactgcgtggtcatcaagtatgtgccgtacgtgggtgacagcaagcgcgcgctggatgagtatacctcggagctgatgctgggcggaaccaacacactggtgctgcac

SEQ ID NO: 150553 - DNA, 120 bp, Artificial Sequence
  ENSG00000105655_10 (sequence is synthesized)
aacacgtgtgaggactcgctgctggccgcacccatcatgctggacctagcgctgctgaccgagctgtgccagcgcgtgagcttctgcactgacatggaccccgagccgcagaccttccac

SEQ ID NO: 150554 - DNA, 120 bp, Artificial Sequence
  ENSG00000105655_11 (sequence is synthesized)
cccgtgctgtccctgctcagcttcctcttcaaggcgccactagtgccgcccggcagcccggtggtcaatgcgcttttccgccagcgcagctgcatcgagaacatcctcagggcctgcgtg

SEQ ID NO: 150555 - DNA, 120 bp, Artificial Sequence
  ENSG00000105655_12 (sequence is synthesized)
gggctcccgccacagaaccacatgctcctggaacacaaaatggagcgcccagggcccagcctcaagcgagttggacccgtggctgccacctaccctatgttgaacaagaaaggaccggta

SEQ ID NO: 150556 - DNA, 120 bp, Artificial Sequence
  ENSG00000105655_13 (sequence is synthesized)
cccgctgccaccaatggctgcaccggtgatgccaatgggcatctgcaagaggagcccccaatgcccaccacctgaggccccggtcacacagtttctcggctcttcctccccgctgccccc

SEQ ID NO: 150557 - DNA, 120 bp, Artificial Sequence
  ENSG00000105655_14 (sequence is synthesized)
cacgaccctaccttgaaggcccccacaaataaaggcgctgccactcagccctccttccacctggggttcttggggcctgtgacctgactctgcctccctctacttccccgactcttgagc

SEQ ID NO: 150558 - DNA, 120 bp, Artificial Sequence
  ENSG00000105655_15 (sequence is synthesized)
gcccagcttcagtcccatcccctctgcccatggtcatcaccccaactcccagggagagcccagaacctggagcctcgctctgcccccagttctcaaaggtggggctagatgggggcgggg

SEQ ID NO: 150559 - DNA, 120 bp, Artificial Sequence
  ENSG00000105655_16 (sequence is synthesized)
acggaacaagaccacagggtggagagtgtggtggcagaaggccaaagagggaatctgagacaagctaccaaaaaccaaaaccagcttccatttatttatgggccccaccccctgacgtcc

SEQ ID NO: 150560 - DNA, 120 bp, Artificial Sequence
  ENSG00000105655_17 (sequence is synthesized)
tggggagaggggccccccaaagagcctttctctctgggacaaaatacaaatggcaggaagggtccatacagaaaagaacgtctctgaggtccttgcgtttttaataaaatggtaagagtc

SEQ ID NO: 150561 - DNA, 120 bp, Artificial Sequence
  ENSG00000105655_18 (sequence is synthesized)
ttttctccggaggtcgcgcgcccgagagcccgcgctgtccgccgccgctgcctgagtcgactctgcgccggtgagtgcggttcggggcagggacggcctccgtggggacccaggctggct

SEQ ID NO: 150562 - DNA, 120 bp, Artificial Sequence
  ENSG00000105655_19 (sequence is synthesized)
gggaggcagggcttggccaccgcccccatctcctgacccacccgccccgcaggactcgctgctggccgcacccatcatgctggacctagcgctgctgaccgagctgtgccagcgcgtgag

SEQ ID NO: 150563 - DNA, 120 bp, Artificial Sequence
  ENSG00000105655_20 (sequence is synthesized)
gggagtcttacaggggcggagcttaaggtgccggaggtctcaggggaggggcctgggggcagcggcttccgtcctggctgtgagcctggaactgaaaaatgcccgaaagtggggcggggc

SEQ ID NO: 150564 - DNA, 120 bp, Artificial Sequence
  ENSG00000105655_21 (sequence is synthesized)
ccccaccccgcgaatccaggcctcacttgacacccggggaactgagtagcccaggcctctgtgagtccgagagtatgtacaaccaacttccctacaccctctccatcctccccacaccct

SEQ ID NO: 150565 - DNA, 120 bp, Artificial Sequence
  ENSG00000105656_0 (sequence is synthesized)
agagatggtcgcaagatggcggcgctgaaggaggataggagctacgggctgtcgtgcgggcgggttagcgacggcagcaaggtgtcggtgttccacgtgaagctcaccgacagtgccctg

SEQ ID NO: 150566 - DNA, 120 bp, Artificial Sequence
  ENSG00000105656_1 (sequence is synthesized)
agggccttcgagagctaccgcgccagacaggattctgtttcactgaggccatctatccgatttcaaggaagccaagggcacatctccatcccccagcctgactgccccgcagaggcgcgg

SEQ ID NO: 150567 - DNA, 120 bp, Artificial Sequence
  ENSG00000105656_2 (sequence is synthesized)
acgttctccttctacctctccaacatcggccgcgacaacccccagggcagcttcgactgcatccagcagtatgtctccagtcatggggaagttcacctggactgcctgggcagcatacag

SEQ ID NO: 150568 - DNA, 120 bp, Artificial Sequence
  ENSG00000105656_3 (sequence is synthesized)
gacaagatcacggtgtgtgccaccgacgactcctaccagaaggcgcggcagagcatggcccaggcggaggaggagacgcggagccgaagtgccattgtcatcaaggctggaggccgctac

SEQ ID NO: 150569 - DNA, 120 bp, Artificial Sequence
  ENSG00000105656_4 (sequence is synthesized)
ctgggcaagaaggttcagtttcggaaaccagccccaggtgcaacagacgcggtgccctcccggaagcgggcaacccccatcaacttggcgagtgccatcaggaagagtggtgccagtgcc

SEQ ID NO: 150570 - DNA, 120 bp, Artificial Sequence
  ENSG00000105656_5 (sequence is synthesized)
gtgagtgggggcagcggggtgtcccagaggcccttccgtgaccgagtgctgcacctcctggcactacggccctaccgcaaggctgagctgctgctgcgactgcagaaggacggcctgacg

SEQ ID NO: 150571 - DNA, 120 bp, Artificial Sequence
  ENSG00000105656_6 (sequence is synthesized)
caggcggacaaggacgcgctggatggcctcctccagcaggtggccaacatgagtgctaaggacggcacgtgtacactgcaggactgcatgtacaaggatgtgcagaaggactggcctggc

SEQ ID NO: 150572 - DNA, 120 bp, Artificial Sequence
  ENSG00000105656_7 (sequence is synthesized)
tactcggagggggaccagcagctgctgaagcgggtgctcgtccggaagctgtgccagccacagagcactggcagcctccttggagaccctgctgcctccagccccccaggcgagcgtggg

SEQ ID NO: 150573 - DNA, 120 bp, Artificial Sequence
  ENSG00000105656_8 (sequence is synthesized)
cgctcggcctcgcccccacagaagcggctgcagcctcctgatttcatcgaccccctagccaacaagaaaccccggatatcgcacttcactcagagagctcagcctgccgtcaacgggaag

SEQ ID NO: 150574 - DNA, 120 bp, Artificial Sequence
  ENSG00000105656_9 (sequence is synthesized)
ctgggcgtgcccaatggccgtgaggccttgctgcccaccccgggcccaccagccagcacggacaccctcagctccagcactcacctgcccccgcggctggagcccccgagggcccacgac

SEQ ID NO: 150575 - DNA, 120 bp, Artificial Sequence
  ENSG00000105656_10 (sequence is synthesized)
cccctggccgatgtcagcaatgacctgggccacagcggccgagactgtgagcacggagaggcggctgccccagcccccactgtgcgcctcggcctgcccctgctgacggactgtgcccag

SEQ ID NO: 150576 - DNA, 120 bp, Artificial Sequence
  ENSG00000105656_11 (sequence is synthesized)
cccagcaggccacacggcagcccctcgcgcagcaagcccaagaagaagtccaagaagcacaaagacaaggagagggcggctgaggacaagccccgggcccagcttccagactgtgcacct

SEQ ID NO: 150577 - DNA, 120 bp, Artificial Sequence
  ENSG00000105656_12 (sequence is synthesized)
gccacccatgccacccccggagccccagcagacaccccaggtttaaacggaacctgcagcgtttccagtgttcccacgtccacgtcggagacgcctgactacttgctgaagtacgcagcc

SEQ ID NO: 150578 - DNA, 120 bp, Artificial Sequence
  ENSG00000105656_13 (sequence is synthesized)
atctcctcttcggagcagcgccagagctacaagaacgacttcaatgccgagtacagcgagtaccgcgacctgcacgcccgcattgagcgcatcacgcggcggttcacccagctcgacgcc

SEQ ID NO: 150579 - DNA, 120 bp, Artificial Sequence
  ENSG00000105656_14 (sequence is synthesized)
cagctccggcagctctcccagggctccgaggagtatgagactactcgagggcagattttgcaggaatatcgaaaaatcaaaaagaccaacaccaactacagccaggagaagcaccgctgc

SEQ ID NO: 150580 - DNA, 120 bp, Artificial Sequence
  ENSG00000105656_15 (sequence is synthesized)
gagtacctgcacagcaagctggcccacatcaagaggctcatcgccgagtacgaccagcggcagctgcaggcttggccctagccgccctccccgatggcggggatctgggagggtcggggg

SEQ ID NO: 150581 - DNA, 120 bp, Artificial Sequence
  ENSG00000105656_16 (sequence is synthesized)
ggtgagagaggatttatttaaaaaaataaacccgaggaagatgctcatctgagccagcaccgccggctttcagggcagcccctgcagacgtctggccctggcgggtggctgcaagcccac

SEQ ID NO: 150582 - DNA, 120 bp, Artificial Sequence
  ENSG00000105656_17 (sequence is synthesized)
ctcggccctccctgcgcttcctgagcagtccctgcttatgatgggctccccaggaagcccactgcctcctccctggctgcagcctccggggttcagcctcctgtctcgccagaagactcc

SEQ ID NO: 150583 - DNA, 120 bp, Artificial Sequence
  ENSG00000105656_18 (sequence is synthesized)
taggcccttggggtggcgcgcctgccttttctagttttatacaaagacagccacttttagctactgctaatgagacttgagtctatttttgtacaaaagagaagcaaaatcttttttcta

SEQ ID NO: 150584 - DNA, 120 bp, Artificial Sequence
  ENSG00000105656_19 (sequence is synthesized)
aacctgtgcctccctctcctcggacacccagggtctagccgctgccctgggtcctgcctgcagtattacagaggtcgtcgaaaggtgcagctgcgttctgagggcgtggggaatgggcag

SEQ ID NO: 150585 - DNA, 120 bp, Artificial Sequence
  ENSG00000105656_20 (sequence is synthesized)
gtggcctctgctggtctctggctctacgtttaggcacccctttccccagcctctcctccttgggcagggtctctgctccagcaagcaaacagggtggcccaggtggctattttgagaact

SEQ ID NO: 150586 - DNA, 120 bp, Artificial Sequence
  ENSG00000105656_21 (sequence is synthesized)
ccagctggtgcccccagacagctgctcagagccaagggggcagagggctttcagcgcccccaggcctgccctgctatttcaggccctcagctgtcgggggccactgtgtttctgtgctcc

SEQ ID NO: 150587 - DNA, 120 bp, Artificial Sequence
  ENSG00000105656_22 (sequence is synthesized)
aagttgagactcggccgcagcggcgtcagacttttctttgcgatgtcctcggtttcccatttgttgctgctgctgctcattccacactgttgagaccttgtggtctcgatgctgctggcc

SEQ ID NO: 150588 - DNA, 120 bp, Artificial Sequence
  ENSG00000105656_23 (sequence is synthesized)
tccctccgtccctctgtccacttgtgggtcctggggtcgtcttagcagagccaccgccaaggtttgcactcagggaggggctgatggagggctgggcgccatggggtcagggaggcccca

SEQ ID NO: 150589 - DNA, 120 bp, Artificial Sequence
  ENSG00000105656_24 (sequence is synthesized)
gggacccatgggcagagctggggagccaggaggatgggtctgcctgctctgggggtgcaggctctgcagacaccccaattgctgctctgttgctgtgcctagtctagtgtcccccaaagc

SEQ ID NO: 150590 - DNA, 120 bp, Artificial Sequence
  ENSG00000105656_25 (sequence is synthesized)
atcggggggccacgcaagtgtgggtgtgtgagtgtgcgtatgtggggaccccccagggcatggtggggtctgaggcgtgtgttcccatttagggctgaatgaagccatgacttggaaagg

SEQ ID NO: 150591 - DNA, 120 bp, Artificial Sequence
  ENSG00000105656_26 (sequence is synthesized)
tggtggggggtggatggcggctgtgactcagggcccagggatcacatgggggtcactgctgccatcagcagtcaggcagggagaacagaaatgcaaaaatacagatgtctatttttctaa

SEQ ID NO: 150592 - DNA, 120 bp, Artificial Sequence
  ENSG00000105656_27 (sequence is synthesized)
actggggggtggaggggtgcctcctgacagcttccaaagagctgactgtggagggcccacagtgtatcccacccctgcccgagagtctctctcctttgggacccccgggttcccagagct

SEQ ID NO: 150593 - DNA, 120 bp, Artificial Sequence
  ENSG00000105656_28 (sequence is synthesized)
ccgaggaaactgatccttcatgtttcaatagctgttgttgtttttctctttgggccgggccgggccggggaagggccgagcaggctccaggaggcctccagagtcagctggaccttgctg

SEQ ID NO: 150594 - DNA, 120 bp, Artificial Sequence
  ENSG00000105656_29 (sequence is synthesized)
tgtcgcccgcaggcagccctgcagacaccggtgaggtgggatgatttcaggaggtcccagcccgggactgcccgcccctctgccctgggaaccagtccaaggggctgtcagttgaatttg

SEQ ID NO: 150595 - DNA, 120 bp, Artificial Sequence
  ENSG00000105656_30 (sequence is synthesized)
cctttttgttgttgttgttgtttttgttgtttatttgttctccttttaaggaattatgaagctaagaaaagttttgtgttttgggggttggtggacaaagttctagctgattaaatatgg

SEQ ID NO: 150596 - DNA, 120 bp, Artificial Sequence
  ENSG00000105656_31 (sequence is synthesized)
tctaacttattgatactatttttttttcttttaatgttgtactgtggagaaaaactattttgagccatggggttggtgtttacaagaactttccacttttgccaaaatgttacaattgaa

SEQ ID NO: 150597 - DNA, 120 bp, Artificial Sequence
  ENSG00000105656_32 (sequence is synthesized)
aggcatctatctgcgtcttcagtttcctgatattttcttaaaagatctagtgtcctttttgtacactaaacaggtgaatgctgacttttttcattctccaataaatttcactgaactgaa

SEQ ID NO: 150598 - DNA, 120 bp, Artificial Sequence
  ENSG00000105656_33 (sequence is synthesized)
ttacttggccttgtccttgaggctgccccaccctcccatgcccccttctcagagcacctgggaccactcaatttgggtttcctgtaggcggggacacattctgttttctcaaaattttgt

SEQ ID NO: 150599 - DNA, 120 bp, Artificial Sequence
  ENSG00000105656_34 (sequence is synthesized)
aactcgccgtgtgtgtgtcagagaatgttgctcctgtgccctgagtcaacaaagacggcccctgtgagctcaagggcagttgggaaggtgtagcgaacatcctgtaaaacgtcccatctt

SEQ ID NO: 150600 - DNA, 120 bp, Artificial Sequence
  ENSG00000105656_35 (sequence is synthesized)
gccagggcccacttgggcgcgcaccatcgccaccacgagcttggtggccccagagtctggcccttccccaggcagcgcttctccccctggtgcactccatgcagcaaccccatggttctg

SEQ ID NO: 150601 - DNA, 120 bp, Artificial Sequence
  ENSG00000105656_36 (sequence is synthesized)
tcgctgggtacagcagcagctcatggcagtgtttgggccctgtctgccaccatgcaaggctgggttctaggcccccaggatagccccttggctggggccacaccaggacgtgtcgggtgc

SEQ ID NO: 150602 - DNA, 120 bp, Artificial Sequence
  ENSG00000105656_37 (sequence is synthesized)
acgtcacaggctgcttgggcaatgggcggctctcctctcccagtggctcccttcatgcagcgatgtgcacctagcttccactctgatagggcaggggcccccaacccccagcactggact

SEQ ID NO: 150603 - DNA, 120 bp, Artificial Sequence
  ENSG00000105656_38 (sequence is synthesized)
ggttaggaactgcccacacagcaggaggtgagctgtgggtgagtgagcacgaccacctgagctctgcctcctgtcagctgagcctgttattagattcttacaggagcgcgaaccctattg

SEQ ID NO: 150604 - DNA, 120 bp, Artificial Sequence
  ENSG00000105662_0 (sequence is synthesized)
gaggaggaggtggcggcgagaagatggcgacttcgaacaatccgcggaaattcagcgagaagatcgcgctgcacaatcagaagcaggcggaggagacggcggccttcgaggaggtcatga

SEQ ID NO: 150605 - DNA, 120 bp, Artificial Sequence
  ENSG00000105662_1 (sequence is synthesized)
aggacctgagcctgacgcgggccgcgcggctccagctccagaaatcccagtacctgcaactgggccccagccgaggccagtactatggcgggtccctgcccaacgtgaaccagatcggga

SEQ ID NO: 150606 - DNA, 120 bp, Artificial Sequence
  ENSG00000105662_2 (sequence is synthesized)
gtggcaccatggacctgcccttccagacccccttccaatcctcgggcctggacaccagccggaccacccggcaccatgggctggtggacagggtgtaccgggagcgtggccggctcggct

SEQ ID NO: 150607 - DNA, 120 bp, Artificial Sequence
  ENSG00000105662_3 (sequence is synthesized)
ccccacaccgccggcccctgtcagtggacaaacacggacggcaggccgacagctgcccctatggcaccatgtacctctcaccacccgcggacaccagctggagaaggaccaattctgact

SEQ ID NO: 150608 - DNA, 120 bp, Artificial Sequence
  ENSG00000105662_4 (sequence is synthesized)
ccgccctgcaccagagcacaatgacgcccacgcagccagaatcctttagcagtgggtcccaggacgtgcaccagaaaagagtcttactgttaacagtcccaggaatggaagagaccacat

SEQ ID NO: 150609 - DNA, 120 bp, Artificial Sequence
  ENSG00000105662_5 (sequence is synthesized)
cagaggcagacaaaaacctttccaagcaagcatgggacaccaagaagacggggtccaggcccaagtcctgtgaggtccccggaatcaacatcttcccgtctgccgaccaggaaaacacta

SEQ ID NO: 150610 - DNA, 120 bp, Artificial Sequence
  ENSG00000105662_6 (sequence is synthesized)
cagccctgatccccgccacccacaacacaggggggtccctgcccgacctgaccaacatccacttcccctccccgctcccgaccccgctggaccccgaggagcccaccttccctgcactga

SEQ ID NO: 150611 - DNA, 120 bp, Artificial Sequence
  ENSG00000105662_7 (sequence is synthesized)
gcagctccagcagcaccggcaacctcgcggccaacctgacgcacctgggcatcggtggcgccggccagggaatgagcacacctggctcctctccacagcaccgcccagctggcgtcagcc

SEQ ID NO: 150612 - DNA, 120 bp, Artificial Sequence
  ENSG00000105662_8 (sequence is synthesized)
ccctgtccctgagcacagaggcaaggcgtcagcaggcatcgcccaccctgtccccgctgtcacccatcactcaggctgtagccatggacgccctgtctctggagcagcagctgccctacg

SEQ ID NO: 150613 - DNA, 120 bp, Artificial Sequence
  ENSG00000105662_9 (sequence is synthesized)
cagcagctgccctacgccttcttcacccaggcgggctcccagcagccaccgccgcagccccagcccccgccgcctcctccacccgcgtcccagcagccaccacccccgccacccccacag

SEQ ID NO: 150614 - DNA, 120 bp, Artificial Sequence
  ENSG00000105662_10 (sequence is synthesized)
cccctggtggccccctgttgcccagcgccagcctgactcgtgggccacagccgcccccgcttgcagtcacggtaccgtcctctctcccccagtcccccccagagaaccctggccagccat

SEQ ID NO: 150615 - DNA, 120 bp, Artificial Sequence
  ENSG00000105662_11 (sequence is synthesized)
cgatggggatcgacatcgcctcggcgccggctctgcagcagtaccgcactagcgccggctccccggccaaccagtctcccacctcgccagtctccaatcaaggcttctccccagggagct

SEQ ID NO: 150616 - DNA, 120 bp, Artificial Sequence
  ENSG00000105662_12 (sequence is synthesized)
ccccgcaacacacttccaccctgggcagcgtgtttggggacgcgtactatgagcagcagatggcggccaggcaggccaatgctctgtcccaccagctggagcagttcaacatgatggaga

SEQ ID NO: 150617 - DNA, 120 bp, Artificial Sequence
  ENSG00000105662_13 (sequence is synthesized)
acgccatcagctccagcagcctgtacagcccgggctccacactcaactactcgcaggcggccatgatgggcctcacgggcagccacgggagcctgccggactcgcagcaactgggatacg

SEQ ID NO: 150618 - DNA, 120 bp, Artificial Sequence
  ENSG00000105662_14 (sequence is synthesized)
ccagccacagtggcatccccaacatcatcctcacagtgacaggagagtccccccccagcctctctaaagaactgaccagctctctggccggggtcggcgacgtcagcttcgactccgaca

SEQ ID NO: 150619 - DNA, 120 bp, Artificial Sequence
  ENSG00000105662_15 (sequence is synthesized)
gccagtttcccctggacgaactcaagatcgaccccctgaccctcgacggactgcacatgctcaacgaccccgacatggttctggccgacccagccaccgaggacaccttccggatggacc

SEQ ID NO: 150620 - DNA, 120 bp, Artificial Sequence
  ENSG00000105662_16 (sequence is synthesized)
gcctgtgagcgggcacgccggcaccctgccgctcagccgtcccgacggcgcctccccagcccggggacggccgtgctccgtccctcgccaacggccgagcttgtgattctgagcttgcaa

SEQ ID NO: 150621 - DNA, 120 bp, Artificial Sequence
  ENSG00000105662_17 (sequence is synthesized)
gattctgagcttgcaatgccgccaagcgccccccgccagcccgcccccggttgtccacctcccgcgaagcccaatcgcgaggccgcgagccgggccgtccacccacccgcccgcccaggg

SEQ ID NO: 150622 - DNA, 120 bp, Artificial Sequence
  ENSG00000105662_18 (sequence is synthesized)
ggccgtgagcctcccgcccctgcagaccctccctgcactggctccctcgcccccagccccggggcctgagccgtcccctgtaagatgcgggaagtgtcagctcccggcgtggcgggcagg

SEQ ID NO: 150623 - DNA, 120 bp, Artificial Sequence
  ENSG00000105662_19 (sequence is synthesized)
ctcaggggaggggcgcgcatggtccgccagggctgtgggccgtggcgcattttccgactgtttgtccagctctcactgccttccttggttcccggtcccccagcccatccgccatcccca

SEQ ID NO: 150624 - DNA, 120 bp, Artificial Sequence
  ENSG00000105662_20 (sequence is synthesized)
gcccgtggtcaggtagagagtgagccccacgccgccccagggaggaggcgccagagcgcggggcagacgcaaagtgaaataaacactattttgacggctgtcttttatatttctgagcac

SEQ ID NO: 150625 - DNA, 120 bp, Artificial Sequence
  ENSG00000105662_21 (sequence is synthesized)
acacagagccctggcgtccaccggggcaggcgcaaagtggacagagcatgcagggcggcggacccccccacgaccctcctcgccctgtctccatcccctcgaagccctgcctcaccgcag

SEQ ID NO: 150626 - DNA, 120 bp, Artificial Sequence
  ENSG00000105662_22 (sequence is synthesized)
gcaggcccatcggtggccacctttgccgggaagtgaccggaaggccccgtgaggggtcgaacgcggaggcaggggttacctcttggggctttacaatccgtggcccctcctgtcctgcac

SEQ ID NO: 150627 - DNA, 120 bp, Artificial Sequence
  ENSG00000105662_23 (sequence is synthesized)
tgtggtcaccggtcctgtcatagatgctgttaatttaaggtacaggcagaggtggccaggggagtttcattgtggtttttttttccttttagtttctagttacattttggttgtagatga

SEQ ID NO: 150628 - DNA, 120 bp, Artificial Sequence
  ENSG00000105662_24 (sequence is synthesized)
ctcgcttaatcttttaagccaacacttgcctgagagcatgtttttatttcagaaatccaactttacctattttttaagctaactggaaatggaggccatgcgccccaaagcagcccgcca

SEQ ID NO: 150629 - DNA, 120 bp, Artificial Sequence
  ENSG00000105662_25 (sequence is synthesized)
cccacctgagtgtaagaagtgagtccggcttttgggtttcaccccaagttatctcaaaacaaaagggctggtcaggctgggcagggccttgtcaggagctcacggtaggcagaggtgcct

SEQ ID NO: 150630 - DNA, 120 bp, Artificial Sequence
  ENSG00000105662_26 (sequence is synthesized)
ctgccagggccacagaacagacttccgggaaggggccttggcttttattgagggtctctcaaagacccagcctgccagcctctcccagaggtgcctgctagtccttagagtgtgtgtgtg

SEQ ID NO: 150631 - DNA, 120 bp, Artificial Sequence
  ENSG00000105662_27 (sequence is synthesized)
aagatgccatgaccagtggcagctgagacctctctgccccaagagtgtgggggactggcagggagcgagggtccccgagacgaggaccacggtcctccctgagaacctgggtggaactgg

SEQ ID NO: 150632 - DNA, 120 bp, Artificial Sequence
  ENSG00000105662_28 (sequence is synthesized)
ccacaccccctctcttgggcagcgtggtctgctggctgccccttcttggcagctcagggtcgtggcaggtggacttggagacacacagcagtgtgtgttttagtggcaggtttcaggagc

SEQ ID NO: 150633 - DNA, 120 bp, Artificial Sequence
  ENSG00000105662_29 (sequence is synthesized)
acctctaagaccagggtgacagggtacttgggagctgtcctggaccctccccataccacgggccctgcaagggaggcatcagggctggctttgttttctgctgttcttggaataggaact

SEQ ID NO: 150634 - DNA, 120 bp, Artificial Sequence
  ENSG00000105662_30 (sequence is synthesized)
gctgttctgatccccccaaaactgcattgcggctctcgctcgctcctgcctgccgggacagcgccttctgctgagtccgtttatttgtagtgtcatggctgctgctttcactggggtcct

SEQ ID NO: 150635 - DNA, 120 bp, Artificial Sequence
  ENSG00000105662_31 (sequence is synthesized)
gggcaccctggcttctgtcctcagagctgggtttgatcctagcaaccatcccttcctctctttgcccggcaatgcctttggcatgtgtctgagcagccaagtggccactcataggagaag

SEQ ID NO: 150636 - DNA, 120 bp, Artificial Sequence
  ENSG00000105662_32 (sequence is synthesized)
gctccctggtcacgttgctcctgctgccgtcttgttccaaggtgcgggggggacactgttggtctgtccaggtcaaggtccctttctcttaccatgacagaggctgggggcagacagcgg

SEQ ID NO: 150637 - DNA, 120 bp, Artificial Sequence
  ENSG00000105662_33 (sequence is synthesized)
ggacttttttttttttttaagaaaaactacatgtacataggagagtttcattaccattagacttgtatgtaggacttaaaaaaaaatggccttaataaaattacaagcaacccgcctgga

SEQ ID NO: 150638 - DNA, 120 bp, Artificial Sequence
  ENSG00000105662_34 (sequence is synthesized)
tgcggttttcaaaagaaggcattgaggaccatgctaggaaacctcataccccatccgtccaacctccggcgggcgccactgcttgtcctctggtcttcggtgtggacagataggagagga

SEQ ID NO: 150639 - DNA, 120 bp, Artificial Sequence
  ENSG00000105662_35 (sequence is synthesized)
gggatgcccacctcggagcatcccaggcccgtggcccattttcagcatcctgaagccagattcacagtgacattgtgttaacgtgacgaccttggtccattatggagttctttttccaat

SEQ ID NO: 150640 - DNA, 120 bp, Artificial Sequence
  ENSG00000105662_36 (sequence is synthesized)
aagaacctggtggaccgaggtccgagcttgccagggacagtggggcccacgcgagtacccggggcccagccaggagccagcagccaggcgtccctgtgttccagaaggattcacgcccct

SEQ ID NO: 150641 - DNA, 120 bp, Artificial Sequence
  ENSG00000105662_37 (sequence is synthesized)
cctggacctgggcgggcctcccagggggtctgtatcacggccttttgtgtgtgcgtacgtgtggtttttttaaatatcactactacatattcttgaattgccaagactttctgaaacaag

SEQ ID NO: 150642 - DNA, 120 bp, Artificial Sequence
  ENSG00000105662_38 (sequence is synthesized)
acagcttaagggaatcagccttttgctttgtgatgtgaaaatactgtgatttgacgagccgcttcctgaggggcaggcccacgtggggaggttgcgccgtgtacatagacccgccgtctg

SEQ ID NO: 150643 - DNA, 120 bp, Artificial Sequence
  ENSG00000105662_39 (sequence is synthesized)
tgtccttggtcaggcccggatgcttggtctacactgggttagaggctgctctccccacgcacccatgtgctcatggcttctgcagaccctctgctgggtacatcggtcccctacggcgaa

SEQ ID NO: 150644 - DNA, 120 bp, Artificial Sequence
  ENSG00000105662_40 (sequence is synthesized)
gttcagccagggctctccctcctgagagcatggcgtccccaccttcctgtttcgccgacgtcactacccagggtggcaagtcttgcaggcagagggtgtagcccaagttcagcctctctc

SEQ ID NO: 150645 - DNA, 120 bp, Artificial Sequence
  ENSG00000105662_41 (sequence is synthesized)
tgtgtcctccagagaagagggttctttgccctcatcagggccctgcttgtgggttttcggctctggggaggagagtgttggcatcagtgtgtttggcctgatttcttcagggggccaagc

SEQ ID NO: 150646 - DNA, 120 bp, Artificial Sequence
  ENSG00000105662_42 (sequence is synthesized)
tcccgggaggacccctagccaggagggccccccatgtccatccatccctcctgctggggcttggatgtcaggcttgggggctgtgagctgggacctcgcctgagcccggtcaggtgggac

SEQ ID NO: 150647 - DNA, 120 bp, Artificial Sequence
  ENSG00000105662_43 (sequence is synthesized)
ctgtgagctgggacctcgcctgagcccggtcaggtgggacaggagcctgccagaagcccatggggggccaggccgggtggcttctattttatttttttagagatggggtcttgctgtgtt

SEQ ID NO: 150648 - DNA, 120 bp, Artificial Sequence
  ENSG00000105662_44 (sequence is synthesized)
cctcctcggcctcccaaagttctggggctacaggtgtgagccacttctgcccagcatcccaggcctgaacagccttggcaggacccgtccctagagggggctctggtgcctcccttaggt

SEQ ID NO: 150649 - DNA, 120 bp, Artificial Sequence
  ENSG00000105662_45 (sequence is synthesized)
gggccttgagctggtttttaaccaaacatccttccaaactcgggctgcgacctgcttcctgagttttctgtatttccaaggagccctccgaccagggagaggctggtggagtaaggtcca

SEQ ID NO: 150650 - DNA, 120 bp, Artificial Sequence
  ENSG00000105662_46 (sequence is synthesized)
gcggtattcgggggtcctctgtcacctcgccctgaaaacagcagctcccatcaccttcactgggtcccgatggagccgtctcagaggccgaggggccctctgtgtgggggtgggacgcag

SEQ ID NO: 150651 - DNA, 120 bp, Artificial Sequence
  ENSG00000105662_47 (sequence is synthesized)
gggctctcagagcaagggccacaaagccgatggcacagatgtgcccctgggcctggcccgtcacccacatgtggtgccctgggccagggcgtgcgggcgccagagccttccctacacagc

SEQ ID NO: 150652 - DNA, 120 bp, Artificial Sequence
  ENSG00000105662_48 (sequence is synthesized)
ctaagagcaggggcaagactcggcccctcactcaccctgggaggcctgcctgggctacatggacacctgggtctctttctacccccattcaccatggaccaggggcctccatttcctggg

SEQ ID NO: 150653 - DNA, 120 bp, Artificial Sequence
  ENSG00000105662_49 (sequence is synthesized)
ggctcttgcggcatgtgatttgggggtccctgggacattctcccgtcagctccacctgagccaagtgtcctgttccctgcggcccttggccttccagggtcctggccaggcaggggtcag

SEQ ID NO: 150654 - DNA, 120 bp, Artificial Sequence
  ENSG00000105662_50 (sequence is synthesized)
gcaccccatactcttccgtgtggcacaggtgtccacccacccccactggccacagacaccattctccccctgggagcaggaggtggagtaagttgtacccccaggcctgggtgctgggga

SEQ ID NO: 150655 - DNA, 120 bp, Artificial Sequence
  ENSG00000105662_51 (sequence is synthesized)
gttcctgagggcatgggtggggcaggagtgagtgcctcgtgatcccagcctcagtttctctcttgtcactttctcaaacctgcaggtctcagggccccgggctcctcctgggcaggatgg

SEQ ID NO: 150656 - DNA, 120 bp, Artificial Sequence
  ENSG00000105662_52 (sequence is synthesized)
ggggcaggggctgggccttggggtggtgctggctctgatgattccagagcctgtatccaccttctgggctcctggccagcaccccacccccaggagccagggacaggtggcatgtgttgg

SEQ ID NO: 150657 - DNA, 120 bp, Artificial Sequence
  ENSG00000105662_53 (sequence is synthesized)
ggtcgggggatggcccccatctcgaagtgttctggaatttgggggcaacccttgcccagcccagccatcaagaacttctgatctcctgcccaccaggaggggacttagccatggacttgg

SEQ ID NO: 150658 - DNA, 120 bp, Artificial Sequence
  ENSG00000105662_54 (sequence is synthesized)
ccagtaggcctggggagggagggctttggcagccaaagtccactggccctgccgtgcccctgagtaggaaactgtcccctaggggctgggtggccccactgatatatgcaaacccgccgg

SEQ ID NO: 150659 - DNA, 120 bp, Artificial Sequence
  ENSG00000105662_55 (sequence is synthesized)
tccgagccctgttcctgcctgtgctcctctgtgcccaggctggctctcccccaaccctagcatgtatactctgccacggacgtcccgtgggccatgattgtgggcggccgcagcgggcgg

SEQ ID NO: 150660 - DNA, 120 bp, Artificial Sequence
  ENSG00000105662_56 (sequence is synthesized)
gggcaggcggctcagggcacactcggccgtccctgccccatcctctggcagggctgcttttgtctttgtacctttgcatcctttgtaatgaaacgtaataaaaatccaacgttttcgtca

SEQ ID NO: 150661 - DNA, 120 bp, Artificial Sequence
  ENSG00000105664_0 (sequence is synthesized)
agaaagcgagcagccacccagctccccgccaccgccatggtccccgacaccgcctgcgttcttctgctcaccctggctgccctcggcgcgtccggacagggccagagcccgttgggctca

SEQ ID NO: 150662 - DNA, 120 bp, Artificial Sequence
  ENSG00000105664_1 (sequence is synthesized)
gacctgggcccgcagatgcttcgggaactgcaggaaaccaacgcggcgctgcaggacgtgcgggagctgctgcggcagcaggtcagggagatcacgttcctgaaaaacacggtgatggag

SEQ ID NO: 150663 - DNA, 120 bp, Artificial Sequence
  ENSG00000105664_2 (sequence is synthesized)
tgtgacgcgtgcgggatgcagcagtcagtacgcaccggcctacccagcgtgcggcccctgctccactgcgcgcccggcttctgcttccccggcgtggcctgcatccagacggagagcggc

SEQ ID NO: 150664 - DNA, 120 bp, Artificial Sequence
  ENSG00000105664_3 (sequence is synthesized)
gcgcgctgcggcccctgccccgcgggcttcacgggcaacggctcgcactgcaccgacgtcaacgagtgcaacgcccacccctgcttcccccgagtccgctgtatcaacaccagcccgggg

SEQ ID NO: 150665 - DNA, 120 bp, Artificial Sequence
  ENSG00000105664_4 (sequence is synthesized)
ttccgctgcgaggcttgcccgccggggtacagcggccccacccaccagggcgtggggctggctttcgccaaggccaacaagcaggtttgcacggacatcaacgagtgtgagaccgggcaa

SEQ ID NO: 150666 - DNA, 120 bp, Artificial Sequence
  ENSG00000105664_5 (sequence is synthesized)
cataactgcgtccccaactccgtgtgcatcaacacccggggctccttccagtgcggcccgtgccagcccggcttcgtgggcgaccaggcgtccggctgccagcggcgcgcacagcgcttc

SEQ ID NO: 150667 - DNA, 120 bp, Artificial Sequence
  ENSG00000105664_6 (sequence is synthesized)
tgccccgacggctcgcccagcgagtgccacgagcatgcagactgcgtcctagagcgcgatggctcgcggtcgtgcgtgtgtgccgttggctgggccggcaacgggatcctctgtggtcgc

SEQ ID NO: 150668 - DNA, 120 bp, Artificial Sequence
  ENSG00000105664_7 (sequence is synthesized)
gacactgacctagacggcttcccggacgagaagctgcgctgcccggagcgccagtgccgtaaggacaactgcgtgactgtgcccaactcagggcaggaggatgtggaccgcgatggcatc

SEQ ID NO: 150669 - DNA, 120 bp, Artificial Sequence
  ENSG00000105664_8 (sequence is synthesized)
ggagacgcctgcgatccggatgccgacggggacggggtccccaatgaaaaggacaactgcccgctggtgcggaacccagaccagcgcaacacggacgaggacaagtggggcgatgcgtgc

SEQ ID NO: 150670 - DNA, 120 bp, Artificial Sequence
  ENSG00000105664_9 (sequence is synthesized)
gacaactgccggtcccagaagaacgacgaccaaaaggacacagaccaggacggccggggcgatgcgtgcgacgacgacatcgacggcgaccggatccgcaaccaggccgacaactgccct

SEQ ID NO: 150671 - DNA, 120 bp, Artificial Sequence
  ENSG00000105664_10 (sequence is synthesized)
cctgtgacaactgtccccagaagagcaacccggatcaggcggatgtggaccacgactttgtgggagatgcttgtgacagcgatcaagaccaggatggagacggacatcaggactctcggg

SEQ ID NO: 150672 - DNA, 120 bp, Artificial Sequence
  ENSG00000105664_11 (sequence is synthesized)
acaactgtcccacggtgcctaacagtgcccaggaggactcagaccacgatggccagggtgatgcctgcgacgacgacgacgacaatgacggagtccctgacagtcgggacaactgccgcc

SEQ ID NO: 150673 - DNA, 120 bp, Artificial Sequence
  ENSG00000105664_12 (sequence is synthesized)
tggtgcctaaccccggccaggaggacgcggacagggacggcgtgggcgacgtgtgccaggacgactttgatgcagacaaggtggtagacaagatcgacgtgtgtccggagaacgctgaag

SEQ ID NO: 150674 - DNA, 120 bp, Artificial Sequence
  ENSG00000105664_13 (sequence is synthesized)
tcacgctcaccgacttcagggccttccagacagtcgtgctggacccggagggtgacgcgcagattgaccccaactgggtggtgctcaaccagggaagggagatcgtgcagacaatgaaca

SEQ ID NO: 150675 - DNA, 120 bp, Artificial Sequence
  ENSG00000105664_14 (sequence is synthesized)
gcgacccaggcctggctgtgggttacactgccttcaatggcgtggacttcgagggcacgttccatgtgaacacggtcacggatgacgactatgcgggcttcatctttggctaccaggaca

SEQ ID NO: 150676 - DNA, 120 bp, Artificial Sequence
  ENSG00000105664_15 (sequence is synthesized)
gctccagcttctacgtggtcatgtggaagcagatggagcaaacgtattggcaggcgaaccccttccgtgctgtggccgagcctggcatccaactcaaggctgtgaagtcttccacaggcc

SEQ ID NO: 150677 - DNA, 120 bp, Artificial Sequence
  ENSG00000105664_16 (sequence is synthesized)
ccggggaacagctgcggaacgctctgtggcatacaggagacacagagtcccaggtgcggctgctgtggaaggacccgcgaaacgtgggttggaaggacaagaagtcctatcgttggttcc

SEQ ID NO: 150678 - DNA, 120 bp, Artificial Sequence
  ENSG00000105664_17 (sequence is synthesized)
tgcagcaccggccccaagtgggctacatcagggtgcgattctatgagggccctgagctggtggccgacagcaacgtggtcttggacacaaccatgcggggtggccgcctgggggtcttct

SEQ ID NO: 150679 - DNA, 120 bp, Artificial Sequence
  ENSG00000105664_18 (sequence is synthesized)
gcttctcccaggagaacatcatctgggccaacctgcgttaccgctgcaatgacaccatcccagaggactatgagacccatcagctgcggcaagcctagggaccagggtgaggacccgccg

SEQ ID NO: 150680 - DNA, 120 bp, Artificial Sequence
  ENSG00000105664_19 (sequence is synthesized)
gatgacagccaccctcaccgcggctggatgggggctctgcacccagccccaaggggtggccgtcctgagggggaagtgagaagggctcagagaggacaaaataaagtgtgtgtgcaggga

SEQ ID NO: 150681 - DNA, 120 bp, Artificial Sequence
  ENSG00000105664_20 (sequence is synthesized)
agaaagcgagcagccacccagctccccgccaccgccatggtccccgacaccgcctgcgttcttctgctcaccctggctgccctcggcgcgtccggacagggccagagcccgttgggtaag

SEQ ID NO: 150682 - DNA, 120 bp, Artificial Sequence
  ENSG00000105664_21 (sequence is synthesized)
ccgcgttagcacccgcgccgtgcccacggccccacaacggactgtaggacccgtgagaggcccgggatccaggctgtttggggctcacggactgttcgtaggggacgtgccgggcgcaga

SEQ ID NO: 150683 - DNA, 120 bp, Artificial Sequence
  ENSG00000105664_22 (sequence is synthesized)
aagcaggtggcgggaccgagactagaggagcgcagtggggcctcggaggtccgggttcgctgcaacggtgggagttggtggtgggattccccggccccatgacgcctcaccaggtcccct

SEQ ID NO: 150684 - DNA, 120 bp, Artificial Sequence
  ENSG00000105664_23 (sequence is synthesized)
gtcccaatcttggggctctggtcccgtggatttctgcagggatccgcaaccaggccgacaactgccctagggtacccaactcagaccagaaggacagtgatggcgatggtataggggatg

SEQ ID NO: 150685 - DNA, 120 bp, Artificial Sequence
  ENSG00000105668_0 (sequence is synthesized)
atggcgtctgcggcagcagcggaggccgagaagggatctccagttgtggtgggcctgctagttgtgggcaatatcattattctgctgtcaggcctgtccctgtttgctgagaccatatgg

SEQ ID NO: 150686 - DNA, 120 bp, Artificial Sequence
  ENSG00000105668_1 (sequence is synthesized)
gtgacagccgaccagtaccgtgtatacccactgatgggagtctcaggcaaggatgacgtcttcgctggtgcctggattgccatcttctgcggcttctccttcttcatggtagccagtttt

SEQ ID NO: 150687 - DNA, 120 bp, Artificial Sequence
  ENSG00000105668_2 (sequence is synthesized)
ggtgtgggtgccgcactctgccgccgccggtccatggtcctcacgtacctggtgctcatgctcatcgtctacatcttcgagtgcgcctcctgcatcacgtcctacacccaccgtgactac

SEQ ID NO: 150688 - DNA, 120 bp, Artificial Sequence
  ENSG00000105668_3 (sequence is synthesized)
atggtgtccaacccatccctgatcaccaagcagatgctgaccttctacagcgcggacaccgaccagggccaggagctgacccgcctctgggaccgcgtcatgattgagcaagaatgctgt

SEQ ID NO: 150689 - DNA, 120 bp, Artificial Sequence
  ENSG00000105668_4 (sequence is synthesized)
ggcacatctggtcccatggactgggtgaacttcacgtcagccttccgggcggccactccggaggtggtgttcccctggcccccactgtgctgtcgccggacgggaaacttcatccccctc

SEQ ID NO: 150690 - DNA, 120 bp, Artificial Sequence
  ENSG00000105668_5 (sequence is synthesized)
gcacatggactacctgttcaccaagggctgcttcgaacacatcggccacgccatcgacagctacacgtggggtatctcgtggtttgggtttgccatcctgatgtggacgctcccggtcat

SEQ ID NO: 150691 - DNA, 120 bp, Artificial Sequence
  ENSG00000105668_6 (sequence is synthesized)
gctgatagccatgtatttctacaccatgctctgagggacaggaggggaaggcaacatacacaccccggactcctccgcatcctcctcctgcttcctccgctgggcctggatggctgcctc

SEQ ID NO: 150692 - DNA, 120 bp, Artificial Sequence
  ENSG00000105668_7 (sequence is synthesized)
acctctcacctcccaacgtccctagcccttacgtccttccacttccaagatctttttccaggttcctgagccctactgtgtctcaggtgtgccctgaaaccccagggcttgtgtgcacat

SEQ ID NO: 150693 - DNA, 120 bp, Artificial Sequence
  ENSG00000105668_8 (sequence is synthesized)
atccttagcccatctttcaagggacctctccatgatcccacctcccattcacagatacctctcttgtagctctctgacctcctccttcatggcaggcatcgccattcttgctgaaccgtt

SEQ ID NO: 150694 - DNA, 120 bp, Artificial Sequence
  ENSG00000105668_9 (sequence is synthesized)
tgtgattgccatttgagctctggaagcctctattgccatgagagttctgtcacggtcactttactgtccccatcatcacccagcacggggctaagcatatactagatagtcaataaataa

SEQ ID NO: 150695 - DNA, 120 bp, Artificial Sequence
  ENSG00000105668_10 (sequence is synthesized)
tacagtggcacaatctcagctcactgcagcgtctgcctcccgggttcaagggattctcccacctcagcttccagagcagctgggattacagggctgcttcgaacacatcggccacgccat

SEQ ID NO: 150696 - DNA, 120 bp, Artificial Sequence
  ENSG00000105669_0 (sequence is synthesized)
gtgtctttcaggaagaggagctggtgagaagacagcgaaatggcgcctccggcccccggcccggcctccggcggctccggggaggtagacgagctgttcgacgtaaagaacgccttctac

SEQ ID NO: 150697 - DNA, 120 bp, Artificial Sequence
  ENSG00000105669_1 (sequence is synthesized)
atcggcagctaccagcagtgcataaacgaggcgcagcgggtgaagctatcaagcccagagagagacgtggagagggacgtcttcctgtatagagcgtacctggcgcagaggaagttcggt

SEQ ID NO: 150698 - DNA, 120 bp, Artificial Sequence
  ENSG00000105669_2 (sequence is synthesized)
gtggtcctggatgagatcaagccctcctcggcccctgagctccaggccgtgcgcatgtttgctgactacctcgcccacgagagtcggagggacagcatcgtggccgagctggaccgagag

SEQ ID NO: 150699 - DNA, 120 bp, Artificial Sequence
  ENSG00000105669_3 (sequence is synthesized)
atgagcaggagcgtggacgtgaccaacaccaccttcctgctcatggccgcctccatctatctccacgaccagaacccggatgccgccctgcgtgcgctgcaccagggggacagcctggag

SEQ ID NO: 150700 - DNA, 120 bp, Artificial Sequence
  ENSG00000105669_4 (sequence is synthesized)
gcccggaaggagctgaagagaatgcaggacctggacgaggatgccaccctcacccagctcgccactgcctgggtcagcctggccacgggtggtgagaagctgcaggatgcctactacatc

SEQ ID NO: 150701 - DNA, 120 bp, Artificial Sequence
  ENSG00000105669_5 (sequence is synthesized)
ttccaggagatggctgacaagtgctcgcccaccctgctgctgctcaatgggcaggcggcctgccacatggcccagggccgctgggaggccgctgagggcctgctgcaggaggcgctagac

SEQ ID NO: 150702 - DNA, 120 bp, Artificial Sequence
  ENSG00000105669_6 (sequence is synthesized)
aaggatagtggctacccagagacgctggtcaacctcatcgtcctgtcccagcacctgggcaagccccctgaggtgacaaaccgatacctgtcccagctgaaggatgcccacaggtcccat

SEQ ID NO: 150703 - DNA, 120 bp, Artificial Sequence
  ENSG00000105669_7 (sequence is synthesized)
cccttcatcaaggagtaccaggccaaggagaacgactttgacaggctggtgctacagtacgctcccagcgcctgaggctggcccagagctgtcaggaccatgaagccaggacagaggcca

SEQ ID NO: 150704 - DNA, 120 bp, Artificial Sequence
  ENSG00000105669_8 (sequence is synthesized)
ggagccagccctgcagccctccccacccggcatccacctgcatcccctctgggggcaggagcccacccccagcacccccatctgttaataaatatctcaactccagggtgttccacctga

SEQ ID NO: 150705 - DNA, 120 bp, Artificial Sequence
  ENSG00000105669_9 (sequence is synthesized)
tgagtggcctccctgctctggggccagcccagggaggcaagtgccccctgccacatctccaggctgcgcacggcctcgctggctgtcgtcatgggagcagagaaaggtggtgctgaaatg

SEQ ID NO: 150706 - DNA, 120 bp, Artificial Sequence
  ENSG00000105669_10 (sequence is synthesized)
aggccctggcctgctgtccaggctccagctcccctgcccagtgtgggaggcactcccatctgcgcaccaggctgcagatccaaggacacggtgcccaggctgcaaccctctgttcccaag

SEQ ID NO: 150707 - DNA, 120 bp, Artificial Sequence
  ENSG00000105669_11 (sequence is synthesized)
ggcagagcagaaagcggctttgtctctgctcggtttctgtgtccccaccccccacgaagccttctgtgtctcggccctgggcccagtctctcaggcctccccgggccccccataccggcc

SEQ ID NO: 150708 - DNA, 120 bp, Artificial Sequence
  ENSG00000105669_12 (sequence is synthesized)
gggggcatggcgtgcagcgcacagcatccctcagattaggcgcctctcccctctgctcccctgctgctttgtgcctcagtttccctcacctgcacagcagtggggggctggtgatggatc

SEQ ID NO: 150709 - DNA, 120 bp, Artificial Sequence
  ENSG00000105669_13 (sequence is synthesized)
ctgcttcaaaggggagggtcagagacagtgctgtgtgtgcacacgccctcatggaccacaaggcactctctgaacctagaactgaaaatatcaattaccgagcagccctctgcaacaccc

SEQ ID NO: 150710 - DNA, 120 bp, Artificial Sequence
  ENSG00000105669_14 (sequence is synthesized)
agagccccaagacagcccagggcgcagcgggggcagggccctcccatcagttttcttatttatttatttagagatggagtctcactctcctgggtggcagagccagaccctgactcacac

SEQ ID NO: 150711 - DNA, 120 bp, Artificial Sequence
  ENSG00000105669_15 (sequence is synthesized)
acaaaaaagaaaataaatagggatgtcacactgtcggcgagccggccgactcggtgctggtccaggtgctggctcctgttggcaggaaaacaagaacaagaggcctcacgagtaattcgt

SEQ ID NO: 150712 - DNA, 120 bp, Artificial Sequence
  ENSG00000105669_16 (sequence is synthesized)
ggtcacagccacctggggctgagagggatgaggggacgagggggcctgcagagagtgggtggccccagggctctgctgcaggtgcaggtgcaggggcgggtgcgtggccctcctctaggg

SEQ ID NO: 150713 - DNA, 120 bp, Artificial Sequence
  ENSG00000105669_17 (sequence is synthesized)
atgggcggtgagtgggccggggcctgaaaccccatcctgggtacctcccccagagctcctgggcctgaggaagctgagcggtgaaatgtgggagtgagggtgtcctcctctgctgggcgg

SEQ ID NO: 150714 - DNA, 120 bp, Artificial Sequence
  ENSG00000105669_18 (sequence is synthesized)
ggctggtggtcctaagcacaggacttaggaacatcccagacacacacagtgagccctgggtgtggagcggccatgcaatgtgtctgtggcgacccgctgaccgccccctcgccctgtcct

SEQ ID NO: 150715 - DNA, 120 bp, Artificial Sequence
  ENSG00000105669_19 (sequence is synthesized)
ggggtccctggtggggcagggacttcctgtctggggctctccctgccaagctgaagacatggaaatcctctggggtggacgggtgcagctgacgcctcgtccctactgcagaggaagttc

SEQ ID NO: 150716 - DNA, 120 bp, Artificial Sequence
  ENSG00000105669_20 (sequence is synthesized)
gctgagggcctgctgcaggaggcgctagacaaggatagtggctacccagagacgctggtcaacctcatcgtcctgtcccagcacctgggcaagccccctgaggtcagagccaccgtgggg

SEQ ID NO: 150717 - DNA, 120 bp, Artificial Sequence
  ENSG00000105671_0 (sequence is synthesized)
aaggggcccctacaagcggccacaaggatggcaggcttcgcggagctcgggctgtcatcgtggctcgtggaacaatgtcggcagctgggtttgaagcagcccacgcccgtgcagctcggc

SEQ ID NO: 150718 - DNA, 120 bp, Artificial Sequence
  ENSG00000105671_1 (sequence is synthesized)
tgcatccccgccatcctggagggtcgagactgcttgggctgtgctaagacaggcagtgggaagacagcagcgtttgtccttcccatcttgcagaagctgtctgaggatccctatggcatc

SEQ ID NO: 150719 - DNA, 120 bp, Artificial Sequence
  ENSG00000105671_2 (sequence is synthesized)
ttctgcctcgtcctgacacccaccagggagctggcctaccagatcgcagagcagttccgggtcctggggaagcctctagggctgaaagactgcatcatcgtcggtggcatggacatggtg

SEQ ID NO: 150720 - DNA, 120 bp, Artificial Sequence
  ENSG00000105671_3 (sequence is synthesized)
gcccaggcgctggagctctctcggaaaccacacgtggtcatcgccacgccggggcgcctggcagatcacctgcgcagctccaacacttttagtataaagaagatccgcttcctggtgatg

SEQ ID NO: 150721 - DNA, 120 bp, Artificial Sequence
  ENSG00000105671_4 (sequence is synthesized)
gatgaggcagaccggctgctggaacagggctgcactgacttcaccgtggacctggaggccatcctggcggctgtgccggcccgcaggcagacactgctgttcagcgccacgctgaccgac

SEQ ID NO: 150722 - DNA, 120 bp, Artificial Sequence
  ENSG00000105671_5 (sequence is synthesized)
acactccgggagctgcagggtctggccaccaaccagcccttcttctgggaagcacaggccccggtgagcaccgtggagcagctggaccagcgctacctgctggtgcctgagaaggtcaag

SEQ ID NO: 150723 - DNA, 120 bp, Artificial Sequence
  ENSG00000105671_6 (sequence is synthesized)
gacgcctacctggtccacctgatccagcgcttccaggatgagcacgaggactggtccattatcatcttcaccaacacgtgcaagacctgccagattctgtgcatgatgctgcgcaaattc

SEQ ID NO: 150724 - DNA, 120 bp, Artificial Sequence
  ENSG00000105671_7 (sequence is synthesized)
ccggggcctggacatccctacggtacaggtggtcatcaaccacaacacccccgggctccccaagatctacatccaccgagtcggccggacggcccgtgcagggcggcagggtcaggccat

SEQ ID NO: 150725 - DNA, 120 bp, Artificial Sequence
  ENSG00000105671_8 (sequence is synthesized)
cacgctggtgacacagtacgacatccacctggtgcacgccatcgaggagcagatcaagaagaagctggaggagttctccgtggaagaggccgaggtgctacagatcctcacacaggtcaa

SEQ ID NO: 150726 - DNA, 120 bp, Artificial Sequence
  ENSG00000105671_9 (sequence is synthesized)
cgtggtgcgaagagagtgtgagatcaaactggaggcggcccactttgacgaaaagaaggagatcaacaaacggaagcagctgatcctggaggggaaggaccctgacctggaggccaagcg

SEQ ID NO: 150727 - DNA, 120 bp, Artificial Sequence
  ENSG00000105671_10 (sequence is synthesized)
caaggctgagctggccaagatcaagcagaagaaccggcgcttcaaggagaaggtggaggagacgctgaagcgacagaaggctggcagggctggccacaaggggcgtccacccaggacacc

SEQ ID NO: 150728 - DNA, 120 bp, Artificial Sequence
  ENSG00000105671_11 (sequence is synthesized)
gtctgggtcccactcaggcccagtcccctcccagggcctggtctgagccccacacggccatctgcccagtccttgactcgtccatggagctgagggtcggaggaaccttccttgggggca

SEQ ID NO: 150729 - DNA, 120 bp, Artificial Sequence
  ENSG00000105671_12 (sequence is synthesized)
gcagcccttcccgggggcctacccagtgccccacagcagaacccgtgggcgctcgtgttgtgcgggccctgctcctctgccccgaaaccactggctggtcccttccctgagccctggcca

SEQ ID NO: 150730 - DNA, 120 bp, Artificial Sequence
  ENSG00000105671_13 (sequence is synthesized)
agattcaggctgcaggggaagaaagaacatgaccgggaggttgtgaccccaacccaaggtcaccccccaggggtgccgcatacaggaggtgcttaataaacgggtcttttgacttcctca

SEQ ID NO: 150731 - DNA, 120 bp, Artificial Sequence
  ENSG00000105671_14 (sequence is synthesized)
tcccatcttgcagaagctgtctgaggatccctatggcatcttctgcctcgtcctgacacccaccaggggtcctgcagaattaaacaagatggccccggtgcagtggctcacacctgtaat

SEQ ID NO: 150732 - DNA, 120 bp, Artificial Sequence
  ENSG00000105671_15 (sequence is synthesized)
gccccgcccctgcagacctcaggagctgggctcggagcctccaggcccaatgtcagagcctggggcaccatctcatccatttaggaaacgtatgtccgttagactgtccagtaaaacgct

SEQ ID NO: 150733 - DNA, 120 bp, Artificial Sequence
  ENSG00000105671_16 (sequence is synthesized)
ggaccgttcaaggaccaacaagagggggcccagtcctagcaatgttattcgggggtagggccttgctgagacttgggtgaggggcaggcctcccttggaaggagggtactccagggccta

SEQ ID NO: 150734 - DNA, 120 bp, Artificial Sequence
  ENSG00000105671_17 (sequence is synthesized)
ccccaccgtggctctgcactccatgatgaagcagaaagaacgctttgccgccctagccaagttcaagtccagcatctaccggatcctgatcgcaacagacgtggcctcccggtgagcagc

SEQ ID NO: 150735 - DNA, 120 bp, Artificial Sequence
  ENSG00000105671_18 (sequence is synthesized)
ccccagtctcctgccaagggcactccctcttttactacaaggccccacagatgagaaggctggcctcaggcatgtcaggcagccctagcatccctgctgagtgaccctgggtgagtcctt

SEQ ID NO: 150736 - DNA, 120 bp, Artificial Sequence
  ENSG00000105671_19 (sequence is synthesized)
gtggtaggacgtgggtagggtgcagcccacagatgagagctactcagggccatgtttgcaagttggggagttgtcctttctaaagcaaaggtgaatcccagctactcgggaggctgaggc

SEQ ID NO: 150737 - DNA, 120 bp, Artificial Sequence
  ENSG00000105671_20 (sequence is synthesized)
atgtccatttccaccaggcaggcccaaagttttgcagacaccagctgctcgaatggccatgggattttgggccctgaagccccttctctgggcttccagtttcctcatctggagaatggg

SEQ ID NO: 150738 - DNA, 120 bp, Artificial Sequence
  ENSG00000105671_21 (sequence is synthesized)
catagcaactgccctgctctccagaggcagctgtgaggctttggtgaggtcagtcctgtgccgaatgggtgcagctataagcttccctggccacccacctggccacatctggggtttgtg

SEQ ID NO: 150739 - DNA, 120 bp, Artificial Sequence
  ENSG00000105671_22 (sequence is synthesized)
gccagagtgaaggggccatgaaagtccaaatttggccagacaatgtgggctaagcccaaggggacaggcagagagacaccagagccagcttcctggctgtgtggcctggacccccctcgg

SEQ ID NO: 150740 - DNA, 120 bp, Artificial Sequence
  ENSG00000105671_23 (sequence is synthesized)
actccaagcctcacccctcatctgcaagcggcttataactgctacatggattcaggggcacccaaaaagacgcagggaaaggcgccggcgacatgttaagtgcccagatacccacatacc

SEQ ID NO: 150741 - DNA, 120 bp, Artificial Sequence
  ENSG00000105672_0 (sequence is synthesized)
gcagataagcccagcttagcccagctgaccccagaccctctcccctcactccccccatgtcgcaggatcgagaccctgaggcagacagcccgttcaccaagccccccgccccgcccccat

SEQ ID NO: 150742 - DNA, 120 bp, Artificial Sequence
  ENSG00000105672_1 (sequence is synthesized)
caccccgtaaacttctcccagcctccgccctgccctcacccagcccgctgttccccaagcctcgctccaagcccacgccacccctgcagcagggcagccccagaggccagcacctatccc

SEQ ID NO: 150743 - DNA, 120 bp, Artificial Sequence
  ENSG00000105672_2 (sequence is synthesized)
cgaggctggggtcgaggctcggccccgcccctgcctctgcaacttgagcctggctgcgacccctgctctgacgtctcggaaaattcccccttgcccaggcccttgggggagggggtgcat

SEQ ID NO: 150744 - DNA, 120 bp, Artificial Sequence
  ENSG00000105672_3 (sequence is synthesized)
ggtatgaaatggggctgagacccccggctgggggcagaggaacccgccagagaacattcagaaggccttcatcgcatccatggacctgtggaactgggatgaggcatccccacaggaagt

SEQ ID NO: 150745 - DNA, 120 bp, Artificial Sequence
  ENSG00000105672_4 (sequence is synthesized)
gcctccagggaacaagctggcagggcttgaaggagccaaattaggcttctgtttccctgatctggcactccaaggggacacgccgacagcgacagcagagacatgctggaaaggtacaag

SEQ ID NO: 150746 - DNA, 120 bp, Artificial Sequence
  ENSG00000105672_5 (sequence is synthesized)
ctcatccctggcaagcttcccacagctggactggggctccgcgttactgcacccagaagttccatggggggcggagcccgactctcaggctcttccgtggtccggggactggacagacat

SEQ ID NO: 150747 - DNA, 120 bp, Artificial Sequence
  ENSG00000105672_6 (sequence is synthesized)
ccatccccgccgccggctccgaaggcgccgcgggccagaactgcgtccccgtggcgggagaggccacctcgtggtcgcgcgcccaggccgccgggagcaacaccagctgggactgttctg

SEQ ID NO: 150748 - DNA, 120 bp, Artificial Sequence
  ENSG00000105672_7 (sequence is synthesized)
gcaacaccagctgggactgttctgtggggcccgacggcgatacctactggggcagtggcctgggcggggagccgcgcacggactgtaccatttcgtggggcgggcccgcgggcccggact

SEQ ID NO: 150749 - DNA, 120 bp, Artificial Sequence
  ENSG00000105672_8 (sequence is synthesized)
gtaccacctcctggaacccggggctgcatgcgggtggcaccacctctttgaagcggtaccagagctcagctctcaccgtttgctccgaaccgagcccgcagtcggaccgtgccagtttgg

SEQ ID NO: 150750 - DNA, 120 bp, Artificial Sequence
  ENSG00000105672_9 (sequence is synthesized)
ctcgatgccccaaaactaaccaccgaggtcccattcagctgtggcagttcctcctggagctgctccacgacggggcgcgtagcagctgcatccgttggactggcaacagccgcgagttcc

SEQ ID NO: 150751 - DNA, 120 bp, Artificial Sequence
  ENSG00000105672_10 (sequence is synthesized)
agctgtgcgaccccaaagaggtggctcggctgtggggcgagcgcaagagaaagccgggcatgaattacgagaagctgagccggggccttcgctactactatcgccgcgacatcgtgcgca

SEQ ID NO: 150752 - DNA, 120 bp, Artificial Sequence
  ENSG00000105672_11 (sequence is synthesized)
agagcggggggcgaaagtacacgtaccgcttcgggggccgcgtgcccagcctagcctatccggactgtgcgggaggcggacggggagcagagacacaataaaaattcccggtcaaacctc

SEQ ID NO: 150753 - DNA, 120 bp, Artificial Sequence
  ENSG00000105672_12 (sequence is synthesized)
aggtgagcgatgaactgaggactagatgcctgggtgtctgggttaggaaggacctgggggactagactcccaagaagccgggggcctggactcctgggtctaacagaggaagagagctgg

SEQ ID NO: 150754 - DNA, 120 bp, Artificial Sequence
  ENSG00000105672_13 (sequence is synthesized)
ggtccctcactcccaggaccaagattttaggctcctggggaaggagggagcggaggcctggactcctggctctgagggaagctagggctggggcccagactccagggcctccaagtgtca

SEQ ID NO: 150755 - DNA, 120 bp, Artificial Sequence
  ENSG00000105672_14 (sequence is synthesized)
gcctccagggaacaagctggcagggcttggtaggctgccgaggctgccacaacgtgtgtggggagggtgtccaggtggggcctctgctgaccctaaccccttatcgcctgcagaaggagc

SEQ ID NO: 150756 - DNA, 120 bp, Artificial Sequence
  ENSG00000105672_15 (sequence is synthesized)
cccgccgctccccggcccactcgaggccccgcccaacccttctcaaacccaatctcccgcctgtactcctgcctcaaccaacccagtctccaccgggctctgcgaggcctcgcccaggtc

SEQ ID NO: 150757 - DNA, 120 bp, Artificial Sequence
  ENSG00000105672_16 (sequence is synthesized)
tgcactgcacaccgcccccaggcccggccctccccactatcgccaagccccgccccttcccactccgaccgagcgggcctctgtcctaggtggctcggctgtggggcgagcgcaagagaa

SEQ ID NO: 150758 - DNA, 120 bp, Artificial Sequence
  ENSG00000105675_0 (sequence is synthesized)
gttgggtgggagcacaggcaccgggcaccatggggaaggccgagaactatgagctctactcggtggagctgggtcctggccctggcggggacatggctgccaagatgagcaagaagaaga

SEQ ID NO: 150759 - DNA, 120 bp, Artificial Sequence
  ENSG00000105675_1 (sequence is synthesized)
aggcgggtggcgggggtggcaagaggaaggagaagctggagaacatgaagaaggagatggagattaacgaccaccagctgtcagtggcggagctggaacagaaataccagaccagtgcca

SEQ ID NO: 150760 - DNA, 120 bp, Artificial Sequence
  ENSG00000105675_2 (sequence is synthesized)
ccaagggcctctctgcgagcctggctgctgagctgctgctgcgggatgggcccaacgcactgcggccaccacggggcaccccagagtacgtcaagttcgcgaggcagctggccgggggcc

SEQ ID NO: 150761 - DNA, 120 bp, Artificial Sequence
  ENSG00000105675_3 (sequence is synthesized)
tgcagtgcctcatgtgggttgccgccgccatctgcctcatcgcctttgccatccaggctagtgagggggacctcaccaccgacgacaatctgtacctggcaatcgctctcattgctgtgg

SEQ ID NO: 150762 - DNA, 120 bp, Artificial Sequence
  ENSG00000105675_4 (sequence is synthesized)
ttgtcgtcaccggctgctttggctactaccaggaattcaagagcaccaacatcatcgccagctttaagaaccttgtgccacagcaagccactgtcatccgcgatggagacaaattccaga

SEQ ID NO: 150763 - DNA, 120 bp, Artificial Sequence
  ENSG00000105675_5 (sequence is synthesized)
tcaacgctgaccaactggtggtgggcgacctggtggagatgaaaggtggggacagagtgcccgccgacatccgcatcctggcggcccagggctgcaaggtggacaactcctcgctgacag

SEQ ID NO: 150764 - DNA, 120 bp, Artificial Sequence
  ENSG00000105675_6 (sequence is synthesized)
gggagtctgagccacagacccgctcacccgagtgcacgcacgagagccctctggagacccgcaacatcgccttcttctccaccatgtgccttgagggcaccgtgcagggcctggtggtga

SEQ ID NO: 150765 - DNA, 120 bp, Artificial Sequence
  ENSG00000105675_7 (sequence is synthesized)
acacgggcgaccgcaccatcattgggcgcatcgcatcgctggcgtcgggggtggaaaacgagaagacacccatcgctatcgagatcgagcattttgtggacatcatcgcgggcctggcca

SEQ ID NO: 150766 - DNA, 120 bp, Artificial Sequence
  ENSG00000105675_8 (sequence is synthesized)
ttctcttcggtgccacattttttattgtggccatgtgcattggctacaccttcctgcgggccatggtcttcttcatggccatcgtggtggcctatgtgcctgaggggctgctggccactg

SEQ ID NO: 150767 - DNA, 120 bp, Artificial Sequence
  ENSG00000105675_9 (sequence is synthesized)
tcacagtctgcctgtccctgacagccaagcgcctggccagtaagaactgcgtggtcaagaacctggaggcggtggagacattgggctccacttcggtgatctgctcggacaagacaggga

SEQ ID NO: 150768 - DNA, 120 bp, Artificial Sequence
  ENSG00000105675_10 (sequence is synthesized)
ctctcactcagaaccgcatgactgtgtcccatctgtggtttgacaaccacatccacacagctgacaccacggaagaccagtcagggcagacgtttgaccagtcctcggagacgtggcggg

SEQ ID NO: 150769 - DNA, 120 bp, Artificial Sequence
  ENSG00000105675_11 (sequence is synthesized)
cgctgtgccgggtgctcaccctgtgcaaccgcgccgccttcaagtccggccaggatgcagtgcctgtgcccaagcgcatcgtgattggagacgcatcggagacggcgctgctcaagttct

SEQ ID NO: 150770 - DNA, 120 bp, Artificial Sequence
  ENSG00000105675_12 (sequence is synthesized)
cggagctgacgctgggcaacgccatgggctaccgggaccgcttcccaaaagtctgcgagatacccttcaactccaccaacaagttccagctgtccatccatacgctggaggacccgcggg

SEQ ID NO: 150771 - DNA, 120 bp, Artificial Sequence
  ENSG00000105675_13 (sequence is synthesized)
acccgcgacacttgctggtgatgaagggcgcccccgagcgcgtgctggagcgctgcagctccatccttatcaagggccaggagctgccgctggacgagcagtggcgcgaggccttccaga

SEQ ID NO: 150772 - DNA, 120 bp, Artificial Sequence
  ENSG00000105675_14 (sequence is synthesized)
ccgcctacctcagcctgggaggcctgggcgaacgcgtgctcggcttctgccagctctacctgaatgagaaggactacccgcctggctatgccttcgacgtagaggccatgaactttccat

SEQ ID NO: 150773 - DNA, 120 bp, Artificial Sequence
  ENSG00000105675_15 (sequence is synthesized)
tagcggcctctgctttgcgggacttgtatccatgattgacccaccccgggccaccgtccctgatgctgtgctcaagtgtcgcaccgcaggcatccgggtgatcatggtaacgggtgacca

SEQ ID NO: 150774 - DNA, 120 bp, Artificial Sequence
  ENSG00000105675_16 (sequence is synthesized)
ccccatcaccgccaaggccattgcagccagtgtgggcatcatctcggaaggcagcgagacagtggaggacatcgctgcccgcctccgtgtgcccgtagaccaggttaatcgcaaggatgc

SEQ ID NO: 150775 - DNA, 120 bp, Artificial Sequence
  ENSG00000105675_17 (sequence is synthesized)
ccgtgcctgtgtgatcaatggcatgcagctgaaggacatggacccatcggaactggtcgaggccctgcgcacccaccccgagatggtgtttgcgcgcaccagcccccagcagaagctggt

SEQ ID NO: 150776 - DNA, 120 bp, Artificial Sequence
  ENSG00000105675_18 (sequence is synthesized)
gatcgtggagagctgccagcggctgggtgcgattgtggccgtcacgggggatggtgtgaatgactccccagctctgaagaaggcagacatcggagtagccatgggcatcgctggctcaga

SEQ ID NO: 150777 - DNA, 120 bp, Artificial Sequence
  ENSG00000105675_19 (sequence is synthesized)
tgctgccaaaaatgcagctgacatgatcctgctggatgacaactttgcctccattgtgacaggcgtggagcagggtcgactgatcttcgacaacctgaagaagtctattgcctacacatt

SEQ ID NO: 150778 - DNA, 120 bp, Artificial Sequence
  ENSG00000105675_20 (sequence is synthesized)
gaccaagaacatcccagagctgacaccctacctcatctacatcaccgtcagcgtgcccctgcccctcgggtgcatcaccatcctcttcatcgaactctgcactgacattttcccatctgt

SEQ ID NO: 150779 - DNA, 120 bp, Artificial Sequence
  ENSG00000105675_21 (sequence is synthesized)
gtccctggcatatgaaaaggccgagagtgacatcatgcacctgcgtccacgcaacccaaagcgtgacagattggtcaacgagcccctggctgcctactcctacttccagattggtgccat

SEQ ID NO: 150780 - DNA, 120 bp, Artificial Sequence
  ENSG00000105675_22 (sequence is synthesized)
tcagtcctttgctggcttcactgactacttcacggcaatggcccaggagggctggttcccactgctgtgcgtggggctgcgggcgcagtgggaggaccaccacctacaagatctgcagga

SEQ ID NO: 150781 - DNA, 120 bp, Artificial Sequence
  ENSG00000105675_23 (sequence is synthesized)
cagctacggccaggagtggacattcgggcagcgcctgtaccagcagtacacctgctacaccgtgttcttcatcagcattgaggtgtgccagatcgccgatgtcctcatccgcaagacgcg

SEQ ID NO: 150782 - DNA, 120 bp, Artificial Sequence
  ENSG00000105675_24 (sequence is synthesized)
ccgtctctctgccttccagcaaggcttcttcaggaataagatcctggtgatcgccatcgtgttccaggtctgcatcggctgcttcctgtgctactgccccggcatgcccaacatcttcaa

SEQ ID NO: 150783 - DNA, 120 bp, Artificial Sequence
  ENSG00000105675_25 (sequence is synthesized)
cttcatgcccattcggttccagtggtggctggtccccctgccctacggcatcctcatcttcgtctatgatgagatccggaagcttggagttcgctgttgcccagggagctggtgggacca

SEQ ID NO: 150784 - DNA, 120 bp, Artificial Sequence
  ENSG00000105675_26 (sequence is synthesized)
ggaactctactattagagggacgactgccttcaagcatccctgcaactgccacagcaggtgggggcagggctcgtgggaccctctggacagccaccaagatatctgagcaaccaagagtc

SEQ ID NO: 150785 - DNA, 120 bp, Artificial Sequence
  ENSG00000105675_27 (sequence is synthesized)
ccagccccaccagtatctgcttctgtagcccacggcaccccaaacttggagggacctgcccactcccctcccccattcccaaggttcgcacctcctggagcagcagcgcctgggcagtcc

SEQ ID NO: 150786 - DNA, 120 bp, Artificial Sequence
  ENSG00000105675_28 (sequence is synthesized)
tctgggctggcctcgggaaagccgccacctgtggtggcggtggggctctgacagggagtacagctgaccgcttctggagggtgtttctgttcttaggactccagtccaggctggacggct

SEQ ID NO: 150787 - DNA, 120 bp, Artificial Sequence
  ENSG00000105675_29 (sequence is synthesized)
gcctgagggcccttcgttaaagacacgcttgtgtcctgggcgatggtaataaaaccagctcatgctgactgtgctgtatctggtgccaggcactgtcctcagcgtctctcattagtgctt

SEQ ID NO: 150788 - DNA, 120 bp, Artificial Sequence
  ENSG00000105675_30 (sequence is synthesized)
gtgatctcccacagtcctgtacatgggggctgtttatccagggctgcacctccagtgcctagtacacagcctggcacatagtaggtcctcaataaacctgccttggggaaatgattccta

SEQ ID NO: 150789 - DNA, 120 bp, Artificial Sequence
  ENSG00000105675_31 (sequence is synthesized)
gaaccaggcagtgggcggggagggggccaggagagcccagagcaagcaccctgccccaccccaccacacagaacgaccaccagctgtcagtggcggagctggaacagaaataccagacca

SEQ ID NO: 150790 - DNA, 120 bp, Artificial Sequence
  ENSG00000105675_32 (sequence is synthesized)
gtggagcagggtccgagccacgccagggggagggcaggcagtgtgggcacaggagggagagggctgtgaggaggctgaggtgcccaccctaccccacaggtcgactgatcttcgacaacc

SEQ ID NO: 150791 - DNA, 120 bp, Artificial Sequence
  ENSG00000105676_0 (sequence is synthesized)
ggctctcttgcgcaagcgcgctgtccgcttcttctgggcggacgctctggaggcaaaacatttccctgctgggggcggcgaccaccgtgagcgtcccggaaggggcggcaaagacgcctc

SEQ ID NO: 150792 - DNA, 120 bp, Artificial Sequence
  ENSG00000105676_1 (sequence is synthesized)
cgtcgcgcacgaggtggcctcgttggctttaccttggttcgcggtcgtccttggttatcgtgagcgtccgcgagtctctgggaggccaagcctaggggcgccacagcgcctgcgcgcgta

SEQ ID NO: 150793 - DNA, 120 bp, Artificial Sequence
  ENSG00000105676_2 (sequence is synthesized)
cggcggccggaaggggctagaggcggctccctgggtgacaaccgcgcgccccacctttccccacgtggccgcgaagaccgggtgagacgctgcggctgccgaggcctgtcccgcgcggag

SEQ ID NO: 150794 - DNA, 120 bp, Artificial Sequence
  ENSG00000105676_3 (sequence is synthesized)
tggggagtgggggtgccgcagggtcgggctggcgcgaccctcggctcaggagcatctatcggctgcacgccaacatcaacacaggcgaagatggtctccaagcgcattgcccaggagacc

SEQ ID NO: 150795 - DNA, 120 bp, Artificial Sequence
  ENSG00000105676_4 (sequence is synthesized)
tttgatgcagctgtgcgcgagaacatcgaggagtttgcgatggggccagaggaggcagtgaaagaggccgtggagcagtttgaatcgcaaggggttgatctgagcaacattgtaaagacg

SEQ ID NO: 150796 - DNA, 120 bp, Artificial Sequence
  ENSG00000105676_5 (sequence is synthesized)
gcacctaaagtctctgcagacggatcccaggagcccacacatgacatcctgcagatgctcagtgacctccaggagtctgtggccagctctcgcccccaggaggtgtcagcatacctcacc

SEQ ID NO: 150797 - DNA, 120 bp, Artificial Sequence
  ENSG00000105676_6 (sequence is synthesized)
cgcttctgcgaccagtgcaaacaggacaaggcctgccgcttcctcgcggcccagaagggggcctaccccatcatcttcactgcctggaagctggccactgcaggtgaccagggccttctg

SEQ ID NO: 150798 - DNA, 120 bp, Artificial Sequence
  ENSG00000105676_7 (sequence is synthesized)
ctccagtccctcaatgccctgtcggtgctgactgatggacagccagacctcctggatgcccagggcctgcagctcctagtggccacgctgacccagaatgctgatgaggctgacctgacc

SEQ ID NO: 150799 - DNA, 120 bp, Artificial Sequence
  ENSG00000105676_8 (sequence is synthesized)
tgctctgggatccgctgtgtgcgtcacgcttgcctgaaacatgaacagaatcggcaagacctggtgaaagctggcgtgctgcctctgctgactggtgccatcacccatcatggccaccac

SEQ ID NO: 150800 - DNA, 120 bp, Artificial Sequence
  ENSG00000105676_9 (sequence is synthesized)
actgacgtggtcagggaagcctgctgggccctgcgtgtcatgaccttcgatgacgacatccgtgtgccctttggccatgcccacaaccatgccaagatgattgtgcaggagaacaaaggc

SEQ ID NO: 150801 - DNA, 120 bp, Artificial Sequence
  ENSG00000105676_10 (sequence is synthesized)
atcgaagccaccaaagcgttcctggataaccctggcatcctgagcgagctctgtggaaccctgtcccgcctggccattcgcaacgagttctgccaggaggtcgtcgacctcgggggcctg

SEQ ID NO: 150802 - DNA, 120 bp, Artificial Sequence
  ENSG00000105676_11 (sequence is synthesized)
agcattctggtgtccctgctagccgactgcaatgaccaccagatgagggaccagagcggcgttcaggagctcgtgaagcaagtgctgagcaccctgcgagccatcgcaggcaacgacgac

SEQ ID NO: 150803 - DNA, 120 bp, Artificial Sequence
  ENSG00000105676_12 (sequence is synthesized)
gtgaaagatgctattgtccgtgctggtgggacggagtccatcgtggctgctatgacccagcatctgaccagcccccaggtgtgtgagcagagctgcgcggccctgtgcttcctggccctg

SEQ ID NO: 150804 - DNA, 120 bp, Artificial Sequence
  ENSG00000105676_13 (sequence is synthesized)
cgtaagcccgacaacagccgcatcatcgtggagggtggcggggctgtggcagcactgcaggccatgaaggcacacccgcagaaggccggcgtgcagaaacaggcttgcatgctgatccga

SEQ ID NO: 150805 - DNA, 120 bp, Artificial Sequence
  ENSG00000105676_14 (sequence is synthesized)
aacctggtggcccacggccaggccttctcgaagcccatcctggacctgggggctgaggcactcatcatgcaggcccgatctgcccaccgtgactgtgaggacgtggccaaggccgccctg

SEQ ID NO: 150806 - DNA, 120 bp, Artificial Sequence
  ENSG00000105676_15 (sequence is synthesized)
cgggacctgggttgtcatgtcgagctccgagagctgtggacaggccagaggggcaacctggcgccatgaccccaggcccagtctgggccgtgactctgggtgagtcgtgtgactcaggaa

SEQ ID NO: 150807 - DNA, 120 bp, Artificial Sequence
  ENSG00000105676_16 (sequence is synthesized)
tgggggtagatccatgtcctccactgtcccccattagttctgtccccttcacaatgagaagtgttttctggcaggccctaggtaaagggtcgggggaggggggagccttgtagggaggcc

SEQ ID NO: 150808 - DNA, 120 bp, Artificial Sequence
  ENSG00000105676_17 (sequence is synthesized)
tctacacagaagaaagcagcccccatgtcccagccacttctgggtcccagccagcagcacggatgttactgtcctgctccttcccccagccccacgccctaccagagggggcaaagggca

SEQ ID NO: 150809 - DNA, 120 bp, Artificial Sequence
  ENSG00000105676_18 (sequence is synthesized)
cgtcccatcactcactgccctgtctgaaatgtggcagccactgtgggccaggctcagggcagggcaggcgattccagtggggttgggccccctggcgcctgctgcttactgcagtttcat

SEQ ID NO: 150810 - DNA, 120 bp, Artificial Sequence
  ENSG00000105676_19 (sequence is synthesized)
gcaggcctctgctccttgtctttcttacctgtaaaatgggtctcagatgctccgccctgcttggccccagcttgtctgtctctgggtcctgggccagccaggatacctgataataaaaga

SEQ ID NO: 150811 - DNA, 120 bp, Artificial Sequence
  ENSG00000105676_20 (sequence is synthesized)
ttttcattcattttatttattcattcagcacctgtgcactgagtgcctgctgcgtgtcgggccccgtcctaggcagtggggacaaggaggctacagggtacaaataaatgagtgaacgat

SEQ ID NO: 150812 - DNA, 120 bp, Artificial Sequence
  ENSG00000105676_21 (sequence is synthesized)
gcaggcccccagcttccgtggaatccagccgatgcaaacagctgaggagcgtcaccctggctgcacctctccgtggtgtccccgtctcccctgcccccagcaggaaagggtgctctcagc

SEQ ID NO: 150813 - DNA, 120 bp, Artificial Sequence
  ENSG00000105676_22 (sequence is synthesized)
tcagcagggctggcccaaacctctgacccagtcaccccgccctatccctcctccctggagactcccaggatgtgggagaaagatctcgaatctgccccagactgccctgacttaacttct

SEQ ID NO: 150814 - DNA, 70 bp, Artificial Sequence
  ENSG00000105676_23 (sequence is synthesized)
tgctcaagtggttctcctacctcggtctccctgattgctgggattacagacctcaggagcatctatcggc

SEQ ID NO: 150815 - DNA, 120 bp, Artificial Sequence
  ENSG00000105676_24 (sequence is synthesized)
ggctctcttgcgcaagcgcgctgtccgcttcttctgggcggacgctctggaggctacagggtacaaataaatgagtgaacgatgttgctctagatacagctcaggagcatctatcggctg

SEQ ID NO: 150816 - DNA, 120 bp, Artificial Sequence
  ENSG00000105676_25 (sequence is synthesized)
cagtgctggccctgtcattcctgctccagccttgctctcagtctgcccatggctcccctttgccttctacataaaaccaaacctgtctgtggtcccagcaacttgggctaaggcgggaag

SEQ ID NO: 150817 - DNA, 89 bp, Artificial Sequence
  ENSG00000105676_26 (sequence is synthesized)
acctgtctgtggtcccagcaacttgggctaaggcgggaagatcacttgagcccaggagtcaaggctgcagtgagttagggatcaagagc

SEQ ID NO: 150818 - DNA, 120 bp, Artificial Sequence
  ENSG00000105676_27 (sequence is synthesized)
atgccctgcagacccagtatggcccaggccttgcccatttcccagtctttccactgtactcactccctattcccccaccccagggcctttgcacaagcccccatgtgacaagccatgccc

SEQ ID NO: 150819 - DNA, 120 bp, Artificial Sequence
  ENSG00000105676_28 (sequence is synthesized)
tctgcctagaagtgcccttcccttggccttccccgtggccggctcctcctagcacatgaggtttcagctcacgttgccttctccaggagagacccccatctcatcacctcatgtgctctg

SEQ ID NO: 150820 - DNA, 120 bp, Artificial Sequence
  ENSG00000105676_29 (sequence is synthesized)
gctctgacactgggccccatctgaggtcacctcatttgtgaactctcctgtttgtcttgcccccaccatcggctggctccctgcagggaggcccctgtccccacttgctgtgccttcagc

SEQ ID NO: 150821 - DNA, 120 bp, Artificial Sequence
  ENSG00000105676_30 (sequence is synthesized)
ttcccgtcagtgtttttgagtgttcacctgaataaactgacaagcactcgaggtccctgccaggtggccccagcgtcctcccctgggcctgggccaagctgcaggcttcttcaggaaggg

SEQ ID NO: 150822 - DNA, 120 bp, Artificial Sequence
  ENSG00000105676_31 (sequence is synthesized)
gcgaagaccggagacggggccttactatgttgtccttgctggtctcaaactccagacttgaaacagtcctcccaccttggcctcctaaagcactgggatcacagctcaggagcatctatc

SEQ ID NO: 150823 - DNA, 120 bp, Artificial Sequence
  ENSG00000105676_32 (sequence is synthesized)
tccttccgcctcggcctcccaaagtgcaggccaccatgcctggcctgaagtggaaacttgataattccagaacggaaacttgatattactgcaataagcaagctcaggagcatctatcgg

SEQ ID NO: 150824 - DNA, 120 bp, Artificial Sequence
  ENSG00000105677_0 (sequence is synthesized)
agtcaggtgggtgccaggccctggccgtggcgaaagagccggcggagccggagacccgctcccggagacgccgcctcgcgatccccgcgcgggcgggaccgggcggccggcatcatgacc

SEQ ID NO: 150825 - DNA, 120 bp, Artificial Sequence
  ENSG00000105677_1 (sequence is synthesized)
ctgtttcacttcgggaactgcttcgctcttgcctacttcccctacttcatcacctacaagtgcagcggcctgtccgagtacaacgccttctggaaatgcgtccaggctggagtcacctac

SEQ ID NO: 150826 - DNA, 120 bp, Artificial Sequence
  ENSG00000105677_2 (sequence is synthesized)
ctctttgtccaactctgcaagatgctgttcttggccactttctttcccacctgggaaggcggcatctatgacttcattggggagttcatgaaggccagcgtggatgtggcagacctgata

SEQ ID NO: 150827 - DNA, 120 bp, Artificial Sequence
  ENSG00000105677_3 (sequence is synthesized)
ccggcaagggagagtacaagatcatggttgctgccctgggctgggccactgctgagcttattatgtcccgctgcattcccctatgggtcggagcccggggcattgagtttgactggaagt

SEQ ID NO: 150828 - DNA, 120 bp, Artificial Sequence
  ENSG00000105677_4 (sequence is synthesized)
acatccagatgagcatagactccaacatcagtctggtccattacatcgtcgcgtctgctcaggtctggatgataacacgctatgatctgtaccacaccttccggccagctgtcctcctgc

SEQ ID NO: 150829 - DNA, 120 bp, Artificial Sequence
  ENSG00000105677_5 (sequence is synthesized)
tgatgttcctcagtgtctacaaggcctttgttatggagaccttcgtccacctctgctcgctgggcagttgggcagctctactggcccgagcagtggtaacggggctgctggccctcagca

SEQ ID NO: 150830 - DNA, 120 bp, Artificial Sequence
  ENSG00000105677_6 (sequence is synthesized)
ctttggccctgtatgtcgccgttgtcaatgtgcactcctaggcttggtgtctcagacattgatgtaccttttccctgcctcactccaggttttagtgaagtaaacagtatttggaaagtt

SEQ ID NO: 150831 - DNA, 120 bp, Artificial Sequence
  ENSG00000105677_7 (sequence is synthesized)
gccccacggtgggaccgccctcgggactccgcactgggaggcgtcaggatacctagagaggatggactttaaagagggcacgacctgagaagagacctagaagcaacttttgcgtagcac

SEQ ID NO: 150832 - DNA, 120 bp, Artificial Sequence
  ENSG00000105677_8 (sequence is synthesized)
ttagtaaaactgagaaaacctcagtagtgtggttggctaacaggttttttttggtgcggttaagagtgatcactgattccgtacgtgctgctaacactgcccaaggagcagcaccttcag

SEQ ID NO: 150833 - DNA, 120 bp, Artificial Sequence
  ENSG00000105677_9 (sequence is synthesized)
atcatggttgctgccctgggctgggccactgctgagcttattatgtcccggtgcgtacagcagcctggagcccagacccctgagaagggacacctgggttccacgggggtgctggagggc

SEQ ID NO: 150834 - DNA, 120 bp, Artificial Sequence
  ENSG00000105677_10 (sequence is synthesized)
ggagcccggggcattgagtttgactggaagtacatccagatgagcatagactccaacatcagtctggtaggcagtcgtgctctcccacatacacatttctgctggcggccatactcctcc

SEQ ID NO: 150835 - DNA, 120 bp, Artificial Sequence
  ENSG00000105677_11 (sequence is synthesized)
ctacttcccctacttcatcacctacaagtgcagcggcctgtgagtgcgggaagggcgcggggcggagagggcgcggggcccgggccgaccctcacctcccgcttctccaggtccgagtac

SEQ ID NO: 150836 - DNA, 120 bp, Artificial Sequence
  ENSG00000105677_12 (sequence is synthesized)
attttgccaccatctggtggttcctcttccagatgggcccccagaacctgtcctgccctcttcctacccacgaacttcccacaaatcccacgtggtttatcttgatcccctcaccttgaa

SEQ ID NO: 150837 - DNA, 120 bp, Artificial Sequence
  ENSG00000105677_13 (sequence is synthesized)
gaagggaagggagttcaggaatggggctccctgtccccctgtgcttacttaagcctcaacctgacccgcaggagttcatgaaggccagcgtggatgtggcagacctgataggtctaaacc

SEQ ID NO: 150838 - DNA, 120 bp, Artificial Sequence
  ENSG00000105677_14 (sequence is synthesized)
ggtgggttatctagtctcccttccttattgtgacattttcctgcaggaccttcgtccacctctgctcgctgggcagttgggcagctctactggcccgagcagtggtaacggggctgctgg

SEQ ID NO: 150839 - DNA, 120 bp, Artificial Sequence
  ENSG00000105679_0 (sequence is synthesized)
agccctggcgctccgcacgcacctcggtaacatcacagcaggtccaggccaatgataaccttataagaggccatgtcgaagcgcgacatcgtcctcaccaatgtcaccgttgtccagttg

SEQ ID NO: 150840 - DNA, 120 bp, Artificial Sequence
  ENSG00000105679_1 (sequence is synthesized)
ctgcgacagccgtgcccggtgaccagagcaccgcccccacctgagcctaaggctgaagtagagccccagccacaaccagagcccacaccagtcagggaggaaataaagccaccaccgcca

SEQ ID NO: 150841 - DNA, 120 bp, Artificial Sequence
  ENSG00000105679_2 (sequence is synthesized)
ccactgcctcctcaccccgctactcctcctcctaagatggtgtctgtggcccgggagctgactgtgggcatcaatggatttggacgcatcggtcgcctggtcctgcgcgcctgcatggag

SEQ ID NO: 150842 - DNA, 120 bp, Artificial Sequence
  ENSG00000105679_3 (sequence is synthesized)
aagggtgttaaggtggtggctgtgaatgatccattcattgacccggaatacatggtgtacatgtttaagtatgactccacccacggccgatacaagggaagtgtggaattcaggaatgga

SEQ ID NO: 150843 - DNA, 120 bp, Artificial Sequence
  ENSG00000105679_4 (sequence is synthesized)
caactggtcgtggacaaccatgagatctctgtctaccagtgcaaagagcccaaacagatcccctggagggctgtcgggagcccctacgtggtggagtccacaggcgtgtacctctccata

SEQ ID NO: 150844 - DNA, 120 bp, Artificial Sequence
  ENSG00000105679_5 (sequence is synthesized)
caggcagcttcggaccacatctctgcaggtgctcaacgtgtggtcatctccgcgccctcaccggatgcaccaatgttcgtcatgggtgtcaatgaaaatgactataaccctggctccatg

SEQ ID NO: 150845 - DNA, 120 bp, Artificial Sequence
  ENSG00000105679_6 (sequence is synthesized)
gagcaacgcgtcctgcaccaccaactgtttggctcccctcgccaaagtcatccacgagcgatttgggatcgtggaagggttgatgaccacagtccattcctacacggccacccagaagac

SEQ ID NO: 150846 - DNA, 120 bp, Artificial Sequence
  ENSG00000105679_7 (sequence is synthesized)
agtggacgggccatcaaggaaggcctggcgagatgggcggggtgcccaccagaacatcatcccagcctccactggggctgcgaaagctgtgaccaaagtcatcccagagctcaaagggaa

SEQ ID NO: 150847 - DNA, 120 bp, Artificial Sequence
  ENSG00000105679_8 (sequence is synthesized)
gctgacagggatggcgttccgggtaccaaccccggatgtgtctgtcgtggacctgacctgccgcctcgcccagcctgccccctactcagccatcaaggaggctgtaaaagcagcagccaa

SEQ ID NO: 150848 - DNA, 120 bp, Artificial Sequence
  ENSG00000105679_9 (sequence is synthesized)
ggggcccatggctggcatccttgcctacaccgaggatgaggtcgtctctacggacttcctcggtgatacccactcgtccatcttcgatgctaaggccggcattgcgctcaatgacaattt

SEQ ID NO: 150849 - DNA, 120 bp, Artificial Sequence
  ENSG00000105679_10 (sequence is synthesized)
cgtgaagctcatttcatggtacgacaacgaatatggctacagtcaccgggtggtcgacctcctccgctacatgttcagccgagacaagtgaaacgggaaggtcctttctttccttcccag

SEQ ID NO: 150850 - DNA, 120 bp, Artificial Sequence
  ENSG00000105679_11 (sequence is synthesized)
gggccggggccggaacatgtgcctcccgttccagcatctggctgcccgggggaggaaggacacccggggcgggcgccccacgccgatgggtccatggtgaaataaaaaacagtgctcacg

SEQ ID NO: 150851 - DNA, 120 bp, Artificial Sequence
  ENSG00000105695_0 (sequence is synthesized)
gagctgggctggcggagcagaggtgcagaagcaactgagtccaagttgtctggcggcttcaggtggacccagaagacgtccccaactcagggagattcagcgatcactcactcgctgtac

SEQ ID NO: 150852 - DNA, 120 bp, Artificial Sequence
  ENSG00000105695_1 (sequence is synthesized)
agaatgatattcctcacggcactgcctctgttctggattatgatttcagcctcccgagggggtcactggggtgcctggatgccctcgtccatctcggccttcgaaggcacgtgcgtctcc

SEQ ID NO: 150853 - DNA, 120 bp, Artificial Sequence
  ENSG00000105695_2 (sequence is synthesized)
atcccctgccgctttgacttcccggatgagctgcggcccgctgtggtgcatggtgtctggtacttcaatagcccctaccccaagaactaccccccggtggtcttcaagtcgcgcacccaa

SEQ ID NO: 150854 - DNA, 120 bp, Artificial Sequence
  ENSG00000105695_3 (sequence is synthesized)
gtagtccacgagagcttccagggccgcagccgcctcctgggggacctgggcctgcgaaactgcaccctcctgctcagcaacgtcagccccgagctgggcgggaagtactacttccgtggg

SEQ ID NO: 150855 - DNA, 120 bp, Artificial Sequence
  ENSG00000105695_4 (sequence is synthesized)
gacctgggcggctacaaccagtacaccttctcagagcacagcgtcctggatatcgtcaacacccccaacatcgtggtgcccccagaggtggtggcaggcacggaggtggaggtcagctgc

SEQ ID NO: 150856 - DNA, 120 bp, Artificial Sequence
  ENSG00000105695_5 (sequence is synthesized)
atggtgccggacaactgcccagagctgcgccctgagctgagctggctgggccacgaggggctgggggagcccgctgtgctgggccggctgcgggaggacgagggcacctgggtgcaggtg

SEQ ID NO: 150857 - DNA, 120 bp, Artificial Sequence
  ENSG00000105695_6 (sequence is synthesized)
tcactgctgcacttcgtgcccacgagggaggccaacggccacaggctgggctgccaggcctccttccccaacaccaccctgcagttcgagggctacgccagcatggacgtcaagtacccc

SEQ ID NO: 150858 - DNA, 120 bp, Artificial Sequence
  ENSG00000105695_7 (sequence is synthesized)
ccggtgattgtggagatgaactcctcggtggaggccatcgagggctcccacgtgagcctgctctgtggggctgacagcaaccccccgccgctgctgacctggatgcgggacgggacagtc

SEQ ID NO: 150859 - DNA, 120 bp, Artificial Sequence
  ENSG00000105695_8 (sequence is synthesized)
ctccgggaggcggtggccgagagcctgctcctggagctggaggaggtgacccccgccgaagacggcgtctatgcctgcctggccgagaatgcctatggccaggacaaccgcaccgtgggg

SEQ ID NO: 150860 - DNA, 120 bp, Artificial Sequence
  ENSG00000105695_9 (sequence is synthesized)
cttgtgctccacacagagcaacccggaccctattctcaccatcttcaaggagaagcagatcctgtccacggtcatctacgagagcgagctgcagctggagctgccggccgtgtcacccga

SEQ ID NO: 150861 - DNA, 120 bp, Artificial Sequence
  ENSG00000105695_10 (sequence is synthesized)
ggatgatggagagtactggtgtgtggctgagaaccagtatggccagagggccaccgccttcaacctgtctgtggagttcgcccctgtgctcctcctggagtcccactgcgcggcagcccg

SEQ ID NO: 150862 - DNA, 120 bp, Artificial Sequence
  ENSG00000105695_11 (sequence is synthesized)
agacacggtgcagtgcctgtgcgtggtgaagtccaacccggagccgtccgtggcctttgagctgccatcgcgcaatgtgaccgtgaacgagagcgagcgggagttcgtgtactcggagcg

SEQ ID NO: 150863 - DNA, 120 bp, Artificial Sequence
  ENSG00000105695_12 (sequence is synthesized)
cagcggcctcgtgctcaccagcatcctcacgctgcgggggcaggcccaggccccgccccgcgtcatctgcaccgcgaggaacctctatggcgccaagagcctggagctgcccttccaggg

SEQ ID NO: 150864 - DNA, 120 bp, Artificial Sequence
  ENSG00000105695_13 (sequence is synthesized)
agcccatcgactgatgtgggccaagatcgggcctgtgggcgccgtggtcgcctttgccatcctgattgccatcgtctgctacattacccagacacgcaggaaaaagaacgtgacagagag

SEQ ID NO: 150865 - DNA, 120 bp, Artificial Sequence
  ENSG00000105695_14 (sequence is synthesized)
ccccagcttctcggcaggggacaaccctcccgtcctgttcagcagcgacttccgcatctctggggcaccagagaagtacgagagcgagaggcgcctgggatctgagaggaggctgctggg

SEQ ID NO: 150866 - DNA, 120 bp, Artificial Sequence
  ENSG00000105695_15 (sequence is synthesized)
ccttcggggtgagcccccagagctggacctgagctattctcactcggacctggggaaacggcccaccaaggacagctacacgctgacggaggagctagctgagtatgctgaaatccgggt

SEQ ID NO: 150867 - DNA, 120 bp, Artificial Sequence
  ENSG00000105695_16 (sequence is synthesized)
caagtgaaggagctgggggcagcctgcgtggctgacccccctcaggaccctcgctggcccccactggctgtgggctcccttcctcccaaaagtatcgggggctggggcaggaggggagtg

SEQ ID NO: 150868 - DNA, 120 bp, Artificial Sequence
  ENSG00000105695_17 (sequence is synthesized)
aggcaggtgacagtgaggtcctgggggcctgacctccccctccttcccagctgcccctccctgccagcacccccacgccctcattacggctcctctctaacctcctttaccctcatctgt

SEQ ID NO: 150869 - DNA, 120 bp, Artificial Sequence
  ENSG00000105695_18 (sequence is synthesized)
ctggaggggagctctgtctgtccgtgttatttattgctacttcctgcctggtctcctgcccccacacctggccctggggcctgtacaaaagggacatgaaataaatgccccaaagccaaa

SEQ ID NO: 150870 - DNA, 120 bp, Artificial Sequence
  ENSG00000105695_19 (sequence is synthesized)
gagctgggctggcggagcagaggtgcagaagcaactgagtccaagttgtctggcggcttcaggtggacccagaagacgtccccaactcagggagattcaggtaacggctgacaggtgctg

SEQ ID NO: 150871 - DNA, 120 bp, Artificial Sequence
  ENSG00000105695_20 (sequence is synthesized)
gagaagtacgagtccaaagaggtttctaccctggaatctcactgagtgccccaggaggtaggttccgggggcctcagtgtgccctcctctgggccctccttgggccctggggttggcgtg

SEQ ID NO: 150872 - DNA, 120 bp, Artificial Sequence
  ENSG00000105695_21 (sequence is synthesized)
ctcccttctgtctgtggccaccgtcctgtgtgtccaaattcctgtggctagggggtggagggaggggtgggaagcgtggggggaacccacatgtcacctgcaggacctcccagattgagg

SEQ ID NO: 150873 - DNA, 120 bp, Artificial Sequence
  ENSG00000105695_22 (sequence is synthesized)
gcggacccatgcaggacccatgggggggcacgtaccaaaccaggtatttccaggaatttggaaagatggggtcctgactaggtggttttcacccaaaaaggtattaggggttacattgtg

SEQ ID NO: 150874 - DNA, 120 bp, Artificial Sequence
  ENSG00000105696_0 (sequence is synthesized)
cgcagccgctgcatcctccgtgcccggcctgagctggagtcccccgcgccccccgcgttccgcccggccatggctgcggtggcgctgatgccaccgccgctgctgctgctgctgctgttg

SEQ ID NO: 150875 - DNA, 120 bp, Artificial Sequence
  ENSG00000105696_1 (sequence is synthesized)
tgctgctgctgctgctgttggcgtcgccgcccgccgcctccgcgccgtccgcccgcgatcccttcgccccccagctcggggacacgcagaactgccagctgcggtgccgcgaccgcgacc

SEQ ID NO: 150876 - DNA, 120 bp, Artificial Sequence
  ENSG00000105696_2 (sequence is synthesized)
tcggcccgcagccctcgcaggcggggctggagggcgcctccgagtctccctatgacagagccgttctgatcagcgcttgcgagcgtggctgccgcctcttctccatctgccgatttgtgg

SEQ ID NO: 150877 - DNA, 120 bp, Artificial Sequence
  ENSG00000105696_3 (sequence is synthesized)
ccagaagctccaagcccaatgccacccaaactgagtgtgaagcagcctgcgtggaagcctatgtgaaggaggcagagcagcaggcctgtagccacggctgctggagccagcccgcggagc

SEQ ID NO: 150878 - DNA, 120 bp, Artificial Sequence
  ENSG00000105696_4 (sequence is synthesized)
ctgagccggagcagaagagaaaggtcctggaggctccaagtggggccctctccctcttggacttgttttccaccctctgcaatgaccttgtcaactcagcccagggatttgtctcctcca

SEQ ID NO: 150879 - DNA, 120 bp, Artificial Sequence
  ENSG00000105696_5 (sequence is synthesized)
cctggacatactacttgcagactgacaatgggaaagtggtggtgtttcagactcagcccatagtggagagcctcggcttccaggggggccgtctgcagcgcgtggaggtgacctggcgag

SEQ ID NO: 150880 - DNA, 120 bp, Artificial Sequence
  ENSG00000105696_6 (sequence is synthesized)
gaaggccaagatccgagtcaagaccagcagcaaggccaaggtggagtctgaagagccacaggacaatgacttcctcagttgcatgtcccggcgctcgggtctgcctcgctggatcctggc

SEQ ID NO: 150881 - DNA, 120 bp, Artificial Sequence
  ENSG00000105696_7 (sequence is synthesized)
ctgctgcctcttcctctccgtgctggtgatgctgtggctgagctgctccaccctggtgaccgcgcctggccagcacctcaagttccagcctctgaccctggagcagcacaagggcttcat

SEQ ID NO: 150882 - DNA, 120 bp, Artificial Sequence
  ENSG00000105696_8 (sequence is synthesized)
gatggagcccgattggcccctgtacccgccgccgtcccacgcctgtgaggacagcctaccaccctacaagctgaagctggacctgaccaagctgtaggcctccactggccccatcactgc

SEQ ID NO: 150883 - DNA, 120 bp, Artificial Sequence
  ENSG00000105696_9 (sequence is synthesized)
caactgcagggggcccctcgggcctcacttgccctgagcccaggagtccaagggcagggtgggtccagccttgagcccctccacccccaaatccttcctctcctcccagtcccacccctt

SEQ ID NO: 150884 - DNA, 120 bp, Artificial Sequence
  ENSG00000105696_10 (sequence is synthesized)
gccccacggagtcctggggacgcagtgccccagctgggaagagggcgggatcgggcactggttcctccttgtccccgctttcttgggggcttgctactttttgtcttctattgtgtggct

SEQ ID NO: 150885 - DNA, 120 bp, Artificial Sequence
  ENSG00000105696_11 (sequence is synthesized)
ttctgagtatttgaaccccagtcctgtgtcaccttcctttttccttctatgtcccctctctgcggggggggcgctgaggctgagggggagctgcgtcttgctagggcttcccccttctcc

SEQ ID NO: 150886 - DNA, 120 bp, Artificial Sequence
  ENSG00000105696_12 (sequence is synthesized)
ccatcccggtctccagagacccagcttctgagagacagggtgtgggcatctccatgcccctataaagcgtgcctggggcttgtctggggctggggaggaataaaccatgtatataaaaga

SEQ ID NO: 150887 - DNA, 120 bp, Artificial Sequence
  ENSG00000105696_13 (sequence is synthesized)
cttcctcagttgcatgtcccggtgggtggcaggaccttgggggtgggaggggggtgggactggaggtacgggtctccctggtcccggcctgggcagctgagtggtgcctgccgggcgggg

SEQ ID NO: 150888 - DNA, 120 bp, Artificial Sequence
  ENSG00000105696_14 (sequence is synthesized)
ggatctccatctctcaagtcctgggttccatggctcatcccccaggtctccatggtctatttcccagggttccatggtccacctcccagggttccatggtccacttctcagggttccgtg

SEQ ID NO: 150889 - DNA, 120 bp, Artificial Sequence
  ENSG00000105696_15 (sequence is synthesized)
gtctacttcccagggttccgtggtccatctccccgggttccatggtctatttaccagggatccgtggtccacctctcagggttccgtggcccacctcccgggttccgtggccacctccca

SEQ ID NO: 150890 - DNA, 120 bp, Artificial Sequence
  ENSG00000105696_16 (sequence is synthesized)
gggttccgtgttccgcctcccagcgttctgtggtccacctcccagggatccatggttcactttccagggttctgtggcccatctccctgggttctgtggcccatctcccagggttccatg

SEQ ID NO: 150891 - DNA, 120 bp, Artificial Sequence
  ENSG00000105696_17 (sequence is synthesized)
gttcatctctcagagttccatgggttcatctcctagggtcatctcctagggtccatctccaagggttctttggtccatctctcagggttccatggttcatctcttaggattctgcagttc

SEQ ID NO: 150892 - DNA, 120 bp, Artificial Sequence
  ENSG00000105696_18 (sequence is synthesized)
atctcccagggttctgtggcccatcccccagggttctgcagtccatctcccagggttccatggtccatttcccagggttccatgttccatctcccagggttccatgttccatctcccagg

SEQ ID NO: 150893 - DNA, 120 bp, Artificial Sequence
  ENSG00000105696_19 (sequence is synthesized)
gttccatgggttcatctcctaagggtcatctcctaggatccatctcccagggttccatgggttcatcttctagggtcatctcctagggtccatctcctagagttctttggtctatctctc

SEQ ID NO: 150894 - DNA, 120 bp, Artificial Sequence
  ENSG00000105696_20 (sequence is synthesized)
gaaggccaagatccgagtcaagaccagcagcaaggccaaggcgctcgggtctgcctcgctggatcctggcctgctgcctcttcctctccgtgctggtgatgctgtggctgagctgctcca

SEQ ID NO: 150895 - DNA, 120 bp, Artificial Sequence
  ENSG00000105697_0 (sequence is synthesized)
accagagcaagctcaagacccagcagtgggacagccagacagacggcacgatggcactgagctcccagatctgggccgcttgcctcctgctcctcctcctcctcgccagcctgaccagtg

SEQ ID NO: 150896 - DNA, 120 bp, Artificial Sequence
  ENSG00000105697_1 (sequence is synthesized)
ccaggacagagctggagccagggccagctggatgcccatgttccagaggcgaaggaggcgagacacccacttccccatctgcattttctgctgcggctgctgtcatcgatcaaagtgtgg

SEQ ID NO: 150897 - DNA, 120 bp, Artificial Sequence
  ENSG00000105697_2 (sequence is synthesized)
gatgtgctgcaagacgtagaacctacctgccctgcccccgtcccctcccttccttatttattcctgctgccccagaacataggtcttggaataaaatggctggttcttttgttttccaaa

SEQ ID NO: 150898 - DNA, 120 bp, Artificial Sequence
  ENSG00000105697_3 (sequence is synthesized)
gagcctcccacgtggtgtggatgaggaggcagatggcagggcctgtgcatttctgtgcttgagtgggccttgaaagtggttcagcaaccaggaagaagtgttcattcctcgacaacaaca

SEQ ID NO: 150899 - DNA, 120 bp, Artificial Sequence
  ENSG00000105697_4 (sequence is synthesized)
tccccgggctctggtgacttggctgacactggatggccctggaatgaaaaaggcaaagaggcaaaatgtgcaagggcccatctggaaccaaggccccataaaagcgactgtcactcggtc

SEQ ID NO: 150900 - DNA, 89 bp, Artificial Sequence
  ENSG00000105697_5 (sequence is synthesized)
gccaggcctcagcctagggcactggagacacccgagcactgagcagagctcaggacgtctcaggagtactggcagctgaacaggaacca

SEQ ID NO: 150901 - DNA, 64 bp, Artificial Sequence
  ENSG00000105697_6 (sequence is synthesized)
gaacagaaatcaatgaagcaccgagtgacagggactggaaggtcctaattccatgggtatttac

SEQ ID NO: 150902 - DNA, 120 bp, Artificial Sequence
  ENSG00000105697_7 (sequence is synthesized)
gtgacagggactggaaggtcctaattccatgggtatttacggaacccctacgccgtgtggagtcttattctagacagtggggacgaggccatgaacaaggtagatgagagaggagatttc

SEQ ID NO: 150903 - DNA, 120 bp, Artificial Sequence
  ENSG00000105697_8 (sequence is synthesized)
tccatcctggtcagggaatttgttaaagactgatgaaaacatgaataaataattgtgtctagtacattctattcgtgaatctcataacagacagtggtagagtgaccgtgacccattcgc

SEQ ID NO: 150904 - DNA, 120 bp, Artificial Sequence
  ENSG00000105697_9 (sequence is synthesized)
cacacagtagagtcacttttttggtttgttttttagagacagggtcttcctctgttgctgaggctggagtgcagtggtgcagtcatagttcactgcagcctcaacctcctgtgctcaagc

SEQ ID NO: 150905 - DNA, 120 bp, Artificial Sequence
  ENSG00000105697_10 (sequence is synthesized)
aatcctcccacctcagcgtcccaagtagctgggacagcaggcacatgccacgggttgggggaccacaggcatggtcaaggggctggcagtcaagcaagtgtttcatgagaaagtgacagt

SEQ ID NO: 150906 - DNA, 120 bp, Artificial Sequence
  ENSG00000105697_11 (sequence is synthesized)
tgaccttcgtcttggagggtgagagatggaggcagcaaagacctaaggagaggacaagccagcatagcccagggtcaggctgaacaagaggagatggtgggacttggggataaggctgag

SEQ ID NO: 150907 - DNA, 77 bp, Artificial Sequence
  ENSG00000105697_12 (sequence is synthesized)
ggaagcccccataagcttttttttttttttctgagatagggtctcgctctgtcgttcaggctggtgtgcagtggcat

SEQ ID NO: 150908 - DNA, 120 bp, Artificial Sequence
  ENSG00000105697_13 (sequence is synthesized)
gcgtgagccactgcgcccagcctcctgtaggtttttaaaatggagaaaaccacaatctcactggccatgttttaaaaaacttaatctgccagtcaggcaccatggctcacacctgtaatc

SEQ ID NO: 150909 - DNA, 78 bp, Artificial Sequence
  ENSG00000105697_14 (sequence is synthesized)
agttttgggaggccaaggtaggaaaaccagaccccacctctacaaaaaattaaaaaattagccgggtgtggtggcgtg

SEQ ID NO: 150910 - DNA, 120 bp, Artificial Sequence
  ENSG00000105697_15 (sequence is synthesized)
cagctactcgggaagctgaggcgggagcatcgcttgagcacaggaggtcaaggctgcagggagctatgactgtgccactgcactctggcctgggcaacagaggaagactctgtctaaaaa

SEQ ID NO: 150911 - DNA, 120 bp, Artificial Sequence
  ENSG00000105697_16 (sequence is synthesized)
ggcaacagaggaagactctgtctaaaaaacaaacaaaaaaagtgactctgctgtgtggcaaatggattgaggggcaagaatgcagggaggtgtgttaggaggctggcactggcatccagg

SEQ ID NO: 150912 - DNA, 120 bp, Artificial Sequence
  ENSG00000105697_17 (sequence is synthesized)
caggggaaggtgatatcccaaagaagagtagcagctgtggaaagaggaggaggcggatctgggaggtttttttttttaggaaaagccgcccatgggaaggtgagcagaagcaagaaagca

SEQ ID NO: 150913 - DNA, 120 bp, Artificial Sequence
  ENSG00000105697_18 (sequence is synthesized)
aggcccctcctaagagtccatttgagctctgggtttaaaccacttggagaggagcaggttgccgggagccagtctcagaggtccactgggccccctgccatcctctgcacccccttctgc

SEQ ID NO: 150914 - DNA, 120 bp, Artificial Sequence
  ENSG00000105697_19 (sequence is synthesized)
tttcacagacgggacaacttgcagagctgcaaccccaggacagagctggagccagggccagctggatggtgagcgcaacagtgatgcctttcctagccccctgctccctccccatgctaa

SEQ ID NO: 150915 - DNA, 120 bp, Artificial Sequence
  ENSG00000105698_0 (sequence is synthesized)
cccccgcccccgccccccccatggacatgctggacccgggtctggatcccgctgcctcggccaccgctgctgccgccgccagccacgacaagggacccgaggcggaggagggcgtcgagc

SEQ ID NO: 150916 - DNA, 120 bp, Artificial Sequence
  ENSG00000105698_1 (sequence is synthesized)
tgcaggaaggcggggacggcccaggagcggaggagcagacagcggtggccatcaccagcgtccagcaggcggcgttcggcgaccacaacatccagtaccagttccgcacagagacaaatg

SEQ ID NO: 150917 - DNA, 120 bp, Artificial Sequence
  ENSG00000105698_2 (sequence is synthesized)
gaggacaggtgacataccgcgtagtccaggtgactgatggtcagctggacggccagggcgacacagctggcgccgtcagcgtcgtgtccaccgctgccttcgcgggggggcagcaggctg

SEQ ID NO: 150918 - DNA, 120 bp, Artificial Sequence
  ENSG00000105698_3 (sequence is synthesized)
tgacccaggtgggtgtggacggggcagcccagcgcccgggccccgccgctgcctctgtgcccccaggtcctgcagcgcccttcccgctggctgtgatccaaaatcccttcagcaatggtg

SEQ ID NO: 150919 - DNA, 120 bp, Artificial Sequence
  ENSG00000105698_4 (sequence is synthesized)
gcagtccggcggccgaggctgtcagcggggaggcacgatttgcctatttcccagcgtccagtgtgggagatactacggctgtgtccgtacagaccacagaccagagcttgcaggctggag

SEQ ID NO: 150920 - DNA, 120 bp, Artificial Sequence
  ENSG00000105698_5 (sequence is synthesized)
gccagttctacgtcatgatgacgccccaggatgtgcttcagacaggaacacagaggacgatcgccccccggacacacccttactctccaaaaattgatggaaccagaacaccccgagatg

SEQ ID NO: 150921 - DNA, 120 bp, Artificial Sequence
  ENSG00000105698_6 (sequence is synthesized)
tccagctttcgaaaatcattccagactgtaacgcagacaacagcaagacgggagcgagtaaaggagggatcctgtccaaggcctgcgattacatccgggagttgcgccagaccaaccagc

SEQ ID NO: 150922 - DNA, 120 bp, Artificial Sequence
  ENSG00000105698_7 (sequence is synthesized)
gcatgcaggagaccttcaaagaggccgagcggctgcagatggacaacgagctcctgaggcagcagatcgaggagctgaagaatgagaacgccctgcttcgagcccagctgcagcagcaca

SEQ ID NO: 150923 - DNA, 120 bp, Artificial Sequence
  ENSG00000105698_8 (sequence is synthesized)
acctggagatggtgggcgagggcacccggcagtgacgcccgccaccaccacgcagccgccgccgcccacgccggcctctgctgcccccttccccagcccttagcacagagagggacacat

SEQ ID NO: 150924 - DNA, 120 bp, Artificial Sequence
  ENSG00000105698_9 (sequence is synthesized)
gcccctcccccagctgcgtttttttatagtagatttttaacaaaaaacggggagaaataatgcatttctgtggatacagtgcccaccgccctcctccacttggaaacggtatcctccctg

SEQ ID NO: 150925 - DNA, 120 bp, Artificial Sequence
  ENSG00000105698_10 (sequence is synthesized)
cccatccgtctgtctgtcgcccttctcccggccctcactaagccccggcacttctagtggtctcacctggaggcaagagggaggggacagaggccctgccacgtcccgctgcctcctgct

SEQ ID NO: 150926 - DNA, 120 bp, Artificial Sequence
  ENSG00000105698_11 (sequence is synthesized)
ctctggaggtactgagacagggtgctgatgggaaggaggggagcctttggggggccacccggggcctggacctatgcagggaggccacgtcccaccccacctcttgtttctgggtccctg

SEQ ID NO: 150927 - DNA, 120 bp, Artificial Sequence
  ENSG00000105698_12 (sequence is synthesized)
ctcccctttgggggtgtgtgtgtgtgttttaattttctttatggaaaaattgacaaaaaaaaaatagagagagaggtatttaactgcaataaactggccccatgtggcccccgccttgtc

SEQ ID NO: 150928 - DNA, 120 bp, Artificial Sequence
  ENSG00000105698_13 (sequence is synthesized)
gctcttggggagccccgggggtggggcaggtgtcgcccagcggatgctgccttcaggcctcaggctgcatggggccagatccctgttgtgcaccgtgaaacctggggacagtgctcttgg

SEQ ID NO: 150929 - DNA, 120 bp, Artificial Sequence
  ENSG00000105698_14 (sequence is synthesized)
aatttttttttcccgcaaaatgggaatgatgtgtcttaagaggaaagtttcttagagtgcgaaacggatttgctcagcaagtgatcgctgacctcccgccatgttccagggctgtttgaa

SEQ ID NO: 150930 - DNA, 120 bp, Artificial Sequence
  ENSG00000105698_15 (sequence is synthesized)
acacaggacagaatgctacacgcagaaggagtccccactcctgttaattgcagagaatgcagtaaaccccaagcacagcaatgaggggacgggatggaggaacagagaaagctaagggta

SEQ ID NO: 150931 - DNA, 120 bp, Artificial Sequence
  ENSG00000105698_16 (sequence is synthesized)
atgctggacccgggtctggatcccgctgcctcggccaccgctgctgccgccgccagccacgacaagggacccgaggcggaggagggcgtcgagctgcaggaaggtgagtgcttgccgggc

SEQ ID NO: 150932 - DNA, 120 bp, Artificial Sequence
  ENSG00000105698_17 (sequence is synthesized)
aggcggagggacaagatcaacaactggatcgtccagctttcgaaaatcattccagactgtaacgcagacaacagcaagacgggagcggcctgcgattacatccgggagttgcgccagacc

SEQ ID NO: 150933 - DNA, 120 bp, Artificial Sequence
  ENSG00000105698_18 (sequence is synthesized)
tctggggagactggagaatgcagtgcaggggccgcaggagccaaaaaggggcactggtcctgcgaagagtggctctgtccatccctgccttccagtatgtgcccactgtgaccagagctc

SEQ ID NO: 150934 - DNA, 120 bp, Artificial Sequence
  ENSG00000105698_19 (sequence is synthesized)
catttctcaaaagaagccagtgatgccaattaccatgagaaatttccttatttttaactgtcgattaaaatttgtacaagtatggtggggcaggcctgcaaaatgatctccaagtgcctg

SEQ ID NO: 150935 - DNA, 120 bp, Artificial Sequence
  ENSG00000105698_20 (sequence is synthesized)
gcctttgatgcccgtcctaaaagcatgtgtggcactggagggcccacgtttctttgttcctcttgagaagctggggtgggggccggctgggctcagggtgcggcccctcacttcccaggg

SEQ ID NO: 150936 - DNA, 120 bp, Artificial Sequence
  ENSG00000105698_21 (sequence is synthesized)
tcggtggggcctgcactgttcctgggtgtccttgggctgagcctctgccctgtgaggacggccgctcaggcatgatccgtcagcgaagccgtggctgtgactctgttttccgcagtggag

SEQ ID NO: 150937 - DNA, 120 bp, Artificial Sequence
  ENSG00000105698_22 (sequence is synthesized)
aaaaattgatggaaccagaacaccccgagatgagaggagaagagcccagcacaacgaagatggaatctcgctctgtcacagtggcgcaatctcagcttactacaacctctgcctccccgg

SEQ ID NO: 150938 - DNA, 76 bp, Artificial Sequence
  ENSG00000105698_23 (sequence is synthesized)
ccttctactcactttggattcaatttgctaggtttcatgctttagcttccctggcacaccccaaccccagcttttt

SEQ ID NO: 150939 - DNA, 120 bp, Artificial Sequence
  ENSG00000105698_24 (sequence is synthesized)
atgctttagcttccctggcacaccccaaccccagctttttaagttccttgaaattcgatgagacttacccgacgggcccgaatgtgtcctagcttggcggaagcttctggggcattgacg

SEQ ID NO: 150940 - DNA, 120 bp, Artificial Sequence
  ENSG00000105698_25 (sequence is synthesized)
tttcaaatctaatacttagcagatgcttgggcaaacagctctgcgataatacatgccccctttttttttcctcctcttgtagaaaaattgatggaaccagaacaccccgagatgagagga

SEQ ID NO: 150941 - DNA, 120 bp, Artificial Sequence
  ENSG00000105698_26 (sequence is synthesized)
tgtaacgcagacaacagcaagacgggagcggtgagcaccccggaccctcagtgtctgcggtggtcccggcccccgacccttgcatgcagaaagtccaacagccatggggctcgggagtca

SEQ ID NO: 150942 - DNA, 120 bp, Artificial Sequence
  ENSG00000105698_27 (sequence is synthesized)
tgtacctgcagccggcgcccagctctcgagaggactgtgggagggcagaggctgaaacgaggccgcctgccgagttcctccacagacccctgggcgaggagcgctctgctggggactgcg

SEQ ID NO: 150943 - DNA, 120 bp, Artificial Sequence
  ENSG00000105698_28 (sequence is synthesized)
ccagcggtgcctccaggcctggactctcagctccgctgctgcttttggccagagttcccaaaggcgggtgtggttgtctttggtgggaaggttcagcgcaccgcgatagtaataggggag

SEQ ID NO: 150944 - DNA, 120 bp, Artificial Sequence
  ENSG00000105698_29 (sequence is synthesized)
caagcactcgctgagcccagtgcagggcctggaccgtgctccatagcaagcactgatcttgggctattggttttggaggaaagagggagcacaaggatggaaggggccagggaagagagg

SEQ ID NO: 150945 - DNA, 120 bp, Artificial Sequence
  ENSG00000105698_30 (sequence is synthesized)
tcacggtgggagaaggagagtccgcatccatcggagggtttgtcactcaggcctgagtgggaggcactggaggcagggagaggccagtcagcagcatgcggccacagcccagagaagcca

SEQ ID NO: 150946 - DNA, 120 bp, Artificial Sequence
  ENSG00000105698_31 (sequence is synthesized)
gaggggtttgctggtgggtgggccccagccttttcaagggaacggcaggtctggggagctgccgatctcggggtgtgagggtaacgggcaggctgtggcccacccctccttctcaggctc

SEQ ID NO: 150947 - DNA, 120 bp, Artificial Sequence
  ENSG00000105698_32 (sequence is synthesized)
actggacccctgaccggtttcatcaccattatccaaggctttgaaaagaccccctggccttcctgccacatgtgccctagctatagggcttcgttcccctccacaaatggtgcagacagc

SEQ ID NO: 150948 - DNA, 120 bp, Artificial Sequence
  ENSG00000105698_33 (sequence is synthesized)
atgagccaccctggcagggggctgggggtccgtggggtaggagttgggggtagctgagcgttctttcctgtccccacggtgcctggtgctggggcttggcagccagggttgggacagcct

SEQ ID NO: 150949 - DNA, 120 bp, Artificial Sequence
  ENSG00000105698_34 (sequence is synthesized)
ggctttagcaggtcctgagtcaggggtctcaggctccgcagcacacagtccccaggcaggtgtcaggatgggatgtggccagagaaaggcatgtgctctgtctggggatagctgccaccc

SEQ ID NO: 150950 - DNA, 120 bp, Artificial Sequence
  ENSG00000105698_35 (sequence is synthesized)
agctgacacagttggcatgagattgtggagttttatggagtaaaatcacaaatctgggttttttaagtaaaaccttctatgagttgccatctctggccttcaacataggatttgggtctt

SEQ ID NO: 150951 - DNA, 120 bp, Artificial Sequence
  ENSG00000105698_36 (sequence is synthesized)
tcctgggtgagctggtgctttgtgggccaggccctgggagctgcaagtaccagttgggatctgccattgccctgtggaaggattttaagcaggggtgaaacatggtcagacttggattta

SEQ ID NO: 150952 - DNA, 120 bp, Artificial Sequence
  ENSG00000105698_37 (sequence is synthesized)
gctgtcaggcagaatgtccccccagtggagcggaggcggagggacaagatcaacaactggatcgtccagctttcgaaaatcattccagactgtaacgcagacaacagcaagacgggagcg

SEQ ID NO: 150953 - DNA, 120 bp, Artificial Sequence
  ENSG00000105698_38 (sequence is synthesized)
cagcaggtgggtgcggggcctggagcgggtcagggcccaggagccccagatgcaaggcgctggccctcagctcccttgacctccgtcgtgtccgccagatcgaggagctgaagaatgaga

SEQ ID NO: 150954 - DNA, 120 bp, Artificial Sequence
  ENSG00000105699_0 (sequence is synthesized)
ctcggctcccacccttgtgtacctgggccgaaccattcaccggagcgcgcagcgggtggagtgtggctcggaggaccgcggcgggtcaagcacctttctcccccatatctgaaagcatgc

SEQ ID NO: 150955 - DNA, 120 bp, Artificial Sequence
  ENSG00000105699_1 (sequence is synthesized)
cctttgtccacgtcgtttacgctcattaaaacttccagaatgcaacaggacggacttggagtagggacaaggaacggaagtgggaaggggaggagcgtgcacccctcctggccttggtgc

SEQ ID NO: 150956 - DNA, 120 bp, Artificial Sequence
  ENSG00000105699_2 (sequence is synthesized)
gcgccgcgccccctaaggtactttggaagggacgcgcgggccagacgcgcccagacggccgcgatggcgctgttggccggcgggctctccagagggctgggctcccacccggccgccgca

SEQ ID NO: 150957 - DNA, 120 bp, Artificial Sequence
  ENSG00000105699_3 (sequence is synthesized)
ggccgggacgcggtcgtcttcgtgtggcttctgcttagcacctggtgcacagctcctgccagggccatccaggtgaccgtgtccaacccctaccacgtggtgatcctcttccagcctgtg

SEQ ID NO: 150958 - DNA, 120 bp, Artificial Sequence
  ENSG00000105699_4 (sequence is synthesized)
accctgccctgtacctaccagatgacctcgacccccacgcaacccatcgtcatctggaagtacaagtctttctgccgggaccgcatcgccgatgccttctccccggccagcgtcgacaac

SEQ ID NO: 150959 - DNA, 120 bp, Artificial Sequence
  ENSG00000105699_5 (sequence is synthesized)
cagctcaatgcccagctggcagccgggaacccaggctacaacccctacgttgagtgccaggacagcgtgcgcaccgtcagggtcgtggccaccaagcagggcaacgctgtgaccctggga

SEQ ID NO: 150960 - DNA, 120 bp, Artificial Sequence
  ENSG00000105699_6 (sequence is synthesized)
gattactaccagggccggaggattaccatcaccggaaatgctgacctgacctttgaccagacggcgtggggggacagtggtgtgtattactgctccgtggtctcagcccaggacctccag

SEQ ID NO: 150961 - DNA, 120 bp, Artificial Sequence
  ENSG00000105699_7 (sequence is synthesized)
gggaacaatgaggcctacgcagagctcatcgtccttgggaggacctcaggggtggctgagctcttacctggttttcaggcggggcccatagaagactggctcttcgtggttgtggtatgc

SEQ ID NO: 150962 - DNA, 120 bp, Artificial Sequence
  ENSG00000105699_8 (sequence is synthesized)
ctggctgccttcctcatcttcctcctcctgggcatctgctggtgccagtgctgcccgcacacttgctgctgctacgtcaggtgcccctgctgcccagacaagtgctgctgccccgaggcc

SEQ ID NO: 150963 - DNA, 120 bp, Artificial Sequence
  ENSG00000105699_9 (sequence is synthesized)
ccccagcacctatgcccacctgtctcccgccaagaccccacccccaccagctatgattcccatgggccctgcctacaacgggtaccctggaggataccctggagacgttgacaggagtag

SEQ ID NO: 150964 - DNA, 120 bp, Artificial Sequence
  ENSG00000105699_10 (sequence is synthesized)
ctcagctggtggccaaggctcctatgtacccctgcttcgggacacggacagcagtgtggcctctgaagtccgcagtggctacaggattcaggccagccagcaggacgactccatgcgggt

SEQ ID NO: 150965 - DNA, 120 bp, Artificial Sequence
  ENSG00000105699_11 (sequence is synthesized)
cctgtactacatggagaaggagctggccaacttcgacccttctcgacctggcccccccagtggccgtgtggagcgggccatgagtgaagtcacctccctccacgaggacgactggcgatc

SEQ ID NO: 150966 - DNA, 120 bp, Artificial Sequence
  ENSG00000105699_12 (sequence is synthesized)
tcggccttcccggggccctgccctcaccccgatccgggatgaggagtggggtggccactccccccggagtcccaggggatgggaccaggagcccgccagggagcaggcaggcgggggctg

SEQ ID NO: 150967 - DNA, 120 bp, Artificial Sequence
  ENSG00000105699_13 (sequence is synthesized)
gcgggccaggcggccccgggcccgctccgtggacgccctggacgacctcaccccgccgagcaccgccgagtcagggagcaggtctcccacgagtaatggtgggagaagccgggcctacat

SEQ ID NO: 150968 - DNA, 120 bp, Artificial Sequence
  ENSG00000105699_14 (sequence is synthesized)
gcccccgcggagccgcagccgggacgacctctatgaccaagacgactcgagggacttcccacgctcccgggacccccactacgacgacttcaggtctcgggagcgccctcctgccgaccc

SEQ ID NO: 150969 - DNA, 120 bp, Artificial Sequence
  ENSG00000105699_15 (sequence is synthesized)
caggtcccaccaccaccgtacccgggaccctcgggacaacggctccaggtccggggacctcccctatgatgggcggctactggaggaggctgtgaggaagaaggggtcggaggagaggag

SEQ ID NO: 150970 - DNA, 120 bp, Artificial Sequence
  ENSG00000105699_16 (sequence is synthesized)
gagaccccacaaggaggaggaggaagaggcctactacccgcccgcgccgcccccgtactcggagaccgactcgcaggcgtcccgagagcgcaggctcaagaagaacttggccctgagtcg

SEQ ID NO: 150971 - DNA, 120 bp, Artificial Sequence
  ENSG00000105699_17 (sequence is synthesized)
ggaaagtttagtcgtctgatctgacgttttctacgtagcttttgtatttttttttttaatttgaaggaacactgatgaagccctgccatacccctcccgagtctaataaaacgtataatc

SEQ ID NO: 150972 - DNA, 120 bp, Artificial Sequence
  ENSG00000105699_18 (sequence is synthesized)
agactcgctcctcccggcagggcgcacctaggcgggtccatcgccagccggggagaggggtttgggcagggagggaacaggtgcgcggcgggacccgccctatctcaacaggtgaatcgc

SEQ ID NO: 150973 - DNA, 120 bp, Artificial Sequence
  ENSG00000105699_19 (sequence is synthesized)
tccaagtgggtctcggttgcatggatctcggtgcgcttggtttggccggagcagatgggggccggaagggacctgtggtccgcaggcgccctcccagcgggccagtcacttggttcgggc

SEQ ID NO: 150974 - DNA, 120 bp, Artificial Sequence
  ENSG00000105699_20 (sequence is synthesized)
ggaggataccctggagacgttgacaggagtagctcagctggtggccaaggctcctatgtacccctgcttcgggacacggacagcagtgtggcctctggtgagaatccatcgtcccgaagt

SEQ ID NO: 150975 - DNA, 120 bp, Artificial Sequence
  ENSG00000105699_21 (sequence is synthesized)
gccaaactaagagaagagtggagacaattggagactctgccttttcaaagtctcatttttaaaaaaaatccagacttggggtccgggtgcggtagttcatgcctgtaatcccagcacttt

SEQ ID NO: 150976 - DNA, 120 bp, Artificial Sequence
  ENSG00000105699_22 (sequence is synthesized)
ccccagtggaagtggagaagtcaggcgccaccaacaagcctctcccagccaggactttgcttagactcgctcctcccggcagggcgcacctaggcgggtccatcgccagccggggagagg

SEQ ID NO: 150977 - DNA, 120 bp, Artificial Sequence
  ENSG00000105700_0 (sequence is synthesized)
gcgggcgccatcccggaagcgcgagcaaggccgccagatgtgcaggcagcggaggaggagaaagagatggacctcccggactcggcctcgagggtcttctgcggccgcatcctgagcatg

SEQ ID NO: 150978 - DNA, 120 bp, Artificial Sequence
  ENSG00000105700_1 (sequence is synthesized)
gtgaacacagatgatgtcaacgccatcatcctggcccagaagaacatgctggaccgctttgagaagaccaatgagatgctgctcaacttcaacaacctgtccagtgcccgcctgcagcag

SEQ ID NO: 150979 - DNA, 120 bp, Artificial Sequence
  ENSG00000105700_2 (sequence is synthesized)
atgagcgaacgcttcctgcaccacacgaggaccctagtagagatgaaacgggacctggacagcatcttccgccgtatcaggacgctgaaagggaaactggccaggcagcacccagaggcc

SEQ ID NO: 150980 - DNA, 120 bp, Artificial Sequence
  ENSG00000105700_3 (sequence is synthesized)
ttcagccatatcccagaggcatccttcctggaggaagaggatgaagaccccatcccacccagcaccacgaccaccattgccacctcagaacagagcacgggctcatgtgacaccagcccc

SEQ ID NO: 150981 - DNA, 120 bp, Artificial Sequence
  ENSG00000105700_4 (sequence is synthesized)
gacaccgtctcgccctccctgagccccggcttcgaggacctgtcccatgtccagcctggctccccagccatcaacggccgcagccagacagatgacgaggagatgacgggcgaatagccc

SEQ ID NO: 150982 - DNA, 120 bp, Artificial Sequence
  ENSG00000105700_5 (sequence is synthesized)
ctcagggcagcagcatacaaggtggcagcgggtaaccctgccttgttctgtcatccagggctcctttgctgccccgttctgtcacccagggctcctagggggacaaggctctctcccgag

SEQ ID NO: 150983 - DNA, 120 bp, Artificial Sequence
  ENSG00000105700_6 (sequence is synthesized)
gggtgtggaattcctgggggggtctttaattctggctccttccttcctcagaacatctctattctgcaagacccctctgccatgccagggcacgcccattccagctggagtcgtggggct

SEQ ID NO: 150984 - DNA, 120 bp, Artificial Sequence
  ENSG00000105700_7 (sequence is synthesized)
gggcacaggggaatttttccagagctgagcctgacgtctgctctgaagaatgcttagaaggttcccagacaccagagccagatgtcccccaccaccggtcaggacctccttgaggtgcac

SEQ ID NO: 150985 - DNA, 120 bp, Artificial Sequence
  ENSG00000105700_8 (sequence is synthesized)
aagcacggtctcctctgagttcaccccagcccacccccgcacccactaattctgcttttcctgccccttgctccgtaaaagtatcaaatactttctccttggtatctcaaggaggtttct

SEQ ID NO: 150986 - DNA, 120 bp, Artificial Sequence
  ENSG00000105700_9 (sequence is synthesized)
gagataggtagaagtcttgagacggaggctggccatccattcagccctgagcgtgctgagttctgtgtttctctgaatagaggtgtggaacctgaggggccagcaggcctctctgaaggc

SEQ ID NO: 150987 - DNA, 120 bp, Artificial Sequence
  ENSG00000105700_10 (sequence is synthesized)
ctccatggagcaaacggagccacctcgggaaagagtttaatggaatatttttgtacccgatgtttacagatgctgttgggaagttatcaataaaaagacaccattactaaaaagggaaaa

SEQ ID NO: 150988 - DNA, 120 bp, Artificial Sequence
  ENSG00000105700_11 (sequence is synthesized)
gtctaagccccgccctttcctgtcgtgacttaacgcacgcaagcggctccagggtacgtccccgccacgcgcgctcgcaggatcggtgcgtggtgacgtttcgccggcgcgggcgccatc

SEQ ID NO: 150989 - DNA, 120 bp, Artificial Sequence
  ENSG00000105700_12 (sequence is synthesized)
ccggaagcgcgagcaaggccgccagatgtgcaggagggtcagtgctgtagcccctcctaccctggctgctccgggaagtccctgcctgccattacggtcatctgtgtgccagcaaaactg

SEQ ID NO: 150990 - DNA, 70 bp, Artificial Sequence
  ENSG00000105700_13 (sequence is synthesized)
caccaggctagtcttgaactcatgacctcaggtgatccaccagccttggcttcccaaagtgctgagatta

SEQ ID NO: 150991 - DNA, 120 bp, Artificial Sequence
  ENSG00000105700_14 (sequence is synthesized)
caaagtgctgagattacaggcatgagcacccggtccaggtatcctctttatacaagatcatgcttctttgggaatgtggagactgggtgtctctgcatggcatgtcataggagttcaata

SEQ ID NO: 150992 - DNA, 120 bp, Artificial Sequence
  ENSG00000105700_15 (sequence is synthesized)
tcataggagttcaataaccatagttattattagagggaagggggttttgctgggtgtggcaccttatttctagaaggtgctgcaaaccactgaccagatacagatcacaaatagatgctc

SEQ ID NO: 150993 - DNA, 120 bp, Artificial Sequence
  ENSG00000105700_16 (sequence is synthesized)
ttggcctccatgatatcttggaaaaaagtattgattgctgacatttgtcaatgaggcaatttcccagaaaaaaaaaatccctgtttcctttttcctggagaaacatcagaagtcaggcag

SEQ ID NO: 150994 - DNA, 120 bp, Artificial Sequence
  ENSG00000105700_17 (sequence is synthesized)
aaatcagctgctgtaagaagccactgtcctgtcacagctggatattgtgcacctgttcagattcacacctttgtgagacccgtgggctgtggccgtttgttgtgacttaggttcactggc

SEQ ID NO: 150995 - DNA, 120 bp, Artificial Sequence
  ENSG00000105700_18 (sequence is synthesized)
tgtgtgacagtggcccagtttctcagtgtccctgagcctcagttttctcatctataaataagaatgataacagtatgtatgagcttgatgctttgtttagcatagagtagctgctgaata

SEQ ID NO: 150996 - DNA, 120 bp, Artificial Sequence
  ENSG00000105700_19 (sequence is synthesized)
aatgggagagtacattaagtgagctctgaaaccctttctttctctttcctttctttctctctttctctgtctctctctctttctctcctctctctttctctctttgtctctctctctttc

SEQ ID NO: 150997 - DNA, 120 bp, Artificial Sequence
  ENSG00000105700_20 (sequence is synthesized)
tgtctctctctctttctctccttctctctctctttctctctctcccttccttccttccctccctccctcccttccttccttcttttcgagatggagtctcactctgtcgcccgggctgga

SEQ ID NO: 150998 - DNA, 120 bp, Artificial Sequence
  ENSG00000105700_21 (sequence is synthesized)
aaaccctttctgatccagtagaagttcgtctctgtttcttggctattaaatgtgtgggcctcagagccaaactatatcaagatcctagatttttcctgaactccctaggagggtcagtgc

SEQ ID NO: 150999 - DNA, 120 bp, Artificial Sequence
  ENSG00000105700_22 (sequence is synthesized)
gacgggagggaggtgccaggaacccctcagccctcacatctgggagccagagacagaaaagagtcctgttttgaaggaggagtgtatcccagaaggtcccagtactgtgtctcactggta

SEQ ID NO: 151000 - DNA, 120 bp, Artificial Sequence
  ENSG00000105700_23 (sequence is synthesized)
ctccagcctgggtgacaggagtgaaactctgtatcaaaaagaaataaaaaaacgaggtcaagtagtaagagaagcggtaagagtgacgggaacaggagtcattgacctcttgggagagga

SEQ ID NO: 151001 - DNA, 120 bp, Artificial Sequence
  ENSG00000105700_24 (sequence is synthesized)
gacattggaggtggtgatgatttgctgaagcagccacacacgttcagcttgtgaggacagcagttgttaggcaggggatgagggaggaagctggcagatctgtgcaggtgagaggtacct

SEQ ID NO: 151002 - DNA, 120 bp, Artificial Sequence
  ENSG00000105700_25 (sequence is synthesized)
gtggccttgggctcatggaagtgggaggtgatgggattctaatgtgcttgggtacagtttacaaatacaacctctcttagtttgcccaatacctccaaattcctggggtggcacacctga

SEQ ID NO: 151003 - DNA, 120 bp, Artificial Sequence
  ENSG00000105700_26 (sequence is synthesized)
ctgctcccgagcacgtcagcactctccacccagggcaggcttctggaaggccaccttggggcctgatactgagaccaggctgtaatgggcagtgggtctggggaaacctggggtgggggc

SEQ ID NO: 151004 - DNA, 120 bp, Artificial Sequence
  ENSG00000105700_27 (sequence is synthesized)
gcaggatcggtgcgtggtgacgtttcgccggcgcgggcgccatcccggaagcgcgagcaaggccgccagatgtgcagagacgggggtttcaccatgttcaccaggctagtcttgaactca

SEQ ID NO: 151005 - DNA, 120 bp, Artificial Sequence
  ENSG00000105700_28 (sequence is synthesized)
gccacagtcacacatccccactgtaggataccaccacggttgggttaggttccagcacatggcggtcccggcctggcctcttggtcccacctcacctggtgactagtgcagaccactctg

SEQ ID NO: 151006 - DNA, 120 bp, Artificial Sequence
  ENSG00000105700_29 (sequence is synthesized)
ttcagaagggtgaagtggctctcccatggtcaaacagcctacctctctgcgtttcttcaataaatctacatttggagttgggatcagagctcttgctgggtcaatttcactgtgcagcgg

SEQ ID NO: 151007 - DNA, 61 bp, Artificial Sequence
  ENSG00000105700_30 (sequence is synthesized)
ggccgccagatgtgcaggttcaagccattctcctgcctcagccatccaagtagctgcagtt

SEQ ID NO: 151008 - DNA, 120 bp, Artificial Sequence
  ENSG00000105701_0 (sequence is synthesized)
aagcggccgaacctggttcccgaggcgcggcggccgcggctgggggcggggaggggggcgcaggaccccaagtgggggtcccggagccagaggcaaggccaattcctgtccccccagcag

SEQ ID NO: 151009 - DNA, 120 bp, Artificial Sequence
  ENSG00000105701_1 (sequence is synthesized)
catggcatcgtgtgctgaaccctctgagccctctgccccactgcccgccggggtcccaccgctcgaggacttcgaggtactggatggggttgaggatgcagagggtgaggaggaagagga

SEQ ID NO: 151010 - DNA, 120 bp, Artificial Sequence
  ENSG00000105701_2 (sequence is synthesized)
ggaggaagaggaggaagaggatgacctgagtgagctgccaccgctggaggacatgggacaacccccggcggaggaggctgagcagcctggggccctggcccgagagttccttgctgccat

SEQ ID NO: 151011 - DNA, 120 bp, Artificial Sequence
  ENSG00000105701_3 (sequence is synthesized)
ggagcccgagcccgccccagccccggccccagaagagtggctggacattctggggaacgggctgttgaggaagaagacgctggtcccagggccgccaggttcgagccgcccggtcaaggg

SEQ ID NO: 151012 - DNA, 120 bp, Artificial Sequence
  ENSG00000105701_4 (sequence is synthesized)
ccaggtggtcaccgtacatctgcagacgtcgctggagaatggcacacgggtgcaggaggagccggagctggtgttcactctgggtgactgtgacgtcatccaggccctggatctcagtgt

SEQ ID NO: 151013 - DNA, 120 bp, Artificial Sequence
  ENSG00000105701_5 (sequence is synthesized)
cccactcatggacgtgggggagacggccatggtcactgctgactccaagtactgctacggcccccaaggcagcaggagcccatacatccccccgcacgcggccctgtgcctggaggtgac

SEQ ID NO: 151014 - DNA, 120 bp, Artificial Sequence
  ENSG00000105701_6 (sequence is synthesized)
cctgaagacggctgtggacgggcctgacctggagatgctcacggggcaggagcgcgtggccctggccaaccggaagcgggagtgcggcaacgcccactaccagcgggcggacttcgtcct

SEQ ID NO: 151015 - DNA, 120 bp, Artificial Sequence
  ENSG00000105701_7 (sequence is synthesized)
agtgtctgaacaacctggcggcctcgcagctgaagctcgaccactaccgcgcagccctgcgctcctgcagccttgtgctggagcaccagccagacaacatcaaggctctcttccgcaagg

SEQ ID NO: 151016 - DNA, 120 bp, Artificial Sequence
  ENSG00000105701_8 (sequence is synthesized)
gcaaggtgctggcccagcagggggagtacagtgaggccatccccatcctgagggcagccctgaagctggaaccttccaacaagacgatccacgcagagctctcaaagctggtgaagaagc

SEQ ID NO: 151017 - DNA, 120 bp, Artificial Sequence
  ENSG00000105701_9 (sequence is synthesized)
atgcggcgcagcggagcacggagaccgccttgtaccggaaaatgctgggcaaccccagccggctgcctgctaagtgccctggcaagggtgcctggtccatcccatggaagtggctgtttg

SEQ ID NO: 151018 - DNA, 120 bp, Artificial Sequence
  ENSG00000105701_10 (sequence is synthesized)
gggcgactgctgttgccttggggggtgtggcactctctgtggtcatcgctgccaggaactgaccacctaggtggctgccaccccctctgcacaccatggaccctgccctgcgctccccaa

SEQ ID NO: 151019 - DNA, 120 bp, Artificial Sequence
  ENSG00000105701_11 (sequence is synthesized)
ctcccccaggctccctgtccactgccctccctggtctggccccctcctccgggttaggggagcaaggattgggggtcgtgcagcccagccagcaggagggactgaggccctctaggagga

SEQ ID NO: 151020 - DNA, 120 bp, Artificial Sequence
  ENSG00000105701_12 (sequence is synthesized)
aagcccagagggagggggccctcattccttcagacccagttttcccccaccctccttaccccgctgggctaggtctccgccagggctggcctcagtttctcctcaacaggcctgggggca

SEQ ID NO: 151021 - DNA, 120 bp, Artificial Sequence
  ENSG00000105701_13 (sequence is synthesized)
gcccttcccctgcctagtccccgcctgagtgccagccccccaccccgcctgccgccccctgtccaggttccctccccgccacagtgaaataaagcatcccaccctgcagtttccacggac

SEQ ID NO: 151022 - DNA, 120 bp, Artificial Sequence
  ENSG00000105701_14 (sequence is synthesized)
ttctgtatgcctttgggcacgtcactcctcctcaggccctcaggttcacttctgtaactaaggcttcaggatgggtcattcagcaaccccagagctgccctgcccgtcaagcttgaactc

SEQ ID NO: 151023 - DNA, 120 bp, Artificial Sequence
  ENSG00000105701_15 (sequence is synthesized)
tttcccccagtggccttagaggctctaaaaatggcttccctaaggcctcggaggctgtcctctccacaaaaatcccagcacccttcgctcagcttataatcaggcaaagccacagggcct

SEQ ID NO: 151024 - DNA, 120 bp, Artificial Sequence
  ENSG00000105701_16 (sequence is synthesized)
gaagccccaggttcaaatcctcctttggcctttggctttctctgtgaccttgggcaaatgcctttgcccctctggcctgtttcctgttctgcaaaatgttgaggggaatcttccctactt

SEQ ID NO: 151025 - DNA, 120 bp, Artificial Sequence
  ENSG00000105701_17 (sequence is synthesized)
cctggagtatttgtaaacattaaataataattagctctaataatggctaacactatttgagcctgatgccaagggcttgatgcatgggttaatttctcccaacaagctggggttgttgtt

SEQ ID NO: 151026 - DNA, 120 bp, Artificial Sequence
  ENSG00000105701_18 (sequence is synthesized)
acacccactgtatagatgaggaaactgaggcctggagcccttgagttacacagaaagtgatcggcagtgtggggaatcagtacagtggagactttgaggggctgtgtaggattctgaccc

SEQ ID NO: 151027 - DNA, 120 bp, Artificial Sequence
  ENSG00000105701_19 (sequence is synthesized)
tccaccatctcccctgcaaaggtgtccactccgtgccagaaacttccagccccagagagcctcagactcagaatattctagaatagcccagaatatgggtagatccccaactgcccctaa

SEQ ID NO: 151028 - DNA, 120 bp, Artificial Sequence
  ENSG00000105705_0 (sequence is synthesized)
attgtgggattggatgagtctcaagatggacaaccgggatgttgcaggaaaggctaaccggtggtttggggttgctccccctaaatctggaaaaatgaacatgaacatccttcaccagga

SEQ ID NO: 151029 - DNA, 120 bp, Artificial Sequence
  ENSG00000105705_1 (sequence is synthesized)
agagctcatcgctcagaagaaacgggaaattgaagccaaaatggaacagaaagccaagcagaatcaggtggccagccctcagcccccacatcctggcgaaatcacaaatgcacacaactc

SEQ ID NO: 151030 - DNA, 120 bp, Artificial Sequence
  ENSG00000105705_2 (sequence is synthesized)
ttcctgcatttccaacaagtttgccaacgatggtagcttcttgcagcagtttctgaagttgcagaaggcacagaccagcacagacgccccgaccagtgcgcccagcgcccctcccagcac

SEQ ID NO: 151031 - DNA, 120 bp, Artificial Sequence
  ENSG00000105705_3 (sequence is synthesized)
acccacccccagcgctgggaagaggtccctgctcatcagcaggcggacaggcctggggctggccagcctgccgggccctgtgaagagctactcccacgccaagcagctgcccgtggcgca

SEQ ID NO: 151032 - DNA, 120 bp, Artificial Sequence
  ENSG00000105705_4 (sequence is synthesized)
ccgcccgagtgtcttccagtcccctgacgaggacgaggaggaggactatgagcagtggctggagatcaaagtttcacccccagagggagccgagactcggaaagtgatagagaaattggc

SEQ ID NO: 151033 - DNA, 120 bp, Artificial Sequence
  ENSG00000105705_5 (sequence is synthesized)
ccgctttgtggcagaaggaggccccgagttagaaaaagtagctatggaggactacaaggataacccagcatttgcatttttgcacgataagaatagcagggaattcctctactacaggaa

SEQ ID NO: 151034 - DNA, 120 bp, Artificial Sequence
  ENSG00000105705_6 (sequence is synthesized)
gaaggtggctgagataagaaaggaagcacagaagtcgcaggcagcctctcagaaagtttcacccccagaggacgaagaggtcaagaaccttgcagaaaagttggccaggttcatagcgga

SEQ ID NO: 151035 - DNA, 120 bp, Artificial Sequence
  ENSG00000105705_7 (sequence is synthesized)
cgggggtcccgaggtggaaaccattgccctccagaacaaccgtgagaaccaggcattcagctttctgtatgagcccaatagccaagggtacaagtactaccgacagaagctggaggagtt

SEQ ID NO: 151036 - DNA, 120 bp, Artificial Sequence
  ENSG00000105705_8 (sequence is synthesized)
ccggaaagccaaggccagctccacaggcagcttcacagcacctgatcccggcctgaagcgcaagtcccctcctgaggccctgtcagggtccttacccccagccaccacctgccccgcctc

SEQ ID NO: 151037 - DNA, 120 bp, Artificial Sequence
  ENSG00000105705_9 (sequence is synthesized)
gtccacgcctgcgcccactatcatccctgctccagctgcccccgggaagccagcctccgcagccaccgtgaagaggaagcggaagagccggtgggggcctgaagaggataaggtagagct

SEQ ID NO: 151038 - DNA, 120 bp, Artificial Sequence
  ENSG00000105705_10 (sequence is synthesized)
cctctgtcagttcaggacctcaaggggctcggctatgagaaggggaagcctgtgggtctagtgggcgtcacagagctttcagacgcccagaagaagcagctgaaggagcagcaggagatg

SEQ ID NO: 151039 - DNA, 120 bp, Artificial Sequence
  ENSG00000105705_11 (sequence is synthesized)
cagcagatgtacgacatgatcatgcagcacaagcgggccatgcaggacatgcagctgctgtgggagaaggcagtccaacagcaccagcacggctatgacagtgatgaggaggtggacagc

SEQ ID NO: 151040 - DNA, 120 bp, Artificial Sequence
  ENSG00000105705_12 (sequence is synthesized)
gagctgggcacctgggagcaccagctgcggcgcatggagatggataagaccagggaatgggccgagcagctgacaaagatgggccggggcaagcacttcatcggagacttcctgcctcca

SEQ ID NO: 151041 - DNA, 120 bp, Artificial Sequence
  ENSG00000105705_13 (sequence is synthesized)
gacgagctggaaaagtttatggagaccttcaaggccctgaaggagggccgtgagcctgactactcagagtacaaggagttcaagctgactgtggagaacatcggctaccagatgctgatg

SEQ ID NO: 151042 - DNA, 120 bp, Artificial Sequence
  ENSG00000105705_14 (sequence is synthesized)
aagatgggctggaaggagggcgaggggctgggctcagagggccagggcatcaagaacccagtgaacaagggcaccaccacagtggacggcgctggcttcggcattgaccggccggcggag

SEQ ID NO: 151043 - DNA, 120 bp, Artificial Sequence
  ENSG00000105705_15 (sequence is synthesized)
ctctccaaggaggacgacgagtatgaggcgttccgcaagaggatgatgctggcctaccgcttccggcccaaccccctgaacaatcccagacggccttactactgagtgttctggaaatac

SEQ ID NO: 151044 - DNA, 120 bp, Artificial Sequence
  ENSG00000105705_16 (sequence is synthesized)
atactttctgaatgaccaaccgtccctggactgtggaatgttccggcctgcatttctgcccaccccttccgttgtcacgagtgccgtgccgtgtaataaagtcccagtgctcatccacca

SEQ ID NO: 151045 - DNA, 120 bp, Artificial Sequence
  ENSG00000105705_17 (sequence is synthesized)
cagatgcctggtcctgttgcaggaagcccctcctgttagcagcgggatgcaagatgctgtctcggggctctccttattggcctgtggagtctccatccccgctcagcctgggttgcactg

SEQ ID NO: 151046 - DNA, 120 bp, Artificial Sequence
  ENSG00000105705_18 (sequence is synthesized)
ccccgctcagcctgggttgcactggaggggaggaagaaagttgttttcagcatagtaaagctggaaggccaggtgcagtgtctcacccctgtcatcccagcactttgagaggccaaggcg

SEQ ID NO: 151047 - DNA, 60 bp, Artificial Sequence
  ENSG00000105705_19 (sequence is synthesized)
caggagaatggcttgaacctgggaagcggttgcagtgagccaagattgcgcctagctgga

SEQ ID NO: 151048 - DNA, 120 bp, Artificial Sequence
  ENSG00000105705_20 (sequence is synthesized)
gtgcctcatggagaaagtctctagcacttgcccagttgcctttgggacacacagcagcccttggccgggggcaagtcaggctctcaagtggaaattcacagtactgttcagtttatgttg

SEQ ID NO: 151049 - DNA, 120 bp, Artificial Sequence
  ENSG00000105705_21 (sequence is synthesized)
tgtacgttctcagggtctcccctttatgatgagggaaatggcagggaatggggaactttaggatctgtggagggggaacacccagcctgtgtgcgagttccacagaagggtgggtgtgtg

SEQ ID NO: 151050 - DNA, 120 bp, Artificial Sequence
  ENSG00000105705_22 (sequence is synthesized)
acaagcagcctagcctccctgccatccccggccatgcggtcgtaccctagccccagtggctgggtctgtgttcactggctcatccattcattgggtgggtttggcacttgctctgtgccc

SEQ ID NO: 151051 - DNA, 120 bp, Artificial Sequence
  ENSG00000105705_23 (sequence is synthesized)
atgcgtttgctgcacagtcgcacgtgtggggctgggtgcttgctagtgtgggccggatgctgttccaagcgttttctgattctcaccagaagtgacaagtggctcccatgtggcacggag

SEQ ID NO: 151052 - DNA, 120 bp, Artificial Sequence
  ENSG00000105705_24 (sequence is synthesized)
acttgctttcgggtccctgctcgccagcctgcctttttttgcacgatagaagctgcagggatatgcctgtcacagatacttattttcccctctcttctgcaaacttcctcctctccagat

SEQ ID NO: 151053 - DNA, 120 bp, Artificial Sequence
  ENSG00000105705_25 (sequence is synthesized)
gaggaggaggactatgagcagtggctggagatcaaaggtaagttgtgggagctgctgctcccccaccaccagtgcccgtgctctagcaggtgggatctgtggtgggcagggcaagtgctg

SEQ ID NO: 151054 - DNA, 120 bp, Artificial Sequence
  ENSG00000105705_26 (sequence is synthesized)
ccaggggcatgggtgctttcggctgagttgcagccaccagacctctgagctgagcctcaggccctctgaggtgaggagagcaaaggagggtgaggggcggggctggggtgttgctgggca

SEQ ID NO: 151055 - DNA, 120 bp, Artificial Sequence
  ENSG00000105705_27 (sequence is synthesized)
tgagggcagtcagcatgtgcttgcacccagccatagcctgatgatccaaggaatgacccagatgcccttgggaggctcactgtggcaagagagaaatgagggaatcacaaatgcacacaa

SEQ ID NO: 151056 - DNA, 120 bp, Artificial Sequence
  ENSG00000105705_28 (sequence is synthesized)
ttctaggtcaaggagaaaagctactgaatgaagattcttatgcttaccagggctgtagccagcaactgcagccagggtggagggtacctaggattggtttgtcactcaagtgccgaaccc

SEQ ID NO: 151057 - DNA, 120 bp, Artificial Sequence
  ENSG00000105705_29 (sequence is synthesized)
tagtgcttagatccgggtgcttcaatgcgcacacaccccagctctgagacacccagcaggtgaagaagtcgccctgtggcttagttggacagaacaggctccaaagtctgaggcccaggt

SEQ ID NO: 151058 - DNA, 120 bp, Artificial Sequence
  ENSG00000105705_30 (sequence is synthesized)
tcaagtcccactgatccatgtcctcagggagcatggcagccctcacccgcccgctcatgtggtggagtgggcctgggggaaagggactgtgggcatgctctaaggcaatcaaccagatgc

SEQ ID NO: 151059 - DNA, 120 bp, Artificial Sequence
  ENSG00000105705_31 (sequence is synthesized)
tcagacttcggctcctgcgtctccccaacagggctcccccacatccctcagtgccctgtaaaccaaggaaggactaagagtgcaaatgtgggccattcttagcggcaaagcccgagtgtt

SEQ ID NO: 151060 - DNA, 120 bp, Artificial Sequence
  ENSG00000105705_32 (sequence is synthesized)
gatgagctggaaggacccaaatcttttcccttcccagagggcccgctgcacccctttgctcaccttctcccccgggaagcaccgcaccgcccgaggggtggtggtttctgccacccggat

SEQ ID NO: 151061 - DNA, 120 bp, Artificial Sequence
  ENSG00000105705_33 (sequence is synthesized)
ggggctgttgcagcatctttctatgtgtcagtgttactggagcctgccaagttccacagctgatgccaaattaaatgtcagctgctctgaggatggttggctgcctcccctgaaggagct

SEQ ID NO: 151062 - DNA, 120 bp, Artificial Sequence
  ENSG00000105705_34 (sequence is synthesized)
aagggagtcgcacagctgagtcttacgccagactctgaatctgtgcgcgcttacacctggtgtctgttagcaacggagctgccttctgagagcccgtttgtgcgtgcgcccatgcatgct

SEQ ID NO: 151063 - DNA, 120 bp, Artificial Sequence
  ENSG00000105705_35 (sequence is synthesized)
gcccacatgccgtctcagctctcttgtctctggctctgcaaattcctgccctgtcactcgttagctgtgtgaccctgagtgagtcccggaacctctgattcttggtgtccacatctgcaa

SEQ ID NO: 151064 - DNA, 120 bp, Artificial Sequence
  ENSG00000105705_36 (sequence is synthesized)
gacagtaatgatatgaggtccccgtgtgcctggagtgtcatgaaggtgtgagactcacagcacaccccagcgcaggagcgagatcggggtgcacctgtcaggctctgactaccctgtgtc

SEQ ID NO: 151065 - DNA, 120 bp, Artificial Sequence
  ENSG00000105705_37 (sequence is synthesized)
actacaggaagaaggtggctgagataagaaaggaagcacagaagtcgcaggcagcctctcagaaagctttctgtatgagcccaatagccaagggtacaagtactaccgacagaagctgga

SEQ ID NO: 151066 - DNA, 120 bp, Artificial Sequence
  ENSG00000105705_38 (sequence is synthesized)
tgtgcctggactcgggacgcccgacagcctcctgcatctcacactcttctccccccaccccctctgtcgttgtggtccatagagagagtgtgcctattgactgtggggtgtgtgagttga

SEQ ID NO: 151067 - DNA, 120 bp, Artificial Sequence
  ENSG00000105707_0 (sequence is synthesized)
tcgagcccgctttccagggaccctacctgagggcccacaggtgaggcagcctggcctagcaggccccacgccaccgcctctgcctccaggccgcccgctgctgcggggccaccatgctcc

SEQ ID NO: 151068 - DNA, 120 bp, Artificial Sequence
  ENSG00000105707_1 (sequence is synthesized)
tgcccaggcctggagactgacccgaccccggcactacctcgaggctccgcccccacctgctggaccccagggtaaggacaagggcccccagactcacagttccagccctgaggacagggg

SEQ ID NO: 151069 - DNA, 120 bp, Artificial Sequence
  ENSG00000105707_2 (sequence is synthesized)
ttccctcatccccccacccagcctaatgcccacctcctaatagaggggttcctggggacctgaagagggggcactatgacgtccccccaagcacctaggtgttctgtcctgctcttcctt

SEQ ID NO: 151070 - DNA, 120 bp, Artificial Sequence
  ENSG00000105707_3 (sequence is synthesized)
cagactcagccgttggaccccagtcctttcctccccagacccaggagttccagccctcaggcccctcctccctcatactagggagtcctggcccccaaattcctcctttcccaagactta

SEQ ID NO: 151071 - DNA, 120 bp, Artificial Sequence
  ENSG00000105707_4 (sequence is synthesized)
tgatttcaggtcctcagctgtctcctccctcaaaccgggatcctcagtcccctgctccaccaggctcaggcatgggggtccccatccctgcaaatccaggcgtccccccgctgctggtca

SEQ ID NO: 151072 - DNA, 120 bp, Artificial Sequence
  ENSG00000105707_5 (sequence is synthesized)
gacactgaccccatccttgaacccagcccaatctgcgtccgtgatcacggcgtgctctggccaaggcccagtccctacagcctgcctggatggacgcctgggactgggggcgccaggact

SEQ ID NO: 151073 - DNA, 120 bp, Artificial Sequence
  ENSG00000105707_6 (sequence is synthesized)
gggctgggctgggctcccccaggccctgcctccccgtccatctcctcacaggtcccaccctggcccaggaggtcagccagggaatcattaacaagaggcagtgacatggcgcagaaggag

SEQ ID NO: 151074 - DNA, 120 bp, Artificial Sequence
  ENSG00000105707_7 (sequence is synthesized)
ggtggccggactgtgccatgctgctccagacccaaggtggcagctctcactgcggggaccctgctacttctgacagccatcggggcggcatcctgggccattgtggctgttctcctcagg

SEQ ID NO: 151075 - DNA, 120 bp, Artificial Sequence
  ENSG00000105707_8 (sequence is synthesized)
agtgaccaggagccgctgtacccagtgcaggtcagctctgcggacgctcggctcatggtctttgacaagacggaagggacgtggcggctgctgtgctcctcgcgctccaacgccagggta

SEQ ID NO: 151076 - DNA, 120 bp, Artificial Sequence
  ENSG00000105707_9 (sequence is synthesized)
cacgtcgggcttcttctgtgtggacgaggggaggctgccccacacccagaggctgctggaggtcatctccgtgtgtgattgccccagaggccgtttcttggccgccatctgccaagactg

SEQ ID NO: 151077 - DNA, 120 bp, Artificial Sequence
  ENSG00000105707_10 (sequence is synthesized)
tggccgcaggaagctgcccgtggaccgcatcgtgggaggccgggacaccagcttgggccggtggccgtggcaagtcagccttcgctatgatggagcacacctctgtgggggatccctgct

SEQ ID NO: 151078 - DNA, 120 bp, Artificial Sequence
  ENSG00000105707_11 (sequence is synthesized)
ctccggggactgggtgctgacagccgcccactgcttcccggagcggaaccgggtcctgtcccgatggcgagtgtttgccggtgccgtggcccaggcctctccccacggtctgcagctggg

SEQ ID NO: 151079 - DNA, 120 bp, Artificial Sequence
  ENSG00000105707_12 (sequence is synthesized)
ggtgcaggctgtggtctaccacgggggctatcttccctttcgggaccccaacagcgaggagaacagcaacgatattgccctggtccacctctccagtcccctgcccctcacagaatacat

SEQ ID NO: 151080 - DNA, 120 bp, Artificial Sequence
  ENSG00000105707_13 (sequence is synthesized)
ccagcctgtgtgcctcccagctgccggccaggccctggtggatggcaagatctgtaccgtgacgggctggggcaacacgcagtactatggccaacaggccggggtactccaggaggctcg

SEQ ID NO: 151081 - DNA, 120 bp, Artificial Sequence
  ENSG00000105707_14 (sequence is synthesized)
agtccccataatcagcaatgatgtctgcaatggcgctgacttctatggaaaccagatcaagcccaagatgttctgtgctggctaccccgagggtggcattgatgcctgccagggcgacag

SEQ ID NO: 151082 - DNA, 120 bp, Artificial Sequence
  ENSG00000105707_15 (sequence is synthesized)
cggtggtccctttgtgtgtgaggacagcatctctcggacgccacgttggcggctgtgtggcattgtgagttggggcactggctgtgccctggcccagaagccaggcgtctacaccaaagt

SEQ ID NO: 151083 - DNA, 120 bp, Artificial Sequence
  ENSG00000105707_16 (sequence is synthesized)
cagtgacttccgggagtggatcttccaggccataaagactcactccgaagccagcggcatggtgacccagctctgaccggtggcttctcgctgcgcagcctccagggcccgaggtgatcc

SEQ ID NO: 151084 - DNA, 120 bp, Artificial Sequence
  ENSG00000105707_17 (sequence is synthesized)
cggtggtgggatccacgctgggcctaggatgggacgtttttcttcttgggcccggtccacaggtccaaggacaccctccctccagggtcctctcttccacagtggcgggcccactcagcc

SEQ ID NO: 151085 - DNA, 120 bp, Artificial Sequence
  ENSG00000105707_18 (sequence is synthesized)
ccgagaccacccaacctcaccctcctgacccccatgtaaatattgttctgctgtctgggactcctgtctaggtgcccctgatgacgggatgctctttaaataataaagatggttttgatt

SEQ ID NO: 151086 - DNA, 120 bp, Artificial Sequence
  ENSG00000105707_19 (sequence is synthesized)
tctaatgggggaagggaggcagagatttgttttaggaaacctacgctcaggcctagaagagggccccccttgggaacagatggactttgaagggttcctggggaagggaagccagtggtg

SEQ ID NO: 151087 - DNA, 120 bp, Artificial Sequence
  ENSG00000105707_20 (sequence is synthesized)
gaggctgccccacacccagaggctgctggaggtcatctccgtgtggtgaggagggcagcgggcaggtggggcaacacctcagacccccaaggcactccctctccccgttttccttccacc

SEQ ID NO: 151088 - DNA, 120 bp, Artificial Sequence
  ENSG00000105707_21 (sequence is synthesized)
tgtcttaactggtctctatttcctttctttctgtgtctccaatcccatctctcccagtgattgccccagaggccgtttcttggccgccatctgccaaggtgagatcctaaaactcagaac

SEQ ID NO: 151089 - DNA, 120 bp, Artificial Sequence
  ENSG00000105707_22 (sequence is synthesized)
cctctcctttaggcccttggggaggccacgtcccctcaagctccccaggatggggccatgtactttcagaccccctagggcagggccaagcctgggctctggggacctgggctccagtcc

SEQ ID NO: 151090 - DNA, 120 bp, Artificial Sequence
  ENSG00000105707_23 (sequence is synthesized)
gattggtccgacctgagtccttgagtctggcagagtgccatggtgctctgtaatcccacctgtaatcccagcattttaggaggcagaggcaggaagattgcttgagcctaggagttcaag

SEQ ID NO: 151091 - DNA, 90 bp, Artificial Sequence
  ENSG00000105707_24 (sequence is synthesized)
ttagtcaggtgtggtggtgcacgcctgtggtcctagctactcaggaggttgagtgcaggtcagctctgcggacgctcggctcatggtctt

SEQ ID NO: 151092 - DNA, 120 bp, Artificial Sequence
  ENSG00000105708_0 (sequence is synthesized)
agtgcggacgtcgccattcctggcccatgggaagattgcgtttcacctgctcctgaaggccgaaggtggctctagcgcatcctttgtcgcgccgtgacctgcaggtactgacagatccgt

SEQ ID NO: 151093 - DNA, 120 bp, Artificial Sequence
  ENSG00000105708_1 (sequence is synthesized)
agggaggacaccgtgacttcccggacgctgggaaatggactcagtctcctttgaggatgtggccgtgaacttcaccctggaggagtgggctttgctggattcttcacagaaaaagctcta

SEQ ID NO: 151094 - DNA, 120 bp, Artificial Sequence
  ENSG00000105708_2 (sequence is synthesized)
tgaagatgtgatgcaggagaccttcaaaaacctggtttgtctaggaaaaaagtgggaagaccaggacattgaagatgaccacagaaaccaggggaaaaatcgaagatgtcatatggttga

SEQ ID NO: 151095 - DNA, 120 bp, Artificial Sequence
  ENSG00000105708_3 (sequence is synthesized)
gagactctgtgaaagtagaagaggtagcaaatgtggagaaaccactagccagatgccaaatgttaatatcaacaaggaaacttttactggagcaaaaccacatgaatgcagcttttgtgg

SEQ ID NO: 151096 - DNA, 120 bp, Artificial Sequence
  ENSG00000105708_4 (sequence is synthesized)
aagagacttcattcatcattcgtcccttaataggcacatgagatctcacactggacagaaaccaaatgagtatcaggaatatgaaaagcaaccatgtaaatgtaaagcagttgggaaaac

SEQ ID NO: 151097 - DNA, 120 bp, Artificial Sequence
  ENSG00000105708_5 (sequence is synthesized)
cttcagttatcaccactgctttcgcaaacatgaaagaactcacactggagtgaagccctatgaatgtaaacagtgtgggaaagcctttatatattaccagccatttcaaagacatgaaag

SEQ ID NO: 151098 - DNA, 120 bp, Artificial Sequence
  ENSG00000105708_6 (sequence is synthesized)
gactcatgctggacagaaaccctatgaatgtaagcaatgtggaaaaacctttatatattaccagtcttttcaaaaacatgctcatactggaaagaaaccctatgaatgtaaacagtgtgg

SEQ ID NO: 151099 - DNA, 78 bp, Artificial Sequence
  ENSG00000105708_7 (sequence is synthesized)
ctcatactggaaagaaaccctatgaatgtaaacagtgtgggaaagcctttatatgttaccaatcttttcaaagacaca

SEQ ID NO: 151100 - DNA, 120 bp, Artificial Sequence
  ENSG00000105708_8 (sequence is synthesized)
tgaaagaactcacactggagaaaaaccctacaaatgtaaagaatgtggtaaagccttcagttttctcagttcttttcgaaggcataaaaggactcatagtggagagaaaccctatgaatg

SEQ ID NO: 151101 - DNA, 120 bp, Artificial Sequence
  ENSG00000105708_9 (sequence is synthesized)
taaagaatgtggaaaagccttcttttattctgcaagctttcgagcacatgtaataatacacactggggctcgaccttataaatgtaaagaatgtgggaaagccttcaactcttctaattc

SEQ ID NO: 151102 - DNA, 120 bp, Artificial Sequence
  ENSG00000105708_10 (sequence is synthesized)
ctgtcgagtgcatgaaagaactcatattggagaaaaaccatatgaatgtaaacgatgtggcaaatcattcagttggtccatttctcttcgattgcatgaaagaactcatactggagagaa

SEQ ID NO: 151103 - DNA, 120 bp, Artificial Sequence
  ENSG00000105708_11 (sequence is synthesized)
tgaaagaactcatactggagagaaaccttatgagtgtaaacagtgtcataaaaccttcagtttttcaagttcccttcgagaacacgaaacaactcacactggagagaaaccctatgaatg

SEQ ID NO: 151104 - DNA, 88 bp, Artificial Sequence
  ENSG00000105708_12 (sequence is synthesized)
aaggtcagtgtggaaaagttttcattcgttccagttcctttcgactgcatgaaagaacacacactggagagaaaccctatgaatgtaa

SEQ ID NO: 151105 - DNA, 120 bp, Artificial Sequence
  ENSG00000105708_13 (sequence is synthesized)
tggagagaaaccctatgaatgtaaactatgcggtaaaaccttcagtttttcaagttcccttcgagaacatgaaaaaattcacactggaaataagccttttgagtgtaagcaatgtggtaa

SEQ ID NO: 151106 - DNA, 120 bp, Artificial Sequence
  ENSG00000105708_14 (sequence is synthesized)
atgaaaggactcacactggagagaaaccgtatcaatgtaaacaatgtggaaaagccttcatttcttccagtaaatttcgaatgcatgagagaactcacacgggagagaaaccctatcgat

SEQ ID NO: 151107 - DNA, 120 bp, Artificial Sequence
  ENSG00000105708_15 (sequence is synthesized)
atgagagaactcacacgggagagaaaccctatcgatgtaaacaatgtgggaaagccttcagattttcaagttctgttcgaattcatgaaaggtctcacactggagagaaaccttatgaat

SEQ ID NO: 151108 - DNA, 120 bp, Artificial Sequence
  ENSG00000105708_16 (sequence is synthesized)
gcaaacaatgtggaaaagccttcatttcttccagtcactttcgactgcatgaaaggactcatatgggagagaaagtctaagaatataagcaacattctgaagccttcggttgttccagct

SEQ ID NO: 151109 - DNA, 120 bp, Artificial Sequence
  ENSG00000105708_17 (sequence is synthesized)
ccttctgaatacacaaaagagttcatactggacagaagctgtgtgaatacaaacattgttctaaagcccttaattgttccagtttcttttgagcacgaaagaattcccactggtgagaaa

SEQ ID NO: 151110 - DNA, 120 bp, Artificial Sequence
  ENSG00000105708_18 (sequence is synthesized)
actggtgagaaacagtatgaatgtaaacattgtgattaagccttcagttgacctaattcatttcaaagacaggactcgtgctgcagtgaaatctgttttgttttttgttttttgtttttt

SEQ ID NO: 151111 - DNA, 88 bp, Artificial Sequence
  ENSG00000105708_19 (sequence is synthesized)
tagtcccagcactttgggaggccaaggtgcaaggcaggcagatcatttgaggtcagaaattcgagaccagcgtggttaccaaaaaatg

SEQ ID NO: 151112 - DNA, 62 bp, Artificial Sequence
  ENSG00000105708_20 (sequence is synthesized)
atggtgtaaccccatctctactaaaaattaccaaaaaatgaaccaggcatggtagtagacag

SEQ ID NO: 151113 - DNA, 120 bp, Artificial Sequence
  ENSG00000105708_21 (sequence is synthesized)
cacgccactgcattccagcctgtgcgacagaatgagacactgtctcaagaaaaaataaaagtgggaaaatcttccaactgtcctctagagtgtgaatatatgaaaggagtcagagtgggg

SEQ ID NO: 151114 - DNA, 120 bp, Artificial Sequence
  ENSG00000105708_22 (sequence is synthesized)
tgaaagtctataaatgtaagacatttgggaaagccttcacacagccttttgagcacacatgagaatgtatactggagagaaaccctataaatattaagaatgtgggaaattcttcatcct

SEQ ID NO: 151115 - DNA, 120 bp, Artificial Sequence
  ENSG00000105708_23 (sequence is synthesized)
agttcttttgttgttgttgatgatacaaaaatattttcatttaataaagattgtcaggttatatttaataagaaagaaagtatcatgtaaacagcccagtaataaaattttacaatctta

SEQ ID NO: 151116 - DNA, 80 bp, Artificial Sequence
  ENSG00000105711_0 (sequence is synthesized)
agtgcgcaggagaccgcggtccgcgcccgagcgcgcccgagccggagcgggaccggggtcggtgcacctagcggatgtgc

SEQ ID NO: 151117 - DNA, 80 bp, Artificial Sequence
  ENSG00000105711_1 (sequence is synthesized)
gccgcgccccccctcctcccccctcgccggtcccagagccgcagctgctgcgcccgcgcgctcccggggacattctaacc

SEQ ID NO: 151118 - DNA, 120 bp, Artificial Sequence
  ENSG00000105711_2 (sequence is synthesized)
tgcgcccgcgcgctcccggggacattctaaccgccgccaggtcccgccgcctctcgccccgctattaataccggcggcccgggaggggggcgcagcacgcgccgcgcagccatggggagg

SEQ ID NO: 151119 - DNA, 120 bp, Artificial Sequence
  ENSG00000105711_3 (sequence is synthesized)
ctgctggccttagtggtcggcgcggcactggtgtcctcagcctgcgggggctgcgtggaggtggactcggagaccgaggccgtgtatgggatgaccttcaaaattctttgcatctcctgc

SEQ ID NO: 151120 - DNA, 120 bp, Artificial Sequence
  ENSG00000105711_4 (sequence is synthesized)
aagcgccgcagcgagaccaacgctgagaccttcaccgagtggaccttccgccagaagggcactgaggagtttgtcaagatcctgcgctatgagaatgaggtgttgcagctggaggaggat

SEQ ID NO: 151121 - DNA, 120 bp, Artificial Sequence
  ENSG00000105711_5 (sequence is synthesized)
gagcgcttcgagggccgcgtggtgtggaatggcagccggggcaccaaagacctgcaggatctgtctatcttcatcaccaatgtcacctacaaccactcgggcgactacgagtgccacgtc

SEQ ID NO: 151122 - DNA, 120 bp, Artificial Sequence
  ENSG00000105711_6 (sequence is synthesized)
ctgagatcatgatgtatgtgctcattgtggtgttgaccatatggctcgtggcagagatgatttactgctacaagaagatcgctgccgccacggagactgctgcacaggagaatgcctcgg

SEQ ID NO: 151123 - DNA, 120 bp, Artificial Sequence
  ENSG00000105711_7 (sequence is synthesized)
aatacctggccatcacctctgaaagcaaagagaactgcacgggcgtccaggtggccgaatagccctggccctgggccccgcctcaaggaagagccagccgtaatggggactctccaggca

SEQ ID NO: 151124 - DNA, 120 bp, Artificial Sequence
  ENSG00000105711_8 (sequence is synthesized)
ccgcctgcccccagcgtgggggtggccactcctgggccccagaaagcctcagagtcctgccgacggagccactggggtgggagggggcagggggcttggctcgcacccccactttcgcct

SEQ ID NO: 151125 - DNA, 120 bp, Artificial Sequence
  ENSG00000105711_9 (sequence is synthesized)
cctccagctcctgccccgccggccgcgcaccgccatgcatgatgggtaaagcaatactgccgctgcccccaccctgcttctgctgcctgtttggggaggggggcggtgaggtgggggcag

SEQ ID NO: 151126 - DNA, 120 bp, Artificial Sequence
  ENSG00000105711_10 (sequence is synthesized)
cggccccgcacccctcctccttgctgatttgcacacattggccgcttcagacacgcacttctggggccagcccctccccgcctcctccctgcctggcggcaggggtcgcgatgatgggct

SEQ ID NO: 151127 - DNA, 120 bp, Artificial Sequence
  ENSG00000105711_11 (sequence is synthesized)
ggagcagtttggggcagggggttctgggacccactccgactccccctccccggcatcatttcccctcccgcttcctccggctggacctggggtcccccctccctgtaatgcactcctgcc

SEQ ID NO: 151128 - DNA, 120 bp, Artificial Sequence
  ENSG00000105711_12 (sequence is synthesized)
ccggcccaacctcgccctctctcaccagccttgaactgtggccacctagaaaggggcccattcagcctcgtctctttacagaagtagttttgttcatgaaataaagactcttggacttga

SEQ ID NO: 151129 - DNA, 120 bp, Artificial Sequence
  ENSG00000105711_13 (sequence is synthesized)
gggaaggggattgggaggggccgaagtcccccaggtccctaattccccctctcttgctccccttcaggccctgggccccgcctcaaggaagagccagccgtaatggggactctccaggca

SEQ ID NO: 151130 - DNA, 120 bp, Artificial Sequence
  ENSG00000105711_14 (sequence is synthesized)
cgcctgctcttcttcgaaaactacgagcacaacaccagcgtcgtcaagaagatccacattgaggtagtggacaaaggtgagtcgggtgctgcctgcccctttaccgtcacccaccggaga

SEQ ID NO: 151131 - DNA, 120 bp, Artificial Sequence
  ENSG00000105711_15 (sequence is synthesized)
gccagatggagggacagatggcaggcagtggacaggacaggctggctctgtgcctggccagccaaccgcccacagcagcgggctgagggggaggggagcagcccctcctgcccactccag

SEQ ID NO: 151132 - DNA, 120 bp, Artificial Sequence
  ENSG00000105711_16 (sequence is synthesized)
ctctggcctctgtttctctccagcccacggagaggtcaaagcatgcctgtcccccacagacgctccgggtacagaacccagctctgtcacctgtgctgtatgacctctggcaggtgcctt

SEQ ID NO: 151133 - DNA, 120 bp, Artificial Sequence
  ENSG00000105711_17 (sequence is synthesized)
ctgtctctgagccaaagggttgtcctgggcttgcccgggataataatccgatgtgtttctcggggtgtggtttgagccattcttccatcatggggttcatgaggattgagcagctgcagg

SEQ ID NO: 151134 - DNA, 120 bp, Artificial Sequence
  ENSG00000105711_18 (sequence is synthesized)
cacacgcctggcttccagcagagccttgcaggtggtggcgagggtggcggttcttactgttcgagtagctcagccctgctgccctctgtggtgatgaggcaagagagcgtgccacctaga

SEQ ID NO: 151135 - DNA, 120 bp, Artificial Sequence
  ENSG00000105711_19 (sequence is synthesized)
gcagagttccgcacacccctctgcactcctgccccgggggagccgcgctggcctgcagtctcactcaacacctctggggcgggcctaggggtcctttctaaagctctcaggtgaggcagt

SEQ ID NO: 151136 - DNA, 120 bp, Artificial Sequence
  ENSG00000105711_20 (sequence is synthesized)
gaagggccacaggtgcggggcccaccctctgagcagcaagggcctacagcgcttttgaacgtctcatcattttgcctcagccaccctggaccccttttctgagggaggtccgccccttct

SEQ ID NO: 151137 - DNA, 120 bp, Artificial Sequence
  ENSG00000105711_21 (sequence is synthesized)
ctgatccatcttctgctcagcatcaattgcaattgtccagcgccctgtggccactggcttagagttggggaaacagcccaggccttgaagcagctacaagccgtggcagaaaggtctctc

SEQ ID NO: 151138 - DNA, 120 bp, Artificial Sequence
  ENSG00000105711_22 (sequence is synthesized)
agggccacggcacacacatcctcatgggcaacacgcactgcccatcttttctgtgagatgggtgccggcctcagtgccttacacggagtcccttagtgaatcctctccccaccctctggg

SEQ ID NO: 151139 - DNA, 120 bp, Artificial Sequence
  ENSG00000105711_23 (sequence is synthesized)
gtaggggctcttcctatccccattttacggatgagaaaaccaaggctcagggagggaaggttatgtggccaaggtcatgtgattgggagctggacttgaatccagaggagcttgggtgac

SEQ ID NO: 151140 - DNA, 120 bp, Artificial Sequence
  ENSG00000105711_24 (sequence is synthesized)
tgtgtttctgttcttggcatgattcactgtactctgtgatcagccagagcctgtgggtttctttttataattagcatttttacgtttattgtcaaattggtgtagcagaatgcaattcag

SEQ ID NO: 151141 - DNA, 120 bp, Artificial Sequence
  ENSG00000105711_25 (sequence is synthesized)
caggcatgtctgagccactctggtgtttgtcacgatgctggggggtgggggtcacccgcagacatggatgatggagccccgcctgcggagttgctgtgacaaagatgcctgcggtactgg

SEQ ID NO: 151142 - DNA, 120 bp, Artificial Sequence
  ENSG00000105711_26 (sequence is synthesized)
gactttacaaaacctgtgttattgctcttgcaaatctgcagaggtgagatggggagagggtgggaggctccagggcactgttcagccacccaggttctttccatcttgttgtttggcagt

SEQ ID NO: 151143 - DNA, 120 bp, Artificial Sequence
  ENSG00000105711_27 (sequence is synthesized)
tggccagggtgttgtgtcctctgtacgccgtgacccaatagagcctctttttttttttttttaaatttagatttttattttttgagacggagttttgctattattgcccaggctggagtg

SEQ ID NO: 151144 - DNA, 120 bp, Artificial Sequence
  ENSG00000105711_28 (sequence is synthesized)
aggtgtgagccactgcgcctggcctgagcctctcttttttaggattgcccactgtatgacactacatcccacagcctgtgctattaccagcatttaccatcatatgcagttccttatgtt

SEQ ID NO: 151145 - DNA, 120 bp, Artificial Sequence
  ENSG00000105711_29 (sequence is synthesized)
cttatgttggccctgcagagtttgtgttttctgcactatccacccagttctagtgttttttacccaccatatgtagtattgccttttaaacattacccactatattatagtattttatat

SEQ ID NO: 151146 - DNA, 120 bp, Artificial Sequence
  ENSG00000105711_30 (sequence is synthesized)
ttttatattacccactataggatattttatattacacaatatattttactatcataatattgccaaacacaacagttttttgttttttgttaaagagaccaagtcttgctctgttgccca

SEQ ID NO: 151147 - DNA, 120 bp, Artificial Sequence
  ENSG00000105711_31 (sequence is synthesized)
tactgtggcgtgatcatagcccactgcagcctcgaactcccgaaatccagcgatccttctgcttgagcctcccacgtagctgggactacaggtgtgagccactacgcccggcaatttttt

SEQ ID NO: 151148 - DNA, 120 bp, Artificial Sequence
  ENSG00000105711_32 (sequence is synthesized)
ttttttttgtagagactggatcttgctatgttgcccaggatggtcttgaactcctggcctcaaataatcttccctccttagccgccgtaagtgccgagattacaggagagagcctccgcg

SEQ ID NO: 151149 - DNA, 120 bp, Artificial Sequence
  ENSG00000105711_33 (sequence is synthesized)
cctggcctacagtatttttattataatccatcatactagcgtatttttaacgttccccaccatggcgggtatttttattacccaccatgctatgctatagtatttcaaaaattaatccta

SEQ ID NO: 151150 - DNA, 120 bp, Artificial Sequence
  ENSG00000105711_34 (sequence is synthesized)
ttgtagcatgtaaaaatattccattctataccatactatattcatcattacctctgatactacagtatttttaacatgactcattgtgctattgtattttttcattacccacaataccac

SEQ ID NO: 151151 - DNA, 120 bp, Artificial Sequence
  ENSG00000105711_35 (sequence is synthesized)
aatattactgtatttgttagcactgcctgccattccttattattattatttttgcaatggagtctcgctctgtcacccaggcaggctggagtgcagcagtacaatgtcggctcactgcac

SEQ ID NO: 151152 - DNA, 68 bp, Artificial Sequence
  ENSG00000105711_36 (sequence is synthesized)
gcacctcccggacgccaccatgcccaactaatttttgtacttgtagtacagacggggttttaccatgt

SEQ ID NO: 151153 - DNA, 81 bp, Artificial Sequence
  ENSG00000105711_37 (sequence is synthesized)
aagaccaggctggtctcgcactcctggcctccagtgattcacccaccttggcctcccagagtgctggaatgacacgtatga

SEQ ID NO: 151154 - DNA, 120 bp, Artificial Sequence
  ENSG00000105711_38 (sequence is synthesized)
cccaccttggcctcccagagtgctggaatgacacgtatgagccaccacactgacctttttattatttttatccaccatctcgctgcaatttcagtattgcccatcgacctatattgcctc

SEQ ID NO: 151155 - DNA, 120 bp, Artificial Sequence
  ENSG00000105711_39 (sequence is synthesized)
ctggtaatgacccctgaggaatgagccatgccatttccataggtggaggcgacgggtcatggtggtgagaacttcactgacctggaagaggtggagaagatgctgggaagctgctgaggg

SEQ ID NO: 151156 - DNA, 120 bp, Artificial Sequence
  ENSG00000105711_40 (sequence is synthesized)
ctgcccacctgtgttaggagaaggcagatggggacccatggggacagtaatactattttggatccacacaacgggagtggaaaatgccttgaggcacagcagcgtctgaggcgggtgaga

SEQ ID NO: 151157 - DNA, 120 bp, Artificial Sequence
  ENSG00000105711_41 (sequence is synthesized)
aatccggcctgcagagtcgcggctggccttcagatctgcgggctgcctgtgagatgccgtgttacctaaatccatttgggcactgagttccaggagtgggggcaagaattccgatgacgg

SEQ ID NO: 151158 - DNA, 120 bp, Artificial Sequence
  ENSG00000105711_42 (sequence is synthesized)
ggctttatccggtgcgcatccagctcagagtggttcctgagaccagccaccatgggcagccaggatgtgctcatccttgaggctttccgaggcatcaaggagatggttggataaagaatt

SEQ ID NO: 151159 - DNA, 120 bp, Artificial Sequence
  ENSG00000105711_43 (sequence is synthesized)
tagcacagagcttgactgatggcaggcgcccacaacatgagacacattaataatgtgtgtggaggccaggtgtagtggttcatgcctgtcaccccagcactttgggaggcagaggtggga

SEQ ID NO: 151160 - DNA, 120 bp, Artificial Sequence
  ENSG00000105711_44 (sequence is synthesized)
caggaggattgcttgagctcaggagttccaggctgcagtgggctatgattgcatcactgcactccagtctgggcaatagagcaagaccctgtctcttaaaaaaataaagtctgttgaaaa

SEQ ID NO: 151161 - DNA, 120 bp, Artificial Sequence
  ENSG00000105711_45 (sequence is synthesized)
gttgaaaagaatgaatgaaggaaggaaggaatgagagggaaaccctgtctcagctcctcccgcagggaagctggggcagggcaggcagggggggcatccggccccgctccctcccttact

SEQ ID NO: 151162 - DNA, 120 bp, Artificial Sequence
  ENSG00000105711_46 (sequence is synthesized)
ctggcccagaaagcactggtgccatctgcacagggtggagccaaagaaagtgccccactcacagcagagggaggccatttgaggacagcagggaaaatgggatctcagccatctaggagg

SEQ ID NO: 151163 - DNA, 120 bp, Artificial Sequence
  ENSG00000105711_47 (sequence is synthesized)
gggccagagatgtgggatggacacctaggaaatccagccgaggacaccagagtggcttttgactctggtcccctggctgaacgcgttccctttacagtttaaatttaggctcaaggagaa

SEQ ID NO: 151164 - DNA, 120 bp, Artificial Sequence
  ENSG00000105711_48 (sequence is synthesized)
gaagctggcaatcggcagggccagtgctgtagagaggatgtagggtttccggaaaatagccaacacttcagcagtgctggctgcgagctcatccaagcatgttacgggtgttaactcatt

SEQ ID NO: 151165 - DNA, 120 bp, Artificial Sequence
  ENSG00000105711_49 (sequence is synthesized)
ccgggatttgaaccctggcagtctggccctagagccccagctgttaaccattaggctttatagccccagttataacaacaataataatactaatacaagtgaaccttcactgagtgccat

SEQ ID NO: 151166 - DNA, 120 bp, Artificial Sequence
  ENSG00000105711_50 (sequence is synthesized)
ttatagatcaagcactattctaaggattttaaagcatatttaattctcacagcactctgatgaaggaggtattcattttacaattgaagaaacagaggcctagagacattgagtcacttg

SEQ ID NO: 151167 - DNA, 120 bp, Artificial Sequence
  ENSG00000105711_51 (sequence is synthesized)
cgcaaggtcacacagctggccagtggcagagccagcctttgaacctgagccttctggttgcagagctacggcttttaggcaccgtgctgagggcctccagaatgacacagatgtggcctc

SEQ ID NO: 151168 - DNA, 120 bp, Artificial Sequence
  ENSG00000105711_52 (sequence is synthesized)
gagttacacagggaggcaggttgagggtgacccccaccaggcctacccaaggctgggtattaataatcacagtgcatacaccaggcccagggaggttgagccactcatccaagctcacac

SEQ ID NO: 151169 - DNA, 120 bp, Artificial Sequence
  ENSG00000105711_53 (sequence is synthesized)
ccgctgggatgctggggacatgggggtcaagggggagacggagacagagagaggggtattggagagagagagagagagagagagttaagagactgagcgcgatggagaaagggaaacttg

SEQ ID NO: 151170 - DNA, 120 bp, Artificial Sequence
  ENSG00000105711_54 (sequence is synthesized)
agaaaggcagaaggagatggagagaagagagagggagatgcgggtgcccgtgaacaccgggagagaatcttgcatggagtttgaaaagggatagacgtagaaaggtggaaagagattagg

SEQ ID NO: 151171 - DNA, 120 bp, Artificial Sequence
  ENSG00000105711_55 (sequence is synthesized)
agaggtctccttctgagcccagagagtggacaaaaagtggagggaccttcagagagacccctgagagggacaaagataggagggactgagacagaggccctcagggagtctgaaagggac

SEQ ID NO: 151172 - DNA, 120 bp, Artificial Sequence
  ENSG00000105711_56 (sequence is synthesized)
cgcaggggaggcggatggatgagaagtcctgaggatcaggaaacaaggacagcacagggctgcagcagaagagacacagcgttagctacagagtgctgggaggcagaaaggaggtgccag

SEQ ID NO: 151173 - DNA, 120 bp, Artificial Sequence
  ENSG00000105711_57 (sequence is synthesized)
tgggagggcacccagggcaccgtcacacttgccagagaggaactccggagcccgggcagggaggaggcagcggagcggcccagggcgccatctctcagtactacccagaggggagtgctc

SEQ ID NO: 151174 - DNA, 120 bp, Artificial Sequence
  ENSG00000105711_58 (sequence is synthesized)
cctgtcagacacaggataggggtcgtcagacccagccccttcctccctccaactcaggagcccaggctcccagccagattcctcaaagaccctgaggagtccacccatagactccttctc

SEQ ID NO: 151175 - DNA, 120 bp, Artificial Sequence
  ENSG00000105711_59 (sequence is synthesized)
tctctaactaaggagccctgtgtacctggggtggagaccgctaccttcccccatcccccgggggttgggtcggtctgatgatggggtcactgtatacctggcctttcccccacagctcgg

SEQ ID NO: 151176 - DNA, 80 bp, Artificial Sequence
  ENSG00000105717_0 (sequence is synthesized)
agtggtagtgctccaggctcgacggcaccctcacagcgcccgcccggccctgccgctcatggccgccccgccgcgccccg

SEQ ID NO: 151177 - DNA, 120 bp, Artificial Sequence
  ENSG00000105717_1 (sequence is synthesized)
cgtcctgcagcagatcatggccatcaccgaccagagcctggacgaggcacaggccagaaagcatgctctgaattgccatcggatgaagcctgctctgttcagcgtgctctgtgagatcaa

SEQ ID NO: 151178 - DNA, 120 bp, Artificial Sequence
  ENSG00000105717_2 (sequence is synthesized)
ggaaaagacagtggtaagcatccgtggcattcaagacgaagatccccctgacgcccagctcctgaggctggataacatgctgctggctgagggcgtgtgcaggcccgagaagagaggaag

SEQ ID NO: 151179 - DNA, 120 bp, Artificial Sequence
  ENSG00000105717_3 (sequence is synthesized)
aggaggagcggtggccagggccggcacagcaacaccaggtggctgtccaaatgacaatagcattgagcactctgactacagggccaagctgtcccagatccgacagatttaccactctga

SEQ ID NO: 151180 - DNA, 120 bp, Artificial Sequence
  ENSG00000105717_4 (sequence is synthesized)
gctagagaaatatgaacaggcctgtcgtgagttcaccacgcacgtcaccaacctcctccaggagcagagcaggatgaggcctgtctcccctaaggagattgagcgcatggtcggcgccat

SEQ ID NO: 151181 - DNA, 120 bp, Artificial Sequence
  ENSG00000105717_5 (sequence is synthesized)
tcacggcaagttcagcgccatccagatgcagttgaagcagagcacctgtgaggcagtgatgaccctgcgttcgcggctgctcgatgccaggcgcaagcggcggaatttcagcaagcaggc

SEQ ID NO: 151182 - DNA, 120 bp, Artificial Sequence
  ENSG00000105717_6 (sequence is synthesized)
gaagaagccaaagaagagctggccaggaagggcggcctcaccatctcccaggtctctaactggtttggcaacaaaagaatccggtataaaaagaacatggggaagtttcaagaagaggct

SEQ ID NO: 151183 - DNA, 120 bp, Artificial Sequence
  ENSG00000105717_7 (sequence is synthesized)
accatttacacgggtaaaacggctgtggataccacggaagttggggtcccagggaaccacgccagctgcctgtcaacacctagctccggctcctctggacccttcccgctgcccagcgct

SEQ ID NO: 151184 - DNA, 120 bp, Artificial Sequence
  ENSG00000105717_8 (sequence is synthesized)
ggggacgccttcctcaccctgcggactctggcctctctccagcctcctcctgggggaggctgcctgcagtcccaggcccagggtagctggcagggggccaccccccaacctgcaactgcc

SEQ ID NO: 151185 - DNA, 120 bp, Artificial Sequence
  ENSG00000105717_9 (sequence is synthesized)
tcacctgctggagaccctggcagcatcaactccagtacatctaattaagtttgggggataagcaggaaagagcgctgcgtgagctgccatgtatcgccagccgttgctttgttactgaac

SEQ ID NO: 151186 - DNA, 120 bp, Artificial Sequence
  ENSG00000105717_10 (sequence is synthesized)
gtgccgccgacgacctcagaaaacccagatgggtggtggtgcccatgagcccctgctcctcagccaggcccgtggcgccggctcatgtgtctgctgcgactcgagatggcctgaaacgcc

SEQ ID NO: 151187 - DNA, 120 bp, Artificial Sequence
  ENSG00000105717_11 (sequence is synthesized)
actcattctcccacttcagttcgtttttttgacagtaattttatggtaacgctatgaattgaattgtctgttctaggactgggcacagattttcccattaaaatttttgacttattttaa

SEQ ID NO: 151188 - DNA, 120 bp, Artificial Sequence
  ENSG00000105717_12 (sequence is synthesized)
aagaaaaaaaaaagacaagccatgaggggacatgagtagtgtggtggggagggcccgctggcctgcctgggtgggggctgaggagcagaggccggatgctgaggaggggcaggagccaca

SEQ ID NO: 151189 - DNA, 120 bp, Artificial Sequence
  ENSG00000105717_13 (sequence is synthesized)
ttcgaggcctcctgccggctgaggggctgggtgggttccacctgaggaggcgccacgactctgcccaccccggctcccatctcttccaggctcctctggacccttcccgctgcccagcgc

SEQ ID NO: 151190 - DNA, 120 bp, Artificial Sequence
  ENSG00000105717_14 (sequence is synthesized)
gatggtggggggagatggggaggaggctcagcctccacgatcgattgattggcacaggaggccctgcctctgcttttgaggggccagcttcttgctgatttgagacagcagggagagcgt

SEQ ID NO: 151191 - DNA, 120 bp, Artificial Sequence
  ENSG00000105717_15 (sequence is synthesized)
gtgatctttctgcatggaagagtttctgtcatgtgaatgcgcatttgtcaaagcgaaacacggaacgctaaccacctttctttcgtggcgcagaacagggagtccatgcagttggtcgct

SEQ ID NO: 151192 - DNA, 120 bp, Artificial Sequence
  ENSG00000105717_16 (sequence is synthesized)
gcagaggtggtccattgttactgaaagccctttccatttacttaacagtcacccgccggtgtgtgaactacagggggtggcaggcggctgctccgctgtggaacctgctgccctgtgcca

SEQ ID NO: 151193 - DNA, 120 bp, Artificial Sequence
  ENSG00000105717_17 (sequence is synthesized)
ccctgctgcctagtcacaggccggcgtgtctgtgctcccaccccaggcctgtcgtgagttcaccacgcacgtcaccaacctcctccaggagcagagcaggatgaggcctgtctcccctaa

SEQ ID NO: 151194 - DNA, 120 bp, Artificial Sequence
  ENSG00000105717_18 (sequence is synthesized)
tgtggacggccactgagctgcatctggggaggccacagtgggaccacatctcccttcccccagtggtcaactctgtgtaactctttcttctgtttcaactgtgagagttctgttcctctt

SEQ ID NO: 151195 - DNA, 80 bp, Artificial Sequence
  ENSG00000105722_0 (sequence is synthesized)
gagaggctctgagaggcgaggccgggtgaggcggcgagggcggcccgacgggcgcgggacgggacggggcagcgagggcg

SEQ ID NO: 151196 - DNA, 120 bp, Artificial Sequence
  ENSG00000105722_1 (sequence is synthesized)
ccccccagcatgaagaccccggcggacacagggtttgccttcccggattgggcctacaagccagagtcgtcccctggctcaaggcagatccagctgtggcactttatcctggagctgctg

SEQ ID NO: 151197 - DNA, 120 bp, Artificial Sequence
  ENSG00000105722_2 (sequence is synthesized)
cggaaggaggagtaccagggcgtcattgcctggcagggggactacggggaattcgtcatcaaagaccctgatgaggtggcccggctgtggggcgttcgcaagtgcaagccccagatgaat

SEQ ID NO: 151198 - DNA, 120 bp, Artificial Sequence
  ENSG00000105722_3 (sequence is synthesized)
tacgacaagctgagccgggccctgcgctattactataacaagcgcattctgcacaagaccaaggggaaacggttcacctacaagttcaatttcaacaaactggtgctggtcaattaccca

SEQ ID NO: 151199 - DNA, 120 bp, Artificial Sequence
  ENSG00000105722_4 (sequence is synthesized)
ttcattgatgtggggttggctgggggtgcagtgccccagagtgccccgccagtgccgtcgggtggtagccacttccgcttccctccctcaacgccctccgaggtgctgtcccccaccgag

SEQ ID NO: 151200 - DNA, 120 bp, Artificial Sequence
  ENSG00000105722_5 (sequence is synthesized)
gacccccgctcaccaccagcctgctcttcatcttcatcttccctcttctcggctgtggtggcccgccgcctgggccgaggctcagtcagtgactgtagtgatggcacgtcagagctggag

SEQ ID NO: 151201 - DNA, 120 bp, Artificial Sequence
  ENSG00000105722_6 (sequence is synthesized)
gaaccgctgggagaggatccccgcgcccgaccacccggccctccggatctgggtgccttccgagggcccccgctggcccgcctgccccatgaccctggtgtcttccgagtctatccccgg

SEQ ID NO: 151202 - DNA, 120 bp, Artificial Sequence
  ENSG00000105722_7 (sequence is synthesized)
cctcggggtggccctgaacccctcagccccttccctgtgtcgcctctggccggtcctggatccctgctgccccctcagctctccccggctctgcccatgacgcccacccacctggcctac

SEQ ID NO: 151203 - DNA, 120 bp, Artificial Sequence
  ENSG00000105722_8 (sequence is synthesized)
actccctcgcccacgctgagcccgatgtaccccagtggtggcggggggcccagcggctcagggggaggctcccacttctccttcagccctgaggacatgaaacggtacctgcaggcccac

SEQ ID NO: 151204 - DNA, 120 bp, Artificial Sequence
  ENSG00000105722_9 (sequence is synthesized)
acccaaagcgtctacaactaccacctcagcccccgcgccttcctgcactaccctgggctggtggtgccccagccccagcgccctgacaagtgcccgctgccgcccatggcacccgagacc

SEQ ID NO: 151205 - DNA, 120 bp, Artificial Sequence
  ENSG00000105722_10 (sequence is synthesized)
ccaccggtcccctcctcggcctcgtcatcctcttcttcttcttcctccccattcaagtttaagctccagccgcccccactcggacgccggcagcgggcagctggggagaaggccgtagcc

SEQ ID NO: 151206 - DNA, 120 bp, Artificial Sequence
  ENSG00000105722_11 (sequence is synthesized)
gctggctgagggggcaggggcgctagccccaccgcccccgccaccacagatcaaggtggagcccatctcggaaggcgagtcggaggaggtagaggtgactgacatcagtgatgaggatga

SEQ ID NO: 151207 - DNA, 120 bp, Artificial Sequence
  ENSG00000105722_12 (sequence is synthesized)
ggaagacggggaggtgttcaagacgccccgtgccccacctgcaccccctaagcctgagcccggcgaggcacccggggcatcccagtgcatgcccctcaagctacgctttaagcggcgctg

SEQ ID NO: 151208 - DNA, 120 bp, Artificial Sequence
  ENSG00000105722_13 (sequence is synthesized)
gagtgaagactgtcgcctcgaagggggtgggggccccgctgggggctttgaggatgagggtgaggacaagaaggtgcgtggggaggggcctggggaggctggggggcccctcaccccaag

SEQ ID NO: 151209 - DNA, 120 bp, Artificial Sequence
  ENSG00000105722_14 (sequence is synthesized)
gcgggtgagctctgacctccagcatgccacggcccagctctccctggagcaccgagactcctgagggctgtgggcaggggacctgtgtgccccgcaccccccatgcttcttttgctgcct

SEQ ID NO: 151210 - DNA, 120 bp, Artificial Sequence
  ENSG00000105722_15 (sequence is synthesized)
taagccccctatgccctggaggtgagggcagctctcttgtctcttccctgcctcctcccttttccctccccacattttgtataaaactttaatttcttttttttaaaaatggtgggggtg

SEQ ID NO: 151211 - DNA, 120 bp, Artificial Sequence
  ENSG00000105722_16 (sequence is synthesized)
ggtgggtgcccagggctaggggctattccctgtctctgtgggtttctaagctctgggcaaagtggtggtagggggagggagggggaagttaagggggtcacctccattctggggaattta

SEQ ID NO: 151212 - DNA, 120 bp, Artificial Sequence
  ENSG00000105722_17 (sequence is synthesized)
tatttgaattgaggctttggccttaacacccaggaacttttctattacaatcgcttaggaagtaaagccttgtctccctccctgttctctgcctcttgtacccctctgacccacccgctc

SEQ ID NO: 151213 - DNA, 120 bp, Artificial Sequence
  ENSG00000105722_18 (sequence is synthesized)
tgccccactcccagccctcctcagccccagccctgcctgccctgcccctccagggggccatgagtgcctaggtttctcataccccacaaggtcacagcaggggagggagggacaatttta

SEQ ID NO: 151214 - DNA, 120 bp, Artificial Sequence
  ENSG00000105722_19 (sequence is synthesized)
taatgaaccaaaaattccatgtgttggggggtggggggcggaggagggtgaggggtgccgcccatgggccacaaatctctacaagtgcctgctatccctctcccactccccaccccagca

SEQ ID NO: 151215 - DNA, 120 bp, Artificial Sequence
  ENSG00000105722_20 (sequence is synthesized)
ccggtccaaccccttcatccccagctgctcctaggactggcccatgggcaggcgggtggggggatgggaagggggtgccctgaaaccaaactggaagccccctctgcctcccagctgggg

SEQ ID NO: 151216 - DNA, 120 bp, Artificial Sequence
  ENSG00000105722_21 (sequence is synthesized)
cctctggggtggggtggggggctgtggtcaagccttattctgtattggggactgagggtggggggagtagaggggccgctggagaatgtattcaaaacaataaaactttggacctttgga

SEQ ID NO: 151217 - DNA, 120 bp, Artificial Sequence
  ENSG00000105722_22 (sequence is synthesized)
gtgcggggcgggggggctcgtccaccgggcccgctatccctggttctgcgctgcgcggtcctgctggtgaccttcacggcggcgcgtgccctgcaccagggtttgccttcccggattggg

SEQ ID NO: 151218 - DNA, 120 bp, Artificial Sequence
  ENSG00000105722_23 (sequence is synthesized)
gtaacacagacgtatcctgaggagagattacagtcaccagtggatcctctagtcctgccttagatgtgaggagagagctggtacccaccctctgggcacttgatttgtcttttgtggcct

SEQ ID NO: 151219 - DNA, 120 bp, Artificial Sequence
  ENSG00000105722_24 (sequence is synthesized)
acgttcctcagttggcctttgggaaccacacctaagtgcgtgttaaggtgtggagtctagacctgggtcccacgtacctgaccttcccaatggcatttctgtacccacagctattactat

SEQ ID NO: 151220 - DNA, 120 bp, Artificial Sequence
  ENSG00000105722_25 (sequence is synthesized)
ttgggtctgacccctggctttgccaaatcctagctgtgtgaccttgggccactcccagcccttccctgagccccttggtaacacagacgtatcctgaggagagattacagtcaccagtgg

SEQ ID NO: 151221 - DNA, 80 bp, Artificial Sequence
  ENSG00000105723_0 (sequence is synthesized)
ggcctgtgctcggcgccatgagcggcggcgggccttcgggaggcggccctgggggctcgggcagggcgcggactagctcg

SEQ ID NO: 151222 - DNA, 120 bp, Artificial Sequence
  ENSG00000105723_1 (sequence is synthesized)
gcggcggaaaggcatctgtcggggccatgggtgggggcgtcggggcctcgagctccgggggtggacccggcggcagcggcggaggaggcagcggaggccccggcgcaggcactagcttcc

SEQ ID NO: 151223 - DNA, 120 bp, Artificial Sequence
  ENSG00000105723_2 (sequence is synthesized)
gaggcagcggaggccccggcgcaggcactagcttcccgccgcccggggtgaagctgggccgtgacagcgggaaggtgaccacagtcgtagccactctaggccaaggcccagagcgctccc

SEQ ID NO: 151224 - DNA, 120 bp, Artificial Sequence
  ENSG00000105723_3 (sequence is synthesized)
aagaagtggcttacacggacatcaaagtgattggcaatggctcatttggggtcgtgtaccaggcacggctggcagagaccagggaactagtcgccatcaagaaggttctccaggacaaga

SEQ ID NO: 151225 - DNA, 120 bp, Artificial Sequence
  ENSG00000105723_4 (sequence is synthesized)
ggttcaagaaccgagagctgcagatcatgcgtaagctggaccactgcaatattgtgaggctgagatactttttctactccagtggcgagaagaaagacgagctttacctaaatctggtgc

SEQ ID NO: 151226 - DNA, 120 bp, Artificial Sequence
  ENSG00000105723_5 (sequence is synthesized)
tggaatatgtgcccgagacagtgtaccgggtggcccgccacttcaccaaggccaagttgaccatccctatcctctatgtcaaggtgtacatgtaccagctcttccgcagcttggcctaca

SEQ ID NO: 151227 - DNA, 120 bp, Artificial Sequence
  ENSG00000105723_6 (sequence is synthesized)
tccactcccagggcgtgtgtcaccgcgacatcaagccccagaacctgctggtggaccctgacactgctgtcctcaagctctgcgattttggcagtgcaaagcagttggtccgaggggagc

SEQ ID NO: 151228 - DNA, 120 bp, Artificial Sequence
  ENSG00000105723_7 (sequence is synthesized)
ccaatgtctcctacatctgttctcgctactaccgggccccagagctcatctttggagccactgattacacctcatccatcgatgtttggtcagctggctgtgtactggcagagctcctct

SEQ ID NO: 151229 - DNA, 120 bp, Artificial Sequence
  ENSG00000105723_8 (sequence is synthesized)
tggaccagctggtggagatcatcaaggtgctgggaacaccaacccgggaacaaatccgagagatgaaccccaactacacggagttcaagttccctcagattaaagctcacccctggacaa

SEQ ID NO: 151230 - DNA, 120 bp, Artificial Sequence
  ENSG00000105723_9 (sequence is synthesized)
aggtgttcaaatctcgaacgccgccagaggccatcgcgctctgctctagcctgctggagtacaccccatcctcaaggctctccccactagaggcctgtgcgcacagcttctttgatgaac

SEQ ID NO: 151231 - DNA, 120 bp, Artificial Sequence
  ENSG00000105723_10 (sequence is synthesized)
tgcgatgtctgggaacccagctgcctaacaaccgcccacttccccctctcttcaacttcagtgctggtgaactctccatccaaccgtctctcaacgccattctcatccctcctcacttga

SEQ ID NO: 151232 - DNA, 120 bp, Artificial Sequence
  ENSG00000105723_11 (sequence is synthesized)
ggtccccagcgggcactaccaccctcaccccgtcctcacaagctttaactgagactccgaccagctcagactggcagtcgaccgatgccacacctaccctcactaactcctcctgagggc

SEQ ID NO: 151233 - DNA, 120 bp, Artificial Sequence
  ENSG00000105723_12 (sequence is synthesized)
cccaccaagcacccttccacttccatctgggagccccaagaggggctgggaaggggggccatagcccatcaagctcctgccctggctgggcccctagactagagggcagaggtaaatgag

SEQ ID NO: 151234 - DNA, 120 bp, Artificial Sequence
  ENSG00000105723_13 (sequence is synthesized)
tccctgtccccacctccagtccctccctcaccagcctcacccctgtggtgggctttttaagaggattttaactggttgtggggagggaagagaaggacagggtgttggggggatgaggac

SEQ ID NO: 151235 - DNA, 120 bp, Artificial Sequence
  ENSG00000105723_14 (sequence is synthesized)
ctcctacccccttggccccctcccctcccccagacctccacctcctccagaccccctcccctcctgtgtcccttgtaaatagaaccagcccagcccgtctcctcttcccttccctggccc

SEQ ID NO: 151236 - DNA, 120 bp, Artificial Sequence
  ENSG00000105723_15 (sequence is synthesized)
ccgggtgtaaatagattgttataatttttttcttaaagaaaacgtcgattcgcaccgtccaacctggccccgcccctcctacagctgtaactcccctcctgtcctctgcccccaaggtct

SEQ ID NO: 151237 - DNA, 120 bp, Artificial Sequence
  ENSG00000105723_16 (sequence is synthesized)
actccctcctcaccccaccctggagggccaggggagtggagagagctcctgatgtcttagtttccacagtaaggtttgcctgtgtacagacctccgttcaataaattattggcatgaaaa

SEQ ID NO: 151238 - DNA, 120 bp, Artificial Sequence
  ENSG00000105723_17 (sequence is synthesized)
atgttgctattcattataatattggatcagaggtcacagtcgcttgcaaatggggatctagggttattgtctcctaagagaacaagaataagaccaaccccgaaaaagagggatctgcat

SEQ ID NO: 151239 - DNA, 120 bp, Artificial Sequence
  ENSG00000105723_18 (sequence is synthesized)
tccctgtccttcagaagatggggatttggagcgaatatcacttagaagcagggctttgaggttactgtgttttgtccccaaagaatagggccaggctttccaaacctggtactcagatca

SEQ ID NO: 151240 - DNA, 120 bp, Artificial Sequence
  ENSG00000105723_19 (sequence is synthesized)
tcttccctattaaaaccaagacctggcatcattacccaccctaaatcttgttgagctgtactgccaatggtgagaattaatagttactgccttttagatataaagacattgggagtcagc

SEQ ID NO: 151241 - DNA, 120 bp, Artificial Sequence
  ENSG00000105723_20 (sequence is synthesized)
atatccttcaaaccaagtccatagtccatgttttaaaatacatggcttggtgtgtctcctttaacaaaaatggaatggagcagggtaggtcacagtttcctacagaatatggatctaagg

SEQ ID NO: 151242 - DNA, 120 bp, Artificial Sequence
  ENSG00000105723_21 (sequence is synthesized)
ttatacttttttaataattgttctaaggtatggtgtcattggctctgaaaaaaaaaagtgatgtagggttatctccctctgaaagaacttgtcactggcccctcaaaatggatttggtgg

SEQ ID NO: 151243 - DNA, 120 bp, Artificial Sequence
  ENSG00000105723_22 (sequence is synthesized)
actgcactccagctgggcaacgagagcgaaactgtgtctcaaaaaaaaaaacaaaaaaatggatttggttcatcagttactcaaaggggtcactatcctctaagaatggcaccaaggttt

SEQ ID NO: 151244 - DNA, 120 bp, Artificial Sequence
  ENSG00000105723_23 (sequence is synthesized)
gccaccatttgaataatgggaattgggaattatagctttccttcaaaggactgaggctggaatagctccttgataataaaggtcaggttcatcattatcataatttggtgcttgtccatt

SEQ ID NO: 151245 - DNA, 120 bp, Artificial Sequence
  ENSG00000105723_24 (sequence is synthesized)
agggaccacccacatatagtgaggggtctgggtctctggaccactcagatgaagaggtcaggtcagtgtttttttctaacctcaaagtaccaaaaagtgagggtcagggcactggcactt

SEQ ID NO: 151246 - DNA, 120 bp, Artificial Sequence
  ENSG00000105723_25 (sequence is synthesized)
atagcaggagaggacattcatttctgtcaccaagaaccagtaaagttaccagctctacaggggaggacttagaggtcagtatcctctaggctgtgagagaggttagtgctttcctaaagt

SEQ ID NO: 151247 - DNA, 120 bp, Artificial Sequence
  ENSG00000105723_26 (sequence is synthesized)
aggagtacctcagggttactgctccctgaagtggaagaggctcggtcaagctttctccaaataggaggggccagagggcagtagatccagagtagatggagtcaacatctgatgtctccc

SEQ ID NO: 151248 - DNA, 120 bp, Artificial Sequence
  ENSG00000105723_27 (sequence is synthesized)
agtaccaagatggaccagtgatctgttgcttcctagaagtagaaatttggggttgccaacccttgaagcagagagatttaggtatcaatatcctcctatgtggaggggagcaggacttaa

SEQ ID NO: 151249 - DNA, 120 bp, Artificial Sequence
  ENSG00000105723_28 (sequence is synthesized)
gattcccagaaaggaagaggggaaaagtcactgggaaggtcccagcatccacctttcctcaaagaggaggaggggacaaagaggtccccaacgagcttcctgcagagatttcccttcctc

SEQ ID NO: 151250 - DNA, 120 bp, Artificial Sequence
  ENSG00000105723_29 (sequence is synthesized)
tccttagtggttgggccttagtttcttcatttggaaggtgggggtgtgggaagcaaccagtcataacttgccgcaggcactgtggcagtgagataacaggagtatgccagtgtccagggc

SEQ ID NO: 151251 - DNA, 80 bp, Artificial Sequence
  ENSG00000105726_0 (sequence is synthesized)
gctaggaaagatggcggcagcggcggcggtgggcaacgcggtgccctgcggggcccggccttgcggggtccggcctgacg

SEQ ID NO: 151252 - DNA, 120 bp, Artificial Sequence
  ENSG00000105726_1 (sequence is synthesized)
cgccgggccggcgctcatagcgaacggtgacgagctggtggctgccgtgtggccgtaccggcggttggcgctgttgcggcgcctcacggtgctgccattcgccgggctgctttacccggc

SEQ ID NO: 151253 - DNA, 120 bp, Artificial Sequence
  ENSG00000105726_2 (sequence is synthesized)
ctggttgggtgccgcagccgctggctgctggggctggggcagcagttgggtgcagatccccgaagctgcgctgctcgtgcttgccaccatctgcctcgcgcacgcgctcactgtcctctc

SEQ ID NO: 151254 - DNA, 120 bp, Artificial Sequence
  ENSG00000105726_3 (sequence is synthesized)
ggggcattggtctgtgcacgcgcattgcgcgctcacctgcaccccggagtacgaccccagcaaagcgacctttgtgaaggtggtgccaacccccaacaatggctccacggagctcgtggc

SEQ ID NO: 151255 - DNA, 120 bp, Artificial Sequence
  ENSG00000105726_4 (sequence is synthesized)
cctgcaccgcaatgagggcgaagacgggcttgaggtgctgtccttcgaattccagaagatcaagtattcctacgatgccctggagaagaagcagtttctccccgtggcctttcctgtggg

SEQ ID NO: 151256 - DNA, 120 bp, Artificial Sequence
  ENSG00000105726_5 (sequence is synthesized)
aaacgccttctcatactatcagagcaacagaggcttccaggaagactcagagatccgagcagctgagaagaaatttgggagcaacaaggccgagatggtggtgcctgacttctcggagct

SEQ ID NO: 151257 - DNA, 120 bp, Artificial Sequence
  ENSG00000105726_6 (sequence is synthesized)
tttcaaggagagagccacagcccccttctttgtatttcaggtgttctgtgtggggctctggtgcctggatgagtactggtactacagcgtctttacgctatccatgctggtggcgttcga

SEQ ID NO: 151258 - DNA, 120 bp, Artificial Sequence
  ENSG00000105726_7 (sequence is synthesized)
ggcctcgctggtgcagcagcagatgcggaacatgtcggagatccggaagatgggcaacaagccccacatgatccaggtctaccgaagccgcaagtggaggcccattgccagtgatgagat

SEQ ID NO: 151259 - DNA, 120 bp, Artificial Sequence
  ENSG00000105726_8 (sequence is synthesized)
cgtaccaggggacatcgtctccatcggccgctccccacaggagaacctggtgccatgtgacgtgcttctgctgcgaggccgctgcatcgtagacgaggccatgctcacgggggagtccgt

SEQ ID NO: 151260 - DNA, 120 bp, Artificial Sequence
  ENSG00000105726_9 (sequence is synthesized)
gccacagatgaaggagcccatcgaagacctcagcccagaccgggtgctggacctccaggctgattcccggctgcacgtcatcttcgggggcaccaaggtggtgcagcacatccccccaca

SEQ ID NO: 151261 - DNA, 120 bp, Artificial Sequence
  ENSG00000105726_10 (sequence is synthesized)
gaaagccaccacgggcctgaagccggttgacagcgggtgcgtggcctacgtcctgcggaccggattcaacacatcccagggcaagctgctgcgcaccatcctcttcggggtcaagagggt

SEQ ID NO: 151262 - DNA, 120 bp, Artificial Sequence
  ENSG00000105726_11 (sequence is synthesized)
gactgcgaacaacctggagaccttcatcttcatcctcttcctcctggtgtttgccatcgctgcagctgcctatgtatggattgaaggtaccaaggaccccagccggaaccgctacaagct

SEQ ID NO: 151263 - DNA, 120 bp, Artificial Sequence
  ENSG00000105726_12 (sequence is synthesized)
gtttctggagtgcaccctgatcctcacctcggtcgtgcctcctgagctgcccatcgagctgtccctggccgtcaacacctccctcatcgccctggccaagctctacatgtactgcacaga

SEQ ID NO: 151264 - DNA, 120 bp, Artificial Sequence
  ENSG00000105726_13 (sequence is synthesized)
gcccttccggatcccctttgctggcaaggtcgaggtgtgctgctttgacaagacggggacgttgaccagtgacagcctggtggtgcgcggtgtggccgggctgagagacgggaaggaggt

SEQ ID NO: 151265 - DNA, 120 bp, Artificial Sequence
  ENSG00000105726_14 (sequence is synthesized)
gaccccagtgtccagcatccctgtagaaacacaccgggccctggcctcgtgccactcgctcatgcagctggacgacggcaccctcgtgggtgaccctctagagaaggccatgctgacggc

SEQ ID NO: 151266 - DNA, 120 bp, Artificial Sequence
  ENSG00000105726_15 (sequence is synthesized)
cgtggactggacgctgaccaaagatgagaaagtattcccccgaagtattaaaactcaggggctgaaaattcaccagcgctttcattttgccagtgccctgaagcgaatgtccgtgcttgc

SEQ ID NO: 151267 - DNA, 120 bp, Artificial Sequence
  ENSG00000105726_16 (sequence is synthesized)
gaagctgggctccaccgacctctgctacatcgcggccgtgaagggggcccccgaaactctgcactccatgttctcccagtgcccgcccgactaccaccacatccacaccgagatctcccg

SEQ ID NO: 151268 - DNA, 120 bp, Artificial Sequence
  ENSG00000105726_17 (sequence is synthesized)
ggaaggagcccgcgtcctggcgctggggtacaaggagctgggacacctcactcaccagcaggcccgggaggtcaagcgggaggccctggagtgcagcctcaagttcgtcggcttcattgt

SEQ ID NO: 151269 - DNA, 120 bp, Artificial Sequence
  ENSG00000105726_18 (sequence is synthesized)
ggtctcctgcccgctcaaggctgactccaaggccgtgatccgggagatccagaatgcgtcccaccgggtggtcatgatcacgggagacaacccgctcactgcatgccacgtggcccagga

SEQ ID NO: 151270 - DNA, 120 bp, Artificial Sequence
  ENSG00000105726_19 (sequence is synthesized)
gctgcacttcattgaaaaggcccacacgctgatcctgcagcctccctccgagaaaggccggcagtgcgagtggcgctccattgacggcagcatcgtgctgcccctggcccggggctcccc

SEQ ID NO: 151271 - DNA, 120 bp, Artificial Sequence
  ENSG00000105726_20 (sequence is synthesized)
aaaggcactggccctggagtacgcactgtgcctcacaggcgacggcttggcccacctgcaggccaccgacccccagcagctgctccgcctcatcccccatgtgcaggtgttcgcccgtgt

SEQ ID NO: 151272 - DNA, 120 bp, Artificial Sequence
  ENSG00000105726_21 (sequence is synthesized)
ggctcccaagcagaaggagtttgtcatcaccagcctgaaggagctgggctacgtgaccctcatgtgtggggatggcaccaacgacgtgggcgccctgaagcatgctgacgtgggtgtggc

SEQ ID NO: 151273 - DNA, 120 bp, Artificial Sequence
  ENSG00000105726_22 (sequence is synthesized)
gctcttggccaatgcccctgagcgggttgtcgagcggcgacggcggccccgggacagcccaaccctgagcaacagtggcatcagagccacctccaggacagccaagcagcggtcggggct

SEQ ID NO: 151274 - DNA, 120 bp, Artificial Sequence
  ENSG00000105726_23 (sequence is synthesized)
ccctccctccgaggagcagccaacctcccagagggaccgcctgagccaggtgctgcgagacctcgaggacgagagtacgcccattgtgaaactgggggatgccagcatcgcagcaccctt

SEQ ID NO: 151275 - DNA, 120 bp, Artificial Sequence
  ENSG00000105726_24 (sequence is synthesized)
cacctccaagctctcatccatccagtgcatctgccacgtgatcaagcagggccgctgcacgctggtgaccacgctacagatgttcaagatcctggcgctcaatgccctcatcctggccta

SEQ ID NO: 151276 - DNA, 120 bp, Artificial Sequence
  ENSG00000105726_25 (sequence is synthesized)
cagccagagcgtcctctacctggagggagtcaagttcagtgacttccaggccaccctacaggggctgctgctggccggctgcttcctcttcatctcccgttccaagcccctcaagaccct

SEQ ID NO: 151277 - DNA, 120 bp, Artificial Sequence
  ENSG00000105726_26 (sequence is synthesized)
ctcccgagaacggcccctgcccaacatcttcaacctgtacaccatcctcaccgtcatgctccagttctttgtgcacttcctgagccttgtctacctgtaccgtgaggcccaggcccggag

SEQ ID NO: 151278 - DNA, 120 bp, Artificial Sequence
  ENSG00000105726_27 (sequence is synthesized)
ccccgagaagcaggagcagttcgtggacttgtacaaggagtttgagccaagcctggtcaacagcaccgtctacatcatggccatggccatgcagatggccaccttcgccatcaattacaa

SEQ ID NO: 151279 - DNA, 120 bp, Artificial Sequence
  ENSG00000105726_28 (sequence is synthesized)
aggcccgcccttcatggagagcctgcccgagaacaagcccctggtgtggagtctggcagtttcactcctggccatcattggcctgctcctcggctcctcgcccgacttcaacagccagtt

SEQ ID NO: 151280 - DNA, 120 bp, Artificial Sequence
  ENSG00000105726_29 (sequence is synthesized)
tggcctcgtggacatccctgtggagttcaagctggtcattgcccaggtcctgctcctggacttctgcctggcgctcctggccgaccgcgtcctgcagttcttcctggggaccccgaagct

SEQ ID NO: 151281 - DNA, 120 bp, Artificial Sequence
  ENSG00000105726_30 (sequence is synthesized)
gaaagtgccttcctgagatggcagtgctggtacccactgcccaccctggctgccgctgggcgggaaccccaacagggccccgggagggaaccctgcccccaaccccccacagcaaggctg

SEQ ID NO: 151282 - DNA, 120 bp, Artificial Sequence
  ENSG00000105726_31 (sequence is synthesized)
tacagtctcgcccttggaagactgagctgggacccccacagccatccgctggcttggccagcagaaccagccccaagccagcacctttggtaaataaagcagcatctgagattttaaaaa

SEQ ID NO: 151283 - DNA, 120 bp, Artificial Sequence
  ENSG00000105726_32 (sequence is synthesized)
tggaaggccagggatgcatgggcctgccagggccaggctgatataggcacgggaattgtcatccccaagttacaggacccagggccccagagatgggggctgtagctgggatggctcagg

SEQ ID NO: 151284 - DNA, 120 bp, Artificial Sequence
  ENSG00000105726_33 (sequence is synthesized)
aaatgctggcagggcaggtgtggactgaggctcccagacccctccaggtggtacagcttggcgtccacacctgtccacaggtaggggtcccaggggtgggccccacagagccccacaagc

SEQ ID NO: 151285 - DNA, 120 bp, Artificial Sequence
  ENSG00000105726_34 (sequence is synthesized)
aaggaacaatcatcaagagggtaaaaaaacaactaagtgggtcataggctacacaggacaggctggtggacagctggggaggcctgtgcgacaccgacactcaggccaaggcgtaaagaa

SEQ ID NO: 151286 - DNA, 120 bp, Artificial Sequence
  ENSG00000105726_35 (sequence is synthesized)
ccaggggggccagcggccaggaactggacacaaaggccccaaacaggcatgggctgacgcagggagtccccggtggctggagggggtgggagattggctgggcgggactgtgcctgtccc

SEQ ID NO: 151287 - DNA, 120 bp, Artificial Sequence
  ENSG00000105726_36 (sequence is synthesized)
gtgggctccagggagggcaggatctgcttcatgattctcaggcccctgtggctgccatggggagcctggatggcggagccggggccagggaggcagccctgggctcaggggtgagaggca

SEQ ID NO: 151288 - DNA, 120 bp, Artificial Sequence
  ENSG00000105726_37 (sequence is synthesized)
ggaatcccccaggatttggtggtggctgtacacaaggtctcccgggaggcaggggatgttactgcctgctgtgtgggcagggtggccccaagtgagccagatcctgactcccccacccgc

SEQ ID NO: 151289 - DNA, 120 bp, Artificial Sequence
  ENSG00000105726_38 (sequence is synthesized)
ggggttgtccagggtgtccagggaggggcactaggccaggcagagccctagctctgtgccagggcagcaggaagccacacagtgtgtgtgagccggagcaggagagggggccctgactcc

SEQ ID NO: 151290 - DNA, 120 bp, Artificial Sequence
  ENSG00000105726_39 (sequence is synthesized)
gagcctcgccgtgggtcccagctgcggccttcctgtcggtcaccatcgcgacctgggccactcatctgcctggcctggattcccaggggcaccctctacactttggcgcaggcttaatca

SEQ ID NO: 151291 - DNA, 120 bp, Artificial Sequence
  ENSG00000105726_40 (sequence is synthesized)
gcccgcgtcctggcgctggggtacaaggagctgggacacctcactcaccagcaggtacgggcccaggctccccctgccttcaccatgtgcctggcccgtcagctcctccctgagtcacct

SEQ ID NO: 151292 - DNA, 120 bp, Artificial Sequence
  ENSG00000105726_41 (sequence is synthesized)
gcccacctgtgtaccaggcctcagcagcacagtgtcttcaaatgcctggcaccactaatcacagccctggcccactgggcacctcggacagcatgtgagcgttcactgggtcgcaggtcc

SEQ ID NO: 151293 - DNA, 120 bp, Artificial Sequence
  ENSG00000105726_42 (sequence is synthesized)
caggatgtgcggcatgtaggtgtttatttaccataatgaggcgatagtctgactgccagctcgggtttcctgtgcactcatgggcagatactgctcctaccacgcttactccccatcctc

SEQ ID NO: 151294 - DNA, 120 bp, Artificial Sequence
  ENSG00000105726_43 (sequence is synthesized)
agtgtcatcctcatttcacaccctctttggcccggcaagctgcccatgtaccgagtgctcccttcccgagcacagggactgctggcatcctcagccacagttgatggcagtttgcccagt

SEQ ID NO: 151295 - DNA, 120 bp, Artificial Sequence
  ENSG00000105726_44 (sequence is synthesized)
gctcagcctgaccagaccccaggcggagcgctccgtgcgtgttactgcgttggtccctccaccccatcctgcaccacacggggtggcttgccttccccacaccacagaggaggaagctgg

SEQ ID NO: 151296 - DNA, 120 bp, Artificial Sequence
  ENSG00000105726_45 (sequence is synthesized)
tgcagctgcctatgtatggattgaaggtaagcgccacggcctctgtggtcccctgcgcccaccctccgaggctccaggttggcaggccctgtctccacaggtaccaaggaccccagccgg

SEQ ID NO: 151297 - DNA, 120 bp, Artificial Sequence
  ENSG00000105726_46 (sequence is synthesized)
aggctcagaagtgaacccacttgcccaggtcacttccaatccatggctaaggattggaatccagacagcctgattccagagctcaaggctccaacctctccccagtgacctctttgagca

SEQ ID NO: 151298 - DNA, 120 bp, Artificial Sequence
  ENSG00000105726_47 (sequence is synthesized)
atgccctggattcagattgatgaagaggcagacatagagacccagcccctcccagctagaggtgtggggcttaccagatacctgccccagagctagaggtgaagcccctgtgggcgcacg

SEQ ID NO: 151299 - DNA, 120 bp, Artificial Sequence
  ENSG00000105726_48 (sequence is synthesized)
cagttcaggacctgcatgagtgttgacagggccctaagaagaaccacatggagcagtgttgccacagggctgctggcagcaaacattcacaggtctgggccagagcagcttccggaacct

SEQ ID NO: 151300 - DNA, 120 bp, Artificial Sequence
  ENSG00000105726_49 (sequence is synthesized)
ggtcgcaggcctccccctgtcccagccccagctaccggggtcttccagggcctggggattgtgggcaggtggcatggagcggatgagcagaactgttgattgacaagcgaagctggtcta

SEQ ID NO: 151301 - DNA, 120 bp, Artificial Sequence
  ENSG00000105726_50 (sequence is synthesized)
gcaacagctgcagcacaagccaggtggaagtgtgctgcccttcagcttgagatggtccagggtgagcaggcagtgccaggagggctggcgggccgcccttggccatcctcagcgcccagc

SEQ ID NO: 151302 - DNA, 120 bp, Artificial Sequence
  ENSG00000105726_51 (sequence is synthesized)
atccaagccagggccagccagcaagaaaggggaagtggagcaagaagatgttgagaactcaggggccctgtcagagttgggagggggcccagccccgagaaaacaggatttcagagaggc

SEQ ID NO: 151303 - DNA, 120 bp, Artificial Sequence
  ENSG00000105726_52 (sequence is synthesized)
cacgggcgcagggataaatgaggtgagggcctggtgtggggtttcccaaggagagcgcaatagcccccttctgtgtgtttcaggttagggggccttgcatgaggtgggggcatggcttag

SEQ ID NO: 151304 - DNA, 120 bp, Artificial Sequence
  ENSG00000105726_53 (sequence is synthesized)
ctggggtcagactgcccaggttctaatctggctgtgtcccgggctctcaggcaagtagctcaggccccaggctcttggttccaccctgtgcacctgagggacattctttgtggagtcccc

SEQ ID NO: 151305 - DNA, 120 bp, Artificial Sequence
  ENSG00000105726_54 (sequence is synthesized)
agagaagggctgggggtcacctgggtgggtagggaggtgcgggctccagagaggagagactggctggtgctggggtccgagtggagggagggtgcttctgagcccggtcagccaagcccc

SEQ ID NO: 151306 - DNA, 120 bp, Artificial Sequence
  ENSG00000105726_55 (sequence is synthesized)
cacatgatccaggtgtggctgccagggagacccaggttgggggtgcagcacaggtgcggcttctgtgctgacacccatgccccgcccaggtctaccgaagccgcaagtggaggcccattg

SEQ ID NO: 151307 - DNA, 120 bp, Artificial Sequence
  ENSG00000105726_56 (sequence is synthesized)
tctgcttgcaccctacagctgcggatccttccagaatttagcctcaggttgcagtactgtgtgcagagcccaggccacagctcacagcctgcatgctctgccccgttcctgcacctggag

SEQ ID NO: 151308 - DNA, 120 bp, Artificial Sequence
  ENSG00000105726_57 (sequence is synthesized)
cccccttcccagtgacacaggtcctcatcgccttcatagtggccacttctgaggcctttccaccctctctggattccattctcacctcctctctcatggcactcagcactccgatttctg

SEQ ID NO: 151309 - DNA, 120 bp, Artificial Sequence
  ENSG00000105726_58 (sequence is synthesized)
tgactttcttgatcatgcgtctcccctggtgcagtgtgagctccctaaggccaggggtctgtgcccagtctgtggtatgtggtggagccccagtgagtaagagttcctggctaaactcca

SEQ ID NO: 151310 - DNA, 120 bp, Artificial Sequence
  ENSG00000105726_59 (sequence is synthesized)
acattattgggagagtccctacttcattgacttggaagctgagccacaagggactctgtgatgtgcccatgtccgcaagcaggacatagagccacattcgggggacccagaccccccagt

SEQ ID NO: 151311 - DNA, 120 bp, Artificial Sequence
  ENSG00000105726_60 (sequence is synthesized)
cactgccagatcccacccctcaagcgtgcctggtaccctcctggcatttctcccctcccaaccctcgcatgtgcccactacgggaacagggccttccattgtccccttggctcccagcgc

SEQ ID NO: 151312 - DNA, 120 bp, Artificial Sequence
  ENSG00000105726_61 (sequence is synthesized)
atggtcagagctcaggaaatgcagagtgtgggcagagggagggacagatggtgagggtgcccctgtctgtccgcaggcccgggaggtcaagcgggaggccctggagtgcagcctcaagtt

SEQ ID NO: 151313 - DNA, 120 bp, Artificial Sequence
  ENSG00000105732_0 (sequence is synthesized)
gagagcgaggctacggagcaggcgagaggcgacggcgagagctagagcgggcgcagcgttagggtggccgtgcaaggggagccgtggcccgggcccggggcgtgcgagacggcggaagca

SEQ ID NO: 151314 - DNA, 120 bp, Artificial Sequence
  ENSG00000105732_1 (sequence is synthesized)
gcccagggccttgctgccgccatgactgaggaatcagaggagacagtcctgtacattgagcaccgctatgtctgctctgagtgcaaccagctgtatggatcactggaagaggtgcttatg

SEQ ID NO: 151315 - DNA, 120 bp, Artificial Sequence
  ENSG00000105732_2 (sequence is synthesized)
caccaaaactcccacgtgccccagcagcactttgagctggtgggcgtggctgatcccggagtcactgtggccacagacacagcttcaggcacgggcctctatcagacccttgtgcaggag

SEQ ID NO: 151316 - DNA, 120 bp, Artificial Sequence
  ENSG00000105732_3 (sequence is synthesized)
agccagtaccagtgcctggagtgtggtcaactgctgatgtcacccagccagctcctggagcaccaggagctgcacctgaagatgatggcaccccaggaggcagtgccagctgagccatca

SEQ ID NO: 151317 - DNA, 120 bp, Artificial Sequence
  ENSG00000105732_4 (sequence is synthesized)
cctaaggcaccacccctgagctccagcaccatccactacgagtgtgtggattgcaaggctctctttgccagccaggagctctggctgaaccaccggcagacgcacctccgggccacaccc

SEQ ID NO: 151318 - DNA, 120 bp, Artificial Sequence
  ENSG00000105732_5 (sequence is synthesized)
accaaggctcctgcccctgttgtcctggggtccccagttgttctagggcctcctgtgggccaggcccgagtggctgtggagcactcataccgaaaggcagaagagggtggggaaggggcg

SEQ ID NO: 151319 - DNA, 120 bp, Artificial Sequence
  ENSG00000105732_6 (sequence is synthesized)
actgtcccatctgccgctgccaccaccactgaggtagtgactgaggtggagctgctcctctacaagtgctctgagtgctcccagctcttccagctgccggcggatttcctggagcaccag

SEQ ID NO: 151320 - DNA, 120 bp, Artificial Sequence
  ENSG00000105732_7 (sequence is synthesized)
gccactcacttccctgctcctgtacccgagtctcaggagcctgccttacagcaggaggtgcaggcctcgtcacctgcagaggtgcctgtgtctcagcctgaccccttgccagcttctgac

SEQ ID NO: 151321 - DNA, 120 bp, Artificial Sequence
  ENSG00000105732_8 (sequence is synthesized)
cacagttacgagctgcgcaatggtgaagccattgggcgggatcgccgggggcgcagggcccggaggaacaacagtggagaagcaggcggggcagccacacaggagctcttctgctcagcc

SEQ ID NO: 151322 - DNA, 120 bp, Artificial Sequence
  ENSG00000105732_9 (sequence is synthesized)
tgtgaccagctctttctctcaccccaccagctacagcagcacctgcggagtcaccgggagggcgtctttaagtgccccctgtgcagtcgtgtcttccctagcccttccagtctggaccag

SEQ ID NO: 151323 - DNA, 120 bp, Artificial Sequence
  ENSG00000105732_10 (sequence is synthesized)
caccttggagaccatagcagcgagtcacacttcctgtgtgtagactgtggcctggccttcggcacagaggccctcctcctggcccaccggcgagcccacaccccgaatcctctgcattca

SEQ ID NO: 151324 - DNA, 120 bp, Artificial Sequence
  ENSG00000105732_11 (sequence is synthesized)
tgtccatgtgggaagacctttgtcaaccttaccaagttcctttatcaccggcgtactcatggggtagggggtgtccctctgcccacaacaccagtcccaccagaggaacctgtcattggt

SEQ ID NO: 151325 - DNA, 120 bp, Artificial Sequence
  ENSG00000105732_12 (sequence is synthesized)
ccaggcacctaccgctgcctcctgtgcagccgtgaatttggaaaggccttgcagctgacccggcaccaacgttttgtgcatcggctggagcggcgccataaatgcagcatttgtggcaag

SEQ ID NO: 151326 - DNA, 120 bp, Artificial Sequence
  ENSG00000105732_13 (sequence is synthesized)
atgttcaagaagaagtctcacgtgcgtaaccacctgcgcacacacacaggggagcggcccttcccctgccctgactgctccaagcccttcaactcacctgccaacctggcccgccaccgg

SEQ ID NO: 151327 - DNA, 120 bp, Artificial Sequence
  ENSG00000105732_14 (sequence is synthesized)
ctcacacacacaggagagcggccctaccggtgtggggactgtggcaaggctttcacgcaaagctccacactgaggcagcaccgcttggtgcatgcccagcacttcccctaccgctgccag

SEQ ID NO: 151328 - DNA, 120 bp, Artificial Sequence
  ENSG00000105732_15 (sequence is synthesized)
gaatgtggggtgcgttttcaccgtccttaccgcctgctcatgcaccgctaccatcacacaggtgaatacccctacaagtgtcgcgagtgcccccgctccttcttgctgcgtcggctgctg

SEQ ID NO: 151329 - DNA, 120 bp, Artificial Sequence
  ENSG00000105732_16 (sequence is synthesized)
gaggtgcaccagctcgtggtccatgccgggcgccagccccaccgctgcccatcctgtggggctgccttcccctcctcactgcggctccgggagcaccgctgtgcagccgctgctgcccag

SEQ ID NO: 151330 - DNA, 120 bp, Artificial Sequence
  ENSG00000105732_17 (sequence is synthesized)
gccccacggcgctttgagtgtggcacctgtggcaagaaagtgggctcagctgctcgactgcaggcacacgaggcggcccatgcagctgctgggcctggagaggtcctggctaaggagccc

SEQ ID NO: 151331 - DNA, 120 bp, Artificial Sequence
  ENSG00000105732_18 (sequence is synthesized)
cctgcccctcgagccccacgggccactcgtgcaccagttgcctctccagcagcccttggaagcactgctacagcatcccctgcggcccctgcccgccgccggggtctagagtgcagcgag

SEQ ID NO: 151332 - DNA, 120 bp, Artificial Sequence
  ENSG00000105732_19 (sequence is synthesized)
tgcaagaagctgttcagcacagagacgtcactgcaggtgcaccggcgcatccacacaggtgagcggccatacccatgtccagactgtggcaaagcgttccgtcagagtacccacctgaaa

SEQ ID NO: 151333 - DNA, 120 bp, Artificial Sequence
  ENSG00000105732_20 (sequence is synthesized)
gaccaccggcgcctgcacacaggtgagcggccctttgcctgtgaagtgtgtggcaaggcctttgccatctccatgcgcctggcagaacatcgccgcatccacacaggcgaacgaccctac

SEQ ID NO: 151334 - DNA, 120 bp, Artificial Sequence
  ENSG00000105732_21 (sequence is synthesized)
tcctgccctgactgtggcaagagctaccgctccttctccaacctctggaagcaccgcaagacccatcagcagcagcatcaggcagctgtgcggcagcagctggcagaggcggaggctgcc

SEQ ID NO: 151335 - DNA, 120 bp, Artificial Sequence
  ENSG00000105732_22 (sequence is synthesized)
gttggcctggccgtcatggagactgctgtggaggcgctacccctggtggaagccattgagatctaccctctggccgaggctgagggggtccagatcagtggctgactctgcccgacttcc

SEQ ID NO: 151336 - DNA, 120 bp, Artificial Sequence
  ENSG00000105732_23 (sequence is synthesized)
tctttggcacctccattccctgttgctgaaggccctccagcatccccttaagcatctgtacatactgtgtcccttcctcttcccatccccaccaccttgtaagttctaaattggatttat

SEQ ID NO: 151337 - DNA, 120 bp, Artificial Sequence
  ENSG00000105732_24 (sequence is synthesized)
tctctcgtgaggggggtgctctggggtccttgacacacataaaggtgcccccccaccttccacctcttagcactggtgaccccaaaaatgaaaccatcaataaagactgagttgccagca

SEQ ID NO: 151338 - DNA, 120 bp, Artificial Sequence
  ENSG00000105732_25 (sequence is synthesized)
gatgagaagaaggagctgcattggatggaaggcccacccccgagccaccccctctaccacaccatgccaccgccctgcccaggcagccctgggcacaggagcccacagagatgagaggca

SEQ ID NO: 151339 - DNA, 120 bp, Artificial Sequence
  ENSG00000105732_26 (sequence is synthesized)
agaagacccagggagaaggccactgagatgaggggagagggctacagagatgaagagaaatgaagagaagagagacagccgtcaagactgtccagagaagtgggctgaggcccacaaacc

SEQ ID NO: 151340 - DNA, 120 bp, Artificial Sequence
  ENSG00000105732_27 (sequence is synthesized)
ccacaaggacaaggacaggaaaagcccagggataagaaagaaaggcccatggagacaagggagcagcctacagagacaagcaaaaggacctcggagacaaggggcagtaatgtggacata

SEQ ID NO: 151341 - DNA, 120 bp, Artificial Sequence
  ENSG00000105732_28 (sequence is synthesized)
gagacctcccgcgaaggaaaacgggagaagccagagacacaagagagaggcccctggaaacagaaagcactcctcagatatggggagcggtccacagggcagggagagagccaaggagag

SEQ ID NO: 151342 - DNA, 120 bp, Artificial Sequence
  ENSG00000105732_29 (sequence is synthesized)
ccgaagaaggtcacagaaacaagggaggcctacagacaccagggtaccaaaaagacaaggatgtggctcatagacacaagagagccactgaggcaggagctgccagcctggagatgcggg

SEQ ID NO: 151343 - DNA, 120 bp, Artificial Sequence
  ENSG00000105732_30 (sequence is synthesized)
agctgaggagggagggactgaggagccgggcacccagagtggatctgggggaaagaggtggaaaagtgacagagggaagacagcctccaagctcagaggcagagagagggaggaggacag

SEQ ID NO: 151344 - DNA, 120 bp, Artificial Sequence
  ENSG00000105732_31 (sequence is synthesized)
gtgagcggaggcacagaatagaaagagaaatggaaagagacctgccgagggagacttggaaagagggaagccagggtggaggagttctgacagagagagggatctaaacagagacatgcc

SEQ ID NO: 151345 - DNA, 120 bp, Artificial Sequence
  ENSG00000105732_32 (sequence is synthesized)
gagagcaacctgggctaacagcaaagagagaagttgggcagagtcagagaggggcccaagagacacaggaaatgggggctcaaaagcggaaagacatatccaggagatagagactggacg

SEQ ID NO: 151346 - DNA, 120 bp, Artificial Sequence
  ENSG00000105732_33 (sequence is synthesized)
gggtggggacagggccaaggcccaccgcaggcagaggatgaggctcagaggaacagaaagagccagtctgggaccaggacggaggcttggagacagcaggggcacggacatgccaggggc

SEQ ID NO: 151347 - DNA, 120 bp, Artificial Sequence
  ENSG00000105732_34 (sequence is synthesized)
aactatacatgcctggtgttagggaatttaatccatgagaaggttaggacatctagtgaccaaatggccatagaattggccccgggtctcactgtgagacgcatcccatagtggcttcag

SEQ ID NO: 151348 - DNA, 84 bp, Artificial Sequence
  ENSG00000105732_35 (sequence is synthesized)
gcaatcaaatctcgagcctcagcctcccgagttgctggggttacaggcacgagccaccacgcccagctaatgttttgtattttt

SEQ ID NO: 151349 - DNA, 120 bp, Artificial Sequence
  ENSG00000105732_36 (sequence is synthesized)
gcccagctaatgttttgtatttttagtaaagatggtagtttcaccaggttggccaggtgggtctcgaatgcctgacttcaagtgaacccgcctcagcgtcccaaaatgttgggattgcag

SEQ ID NO: 151350 - DNA, 120 bp, Artificial Sequence
  ENSG00000105737_0 (sequence is synthesized)
atgccggctgagctgctgctgctgctgattgttgccttcgccagccccagctgccaggtgctctcatcactgcgcatggctgcaatcctggatgatcagacagtgtgtggccgcggtgag

SEQ ID NO: 151351 - DNA, 120 bp, Artificial Sequence
  ENSG00000105737_1 (sequence is synthesized)
cgtctggccttggccttggcccgggagcagatcaacgggatcatcgaggtcccagccaaggcccgagtggaagtagacatctttgagctgcagcgggacagccagtacgagaccacggac

SEQ ID NO: 151352 - DNA, 120 bp, Artificial Sequence
  ENSG00000105737_2 (sequence is synthesized)
accatgtgtcagatcttacccaaaggggttgtgtctgtccttgggccctcctctagcccagcatctgcctccaccgtgagccatatctgtggagagaaggagatcccccacatcaaggtg

SEQ ID NO: 151353 - DNA, 120 bp, Artificial Sequence
  ENSG00000105737_3 (sequence is synthesized)
ggtcccgaggagacaccccgccttcagtaccttcgcttcgcgtctgtcagcctgtaccccagtaacgaggacgtcagcttggcggtctcccgaatcctcaagtccttcaactacccctcg

SEQ ID NO: 151354 - DNA, 120 bp, Artificial Sequence
  ENSG00000105737_4 (sequence is synthesized)
gccagcctcatctgcgccaaggctgagtgcctgctgcgattggaggaactggtgcgtggcttcctcatctccaaggagacgctgtcagtgaggatgttggacgacagccgggaccccaca

SEQ ID NO: 151355 - DNA, 120 bp, Artificial Sequence
  ENSG00000105737_5 (sequence is synthesized)
ccactgctcaaggagatccgtgatgacaaggtgtccaccatcatcatcgacgccaacgcctccatctcccacctcatcctccgtaaggcctcggaactgggaatgacctcagcgttttac

SEQ ID NO: 151356 - DNA, 120 bp, Artificial Sequence
  ENSG00000105737_6 (sequence is synthesized)
aagtacatcctcaccaccatggacttccccatcctgcatctggacggtattgtggaggactcctccaacatcctgggcttctccatgttcaacacgtcccaccccttctaccctgagttt

SEQ ID NO: 151357 - DNA, 120 bp, Artificial Sequence
  ENSG00000105737_7 (sequence is synthesized)
gtccgcagcctcaacatgtcctggagggagaactgtgaagccagcacctacctgggccctgcgctgtcagccgccctgatgtttgacgccgtgcacgtggtggtgagcgctgtccgagag

SEQ ID NO: 151358 - DNA, 120 bp, Artificial Sequence
  ENSG00000105737_8 (sequence is synthesized)
ctgaaccgcagccaggagatcggtgtgaagcctctggcctgtacatcggccaacatttggccccacgggaccagcctcatgaactacctgcgcatggtagagtatgatgggctgaccggg

SEQ ID NO: 151359 - DNA, 120 bp, Artificial Sequence
  ENSG00000105737_9 (sequence is synthesized)
cgggtcgagttcaacagcaaagggcagagaaccaactacaccctgcgcatcctagaaaagtcccggcagggccaccgtgagattggggtgtggtactctaaccgcaccctggccatgaat

SEQ ID NO: 151360 - DNA, 120 bp, Artificial Sequence
  ENSG00000105737_10 (sequence is synthesized)
gccaccaccctggacatcaacctgtcgcagacactggccaacaagaccctggtggtcacaaccatcctggagaacccatacgtcatgcgccggcccaacttccaggccctgtcggggaac

SEQ ID NO: 151361 - DNA, 120 bp, Artificial Sequence
  ENSG00000105737_11 (sequence is synthesized)
gaacgcttcgagggcttctgcgtggacatgctgcgggagctggccgagctgctgcgcttccgctaccgcctgcggttggtggaggatgggctgtacggggcgcccgagcccaacggctcc

SEQ ID NO: 151362 - DNA, 120 bp, Artificial Sequence
  ENSG00000105737_12 (sequence is synthesized)
tggacgggcatggttggcgagctcatcaaccggaaggcagacctggctgtggccgccttcaccatcacagctgagcgggagaaggtcatcgacttttccaagccctttatgaccctgggg

SEQ ID NO: 151363 - DNA, 120 bp, Artificial Sequence
  ENSG00000105737_13 (sequence is synthesized)
atcagcatcctctaccgagtgcacatgggccgcaagcctggctacttctccttcctggaccccttctcccctgctgtgtggctcttcatgcttcttgcctacctggctgtcagctgcgtc

SEQ ID NO: 151364 - DNA, 120 bp, Artificial Sequence
  ENSG00000105737_14 (sequence is synthesized)
ccaggctgagcccctatgagtggtataacccacacccatgcctgcgggcacgcccccacatcctggagaaccagtacacgctgggcaacagcctgtggtttcccgtggggggcttcatgc

SEQ ID NO: 151365 - DNA, 120 bp, Artificial Sequence
  ENSG00000105737_15 (sequence is synthesized)
agcagggctcggagatcatgccccgggcgctgtccacgcgctgtgtcagcggagtctggtgggccttcaccttgatcatcatctcctcctacacggccaacctggccgccttcctcaccg

SEQ ID NO: 151366 - DNA, 120 bp, Artificial Sequence
  ENSG00000105737_16 (sequence is synthesized)
tgcagcgcatggaggtgcctgtggagtcggccgatgacctggcagatcagaccaacatcgagtatggcaccatccacgccggctccaccatgaccttcttccagaattcacggtaccaaa

SEQ ID NO: 151367 - DNA, 120 bp, Artificial Sequence
  ENSG00000105737_17 (sequence is synthesized)
cgtaccagcgcatgtggaactacatgcagtcgaagcagcccagcgtgttcgtcaagagcacagaagagggcattgcccgcgtcctcaactcccgctacgccttcctgctcgagtccacca

SEQ ID NO: 151368 - DNA, 120 bp, Artificial Sequence
  ENSG00000105737_18 (sequence is synthesized)
tgaacgaataccaccggcgcctcaactgcaacctcacccagatcgggggactcctcgacaccaagggctacggcattggcatgccgctgggctccccgttccgggatgagatcacactgg

SEQ ID NO: 151369 - DNA, 120 bp, Artificial Sequence
  ENSG00000105737_19 (sequence is synthesized)
ccatcctgcagcttcaggagaacaaccggctggagatcctgaagcgcaagtggtgggaggggggccggtgccccaaggaggaggaccatcgagctaaaggtttgggcatggagaacattg

SEQ ID NO: 151370 - DNA, 120 bp, Artificial Sequence
  ENSG00000105737_20 (sequence is synthesized)
gtggcatttttatcgtgctcatctgtggcctcatcattgctgtcttcgtggcggtcatggaattcatatggtccacacggaggtcagctgagtccgaggaggtgtcggtgtgccaggaga

SEQ ID NO: 151371 - DNA, 120 bp, Artificial Sequence
  ENSG00000105737_21 (sequence is synthesized)
tgctgcaggagctgcgccacgccgtttcttgccgcaagacgtcgcgttcccgccggcgccgacgcccgggcggcccgagccgggccctgctgtcactgcgcgcggtccgcgagatgcgcc

SEQ ID NO: 151372 - DNA, 120 bp, Artificial Sequence
  ENSG00000105737_22 (sequence is synthesized)
gctgtcactgcgcgcggtccgcgagatgcgcctcagcaacggcaagctctactcggccggcgcgggcggggatgcgggcagcgcgcacgggggcccgcagcgcctcctggacgacccggg

SEQ ID NO: 151373 - DNA, 80 bp, Artificial Sequence
  ENSG00000105737_23 (sequence is synthesized)
ccccctgcacccacgtgcgcgtctgccaggagtgccggcgcatccaggcgctgcgggcctcgggggccggcgcgcctccg

SEQ ID NO: 151374 - DNA, 120 bp, Artificial Sequence
  ENSG00000105737_24 (sequence is synthesized)
ctggcggagcacgagtgaccacgggcggggctgtgcgggcgcccggactgaccgaagggacggggcccgccccaggccccagcagtctccgctcccgcagcgggcgcgggacaggacttg

SEQ ID NO: 151375 - DNA, 120 bp, Artificial Sequence
  ENSG00000105737_25 (sequence is synthesized)
ccgctcccgcagcgggcgcgggacaggacttgtgcgccggcgccccggacgccgcgattttgcctttggttccccgcgaagtccgaggcctggctctggagcccgcctgcgccccccagt

SEQ ID NO: 151376 - DNA, 120 bp, Artificial Sequence
  ENSG00000105737_26 (sequence is synthesized)
ggactcgcgagagggtgccgcgggcgagaagggcgcaggaaccgaggactccaggggctggggacttcgggggcggctctgggaagcggaaagcagtcagcggagaggaccccattctgg

SEQ ID NO: 151377 - DNA, 120 bp, Artificial Sequence
  ENSG00000105737_27 (sequence is synthesized)
gactgctcaggctccccaagacttgacgcagccccccacgcttctggaggtggggagggcctctggacagatgggtgtcccctggtgcccctccactcttctcttcctctcttttttggg

SEQ ID NO: 151378 - DNA, 120 bp, Artificial Sequence
  ENSG00000105737_28 (sequence is synthesized)
gggagaaacctcggaatttctatgagacctcccccagggagggggtcagttgggcccccatccctccccttgccacatcgcagcccctgttggaataaaaaaaagaacaaaaccccagaa

SEQ ID NO: 151379 - DNA, 120 bp, Artificial Sequence
  ENSG00000105737_29 (sequence is synthesized)
ccccttctctcctccattttctcctttccccttcctcccctccccggcccgccctctcctcttccacctgtccttcctccctgctcctgtggagccaccgttttggattagttgggagcc

SEQ ID NO: 151380 - DNA, 120 bp, Artificial Sequence
  ENSG00000105737_30 (sequence is synthesized)
tgggagccaccaccggcggcgggggagggggccctgtggactgccctctccccccgcccagccccaccaccacccagcgccagagcacctcccgctgtcggtcttcgggcctcgagggag

SEQ ID NO: 151381 - DNA, 120 bp, Artificial Sequence
  ENSG00000105737_31 (sequence is synthesized)
tggcccaaggactcctctgaaggagccgtccatgctgctagtaaaggtgccctccacccgtgtccaggttgccttctcaaggacatccctccggcaagtctgtcctttcctcctgcagca

SEQ ID NO: 151382 - DNA, 120 bp, Artificial Sequence
  ENSG00000105737_32 (sequence is synthesized)
tcagttgtcctctctttattggattcaggccaccaacgtacaaatatgctgtcatttctccagtcttaaaccctctcctgacctcactttccctcccagccaccgcccactttcttccct

SEQ ID NO: 151383 - DNA, 120 bp, Artificial Sequence
  ENSG00000105737_33 (sequence is synthesized)
tctctttacagccttggcagcagtggggggtctccctgatgcttccagtttcttctttcctcccatttcctcttgccccccactccagtctggcatcggtccctgccactccactgaagc

SEQ ID NO: 151384 - DNA, 120 bp, Artificial Sequence
  ENSG00000105737_34 (sequence is synthesized)
cactcttgtcaccagcaacttccatgtctgaaattcccggtctcaggcctcatgtatatgaggtagcagtgggcttcggcacagccagtcactctcaatcctcaaagccccttcttcccc

SEQ ID NO: 151385 - DNA, 120 bp, Artificial Sequence
  ENSG00000105737_35 (sequence is synthesized)
ttctcccacttctccggtcactccttcccaggctccctcgttgggtttctctttctccccaggctctgtttgttgtggggctccagggctcagtccttagactgcttctcttctcggtct

SEQ ID NO: 151386 - DNA, 120 bp, Artificial Sequence
  ENSG00000105737_36 (sequence is synthesized)
ttctccactacttgaatgatcccaccagccaaatggctcttaagacccactatgtgctggtgattcttgtgttagttatctattgctatcataacaaatgaccttaacagcttttaaaaa

SEQ ID NO: 151387 - DNA, 120 bp, Artificial Sequence
  ENSG00000105737_37 (sequence is synthesized)
ttgtaagtgagaaatgtgtactatgaataaatcaaccgtgctcagcaagcagattcctgctctacctgcctggtccgggctccaggatccgcaacccagccactagacacccagcctctg

SEQ ID NO: 151388 - DNA, 120 bp, Artificial Sequence
  ENSG00000105737_38 (sequence is synthesized)
aagggtgaggatagttcccccaggagaagttagggttctgccatgagaacaggcactggacaagcaaaaacaacagctttccacctcccagtcttgagacacacatgtgtataaggagga

SEQ ID NO: 151389 - DNA, 120 bp, Artificial Sequence
  ENSG00000105738_0 (sequence is synthesized)
acagttcccaggaggactcgcgcgaagcggcttggaagtgggcagcctggaagtcactcgggccaccggagctggcggcgtctccagcgagcggcgcggagctggacgccgcgatcgtgg

SEQ ID NO: 151390 - DNA, 120 bp, Artificial Sequence
  ENSG00000105738_1 (sequence is synthesized)
ggcccgcgaggcgggcagccggggcgtccagatgcacagtctctgacatcagctctcctgggaccctccaagagcactagtgtctagaaggcactaaggcatggcgaggacaacatcctt

SEQ ID NO: 151391 - DNA, 120 bp, Artificial Sequence
  ENSG00000105738_2 (sequence is synthesized)
gctgcctccagctggcgggcgaccacagctactgcctgctctgcgctactgagccactcggtctggagcccccaggacagcacctgcttcctgaggttgtcctggctcagctgtgcacag

SEQ ID NO: 151392 - DNA, 120 bp, Artificial Sequence
  ENSG00000105738_3 (sequence is synthesized)
cgatggtggagaactggactccacaggctcacaaccttcctgtcaggtttcagggcccagcatccttcatcctgggcctggctgccctgaacaatggctgagggctgggggaccccatag

SEQ ID NO: 151393 - DNA, 120 bp, Artificial Sequence
  ENSG00000105738_4 (sequence is synthesized)
agtgacaccacagcgtacggggccagcagcactccagtgcccgtggactatgaccacctatcgggccatccccagcgatggtgtggacctggcagccagctgtggcgccagggtgggcga

SEQ ID NO: 151394 - DNA, 120 bp, Artificial Sequence
  ENSG00000105738_5 (sequence is synthesized)
tgtcctccctgggccacacacaggggactacgctcccttgggattctgggcccagaatggcagcatgtcccagcctcttggcgagagcccggccaccgccaccgccaccgccaccgccac

SEQ ID NO: 151395 - DNA, 120 bp, Artificial Sequence
  ENSG00000105738_6 (sequence is synthesized)
cacccgccccagccccaccactcccgcaatgcccaagatgggcgtgcgcgcaagggtggccgactggccgcccaagcgggaggccctgagagagcacagcaacccaagcccctcccagga

SEQ ID NO: 151396 - DNA, 120 bp, Artificial Sequence
  ENSG00000105738_7 (sequence is synthesized)
cacagatggcacaaaggccaccaagatggcccattccatgaggagcatacagaacggacagccccccaccagcaccccggcttcctcagggtccaaagccttccaccgactctccaggag

SEQ ID NO: 151397 - DNA, 120 bp, Artificial Sequence
  ENSG00000105738_8 (sequence is synthesized)
aaggtccaaagacgtggagttccaggacgggtggccccggtcccccggcagggccttcctcccccttcggcaccgcagcagcagcgagatcaccctcagcgagtgtgacgcggaggacgc

SEQ ID NO: 151398 - DNA, 120 bp, Artificial Sequence
  ENSG00000105738_9 (sequence is synthesized)
gggggagccgcggggggcccggcacacgggggcgctgcccctcttccgcgagtacgggagcacctcgtccatcgacgtgcagggcatgcccgagcagagcttcttcgacatcctgaacga

SEQ ID NO: 151399 - DNA, 120 bp, Artificial Sequence
  ENSG00000105738_10 (sequence is synthesized)
gttccgcagcgagcagcccgacgcccgagggtgccaggccctcaccgagctcctccgggcagatcctggcccacacctcatggggggcggcggcggagccaagggggactcccacaacgg

SEQ ID NO: 151400 - DNA, 120 bp, Artificial Sequence
  ENSG00000105738_11 (sequence is synthesized)
gcagcccgccaaggacagcctcctgccactgcagcccacgaaggagaaggagaaggcccggaagaaacctgcgcggggcctcggcggcggggacacggtggactcgtccatctttcggaa

SEQ ID NO: 151401 - DNA, 120 bp, Artificial Sequence
  ENSG00000105738_12 (sequence is synthesized)
gctaaggagcagcaaacccgagggggaggctgggcgttccccgggggaggccgacgagggccggagccccccggaagccagcaggccgtgggtgtgtcagaagagcttcgcccacttcga

SEQ ID NO: 151402 - DNA, 120 bp, Artificial Sequence
  ENSG00000105738_13 (sequence is synthesized)
cgtgcagagcatgctgttcgacctcaacgaggcggccgccaacagggtgtcggtgtcgcagcggcggaacaccaccacgggtgcttcggccgcttccgccgcctcggccatggcctccct

SEQ ID NO: 151403 - DNA, 120 bp, Artificial Sequence
  ENSG00000105738_14 (sequence is synthesized)
cacggcctcgcgggcccacagcctcggaggcctggacccggccttcaccagcacagaggacctaaactgcaaggagaacttggagcaggacctcggcgatgacaacagcaacgacctgct

SEQ ID NO: 151404 - DNA, 120 bp, Artificial Sequence
  ENSG00000105738_15 (sequence is synthesized)
gctcagctgcccgcacttccgcaatgagatcgggggcgagtgtgagcgcaacgtgagcttctcccgggcttccgtgggctccccgagcagcggcgagggccacctggcagagcccgccct

SEQ ID NO: 151405 - DNA, 120 bp, Artificial Sequence
  ENSG00000105738_16 (sequence is synthesized)
gagcgcctaccgcaccaacgccagcatctcggtgttggaagttcccaaggagcagcagcggacgcagagtcggccccggcagtacagcatcgagcatgtggacctgggcgcccgctacta

SEQ ID NO: 151406 - DNA, 120 bp, Artificial Sequence
  ENSG00000105738_17 (sequence is synthesized)
ccaggattacttcgtgggcaaagaacatgccaattacttcggcgtggatgagaagctggggccagtggctgtgagcattaagcgggagaagctggaagaccacaaggagcacggacctca

SEQ ID NO: 151407 - DNA, 120 bp, Artificial Sequence
  ENSG00000105738_18 (sequence is synthesized)
gtaccagtacaggatcatcttccggacccgcgagctcatcaccctgcggggctccatcctggaagatgctacgcccacagccaccaagcatgggaccgggcggggcctgcccttgaagga

SEQ ID NO: 151408 - DNA, 120 bp, Artificial Sequence
  ENSG00000105738_19 (sequence is synthesized)
tgccctggagtatgtcatccccgagctcaacatccactgcctgcggctggccctcaacacccccaaggtgacggagcaactgctgaagctcgatgagcaagggctctgccggaagcacaa

SEQ ID NO: 151409 - DNA, 120 bp, Artificial Sequence
  ENSG00000105738_20 (sequence is synthesized)
ggtgggcatcctctattgcaaggccggccagagctccgaggaggagatgtacaacaatgaggaggccggccccgcctttgaggagttcctctccctcatcggcgagaaggtctgcctgaa

SEQ ID NO: 151410 - DNA, 120 bp, Artificial Sequence
  ENSG00000105738_21 (sequence is synthesized)
gggcttcaccaagtacgctgcccagctggacgtcaagaccgactccacgggaacccactccctctacacgatgtaccaggactacgagatcatgttccatgtctccaccctgctccctta

SEQ ID NO: 151411 - DNA, 120 bp, Artificial Sequence
  ENSG00000105738_22 (sequence is synthesized)
cacccccaacaacaggcagcagctgctacggaagaggcacataggaaatgacatcgtgacgatcatcttccaggagcctggcgcgctaccgttcacccccaagaacatccgctcccactt

SEQ ID NO: 151412 - DNA, 120 bp, Artificial Sequence
  ENSG00000105738_23 (sequence is synthesized)
ccagcacgtcttcatcattgtccgagtccacaacccctgcactgataacgtctgttacagtatggctgtgacccgatccaaagacgctcctcctttcggcccccccatccccagtggaac

SEQ ID NO: 151413 - DNA, 120 bp, Artificial Sequence
  ENSG00000105738_24 (sequence is synthesized)
cacattccgcaaatccgacgtcttcagagacttcttgctggccaaggtgattaacgctgagaacgccgcgcacaagtccgacaagttccacaccatggccaccaggacccgccaggagta

SEQ ID NO: 151414 - DNA, 120 bp, Artificial Sequence
  ENSG00000105738_25 (sequence is synthesized)
tctcaaggacctggccgaaaactgtgtctccaacacccccatcgactccaccggcaaattcaacctcatctccctgacctccaagaagaaggaaaagacaaaagcacgggctggcgctga

SEQ ID NO: 151415 - DNA, 120 bp, Artificial Sequence
  ENSG00000105738_26 (sequence is synthesized)
gcagcacagtgcaggggccatcgcctggagggtggtggcccaggactacgcccagggggtggaaatcgactgcattttgggaatttccaatgagtttgtggtgctcctggacttacgcac

SEQ ID NO: 151416 - DNA, 120 bp, Artificial Sequence
  ENSG00000105738_27 (sequence is synthesized)
caaggaggtggtgttcaactgctactgcggggatgtcattggctggactccagactcctccacactcaaaatcttctatggacgaggagaccacatcttcctacaggcgacagagggttc

SEQ ID NO: 151417 - DNA, 120 bp, Artificial Sequence
  ENSG00000105738_28 (sequence is synthesized)
tgtggaggacataagggagatagtgcagagactgaaggtgatgaccagtggctgggagacggtggacatgacgcttcggcggaacgggctcgggcagctgggcttccacgtgaagtacga

SEQ ID NO: 151418 - DNA, 120 bp, Artificial Sequence
  ENSG00000105738_29 (sequence is synthesized)
cggcacggtggccgaggttgaggactatgggttcgcctggcaggccggcctccggcagggcagccgactagtggagatctgcaaggtggccgtggtcacactgacccacgaccagatgat

SEQ ID NO: 151419 - DNA, 120 bp, Artificial Sequence
  ENSG00000105738_30 (sequence is synthesized)
cgacctgctgcgcacctctgtcactgtgaaggtggtcatcatcccgccttttgaggacggcactccccggaggggttggccggagacctacgacatgaatacctcggagcccaagacgga

SEQ ID NO: 151420 - DNA, 120 bp, Artificial Sequence
  ENSG00000105738_31 (sequence is synthesized)
gcaggaaagcatcactcctgggggccggcccccctaccgcagcaatgctccctggcagtggagcgggcccgcatcccataactctctaccagcctccaagtgggccactccaaccactcc

SEQ ID NO: 151421 - DNA, 120 bp, Artificial Sequence
  ENSG00000105738_32 (sequence is synthesized)
cggccatgcccagtccctgagccggcccctgaagcagacccccatagtccccttccgggagtcccagccactgcacagcaagaggcctgtcagcttcccagaaaccccttacacagtatc

SEQ ID NO: 151422 - DNA, 120 bp, Artificial Sequence
  ENSG00000105738_33 (sequence is synthesized)
caagccatccccagaaaggtacacggctgccccacaccccctgctatctcttgatccccacttcagccacgatgggacgtccagcggcgactcctcttccggcggcctgaccagccagga

SEQ ID NO: 151423 - DNA, 120 bp, Artificial Sequence
  ENSG00000105738_34 (sequence is synthesized)
gagcaccatggaacgccagaagccagagcctttgtggcatgtgcctgcccaggccaggctctcagccatagccggaagcagcgggaacaagcacccgtccaggcaggatgcagcaggcaa

SEQ ID NO: 151424 - DNA, 120 bp, Artificial Sequence
  ENSG00000105738_35 (sequence is synthesized)
agattcccccaacaggcattccaaaggagaacctcaatactcaagtcattccagcagcaacaccctctccagcaacgcatccagcagccacagcgacgaccgctggttcgaccccctgga

SEQ ID NO: 151425 - DNA, 120 bp, Artificial Sequence
  ENSG00000105738_36 (sequence is synthesized)
ccccctggagccagagcaagaccccctctccaagggtggctctagtgacagcggcatcgacaccaccctctacacctccagccctagctgcatgtccctggccaaggctccacggcccgc

SEQ ID NO: 151426 - DNA, 120 bp, Artificial Sequence
  ENSG00000105738_37 (sequence is synthesized)
caagccacacaagccccctggaagtatgggcctttgtggcgggggtcgcgaggccgctgggaggtcccaccacgcagacaggcggcgggaggtctcccctgcccccgcagttgccggcca

SEQ ID NO: 151427 - DNA, 120 bp, Artificial Sequence
  ENSG00000105738_38 (sequence is synthesized)
aagcaagggctaccgaccgaagctgtactcctccggctccagcacccccacgggactggcggggggcagccgagacccaccgaggcagcccagtgacatgggctcgagggttggctaccc

SEQ ID NO: 151428 - DNA, 120 bp, Artificial Sequence
  ENSG00000105738_39 (sequence is synthesized)
cgctcaggtttacaaaactgccagtgcagagactcctcggccctcccagctggcccagcccagcccctttcagctctccgcctccgtccccaagtccttcttctccaagcagcctgtacg

SEQ ID NO: 151429 - DNA, 120 bp, Artificial Sequence
  ENSG00000105738_40 (sequence is synthesized)
caataagcacccaacagggtggaagagaacggaggagcccccaccacggccactccccttcagtgacccaaagaagcaggtggacacgaacaccaaaaatgtctttgggcaaccgaggtt

SEQ ID NO: 151430 - DNA, 120 bp, Artificial Sequence
  ENSG00000105738_41 (sequence is synthesized)
gagggcatccctccgagacctccggtcaccacggaagaactacaaatccaccatcgaggatgacctgaagaaactcatcatcatggacaacctggggccagagcaggagagagacacggg

SEQ ID NO: 151431 - DNA, 120 bp, Artificial Sequence
  ENSG00000105738_42 (sequence is synthesized)
acagtcaccgcagaagggcctgcagcggacgctgtcggacgagagcctgtgcagcgggcgccgggagcccagcttcgccagccccgctggcctagagccagggctgcccagcgacgtgct

SEQ ID NO: 151432 - DNA, 120 bp, Artificial Sequence
  ENSG00000105738_43 (sequence is synthesized)
cttcaccagcacctgcgccttcccgtccagcacgctgcctgcacgccgccagcaccagcacccccacccgcccgtcggccccggtgccacccctgccgccggcagcggctttcccgagaa

SEQ ID NO: 151433 - DNA, 120 bp, Artificial Sequence
  ENSG00000105738_44 (sequence is synthesized)
gaaatccaccatctcagcctcggagctctcgctggctgatgggcgggaccgccccctgcggcgcctggaccctgggctgatgcccctgcctgacacagctgctggcctcgagtggtccag

SEQ ID NO: 151434 - DNA, 120 bp, Artificial Sequence
  ENSG00000105738_45 (sequence is synthesized)
cctggtgaacgcagccaaggcatacgaagtgcaaagagccgtctcactcttctctctgaacgacccggccctgagcccggacatcccgcctgcacacagtcctgtccacagccacctgag

SEQ ID NO: 151435 - DNA, 120 bp, Artificial Sequence
  ENSG00000105738_46 (sequence is synthesized)
cctggagaggggacccccgacccccaggaccacccctaccatgagcgaggagccacccctggatctgacaggcaaggtgtaccagctggaggtgatgctgaaacagctgcacactgacct

SEQ ID NO: 151436 - DNA, 120 bp, Artificial Sequence
  ENSG00000105738_47 (sequence is synthesized)
gcagaaggagaagcaggacaaggtggtgctccagtcagaggtggccagcctgcggcagaacaaccagcggctgcaggaggagtcgcaggccgccagcgagcagctgcgcaagtttgcgga

SEQ ID NO: 151437 - DNA, 120 bp, Artificial Sequence
  ENSG00000105738_48 (sequence is synthesized)
gatcttctgcagggagaagaaggagctctgaggtgggaggccgccgcccgccttcgctccttcccctcaggccgtggccctgctgcctctctccctccactcagctcccagctgccggtg

SEQ ID NO: 151438 - DNA, 120 bp, Artificial Sequence
  ENSG00000105738_49 (sequence is synthesized)
tgaccaagatgacccatccagggccctccccatggacacggaaactccgatggcctcactagggctgtgagtcagggtcagcgcgcacagccctcatgccccagagggcgaagtggtctc

SEQ ID NO: 151439 - DNA, 120 bp, Artificial Sequence
  ENSG00000105738_50 (sequence is synthesized)
aggcctccctccaagctgcccagctgtggtcccggtgagctgggctgtgcttacaccgctcccgggcctgccccgctgtccccatctagcctcttcctgggaccagcccttcgaagctga

SEQ ID NO: 151440 - DNA, 120 bp, Artificial Sequence
  ENSG00000105738_51 (sequence is synthesized)
tggggacggagagaggagccagtctccagacgcctcggctccaggaggtcacacagcaggtttctgcaccacgcacaacaaagttgcggcttgtggggccgaggcccctgcatgaaaagt

SEQ ID NO: 151441 - DNA, 120 bp, Artificial Sequence
  ENSG00000105738_52 (sequence is synthesized)
acagcgtgaaagcaaccctttcttccccacacccagagaggtgaggcccgcgtggacacagaccagggcgcctcggtccctagcacgtgagctccaaaaagcacgaacatgatcccctcc

SEQ ID NO: 151442 - DNA, 120 bp, Artificial Sequence
  ENSG00000105738_53 (sequence is synthesized)
ctaaccccctcctcccaaaaagcagccaggagcactttcttagagtttaaattattttcttgggggcctgaggatagagagaggcaaggctagcctccagagccgatttatttgagagag

SEQ ID NO: 151443 - DNA, 120 bp, Artificial Sequence
  ENSG00000105738_54 (sequence is synthesized)
aaactctatttggatctccaggacggtttatacgatctttttctatcagctcctcttccgccagaggccactgcacctgggctaggggtccacaggcccctccaccttccagctaaccag

SEQ ID NO: 151444 - DNA, 120 bp, Artificial Sequence
  ENSG00000105738_55 (sequence is synthesized)
gccaggccggggcggtggagccaccacacagccgactctctcctcctcctcccggcacgacctggccctgaccagcagcctcggcctcttctgggttccaggaggggctcccgaagccct

SEQ ID NO: 151445 - DNA, 120 bp, Artificial Sequence
  ENSG00000105738_56 (sequence is synthesized)
caggacagggctggaggagaacagccttcatctcctcctctggtttttttttcctttgcaagtctcccagcccatctctccgagcagcggccaccagaccccctcaccatgctccccggg

SEQ ID NO: 151446 - DNA, 120 bp, Artificial Sequence
  ENSG00000105738_57 (sequence is synthesized)
gagcactgcaccccgcgaaccccactggacgctggttctctaaaggcaataaggggcggccatgccggtgtggtaccacgctgttcctccaggaaaccgtttctttttttccttctttaa

SEQ ID NO: 151447 - DNA, 120 bp, Artificial Sequence
  ENSG00000105738_58 (sequence is synthesized)
aagcaaacagaaaaagatatatatatatatatatatatatttattttttcatgtagagttggcgccagaacaagcctgtatggccacagtctgtggattcatccccccaacctcaagctg

SEQ ID NO: 151448 - DNA, 120 bp, Artificial Sequence
  ENSG00000105738_59 (sequence is synthesized)
aggaccaaggcgtgtcccctgtgggctgggggtcagtgggaggaccagagggatgaagtcagggcaggccggtgccctttttgggaggcaccaggcggggaggagttggcggagcaggtc

SEQ ID NO: 151449 - DNA, 120 bp, Artificial Sequence
  ENSG00000105738_60 (sequence is synthesized)
tggctgtgagccagcaccaggcaacccggcccttgtccagggacctctgctgccttctctctggggtcaggaacctcagaggagggggctctggggactgcataggacgcaggcactcgg

SEQ ID NO: 151450 - DNA, 120 bp, Artificial Sequence
  ENSG00000105738_61 (sequence is synthesized)
aggtgccggtgtggatgggtgggggtgagagaagagggttcttatcgcgtctcctgtgatcagcctctggccccctggaggaggaaacctcagcgctgcccctgcccccaccctcacccc

SEQ ID NO: 151451 - DNA, 120 bp, Artificial Sequence
  ENSG00000105738_62 (sequence is synthesized)
caacaccaagagtgaggtgggcgtgccccaggcagcgtcctcagccctggccagctactgtgatgccatcttctcccccatccccttctctggggggcccacccgtcccccacccccacc

SEQ ID NO: 151452 - DNA, 120 bp, Artificial Sequence
  ENSG00000105738_63 (sequence is synthesized)
ccttagaccctcatcgggtccctttttttttttttttttcagttgtctcctcccatcttcagatcattcgaatcattttggggacttaatcatgtacatggacaagtgtaaattatgatt

SEQ ID NO: 151453 - DNA, 120 bp, Artificial Sequence
  ENSG00000105738_64 (sequence is synthesized)
tttggttttgttttctgttattttttaaggatttctgcaaaaacagatctatttaatttgaggttgatgttctatccaatggccgaagatagcagcaggttttttttttcatatgttgat

SEQ ID NO: 151454 - DNA, 120 bp, Artificial Sequence
  ENSG00000105738_65 (sequence is synthesized)
ttgtttcatttggattttttttttattattctttattgtcttttttttttccccatccctgtcttgagattttctggcatgtttctggaggtttcaaaggaaataaaggtttcatagaaa

SEQ ID NO: 151455 - DNA, 120 bp, Artificial Sequence
  ENSG00000105738_66 (sequence is synthesized)
gtgctgggattataggtgtgaaccaccaggcctggccagtgtatttaatttttaagagtagattgaagtgaaagcaccaagttaaaaaccagcacagatggtacgtgggatatggcaaaa

SEQ ID NO: 151456 - DNA, 75 bp, Artificial Sequence
  ENSG00000105738_67 (sequence is synthesized)
gatgatcgacctgctgcgcacctctgtcactgtgaaggtggtcatcatcccgccttttgaggacggcactccccg

SEQ ID NO: 151457 - DNA, 120 bp, Artificial Sequence
  ENSG00000105738_68 (sequence is synthesized)
ttgagtacctcctgtatgccaggcactgtgctgggtactgaggatacagcagttggccgtgaacaaaatccctgttctcatggagctgccacttcaatgggaagagacaagaaacaaaat

SEQ ID NO: 151458 - DNA, 120 bp, Artificial Sequence
  ENSG00000105738_69 (sequence is synthesized)
gaagtggggaaagccatctctgctgagtgtcaataagtgttaagtaatggggacagaaaagcaaagatcagggagtgttgtggtggggtggatctgaataacgtagtcagcaaaggcctc

SEQ ID NO: 151459 - DNA, 120 bp, Artificial Sequence
  ENSG00000105738_70 (sequence is synthesized)
agaatgttcctagcagagggaacagcggtgcagaggcttcgaggaagtgtttctggccatggtgaggcctttgtcctttatcctgaatgagagggaaccacaggaagctgctacggaaga

SEQ ID NO: 151460 - DNA, 120 bp, Artificial Sequence
  ENSG00000105738_71 (sequence is synthesized)
tgttggtcctgcccacaagggcaggtccttttgaccatctgtccattctcgtgcttcctgtgcctggacccgccaggtgctcagcaggtgtctgtagagtgggctctttgtatcctggag

SEQ ID NO: 151461 - DNA, 120 bp, Artificial Sequence
  ENSG00000105738_72 (sequence is synthesized)
gtacgaagaaggggtcctccctgaagtcacatgcacggcccagcctcagggaaaacgcacacttaagggtgggcagccacccttcccctggcctggtgctcctaacaccccgtccacatc

SEQ ID NO: 151462 - DNA, 120 bp, Artificial Sequence
  ENSG00000105738_73 (sequence is synthesized)
cacagaggtgcccttggtgggtggagtgtgccgggtggagggctggcttcctgcttcccctcagagcttctcctcaggctttgctagaatgtcagggataagggggcctgtacccccagg

SEQ ID NO: 151463 - DNA, 120 bp, Artificial Sequence
  ENSG00000105738_74 (sequence is synthesized)
gaggccttttctttccctcccccaaagggaatgttggcaaaacagctttctttgggaacgcgcctgttcacgacgaccagccatctcctggggaactccggtggctggctggcgtgttcc

SEQ ID NO: 151464 - DNA, 120 bp, Artificial Sequence
  ENSG00000105738_75 (sequence is synthesized)
tgcggctgttgaataagtcgctgttaggagctggcacggcaggttcccgtttccgcattccaggcacccacagcgggctgggggcgggcaccactgaggtcggcctggagagccaaggca

SEQ ID NO: 151465 - DNA, 120 bp, Artificial Sequence
  ENSG00000105738_76 (sequence is synthesized)
cgccctgggaggaccagggacaggaggagtccacctggggctcccctgacagccacctgcccactttgtgatcagagccgtgttcggggagtctttcagatgcacagtctctgacatcag

SEQ ID NO: 151466 - DNA, 120 bp, Artificial Sequence
  ENSG00000105738_77 (sequence is synthesized)
agtgacccaaagaagtaagtgcctggacgtccagcgaggcgcccgccagatccacaccagggcgtctccggggcggaaagagggtgatgccacatgctgtcattgcacagacgactgtgg

SEQ ID NO: 151467 - DNA, 120 bp, Artificial Sequence
  ENSG00000105738_78 (sequence is synthesized)
gccagtgtaccagtgtacacactggggctgcagctgcaagcaggacaggcgagaacccctcttggggagctggcattccatttggggtgaccaacaataagtagaataagagaagcacgc

SEQ ID NO: 151468 - DNA, 120 bp, Artificial Sequence
  ENSG00000105738_79 (sequence is synthesized)
gtgggcagcctggaagtcactcgggccaccggagctggcggcgtctccagcgagcggcgcggagctggacgccgcgatcgtggggcccgcgaggcgggcagccggggcgtccaggcgtgc

SEQ ID NO: 151469 - DNA, 120 bp, Artificial Sequence
  ENSG00000105738_80 (sequence is synthesized)
accccggcgctgtggtgaagagcttggaggcggggagcggtggattcgcgtcccggctgtgccactcgggagccgcgatctgggaaaaccgcgccgaacctcaatttcccctgcagtaaa

SEQ ID NO: 151470 - DNA, 120 bp, Artificial Sequence
  ENSG00000105738_81 (sequence is synthesized)
ggaggcacttactacgtatttgggttattgttagctctccgaaaaatgaggtgaagatgttatcgattgcatagggtgaggattagttgagcgtgtgcatgtaaagaggtgagtccttag

SEQ ID NO: 151471 - DNA, 120 bp, Artificial Sequence
  ENSG00000105738_82 (sequence is synthesized)
ttagcacccaatgcaggctagctgctgttaaccgagattattttgttaagagcgttggtttggaaggcagagagaccccaggttcaaatttgaacatttaccagctgtgtgactttgggc

SEQ ID NO: 151472 - DNA, 120 bp, Artificial Sequence
  ENSG00000105750_0 (sequence is synthesized)
gcctttgtctctcgctgcagcctgagctctaggtcttgttttccctgctttgtgttttctgctcgtggacgcccagcctctgtggccctgtggcctgcaggtattgggagatccacagct

SEQ ID NO: 151473 - DNA, 85 bp, Artificial Sequence
  ENSG00000105750_1 (sequence is synthesized)
aaggagtggcaatgcctggacactgcacagcggaatttatatagaaatgtgatgttagagaactacagaaacctggtcttcctgg

SEQ ID NO: 151474 - DNA, 120 bp, Artificial Sequence
  ENSG00000105750_2 (sequence is synthesized)
aatgtgatgttagagaactacagaaacctggtcttcctgggtattactgtttctaagccagacctgatcacttgtctggagcaagggaaagaggcctggagtatgaagagacatgagatc

SEQ ID NO: 151475 - DNA, 120 bp, Artificial Sequence
  ENSG00000105750_3 (sequence is synthesized)
atggtggccaaacccacagttatgtgttctcattttgcccaagacctttggccggagcagaatataaaagattctttccaaaaagtgacactgaaaagatatggaaaatgtagacatgaa

SEQ ID NO: 151476 - DNA, 120 bp, Artificial Sequence
  ENSG00000105750_4 (sequence is synthesized)
aatttaccattaagaaaaggctgtgaaagtatggatgagtgtaagatgcacaaaggaggttgtaatggacttaaccaatgtctcacagctacccagagcaaaatatttcaatgtgataaa

SEQ ID NO: 151477 - DNA, 120 bp, Artificial Sequence
  ENSG00000105750_5 (sequence is synthesized)
tatgtaaaagtcgctcataaattttcaaattcaaacagacatgagataagacatactaaaaagaaacctttcaaatgtacaaaatgtggcaaatcatttggcatgatttcatgcctaact

SEQ ID NO: 151478 - DNA, 120 bp, Artificial Sequence
  ENSG00000105750_6 (sequence is synthesized)
gaacatagcagaattcatactagagtaaatttctacaaatgtgaagaatgtggaaaagcctttaactggtcctcaacccttactaaacataagagaattcatacgggagagaaaccttac

SEQ ID NO: 151479 - DNA, 63 bp, Artificial Sequence
  ENSG00000105750_7 (sequence is synthesized)
gagaaaccttacaaatgtgaagaatgtggtaaagcctttaaccagtcctcaaaccttattact

SEQ ID NO: 151480 - DNA, 71 bp, Artificial Sequence
  ENSG00000105750_8 (sequence is synthesized)
gagaaaccctacaaatgtaaagaatgtggtaaagcttttaaccgatcttcaacccttactacccatagaac

SEQ ID NO: 151481 - DNA, 74 bp, Artificial Sequence
  ENSG00000105750_9 (sequence is synthesized)
tactggagagaaaccctacaaatgtaaaaaatgtggaaaagcctttaaccagtctgcacaccttaccacacatg

SEQ ID NO: 151482 - DNA, 62 bp, Artificial Sequence
  ENSG00000105750_10 (sequence is synthesized)
tagaatgtggtaaagcttttaaacactcttcaacccttactaaacataagataattcatact

SEQ ID NO: 151483 - DNA, 88 bp, Artificial Sequence
  ENSG00000105750_11 (sequence is synthesized)
ccttgccttacaaatgtaaagaatgtgaaaaagcttttaaccaatcctcaaaacttactgaacataagaaaattcatactggagagaa

SEQ ID NO: 151484 - DNA, 90 bp, Artificial Sequence
  ENSG00000105750_12 (sequence is synthesized)
ttcatactggagagaaaccctatgaatgtgaaaatcttactagacataagaaaagtcatacagaagagaaaccttacaaatgtgaagaat

SEQ ID NO: 151485 - DNA, 62 bp, Artificial Sequence
  ENSG00000105750_13 (sequence is synthesized)
aaccttactaaacataagagaattcatactggagaaaaaccttacaaatgtgaagaatgtga

SEQ ID NO: 151486 - DNA, 120 bp, Artificial Sequence
  ENSG00000105750_14 (sequence is synthesized)
tgaagaatgtgacaaagcttttaaatggtcctcagtccttactaaacataagataattcataccggagaaaaattacaaatatgaaaattatggcaaagctttaatcaatttacaagtct

SEQ ID NO: 151487 - DNA, 120 bp, Artificial Sequence
  ENSG00000105750_15 (sequence is synthesized)
tactaaacataagaaaatttatactggagagaaactactaacctgaaagatgtgacaataattttgacaacacctcagacttataaaagtaatcatactggtgagaaattctaaaaatgt

SEQ ID NO: 151488 - DNA, 120 bp, Artificial Sequence
  ENSG00000105750_16 (sequence is synthesized)
gaagactatggcaaagtctttaaatggttgtcacactttaggtaagataattcatattggaacaaactacaagtgcaaacaatgtggcaaaacttaatttatgctcacaccttactgcac

SEQ ID NO: 151489 - DNA, 120 bp, Artificial Sequence
  ENSG00000105750_17 (sequence is synthesized)
agaaaagaatttttagttgagaaaaagtatacaaatataaagaatgtggaaaagccgttaatatctgctcacatcttactcagcatcagaaagtacttaataaaagcattataaatggaa

SEQ ID NO: 151490 - DNA, 80 bp, Artificial Sequence
  ENSG00000105750_18 (sequence is synthesized)
gctaaaaacggctagcagatatctaagaatgtcagcacaggtgtttgaatacattttgcttctaagagaagttactattt

SEQ ID NO: 151491 - DNA, 120 bp, Artificial Sequence
  ENSG00000105750_19 (sequence is synthesized)
ctttgaaaaggaacctctatttcacattttacgatgagcacaatatagttttgcattggtgtatatgaatttgaatgagcaaacagctcttcaagtttttggggtttttttgtttgtttt

SEQ ID NO: 151492 - DNA, 120 bp, Artificial Sequence
  ENSG00000105750_20 (sequence is synthesized)
gcctcagcctcccaagtagctgtgactaaagccgtgcaccacaacgtctggccaattttttgtattttagtagagacgaagtttcaccatattggccaggcgagtctcaaactcctgacc

SEQ ID NO: 151493 - DNA, 120 bp, Artificial Sequence
  ENSG00000105750_21 (sequence is synthesized)
aaggcagaggagaacaaaggaaggagggagcaacttgtggatgctgagaaagtgtctcactatgttgctcaggctgatcttcaactcctagtctcaagttgtctatcaaaaagaatgtcg

SEQ ID NO: 151494 - DNA, 120 bp, Artificial Sequence
  ENSG00000105750_22 (sequence is synthesized)
caaaggcagaggagaacaaaggaaggagggagcaacttgtggatgctgagaaaggttgtctatcaaaaagaatgtcgtatgagctattgagaaaggtgtatatcctgatgttactgagga

SEQ ID NO: 151495 - DNA, 120 bp, Artificial Sequence
  ENSG00000105750_23 (sequence is synthesized)
gttttctgctcgtggacgcccagcctctgtggccctgtggcctgcaggtattgggagatccacagctaagacgccgggaccccctggaagcctagaaatggtattactgtttctaagcca

SEQ ID NO: 151496 - DNA, 120 bp, Artificial Sequence
  ENSG00000105750_24 (sequence is synthesized)
ccacagaatcttactctgtcacccagtctggaatgcagtagcaagattttggcccactgcagcctcaaccttctggggtcaagtgattgttccacctcagcctcccgagtagcttggact

SEQ ID NO: 151497 - DNA, 120 bp, Artificial Sequence
  ENSG00000105750_25 (sequence is synthesized)
tactatgcctggctaattttttgattatttgtagagacagagtctcactttgttgcccagtctagtctcaaacttctggctccaaatgatcctcctaccttggtctcccaaagtgttggg

SEQ ID NO: 151498 - DNA, 120 bp, Artificial Sequence
  ENSG00000105750_26 (sequence is synthesized)
attataggtatgagcctgttcacccagccagtattcttaaatttaataagatttgttatgtgtcctaacagaatacacaaggtgcaaataagaatgttgtgtattctcttgcttttgact

SEQ ID NO: 151499 - DNA, 120 bp, Artificial Sequence
  ENSG00000105750_27 (sequence is synthesized)
tcactgttggatgtggaacctggtgggagatgtttagatcatggggcaaatttctcatgaatggctttgtactatcctcttggtaatcaaaaagtttacactctgttaattcagatgaga

SEQ ID NO: 151500 - DNA, 120 bp, Artificial Sequence
  ENSG00000105750_28 (sequence is synthesized)
gctgcctcattaaaagaacctggccccttcacctcacatttggttctgtcttttactatgtgatatgtccagttactgttggccttccaccattgtggaagcttactgaaaccttccacc

SEQ ID NO: 151501 - DNA, 120 bp, Artificial Sequence
  ENSG00000105750_29 (sequence is synthesized)
agaggcagatgccggcacacacttcttgtacagtctgcccaacgatgaaccaaacaagcctttttatttataaattatccactctcaggtattcctctatgtgcaaaataatatattctg

SEQ ID NO: 151502 - DNA, 120 bp, Artificial Sequence
  ENSG00000105750_30 (sequence is synthesized)
taacgttgtctaagttttctgttttcttattgatcttttgtctgaattttctatttattattaaaaatggggtcttgatgtctacaattattatgttgctatgtatttcttgtttcactt

SEQ ID NO: 151503 - DNA, 120 bp, Artificial Sequence
  ENSG00000105750_31 (sequence is synthesized)
ttgtcaatatttgctttacgtattttggagccctaatgttgtatatacatatacacataaataaataggcataatagttttagattcctggtaaattgatccattttactattgtataat

SEQ ID NO: 151504 - DNA, 120 bp, Artificial Sequence
  ENSG00000105750_32 (sequence is synthesized)
atcagtctttgtctcatgctagtacttgacttaaagcatataatgtctaatataattatgagtgtcttactcaattgtggttatatttgcatgtaataaaaagtttttccattctgttac

SEQ ID NO: 151505 - DNA, 120 bp, Artificial Sequence
  ENSG00000105750_33 (sequence is synthesized)
tgctcgtggacgcccagcctctgtggccctgtggcctgcaggtattgggagatccacagctaagacgccgggaccccctggaagcctagaaatggtgagagtgccagggaccattgacat

SEQ ID NO: 151506 - DNA, 120 bp, Artificial Sequence
  ENSG00000105755_0 (sequence is synthesized)
attcctgaccccgcagtgggcgcgatggcggaggctgtactgagggtcgcccggcggcagctgagccagcgcggcgggtctggagcccccatcctcctgcggcagatgttcgagcctgtg

SEQ ID NO: 151507 - DNA, 120 bp, Artificial Sequence
  ENSG00000105755_1 (sequence is synthesized)
agctgcaccttcacgtacctgctgggtgacagagagtcccgggaggccgttctgatcgacccagtcctggaaacagcgcctcgggatgcccagctgatcaaggagctggggctgcggctg

SEQ ID NO: 151508 - DNA, 120 bp, Artificial Sequence
  ENSG00000105755_2 (sequence is synthesized)
ctctatgctgtgaatacccactgccacgcggaccacattacaggctcggggctgctccgttccctcctccctggctgccagtctgtcatctcccgccttagtggggcccaggctgactta

SEQ ID NO: 151509 - DNA, 120 bp, Artificial Sequence
  ENSG00000105755_3 (sequence is synthesized)
tgtcaccttcgtcctgaatgaccacagcatggccttcactggagatgccctgttgatccgtgggtgtgggcggacagacttccagcaaggctgtgccaagaccttgtaccactcggtcca

SEQ ID NO: 151510 - DNA, 120 bp, Artificial Sequence
  ENSG00000105755_4 (sequence is synthesized)
tgaaaagatcttcacacttccaggagactgtctgatctaccctgctcacgattaccatgggttcacagtgtccaccgtggaggaggagaggactctgaaccctcggctcaccctcagctg

SEQ ID NO: 151511 - DNA, 120 bp, Artificial Sequence
  ENSG00000105755_5 (sequence is synthesized)
tgaggagtttgtcaaaatcatgggcaacctgaacttgcctaaacctcagcagatagactttgctgttccagccaacatgcgctgtggggtgcagacacccactgcctgatctcacttctg

SEQ ID NO: 151512 - DNA, 120 bp, Artificial Sequence
  ENSG00000105755_6 (sequence is synthesized)
tcagatgctcccatccactattaatgcactaggtgggaggagagggcggcaatgacactgcacctctcctttcccaccgcattccctggagctccctaaataaaactttttttaacgtga

SEQ ID NO: 151513 - DNA, 120 bp, Artificial Sequence
  ENSG00000105755_7 (sequence is synthesized)
caaaatcatgggcaacctgaacttgcctaaacctcagcagataggtgagcagctggggacctggacttctgggtctgagagaggaggggctggggtcttggactcctgggtctgagagag

SEQ ID NO: 151514 - DNA, 74 bp, Artificial Sequence
  ENSG00000105755_8 (sequence is synthesized)
gcctggactcctgggtctaagggaggaggggctgggggactggactcctgggtctgaggcagtaggggctgggg

SEQ ID NO: 151515 - DNA, 120 bp, Artificial Sequence
  ENSG00000105755_9 (sequence is synthesized)
ggggactggactcctgggtctgaggcagtaggggctgggggcctggactcctggctctgagggagtaggggctgggctgggggcctgggctcctgagtctgagggaggaggggctggggg

SEQ ID NO: 151516 - DNA, 120 bp, Artificial Sequence
  ENSG00000105755_10 (sequence is synthesized)
cccgcagtgggcgcgatggcggaggctgtactgagggtcgcccggcggcagctgagccagcgcggcgggtctggagcccccatcctcctgcggcaggtgcgggtggctggacctaggagg

SEQ ID NO: 151517 - DNA, 120 bp, Artificial Sequence
  ENSG00000105755_11 (sequence is synthesized)
ggactgctgggcactaggcggcagcaaggacggaactccggggtctcttaatagggagagatccggggggacccacgcctgcatcttgcggaaagcggggtggaggtttagggctggact

SEQ ID NO: 151518 - DNA, 120 bp, Artificial Sequence
  ENSG00000105767_0 (sequence is synthesized)
gcggcggcggcggcggcaccatgggccgggcccggcgcttccagtggccgctgctgctgctgtgggcggccgcggcggggccaggggcaggacaggaagtacagacagagaacgtgacag

SEQ ID NO: 151519 - DNA, 120 bp, Artificial Sequence
  ENSG00000105767_1 (sequence is synthesized)
ccaggggcaggacaggaagtacagacagagaacgtgacagtggctgagggtggggtggctgagatcacctgccgtctgcaccagtatgatgggtccatagttgtcatccagaacccagcc

SEQ ID NO: 151520 - DNA, 120 bp, Artificial Sequence
  ENSG00000105767_2 (sequence is synthesized)
cggcagaccctcttcttcaatggcacccgtgccttgaaggatgagcgtttccagcttgaggagttctccccacgccgggtgcggatccggctctcagatgcccgcctggaggacgagggg

SEQ ID NO: 151521 - DNA, 120 bp, Artificial Sequence
  ENSG00000105767_3 (sequence is synthesized)
ggctatttctgccagctctacacagaagacacccaccaccagattgccacgctcacggtactagtggccccagagaatcctgtggtggaggtccgggagcaggcggtagagggcggcgag

SEQ ID NO: 151522 - DNA, 120 bp, Artificial Sequence
  ENSG00000105767_4 (sequence is synthesized)
gtggagctcagctgcctcgttccgcggtcccgtccggctgccaccctgcgctggtaccgggaccgcaaggagctgaaaggagtgagcagcagccaggaaaatggcaaggtctggagcgtg

SEQ ID NO: 151523 - DNA, 120 bp, Artificial Sequence
  ENSG00000105767_5 (sequence is synthesized)
gcaagcacagtacggtttcgtgtggaccgtaaggacgacggtggtatcatcatctgtgaggcgcagaaccaggcgctgccctccggacacagcaagcagacgcagtacgtgctggatgtg

SEQ ID NO: 151524 - DNA, 120 bp, Artificial Sequence
  ENSG00000105767_6 (sequence is synthesized)
cagtactcccccacggcccggattcatgcctcccaagctgtggtgagggagggagacacgctggtgttgacgtgtgctgtcacggggaaccccaggccaaaccagatccgctggaaccgc

SEQ ID NO: 151525 - DNA, 120 bp, Artificial Sequence
  ENSG00000105767_7 (sequence is synthesized)
gggaatgagtctttgccggagagggcggaggccgtgggagagacgctcacgctgccgggtctggtatccgcggataacggcacctacacttgcgaggcgtccaataagcacggccatgcg

SEQ ID NO: 151526 - DNA, 120 bp, Artificial Sequence
  ENSG00000105767_8 (sequence is synthesized)
agggcgctctacgtacttgtggtctacgaccctggtgcggtggtagaggctcagacgtcggttccctatgccattgtgggcggcatcctggcgctgctggtgtttctgatcatatgtgtg

SEQ ID NO: 151527 - DNA, 120 bp, Artificial Sequence
  ENSG00000105767_9 (sequence is synthesized)
gcagaagggttcctatctgacccacgaagccagtggcttggatgaacagggagaagcaagagaagccttcctcaatggcagcgacggacacaagaggaaagaggaattcttcatctgacc

SEQ ID NO: 151528 - DNA, 120 bp, Artificial Sequence
  ENSG00000105767_10 (sequence is synthesized)
ctatccccaccccaggcctaggcctgggcctgggctggggtcccccccactgccagctgcaaggaaccagcaaagacatttaccagagtctgggatggtgggcttctccccccaccacta

SEQ ID NO: 151529 - DNA, 120 bp, Artificial Sequence
  ENSG00000105767_11 (sequence is synthesized)
acacctcagacgcttgggcagggatgggggtgttggatgcctggatctctgtaagggccagaagtgagggcccagaggtctgggtcccccagggggcaggggccaaaggtccagaccccc

SEQ ID NO: 151530 - DNA, 120 bp, Artificial Sequence
  ENSG00000105767_12 (sequence is synthesized)
caagtccagtgagggcagtagggattgggttgggggaagataactgggggaaggccagggcccctaggctacaaaaccaggtcttgtggggagggggtcagtttctgggaagggtggggg

SEQ ID NO: 151531 - DNA, 120 bp, Artificial Sequence
  ENSG00000105767_13 (sequence is synthesized)
gggcagggaaggggaacacagatttctttgggggtcctagaccccatgccagccattgtaagagttccacagagctctgggcacttctttgcaaagccatgtttgcacggtggggggatg

SEQ ID NO: 151532 - DNA, 120 bp, Artificial Sequence
  ENSG00000105767_14 (sequence is synthesized)
ggtggggggagggcgtggaaatagggattctgtgtctttgtgtcataactttgatgggggcagtgagggagacagccccaacccttttctccaatcccccttccccaggttcctgggctc

SEQ ID NO: 151533 - DNA, 120 bp, Artificial Sequence
  ENSG00000105767_15 (sequence is synthesized)
cccttctctctaccttctcccccaacgtctgtcccatccatatttgtctctctgtccacccactcctgggggggccttccccatctctcctccaggccccccggggagggggaaaggagt

SEQ ID NO: 151534 - DNA, 120 bp, Artificial Sequence
  ENSG00000105767_16 (sequence is synthesized)
ttggggaggattcgtggtcttcatggttttatatataatatattaaaaaatcaaaagtctgtatgaaaatatcagattgcacccccctctccccattcctggcttttgccccctttttct

SEQ ID NO: 151535 - DNA, 90 bp, Artificial Sequence
  ENSG00000105767_17 (sequence is synthesized)
tgttcacacacattttgtacggggtggggaggggaatggggagggggtttggcaatctcactaaccaccattaaactgaggagagaacaa

SEQ ID NO: 151536 - DNA, 120 bp, Artificial Sequence
  ENSG00000105771_0 (sequence is synthesized)
attcagttctcgagctccagccctcagcgcatgcgcaggacgagtcgcctgagggaactgatctcagctcgggcccgcgttacatcctcctcctcttcttccttcggcccagctttcctt

SEQ ID NO: 151537 - DNA, 120 bp, Artificial Sequence
  ENSG00000105771_1 (sequence is synthesized)
aggggctgcaacccggacgccgaggccggtttcggagtggggagtgcccattttctctccttcccacgttcctggcccccagacgccatttgcaggcgggtggcttgggtcagcctcccc

SEQ ID NO: 151538 - DNA, 120 bp, Artificial Sequence
  ENSG00000105771_2 (sequence is synthesized)
gcccccacccgactcccgtcacgggagagcgcacaccgcgccccgagaaccaatcagcagccgcgttaggtaaccatgtctgagtctggacacagtcagcctggactctatgggatagag

SEQ ID NO: 151539 - DNA, 120 bp, Artificial Sequence
  ENSG00000105771_3 (sequence is synthesized)
cggcggcgacggtggaaggagcctggctctggtggcccccagaatctctctgggcctggtggtcgggagagggactacattgcaccatgggaaagagagagaagggatgccagcgaagag

SEQ ID NO: 151540 - DNA, 120 bp, Artificial Sequence
  ENSG00000105771_4 (sequence is synthesized)
acaagcacttccgtcatgcagaaaacccccatcatcctctcaaaacctccagcagagcggtcaaaacagccaccacctccaacagcccctgctgccccgcctgctccagcccctctggag

SEQ ID NO: 151541 - DNA, 120 bp, Artificial Sequence
  ENSG00000105771_5 (sequence is synthesized)
aagcccatcgttctcatgaagccacgggaggaggggaaggggcctgtggccgtgacaggtgcctctacccctgagggcaccgccccaccaccccctgcagcccctgcgccacccaagggg

SEQ ID NO: 151542 - DNA, 120 bp, Artificial Sequence
  ENSG00000105771_6 (sequence is synthesized)
gagaaggaggggcagagacccacacagcctgtgtaccagatccagaaccggggcatgggcactgccgcaccagcagccatggaccctgtcgtgggtcaggccaaactactgcccccagag

SEQ ID NO: 151543 - DNA, 120 bp, Artificial Sequence
  ENSG00000105771_7 (sequence is synthesized)
cgcatgaagcacagcatcaagttggtggatgaccagatgaattggtgtgacagtgccatcgagtacctgttggatcagactgatgtgttggtggttggtgtcctgggcctccaggggaca

SEQ ID NO: 151544 - DNA, 120 bp, Artificial Sequence
  ENSG00000105771_8 (sequence is synthesized)
ggcaagtccatggtcatgtcattgttgtcagccaacactccagaggaggaccagaggacttatgttttccgggcccagagcgctgaaatgaaggaacgagggggcaaccagaccagtggc

SEQ ID NO: 151545 - DNA, 120 bp, Artificial Sequence
  ENSG00000105771_9 (sequence is synthesized)
atcgacttctttattacccaagaacggattgttttcctggacacacagcccatcctgagcccttctatcctagaccatctcatcaataatgaccgcaaactgcctccagagtacaacctt

SEQ ID NO: 151546 - DNA, 120 bp, Artificial Sequence
  ENSG00000105771_10 (sequence is synthesized)
ccccacacttacgttgaaatgcagtcactccagattgctgccttccttttcacggtctgccatgtggtgattgttgtccaggactggttcacagacctcagtctctacaggttcctgcag

SEQ ID NO: 151547 - DNA, 120 bp, Artificial Sequence
  ENSG00000105771_11 (sequence is synthesized)
acagcagagatggtgaagccctccaccccatcccccagccacgagtccagcagctcatcgggctccgatgaaggcaccgagtactacccccacctagtcttcttgcagaacaaagctcgc

SEQ ID NO: 151548 - DNA, 120 bp, Artificial Sequence
  ENSG00000105771_12 (sequence is synthesized)
cgagaggacttctgtcctcggaagctgcggcagatgcacctgatgattgaccagctcatggcccactcccacctgcgttacaagggaactctgtccatgttacaatgcaatgtcttcccg

SEQ ID NO: 151549 - DNA, 120 bp, Artificial Sequence
  ENSG00000105771_13 (sequence is synthesized)
gggcttccacctgacttcctggactctgaggtcaacttattcctggtacccttcatggacagtgaagcagagagtgaaaacccaccaagagcaggacctggttccagcccactcttctcc

SEQ ID NO: 151550 - DNA, 120 bp, Artificial Sequence
  ENSG00000105771_14 (sequence is synthesized)
ctgctgcctgggtatcgtggccaccccagtttccagtccttggtgagcaagctccggagccaagtgatgtccatggcccggccacagctgtcacacacgatcctcaccgagaagaactgg

SEQ ID NO: 151551 - DNA, 120 bp, Artificial Sequence
  ENSG00000105771_15 (sequence is synthesized)
ttccactacgctgcccggatctgggatggggtgagaaagtcctctgctctggcagagtacagccgcctgctggcctgaggccaaggagaggaatgtcatgcaggggacctcctgggtccg

SEQ ID NO: 151552 - DNA, 120 bp, Artificial Sequence
  ENSG00000105771_16 (sequence is synthesized)
cagtgtactgcgagggagcacagatgtccatcccccgctggggtggagagcggcagcaggcctgatggatgagggatcgtggcttcccggcccagagacatgaggtgtccagggccaggc

SEQ ID NO: 151553 - DNA, 120 bp, Artificial Sequence
  ENSG00000105771_17 (sequence is synthesized)
cccccaccctcagttggggctgttccgggggtgactgtgagcgatcccaccccaaacctgagatggggtagcccgtcctgtgtcctccacagggacaagcagtgggaggagtctgaatgg

SEQ ID NO: 151554 - DNA, 120 bp, Artificial Sequence
  ENSG00000105771_18 (sequence is synthesized)
tcaccaggaagcccgggctccatcttgacctcctttttcagggacaggagcaacaggcccctcttccctgactctaagcccttccctgtaaggtgaggcagggtctggagagctctttat

SEQ ID NO: 151555 - DNA, 120 bp, Artificial Sequence
  ENSG00000105771_19 (sequence is synthesized)
tggaacagatctggtggttcaaataaacacagtcatgcaagcctgttcttatgttccacttactcctctacccaccatgcagctctgggaagcaggacaaattggacacccagcccttgc

SEQ ID NO: 151556 - DNA, 120 bp, Artificial Sequence
  ENSG00000105771_20 (sequence is synthesized)
gggcagatggagatcagtctctgctaagaagtccctagaaggggttattctgtttcctggggtggcatcaagcctcccctgtgtatgttttggatgggaaaatacactggtgcagctgag

SEQ ID NO: 151557 - DNA, 120 bp, Artificial Sequence
  ENSG00000105771_21 (sequence is synthesized)
tacagcaactaccctcgtgtcttctgctctcacttaaagacagttacctgcctttgggttaaatgcccagttaaatacagtgcctaggctgggcatggtggctcacgtctataatcctag

SEQ ID NO: 151558 - DNA, 120 bp, Artificial Sequence
  ENSG00000105771_22 (sequence is synthesized)
gactccgtctcaaaaaaaaaaaaaaagcctacttttgacttaagaaacagaacttgtccttaaatgtagtaagtacttacccttaatccaaataccatgcctcacccgtacagacagtgc

SEQ ID NO: 151559 - DNA, 120 bp, Artificial Sequence
  ENSG00000105771_23 (sequence is synthesized)
caaataccatgcctcacccgtacagacagtgccttctgttggttaaatacagtggctttcctctcgtaaacctcatctactcttgcttagaaatggcaaccctcacctttaatgtaaatc

SEQ ID NO: 151560 - DNA, 120 bp, Artificial Sequence
  ENSG00000105771_24 (sequence is synthesized)
cagaacctaccctcagttaaatccactctgcgatttggtacagtaccaaccctcatctgctcagttaaatacagtacatgatcttagtttgaggtttcccaaagtatgtctccaaattgg

SEQ ID NO: 151561 - DNA, 120 bp, Artificial Sequence
  ENSG00000105771_25 (sequence is synthesized)
tctcgccaccccaaattaatccatcgttcagtaaagcagtcagctccagtccagctggctgagtctgttcatccattgccctcccccaccccctgccgcccgtggcacatatttgtctcc

SEQ ID NO: 151562 - DNA, 120 bp, Artificial Sequence
  ENSG00000105771_26 (sequence is synthesized)
ctggtttcctcctgctttcaagcatcccatacagccctggtgtttcataccatggggatccagggccttgtgagaaacaactgaagtgagggggggcggggggtcagtgaagaaagcact

SEQ ID NO: 151563 - DNA, 120 bp, Artificial Sequence
  ENSG00000105771_27 (sequence is synthesized)
cagcagggccagagaaggtcaggccagaagtggatagaatgccagtctctacagagggctgaggcctgggagacaggaggcccagcacaggctctggcacagccacttcctgaccgactg

SEQ ID NO: 151564 - DNA, 120 bp, Artificial Sequence
  ENSG00000105771_28 (sequence is synthesized)
tagtaggcaaggagcctcccctctctggccattattccaacatttaagatcatcctcgaggcccttcagagctgtgacattcactgcccttttaccgaaatgcttctaaatcctttgccc

SEQ ID NO: 151565 - DNA, 120 bp, Artificial Sequence
  ENSG00000105771_29 (sequence is synthesized)
cactgtcgtgatctctacagaaccctcctgaccatcctctccagctagataacccagctcttccctgccttgtcaaaatgtctgccccaagtctcatccccacccctgcttccccagggg

SEQ ID NO: 151566 - DNA, 120 bp, Artificial Sequence
  ENSG00000105771_30 (sequence is synthesized)
gtcttcctgctggttgatttgggggtttgccagagtaggaaaggtggtgggggcaacggccagagaaagatgggagacccaaggcaagacggcaccagacagcatgcaactcagtccagg

SEQ ID NO: 151567 - DNA, 120 bp, Artificial Sequence
  ENSG00000105771_31 (sequence is synthesized)
agagttggagcttcagtttcttccatcccagcccctttcagcacaaggctggggacagagagaactgtgccctcccagccctaacctaccacctcctgctggcccagctcagggctgaga

SEQ ID NO: 151568 - DNA, 120 bp, Artificial Sequence
  ENSG00000105771_32 (sequence is synthesized)
ttgttgattggattcacctgtgatcttgtggtcagtgttgccaaggaaggtctgaatcagcacactcttggtgtccctggctgccaaatccaggggcgtgtgaagcatccggtagatggt

SEQ ID NO: 151569 - DNA, 120 bp, Artificial Sequence
  ENSG00000105771_33 (sequence is synthesized)
ggtgaaggaggtgctgcaggtgaccaggatgcccggatgggtgaaatgaggcactctggaaatccggcctagcgtttccaccaccaccaccgtggtgatctggtgaccttggtccaaagg

SEQ ID NO: 151570 - DNA, 120 bp, Artificial Sequence
  ENSG00000105771_34 (sequence is synthesized)
ccctgtcccacctccagggttttgtgcaggggctggctcgttgaggcagtttgacagaggagtcaaactggcagtagccttctgaacagtgggtaagtatgtaccggtcacccgccaccc

SEQ ID NO: 151571 - DNA, 120 bp, Artificial Sequence
  ENSG00000105771_35 (sequence is synthesized)
cctttacatccagcagaggactcaggctgatgctgccagcaggccactgtggacaccagctagatatactgctgcagggaggccttctgctctaggatgggctgcaagatgggcctggcc

SEQ ID NO: 151572 - DNA, 120 bp, Artificial Sequence
  ENSG00000105771_36 (sequence is synthesized)
accaggaatgcctgctgcttgtggctctccagtcccttcatcattcccagcaggtggaactcacgcttttcaattcagacacaggaatacattggtatccttctcaccctccactgcagg

SEQ ID NO: 151573 - DNA, 120 bp, Artificial Sequence
  ENSG00000105771_37 (sequence is synthesized)
aaacatgagcaccgctcaatcagcttctacactggagcaggccatgttgtgctggcagctgcctgggctcaagcgcctgtcatgagcgcagcacttggcctaagaatgtcagccctgcag

SEQ ID NO: 151574 - DNA, 120 bp, Artificial Sequence
  ENSG00000105771_38 (sequence is synthesized)
ccaggctgcctatgttcagatcccagccttgccatctaccacctgtgtggcattggacaagttgctaaagcttgctgggcatctgttttgtctgcaaaataaggtgatgattgtacctac

SEQ ID NO: 151575 - DNA, 120 bp, Artificial Sequence
  ENSG00000105771_39 (sequence is synthesized)
aaataaggtgatgattgtacctacctcctaggggtgttgtggtgattaattgagttcataatggtgtctgttttagtcggttcttgcattgctgtaaggaaatacctgagactgggtaat

SEQ ID NO: 151576 - DNA, 63 bp, Artificial Sequence
  ENSG00000105771_40 (sequence is synthesized)
ctgggagcaggtacttcacatgcccagagcaggagcaagagggggcaggtggcacacactttg

SEQ ID NO: 151577 - DNA, 120 bp, Artificial Sequence
  ENSG00000105771_41 (sequence is synthesized)
ccagagcaggagcaagagggggcaggtggcacacactttgaaaccacgagctcttacaacagattcactattgtgaggacagtaccaaggggctggcgctgaaccatgagaaaccacccc

SEQ ID NO: 151578 - DNA, 120 bp, Artificial Sequence
  ENSG00000105771_42 (sequence is synthesized)
catgatgccgtccctcccgccaggccccacctccaacagtggtgactacaaactacaagttgacatgagatctggtggggacacagatccaaaccatatcagtgcctgacctatgctgag

SEQ ID NO: 151579 - DNA, 120 bp, Artificial Sequence
  ENSG00000105771_43 (sequence is synthesized)
cctcaataaatgttaaatgccaccatcatccacaggtgccaggtctgcattgggcacatagcattttgcaatcctctaactttgcaaataaatgagccaatacatactctttctccttaa

SEQ ID NO: 151580 - DNA, 120 bp, Artificial Sequence
  ENSG00000105771_44 (sequence is synthesized)
gcgcgaggctagcgcaccggcggcgggcggggcgctccggcaggccccgcccccgccttggccattgaaaggtcgctgggacgtccggcgggggtaaccatgtctgagtctggacacagt

SEQ ID NO: 151581 - DNA, 120 bp, Artificial Sequence
  ENSG00000105771_45 (sequence is synthesized)
tcagccggggctgaactctcaggtgctccttgaagcccaggatgctgttaactgggagaaagaccctggcagtctatccctcttaccctccctgccccaactttccaggacctggttcca

SEQ ID NO: 151582 - DNA, 120 bp, Artificial Sequence
  ENSG00000105771_46 (sequence is synthesized)
gctagcgcaccggcggcgggcggggcgctccggcaggccccgcccccgccttggccattgaaaggtcgctgggacgtccggcgggggtgcggcactgagtaaccatgtctgagtctggac

SEQ ID NO: 151583 - DNA, 120 bp, Artificial Sequence
  ENSG00000105771_47 (sequence is synthesized)
gcgcgaggctagcgcaccggcggcgggcggggcgctccggcaggccccgcccccgccttggccattgaaaggtaaccatgtctgagtctggacacagtcagcctggactctatgggatag

SEQ ID NO: 151584 - DNA, 120 bp, Artificial Sequence
  ENSG00000105771_48 (sequence is synthesized)
tcccaggttccttttctggaacagtgatgattgctactgtcttgtaagcatctcacccatgtggcaacatgctgtttcctgtgactttgaatcctcctaatcagccagcatcatgtaggt

SEQ ID NO: 151585 - DNA, 120 bp, Artificial Sequence
  ENSG00000105771_49 (sequence is synthesized)
ccttgtcaccagttttcctggtggggaaatttaggctcggggaaaagtgttacatagcaaggccacacatctgtggctaggagtcatttgattgctaggagtaggaccagtgaccagatt

SEQ ID NO: 151586 - DNA, 120 bp, Artificial Sequence
  ENSG00000105771_50 (sequence is synthesized)
tagcttaaggaagatttattccagggacctgatcacagaaagcagggccctgcagcagatgggaaccaggaagccatcagggtctcattcttcacacttctgcatttgtcttgtttcctg

SEQ ID NO: 151587 - DNA, 120 bp, Artificial Sequence
  ENSG00000105771_51 (sequence is synthesized)
cctctggctttctctccctgctttcacttggcccggcactagctctgtggcccctactttacattacttctttgtccagagctctcagcatatgagtccaggtcttcctcatcttacttc

SEQ ID NO: 151588 - DNA, 120 bp, Artificial Sequence
  ENSG00000105771_52 (sequence is synthesized)
tcagggaggctgtgcatgtgcaggggttgtgtgggaacgctacgtgctttctgctcagttttgctgtgaacctaaaactgctctaaaaaatagcctttaaaaaaaaaatacagtaaactc

SEQ ID NO: 151589 - DNA, 120 bp, Artificial Sequence
  ENSG00000105771_53 (sequence is synthesized)
aaagaatttatacagttggtaagtccatgggttggtatctgagaggattatctctgaattctctgaaattgtgagaaacatggtgtgtatatggtatttttctgagcatggctgtagctt

SEQ ID NO: 151590 - DNA, 120 bp, Artificial Sequence
  ENSG00000105771_54 (sequence is synthesized)
atctgggtggccccgtccacctgttctccctcctctagcctttgcacatgccgttcctttgcctgtttcatcctttctccgctctactcttcttcaaagacccagttcattttatgatcc

SEQ ID NO: 151591 - DNA, 120 bp, Artificial Sequence
  ENSG00000105771_55 (sequence is synthesized)
ctcgctagggcctcaaagagactaggggcagaaatcagacctgactcacttctgggtccccagcattgccctacacagagcctggtgctaaagtgaagtgaagttatataaatatttaca

SEQ ID NO: 151592 - DNA, 120 bp, Artificial Sequence
  ENSG00000105771_56 (sequence is synthesized)
ttttacatccccacccccatcctcccaagatctggagagctgggtgtgggtggtccacttagtttctgcttcagaagagccctggctgccccaagggctataggaagaggacaacactga

SEQ ID NO: 151593 - DNA, 120 bp, Artificial Sequence
  ENSG00000105771_57 (sequence is synthesized)
gagtcaggactggctcaactcctggctctgcccctcaggcaagtcatttcccaccccctcccctttgacgcctcagcatctgcctgtgtaaaatgggggtgataattcccacctttcctg

SEQ ID NO: 151594 - DNA, 120 bp, Artificial Sequence
  ENSG00000105771_58 (sequence is synthesized)
caagcacttccgtcatgcagaaaacccccatcatcctctcaaaacctccagcagagcgggtgagcagagaaggagggaggagggggagccgttagggaagggattgcccccattgatggg

SEQ ID NO: 151595 - DNA, 120 bp, Artificial Sequence
  ENSG00000105771_59 (sequence is synthesized)
attttttttacctccgtagtcaaaacagccaccacctccaacagcccctgctgccccgcctgctccagcccctctggagaagcccatcgttctcatgaagccacgggaggaggggaaggg

SEQ ID NO: 151596 - DNA, 120 bp, Artificial Sequence
  ENSG00000105771_60 (sequence is synthesized)
ccggcaggccccgcccccgccttggccattgaaaggtcgctgggacgtccggcgggggtgcggcactgagtagggggccggcgaccgtcaattcgatactgggttggcaggaatgggggc

SEQ ID NO: 151597 - DNA, 120 bp, Artificial Sequence
  ENSG00000105771_61 (sequence is synthesized)
gggggacggaaataacgtgtaaatgagaaacttatgctctgcgagatccaagtacagcctgcaaactgcccgtcaagtactggggaggccgccccaataacgtgtaaccatgtctgagtc

SEQ ID NO: 151598 - DNA, 120 bp, Artificial Sequence
  ENSG00000105771_62 (sequence is synthesized)
acttttgcccccatctcattcgccttctacacagtagcctaaaggatttctagtatagtgctgaaaagtgtgggccctggagaatgtgtgttctgatcctgtctgttagttcttaccagc

SEQ ID NO: 151599 - DNA, 120 bp, Artificial Sequence
  ENSG00000105771_63 (sequence is synthesized)
tgggtgactttcagttttaaactcccttaaaccacagctctttatctgtaaatagggatggtaactgtacttagcctcttaggagtttcaaggattcagtggaacaatccaggcaaagtg

SEQ ID NO: 151600 - DNA, 120 bp, Artificial Sequence
  ENSG00000105778_0 (sequence is synthesized)
gtgtcaggtgacagcccggaagctgcggaagcggatgagggaagggcggccgtggccctgggggcggcgggagctgctttgcctccaccgatctccctgtgcggccctcatgtgctgtgc

SEQ ID NO: 151601 - DNA, 120 bp, Artificial Sequence
  ENSG00000105778_1 (sequence is synthesized)
tcgctgacacccgaagtccgcggctttccgcacacggtggggtcgtcagacccgctgcccttggcggtcgaagtcgtcgtgcgggcccgcggcggccgcccatggagaaggccaggagag

SEQ ID NO: 151602 - DNA, 120 bp, Artificial Sequence
  ENSG00000105778_2 (sequence is synthesized)
gcggggatggcgtcccccgggggcccgtactgcacatcgtggtggtcggatttcaccacaagaagggctgccaggttgaattctcttacccgcccctgattccaggagatggacatgaca

SEQ ID NO: 151603 - DNA, 120 bp, Artificial Sequence
  ENSG00000105778_3 (sequence is synthesized)
gccacactttacctgaagaatggaagtatttgcccttccttgccttaccagatggcgcacacaactaccaggaagatactgtgttttttcacttgccacccagaaatggaaatggagcca

SEQ ID NO: 151604 - DNA, 120 bp, Artificial Sequence
  ENSG00000105778_4 (sequence is synthesized)
cagtatttggtatctcttgctatcgacaaattgaagccaaggcactgaaagtaaggcaagcagatatcaccagagagactgttcagaaaagtgtctgtgttctaagcaagctgcctctgt

SEQ ID NO: 151605 - DNA, 120 bp, Artificial Sequence
  ENSG00000105778_5 (sequence is synthesized)
atggtttacttcaagcaaaacttcaactcattacacatgcatattttgaagagaaggatttttcccaaatttctattctaaaggagctttatgaacatatgaatagttccttgggaggtg

SEQ ID NO: 151606 - DNA, 120 bp, Artificial Sequence
  ENSG00000105778_6 (sequence is synthesized)
cttcattagaaggatcccaagtatatcttggtctgtcacctcgagatcttgtccttcattttcgacacaaggtcttaatcctatttaagctaattcttcttgaaaaaaaggttctttttt

SEQ ID NO: 151607 - DNA, 120 bp, Artificial Sequence
  ENSG00000105778_7 (sequence is synthesized)
atatttctccagtgaataaattggtgggtgcactgatgactgtgttatccctttttccaggcatgattgaacatggtctcagtgactgttctcagtatagaccccggaaaagtatgtctg

SEQ ID NO: 151608 - DNA, 120 bp, Artificial Sequence
  ENSG00000105778_8 (sequence is synthesized)
aagatggtgggcttcaggaaagtaacccatgtgcagatgattttgtttctgcatccactgctgatgtttcacataccaacttgggaactatcaggaaagtcatggcaggaaaccatggag

SEQ ID NO: 151609 - DNA, 120 bp, Artificial Sequence
  ENSG00000105778_9 (sequence is synthesized)
aagatgctgccatgaagactgaggagcctttgttccaagtggaagacagcagcaaagggcaggaacccaatgataccaatcaatatttgaaacctccatctcgcccatctccagattctt

SEQ ID NO: 151610 - DNA, 120 bp, Artificial Sequence
  ENSG00000105778_10 (sequence is synthesized)
cagaaagtgactgggaaactttggatcctagtgtcttagaggaccccaacttgaaagaaagggaacagctgggatcagaccagacaaatttgtttccaaaggactctgtcccctcagaga

SEQ ID NO: 151611 - DNA, 120 bp, Artificial Sequence
  ENSG00000105778_11 (sequence is synthesized)
gtcttccaattactgtacaacctcaagctaatacgggacaggtagtcctgataccagggctcatttcgggtttggaagaggatcagtatggcatgcccctggccatcttcacaaagggat

SEQ ID NO: 151612 - DNA, 120 bp, Artificial Sequence
  ENSG00000105778_12 (sequence is synthesized)
atctgtgtttgccttacatggcattgcagcagcatcatcttctctccgatgtcaccgttcgggggtttgttgctggagctactaacatcctttttcgacaacagaaacacctcagtgatg

SEQ ID NO: 151613 - DNA, 120 bp, Artificial Sequence
  ENSG00000105778_13 (sequence is synthesized)
ccattgtggaagtagaagaagctctgatccagatccatgatccagaactcaggaagctgcttaacccaaccactgcagacctaaggttcgcagactacctagtgaggcacgtgactgaga

SEQ ID NO: 151614 - DNA, 120 bp, Artificial Sequence
  ENSG00000105778_14 (sequence is synthesized)
atcgggatgacgtcttcctagatggcacgggctgggagggaggtgacgaatggatccgggcccagtttgcggtctacattcatgccctgctggctgccacactgcaattagacaatgaaa

SEQ ID NO: 151615 - DNA, 120 bp, Artificial Sequence
  ENSG00000105778_15 (sequence is synthesized)
agatattatcggactatgggacaacttttgttacagcatggaagaatactcacaactacagggtgtggaacagcaacaagcatccagcacttgcagaaataaatccaaaccatccatttc

SEQ ID NO: 151616 - DNA, 120 bp, Artificial Sequence
  ENSG00000105778_16 (sequence is synthesized)
aaggccaatactcagtatcagacatgaagttaaggttctcacattctgttcagaatagtgaacgtggcaaaaaaattggaaacgtcatggtcacaactagccggaatgttgtacaaacag

SEQ ID NO: 151617 - DNA, 120 bp, Artificial Sequence
  ENSG00000105778_17 (sequence is synthesized)
gaaaagctgttggccagtcagttggaggagctttttccagtgcaaagacagctatgtcttcatggctttccactttcaccacttccacctcccaaagtctcactgagccaccagatgaga

SEQ ID NO: 151618 - DNA, 120 bp, Artificial Sequence
  ENSG00000105778_18 (sequence is synthesized)
agccttgagcaaggcgtcagaggctgctattgctttctgaggtttaagtgtcccctgtctgtctgctgctcccaggctgttactagccacagatccacagcaggggaccatatgtcgaac

SEQ ID NO: 151619 - DNA, 120 bp, Artificial Sequence
  ENSG00000105778_19 (sequence is synthesized)
tgtttacatggatgttgctctaagtgaatgtttcgggatgccgaaatgatgaaatcacagccatagcagggatggctttccaggttggggtttcaattgactacttttatttcagtctga

SEQ ID NO: 151620 - DNA, 120 bp, Artificial Sequence
  ENSG00000105778_20 (sequence is synthesized)
gcctgattaaaacatacagtgaaccttctaatgaattttgagttctgatattgtacattggtttactttagaagagtttttacttatgtaaattttgttctgttttggtgtttgaatatc

SEQ ID NO: 151621 - DNA, 120 bp, Artificial Sequence
  ENSG00000105778_21 (sequence is synthesized)
tagatggtcactgtaatttatacttgctaaaattaatttatattaccattttctctaaagttggccttaaaacgtgcttataaagtgaaggggtcatacagttgggccttcattattttg

SEQ ID NO: 151622 - DNA, 120 bp, Artificial Sequence
  ENSG00000105778_22 (sequence is synthesized)
ctgaattatgtgatgatttttttgctttctacccacaaaacatttattaattcacttcctcccagaaacatgaaagttagaggtggtagttctgaggattgggtgttttgttttacgttt

SEQ ID NO: 151623 - DNA, 120 bp, Artificial Sequence
  ENSG00000105778_23 (sequence is synthesized)
ttagtttgttctttccacatccttaaaaacttggtttcagacatcaaggagtatcactgtgctttcctcctctttataactgtgcaggtgggtgtgcagagaaatagcagagtgatggtt

SEQ ID NO: 151624 - DNA, 120 bp, Artificial Sequence
  ENSG00000105778_24 (sequence is synthesized)
cgatgatactgaagcagtttaacatgaatgtgtctgtagggcaatactttcaaagaagacctatgtgtttatttttcaaccgcagtcatgttgcagtcttacaagcactttttttttatt

SEQ ID NO: 151625 - DNA, 120 bp, Artificial Sequence
  ENSG00000105778_25 (sequence is synthesized)
cgcagtcatgttgcagtcttacaagcactttttttttattccagagtttgtgccatctgtttctctttttttttttggggggggggggggggcggggtctcactctatcgcccaggctgg

SEQ ID NO: 151626 - DNA, 79 bp, Artificial Sequence
  ENSG00000105778_26 (sequence is synthesized)
tcagcctcttgtttcttttttaaacagttttctattgggtgtttgcagacctacagcttttctcgtagtcttattcata

SEQ ID NO: 151627 - DNA, 120 bp, Artificial Sequence
  ENSG00000105778_27 (sequence is synthesized)
tgtttgcagacctacagcttttctcgtagtcttattcataaagcttttcaaagcacttagtcttctacttccctaactgaaagtcctcctataatcaatccctacccccttctagaagta

SEQ ID NO: 151628 - DNA, 120 bp, Artificial Sequence
  ENSG00000105778_28 (sequence is synthesized)
agtattaaatagaaatctcatcttagtttatattcagcaaagtaagaggcaagagaagaaaactgcagccttgacatctgtcatctgagaaaggatatctggtttcatgttaggcacata

SEQ ID NO: 151629 - DNA, 120 bp, Artificial Sequence
  ENSG00000105778_29 (sequence is synthesized)
catgcatgtgtgtgccatctactgatgatttgtacacagctggacctcgtgtgtttgccatgctcagctctcatttgcttttcaaggatacctgggatggctgttctcagagagtactta

SEQ ID NO: 151630 - DNA, 120 bp, Artificial Sequence
  ENSG00000105778_30 (sequence is synthesized)
cggggaacagactgccttttagtaacaagggatacttgggaaatacattgtgagtatgatctatcccagattgctggggaaataaaggagggccctgattatatttggtttattcctcac

SEQ ID NO: 151631 - DNA, 120 bp, Artificial Sequence
  ENSG00000105778_31 (sequence is synthesized)
taaatgtttaagaagtaaatgctcccaaggcatttgaaatgaacatagaaacataatctaaatgtctctaaattttccactttgtgttttctaaacacaaattgtattactcatttgagc

SEQ ID NO: 151632 - DNA, 120 bp, Artificial Sequence
  ENSG00000105778_32 (sequence is synthesized)
ataactcaagaattcagcgatgataaattgaagggctgaatgtgagaactccattaattccacttcttccaagaaagttaacctcaggaaatgctgtttgaagagaagaaagtagtacca

SEQ ID NO: 151633 - DNA, 120 bp, Artificial Sequence
  ENSG00000105778_33 (sequence is synthesized)
aacaaaaaccttaaacagtacttgaatcttttttgcgctgagactataaagaattcattctaacatcttgtttcataagggccacatcattcgttggagcatgatagtgtgatttgtgta

SEQ ID NO: 151634 - DNA, 120 bp, Artificial Sequence
  ENSG00000105778_34 (sequence is synthesized)
caattgttacctctcagctgctgaagttcacacttcaaggatctaggagctctgtgaggggtcgtccagcaagatgctgatttgtctttcagttggtatggtttctgtgatcggggtaaa

SEQ ID NO: 151635 - DNA, 120 bp, Artificial Sequence
  ENSG00000105778_35 (sequence is synthesized)
ctcccgtctcccactattcaaaagcagcccaactcatgctttggaatccactgaaataaaaatagttacatgaagtttaactttgctttaatatcacttgttcctcattgaatatacact

SEQ ID NO: 151636 - DNA, 120 bp, Artificial Sequence
  ENSG00000105778_36 (sequence is synthesized)
ttgatcggactttctattaacatttctagctaagagtttgactcttagtggtcactttactgactttccaacataaaacaagtatctcagaagatacaactttcatcatagaaatggtca

SEQ ID NO: 151637 - DNA, 120 bp, Artificial Sequence
  ENSG00000105778_37 (sequence is synthesized)
aaagaccatagctatatttccttcaggttctgggaggtggagtttttcaaggaacactggctgttgtattgttggcaggggccccaaggcagctcgcacaatcaaaggcaggaagcctca

SEQ ID NO: 151638 - DNA, 120 bp, Artificial Sequence
  ENSG00000105778_38 (sequence is synthesized)
cccctggtcctgtgaccccccccccccacacacacacatacttcaggcttggattctaggctccaagtggccagcatagaagcagcagcctctctccaaaccctggctctgtgagccata

SEQ ID NO: 151639 - DNA, 120 bp, Artificial Sequence
  ENSG00000105778_39 (sequence is synthesized)
ggaaccagcactaggtcatcttctgacatagccctggtgaaggtgtgtgtgtgttggtggccacacttgctaaggcttttgtgtctaagaattgagtatttgtacctaggtgtgagggaa

SEQ ID NO: 151640 - DNA, 120 bp, Artificial Sequence
  ENSG00000105778_40 (sequence is synthesized)
ccagggtcagccagcctttttcagatggcgccaggcacacacactacatcaatggcttgctggtggcttcaccactatccaggtgacttaaaagagtgtttggaaaatgtccctggtata

SEQ ID NO: 151641 - DNA, 120 bp, Artificial Sequence
  ENSG00000105778_41 (sequence is synthesized)
cttcaattcctactagacattgtaatgacaatggtgtaggtaaggaagagagagttaaaactaccagttgtggaatagaaatagttgcatgtccaaagaaggcttagaatgattgtgcat

SEQ ID NO: 151642 - DNA, 120 bp, Artificial Sequence
  ENSG00000105778_42 (sequence is synthesized)
atgcagttggctcacataaccagcatgaacagtctctccccaaatccattagtgattcactaccccccgccaagcacagccctaaaacaattctcgtccactttcctgttaagaaacaca

SEQ ID NO: 151643 - DNA, 120 bp, Artificial Sequence
  ENSG00000105778_43 (sequence is synthesized)
gcagcaatatactttggcagcaaaccagagcatatgatgtaacttgctcaaccttatcttcctttccaaattctatactaagcatctgatgttttttagaataatttcctttggaaagcc

SEQ ID NO: 151644 - DNA, 120 bp, Artificial Sequence
  ENSG00000105778_44 (sequence is synthesized)
aacgagaaaacaaattaggaagagagagaagtgagaaattgttgcatggctgaggaacaagatgcttaaaatctgaatggaagtattttgagagcagtatttcatgtgctaagggttata

SEQ ID NO: 151645 - DNA, 120 bp, Artificial Sequence
  ENSG00000105778_45 (sequence is synthesized)
agaattcttttagaaagggattagaattttactctgctagttacaagttttaaagtcacgctacggcattatcaccctggcaggtaggttttgttattgttttacattttgtgaaaaaaa

SEQ ID NO: 151646 - DNA, 120 bp, Artificial Sequence
  ENSG00000105778_46 (sequence is synthesized)
gttttgtagaagttacagctagtggtcttttccctccagagccagtgatgagtgtgggagcacttcagctctgtaaggggccagcgttctgacctttaaccacatgaactaacctgcgtc

SEQ ID NO: 151647 - DNA, 120 bp, Artificial Sequence
  ENSG00000105778_47 (sequence is synthesized)
agcagttgcagaaagtagcctgttaggacagcagctgctaagcgttgcctggtattttagtggggagaaggctgggactcttcatggcatcaacacttgcatgctctgaatctttgatca

SEQ ID NO: 151648 - DNA, 120 bp, Artificial Sequence
  ENSG00000105778_48 (sequence is synthesized)
gagatgaggtgccatttttggcatttccaccccgtctcgtggtagcctttaaaagtggtagaagatgctgccctaattccccgaggatgattgtcattccatgcagcataatgtgccgtg

SEQ ID NO: 151649 - DNA, 120 bp, Artificial Sequence
  ENSG00000105778_49 (sequence is synthesized)
aggagttttctcattccagttctttggacttcgtaacattggaattgtttttccataatttccggcattccataaatatttgtcaaggacaaagaaaaggaatgtggatgtttattcttt

SEQ ID NO: 151650 - DNA, 120 bp, Artificial Sequence
  ENSG00000105778_50 (sequence is synthesized)
tcatatgaatgactttgtacacatgacttcctgctttcattatgaaggaggggaaactagttcccttgtatggtaactccaaagttaaaaaattgtgcatgtctgaggggttgaatatat

SEQ ID NO: 151651 - DNA, 120 bp, Artificial Sequence
  ENSG00000105778_51 (sequence is synthesized)
tttgtaaaactctaaatacatttgtatttctgtgctgttctaaagtttacctttttacttatatgaaagataactatatatttaaatcatgtaagtggaacacagtgtagggggtttttc

SEQ ID NO: 151652 - DNA, 120 bp, Artificial Sequence
  ENSG00000105778_52 (sequence is synthesized)
caatcttatttttcatcaggttctcacacccacgtagtatgctgctcaaattttttcgtgtgtgcaaatgtgaacatttgaacatttcagttaggtactgagccagaaaaggtaattgaa

SEQ ID NO: 151653 - DNA, 120 bp, Artificial Sequence
  ENSG00000105778_53 (sequence is synthesized)
gttttcagaaagcttctgtgcttagaaaatattttgttgttttcttaaaatattagtattttgtagctggaagaataagatcaaggcttacatgtttcaggccacttggtcactggttcc

SEQ ID NO: 151654 - DNA, 120 bp, Artificial Sequence
  ENSG00000105778_54 (sequence is synthesized)
tgaatttagaaaacattggattaatgagttggtgaaggcatttagtggttacaaaaacagtttaaatatttatgattaaaggcttttcacaaacctttttaaagaaaatttagctgagaa

SEQ ID NO: 151655 - DNA, 120 bp, Artificial Sequence
  ENSG00000105778_55 (sequence is synthesized)
aacttaaaaagttttctaaggaagtttaactgtggcacatgttttgatcagaaaggtagttctctttgctctggtagttttaaagtttgtactagttctttatttctgttgtttttttaa

SEQ ID NO: 151656 - DNA, 120 bp, Artificial Sequence
  ENSG00000105778_56 (sequence is synthesized)
attgttaaaattataaatcacgtctaatcatactgaattgtaaaacttgaattgtatctttattttaagcataaatgagaataaaatgatcctgttcaccctgcctacagttggacttga

SEQ ID NO: 151657 - DNA, 120 bp, Artificial Sequence
  ENSG00000105778_57 (sequence is synthesized)
gctgccagcctctgtatggtttacttcaagcaaaacttcaactcattacacatgcatattttgaagagaaggatttttcccaaatttctattctaaaggagctttatgaacatatgaata

SEQ ID NO: 151658 - DNA, 120 bp, Artificial Sequence
  ENSG00000105778_58 (sequence is synthesized)
cacatcgtggtggtcggatttcaccacaagaagggctgccaggagggagcacacgagcgaatgaggtgggaactggagtgcacgagcactggagctgactggctgcttcagagctgatgg

SEQ ID NO: 151659 - DNA, 120 bp, Artificial Sequence
  ENSG00000105778_59 (sequence is synthesized)
gatcaaactccactcagatccactgcattccacccctcgtggagggaatgcacaggtgagtgggtacaggagccaaagcgagcgcttttggacaccggcaggagcaaactctgtgcaggc

SEQ ID NO: 151660 - DNA, 120 bp, Artificial Sequence
  ENSG00000105778_60 (sequence is synthesized)
cctgcagcaacatctaggtgggggtgcttgtgacccccaaagccccagagggtgtgttacagtgttcatttcgctcttccatctgcaaacagcttaagtgttaacagatcagtgggccct

SEQ ID NO: 151661 - DNA, 120 bp, Artificial Sequence
  ENSG00000105778_61 (sequence is synthesized)
ctgcctttttgcatgaggcaggtgtcctccaccagggcagtgtgaccgccttttgtatccacactcgtggctcccaagctcttgtccagcgtccaggaaaaatgaggtcgcttgaacgaa

SEQ ID NO: 151662 - DNA, 120 bp, Artificial Sequence
  ENSG00000105778_62 (sequence is synthesized)
ttgaagggtggtaaatgcaggggattttattgccaatgaaagtggctctcagtggaaaggggagctgaaaaagagatggggcaggtaggtaagcttcccctgaagtccagccatctccaa

SEQ ID NO: 151663 - DNA, 120 bp, Artificial Sequence
  ENSG00000105778_63 (sequence is synthesized)
ccagattcttttccaaagttaggccatcaagctgtccctctgaagtcaagccacttctctccagtgtccagccgtagtccctgacatctagctgcgtctctctgccagctgagtcagggg

SEQ ID NO: 151664 - DNA, 120 bp, Artificial Sequence
  ENSG00000105778_64 (sequence is synthesized)
tttttataggcacaggatgggggctgggcaggccatggatagtttaatgaaaggcaatattctagtggaaaaacaagttctcactttgggccacgggtttcaggcttttccacttcaagg

SEQ ID NO: 151665 - DNA, 120 bp, Artificial Sequence
  ENSG00000105778_65 (sequence is synthesized)
tggtgttttattggggacccacccttttctgcctagaatatctctacctccatccctatcaatatatgttgacacaagcaaaatgtcattttatataatagagtcctgatattctgtttc

SEQ ID NO: 151666 - DNA, 120 bp, Artificial Sequence
  ENSG00000105778_66 (sequence is synthesized)
actgtggtgggattctcataataacaatttctacgttaaaattaaaatacacattatctattttcatgctcataatccaagtactccaatttaaggaatgtgaaataatagctctttaat

SEQ ID NO: 151667 - DNA, 120 bp, Artificial Sequence
  ENSG00000105778_67 (sequence is synthesized)
tctagggaaaaaatagaagataacagcctttattcacttgaatgtataaaagtacatgctttaaactaagatacttatttccatttaatttaaaaacaaacttcttgatgggctcagtga

SEQ ID NO: 151668 - DNA, 120 bp, Artificial Sequence
  ENSG00000105778_68 (sequence is synthesized)
cacatgcttgtaatcccagccctttgggagaccagggtgggaagattgcttgatcctaggtgtttgagagcagcctgggcaacgaaaaatgaaataattaactgggtgcagtggtgcacg

SEQ ID NO: 151669 - DNA, 120 bp, Artificial Sequence
  ENSG00000105778_69 (sequence is synthesized)
cctgtagtcccagctactcaggctgaagtgggaggaccacttgagcacaggaggccgaggctgcagtgagccctgatcacaccagtgcacagcagcttgagtgacagagcaagaccctgt

SEQ ID NO: 151670 - DNA, 71 bp, Artificial Sequence
  ENSG00000105778_70 (sequence is synthesized)
ggcaaaatccaggaggtggaagtttctgtgagccaagagcatgccactgcactccagactgggcgacagag

SEQ ID NO: 151671 - DNA, 120 bp, Artificial Sequence
  ENSG00000105778_71 (sequence is synthesized)
ccactgcactccagactgggcgacagagccagactgtgtctcaagaaaaataaaaaataaaaaatcttacttttaattggtaagtctcaaaagtaccattttacctctgcagtatacact

SEQ ID NO: 151672 - DNA, 120 bp, Artificial Sequence
  ENSG00000105778_72 (sequence is synthesized)
gcagtatacactttatatttctgaacatctaatgcagtcatgaaaatgttgtcatattgaggtataggagtgtaaagcgcagctgtttcaaatctatacttgacaaatacagtgatttgt

SEQ ID NO: 151673 - DNA, 120 bp, Artificial Sequence
  ENSG00000105778_73 (sequence is synthesized)
tgccaactttgtagtcgagtgaggaataaatgccaattgctttgtagtattgacttttcaagagatatgagaaagaaaccataactgagaagaaaacatgtctgatgcccagggcttttt

SEQ ID NO: 151674 - DNA, 120 bp, Artificial Sequence
  ENSG00000105778_74 (sequence is synthesized)
cgttttcttttgttttaagcagaaaacatgacagagctttgactttgctgcctaaaatattatgactattaagaaaataaatactttgtgcttctgagtgaaaagaaaaaatctctgaga

SEQ ID NO: 151675 - DNA, 120 bp, Artificial Sequence
  ENSG00000105778_75 (sequence is synthesized)
taccgagaaaggaagcaaagaggcagagcagttgtgaagcactctccttccttctgtaagccgttgatatacgtagggtccatggatgtggttaatgtgtgtgctaatagtttggcagtg

SEQ ID NO: 151676 - DNA, 120 bp, Artificial Sequence
  ENSG00000105778_76 (sequence is synthesized)
tggcttctatttgccgtatggttctctggcagtggaacatagtgcattgttaaaaagtgaacagagggtattcctgaagtactcagagttcacactagggtactatgttactttgttttt

SEQ ID NO: 151677 - DNA, 120 bp, Artificial Sequence
  ENSG00000105778_77 (sequence is synthesized)
gtagttttcttgttttctcagtctttttttctgaggacaaagtaaatggaatctgactagaggacaccaatttggtttataaactatgacaaagcatggtaatttttattactggaggac

SEQ ID NO: 151678 - DNA, 120 bp, Artificial Sequence
  ENSG00000105778_78 (sequence is synthesized)
aaacatgtcaccctttcttgcatagttcatttagcatttagaaaaattgcttttttattccttgtgatcagagtcagcttttactttttagaaatcagctattgtcttatttttccctcc

SEQ ID NO: 151679 - DNA, 120 bp, Artificial Sequence
  ENSG00000105778_79 (sequence is synthesized)
tcttctcccttagtaatcttgtaaatctaaaaattagaatcaaaatagatttggccacatgaatattggttacatacaaagtcatatttgaaatttgtgtgatttagtagcagcctttct

SEQ ID NO: 151680 - DNA, 120 bp, Artificial Sequence
  ENSG00000105778_80 (sequence is synthesized)
ggggatatttgatacattttttatgcattgcatgtattaatgccctaccagacatcttttttttttttaagagaaaagcaaacagaagtttattaacatgattaccttgtgaatacatgg

SEQ ID NO: 151681 - DNA, 120 bp, Artificial Sequence
  ENSG00000105778_81 (sequence is synthesized)
gagataactcagaaatgagaaaatctcaagagtagatctcaaagaggtggcttcaacttcagacttacacacttcattccccaacacaaagaatgaagggtgtaggccagacaaccctca

SEQ ID NO: 151682 - DNA, 120 bp, Artificial Sequence
  ENSG00000105778_82 (sequence is synthesized)
ttctctgttaagactacctggtgaagaagtgcagggtaaacaaaagtgaggtttgttatgcagattgaacttgtgctttttgtgttgataagagtttccagtgatttaggcctttaatcc

SEQ ID NO: 151683 - DNA, 120 bp, Artificial Sequence
  ENSG00000105778_83 (sequence is synthesized)
gccagatcctgtctcaaacaaataaatgaaagtttccagtgatttagtcatccttctcttcctggtacagaaaggaagacactcttacaaatgtagatattctttataaaataaatttct

SEQ ID NO: 151684 - DNA, 120 bp, Artificial Sequence
  ENSG00000105778_84 (sequence is synthesized)
cttacaaaaatacaacttttactgttttcagagcttctcctgtgtctgtttcccaaaataatcagtttaaagtaatcctgtgccaaagaggcatatttggaatggcatatactggtgtcc

SEQ ID NO: 151685 - DNA, 120 bp, Artificial Sequence
  ENSG00000105778_85 (sequence is synthesized)
tacagacatattttggggtgtcatgtcctgaactctacagttggctccctccgccttatggaaatgtaaataaaatctttggagaccattggtttccactgagctccttcatcagctcca

SEQ ID NO: 151686 - DNA, 120 bp, Artificial Sequence
  ENSG00000105778_86 (sequence is synthesized)
agaggtccctcctgctaaagttcgacgtcaccaatctaagttatctgacctgagaaatcaggagaaagagaaacaaaagtcaaatccccaaacaggctagttttagctggcatgataagg

SEQ ID NO: 151687 - DNA, 120 bp, Artificial Sequence
  ENSG00000105778_87 (sequence is synthesized)
gagtctcctctgctttaacccttaaaaggaaagtaactttgaaactactgatttactttttgttccttatttctgctttcttcagccttttacccatcccaaaatactcactacccacat

SEQ ID NO: 151688 - DNA, 120 bp, Artificial Sequence
  ENSG00000105778_88 (sequence is synthesized)
tgcagagatgagctctctcaacttcttgttctgaaggttacgtgactggtgaattgttctttgctcaaataaactgttaaatttatcttggcagactctattttgatccccaaatttgat

SEQ ID NO: 151689 - DNA, 120 bp, Artificial Sequence
  ENSG00000105778_89 (sequence is synthesized)
gatccccaaatttgatttagatttggggccattaaatttcactatttaataataaccctactggatgagaataagtgtttctcaatttctggtgatatggtttggctgtgtccccaccca

SEQ ID NO: 151690 - DNA, 90 bp, Artificial Sequence
  ENSG00000105778_90 (sequence is synthesized)
atggtttggctgtgtccccacccagaatctcatcttgaattatattccccataatccccacgtgtcaatggcaggaccaggtagaggtaa

SEQ ID NO: 151691 - DNA, 120 bp, Artificial Sequence
  ENSG00000105778_91 (sequence is synthesized)
tggcatttcccctgcttgcactcactccattccactgccctgtgaagcaggtgcctgcttctcctttgccttccgccatgattataagtttcctgaggtttcctccctagcattacagaa

SEQ ID NO: 151692 - DNA, 120 bp, Artificial Sequence
  ENSG00000105778_92 (sequence is synthesized)
tcctttataaattacccagtctcaggtgttttttcatagcagtatgaggactgatatatctgggtacttaacattggttttcgtctgtggtttttttacatatacttagggctgccatgt

SEQ ID NO: 151693 - DNA, 120 bp, Artificial Sequence
  ENSG00000105778_93 (sequence is synthesized)
ggtttttttacatatacttagggctgccatgtacagctatatgtacttcacgacacaattgcagggagagccattcatgtaaatgacaatgtctgtggttctccctggagctgtgcagtg

SEQ ID NO: 151694 - DNA, 120 bp, Artificial Sequence
  ENSG00000105778_94 (sequence is synthesized)
aggcagcctactacacttatcatcacttctgtggtgctggttagtttaattggcattactatttaaattgtcttgattcaactgagtatttaagagtctcatgttaacttccaagagaat

SEQ ID NO: 151695 - DNA, 120 bp, Artificial Sequence
  ENSG00000105778_95 (sequence is synthesized)
tcctctttagcctctgtgccatgaaattttgtgtctgtgtggattaatttggatatatagaaaggggacagatattcagtcagtatttaaaacatgaaaaacatacaatttaagatttaa

SEQ ID NO: 151696 - DNA, 120 bp, Artificial Sequence
  ENSG00000105778_96 (sequence is synthesized)
atataccatcaatttggaaataacattcttttttttttcatgcttaatctctgataattagggattatcagatagcaactgggcattctacaattcagtcatattgtgacattactcagt

SEQ ID NO: 151697 - DNA, 120 bp, Artificial Sequence
  ENSG00000105778_97 (sequence is synthesized)
taacatcaaactctgtaagggctcactcagtcccacaaaactgccctcacttcaggcaccaatcacaagtcctgggtccccaggccaccccacctctgtctgactttgctaccaattcag

SEQ ID NO: 151698 - DNA, 120 bp, Artificial Sequence
  ENSG00000105778_98 (sequence is synthesized)
ggcttcccataaccttctctgaggtttgataatttgccagaatgactcataaaactcaggaaaactcttcgcttgcattcactggtttattattaaaggacacaattcaggaacaaccag

SEQ ID NO: 151699 - DNA, 120 bp, Artificial Sequence
  ENSG00000105778_99 (sequence is synthesized)
atggaagagatgaataaggcaaggtgttggttggtgggtcagggagtttccatgccatctttagcatgctgccctcccagcactttgatgtgttcaacaacccaggaactcactgaatcc

SEQ ID NO: 151700 - DNA, 120 bp, Artificial Sequence
  ENSG00000105778_100 (sequence is synthesized)
cattgtttaggggtttttatggaggtttcattacataggcgtgattgactaaaccattggccattggtgatagaattcaatctccaacaccgttcctgggaggtcaaggggtatggctga

SEQ ID NO: 151701 - DNA, 120 bp, Artificial Sequence
  ENSG00000105778_101 (sequence is synthesized)
aagttccatccctttaatcaaggcttggtctttccggtgatcagcctctgtcatgaagctatctaggtcctcctaccactagagtcaccttagcataaactcaagtatgattgattgggg

SEQ ID NO: 151702 - DNA, 120 bp, Artificial Sequence
  ENSG00000105778_102 (sequence is synthesized)
cttattatgaataacaaaagatgctcctattactcaggaaattccaaggatgttaggagttttgttccaggaatgagggacaaggaccaaatatatgtatttttaattatatcacatttg

SEQ ID NO: 151703 - DNA, 120 bp, Artificial Sequence
  ENSG00000105778_103 (sequence is synthesized)
cacatttgaatattctgaaaagtttgcagtagtataatgttttaaaaaactagaaaaactcaacaatagaggattgatattaaaataatgaaataatatatatccattagaaaggagttt

SEQ ID NO: 151704 - DNA, 120 bp, Artificial Sequence
  ENSG00000105778_104 (sequence is synthesized)
acaggtgtgagccactgcacccggccagaaaggagttttaataaacagttttgaacttgattagcaatttcagcagtttccaaatggaagtattcgttggtagaaaatctaccagcagga

SEQ ID NO: 151705 - DNA, 120 bp, Artificial Sequence
  ENSG00000105778_105 (sequence is synthesized)
ttcgttggtagaaaatctaccagcaggagaagagaattatagaaagctgccaacacagtacaggcagtctgcaatttatgaaagagttgtgttctaaaagttggctgtttgaaattctga

SEQ ID NO: 151706 - DNA, 120 bp, Artificial Sequence
  ENSG00000105778_106 (sequence is synthesized)
acactttcccaaagaaacaatgttgtaaatactctgggcccaagtcaggctagaacagccttaattttacccatggaattcttggaatacatgtagtatccacacttctatttatgacag

SEQ ID NO: 151707 - DNA, 120 bp, Artificial Sequence
  ENSG00000105778_107 (sequence is synthesized)
ttttgagtcaactgcgtcttcagtttcagctagaaccatctaaaactgatcttccttcagtagagttgcgaattcggagaatatgttaagcatagcatagcttcagatattaattaaact

SEQ ID NO: 151708 - DNA, 120 bp, Artificial Sequence
  ENSG00000105778_108 (sequence is synthesized)
tctggccaatggcaacctgttaactaaatcttcagaacagaagatagatttctacacctgcccttaactccaagattataggatggaaataagatttccttcagaagttaagaactgctt

SEQ ID NO: 151709 - DNA, 120 bp, Artificial Sequence
  ENSG00000105778_109 (sequence is synthesized)
gtgattgtcttatttatttatttatttttaatcctaaaagcaatacatatccatttaaaaataattaaaagtagaggtagtatgctccacttgctgtgaaatcatttagaaaattgtttt

SEQ ID NO: 151710 - DNA, 120 bp, Artificial Sequence
  ENSG00000105778_110 (sequence is synthesized)
tgtgtacacatacaacacagctagaacaagtgtggctaaaaaaagcaatgcagttggtaaataaagatgaagtttgttaggttgttcatattcttttaactttctgtaagtttgaaaatt

SEQ ID NO: 151711 - DNA, 120 bp, Artificial Sequence
  ENSG00000105778_111 (sequence is synthesized)
tcaaaacaaaatggtggcgattttttttaaagtaacaggagtattcgcttatcttccatccccaacctcattctcctctccagagttaaaacctctgctagcagtgtatatagattttca

SEQ ID NO: 151712 - DNA, 120 bp, Artificial Sequence
  ENSG00000105778_112 (sequence is synthesized)
agtgtcttttcaagcatgttttttaaatccatttacagaaaattttttttgcacaaacggaatcacagtatatacagaatcatactacagtcaccagtcaagggattttgtccaagaccc

SEQ ID NO: 151713 - DNA, 120 bp, Artificial Sequence
  ENSG00000105778_113 (sequence is synthesized)
caagagcaggttcttggctctcatgcaggaaagaattcagggcaagtcacagagtagagtgaagttaaaatgatttactacagactactgaattacagaatagggcatcctcagagagca

SEQ ID NO: 151714 - DNA, 120 bp, Artificial Sequence
  ENSG00000105778_114 (sequence is synthesized)
tagggcatcctcagagagcaagaggagggtgcacccatttcaatataatgctaatatgggttattaagaaaagtgtactttggccaggcgcagtgctcacgcctataatcccagcacttt

SEQ ID NO: 151715 - DNA, 120 bp, Artificial Sequence
  ENSG00000105784_0 (sequence is synthesized)
gtgtgtgtgtggagctcgggtgccaagggcgagccgtcagtccccgggtgcgagtccctgctgtcttccacacccttcctccctccaggctcctttcctacatccttcccgcgcccccac

SEQ ID NO: 151716 - DNA, 120 bp, Artificial Sequence
  ENSG00000105784_1 (sequence is synthesized)
ggttgcggaccgagcgagaacccccttaagcaggtgtggggggcgtgcggggtggcacgagacaaaaggggcacgggggtaagcccgccatggcctcccggagcctggggggcctgagcg

SEQ ID NO: 151717 - DNA, 120 bp, Artificial Sequence
  ENSG00000105784_2 (sequence is synthesized)
ggatccgcggcggtggcggcggaggcggcaagaaaagcctgagcgcccgcaatgctgcggtggagaggaggaacctgatcaccgtgtgcaggttttctgtgaagaccctgattgatcggt

SEQ ID NO: 151718 - DNA, 120 bp, Artificial Sequence
  ENSG00000105784_3 (sequence is synthesized)
cttgctttgagacaattgatgattcttctcctgaatttaacaattttgcagctattttggaacagattttaagccaccggctaaaaggtcaagtaacctggtttggttatgaaagtcctc

SEQ ID NO: 151719 - DNA, 120 bp, Artificial Sequence
  ENSG00000105784_4 (sequence is synthesized)
gtagcttctgggactatatcagagtggcttgccggaaagtttcacagaattgtatctgcagcattgaaaatatggaaaatgtcagttcttctagagctaagggtagagcctggatcagag

SEQ ID NO: 151720 - DNA, 120 bp, Artificial Sequence
  ENSG00000105784_5 (sequence is synthesized)
tagcactcatggaaaaacatttatctgaatacatctctacagctctgagagacttcaaaacaaccaggagattttatgaagatggagcaattgtcttgggtgaagaagcaaatatgcttg

SEQ ID NO: 151721 - DNA, 120 bp, Artificial Sequence
  ENSG00000105784_6 (sequence is synthesized)
ctggcatgcttctaggactcaatgctattgatttcagtttctgcctaaagggagaggggctggatggcagttttcctgctgtaatagactatacaccatatttgaagtatatccaaagtt

SEQ ID NO: 151722 - DNA, 120 bp, Artificial Sequence
  ENSG00000105784_7 (sequence is synthesized)
ctgatagtatcagcagtgatgaggaggagctaaggactttgggaagcagtggtagcgaaagcagtactccagagaatgtcggacctcctttcctcatggatgagaacagttggttcaaca

SEQ ID NO: 151723 - DNA, 120 bp, Artificial Sequence
  ENSG00000105784_8 (sequence is synthesized)
atcagcttaccctggaacagaagggttaccttgaagaactcttacgacttcgagagaaccaactatctgaatctgtctcccagaataaaatactacttcaaaggattgaagattccgatc

SEQ ID NO: 151724 - DNA, 120 bp, Artificial Sequence
  ENSG00000105784_9 (sequence is synthesized)
tggctcataaactggagaaggaacaattagaatatataattgtggagcttcaagatcagctgactgtgctaaagaataatgatttaagatcgagacaagagttaactgcccatctcacca

SEQ ID NO: 151725 - DNA, 120 bp, Artificial Sequence
  ENSG00000105784_10 (sequence is synthesized)
accagtggccttctccaggagctctggatgtcaatgctgttgccttggatacgttgctttaccgaaaacacaataaacagtggtatgagaaaagttatcaaagtcttgaccagttatcag

SEQ ID NO: 151726 - DNA, 120 bp, Artificial Sequence
  ENSG00000105784_11 (sequence is synthesized)
cagaagttagcctttctcagacttcactagatccaggccagtcacaagaaggagatggaaaacaagacacattaaatgtaatgagtgaaggtaaggaagatactccctcattacttggcc

SEQ ID NO: 151727 - DNA, 120 bp, Artificial Sequence
  ENSG00000105784_12 (sequence is synthesized)
tctgtggatctctaacgtcagtggcaagttacaagtctctaacaagcttaaaatctaatgactaccttgcaagtcctacaacagagatgacaagtccaggcctaactccatcctgaaaat

SEQ ID NO: 151728 - DNA, 120 bp, Artificial Sequence
  ENSG00000105784_13 (sequence is synthesized)
ttttgtgtaaaagccaaaactttttatgttgtaaatgtttaatttacatgtttgactgctgggaagacctttgaaattttatattgttctggtacatgtctgaaattctattgcttggag

SEQ ID NO: 151729 - DNA, 120 bp, Artificial Sequence
  ENSG00000105784_14 (sequence is synthesized)
agaatcccctccagataagagattttgagtgaaaaacataatgatcctgccatttttcatttttaaaattcttacatttgtcattgagaaagttcaaaatggaataggctttaaaaaaaa

SEQ ID NO: 151730 - DNA, 120 bp, Artificial Sequence
  ENSG00000105784_15 (sequence is synthesized)
aaaaactttcaaagatccgccaaatcattcatagcaaattgtacatattgttcagctgatttttatatatttaaatacaccttagtggccagagactgacttcaaggttttattccagag

SEQ ID NO: 151731 - DNA, 120 bp, Artificial Sequence
  ENSG00000105784_16 (sequence is synthesized)
actccagagacttaagctaagtattttttcattctttcagattttcaaaaaaaaaaaaaaaaaaagttaatttcattttttcattaatgtcttcctaagttctatgctttaaatgccttg

SEQ ID NO: 151732 - DNA, 120 bp, Artificial Sequence
  ENSG00000105784_17 (sequence is synthesized)
gacgggctcgcgcgcgcgccgtctgctgaggtccctcgggaaggaggagagcgcctgacgccgacccgcaggcgcagcccggcagtcggcggcgcgccgagggcggaggtggtgcgtgcg

SEQ ID NO: 151733 - DNA, 120 bp, Artificial Sequence
  ENSG00000105784_18 (sequence is synthesized)
tttataaattccataggaacatgcctgttttggtagttactgacttaatttgttagtgccacaaggaaaatattttacagtattttatgccatttaggcaaaatgaataaactgttttcc

SEQ ID NO: 151734 - DNA, 120 bp, Artificial Sequence
  ENSG00000105784_19 (sequence is synthesized)
aagattttcttaaaagattatcaatttaaaagtatgatcaagtatgcctcaaaaactagaaacatttcaaaatgtagaacaaacgttgaaaaattgttttgccaggaaagagttcaagtt

SEQ ID NO: 151735 - DNA, 120 bp, Artificial Sequence
  ENSG00000105784_20 (sequence is synthesized)
cagttaaggatttgagaggcttttaaacaaggatcagtaggatagttatcatatttacttaatatatgtctgatattcagtgctggttctttttcctgtttgtgcaacaatgaagtgtgt

SEQ ID NO: 151736 - DNA, 120 bp, Artificial Sequence
  ENSG00000105784_21 (sequence is synthesized)
catgtgtgttttatagcctctatcattaatcacaccagagtctcattttaaaacattttaatgttaaaacatccccacacttatacacaggtaaaattagtttttttttttttaaagttg

SEQ ID NO: 151737 - DNA, 120 bp, Artificial Sequence
  ENSG00000105784_22 (sequence is synthesized)
taatctgtacttttttttttttgcaatttttgaaacagctacattaatccctaaaaatcccaccatactgaaaatgtatggcgtgtattttctatagtaagtaatatgaggaaaacatga

SEQ ID NO: 151738 - DNA, 120 bp, Artificial Sequence
  ENSG00000105784_23 (sequence is synthesized)
ttagctgtgccaaagaaattttatacattgtttacatgatgaggccacagtacttactgaggacttcatatggtttttttgtttattattattgagaaaagagctgaggttaccacattc

SEQ ID NO: 151739 - DNA, 120 bp, Artificial Sequence
  ENSG00000105784_24 (sequence is synthesized)
attctttgtgttagaaatgtaggagtgtggtggttttctgcaatatttagagcttagtctcataatttggaatttaagataataagtagtaacaaggcaagtcttttatgtaagacagtc

SEQ ID NO: 151740 - DNA, 120 bp, Artificial Sequence
  ENSG00000105784_25 (sequence is synthesized)
aaacagtgtcacttcagggacaaaggcctggaagcccttaaaataagttatcttagatgtgccagaacatattcagagctttattcctttaagcttaaggcttcaatacttgtagaaatg

SEQ ID NO: 151741 - DNA, 120 bp, Artificial Sequence
  ENSG00000105784_26 (sequence is synthesized)
caaatattcttgagaaatgatacattttttgttctcaatttctcaattctacatacctgattatgagtgaagtatccaaagcaggttttcatcagcatgggggatggaaggtaggtataa

SEQ ID NO: 151742 - DNA, 120 bp, Artificial Sequence
  ENSG00000105784_27 (sequence is synthesized)
tatgaggacaatggaaactttgggagaagggagtgaggaaatggataaagagaaatttgaaaattttaggctggacttgagcactattgctgctttcctatgaactatcagaatgtttaa

SEQ ID NO: 151743 - DNA, 120 bp, Artificial Sequence
  ENSG00000105784_28 (sequence is synthesized)
atgctttatcattcatggtccactctcaaccaacatttattatcctttagtaattaaacaatggttttacatacatttttataatgtagaaggaaattcaagattccataatcgtaaaat

SEQ ID NO: 151744 - DNA, 120 bp, Artificial Sequence
  ENSG00000105784_29 (sequence is synthesized)
ttttcagatttgtctaatgtgtaatttgtgcatcttcacatgctgctaaatgcagatttaaacattacatctgaggatcatgacttttcctcctttcttggagatcttggtataaaattc

SEQ ID NO: 151745 - DNA, 120 bp, Artificial Sequence
  ENSG00000105784_30 (sequence is synthesized)
atctgctgttataaaatcaggtttctacagagttcgtttcacactaaaggtagtttgttactgtttgcatgaggaaaccatgtatgtctcaatctttaattttaggtggtagtgtttatt

SEQ ID NO: 151746 - DNA, 120 bp, Artificial Sequence
  ENSG00000105784_31 (sequence is synthesized)
gttcaccctccctcttgcctccaaaagaatgctgaattatacgccaatatttccatgtgtattctgttgccttgatgcgtactatacttgttgcatgtatattaaaaattttgtactatg

SEQ ID NO: 151747 - DNA, 120 bp, Artificial Sequence
  ENSG00000105784_32 (sequence is synthesized)
gtgctgaattgtctctggagagcaactttcttgacttcattggtgaaattgtagccttttgattcaagacaccgctactagtttctgtgtcttttagatgaaatttcaagagagaatttt

SEQ ID NO: 151748 - DNA, 120 bp, Artificial Sequence
  ENSG00000105784_33 (sequence is synthesized)
gagactactggccagccagtagcttgcctcttccttcctctgttccaatcagctacagctaactgcaggttcccctaggcttactcagaaggaacaatggactgagcacagggcaagcta

SEQ ID NO: 151749 - DNA, 120 bp, Artificial Sequence
  ENSG00000105784_34 (sequence is synthesized)
gttccaggactctgagggagcagcccagctggaccgaggccgcgtcgttcctgggcttactattcccagacccggactcccgattccggagtcacggcccaggacgcgaaaagactctac

SEQ ID NO: 151750 - DNA, 120 bp, Artificial Sequence
  ENSG00000105792_0 (sequence is synthesized)
agcaacgcgctggcttgtgttaacaaccggcccgggatcagaggtctgggtcaactggggggcggcagcggcgctaagcggactgtatggcggtggcctaggcccctggcggaattttgg

SEQ ID NO: 151751 - DNA, 120 bp, Artificial Sequence
  ENSG00000105792_1 (sequence is synthesized)
gacctttcgcgactctagcgactctcaggctgccttcccttctcggtggcggggcctctttgggcccagcggctgcgggcgcactgtaggacaggaagatccccccactctccaccccgc

SEQ ID NO: 151752 - DNA, 120 bp, Artificial Sequence
  ENSG00000105792_2 (sequence is synthesized)
cgccaccggccatgtggacagaggaagccggggcgaccgccgaggcccaggaatccggcatcaggaacaagtctagcagttccagtcaaatcccggtggttggggtggtgacggaggacg

SEQ ID NO: 151753 - DNA, 120 bp, Artificial Sequence
  ENSG00000105792_3 (sequence is synthesized)
atgaggcgcaggatgttttcaagcctatggaccttaatcgtgtcatcaaactcctcgaagagactgataaagatggcttggaagaaaaacaacttaaatttgtcaagaaactggtacagt

SEQ ID NO: 151754 - DNA, 120 bp, Artificial Sequence
  ENSG00000105792_4 (sequence is synthesized)
gttatcagaatggacttccattaagggatttagcacagatatttaaaattctgaatctgtgttcaggaaaaataaaaaaccagcctcgttttatagaatctgcatatgatatcataaaac

SEQ ID NO: 151755 - DNA, 120 bp, Artificial Sequence
  ENSG00000105792_5 (sequence is synthesized)
tgtgtggcttgccatttttgaaaaagaaagtgtcggatgaaataacttatgctgaagatactgctaattcaattgcacttctgggtgacttaatgaaaataccaagttctgaattgagga

SEQ ID NO: 151756 - DNA, 120 bp, Artificial Sequence
  ENSG00000105792_6 (sequence is synthesized)
tacaaatttgtaagtgtattgttgatttttatcatgcagaaccaccaaagaagcatattccaggttaccagcaagcgagttcatcatacaagattcaaatggctgaagttggaggattag

SEQ ID NO: 151757 - DNA, 120 bp, Artificial Sequence
  ENSG00000105792_7 (sequence is synthesized)
caaaaacaatggtccagtcaatgaccttgcttgaaaatcaacttgttgagaaactttgggtacttaaagttctgcagcatctctcaacttctgaagttaattgtactataatgatgaaag

SEQ ID NO: 151758 - DNA, 120 bp, Artificial Sequence
  ENSG00000105792_8 (sequence is synthesized)
cacaagcagccagtggaatctgtactcacctcaatgacccagatccctctggacagcttttatttcgttcatcagaaatactttggaacttgctggaaaaatcttcaaaagaagaagtca

SEQ ID NO: 151759 - DNA, 120 bp, Artificial Sequence
  ENSG00000105792_9 (sequence is synthesized)
tacaacagcttagtaacttggaatgtttgctggctttgaaggaagtatttaaaaatctgtttatgagaggtttcagtcattatgaccgtcagcttagaaatgacatattagtgatcacta

SEQ ID NO: 151760 - DNA, 120 bp, Artificial Sequence
  ENSG00000105792_10 (sequence is synthesized)
caattatagctcaaaatcctgaagcaccaatgattgaatgtggctttaccaaggatttgatactgtttgccacctttaatgaagttaaaagtcaaaatcttttggtaaaaggacttaagc

SEQ ID NO: 151761 - DNA, 120 bp, Artificial Sequence
  ENSG00000105792_11 (sequence is synthesized)
tttctaattcctatgaagattttgagttgaagaaattactattcaacgtaattgtgatcttatgtaaagatttacctactgtacagctattaattgatggcaaagttattttggctttgt

SEQ ID NO: 151762 - DNA, 120 bp, Artificial Sequence
  ENSG00000105792_12 (sequence is synthesized)
ttacctatgttaagaagcctgagaagcaaaaaataattgactggtctgcagcacagcatgaagaattacaactgcatgcaattgccactttgtcatcagtggctcctttattaatagaag

SEQ ID NO: 151763 - DNA, 120 bp, Artificial Sequence
  ENSG00000105792_13 (sequence is synthesized)
aatacatgtcatgccagggaaatgctcgagtccttgcatttctagaatggtgtgagagtgaagatccgtttttcagtcatggtaacagttttcatggtacaggtggccgaggcaacaagt

SEQ ID NO: 151764 - DNA, 120 bp, Artificial Sequence
  ENSG00000105792_14 (sequence is synthesized)
ttgcccagatgcgttacagtttaagactcctgagagccgtggtctaccttgaagatgagactgtaaacaaagatctttgtgaaaagggaacaattcagcaaatgataggaatctttaaaa

SEQ ID NO: 151765 - DNA, 120 bp, Artificial Sequence
  ENSG00000105792_15 (sequence is synthesized)
atataataagcaagcctaatgaaaaggaagaagccattgttttggaaatccagtctgatatattacttatcctatctggcctttgtgagaatcacattcaaaggaaggaaattttcggaa

SEQ ID NO: 151766 - DNA, 120 bp, Artificial Sequence
  ENSG00000105792_16 (sequence is synthesized)
ttaggctataatgtacttctttttagtacattggacagcatttggtgctgtattttgggatgttatccctcagaggattattttcttgaaaaggaaggcatttttctccttttggatttg

SEQ ID NO: 151767 - DNA, 120 bp, Artificial Sequence
  ENSG00000105792_17 (sequence is synthesized)
ttagcattgaaccaaaaaaaattctgtaatctaatacttggaataatggttgaattttgtgataatcccaaaactgcagctcatgtcaatgcttggcaagggaagaaggatcagacagct

SEQ ID NO: 151768 - DNA, 120 bp, Artificial Sequence
  ENSG00000105792_18 (sequence is synthesized)
gctagtcttttaattaaattgtggagaaaggaggaaaaagaactaggagtaaaacgtgataaaaatgggaagatcattgatacaaaaaaacctctatttactagctttcaagaagagcaa

SEQ ID NO: 151769 - DNA, 120 bp, Artificial Sequence
  ENSG00000105792_19 (sequence is synthesized)
aaaatcatcccactgcctgctaactgcccatctattgcggttatggatgtttctgagaatattagagcaaaaatttatgctatattgggcaaactagattttgaaaatttacctggccta

SEQ ID NO: 151770 - DNA, 120 bp, Artificial Sequence
  ENSG00000105792_20 (sequence is synthesized)
tctgctgaagattttgtcaccctttgtatcatacatagatatcttgattttaaaattggagaaatatggaatgaaatatatgaagaaataaaattagaaaaattaagaccagtcactaca

SEQ ID NO: 151771 - DNA, 120 bp, Artificial Sequence
  ENSG00000105792_21 (sequence is synthesized)
gataaaaaagctttggaagctattacaacagcatcagaaaatattggaaagatggttgcttctctgcaaagtgatataattgaaagccaagcatgccaagacatgcaaaatgaacaaaaa

SEQ ID NO: 151772 - DNA, 120 bp, Artificial Sequence
  ENSG00000105792_22 (sequence is synthesized)
gtatatgcaaaaatacaggccacgcacaagcaaagagagctggctaataaatcatgggaagatttcttggctagaacatcaaacgctaaaacgttaaagaaagcaaaaagccttcaagaa

SEQ ID NO: 151773 - DNA, 120 bp, Artificial Sequence
  ENSG00000105792_23 (sequence is synthesized)
aaagctatagaagcctccagataccataaacgaccacaaaatgcaatatttcaccaaacacatattaaaggccttaacacaacggtgccctctggtggagtagtaacagtggaaagcact

SEQ ID NO: 151774 - DNA, 120 bp, Artificial Sequence
  ENSG00000105792_24 (sequence is synthesized)
cctgcccgattagtaggaggacctctggttgatacggatattgctcttaaaaaactgcccattcgaggaggagccttgcagagggtgaaagcagttaaaattgtggatgcaccaaaaaag

SEQ ID NO: 151775 - DNA, 120 bp, Artificial Sequence
  ENSG00000105792_25 (sequence is synthesized)
gcaccaaaaaagagtattcctacgtaatatactatagagactttttgaaataaagtcagcttataattttttagctgaatatatctttatacatatgtaaagccaatattttagaataag

SEQ ID NO: 151776 - DNA, 120 bp, Artificial Sequence
  ENSG00000105792_26 (sequence is synthesized)
aatattttagtaaaatactataaaaataaaaggacatataatttatttttatggaaaacatcaacatgtaatatcagaagagttgtcatcagtttctttggaaaggctaccaattttact

SEQ ID NO: 151777 - DNA, 120 bp, Artificial Sequence
  ENSG00000105792_27 (sequence is synthesized)
aagtgaaattgtaaaacatagtacatcagttaggactctgttggttgcatgtgaactattctaactagtttaagtcagaaaaaaaatttcttacaggctctatacctatcaaatctagga

SEQ ID NO: 151778 - DNA, 120 bp, Artificial Sequence
  ENSG00000105792_28 (sequence is synthesized)
ggaatttagactacaggcattgctgaatctaaggactaaaactatatgagtaggatcttctccttccctagcagctcctggcttacattctcttaggttcatgcctgtgtctctgtggtt

SEQ ID NO: 151779 - DNA, 120 bp, Artificial Sequence
  ENSG00000105792_29 (sequence is synthesized)
tctgcagctgcctatgcatctcaggacccctgattgcccacatgcctacggtagtcctgagccattcaccatgactttggccatggctgagtactgcctattcctggagccagaagcagg

SEQ ID NO: 151780 - DNA, 120 bp, Artificial Sequence
  ENSG00000105792_30 (sequence is synthesized)
gcaactccatccaaaacatatggatagagtggggaatcagggtactattatcagaagcaagtatatatgaatattgggcagcaagataaacaataactctgcaacaagtatgttggtcaa

SEQ ID NO: 151781 - DNA, 120 bp, Artificial Sequence
  ENSG00000105792_31 (sequence is synthesized)
aataaaattatgttttctctgctataaaagcaaatgttagtcatgagccaaatggtaaaaaagaaaaaaaaatgcagctggttttactcttaatatataaatatacaaagcaaactctaa

SEQ ID NO: 151782 - DNA, 120 bp, Artificial Sequence
  ENSG00000105792_32 (sequence is synthesized)
gataaaaacaaaaaaatgatggtttcaatagatagattttaagtgaacgcctgtttagctccaagctttgatgcaatttctcatcatattctaccaccctgtgcctgggctcctctggaa

SEQ ID NO: 151783 - DNA, 120 bp, Artificial Sequence
  ENSG00000105792_33 (sequence is synthesized)
aaataatcataatcttgcttactgggaaccagaactgaacagcaaggcaataagaaaggaaattttcggaactgaaggagtagatatcgttcttcatgtgatgaaaacagaccccaggaa

SEQ ID NO: 151784 - DNA, 120 bp, Artificial Sequence
  ENSG00000105792_34 (sequence is synthesized)
attaagaaagcatcaggcctttcacccctttgtctaaagttttttttttttttttacaagggtttgaaaaatttgctatcctaagtgactggaagaaaactaagtaaattagtagtaggt

SEQ ID NO: 151785 - DNA, 120 bp, Artificial Sequence
  ENSG00000105792_35 (sequence is synthesized)
ttagtagtaggttcatatttttagagaatatttttaagaaatggtatttaattatattcttttaactaaaaaaaaaattaaagtagttcctaaagatgcttctttgggttttctgctttt

SEQ ID NO: 151786 - DNA, 120 bp, Artificial Sequence
  ENSG00000105792_36 (sequence is synthesized)
aataatatttcattgagatgtaaatagattgcttcaaaataatattttggtattttatacatttctgttcatttttcctttttctaaatccattaggcaacatgatctgattaatgttta

SEQ ID NO: 151787 - DNA, 120 bp, Artificial Sequence
  ENSG00000105792_37 (sequence is synthesized)
tccattaggcaacatgatctgattaatgtttatagagtttactttttatatgaaagaagatattgtttcctaaataaaaatagtccaaatgttcaaaaattttaattactagattctaaa

SEQ ID NO: 151788 - DNA, 82 bp, Artificial Sequence
  ENSG00000105792_38 (sequence is synthesized)
attctaaattaatgagacttacagtatcataatttttagttcatttacatattccatactgctatagacagggtttcactca

SEQ ID NO: 151789 - DNA, 79 bp, Artificial Sequence
  ENSG00000105792_39 (sequence is synthesized)
agcgatccactcacctcagcctctgcctatattacattttctttttttcttttttttttggagacagagtctcgctctt

SEQ ID NO: 151790 - DNA, 78 bp, Artificial Sequence
  ENSG00000105792_40 (sequence is synthesized)
ataggcatgagccaccacacctggccaatatattacattttctttttttcttttttttttacatgaactcggctcact

SEQ ID NO: 151791 - DNA, 120 bp, Artificial Sequence
  ENSG00000105792_41 (sequence is synthesized)
gattacagacatgagccactgcaccccgcctacatattctaagccttttaagattcttatggtttcatctaaacggttcacttttttttttaaattttattttaggttcaggggtacaca

SEQ ID NO: 151792 - DNA, 120 bp, Artificial Sequence
  ENSG00000105792_42 (sequence is synthesized)
ggtttcatctaaacggttcacttttttttttaaattttattttaggttcaggggtacacatacaggtttgttatatgggtaaactcatgtcacaagggtttgttgtacagattattttgt

SEQ ID NO: 151793 - DNA, 120 bp, Artificial Sequence
  ENSG00000105792_43 (sequence is synthesized)
caatagttattttttctgaccctctccctcctcctactctctaccatctaataggcctcagtgtgtgttgttctcctccatgtgtccatgaattctcatcatttagatcccacttataag

SEQ ID NO: 151794 - DNA, 66 bp, Artificial Sequence
  ENSG00000105792_44 (sequence is synthesized)
cctccatccatgttccctcaaaatacatgatctcactatttttatggctgcatagcattccatggt

SEQ ID NO: 151795 - DNA, 120 bp, Artificial Sequence
  ENSG00000105792_45 (sequence is synthesized)
tgctgcagtgaacattcatgtgtgtgtctttatgatagaatggtttatattcctctgagcatatactcagtcacaggattgctgggtcgaatagtagttctgtttttagctctttgagga

SEQ ID NO: 151796 - DNA, 80 bp, Artificial Sequence
  ENSG00000105792_46 (sequence is synthesized)
aactaatttacactcccagcaacagtgtataagcatccccttttctccacaaccttgccggtatgtgagatactatttca

SEQ ID NO: 151797 - DNA, 120 bp, Artificial Sequence
  ENSG00000105792_47 (sequence is synthesized)
gagatactatttcattgtgatttgaatttgaatttttctaataatcagtgatattgagcttttttcatatgcttgttggctgcatgtatgacttcttttgaaaagtgtctgttcatgtcc

SEQ ID NO: 151798 - DNA, 120 bp, Artificial Sequence
  ENSG00000105792_48 (sequence is synthesized)
tgttttttcttataaatttgtttaagttcattatagatgctggatattagacctctgtcagatgcatagtttgcacaaattttctcccattctgttggttggcttttcatcctgttgata

SEQ ID NO: 151799 - DNA, 120 bp, Artificial Sequence
  ENSG00000105792_49 (sequence is synthesized)
aattagatcccatttgtcaatttttgcttgtattgtgattccttttgacatctttgtcatgaaatctttgcccattcctaagtccagattgctactgcctaggttgtcttccagggttct

SEQ ID NO: 151800 - DNA, 83 bp, Artificial Sequence
  ENSG00000105792_50 (sequence is synthesized)
catctttgtcatgaaatctttgcccattcctaagtccagattgctactgcctaggttgtcttccagggttcacttgagttgat

SEQ ID NO: 151801 - DNA, 120 bp, Artificial Sequence
  ENSG00000105792_51 (sequence is synthesized)
ctgcatatggctggctagttatcccagcaccatttattaaatagggagttatttccccattgcttgtttctgtcagctttgttgaagatcaagtagttgtaggtgtgtagccttatttct

SEQ ID NO: 151802 - DNA, 120 bp, Artificial Sequence
  ENSG00000105792_52 (sequence is synthesized)
taccagtactatgctgttttggttactgtggtcttgtagtttagtttgaacttaggtaacgtgatgcctgtagtgttgctctttgtttaggatttccttggctattggggctctttctgg

SEQ ID NO: 151803 - DNA, 120 bp, Artificial Sequence
  ENSG00000105792_53 (sequence is synthesized)
ctttgtttaggatttccttggctattggggctctttctggttccatatgattttttgaatagttttctctagttatgtgaagattgttgttgatagctttatagaaatactattgaatct

SEQ ID NO: 151804 - DNA, 72 bp, Artificial Sequence
  ENSG00000105792_54 (sequence is synthesized)
attcttcctatcctaagcagtattttctaattctcatcatagaggtcttttggctccctggttagctgtatt

SEQ ID NO: 151805 - DNA, 120 bp, Artificial Sequence
  ENSG00000105792_55 (sequence is synthesized)
gctgtattcctaggtattttattctttttatggcaattgtgaatgggattgtgtttctgacttggctgttggcttggctgttgttggtgtgtaggaatgctagtcacttttgtacattga

SEQ ID NO: 151806 - DNA, 120 bp, Artificial Sequence
  ENSG00000105792_56 (sequence is synthesized)
gtgtaggaatgctagtcacttttgtacattgatttcgtgtcccgcaactttgctaaagttgtttatcagctaaaggagcttttgggccgagactatggagttttctagatacagactcat

SEQ ID NO: 151807 - DNA, 120 bp, Artificial Sequence
  ENSG00000105792_57 (sequence is synthesized)
gtcatctgcaaacagggatagtttgacttcccctcttcctgtttggatgctttttttttttctttctcttgcttgattgctctggccaagatttccaatactatgtggtgaaagagcgca

SEQ ID NO: 151808 - DNA, 120 bp, Artificial Sequence
  ENSG00000105792_58 (sequence is synthesized)
agatttccaatactatgtggtgaaagagcgcatgcctgtcttgtgccagtttacaaagggaatgcttccagcttttctccattccatataatgctggctgtgggtttgtcatagatggct

SEQ ID NO: 151809 - DNA, 120 bp, Artificial Sequence
  ENSG00000105792_59 (sequence is synthesized)
tgtttatttttaaatgtaaatacttccccttctgatgacttgtatcttcaatccatttttattgtttctgagttttgacctatagcatcataaaatagtttttatatttatagcataata

SEQ ID NO: 151810 - DNA, 120 bp, Artificial Sequence
  ENSG00000105792_60 (sequence is synthesized)
tatagaaaccaaaagtaaacaaggttacatcactgttaaactgacattactcaagttctggatttcaaaattttttaaattatttacatagaagttttacttttaaaaagtaattttgtg

SEQ ID NO: 151811 - DNA, 120 bp, Artificial Sequence
  ENSG00000105792_61 (sequence is synthesized)
aaattttaatattttacataaacaataaaaatgaaggctctaagttttgccacagagtggggaagaaatagctgcttaattattatttcaaaagtgtaaccgtgtaataggcactatttt

SEQ ID NO: 151812 - DNA, 120 bp, Artificial Sequence
  ENSG00000105792_62 (sequence is synthesized)
tttgctacaatatttttatatattttatgttatctagactaaaatctcaaaattaagtatttgtttactatggtttttatctgtcccttttctattttcatgctatccaatgattagata

SEQ ID NO: 151813 - DNA, 120 bp, Artificial Sequence
  ENSG00000105792_63 (sequence is synthesized)
tattgggcaaactaggtaagaagttctcttcaaatttgcaagagtctgttttgctaagtatacacactgattttactttggagacagtttttcaaatataatgagcaaaaatctctttat

SEQ ID NO: 151814 - DNA, 120 bp, Artificial Sequence
  ENSG00000105792_64 (sequence is synthesized)
atagagaaattcattttccattgttaccccaattcccaaactgcacccctcaccaattaaatcagaatctctgtgtgtgggatccaggcaatagtattttttaaagctccccaggcaatt

SEQ ID NO: 151815 - DNA, 120 bp, Artificial Sequence
  ENSG00000105792_65 (sequence is synthesized)
ccaatgtgcagataggattaaggacagttagtttagatgattaagcttaaaatactgacattctgagtcacttgagtttttttttttaagtctttgctgtctattaaggaaaaagtttat

SEQ ID NO: 151816 - DNA, 120 bp, Artificial Sequence
  ENSG00000105792_66 (sequence is synthesized)
caaacactcttcagcttctgaagtaagatattattgtctgactacaacacagaaagaaatgattcctatatattggatgacctggcagaaatgtgttatagaaagaagcctactcacaag

SEQ ID NO: 151817 - DNA, 120 bp, Artificial Sequence
  ENSG00000105792_67 (sequence is synthesized)
gtgttatagaaagaagcctactcacaagctactcacagaattaactttttcataaatcaagatgaaatcaaaagtaactttgcatttgtttttagataggtagatagatagatagataga

SEQ ID NO: 151818 - DNA, 120 bp, Artificial Sequence
  ENSG00000105792_68 (sequence is synthesized)
ggaatgttcttttaatcttaaaatgacagccagtgacataactaacatctttgtttgaatctgtgttcaattatgttttagattcatgtaatggctatgtttcaggacatcttttttgtt

SEQ ID NO: 151819 - DNA, 120 bp, Artificial Sequence
  ENSG00000105792_69 (sequence is synthesized)
ccatggtataaatgaatctgcacaataacaagccacacttttctatgtggaaggctcttgaagtagcttcttaacactaaaatataacttggaatatagataaagtaaaattagacttta

SEQ ID NO: 151820 - DNA, 120 bp, Artificial Sequence
  ENSG00000105792_70 (sequence is synthesized)
tgaacaaaaagtatatgcaaaaatacaggccacgcacaagcaaagagagctggctaataaatcatgggaagatttcttggctagaacatcaaacgctaaaacgttaaaggtgccctctgg

SEQ ID NO: 151821 - DNA, 120 bp, Artificial Sequence
  ENSG00000105793_0 (sequence is synthesized)
aaaaaggccgcgctgtactgcggcttgtgccgcttccgcaagaaggtttcctggcctgttgcagccatggtgcattgcagttgcgtgttgttcagaaagtatggaaatttcatcgataag

SEQ ID NO: 151822 - DNA, 120 bp, Artificial Sequence
  ENSG00000105793_1 (sequence is synthesized)
ctaagactcttcaccaggggaggatccggtggaatgggttatcctcgtttaggtggagaaggtggaaaaggtggtgatgtctgggttgtagcccagaacagaatgactttaaaacaactt

SEQ ID NO: 151823 - DNA, 120 bp, Artificial Sequence
  ENSG00000105793_2 (sequence is synthesized)
aaagacaggtatcctcggaaacggtttgtggctggagtaggagcaaacagcaaaattagtgcactgaaaggctccaaaggaaaagactgtgaaatccctgtgcctgtgggtatttcagta

SEQ ID NO: 151824 - DNA, 120 bp, Artificial Sequence
  ENSG00000105793_3 (sequence is synthesized)
actgatgaaaatggtaaaattataggagaactcaataaagaaaatgacagaattttggtagctcaaggaggtcttggtggtaaattacttacaaatttcttaccattgaaaggccagaaa

SEQ ID NO: 151825 - DNA, 120 bp, Artificial Sequence
  ENSG00000105793_4 (sequence is synthesized)
cgaataattcaccttgatctaaaacttatagctgatgtaggcctagtaggattcccaaatgctggaaaatcctctttgctaagttgtgtttctcatgcaaaacctgcaattgcagattac

SEQ ID NO: 151826 - DNA, 120 bp, Artificial Sequence
  ENSG00000105793_5 (sequence is synthesized)
gcatttacaacattaaagcctgaacttggaaagataatgtacagtgatttcaaacagatatcagtagctgatcttccgggtttaatagaaggagcacatatgaacaaaggaatgggccac

SEQ ID NO: 151827 - DNA, 120 bp, Artificial Sequence
  ENSG00000105793_6 (sequence is synthesized)
aaattcctcaagcatatagaaagaactagacaactactttttgttgttgatatttctggatttcagctttcttctcacactcaatacaggacagcttttgaaaccataatactgcttaca

SEQ ID NO: 151828 - DNA, 120 bp, Artificial Sequence
  ENSG00000105793_7 (sequence is synthesized)
aaagagttggaattgtacaaagaggaacttcagacaaaacctgcactcttggcagttaataaaatggacttgccagatgcccaagataagttccatgaattgatgagccagctccagaat

SEQ ID NO: 151829 - DNA, 120 bp, Artificial Sequence
  ENSG00000105793_8 (sequence is synthesized)
cctaaagattttctgcatttatttgaaaaaaacatgattccagagaggactgtagagttccaacatatcatccccatatctgcagttactggagaaggaatcgaagaattaaagaattgt

SEQ ID NO: 151830 - DNA, 120 bp, Artificial Sequence
  ENSG00000105793_9 (sequence is synthesized)
ataagaaagtcactggatgaacaggccaaccaggaaaatgatgcacttcataagaaacagttgcttaatttgtggatttctgatacaatgtcttctactgagccaccatcaaagcatgct

SEQ ID NO: 151831 - DNA, 120 bp, Artificial Sequence
  ENSG00000105793_10 (sequence is synthesized)
gttactacttccaaaatggatataatttaaatatattaaaaatggtattgatggaacagtatttaatgcttaaaaacaaggaaatcctttcatctgtgacaacctggaggacatgttaag

SEQ ID NO: 151832 - DNA, 120 bp, Artificial Sequence
  ENSG00000105793_11 (sequence is synthesized)
taaaataagccaggcttagaaagacaaatgctgcataatctcactgtggaatcttaagttgaactcatagaaggagagaatagaatggtggttatcaagggctggtggggcagtggagga

SEQ ID NO: 151833 - DNA, 120 bp, Artificial Sequence
  ENSG00000105793_12 (sequence is synthesized)
ttgaggagatattggtcaaaatttacaaaatttcagttagacaaggcaactgagttcaagagatctgttgtacagcttggtgactgtaattaacaacaatgtattttgaaagtcactgag

SEQ ID NO: 151834 - DNA, 120 bp, Artificial Sequence
  ENSG00000105793_13 (sequence is synthesized)
taaattttaagtggtttttccaaaaaagcacataaggtaatgcacgttaattagctatattgagccattccacaatgtatagatatttcaaaacatgttacacatgataaatccagtttt

SEQ ID NO: 151835 - DNA, 120 bp, Artificial Sequence
  ENSG00000105793_14 (sequence is synthesized)
ttttattttgaaagttttttcacagatcttttttttagtattattaccttctgatatatgtgtcattattgaagaaccataccttttaaagttattattttgtaattaagtatgtcaaca

SEQ ID NO: 151836 - DNA, 75 bp, Artificial Sequence
  ENSG00000105793_15 (sequence is synthesized)
attattgaagaaccataccttttaaagttattattttgtaattaagtatgtcaacagtaaaaaataaccggaggc

SEQ ID NO: 151837 - DNA, 61 bp, Artificial Sequence
  ENSG00000105793_16 (sequence is synthesized)
aacccgagggagctaaaaaattacattttacaagtttatggccagcccacctgtaataaca

SEQ ID NO: 151838 - DNA, 120 bp, Artificial Sequence
  ENSG00000105793_17 (sequence is synthesized)
tacattttacaagtttatggccagcccacctgtaataacattctctgatattcctttacttaggatgtccctattgagatcattttttaaatttatgtggaaggattctctagattatta

SEQ ID NO: 151839 - DNA, 120 bp, Artificial Sequence
  ENSG00000105793_18 (sequence is synthesized)
ttagaatgagcaattcagttttgtttgtttttgagcctgtcttgtacctggttgcactaaatatataatagttatcttttgtggagaccttaaaaccctaaatttgaatacatgttcaat

SEQ ID NO: 151840 - DNA, 120 bp, Artificial Sequence
  ENSG00000105793_19 (sequence is synthesized)
gatagtaaagatatgacagaaactagaagatagctgtttatgatttgagcttttggaaaattttcgtttcttgaatgtaatagtattttttcctgaattggaggagactgatctatattg

SEQ ID NO: 151841 - DNA, 120 bp, Artificial Sequence
  ENSG00000105793_20 (sequence is synthesized)
tttcatttttcttttgtcctagtctatttcactttcttttgtcataatctatttaatttcccactttcttattttagtaaagagagaataaatagcaagtgcaggccaggcatggtggtg

SEQ ID NO: 151842 - DNA, 87 bp, Artificial Sequence
  ENSG00000105793_21 (sequence is synthesized)
agagagaataaatagcaagtgcaggccaggcatggtggtgcaggccagacatagcggtacatgcctgtaatcctagcactttgggat

SEQ ID NO: 151843 - DNA, 120 bp, Artificial Sequence
  ENSG00000105793_22 (sequence is synthesized)
aacagaaaacgcaaactttaatattatcaacaatcaatatattataagagattgcaatttctaagtttctacctgagtgtttcacaaatacaaactggacattttccctttaaatgagtt

SEQ ID NO: 151844 - DNA, 120 bp, Artificial Sequence
  ENSG00000105793_23 (sequence is synthesized)
ttattataaaatgtacatattgattgtaaaaacaaaaaattcaaatagtacaaaagcatataagtaactaataaaagctccctttctgcattaggcccctcagttcttcccagggaaaat

SEQ ID NO: 151845 - DNA, 120 bp, Artificial Sequence
  ENSG00000105793_24 (sequence is synthesized)
gggaaaatgattaatagtttacattcttgcagaaattttttatgtataaatttttacccaaatgaattcattatataaattttttccaacttagtgtttttttacataatagtagcaagt

SEQ ID NO: 151846 - DNA, 88 bp, Artificial Sequence
  ENSG00000105793_25 (sequence is synthesized)
acttagtgtttttttacataatagtagcaagttaaaaaattgtacttcaggccaggcacggtgggtcacgcctgtagaccacttgagg

SEQ ID NO: 151847 - DNA, 120 bp, Artificial Sequence
  ENSG00000105793_26 (sequence is synthesized)
gagattgcgccattgcactccagcctggaggacaagagggagacttcctctcaaaaaacaaaatattgtacttcaaaaaattattcttcaatgctatttttaaattactagaaattattt

SEQ ID NO: 151848 - DNA, 120 bp, Artificial Sequence
  ENSG00000105793_27 (sequence is synthesized)
tggaatttaatgttgcatacagcctgagatatggctgttcaccctttggtaaagtattaaagaaaaataatgcattgttctcagcttaaatttttttctgatttgacaacatgagtgatg

SEQ ID NO: 151849 - DNA, 120 bp, Artificial Sequence
  ENSG00000105793_28 (sequence is synthesized)
ttttcccagtattatttcaattatatttgttttattttctgttcctcactcctacctctcattccagtccccaaactggcttttcttttatttcttttttcttcattgctgatgtattta

SEQ ID NO: 151850 - DNA, 120 bp, Artificial Sequence
  ENSG00000105793_29 (sequence is synthesized)
cctttgataacagaaactgcaggggattggaatagcctctttacaagaaaagaataagagtgaggaaaagcgtttggaatttatagtgatcacagtgaccaggttttgtattgggtatgt

SEQ ID NO: 151851 - DNA, 120 bp, Artificial Sequence
  ENSG00000105793_30 (sequence is synthesized)
tttacatttgtaacttcagtgctatttttttttaagctccattgttttctaaatgtaaacaagtatcaatgtaaggacagtttcatcaggtgaatatcagaagtactgacaccataatct

SEQ ID NO: 151852 - DNA, 120 bp, Artificial Sequence
  ENSG00000105793_31 (sequence is synthesized)
cattttgcactgtggcaaagggtagtagatgtgtgttcaggattatttgctctgtcagtagtgcccagggtgccactccatgactaaccgaaacattttattatgtgactcactaagatg

SEQ ID NO: 151853 - DNA, 120 bp, Artificial Sequence
  ENSG00000105793_32 (sequence is synthesized)
ttcaattcattagtattttctggttactcaaagtgtactctatgtacctttttttgacctttgatttttattctgatggagaagatcagattccttttttatcttataaaaaataatttt

SEQ ID NO: 151854 - DNA, 120 bp, Artificial Sequence
  ENSG00000105793_33 (sequence is synthesized)
gaaacaaagacttattttgaagtaagtcttttaacattatctcagatgcattttattttgtccttaagtaagacttttcatttttacctttcaaaatgcaattttcaaaatatatgcttt

SEQ ID NO: 151855 - DNA, 120 bp, Artificial Sequence
  ENSG00000105793_34 (sequence is synthesized)
tttgaaacacttattatgttactgaataaccagagtattaaattcaatgtacagcaaatttttacaaagtcccagtagttcttgcagagctttctataatatcagatttatttaccatca

SEQ ID NO: 151856 - DNA, 120 bp, Artificial Sequence
  ENSG00000105793_35 (sequence is synthesized)
tgaaatatgtttatacagtattaagtatattgtactatgaagttggacctgcacactgaaaaattccaaaatacctattatgttgtgctttttgtgatatatattcatattattatttgt

SEQ ID NO: 151857 - DNA, 120 bp, Artificial Sequence
  ENSG00000105793_36 (sequence is synthesized)
cataacaaggtgaacttttttaaaatggtaaacatgtattagttacataatcaggaaaaaagtcatcttttataatgagaaaaattaggtcaaggatatttcaggttttatccaattaga

SEQ ID NO: 151858 - DNA, 120 bp, Artificial Sequence
  ENSG00000105793_37 (sequence is synthesized)
tttcttgtaaagttatgtgttttcttttatctcagtgcttatttgctttgcaaggatgaaggttagagattcctttcagtagttaatgaaagctacagacttgtcttgccgaaaaatgta

SEQ ID NO: 151859 - DNA, 120 bp, Artificial Sequence
  ENSG00000105793_38 (sequence is synthesized)
cataaacacataaactattttccaagcagtttcacagtgtttgcaaagttcagattgaaaacccagttttacaaatcccatctacaaatttgcattgtcattaagatatattaaaaataa

SEQ ID NO: 151860 - DNA, 120 bp, Artificial Sequence
  ENSG00000105793_39 (sequence is synthesized)
tttttcaaagcaacagcacagatgcactttaaaactgtagcttaaaaataaaaattagtaatataacttgtgtaaacctacacaaaagataaaagatatcttattgcaaaaatagggcaa

SEQ ID NO: 151861 - DNA, 120 bp, Artificial Sequence
  ENSG00000105793_40 (sequence is synthesized)
cattttgttttaaagaccaaatagtgaattgaatttaatgcatatctttaaatccttaatagtatctcaaatctggtttaaatctgtctctccttaacggaatagaaagtgaaacaaatc

SEQ ID NO: 151862 - DNA, 120 bp, Artificial Sequence
  ENSG00000105793_41 (sequence is synthesized)
cagaaatcttgttcgagtacatggtctgtgctagtaatcatatctaaagtggtaatgttaccatatgctgggtactgggctgagtaaatcacatattttaacttatttaaacactgcact

SEQ ID NO: 151863 - DNA, 120 bp, Artificial Sequence
  ENSG00000105793_42 (sequence is synthesized)
gtattgcctgctagcgatgtcatttttttaaagttggatggtgaatacatgagttgttttttaaactcttttgggagcctaaaaaatttgaatttttttttttccccccccagacggagt

SEQ ID NO: 151864 - DNA, 120 bp, Artificial Sequence
  ENSG00000105793_43 (sequence is synthesized)
tgaatttttttttttccccccccagacggagtctcgctctcttgccaggctggagtgcagtgacattatcttggctcactgcagcctctgattccctggttcaagcaattctcctgcctc

SEQ ID NO: 151865 - DNA, 120 bp, Artificial Sequence
  ENSG00000105793_44 (sequence is synthesized)
ggggtttcaccatgttggccaggatgggaaaattttttaaaagacatttattaaaaaaaaatgtctatgccttatcaaagtttataactcaagaattaatgagataaacagtggacaaaa

SEQ ID NO: 151866 - DNA, 120 bp, Artificial Sequence
  ENSG00000105793_45 (sequence is synthesized)
tttataactcaagaattaatgagataaacagtggacaaaaagtgttggcagataacatgcataattttaattaaaagttaagcagtgaaaaataaacatctttttttcttaaagagatat

SEQ ID NO: 151867 - DNA, 120 bp, Artificial Sequence
  ENSG00000105793_46 (sequence is synthesized)
ttcatatctgttctatttgtttagttttatttattctttttagagacagggtctctctgtggagtgcagtggcatgattatagccctctgcggcctcaatcttcagggcttaagttatcc

SEQ ID NO: 151868 - DNA, 120 bp, Artificial Sequence
  ENSG00000105793_47 (sequence is synthesized)
tcctgcctcatcctcccaagtagctaggactacaagtgtgtgccaccatacctggctaatttttaaaaactattttgtagagacagggtcttactatgttgcccagagtggtcttgaact

SEQ ID NO: 151869 - DNA, 120 bp, Artificial Sequence
  ENSG00000105793_48 (sequence is synthesized)
cccatcctcatggaatcctcccacttcagtctctgaaagtgctaggattataggcatgagccatttatgcccagccagttttcttttttctaattgaagcttggcaagcagagggaaatg

SEQ ID NO: 151870 - DNA, 120 bp, Artificial Sequence
  ENSG00000105793_49 (sequence is synthesized)
tattagggaaatagctttagttttgagtgggtgtcagtagccagctgaagaaaaagcaaaatgaaataggtagtagaaatgagaaagggagagagggaagaagaaaaaaatggatgttgg

SEQ ID NO: 151871 - DNA, 120 bp, Artificial Sequence
  ENSG00000105793_50 (sequence is synthesized)
aaagttgttgcatgtctctctggatagctcagaagtatcagttgtggttattgcctcacttggcttttgtaagcatgaaaaagccagggacaatttcaactaccatttctgaccatcatc

SEQ ID NO: 151872 - DNA, 120 bp, Artificial Sequence
  ENSG00000105793_51 (sequence is synthesized)
aaccacaaattttaggcaatttgttagaattttttttaaatgttcttaatagttgttgggtacctgggagatttcagagaaagtaatcacctttgtatatattattaatgtgtttataat

SEQ ID NO: 151873 - DNA, 120 bp, Artificial Sequence
  ENSG00000105793_52 (sequence is synthesized)
agaaattaaattctttgggatgtacaggtaagataagctatgtgaagcatagctgttatccaagtcgtgtgcctttgaaatacttggaatttgaagaacaggacatgcagcttatgttat

SEQ ID NO: 151874 - DNA, 120 bp, Artificial Sequence
  ENSG00000105793_53 (sequence is synthesized)
aattaatttgcgagcaatatatggcatgatagtattttcttatctaaattctgagtgcattgaaagtttaaagcaaaggacaaaagcttcctttgttcatggcccatattccagtatatt

SEQ ID NO: 151875 - DNA, 120 bp, Artificial Sequence
  ENSG00000105793_54 (sequence is synthesized)
tttctgaaactgccaatattttctgatcggtactttcatttttctagttggttaccaaatactgttattggtattatttctatataaaaggctttaagaagactatagtataattttctt

SEQ ID NO: 151876 - DNA, 120 bp, Artificial Sequence
  ENSG00000105793_55 (sequence is synthesized)
aagaaaaaagacatgattataagctaaaatatgccttcggttttgtgtgctacaaattgagggagattgagaatattttaaatcaagggcagacattgagtaaaagcttatgactttgga

SEQ ID NO: 151877 - DNA, 120 bp, Artificial Sequence
  ENSG00000105793_56 (sequence is synthesized)
tggatttgaaacatgattaaatgacagagtaaataaaagcccctagtcaagtgaattctaatgggggaaataagaggactatataaaaattgaacctctgttttgaaaacaaatctttcc

SEQ ID NO: 151878 - DNA, 120 bp, Artificial Sequence
  ENSG00000105793_57 (sequence is synthesized)
aggaagtggtaccactctggggtcaagagaaattgtaagaacaataaaatgagcacacatgaccttcctttcctataaaaatatgaagcagaaaactcccccatgatttcctcatgttgc

SEQ ID NO: 151879 - DNA, 120 bp, Artificial Sequence
  ENSG00000105793_58 (sequence is synthesized)
ttagaatagtgtgtatttcagaacttttccatttaatatttttggaccacagttgactgaaactgaggatgggaggaagggatgcttaaaaccttggatagtaccaaaccctatatatat

SEQ ID NO: 151880 - DNA, 120 bp, Artificial Sequence
  ENSG00000105793_59 (sequence is synthesized)
tatgtttttttctatatatacacagctatgataaagttcataaattaggcacagtaagagattaaaaatattaaattgggccaattaatatattgtaataaaagctatgttaatgtggtc

SEQ ID NO: 151881 - DNA, 120 bp, Artificial Sequence
  ENSG00000105793_60 (sequence is synthesized)
tccagggaaatcaagagatggagaaattggcccaccaaccactttggtggtaaaagaggagagtttcctttgtgattggcccgcgctcctaaatttgcccaagtaaaatctacatgagtg

SEQ ID NO: 151882 - DNA, 89 bp, Artificial Sequence
  ENSG00000105793_61 (sequence is synthesized)
ccgcgctcctaaatttgcccaagtaaaatctacatgagtgtttcccacgacttggaggtggattgcatatgaggacttggcatcatcat

SEQ ID NO: 151883 - DNA, 120 bp, Artificial Sequence
  ENSG00000105793_62 (sequence is synthesized)
gtaggagcaaacagcaagtaagtaattactgaatgacttaaattttagaaaatcaaacccttctggaaattttttttttagttacaaaataaaaacttaattgttaatttgaagtaaatt

SEQ ID NO: 151884 - DNA, 120 bp, Artificial Sequence
  ENSG00000105793_63 (sequence is synthesized)
atttcctgtatttataaccaagcaaaagcctaaaatgtctcaactcataaaagactgatactaaagaatatttcagagttttaaaactttctgtccgtttcttttcccaatgtctatctg

SEQ ID NO: 151885 - DNA, 120 bp, Artificial Sequence
  ENSG00000105793_64 (sequence is synthesized)
aagttttgttcttttgctctttgcaaaagctcttgctactgctcattctttgggttcatactgcctttatgagcagtaacactgatcacgaaggtctgtagcttcactgctgaagccagc

SEQ ID NO: 151886 - DNA, 120 bp, Artificial Sequence
  ENSG00000105793_65 (sequence is synthesized)
cactgctgaagccagcaagaccacaaacccactgggaggaatgaacaactccagacctgctgccttaggagttctaatgctcaccgtggaggtttgcagcttcactcctgaggccagcaa

SEQ ID NO: 151887 - DNA, 77 bp, Artificial Sequence
  ENSG00000105793_66 (sequence is synthesized)
caaactctgaaggcttcattgttgaagaaagaaacataattacgtgtggaaaagcaggaactcaggtggggtaagaa

SEQ ID NO: 151888 - DNA, 120 bp, Artificial Sequence
  ENSG00000105793_67 (sequence is synthesized)
acataattacgtgtggaaaagcaggaactcaggtggggtaagaaaccaatcgtgatgaatgagggcttgaactctcattgtctgagacgggatttcaccgtgttagccgggatggtctcg

SEQ ID NO: 151889 - DNA, 120 bp, Artificial Sequence
  ENSG00000105793_68 (sequence is synthesized)
tgcatatgaggcatttagggcataccccataactccaattgcctcactagtagacatttcccagtcaaataagatatggcctgaggaaacggcccaacagtctcactctgtcacccagac

SEQ ID NO: 151890 - DNA, 120 bp, Artificial Sequence
  ENSG00000105793_69 (sequence is synthesized)
agcctcaacctcctgggctcaggtgatcttcccaccacagcctcacaggcagcttagactacaagtgtgtgccatcatgcccagctaatttgttgtgttttttgtagagacagggttttg

SEQ ID NO: 151891 - DNA, 86 bp, Artificial Sequence
  ENSG00000105793_70 (sequence is synthesized)
gcagcttagactacaagtgtgtgccatcatgcccagctaatttgttgtgttttttgtagagacagggttttgccatgtcccaacct

SEQ ID NO: 151892 - DNA, 120 bp, Artificial Sequence
  ENSG00000105793_71 (sequence is synthesized)
actatgcctggcctcttatttttgtttcttattcatattatctaagaattttaatttactgtcagtggttattgctttatgaaatctcagtaacaagaagcaaagaaaatgagatcagta

SEQ ID NO: 151893 - DNA, 120 bp, Artificial Sequence
  ENSG00000105793_72 (sequence is synthesized)
agtgagaatcctgaatacattacgaacttttctgctcataagtcctcttgtttgaacaaacaggaagcattatcatgaaagtctcttctgataattccactgccattcttacatctatca

SEQ ID NO: 151894 - DNA, 120 bp, Artificial Sequence
  ENSG00000105793_73 (sequence is synthesized)
agactaaccgatgactaataggatagtagaagacccttaaaatagttttattcctctagtacaggtggtcttaaatgggggtcttaaaaaaatgattctaattctcaagatttctagaaa

SEQ ID NO: 151895 - DNA, 120 bp, Artificial Sequence
  ENSG00000105793_74 (sequence is synthesized)
tgcttcctaaaaagtaacctttacattatatccttcaaattaaaagcaaagtgccttaacagcgaagtaaaatcatgttccataggaataaatttcctccactcattatgaatacaggta

SEQ ID NO: 151896 - DNA, 120 bp, Artificial Sequence
  ENSG00000105793_75 (sequence is synthesized)
tcagaaagattaaaatttacttctttctgtcattgacacaactactctgcttattcttgcttagttatttcagtacccatgacagtgttccagcacatagctgagtatgtgggacaaatt

SEQ ID NO: 151897 - DNA, 120 bp, Artificial Sequence
  ENSG00000105793_76 (sequence is synthesized)
cagaacacagaaattattatattaatgcatgaataaatgaatgaatagttgaagtgtaagttcctaggaagaaaggcaatgagataaatccactttttttccctcacataggccttgttt

SEQ ID NO: 151898 - DNA, 120 bp, Artificial Sequence
  ENSG00000105793_77 (sequence is synthesized)
gaagacaataattacatggcctgaggccctctctttgagaatacttcatttttactcaaagaggtcttacctagtatgtaaacctcatttgtttgatccatttaacttcatcatttggga

SEQ ID NO: 151899 - DNA, 120 bp, Artificial Sequence
  ENSG00000105793_78 (sequence is synthesized)
gatataatggttctcagacttgtaatattttgacggcatgaaacaaataatatttgatttgttacatctgaaggattataaggctaatgagtaagaataactcgatgctccacttcaggt

SEQ ID NO: 151900 - DNA, 120 bp, Artificial Sequence
  ENSG00000105793_79 (sequence is synthesized)
gattcgtatgctataggagttagcaatctagttcttgtctttcgtttgaataaattaacaaatattcctagagtatctactgattacaaggcctgagccagacggaccttgttagggact

SEQ ID NO: 151901 - DNA, 120 bp, Artificial Sequence
  ENSG00000105793_80 (sequence is synthesized)
cttgaacaagcagaactaaaagcatgatagacaaaaggtagaaatctaattaaaagcagttgagatgatgacacaagatcaattgaaataatctgcaaagcccagaatgaagttagacac

SEQ ID NO: 151902 - DNA, 120 bp, Artificial Sequence
  ENSG00000105793_81 (sequence is synthesized)
acacttttcattttagtctgctgacaaaattaagcaatataacatcacaaaatattagatttgttaattatatatttgtctattttatgcttaagtgtatctacattaaatgttagatta

SEQ ID NO: 151903 - DNA, 120 bp, Artificial Sequence
  ENSG00000105793_82 (sequence is synthesized)
caatgtggtgttagtattagaccctggagtaaagtcataggtgaaaaaccagtgaaagcaaatagtctgtagtttagttaatattctagcaatattaatttttttagttttgaaaaatgg

SEQ ID NO: 151904 - DNA, 120 bp, Artificial Sequence
  ENSG00000105793_83 (sequence is synthesized)
ttataaaagatgttaacattcgggcaaactggataaagattacatggaatctcttttggctatttttgtaacttctgtaaattaaaaagtacttcaaaataaaattatttaaaattgtaa

SEQ ID NO: 151905 - DNA, 120 bp, Artificial Sequence
  ENSG00000105808_0 (sequence is synthesized)
cagtccagcgcccgccgcccgccaccccggaccccggtgtctggcttcccccgagccgggaccccgcgatggccaagcgcagctcgctgtacatccgcatcgtggaggggaagaaccttc

SEQ ID NO: 151906 - DNA, 120 bp, Artificial Sequence
  ENSG00000105808_1 (sequence is synthesized)
ccgccaaggacatcactggcagcagcgacccctactgcatcgtgaaggtggacaatgagcccatcatcaggacagccacagtgtggaagaccctgtgccccttctggggtgaggagtacc

SEQ ID NO: 151907 - DNA, 120 bp, Artificial Sequence
  ENSG00000105808_2 (sequence is synthesized)
aagtgcacctgccgcccaccttccacgctgtggctttctatgtcatggatgaggatgccctcagccgggacgacgttatcggaaaggtctgccttacaagggacaccatagcctctcacc

SEQ ID NO: 151908 - DNA, 120 bp, Artificial Sequence
  ENSG00000105808_3 (sequence is synthesized)
ctaagggtttcagcgggtgggcccacctgacggaggtcgaccccgatgaggaggtgcagggcgagatccacctgcggctggaagtgtggccaggggcccgggcctgccggctacgctgct

SEQ ID NO: 151909 - DNA, 120 bp, Artificial Sequence
  ENSG00000105808_4 (sequence is synthesized)
ctgtgctggaggccagggatctggccccaaaggaccgcaatggcacatctgaccccttcgtccgagtgcgctacaagggccggacacgggagacctcgatcgtgaagaagtcatgctacc

SEQ ID NO: 151910 - DNA, 120 bp, Artificial Sequence
  ENSG00000105808_5 (sequence is synthesized)
cacgctggaatgagacgtttgaatttgagctgcaggagggggccatggaggcgctgtgcgtggaggcctgggactgggaccttgtcagccgaaacgacttcctgggcaaagtggtgattg

SEQ ID NO: 151911 - DNA, 120 bp, Artificial Sequence
  ENSG00000105808_6 (sequence is synthesized)
atgtccagagactgcgggtggtgcagcaggaggagggctggttccggctgcagcccgaccagtccaagagccggcggcatgacgagggcaacctgggctccttgcagctggaggtgcggc

SEQ ID NO: 151912 - DNA, 120 bp, Artificial Sequence
  ENSG00000105808_7 (sequence is synthesized)
tgcgggacgagacggtgctgccctccagctactaccagccactggtgcacctgctgtgccacgaggtcaagctgggcatgcagggcccagggcagctgatcccactcatcgaggagacaa

SEQ ID NO: 151913 - DNA, 120 bp, Artificial Sequence
  ENSG00000105808_8 (sequence is synthesized)
ccagcaccgagtgtcgccaggacgtggccacgaacctgctcaagctcttcctggggcaggggctggccaaggacttcctggacctgctcttccagctggagctgagtcgcaccagtgaga

SEQ ID NO: 151914 - DNA, 120 bp, Artificial Sequence
  ENSG00000105808_9 (sequence is synthesized)
ccaacaccctgttccggagcaactctctggcctcaaagtccatggagtcttttctgaaggtggccgggatgcagtacctgcacggcgtcctgggccccatcatcaacaaggtgtttgagg

SEQ ID NO: 151915 - DNA, 120 bp, Artificial Sequence
  ENSG00000105808_10 (sequence is synthesized)
agaagaagtacgtggagctggaccccagcaaagtggaagttaaggatgtagggtgctccgggctgcaccgcccgcagaccgaggccgaggtgctggagcagagcgcgcagacgctgcgcg

SEQ ID NO: 151916 - DNA, 120 bp, Artificial Sequence
  ENSG00000105808_11 (sequence is synthesized)
ggggccctgctgagcgcgctcagccgctcggttcgcgcgtgccccgccgtggtgcgcgccaccttccgccagctcttccggcgcgtgcgcgagcgcttccccggcgcccagcacgagaat

SEQ ID NO: 151917 - DNA, 120 bp, Artificial Sequence
  ENSG00000105808_12 (sequence is synthesized)
acgagaatgtaccgttcatcgccgtcaccagcttcctgtgcctgcgcttcttctctcccgccatcatgtcgcccaagctcttccacctgcgggagcgccacgcggacgcccgcaccagcc

SEQ ID NO: 151918 - DNA, 120 bp, Artificial Sequence
  ENSG00000105808_13 (sequence is synthesized)
gcaccctgctcctgttggccaaggcagtccagaacgtgggcaacatggacacgccggcttccagggccaaggaggcttggatggagccgctgcagcccaccgtgcgccagggcgtggcgc

SEQ ID NO: 151919 - DNA, 120 bp, Artificial Sequence
  ENSG00000105808_14 (sequence is synthesized)
agctgaaggacttcatcaccaagctcgtggacatcgaggagaaggacgagctggacctgcagcggacgctgagtttgcaggcgccacctgtgaaggaggggccactcttcatccacagga

SEQ ID NO: 151920 - DNA, 120 bp, Artificial Sequence
  ENSG00000105808_15 (sequence is synthesized)
ccaagggcaagggccccctcatgtcctcctccttcaagaagctctacttctccctcactaccgaggccctcagcttcgcgaagacgcccagctccaagaaaagcgccctcatcaagttag

SEQ ID NO: 151921 - DNA, 120 bp, Artificial Sequence
  ENSG00000105808_16 (sequence is synthesized)
ccaacatccgggcagcggaaaaggttgaggaaaagagctttggcggctcgcacgtcatgcaggtcatctacacggacgacgccggcaggccccagactgcctacctgcagtgcaagtgtg

SEQ ID NO: 151922 - DNA, 120 bp, Artificial Sequence
  ENSG00000105808_17 (sequence is synthesized)
tgaatgagcttaaccagtggctgtctgcgctgcggaaggtgagcatcaacaacaccggactgctgggctcctaccaccctggcgtcttccgtggggacaagtggagctgctgccaccaaa

SEQ ID NO: 151923 - DNA, 120 bp, Artificial Sequence
  ENSG00000105808_18 (sequence is synthesized)
aagagaagacaggtcagggctgcgataagacccggtcacgggtgaccctgcaggagtggaatgaccctcttgaccatgaccttgaggcccagctcatctaccggcacctgctgggcgtgg

SEQ ID NO: 151924 - DNA, 120 bp, Artificial Sequence
  ENSG00000105808_19 (sequence is synthesized)
aggccatgctgtgggagaggcaccgggagctgagcgggggcgcagaggcaggcacggtgcccacgagccctggcaaagtccccgaggactcattggcccggctgctccgggtgctgcagg

SEQ ID NO: 151925 - DNA, 120 bp, Artificial Sequence
  ENSG00000105808_20 (sequence is synthesized)
acctccgcgaggcccatagctccagcccggccggctccccaccctcagagcccaactgcctcctggagctgcagacgtgaggcccgccctacgctccccttgctgagtcccctgccaagc

SEQ ID NO: 151926 - DNA, 120 bp, Artificial Sequence
  ENSG00000105808_21 (sequence is synthesized)
gctcggagcccccccaggacactctgcaccccctcaccccggtcctcctcattagggtgcagggcctaggtctcttccaggtgggggaggggggagagtcaggaataaggggatccccag

SEQ ID NO: 151927 - DNA, 120 bp, Artificial Sequence
  ENSG00000105808_22 (sequence is synthesized)
aagtgcagagctgagcaggcttgggcctgtcatggctggccggaagtgtccccagctccctacagacgctgtagccatcactgcctctccagggaccctcctctcctgcccaggacagac

SEQ ID NO: 151928 - DNA, 120 bp, Artificial Sequence
  ENSG00000105808_23 (sequence is synthesized)
ggagacccggccgccaccccacccgctacccttgggtgccacagggctgtgctgttgccaacagtaaacctgctcttactgtccaggctctggggtcttgtgatgagggtctggggagaa

SEQ ID NO: 151929 - DNA, 120 bp, Artificial Sequence
  ENSG00000105808_24 (sequence is synthesized)
agtgggcccggggggaccccggaggctgtcggtggatgtgccgatgatggggctgacagtatgggctctgggcatccctgttcccccctctttcttccccccactcttctggggtcgggg

SEQ ID NO: 151930 - DNA, 120 bp, Artificial Sequence
  ENSG00000105808_25 (sequence is synthesized)
gttcctttcccttcccagttgctgtccctgggtcccctctttcatgtcccacaggccacagagcccagtgtgtccaaccagctgttctctcctcaaagcagcccccaagcaagtcccttc

SEQ ID NO: 151931 - DNA, 120 bp, Artificial Sequence
  ENSG00000105808_26 (sequence is synthesized)
tctagggtgtccctgaggacagcacagaggcgggactcagagaccccattcctcttcacgcagcccttaccccaagccctctagctgtgtggctggcagtgttggccacgtaggggctcc

SEQ ID NO: 151932 - DNA, 120 bp, Artificial Sequence
  ENSG00000105808_27 (sequence is synthesized)
catccccccaccattgtgtcacatgggctgccaggctcagctcccagctgcgtccacagtgacctggatcagggtggggacaaggactggaccctccttctccagaaggccttcagctct

SEQ ID NO: 151933 - DNA, 120 bp, Artificial Sequence
  ENSG00000105808_28 (sequence is synthesized)
tgccttgccatgcagtcacctccttccccctctgaccccagatcccaaaggtgcaccgttgccccagcccctttctggccccatggggtttctctgatgccttcatcatagaggcccggg

SEQ ID NO: 151934 - DNA, 120 bp, Artificial Sequence
  ENSG00000105808_29 (sequence is synthesized)
gctggtccgatggttggcaaaacttgactccggcccagtccccactcttggggacttagaacccctgctgtcctgggatctggcctgcctttctttggtcagtccctgtggtcccccacc

SEQ ID NO: 151935 - DNA, 120 bp, Artificial Sequence
  ENSG00000105808_30 (sequence is synthesized)
agctccccctcccatagggctgcccaccaagccctgcccccagcccaagaggagcccccactgcctgcggggcagtgatgtctggccaccggctcacaccaatgacttggtcctggggtg

SEQ ID NO: 151936 - DNA, 120 bp, Artificial Sequence
  ENSG00000105808_31 (sequence is synthesized)
gcagaagcagcaggtgacaggagcagggcccctgtccctctcttctggccctgtggtacccaggccacacgttgtgcccgctcttggggctgaccggctgtagggaccaccagccgctgc

SEQ ID NO: 151937 - DNA, 120 bp, Artificial Sequence
  ENSG00000105808_32 (sequence is synthesized)
tactgtgggccgccccggggcagggtgggcagggcttttgtgggttatgaggacacagaagtccctgaggcccccagacctggctcagccaacctccttcctcccccggttgccccccac

SEQ ID NO: 151938 - DNA, 120 bp, Artificial Sequence
  ENSG00000105808_33 (sequence is synthesized)
tctaaagcctcctccctcccagcgtccactggctccaggctcctcacaacagcagctcatagacacggggcgtctccaggtggtcccagccctccagatgtttctagctctccaggtggg

SEQ ID NO: 151939 - DNA, 120 bp, Artificial Sequence
  ENSG00000105808_34 (sequence is synthesized)
cgctgttttcacgtctgcctgcatccattcattccttcattcctcacctttatcctgttatctctatttttttaagctaccaggaaggaaagggaagaagagatcacgaaactgggaccc

SEQ ID NO: 151940 - DNA, 120 bp, Artificial Sequence
  ENSG00000105808_35 (sequence is synthesized)
ccagaaaggaggagtgggctttgaacttagacatctacctcagagctcaaataggttgtttaaaatcacattcaattttcagatgaaggggaactttatagttttttttttttttttttt

SEQ ID NO: 151941 - DNA, 120 bp, Artificial Sequence
  ENSG00000105808_36 (sequence is synthesized)
cctccgaaagtgctgagattacagttgcgagccactgtgcgtggccagaactttataataagagacttgaagctgggtgtgacggtgcacacctctagtcccagctactcgggaggccaa

SEQ ID NO: 151942 - DNA, 120 bp, Artificial Sequence
  ENSG00000105808_37 (sequence is synthesized)
ctctagtcccagctactcgggaggccaagacagaaggatcaccttgaggccaggagtttaaggccagcctgggcaacatagcaaaacctagtccctaaaattaaaaaaaaaaaaaaaaaa

SEQ ID NO: 151943 - DNA, 120 bp, Artificial Sequence
  ENSG00000105808_38 (sequence is synthesized)
tttgaactaaatagtggtgatggctacacattgtgaatgtaattaacaccactgagttaaacacttaaaatggttaaaatggcaaattgtatgttatacctattttactacaataaaaag

SEQ ID NO: 151944 - DNA, 120 bp, Artificial Sequence
  ENSG00000105808_39 (sequence is synthesized)
tataaaaaagagaagatatttaggtgacttacagcaaccaattgcaacaaaacaaaatgttaagaaatgatctttttatgaggcaattggaaatttgaacactgatcaactataggatga

SEQ ID NO: 151945 - DNA, 120 bp, Artificial Sequence
  ENSG00000105808_40 (sequence is synthesized)
aggcaattggaaatttgaacactgatcaactataggatgattggaattattaatttttaaaggtgtgataagatactgcacttggctgggcacagtggcacatgcctgtaatcccagcta

SEQ ID NO: 151946 - DNA, 120 bp, Artificial Sequence
  ENSG00000105808_41 (sequence is synthesized)
ttcgagaccagcctgggcaacgtggcgaaatccccgtctttacaaaaacaaacaaacaaacaaaaaagatattgcagttgtgttgtaagcgtccttatctttcagagctacatagtggaa

SEQ ID NO: 151947 - DNA, 120 bp, Artificial Sequence
  ENSG00000105808_42 (sequence is synthesized)
tgtttatggaatatttaggataaatgatataggcatttgggatttgctgcaaaatgacccagaggcaggggtcagggggagaggtagagatgagacaagaggtagaggggagaggtagag

SEQ ID NO: 151948 - DNA, 120 bp, Artificial Sequence
  ENSG00000105808_43 (sequence is synthesized)
gtagccacgagctgataattacagacaagagatgcggagtatgtgggggctcattatcctgcatagtctatctttgtatatctttgaacttttcaagaataaaaaagcttaaaaagtata

SEQ ID NO: 151949 - DNA, 120 bp, Artificial Sequence
  ENSG00000105808_44 (sequence is synthesized)
ggaccccggtgtctggcttcccccgagccgggaccccgcgatggccaagcgcagctcgctgtacatccgcatcgtggaggggaagaaccttcccgccaaggacatgtgagcgcggccggg

SEQ ID NO: 151950 - DNA, 120 bp, Artificial Sequence
  ENSG00000105808_45 (sequence is synthesized)
ctctcagccccctccctctgtctcctcttccctctctctcccctccctgtccgtccccttccctttctgcccctccctctgtccctctcccagtctctccccttcctccttccccctcct

SEQ ID NO: 151951 - DNA, 120 bp, Artificial Sequence
  ENSG00000105808_46 (sequence is synthesized)
ttcttctcctttctctctctacccatccctgtctcctccccctccttctccctcccccacaactctccctccatctactcccacccctgcccgcgaaaggggagccctggtgcgggttcc

SEQ ID NO: 151952 - DNA, 120 bp, Artificial Sequence
  ENSG00000105808_47 (sequence is synthesized)
tgcccttccctcaccatccgctcccgggctgagggcggggacccgtgtttggccggaggagcctgcggtctccaaaccaggacgcggagactcagcctccgctctcttcccccgcactcc

SEQ ID NO: 151953 - DNA, 120 bp, Artificial Sequence
  ENSG00000105808_48 (sequence is synthesized)
gcctctggctgaacgatgggaccctgagccctgctgtgcacctgcagggacctaacccaaggaatgctggcccctccaggagctctgggcagaaagggtcccgtggaccaggtggtttgg

SEQ ID NO: 151954 - DNA, 120 bp, Artificial Sequence
  ENSG00000105808_49 (sequence is synthesized)
tggtttgggaaatgccacgtgatgtgtgtgatgcatatgagtgaattcgctgaaggctctaaggaggcccgaaaacacgttagaatcccatttctttttatttcttcttcttcttttttt

SEQ ID NO: 151955 - DNA, 120 bp, Artificial Sequence
  ENSG00000105808_50 (sequence is synthesized)
tggtctcctgctcagggaaagccatttctactctccccagaagccggggccacgttctgtactcctggcctctgttctgcagcatgttcccaagcctggttgttactgcctcttccctag

SEQ ID NO: 151956 - DNA, 120 bp, Artificial Sequence
  ENSG00000105808_51 (sequence is synthesized)
gttaaggatgtagggtgaggccgggggtaactccgggggttgcggggtgcagcggcagcgggttgggatcaggccctgtcagcatgtgtgtttgtgcttctgcccacccgtgtattgtcc

SEQ ID NO: 151957 - DNA, 120 bp, Artificial Sequence
  ENSG00000105808_52 (sequence is synthesized)
cctgtgtccgtgtcctggctgctgtgagagccactgttcctgtcgtggccctggcgctgaccgcgacctcctctgccaacccgccccgttccacgcaggtgctccgggctgcaccgcccg

SEQ ID NO: 151958 - DNA, 120 bp, Artificial Sequence
  ENSG00000105808_53 (sequence is synthesized)
gtgaagagcggtggggaaccagggagcgctggggaggaccagggaggctgtgtcccagcgagggtcagggacggagcctaaggggagggggctgccaggagccctggtctgggggactcc

SEQ ID NO: 151959 - DNA, 120 bp, Artificial Sequence
  ENSG00000105808_54 (sequence is synthesized)
cccagacctggccatctgattgctccctggcccatttcaccaccaggactcctgggtcctttttggcatcctctttgcagcctggagggaggcagagcctgggggcctgggagggcgaaa

SEQ ID NO: 151960 - DNA, 120 bp, Artificial Sequence
  ENSG00000105808_55 (sequence is synthesized)
agcttgagcgtgtgggtgtgcacatgcgtggctccatggtgcatgcgccacatacacacgtgtgtgtgcaggcatgcaggcacaagtgtgcatggactacacgtgtgcgtgcaggtgtga

SEQ ID NO: 151961 - DNA, 120 bp, Artificial Sequence
  ENSG00000105808_56 (sequence is synthesized)
cactctcaacttggagcgctccaaacagggaaaccccaagccttgctggcttctgccaaccccctgagcagaagcatgggtccccctgatcaccacctcaccaccctcatcctgatctca

SEQ ID NO: 151962 - DNA, 73 bp, Artificial Sequence
  ENSG00000105808_57 (sequence is synthesized)
ctgtacaacgctacagctagaccacggtgggcttggcaacaggtgtcttcccagatgctggcgttaccgctag

SEQ ID NO: 151963 - DNA, 120 bp, Artificial Sequence
  ENSG00000105808_58 (sequence is synthesized)
gctcttccaactgctgtttcttcacctgcggagcctcagtttccccatctgtcattggggataccagcccctgcttcacgggtgcctaggggattcccagattatggaggtgcctcaagg

SEQ ID NO: 151964 - DNA, 120 bp, Artificial Sequence
  ENSG00000105808_59 (sequence is synthesized)
cgccaccccggaccccggtgtctggcttcccccgagccgggaccccgcgatggccaagcgcagctcgctgtacatccgcatcgtggaggggaagaaccttcccgccaaggacatgacagc

SEQ ID NO: 151965 - DNA, 120 bp, Artificial Sequence
  ENSG00000105810_0 (sequence is synthesized)
aacctctccgcgcgaagacggcttcagccctgcagggaaagaaaagtgcaatgattctggactgagacgcgcttgggcagaggctatgtaatcgtgtctgtgttgaggacttcgcttcga

SEQ ID NO: 151966 - DNA, 120 bp, Artificial Sequence
  ENSG00000105810_1 (sequence is synthesized)
ggagggaagaggagggatcggctcgctcctccggcggcggcggcggcggcgactctgcaggcggagtttcgcggcggcggcaccagggttacgccagccccgcggggaggtctctccatc

SEQ ID NO: 151967 - DNA, 120 bp, Artificial Sequence
  ENSG00000105810_2 (sequence is synthesized)
cagcttctgcagcggcgaaagccccagcgcccgagcgcctgagccggcggggagcaagtaaagctagaccgatctccggggagccccggagtaggcgagcggcggccgccagctagttga

SEQ ID NO: 151968 - DNA, 120 bp, Artificial Sequence
  ENSG00000105810_3 (sequence is synthesized)
ttgagcgcaccccccgcccgccccagcggcgccgcggcgggcggcgtccaggcggcatggagaaggacggcctgtgccgcgctgaccagcagtacgaatgcgtggcggagatcggggagg

SEQ ID NO: 151969 - DNA, 120 bp, Artificial Sequence
  ENSG00000105810_4 (sequence is synthesized)
ctatgggaaggtgttcaaggcccgcgacttgaagaacggaggccgtttcgtggcgttgaagcgcgtgcgggtgcagaccggcgaggagggcatgccgctctccaccatccgcgaggtggc

SEQ ID NO: 151970 - DNA, 120 bp, Artificial Sequence
  ENSG00000105810_5 (sequence is synthesized)
ggtgctgaggcacctggagaccttcgagcaccccaacgtggtcaggttgtttgatgtgtgcacagtgtcacgaacagacagagaaaccaaactaactttagtgtttgaacatgtcgatca

SEQ ID NO: 151971 - DNA, 120 bp, Artificial Sequence
  ENSG00000105810_6 (sequence is synthesized)
agacttgaccacttacttggataaagttccagagcctggagtgcccactgaaaccataaaggatatgatgtttcagcttctccgaggtctggactttcttcattcacaccgagtagtgca

SEQ ID NO: 151972 - DNA, 120 bp, Artificial Sequence
  ENSG00000105810_7 (sequence is synthesized)
tcgcgatctaaaaccacagaacattctggtgaccagcagcggacaaataaaactcgctgacttcggccttgcccgcatctatagtttccagatggctctaacctcagtggtcgtcacgct

SEQ ID NO: 151973 - DNA, 120 bp, Artificial Sequence
  ENSG00000105810_8 (sequence is synthesized)
gtggtacagagcacccgaagtcttgctccagtccagctacgccacccccgtggatctctggagtgttggctgcatatttgcagaaatgtttcgtagaaagcctctttttcgtggaagttc

SEQ ID NO: 151974 - DNA, 120 bp, Artificial Sequence
  ENSG00000105810_9 (sequence is synthesized)
agatgttgatcaactaggaaaaatcttggacgtgattggactcccaggagaagaagactggcctagagatgttgcccttcccaggcaggcttttcattcaaaatctgcccaaccaattga

SEQ ID NO: 151975 - DNA, 120 bp, Artificial Sequence
  ENSG00000105810_10 (sequence is synthesized)
gaagtttgtaacagatatcgatgaactaggcaaagacctacttctgaagtgtttgacatttaacccagccaaaagaatatctgcctacagtgccctgtctcacccatacttccaggacct

SEQ ID NO: 151976 - DNA, 120 bp, Artificial Sequence
  ENSG00000105810_11 (sequence is synthesized)
ggaaaggtgcaaagaaaacctggattcccacctgccgcccagccagaacacctcggagctgaatacagcctgaggcctcagcagccgccttaagctgatcctgcggagaacacccttggt

SEQ ID NO: 151977 - DNA, 120 bp, Artificial Sequence
  ENSG00000105810_12 (sequence is synthesized)
ggcttatgggtccccctcagcaagccctacagagctgtggaggattgctatctggaggccttccagctgctgtcttctggacaggctctgcttctccaaggaaaccgcctagtttactgt

SEQ ID NO: 151978 - DNA, 120 bp, Artificial Sequence
  ENSG00000105810_13 (sequence is synthesized)
tttgaaatcaatgcaagagtgattgcagctttatgttcatttgtttgtttgtttgtctgtttgtttcaagaacctggaaaaattccagaagaagagaagctgctgaccaattgtgctgcc

SEQ ID NO: 151979 - DNA, 120 bp, Artificial Sequence
  ENSG00000105810_14 (sequence is synthesized)
atttgatttttctaaccttgaatgctgccagtgtggagtgggtaatccaggcacagctgagttatgatgtaatctctctgcagctgccgggcctgatttggtacttttgagtgtgtgtgt

SEQ ID NO: 151980 - DNA, 120 bp, Artificial Sequence
  ENSG00000105810_15 (sequence is synthesized)
gtgtgtgtgtgtgtgtatgtgagagattctgtgatcttttaaagtgttactttttgtaaacgacaagaataattcaattttaaagactcaaggtggtcagtaaataacaggcatttgttc

SEQ ID NO: 151981 - DNA, 120 bp, Artificial Sequence
  ENSG00000105810_16 (sequence is synthesized)
taaataacaggcatttgttcactgaaggtgattcaccaaaatagtcttctcaaattagaaagttaaccccatgtcctcagcatttcttttctggccaaaagcagtaaatttgctagcagt

SEQ ID NO: 151982 - DNA, 120 bp, Artificial Sequence
  ENSG00000105810_17 (sequence is synthesized)
aaaagatgaagttttatacacacagcaaaaaggagaaaaaattctagtatattttaagagatgtgcatgcattctatttagtcttcagaatgctgaatttacttgttgtaagtctatttt

SEQ ID NO: 151983 - DNA, 120 bp, Artificial Sequence
  ENSG00000105810_18 (sequence is synthesized)
aaccttctgtatgacatcatgctttatcatttcttttggaaaatagcctgtaagctttttattacttgctataggtttagggagtgtacctcagatagattttaaaaaaaagaatagaaa

SEQ ID NO: 151984 - DNA, 120 bp, Artificial Sequence
  ENSG00000105810_19 (sequence is synthesized)
gcctttatttcctggtttgaaattcctttcttccctttttttgttgttgttattgttgtttgttgttgttattttgtttttgtttttaggaatttgtcagaaactctttcctgttttggt

SEQ ID NO: 151985 - DNA, 120 bp, Artificial Sequence
  ENSG00000105810_20 (sequence is synthesized)
ttggagagtagttctctctaactagagacaggagtggccttgaaattttcctcatctattacactgtactttctgccacacactgccttgttggcaaagtatccatcttgtctatctccc

SEQ ID NO: 151986 - DNA, 120 bp, Artificial Sequence
  ENSG00000105810_21 (sequence is synthesized)
ggcacttctgaaatatattgctaccattgtataactaataacagattgcttaagctgttcccatgcaccacctgtttgcttgctttcaatgaacctttcataaattcgcagtctcagctt

SEQ ID NO: 151987 - DNA, 120 bp, Artificial Sequence
  ENSG00000105810_22 (sequence is synthesized)
atggtttatggcctcgattctgcaaacctaacagggtcacatatgttctctaatgcagtccttctacctggtgtttacttttgttacctaaataatgagtaggatcttgttttgttttat

SEQ ID NO: 151988 - DNA, 120 bp, Artificial Sequence
  ENSG00000105810_23 (sequence is synthesized)
caccagcacacagattgctataaactgttactttgtgaattacatttttatagaagatattttcagtgtctttacctgagggtatgtctttagctatgttttagggccatacatttactc

SEQ ID NO: 151989 - DNA, 120 bp, Artificial Sequence
  ENSG00000105810_24 (sequence is synthesized)
tatcaaatgatcttttctccatcccccaggctgtgcttatttctagtgccttgtgctcactcctgctctctacagagccagcctggcctgggcattgtaaacagcttttcctttttctct

SEQ ID NO: 151990 - DNA, 120 bp, Artificial Sequence
  ENSG00000105810_25 (sequence is synthesized)
tactgttttctctacagtcctttatatttcataccatctctgccttataagtggtttagtgctcagttggctctagtaaccagaggacacagaaagtatcttttggaaagtttagccacc

SEQ ID NO: 151991 - DNA, 120 bp, Artificial Sequence
  ENSG00000105810_26 (sequence is synthesized)
tgtgctttctgactcagagtgcatgcaacagttagatcatgcaacagttagattatgtttagggttaggattttcaaagaatggaggttgctgcactcagaaaataattcagatcatgtt

SEQ ID NO: 151992 - DNA, 120 bp, Artificial Sequence
  ENSG00000105810_27 (sequence is synthesized)
tatgcattattaagttgtactgaattctttgcagcttaatgtgatatatgactatcttgaacaagagaaaaaactaggagatgtttctcctgaagagcttttggggttgggaactattct

SEQ ID NO: 151993 - DNA, 120 bp, Artificial Sequence
  ENSG00000105810_28 (sequence is synthesized)
tttttaattgctgtactacttaacattgttctaattcagtagcttgaggaacaggaacattgttttctagagcaagataataaaggagatgggccatacaaatgttttctactttcgttg

SEQ ID NO: 151994 - DNA, 120 bp, Artificial Sequence
  ENSG00000105810_29 (sequence is synthesized)
tgacaacattgattaggtgttgtcagtactataaatgcttgagatataatgaatccacagcattcaaggtcaggtctactcaaagtctcacatggaaaagtgagttctgcctttcctttg

SEQ ID NO: 151995 - DNA, 120 bp, Artificial Sequence
  ENSG00000105810_30 (sequence is synthesized)
atcgagggtcaaaatacaaagacatttttgctagggcctacaaattgaatttaaaaactcactgcactgattcatctgagctttttggttagtattcatggctagagtgaacatagcttt

SEQ ID NO: 151996 - DNA, 120 bp, Artificial Sequence
  ENSG00000105810_31 (sequence is synthesized)
agtttttgctgttgtaaaagtgttttcataagttcactcaagaaaaatgcagctgttctgaactggaatttttcagcattctttagaattttaaatgagtagagagctcaacttttattc

SEQ ID NO: 151997 - DNA, 120 bp, Artificial Sequence
  ENSG00000105810_32 (sequence is synthesized)
ctagcatctgcttttgactcatttctaggcagtgcttatgaagaaaaattaaagcacaaacattctggcattcaatcgttggcagattatcttctgatgacacagaatgaaagggcatct

SEQ ID NO: 151998 - DNA, 120 bp, Artificial Sequence
  ENSG00000105810_33 (sequence is synthesized)
cagcctctctgaactttgtaaaaatctgtccccagttcttccatcggtgtagttgttgcatttgagtgaatactctcttgatttatgtattttatgtccagattcgccatttctgaaatc

SEQ ID NO: 151999 - DNA, 120 bp, Artificial Sequence
  ENSG00000105810_34 (sequence is synthesized)
cagatccaacacaagcagtcttgccgttagggcattttgaagcagatagtagagtaagaacttagtgactacagcttattcttctgtaacatatggtttcaaacatctttgccaaaagct

SEQ ID NO: 152000 - DNA, 120 bp, Artificial Sequence
  ENSG00000105810_35 (sequence is synthesized)
aagcagtggtgaactgaaaagggcatattgccccaaggttacactgaagcagctcatagcaagttaaaatattgtgacagatttgaaatcatgtttgaatttcatagtaggaccagtaca

SEQ ID NO: 152001 - DNA, 120 bp, Artificial Sequence
  ENSG00000105810_36 (sequence is synthesized)
agaatgtccctgctagtttctgtttgatgtttggttctggcggctcaggcattttgggaactgttgcacagggtggagtcaaaacaacctacatataaaaagagaaaaagagaaacttgt

SEQ ID NO: 152002 - DNA, 120 bp, Artificial Sequence
  ENSG00000105810_37 (sequence is synthesized)
ccatttagctttcataagaaatcccatggcaaagggtaataaaaaggacctaatcttaaaaatacaatttctaagcacttgtaagaacccagtgggttggagcctcccactttgtccctc

SEQ ID NO: 152003 - DNA, 120 bp, Artificial Sequence
  ENSG00000105810_38 (sequence is synthesized)
ctttgaagtggatgggaactcaaggtgcaaagaacctgttttggaagaaagcttggggccatttcagccccctgtattctcatgattttctctcaggaagcacacactgtgaatggcaga

SEQ ID NO: 152004 - DNA, 120 bp, Artificial Sequence
  ENSG00000105810_39 (sequence is synthesized)
cttttcatttagccccaggtgacttactaaaaatagttgaaaattattcacctaagaatagaatctcagcattgtgttaaataaaaatgaaagctttagaaggcatgagatgttcctatc

SEQ ID NO: 152005 - DNA, 120 bp, Artificial Sequence
  ENSG00000105810_40 (sequence is synthesized)
ttaaataaagcatgtttcttttctatagagaaatgtatagtttgactctccagaatgtactatccatcttgatgagaaaactcttaaatagtaccaaacattttgaactttaaattatgt

SEQ ID NO: 152006 - DNA, 120 bp, Artificial Sequence
  ENSG00000105810_41 (sequence is synthesized)
atttaaagtgagtgtttaagaaactgtagctgcttcttttacaagtggtgcctattaaagtcagtaatggccattattgttccattgtggaaattaaattatgtaagcttcctaatatca

SEQ ID NO: 152007 - DNA, 120 bp, Artificial Sequence
  ENSG00000105810_42 (sequence is synthesized)
taaacatattaaaattcttctaaaatattgcttttcttttaagtgacaatttgactattcttatgataagcacatgagagtgtcttacattttccaaaagcaggctttaattgcatagtt

SEQ ID NO: 152008 - DNA, 120 bp, Artificial Sequence
  ENSG00000105810_43 (sequence is synthesized)
gagtctaggaaaaaataatgttaaaagtgaatatgccaccataattacttaattatgttagtatagaaactacagaatatttaccctggaaagaaaatattggaatgttattataaactc

SEQ ID NO: 152009 - DNA, 120 bp, Artificial Sequence
  ENSG00000105810_44 (sequence is synthesized)
ttagatatttatataattcaaaagaatgcatgtttcacattgtgacagataaagatgtatgatttctaaggctttaaaaattattcataaaacagtgggcaatagataaaggaaattctg

SEQ ID NO: 152010 - DNA, 120 bp, Artificial Sequence
  ENSG00000105810_45 (sequence is synthesized)
gagaaaatgaaggtatttaaagggtagtttcaaagctatatatattttgaaggatatattctttatgaacaaatatattgtaaaaatttatactaaggtcatctggtaactgtgggatta

SEQ ID NO: 152011 - DNA, 120 bp, Artificial Sequence
  ENSG00000105810_46 (sequence is synthesized)
atatggtcgaaaacaaatgttatggagaagctgtcccaagcaaactaaattacctgtacttttttcccatttcaagggaagaggcaaccacatgaagcaatacttcttacacatgcctaa

SEQ ID NO: 152012 - DNA, 120 bp, Artificial Sequence
  ENSG00000105810_47 (sequence is synthesized)
gaacgttcattgaaaaaataaatttttaaaaggcatgtgtttcctatgccaccaatacttttgaaaaattgtgaaccttacccaaaaccatttatcatgtccattaagtatatttgggta

SEQ ID NO: 152013 - DNA, 120 bp, Artificial Sequence
  ENSG00000105810_48 (sequence is synthesized)
taattagaaatgctgttttcctcaaaagcatgagaaactagcattttcatttcttatttactccctttctatatcaatgcaattcacaacccaattttaatacatccctatatctcaagc

SEQ ID NO: 152014 - DNA, 120 bp, Artificial Sequence
  ENSG00000105810_49 (sequence is synthesized)
atttctatcttgtactttttcagaaaataaaccaaaaataatcctttggtctctctatcttctgacctttgtaagcaacagaaatgtaaaaacagaaggggtccaatttttacacgtttt

SEQ ID NO: 152015 - DNA, 120 bp, Artificial Sequence
  ENSG00000105810_50 (sequence is synthesized)
tttctcaagtagcctttctggggatttttattttcttaatgaagtgccaatcagcttttcaaaatgttttctatttctcagcatttccaggaagtgataacgtttagctaaatgagtaga

SEQ ID NO: 152016 - DNA, 120 bp, Artificial Sequence
  ENSG00000105810_51 (sequence is synthesized)
agtggacttccttcaacatattgttaccttgtctagccttaggaagaaaacaagagccacctgaaaataaatacaggctcttttcgagcatctgctgaaatactgttacagcaatttgaa

SEQ ID NO: 152017 - DNA, 120 bp, Artificial Sequence
  ENSG00000105810_52 (sequence is synthesized)
gttgatgtggtaggaaaggaaggtgacttttcttgcaaaagtctttctaaacattcacactgtcctaagagatgagctttcttgttttattccggtatattccacaaggtggcactttta

SEQ ID NO: 152018 - DNA, 120 bp, Artificial Sequence
  ENSG00000105810_53 (sequence is synthesized)
gagaaaaacaaatctgatgaagactaaagaggtacttctaaaagagatttcattctaactttatttttctgcgcatatttaactctttcctagcacttgttttttgggatgattaatagt

SEQ ID NO: 152019 - DNA, 120 bp, Artificial Sequence
  ENSG00000105810_54 (sequence is synthesized)
ctctataatgttctgtaacttcaatattttacttgttacctaggttctgaacaattgtctgcaaataaattgttcttaaggatggataatacacccattttgatcatttaagtaaagaaa

SEQ ID NO: 152020 - DNA, 120 bp, Artificial Sequence
  ENSG00000105810_55 (sequence is synthesized)
gcctagtcattcattcagtcaagaaaaaatttttgaagtacccagttaccttacttttctagattaaaacaggcttagttactaaaaaggcagtcctcatctgtgaacaggatagtttcg

SEQ ID NO: 152021 - DNA, 120 bp, Artificial Sequence
  ENSG00000105810_56 (sequence is synthesized)
ttagaagtataaaactcctttagtggccccagttaaaacacacataccctctctgctgctttcaaattccctagcatggtggcctttcaacattgattaaattttaaaatcctaatttaa

SEQ ID NO: 152022 - DNA, 120 bp, Artificial Sequence
  ENSG00000105810_57 (sequence is synthesized)
agatcaggtgagcaaaatgagtagcacatcagtaattcagtagacaaaacttttgtctgaaaaattgctgtattgaaacagagccctaaaataccaaaagaccaggtaattttaacattt

SEQ ID NO: 152023 - DNA, 120 bp, Artificial Sequence
  ENSG00000105810_58 (sequence is synthesized)
gtggaatcacaaatgtaaattcataagaagctctaattaaaaaaaaaaagtctgaagtatatgagcataacaacttaggagtgtgtctacatacttaacttttgaagttttttggcaact

SEQ ID NO: 152024 - DNA, 120 bp, Artificial Sequence
  ENSG00000105810_59 (sequence is synthesized)
ttatatactttttttaaatttacaagtctacttaaagacttcttataccccaaatgattaagttaattttagaggtcacctttctcacagcagtgtcacttgaaatttagtagggaagga

SEQ ID NO: 152025 - DNA, 120 bp, Artificial Sequence
  ENSG00000105810_60 (sequence is synthesized)
tattgcagtatttttcagtttccttagcacagcaccacagaaagcagcttattccttttgagtggcagacactcgacggtgcctgcccaactttcctcctgagtggcaagcagatgagtc

SEQ ID NO: 152026 - DNA, 120 bp, Artificial Sequence
  ENSG00000105810_61 (sequence is synthesized)
tcagtaattcatactgaaccaaaatgccacatacactaggggcagtcagaaactggctgagaaatcccccgcctcattcgcccctctgctcccaggaactagagtccagttaaagcccct

SEQ ID NO: 152027 - DNA, 120 bp, Artificial Sequence
  ENSG00000105810_62 (sequence is synthesized)
atgcgaaaggccgaattccaccccagggtttgttataacagtggccagtctgaaccccatttgctcgtgctcaaaacttgattcccacttgaaagccttccgggcgcgctgcctcgttgc

SEQ ID NO: 152028 - DNA, 120 bp, Artificial Sequence
  ENSG00000105810_63 (sequence is synthesized)
cccgcccctttggcaggagagaggcagtgggcgaggccgggctggggccccgcctcccactcacctgccggtgcctgaaattatgtgcggccccgcgggctgctttccgaggtcagagtg

SEQ ID NO: 152029 - DNA, 120 bp, Artificial Sequence
  ENSG00000105810_64 (sequence is synthesized)
ccctgctgctgtctcagaggcatctgttctgcaaatcttaggaagaaaaatgtccctagtagcaaacgggtgtcttctgtgcataaataagtacaacacaattctccgaaagttcgggta

SEQ ID NO: 152030 - DNA, 120 bp, Artificial Sequence
  ENSG00000105810_65 (sequence is synthesized)
aaaagagatgcggtagcagctgccctgtgtgaagctgtctaccccgcatctctcaggcgctaagctcagtttttgtttttgtttttgtttttttaaagaaaagatgtataattgcaggaa

SEQ ID NO: 152031 - DNA, 120 bp, Artificial Sequence
  ENSG00000105810_66 (sequence is synthesized)
tttttttttatttttttattttccatcattctatatatgtgatggtgaaagatatgcctggaaaagttttgttttgaaaagtttattttctgcttcgtcttcagttggcaaaagctctca

SEQ ID NO: 152032 - DNA, 120 bp, Artificial Sequence
  ENSG00000105810_67 (sequence is synthesized)
attctttagcttccagtttcttttctctctttttctttgttaggtaattaaaggtatgtaaacaaattatctcatgtagcaggggattttcatgttgagaggaatcttccgtgtgagttg

SEQ ID NO: 152033 - DNA, 120 bp, Artificial Sequence
  ENSG00000105810_68 (sequence is synthesized)
tttggtcacacaaataaccctttctcaattttaggagtttggattgtcaaatgtaggtttttctcaaagggggcatataactacatattgactgccaagaactatgactgtagcactaat

SEQ ID NO: 152034 - DNA, 120 bp, Artificial Sequence
  ENSG00000105810_69 (sequence is synthesized)
cagcacacatagagccacacaattatttaatttctaactctctgtggtccctagaaaaattccgttgatgtgcttaggttaaagttctgaagatacccgttgtacccttacttgaaagtt

SEQ ID NO: 152035 - DNA, 120 bp, Artificial Sequence
  ENSG00000105810_70 (sequence is synthesized)
tctaatcttaagttttatgaaatgcaataatatgtatcagctagcaatatttctgtgatcaccaacaactctcagtttgatcttaaagtctgaataataaaacaaatcccagcagtaata

SEQ ID NO: 152036 - DNA, 120 bp, Artificial Sequence
  ENSG00000105810_71 (sequence is synthesized)
catttcttaaacctcacagtgcatgatatatcttttcattctgatcctgtgtttgcaaaaatatacacatgtatatcatagttcctcactttttattcatttgttttcctattacctgta

SEQ ID NO: 152037 - DNA, 120 bp, Artificial Sequence
  ENSG00000105810_72 (sequence is synthesized)
gtaaatatattagttagtacatggaatttatagcatcagctacccccaggaacagcacctgacaggcgggggattttttttcaagttgttctacatttgcataaattatttctattatta

SEQ ID NO: 152038 - DNA, 120 bp, Artificial Sequence
  ENSG00000105810_73 (sequence is synthesized)
ttcatgtatgttatttatttctgaatcacactagtcctgtgaaagtacaactgaaggcagaaagtgttaggattttgcatctaatgttcattatcatggtattgatggacctaagaaaat

SEQ ID NO: 152039 - DNA, 120 bp, Artificial Sequence
  ENSG00000105810_74 (sequence is synthesized)
aaaaattagactaagcccccaaataagctgcatgcatttgtaacatgattagtagatttgaatatatagatgtagtattttgggtatctaggtgttttatcattatgtaaaggaattaaa

SEQ ID NO: 152040 - DNA, 120 bp, Artificial Sequence
  ENSG00000105810_75 (sequence is synthesized)
gtaaaggactttgtagttgtttttattaaatatgcatatagtagagtgcaaaaatatagcaaaaataaaaactaaaggtagaaaagcattttagatatgccttaatttagaaactgtgcc

SEQ ID NO: 152041 - DNA, 120 bp, Artificial Sequence
  ENSG00000105810_76 (sequence is synthesized)
aggtggccctcggaatagatgccaggcagagaccagtgcctgggtggtgcctcctcttgtctgccctcatgaagaagcttccctcacgtgatgtagtgccctcgtaggtgtcatgtggag

SEQ ID NO: 152042 - DNA, 120 bp, Artificial Sequence
  ENSG00000105810_77 (sequence is synthesized)
tagtgggaacaggcagtactgttgagaggagagcagtgtgagagtttttctgtagaagcagaactgtcagcttgtgccttgaggcttccagaacgtgtcagatggagaagtccaagtttc

SEQ ID NO: 152043 - DNA, 120 bp, Artificial Sequence
  ENSG00000105810_78 (sequence is synthesized)
catgcttcaggcaacttagctgtgtacagaagcaatccagtgtggtaataaaaagcaaggattgcctgtataatttattataaaataaaagggattttaacaaccaacaattcccaacac

SEQ ID NO: 152044 - DNA, 120 bp, Artificial Sequence
  ENSG00000105810_79 (sequence is synthesized)
ctcaaaagcttgttgcattttttggtatttgaggtttttatctgaaggttaaagggcaagtgtttggtatagaagagcagtatgtgttaagaaaagaaaaatattggttcacgtagagtg

SEQ ID NO: 152045 - DNA, 120 bp, Artificial Sequence
  ENSG00000105810_80 (sequence is synthesized)
caaattagaactagaaagttttatacgattatcattttgagatgtgttaaagtaggttttcactgtaaaatgtattagtgtttctgcattgccatagggcctggttaaaactttctctta

SEQ ID NO: 152046 - DNA, 120 bp, Artificial Sequence
  ENSG00000105810_81 (sequence is synthesized)
ggtttcaggaagactgtcacatacagtaagcttttttccttctgacttataatagaaaatgttttgaaagtaaaaaaaaaaaatctaatttggaaatttgacttgttagtttctgtgttt

SEQ ID NO: 152047 - DNA, 120 bp, Artificial Sequence
  ENSG00000105810_82 (sequence is synthesized)
gaaatcatggttctagaaatgtagaaattgtgtatatcagatactcatctaggctgtgtgaaccagcccaagatgaccaacatccccacacctctacatctctgtcccctgtatctcttc

SEQ ID NO: 152048 - DNA, 120 bp, Artificial Sequence
  ENSG00000105810_83 (sequence is synthesized)
ctttctaccactaaagtgttccctgctaccatcctggcttgtccacatggtgctctccatcttcctccacatcatggaccacaggtgtgcctgtctaggcctggccaccactcccaactt

SEQ ID NO: 152049 - DNA, 120 bp, Artificial Sequence
  ENSG00000105810_84 (sequence is synthesized)
gacctagccacattcatctagagatggttcctgatgctgggcacagactgtgctcatggcacccattagaaatgcctctagcatctttgtatgcatcttgatttttaaaccaagtcattg

SEQ ID NO: 152050 - DNA, 120 bp, Artificial Sequence
  ENSG00000105810_85 (sequence is synthesized)
tacagagcattcagttttggctgtggtaccaagagaaaaactaatcaagaatataaaccacattccaggctgctgttttctctccatctacaggccacacttttactgtatttcttcata

SEQ ID NO: 152051 - DNA, 120 bp, Artificial Sequence
  ENSG00000105810_86 (sequence is synthesized)
cttgaaattcattctgctattttcatatcagggtacagacttataagggtgcatgttccttaaaggtgcataattattcttattccgtttgcttatattgctacagaatgctctgttttg

SEQ ID NO: 152052 - DNA, 120 bp, Artificial Sequence
  ENSG00000105810_87 (sequence is synthesized)
gtgctttgagttctgcagacccaagaagcagtgtggaaattcactgcctgggacacagtcttataagaatgttggcaggtgactttgtatcagatgttgcttctcttttctctgtacaca

SEQ ID NO: 152053 - DNA, 120 bp, Artificial Sequence
  ENSG00000105810_88 (sequence is synthesized)
gattgagagttaccacagtggcctgtcgggtccaccctgtgggtgcagcacagctctctgaaagcaagaaccttcctacctattctaacgtttttgccctctaagaaaaatggcctcagg

SEQ ID NO: 152054 - DNA, 120 bp, Artificial Sequence
  ENSG00000105810_89 (sequence is synthesized)
tatggtatagacatagcaagaggggaagggctgtctcactctagcaaccatccctccattacacacagaaagccctcttgaagcaaaagaagaagaaagaaagaaagcttatctctaagg

SEQ ID NO: 152055 - DNA, 120 bp, Artificial Sequence
  ENSG00000105810_90 (sequence is synthesized)
ctactgtcttcagaatgctctgagctgaatgctcttgctcctttcccaagaggcagatgaaaatatagccagtttatctatacccttcctatctgaggaggagaatagaaaagtagggta

SEQ ID NO: 152056 - DNA, 120 bp, Artificial Sequence
  ENSG00000105810_91 (sequence is synthesized)
aatatgtaacgtaaaatatgtcattcaaggaccaccaaaactttaagtaccctatcattaaaaatctggttttaaaagtagctcaagtaagggatgctttgtgacccagggtttctgaag

SEQ ID NO: 152057 - DNA, 120 bp, Artificial Sequence
  ENSG00000105810_92 (sequence is synthesized)
tcagatagccattcttacctgccccttactctgacttattgggaaagggagaactgcagtggtgtttctgttgcagtggcaaaggtaacatgtcagaaaattcagagggttgcataccaa

SEQ ID NO: 152058 - DNA, 120 bp, Artificial Sequence
  ENSG00000105810_93 (sequence is synthesized)
taatcctttggaaactggatgtcttactgggtgctagaatgaaaatgtaggtatttattgtcagatgatgaagttcattgtttttttcaaaattggtgttgaaatatcactgtccaatgt

SEQ ID NO: 152059 - DNA, 120 bp, Artificial Sequence
  ENSG00000105810_94 (sequence is synthesized)
gttcacttatgtgaaagctaaattgaatgaggcaaaaagagcaaatagtttgtatatttgtaataccttttgtatttcttacaataaaaatattggtagcaaataaaaataataaaaaca

SEQ ID NO: 152060 - DNA, 120 bp, Artificial Sequence
  ENSG00000105810_95 (sequence is synthesized)
ataactttaaactgctttctggagatgaattactctcctggctattttcttttttactttaatgtaaaatgagtataactgtagtgagtaaaattcattaaattccaagttttagcagaa

SEQ ID NO: 152061 - DNA, 120 bp, Artificial Sequence
  ENSG00000105810_96 (sequence is synthesized)
gctggtaactccttccccagagtctgattacctgctccgcgaggccgcggacacgtgcggagagccgactgacactcgcagccccctcgggaggcccgacgcgactgggcccctcaggtg

SEQ ID NO: 152062 - DNA, 120 bp, Artificial Sequence
  ENSG00000105810_97 (sequence is synthesized)
agcatggcatttctatcattaggggtcatgatggccagatccatctaccccaggctaccacttgcaagcctgtcctgaaaccgccttctcagtgcttacagtgttgttttatatgactgt

SEQ ID NO: 152063 - DNA, 120 bp, Artificial Sequence
  ENSG00000105810_98 (sequence is synthesized)
agactcgagcgggagggggttggggggatgcaggacaggcgggttgggcggccggcggcggctccccggctacctgtgtggccctcgacctggctcagacccccgggcagtccctggggg

SEQ ID NO: 152064 - DNA, 120 bp, Artificial Sequence
  ENSG00000105810_99 (sequence is synthesized)
ctctttcctcggcttttaaggaaagttctgaatgtagtgagtgccagaagctctgctctcgccgcggtccgctccacccgctcatcgtgggggtcgcgccgtttgtttaattcctggcaa

SEQ ID NO: 152065 - DNA, 120 bp, Artificial Sequence
  ENSG00000105819_0 (sequence is synthesized)
atcctctaccttccttctagcagaaatggcggctgcggcggctcgagtggtgttgtcatccgcggcgcggcggcggctctggggtttcagcgagagtcttctaatccgaggcgctgcggg

SEQ ID NO: 152066 - DNA, 120 bp, Artificial Sequence
  ENSG00000105819_1 (sequence is synthesized)
acggtcattatattttggagagaacagattaagaagtacacaggctgctacccaagttgttctgaatgttcctgaaacaagagtaacatgtttagaaagtggactcagagtagcttcgga

SEQ ID NO: 152067 - DNA, 120 bp, Artificial Sequence
  ENSG00000105819_2 (sequence is synthesized)
agactctgggctctcaacatgcacagttggactctggattgatgctggaagtagatacgaaaatgagaagaacaatggaacagcacactttctggagcatatggctttcaagggcaccaa

SEQ ID NO: 152068 - DNA, 120 bp, Artificial Sequence
  ENSG00000105819_3 (sequence is synthesized)
gaagagatcccagttagatctggaacttgagattgaaaatatgggtgctcatctcaatgcctatacctccagagagcagactgtatactatgccaaagcattctctaaagacttgccaag

SEQ ID NO: 152069 - DNA, 120 bp, Artificial Sequence
  ENSG00000105819_4 (sequence is synthesized)
agctgtagaaattcttgctgatataatacaaaacagcacattgggagaagcagagattgaacgtgagcgtggagtaatccttagagagatgcaggaagttgaaaccaatttacaagaagt

SEQ ID NO: 152070 - DNA, 120 bp, Artificial Sequence
  ENSG00000105819_5 (sequence is synthesized)
tgtttttgattatcttcatgccacagcttatcaaaatactgcacttggacggacaattttgggaccaactgaaaatatcaaatctataagtcgtaaggacttagtggattatataaccac

SEQ ID NO: 152071 - DNA, 120 bp, Artificial Sequence
  ENSG00000105819_6 (sequence is synthesized)
acattataaggggccaagaatagtgcttgctgctgctggaggtgtttcccatgatgaattgcttgacttagcaaagtttcatttcggtgactctttatgcacacacaaaggagaaatacc

SEQ ID NO: 152072 - DNA, 120 bp, Artificial Sequence
  ENSG00000105819_7 (sequence is synthesized)
agctctgcctccctgcaaattcacaggaagtgagattcgtgtgagggatgacaagatgcctttggcgcaccttgcaatagctgttgaagctgttggttgggcacatccagatacaatctg

SEQ ID NO: 152073 - DNA, 120 bp, Artificial Sequence
  ENSG00000105819_8 (sequence is synthesized)
tctcatggttgcaaacacgctgattggcaactgggatcgctcttttgggggaggaatgaatttatctagcaagctggcccagctcacttgtcatggcaatctttgccatagctttcagtc

SEQ ID NO: 152074 - DNA, 120 bp, Artificial Sequence
  ENSG00000105819_9 (sequence is synthesized)
tttcaacacttcctacacagatacaggattatggggactgtatatggtttgtgaatcatccactgttgcagacatgctacatgttgttcaaaaagaatggatgcgactctgtacaagtgt

SEQ ID NO: 152075 - DNA, 120 bp, Artificial Sequence
  ENSG00000105819_10 (sequence is synthesized)
cacagaaagtgaggttgcacgagccagaaatcttctgaaaacaaacatgttgttgcagcttgatggttcaactccaatttgtgaagatattggtaggcaaatgttatgctataatagaag

SEQ ID NO: 152076 - DNA, 120 bp, Artificial Sequence
  ENSG00000105819_11 (sequence is synthesized)
gattcccatccctgagcttgaagcaagaattgatgctgtgaatgctgagacaattcgagaagtatgtaccaaatacatttataataggagtccagctattgctgctgttggtcccattaa

SEQ ID NO: 152077 - DNA, 120 bp, Artificial Sequence
  ENSG00000105819_12 (sequence is synthesized)
gcaactaccagattttaaacagatacgcagtaacatgtgttggcttcgtgattaaaatgctcctaatcaagattgtttgaacacatgtatttataaaacagagctagagaaaaataaaaa

SEQ ID NO: 152078 - DNA, 120 bp, Artificial Sequence
  ENSG00000105819_13 (sequence is synthesized)
tgaacatgtatatacatttggaaatttgaattaaatactgtatcatactttcaaaggataaaaagactacccctctgaaggttgttttgtattaatggtcagtctttgttctctgagaaa

SEQ ID NO: 152079 - DNA, 120 bp, Artificial Sequence
  ENSG00000105819_14 (sequence is synthesized)
ttatgttggaagcagcatactttcaaattattaccatgagtataattttaagaatgaaaatgtttacagtattttcagttttattataaaaatgcacacacaacaaagattgtcatttct

SEQ ID NO: 152080 - DNA, 120 bp, Artificial Sequence
  ENSG00000105819_15 (sequence is synthesized)
tggctctacttgcattcagcacttgttcttgagcagctttctttgcttttaccatctcgacaagttcctaggaagggagaaaggtgtgatttaagaagttgcgatttaaaaacagacatt

SEQ ID NO: 152081 - DNA, 120 bp, Artificial Sequence
  ENSG00000105819_16 (sequence is synthesized)
tctgccagggcctagaaagtttctaaggttgctcatttcttcctcataatattgaccccataactactggttttgaaataagcactatattattaaccacttaatagacataaaatatga

SEQ ID NO: 152082 - DNA, 120 bp, Artificial Sequence
  ENSG00000105819_17 (sequence is synthesized)
gctatatcacccaagctacaatttaaaatacaacaatctataaacgcttaagtctgcaaccttgtatcgtttcatgcagtccttctttgtcctgccaggcaccgcttctgctattttttc

SEQ ID NO: 152083 - DNA, 120 bp, Artificial Sequence
  ENSG00000105819_18 (sequence is synthesized)
ccatctttcaggtgtatttactgggtatgttttcaaagcttgttccaaaagcttctgttcttctgttgtccaaggggtgaagtctgtatatggacctgattaagaaaaatttttatttga

SEQ ID NO: 152084 - DNA, 120 bp, Artificial Sequence
  ENSG00000105819_19 (sequence is synthesized)
aaactgtctttgaacatgttctcagacaagtcttgtggtccacaagtattcgctaagtgcccatttcaatctgggatgtgtcattttgaaaataaacttgtagagatgagagatacatat

SEQ ID NO: 152085 - DNA, 120 bp, Artificial Sequence
  ENSG00000105819_20 (sequence is synthesized)
agccctctgagtgttaataagagaaaaaatttcagatagctcacatcccagaaaataaaatctcaaaggcttttaaaacacaatagtaaagatctaccttgtactgtttatctcttaaaa

SEQ ID NO: 152086 - DNA, 120 bp, Artificial Sequence
  ENSG00000105819_21 (sequence is synthesized)
atcaatgtaatacactcaccagactggtaaaaagccatatttaaatttatagtactgttggactcttggactcaaaaacacaaccacaattcattaagagttctgataaatctacttcct

SEQ ID NO: 152087 - DNA, 120 bp, Artificial Sequence
  ENSG00000105819_22 (sequence is synthesized)
tacagaataggtaaaagagcttcctcacagttaaacttttgctggatagaaaccctggaaatcattcttgttttacactgaaggaaacaaacctagcaaaattaagccaagtgcccaagg

SEQ ID NO: 152088 - DNA, 120 bp, Artificial Sequence
  ENSG00000105819_23 (sequence is synthesized)
taccagtgctggagaggcaagctgagattagattgtgttgtagtgtggtgttctcttcgtcacatctgctaaaatcttgggagccgatgctgaacacttccaataactgctattgtggtt

SEQ ID NO: 152089 - DNA, 120 bp, Artificial Sequence
  ENSG00000105819_24 (sequence is synthesized)
cttcaactaaaccttgtatatttcagaaaacatctaagatgtgtgtcagaaacaaatatgtttcttaaggatgttaagtattacacagtccacttgtgtaggtaaaagtagaatgttaag

SEQ ID NO: 152090 - DNA, 120 bp, Artificial Sequence
  ENSG00000105819_25 (sequence is synthesized)
tggtagaaagctgatttggttaagttaatggacttctggcaatttagttatttcagactatgcagtgacaacacagactaatactaccagtagcctgactactactagaaactgcggcct

SEQ ID NO: 152091 - DNA, 120 bp, Artificial Sequence
  ENSG00000105819_26 (sequence is synthesized)
gtgagatctgttaaaagttaagcctagaaaccaaagttccttcccaattaaagaaggaaaaacaaaacaaaacaaaacaaaaccaccacctattcaaaacaaagcagagaatttgtataa

SEQ ID NO: 152092 - DNA, 120 bp, Artificial Sequence
  ENSG00000105819_27 (sequence is synthesized)
tatttgatggtacctaaggtgcctaagaagcttttttgaaggtagcttttaagttctaggaagtcttttgttgaatttccttgtattggtttaaagccctaaataccatagattttattt

SEQ ID NO: 152093 - DNA, 120 bp, Artificial Sequence
  ENSG00000105819_28 (sequence is synthesized)
cctctcttggaaaaaagatggaagtgacatggcagtatttcctgctgttctccagttacttcacaataccaaaataaattaaacgtactgttgcaaaactcctatgagaaatcactattc

SEQ ID NO: 152094 - DNA, 120 bp, Artificial Sequence
  ENSG00000105819_29 (sequence is synthesized)
aaaaaatggtgccagcttgctgtttaatggtacaactgaagaggaaggagccttcccatttccataaaagaggcaaaggagtcatacccacatagcactactgccagtcactcttgcctt

SEQ ID NO: 152095 - DNA, 120 bp, Artificial Sequence
  ENSG00000105819_30 (sequence is synthesized)
cacagggtcacctctcctcacagaaagcagactggacaaatatcagggcccacctccctccaacatggaaacaagtccccctaagaaagagctgagactagtgtgctaatacctgttgta

SEQ ID NO: 152096 - DNA, 120 bp, Artificial Sequence
  ENSG00000105819_31 (sequence is synthesized)
ttttgtggagataaaggtgcaggagaataaactcctttataaagaagtgtctttcaggtgttctgaaaccctgccttgttacttacctttattaaaagaaccgaaataatgcctaactca

SEQ ID NO: 152097 - DNA, 120 bp, Artificial Sequence
  ENSG00000105819_32 (sequence is synthesized)
agaaatggcggctgcggcggctcgagtggtgttgtcatccgcggcgcggcggcggctctggggtttcagcgagagtcttctaatccgaggcgctgcgggacgggtgagcttccctccagg

SEQ ID NO: 152098 - DNA, 120 bp, Artificial Sequence
  ENSG00000105819_33 (sequence is synthesized)
ccggtcctgtcctcgagatctcgccagacccggcgcagcgcacctgagagtcggcgccacagatccgaacagtgggtcgggcagggcctcctcgacccggacccgccgggcgccaggcgg

SEQ ID NO: 152099 - DNA, 120 bp, Artificial Sequence
  ENSG00000105819_34 (sequence is synthesized)
cctggggctgctgaactggccgggggtgactggcttgtggccacccgccaggagacctgctagtgacgtgtgggatgaccctggttttcggctcctcccgccagctactgaggagtgcat

SEQ ID NO: 152100 - DNA, 120 bp, Artificial Sequence
  ENSG00000105819_35 (sequence is synthesized)
gtttgaccactaaaaacgtagtgcttgcaaattggggaaaactaaaaagtgaaatgggtaccgctccagagttctatttttgcctaagactgaacttcgtcctcagctgggcttcccgcg

SEQ ID NO: 152101 - DNA, 120 bp, Artificial Sequence
  ENSG00000105819_36 (sequence is synthesized)
cctcagccacagtacgtctaattatttaaaatttgtgattatcgctggtggtcaacaatttttttgtttttcatcctttaactggaaaaaggaggggctgtctcagtttttcttctgact

SEQ ID NO: 152102 - DNA, 120 bp, Artificial Sequence
  ENSG00000105819_37 (sequence is synthesized)
ctgtgtgtcacttacaattaataatgctagctgttaacatctacatagcagttgacatgtgccaggcctgtttaccagttaatcttctccatgatcctatgaggaaagtgctattgctgt

SEQ ID NO: 152103 - DNA, 120 bp, Artificial Sequence
  ENSG00000105819_38 (sequence is synthesized)
ctccatttcatagatgaggaaaatgaggcacagaggagacgttatgtagccactaccactgcaacttgctcaaacttccggccaagtcggctctagtccagacagcctgactcctcagcc

SEQ ID NO: 152104 - DNA, 120 bp, Artificial Sequence
  ENSG00000105819_39 (sequence is synthesized)
tgcgtctgtatgctgcctctcctaattcattatgtttattaataatttttccccgttttgttaacacttatgtttcaaaaacagtcatctttatttacattgactgatcatttcttttgt

SEQ ID NO: 152105 - DNA, 120 bp, Artificial Sequence
  ENSG00000105819_40 (sequence is synthesized)
attaagagacctagataaacagtagttgccatgttttcaaaggttgcagttggtttttcctaagtctcaagatgtgaagctgatttatactatagaatttttttttttttttttttttga

SEQ ID NO: 152106 - DNA, 120 bp, Artificial Sequence
  ENSG00000105819_41 (sequence is synthesized)
caggcgtgagccaccacacctggctgaaagttttaatctttcagaagcaggttaattcagaaagatgatcctaaaagtttaaaagccaactagaagttgtttggaaaatatctctgaaag

SEQ ID NO: 152107 - DNA, 120 bp, Artificial Sequence
  ENSG00000105819_42 (sequence is synthesized)
ttgtttggaaaatatctctgaaagtaatctggttgaagggaaagtaaatctgaagttgccactgctaaaagaaaacaaagtatattgagtcgatagatgggcagaaaggctcgcagcttc

SEQ ID NO: 152108 - DNA, 120 bp, Artificial Sequence
  ENSG00000105819_43 (sequence is synthesized)
ttggaaaacatttagctctggttcctttcctccactattcttaattggtttacatctttctaaatctagtcaactaggatgtaattattgttaaaaattagatttaagttagactctact

SEQ ID NO: 152109 - DNA, 120 bp, Artificial Sequence
  ENSG00000105819_44 (sequence is synthesized)
ctccaacagatgaggactcatgaagtctcaagatgcttatagcatttctgaaaatgtgatcagcccatttgtataaagcctttgtctgctaatgtgtaattaggcatgtttatgtatcat

SEQ ID NO: 152110 - DNA, 120 bp, Artificial Sequence
  ENSG00000105819_45 (sequence is synthesized)
ttttgagaaattaatactggggaaaataatcattttagcttttgcttagcattggaattaaattgtaatcacctgtatgttttgtgtagaagatggcatcatcattcttaggtcattaac

SEQ ID NO: 152111 - DNA, 120 bp, Artificial Sequence
  ENSG00000105819_46 (sequence is synthesized)
tcatgaaatacaacattttccaactactactgtttttccacgttttttaggatgcgactctgtacaagtgtcacagaaagtgaggttgcacgagccagaaatcttctgaaaacaaacatg

SEQ ID NO: 152112 - DNA, 120 bp, Artificial Sequence
  ENSG00000105819_47 (sequence is synthesized)
ttgttgcagcttgatggtaaaaataaagatataggttctgttttcatatggttgatctgtattccaatagttaatttttccttctctttaaacaggttcaactccaatttgtgaagatat

SEQ ID NO: 152113 - DNA, 120 bp, Artificial Sequence
  ENSG00000105819_48 (sequence is synthesized)
tcatgttttcttaaatataagttctttgtaagaatccttttttaaagtggcagaatagagtcttgtactgtgaattctgacttaaaaatataaactgatcctggattgcatgtgggccag

SEQ ID NO: 152114 - DNA, 120 bp, Artificial Sequence
  ENSG00000105821_0 (sequence is synthesized)
actggtcgtctccatgcgccggttcctgggcgtcttagagccaaggcgcgaggctcggagtgagaggtagagctggaggggaccctaagcgccctccgcccgggacgtgagccgctgcgc

SEQ ID NO: 152115 - DNA, 120 bp, Artificial Sequence
  ENSG00000105821_1 (sequence is synthesized)
ccaccgggctagacccggcgccatcatgctgcttctgccaagcgccgcggacggccggggcaccgccatcacccacgctctgacctctgcctctacactctgtcaagttgaacctgtggg

SEQ ID NO: 152116 - DNA, 120 bp, Artificial Sequence
  ENSG00000105821_2 (sequence is synthesized)
aagatggtttgaagcttttgttaagaggagaaacagaaatgcttctgcctcttttcaggaactggaggataagaaagagttatccgaggaatcagaagatgaagaattgcagttggaaga

SEQ ID NO: 152117 - DNA, 120 bp, Artificial Sequence
  ENSG00000105821_3 (sequence is synthesized)
gtttcccatgctgaaaacacttgatcccaaagactggaagaaccaagatcattatgcagttcttggacttggccatgtgagatacaaggctacacagagacagatcaaagcagctcataa

SEQ ID NO: 152118 - DNA, 120 bp, Artificial Sequence
  ENSG00000105821_4 (sequence is synthesized)
agcaatggttttaaaacatcacccagacaaacggaaagcagctggtgaaccaataaaagaaggagataatgactacttcacttgcataactaaagcttatgaaatgttatctgatccagt

SEQ ID NO: 152119 - DNA, 120 bp, Artificial Sequence
  ENSG00000105821_5 (sequence is synthesized)
gaaaagacgagcatttaacagtgtagatcctacttttgataactcagttccttctaaaagtgaagcaaaggataatttcttcgaagtgtttaccccagtgtttgaaaggaattccagatg

SEQ ID NO: 152120 - DNA, 120 bp, Artificial Sequence
  ENSG00000105821_6 (sequence is synthesized)
gtcaaataaaaaaaatgttcctaaacttggtgatatgaattcatcatttgaagatgtagatatattttattctttctggtataattttgattcttggagagaattttcttatttagatga

SEQ ID NO: 152121 - DNA, 120 bp, Artificial Sequence
  ENSG00000105821_7 (sequence is synthesized)
agaagaaaaagaaaaagcagaatgtcgtgatgagaggagatggattgaaaagcagaacagagcaacaagagcacaaagaaaaaaagaagaaatgaacagaataagaacattagttgacaa

SEQ ID NO: 152122 - DNA, 120 bp, Artificial Sequence
  ENSG00000105821_8 (sequence is synthesized)
tgcatacagctgtgatccaaggataaaaaagttcaaggaagaagaaaaagccaagaaagaagcagaaaagaaagcaaaagcagaagctaaacggaaggagcaagaagctaaagaaaaaca

SEQ ID NO: 152123 - DNA, 120 bp, Artificial Sequence
  ENSG00000105821_9 (sequence is synthesized)
aattagaagctgctcggttagctaaggagaaagaagaggaggaagtcagacagcaagcattgctggcaaagaaggaaaaagatatccagaaaaaagccattaagaaggaaaggcaaaaac

SEQ ID NO: 152124 - DNA, 120 bp, Artificial Sequence
  ENSG00000105821_10 (sequence is synthesized)
ttcgaaactcatgcaagacctggaatcatttttctgataatgaggcagagcgggttaaaatgatggaagaagtggaaaaactttgtgatcggcttgaactggcaagcttacagtgcttga

SEQ ID NO: 152125 - DNA, 120 bp, Artificial Sequence
  ENSG00000105821_11 (sequence is synthesized)
atgaaacactcacatcatgcacaaaagaagtaggaaaggctgctttggaaaaacagatagaagaaataaatgagcaaatcagaaaagagaaagaggaagctgaggctcgtatgcgacaag

SEQ ID NO: 152126 - DNA, 120 bp, Artificial Sequence
  ENSG00000105821_12 (sequence is synthesized)
catctaagaacacagagaaatcaactggtggaggtggaaatggaagtaaaaattggtcagaagatgatctacaattactaattaaagctgtgaatctgttccctgctggaacaaattcaa

SEQ ID NO: 152127 - DNA, 120 bp, Artificial Sequence
  ENSG00000105821_13 (sequence is synthesized)
gatgggaagttattgctaattacatgaacatacattcttcctctggagtcaaaagaactgccaaagatgttattggcaaagcaaagagtctccaaaaacttgaccctcatcaaaaagatg

SEQ ID NO: 152128 - DNA, 120 bp, Artificial Sequence
  ENSG00000105821_14 (sequence is synthesized)
acataaataaaaaggcatttgataagttcaaaaaagaacatggagtggtacctcaagcagacaacgcaacgccttcagaacgatttgaaggtccatatacagacttcaccccttggacaa

SEQ ID NO: 152129 - DNA, 120 bp, Artificial Sequence
  ENSG00000105821_15 (sequence is synthesized)
cagaagaacagaagcttttggaacaagctttgaaaacatacccagtaaatacacctgaaagatgggaaaaaatagcagaagcggtgcctggcaggacaaagaaggactgcatgaaacgat

SEQ ID NO: 152130 - DNA, 120 bp, Artificial Sequence
  ENSG00000105821_16 (sequence is synthesized)
acaaggaacttgtcgagatggtaaaagcaaagaaagctgctcaagaacaagtgctgaatgcaagtagagccaagaaatgacaatctttgttgtgtgtgcatttttataataaaactgaaa

SEQ ID NO: 152131 - DNA, 120 bp, Artificial Sequence
  ENSG00000105821_17 (sequence is synthesized)
atactgtaaacattttcattcttaaaattatactcatggtaataatttgaaagtatgctgcttccaacataatttctcagagaacaaagactgaccattaatacaaaacaaccttcagag

SEQ ID NO: 152132 - DNA, 120 bp, Artificial Sequence
  ENSG00000105821_18 (sequence is synthesized)
gggtagtctttttatcctttgaaagtatgatacagtatttaattcaaatttccaaatgtatatacatgttcatttttatttttctctagctctgttttataaatacatgtgttcaaacaa

SEQ ID NO: 152133 - DNA, 120 bp, Artificial Sequence
  ENSG00000105821_19 (sequence is synthesized)
catgccccactgctgaccttccagctccatcttcgagttgtagagtttgtagggaagggaaatcagaggaattagtaaaaattattgtttttaataaattaaattgtttgttgaactgtt

SEQ ID NO: 152134 - DNA, 120 bp, Artificial Sequence
  ENSG00000105821_20 (sequence is synthesized)
ttttaaaagatatacagtatcatagtctgcagccataactacatttaacagcatgtgttatattgtcataacaagcaaaaaaccacggtctcccctgccttcagaatcagaagaaagcaa

SEQ ID NO: 152135 - DNA, 120 bp, Artificial Sequence
  ENSG00000105821_21 (sequence is synthesized)
tccattttacatatagactttcccattagggataagaaattaggatgggtgtgtgtgtgtggatacaaaatactcctccaatggcaagcttttaaaaaataatacttcacctctctttag

SEQ ID NO: 152136 - DNA, 120 bp, Artificial Sequence
  ENSG00000105821_22 (sequence is synthesized)
aagtatagcagctgcacttagtggatactgcctttttattgttttttggtttttggttttttttttacgttattttgtaatcttaggtcacacctttgtagatatcaccctgtcttctgt

SEQ ID NO: 152137 - DNA, 120 bp, Artificial Sequence
  ENSG00000105821_23 (sequence is synthesized)
ccaagaaaagttgtctgatgttttattgttgttttcattgacaaggttataatttggcatgggagagggtaatgttgggaccccagtcttcatatgccttataaaacaccatcccttaat

SEQ ID NO: 152138 - DNA, 120 bp, Artificial Sequence
  ENSG00000105821_24 (sequence is synthesized)
gctcctaaatgtcctatgctttgcaatcctgtggacataatttcttatacacgtgatcagttcaactgattaataaagtttagtgaaagaggtaagaggtgaaggtgatcagttttctat

SEQ ID NO: 152139 - DNA, 120 bp, Artificial Sequence
  ENSG00000105821_25 (sequence is synthesized)
cttaggagaatgttctgccctccactctagagaatggatattgaggtcagagagggtaagattgtggccacatggaaaaggagcagggagtcagggcctgtcaagaagaggaagtattat

SEQ ID NO: 152140 - DNA, 120 bp, Artificial Sequence
  ENSG00000105821_26 (sequence is synthesized)
atgtggaggaagatgactgaataagaatgcctgtggtaaaaattattagtcaatacttagcatagtagatgaactcaaaatcgtccccattactgcttacatttaggaaaatcacaggaa

SEQ ID NO: 152141 - DNA, 120 bp, Artificial Sequence
  ENSG00000105821_27 (sequence is synthesized)
ttattttaaactggatttgtttaaaggctggcatgagtctagacaaagcatatggtaatgcatgtgaatagttattccagtataaataaatgccagaaaagtccatttgccacgtacaag

SEQ ID NO: 152142 - DNA, 75 bp, Artificial Sequence
  ENSG00000105821_28 (sequence is synthesized)
tataaataaatgccagaaaagtccatttgccacgtacaagtgtttgcaaagttttactatacgaaagaatagcat

SEQ ID NO: 152143 - DNA, 120 bp, Artificial Sequence
  ENSG00000105821_29 (sequence is synthesized)
attgcgctccagcctgggcaacaagagcgacactctgtttccgaaaaaatagaatagcatacaaataccaaatatgtcttagtacagataaatttgttaattagaattgataatagaact

SEQ ID NO: 152144 - DNA, 120 bp, Artificial Sequence
  ENSG00000105821_30 (sequence is synthesized)
agtacagataaatttgttaattagaattgataatagaactgtgagaatagtttgtgttttaaggtgaaagaattctttctcagaagattaaaaatgtgcaataaattgtaaaagaagcat

SEQ ID NO: 152145 - DNA, 120 bp, Artificial Sequence
  ENSG00000105821_31 (sequence is synthesized)
agattaaaaatgtgcaataaattgtaaaagaagcattcatatgcttctgttaaatccactgtctttttttgagacagaatttcgtacttgttgcgcaggctggagtgcaatggcaccatc

SEQ ID NO: 152146 - DNA, 80 bp, Artificial Sequence
  ENSG00000105821_32 (sequence is synthesized)
tccactctttttattggccttgtagaaattgatttttagccaggcacagtgggtcacacctgtaatcccaacactttgga

SEQ ID NO: 152147 - DNA, 120 bp, Artificial Sequence
  ENSG00000105821_33 (sequence is synthesized)
tagccaggcacagtgggtcacacctgtaatcccaacactttggaagaccaaggcaggcagattacttgaggctggagttcaatactagcccggccaatgtggtgaaaccccatctctact

SEQ ID NO: 152148 - DNA, 84 bp, Artificial Sequence
  ENSG00000105821_34 (sequence is synthesized)
tgtctcatttcagcttttgaatatgtattctctagccaaaaattttgcagcaccagtgtagagattgttaacaataagggtaat

SEQ ID NO: 152149 - DNA, 120 bp, Artificial Sequence
  ENSG00000105821_35 (sequence is synthesized)
ttgcagcaccagtgtagagattgttaacaataagggtaattctaacttactctctaccacccttgtggaatattccgtcagtctttatttagaaagaaactgtcattctctcacctctgt

SEQ ID NO: 152150 - DNA, 120 bp, Artificial Sequence
  ENSG00000105821_36 (sequence is synthesized)
cactgtaaaacacagttgctactcattgctttctgaaaatctatctaaaagttaaaatgcaaagttactgtttgcaaatctataattattagcacaaacctaataaaaatgtaaatctgg

SEQ ID NO: 152151 - DNA, 120 bp, Artificial Sequence
  ENSG00000105821_37 (sequence is synthesized)
ttttaatgaaacttttcttcaactcacactggagcctggagataatgtagacagactccaaatagcagcacttgttatcacagaaacttgcagagataaattctgtgccacagcagaaaa

SEQ ID NO: 152152 - DNA, 120 bp, Artificial Sequence
  ENSG00000105821_38 (sequence is synthesized)
atgagtttgaagagaggtttgaaatggccttgtggatgaataactcagtgacccacagacttgtcaattagtgtccaaggctaatggaagtcacatgacatgagtactgggaaaatcagg

SEQ ID NO: 152153 - DNA, 120 bp, Artificial Sequence
  ENSG00000105821_39 (sequence is synthesized)
caggctgtgggcagttcttggtccctcaggcagacctatgcagactggaagccagagtgaaaagctggtgcttctttttgggttggcctgagaggagtatggggtcagagtgagaatgac

SEQ ID NO: 152154 - DNA, 120 bp, Artificial Sequence
  ENSG00000105821_40 (sequence is synthesized)
attgagagttgaggaccacaaagccctagccaggaagagagtgtagaatagcaatacagtatacttctaagtccctgacttatgatatttgtgcagatagaagaaataaatgagcaaatc

SEQ ID NO: 152155 - DNA, 120 bp, Artificial Sequence
  ENSG00000105821_41 (sequence is synthesized)
tgacagaatacttgtttctcaggaaattgaagatcatgagacaagtcttgatttatgttggcttactctgtcatggcttgttctagggattaggttttctgtagtttttcttttacagtc

SEQ ID NO: 152156 - DNA, 120 bp, Artificial Sequence
  ENSG00000105821_42 (sequence is synthesized)
ttgctctttgttttttcccacctcaagctggagcttgagtttaactgcaagaaagccctagagatccagcgtccctaattctatagatgaaaccgaggctgttttcagaatgattgatct

SEQ ID NO: 152157 - DNA, 120 bp, Artificial Sequence
  ENSG00000105821_43 (sequence is synthesized)
tctgaagaaatgtattaaactggcagtatacacaaataagtggttttatttatgttgatttgtacaccaaatctgtaagatgtatggacttaaaaccaagattatcgttgatttaaacac

SEQ ID NO: 152158 - DNA, 120 bp, Artificial Sequence
  ENSG00000105821_44 (sequence is synthesized)
gcaaaaaccgtagtccaggcaacaggaatttatagtagcagcataattagaccaccaatctgagctcattctgtacatactataacctttctgcagtaaaaatctaatggtttttgtcgt

SEQ ID NO: 152159 - DNA, 120 bp, Artificial Sequence
  ENSG00000105821_45 (sequence is synthesized)
ttcattttgtttttccttactactattcatattattgtataatatatcctatcagatgggaagttattgctaattacatgaacatacattcttcctctggagtcaaaagaactgccaaag

SEQ ID NO: 152160 - DNA, 120 bp, Artificial Sequence
  ENSG00000105821_46 (sequence is synthesized)
atgttattggcaaagcaaagagtctccaaaaacttggtgagttttgagaagtccatttgttactttaaacacctatttttaaaataacttatgcaatttaatgaaagattaaatgatgat

SEQ ID NO: 152161 - DNA, 120 bp, Artificial Sequence
  ENSG00000105821_47 (sequence is synthesized)
ttttatgtctattaagtggttaataatatagtgcttatttcaaaaccagtagttatggggtcaatattatgaggaagaaatgagcaaccttagaaactttctaggccctggcagataatg

SEQ ID NO: 152162 - DNA, 120 bp, Artificial Sequence
  ENSG00000105825_0 (sequence is synthesized)
agaaagccgcgcacctcctcccgccaggcgctttctcggacgccttgcccagcgggccgcccgaccccctgcaccatggaccccgctcgccccctggggctgtcgattctgctgcttttc

SEQ ID NO: 152163 - DNA, 120 bp, Artificial Sequence
  ENSG00000105825_1 (sequence is synthesized)
ctgacggaggctgcactgggcgatgctgctcaggagccaacaggaaataacgcggagatctgtctcctgcccctagactacggaccctgccgggccctacttctccgttactactacgac

SEQ ID NO: 152164 - DNA, 120 bp, Artificial Sequence
  ENSG00000105825_2 (sequence is synthesized)
aggtacacgcagagctgccgccagttcctgtacgggggctgcgagggcaacgccaacaatttctacacctgggaggcttgcgacgatgcttgctggaggatagaaaaagttcccaaagtt

SEQ ID NO: 152165 - DNA, 120 bp, Artificial Sequence
  ENSG00000105825_3 (sequence is synthesized)
tgccggctgcaagtgagtgtggacgaccagtgtgaggggtccacagaaaagtatttctttaatctaagttccatgacatgtgaaaaattcttttccggtgggtgtcaccggaaccggatt

SEQ ID NO: 152166 - DNA, 120 bp, Artificial Sequence
  ENSG00000105825_4 (sequence is synthesized)
gagaacaggtttccagatgaagctacttgtatgggcttctgcgcaccaaagaaaattccatcattttgctacagtccaaaagatgagggactgtgctctgccaatgtgactcgctattat

SEQ ID NO: 152167 - DNA, 120 bp, Artificial Sequence
  ENSG00000105825_5 (sequence is synthesized)
tttaatccaagatacagaacctgtgatgctttcacctatactggctgtggagggaatgacaataactttgttagcagggaggattgcaaacgtgcatgtgcaaaagctttgaaaaagaaa

SEQ ID NO: 152168 - DNA, 120 bp, Artificial Sequence
  ENSG00000105825_6 (sequence is synthesized)
aagaagatgccaaagcttcgctttgccagtagaatccggaaaattcggaagaagcaattttaaacattcttaatatgtcatcttgtttgtctttatggcttatttgcctttatggttgta

SEQ ID NO: 152169 - DNA, 120 bp, Artificial Sequence
  ENSG00000105825_7 (sequence is synthesized)
tctgaagaataatatgacagcatgaggaaacaaatcattggtgatttattcaccagtttttattaatacaagtcactttttaaaaaatttggatttttttatatataactagctgctatt

SEQ ID NO: 152170 - DNA, 120 bp, Artificial Sequence
  ENSG00000105825_8 (sequence is synthesized)
caaatgtgagtctaccatttttaatttatggttcaactgtttgtgagactgaattcttgcaatgcataagatataaaagcaaatatgactcactcatttcttggggtcgtattcctgatt

SEQ ID NO: 152171 - DNA, 120 bp, Artificial Sequence
  ENSG00000105825_9 (sequence is synthesized)
gcttttaacatatttgagaataaaaaggactagcaaataaaactcattttgcatttaaaagttggattatattttagtcccaagaagacaaagtcgcagattaacaacactttaaaaata

SEQ ID NO: 152172 - DNA, 120 bp, Artificial Sequence
  ENSG00000105825_10 (sequence is synthesized)
ttactcccattttattgtgttagattgcagtacaatgaatgaataaggggatttatttaaaagatcttaactttcttgactgatttaaaaagctaatcaatttattaaagccagaaatgt

SEQ ID NO: 152173 - DNA, 120 bp, Artificial Sequence
  ENSG00000105825_11 (sequence is synthesized)
tctcctctgggaaagcaatttctatctatttatctaccaatccccactcacatgtatatgtttgtgtttacatagagatagatggttttaagggttttcctattgttaaattatttccta

SEQ ID NO: 152174 - DNA, 120 bp, Artificial Sequence
  ENSG00000105825_12 (sequence is synthesized)
agacattgtgggttggagaccactaaacttataaaaaaccaaggaaagtaaagtttttcaaatgtttatactgtttaaggtgtttatttatataaaccatgcatgagaaaccatgcataa

SEQ ID NO: 152175 - DNA, 120 bp, Artificial Sequence
  ENSG00000105825_13 (sequence is synthesized)
aataatttaaatttcaccagtaaattatcattgattaaatatggtcataccaatgaaataggttttttctttctctgtaataaaacaatttttctaaattcttatgttttcatagcaaga

SEQ ID NO: 152176 - DNA, 120 bp, Artificial Sequence
  ENSG00000105825_14 (sequence is synthesized)
aagattaacatatttaattacaaattaaatatgcaaaatgacaaatgcgtttaccttttgcttgaacaatctttcatttaaaaatttatcccagttattttgacaaataggtatatgcct

SEQ ID NO: 152177 - DNA, 120 bp, Artificial Sequence
  ENSG00000105825_15 (sequence is synthesized)
gagaactttgaatgatgctgaaagctagaagcaaaccaggtactcttcagtcagggactggttgaagattttatggatgaggagttagcaaaatatctatatatgcatatcttctgactc

SEQ ID NO: 152178 - DNA, 120 bp, Artificial Sequence
  ENSG00000105825_16 (sequence is synthesized)
ccaggatacataagaaacacagggcctagaacagtatgaataaacacacatatacacaaacatcacagaagatactaaagatattaaaaatgtttacctatagaggtttggagagaacag

SEQ ID NO: 152179 - DNA, 120 bp, Artificial Sequence
  ENSG00000105825_17 (sequence is synthesized)
aggggtggacagttgtggagataatatttgtgtaaatataactgtgatatagtttttatcttggaccatgtaaatatttgacataattaataatcaaaattaaataaaaaagaaaaagca

SEQ ID NO: 152180 - DNA, 120 bp, Artificial Sequence
  ENSG00000105825_18 (sequence is synthesized)
tagcctgggttttctcaagtgttaagcaaacctcatggttttcagtttcttaaaagtaatcacaaatttacaaccactaacacatttcctgtctcccaactgacattgatcataattcag

SEQ ID NO: 152181 - DNA, 120 bp, Artificial Sequence
  ENSG00000105829_0 (sequence is synthesized)
actgatgtcgtggcgctttaggggaagaagttggtgtttcgctgggccctggtactgaagacgcggtccgggtcgcccctagctgtttcctactcacccaaagccccgcacccgcctttt

SEQ ID NO: 152182 - DNA, 120 bp, Artificial Sequence
  ENSG00000105829_1 (sequence is synthesized)
ctctctctcctctggcaggatgaggcgtgcaggcctgggtgaaggagtacctcctggcaactatgggaactatggctatgctaatagtgggtatagtgcctgtgaagaagaaaatgagag

SEQ ID NO: 152183 - DNA, 120 bp, Artificial Sequence
  ENSG00000105829_2 (sequence is synthesized)
gctcactgaaagtctgagaagcaaagtaactgctataaaatctctttccattgaaataggccatgaagttaaaacccagaataaattattagctgaaatggattcacaatttgattccac

SEQ ID NO: 152184 - DNA, 120 bp, Artificial Sequence
  ENSG00000105829_3 (sequence is synthesized)
aactggatttctaggtaaaactatgggcaaactgaagattttatccagagggagccaaacaaagctgctgtgctatatgatgctgttttctttatttgtcttttttatcatttattggat

SEQ ID NO: 152185 - DNA, 120 bp, Artificial Sequence
  ENSG00000105829_4 (sequence is synthesized)
tattaaactgaggtgatgcatgtaattgtgaatttggaatttgttccaacttaatggcttgcagtaccactttgataaaaatcagcatcaaaacattcctagtgttcaaatactgtggca

SEQ ID NO: 152186 - DNA, 120 bp, Artificial Sequence
  ENSG00000105829_5 (sequence is synthesized)
ttttccattgaaaattgctgaattttgcttattttataaatcacattagttaatacagtggtctttgaatactgtttcttaatgactcattttagcccctattttcaggggtagtgagag

SEQ ID NO: 152187 - DNA, 120 bp, Artificial Sequence
  ENSG00000105829_6 (sequence is synthesized)
gccaactgtcagattaaatagcattataatattttgttgtaatcataaatgcaggtttatgtcccatgtaaggaaacttagtgggagagtaacagaatgcctggagagcctgactctgag

SEQ ID NO: 152188 - DNA, 120 bp, Artificial Sequence
  ENSG00000105829_7 (sequence is synthesized)
ctcttgaagtagtcagccagtttgtggtaaaatggtaattgaattttcctaactgcatcaactgtaatgatatactcccttctcctcctttatttagttaaaattgtaggctgatttctt

SEQ ID NO: 152189 - DNA, 120 bp, Artificial Sequence
  ENSG00000105829_8 (sequence is synthesized)
tttacctacaatcttcctaataatttttgatgataatgacccctcatttctttctgcccaaagacctcattctttaaataaaacttgttattttggcatatttctggtagggcccattgc

SEQ ID NO: 152190 - DNA, 120 bp, Artificial Sequence
  ENSG00000105829_9 (sequence is synthesized)
acatgtgtatcagtatagttattatttcatattaactttatgaattctcttgacttggcttataatagttttatgatttttactacataggtagcacatttatcatttgtgacagaataa

SEQ ID NO: 152191 - DNA, 120 bp, Artificial Sequence
  ENSG00000105829_10 (sequence is synthesized)
tgtgaagttaagtaattactgaactttaaatggaaatagtatgcaagaaactcaggcattgaacttgaagataagagtattattgctttaatccagtgtatttgtttatggaaagaaaaa

SEQ ID NO: 152192 - DNA, 120 bp, Artificial Sequence
  ENSG00000105829_11 (sequence is synthesized)
cacaaaggcagactgttgagtaaaaaatattaaatattgttaaatattctgtattttggaatttatccatttataggcttcaaaagtaaatttttaaataaaatatattagtcgactgtg

SEQ ID NO: 152193 - DNA, 120 bp, Artificial Sequence
  ENSG00000105829_12 (sequence is synthesized)
ctgttcctcagcatttgtccagaagcttaaaaagaaggaggcttactttcagtgccatctatcacagctgcagaattatatcatgacatgtcaaaataatgactctgaagccttccaaat

SEQ ID NO: 152194 - DNA, 120 bp, Artificial Sequence
  ENSG00000105829_13 (sequence is synthesized)
tctgaaaagtctcttcttggccaaacatcaaagtctggagccagagatgtaagcagaaatggggcggaaagagctcacatgttgaatcaatcagccttgatttgaatcaaccttccatca

SEQ ID NO: 152195 - DNA, 120 bp, Artificial Sequence
  ENSG00000105829_14 (sequence is synthesized)
attaccagctaagtaactttaaaaaagtcacttaatctctctggctttctatttccccatctggaaagtaacacatacctcacaggttgttattaggaacaaataaaaaatttgtgtcaa

SEQ ID NO: 152196 - DNA, 120 bp, Artificial Sequence
  ENSG00000105829_15 (sequence is synthesized)
cctacttccctgccttgataagtcactacaaattagaaattaatgcagagaactcctagttgggcaatcagttccagactccacagaccccaggacacaaactctattcaagaatctgtt

SEQ ID NO: 152197 - DNA, 120 bp, Artificial Sequence
  ENSG00000105829_16 (sequence is synthesized)
gtacaaactgtatttccaacacttctagccctatatatacctgtcaatgatattatacttataaatacaaaagtccttattatggatgaagaaatagattaattaaaattgtatagatta

SEQ ID NO: 152198 - DNA, 120 bp, Artificial Sequence
  ENSG00000105829_17 (sequence is synthesized)
gaaatggtaagtggttatgattttaactttaagaaatttgatctaatattcgcaaataatagaatttcaacttttattcattttgaaatacagagatcgtaagtccttgattcccgtcca

SEQ ID NO: 152199 - DNA, 120 bp, Artificial Sequence
  ENSG00000105829_18 (sequence is synthesized)
tttgtatctaatgtgtttggaataactataaggtttattttgccatgcttttgcatttttcatctcgtcttacgcatgtaagtgggaggaacaagtggaagccaatatatctttaatcct

SEQ ID NO: 152200 - DNA, 120 bp, Artificial Sequence
  ENSG00000105829_19 (sequence is synthesized)
tcaattttgccactgttaaaatcacttgaatctttacctttgggaactagcattcacaaaatggtgaatactaactcttatcctgatttgctacaagaaactagtctagaatgagcagtg

SEQ ID NO: 152201 - DNA, 120 bp, Artificial Sequence
  ENSG00000105829_20 (sequence is synthesized)
taattattagcactacactctttctatgcttcacacactacagaatcttcatcttcaagtctgtaattcctcaaagtacatggatcaacatttaggcttctggaggccagcagtgaacga

SEQ ID NO: 152202 - DNA, 120 bp, Artificial Sequence
  ENSG00000105829_21 (sequence is synthesized)
ggcagtgcaaaaatgaccataattcacagtcaaccagccaacatgtgtagctccgggcacatgttattatattcactggatgttaacaggatttctagttagattgagagatgagaaact

SEQ ID NO: 152203 - DNA, 120 bp, Artificial Sequence
  ENSG00000105829_22 (sequence is synthesized)
ctttaaaaagctcattctctttggtagaatgatttattttcctttggatagatactcagtaatgggattgctgggctaagtggtagttctgttttaaattagttgagaaatctccaagct

SEQ ID NO: 152204 - DNA, 120 bp, Artificial Sequence
  ENSG00000105829_23 (sequence is synthesized)
agttgagaaatctccaagctgatttccacagtggcagaactaatttacattcctaccaactatgtataagtgttctcttttctctgcagccccgccagcatctgttattttttgactttt

SEQ ID NO: 152205 - DNA, 120 bp, Artificial Sequence
  ENSG00000105829_24 (sequence is synthesized)
gatgtgcaatctcgtggtatctcattgtggttttgctttgcatttgtctagtaattactgattatgagcattttttaaatatgtttcttggccgcttgaatggcttctttggagaagtgt

SEQ ID NO: 152206 - DNA, 83 bp, Artificial Sequence
  ENSG00000105829_25 (sequence is synthesized)
agattctggaagttacatgcactcatatgttcatcgcagtgctattcacaataacaaggacatggaatcaactggggtgccct

SEQ ID NO: 152207 - DNA, 89 bp, Artificial Sequence
  ENSG00000105829_26 (sequence is synthesized)
atcctaatcgtatgttcttacttataagtgggagctaaacattgagtgcacgtagatataaaaattggaacaacaggcactgtagaagg

SEQ ID NO: 152208 - DNA, 120 bp, Artificial Sequence
  ENSG00000105829_27 (sequence is synthesized)
acgtagatataaaaattggaacaacaggcactgtagaagggggaagggaggaaggaaggtatgggttgaaaaactagctattgggtactatgctcactacttgggtgagaaattcatatc

SEQ ID NO: 152209 - DNA, 120 bp, Artificial Sequence
  ENSG00000105829_28 (sequence is synthesized)
tcaaacctcagcatcatgcaatataaccatgtaaaaaatctgcacatgtaacccctgaatctaaaataaaagtggaaatcgtttttatttttgtattatttatttatttatttttatttt

SEQ ID NO: 152210 - DNA, 69 bp, Artificial Sequence
  ENSG00000105829_29 (sequence is synthesized)
tatttatttttatttttatttacttattttttgagatagagtctcgccctgccactgagtttaagcgat

SEQ ID NO: 152211 - DNA, 74 bp, Artificial Sequence
  ENSG00000105829_30 (sequence is synthesized)
tgaaggctgaggctgacggatcacctgaggtcaggagtctgaaattgtttttaaaaagtatgttttgatataaa

SEQ ID NO: 152212 - DNA, 120 bp, Artificial Sequence
  ENSG00000105829_31 (sequence is synthesized)
gagtctgaaattgtttttaaaaagtatgttttgatataaagccttttttcaattttttttaaagtctaattcttgacagagcaacagaaacaaataaagtagaagcccaaaaggaaattt

SEQ ID NO: 152213 - DNA, 120 bp, Artificial Sequence
  ENSG00000105829_32 (sequence is synthesized)
gtcattactaaaaccaaccaggctcaggtgacttttcttctccattcagacgggaacttaaatgaacaaaaatatctttaacaaattgaagacaacttaaagatcagtttatttattcat

SEQ ID NO: 152214 - DNA, 120 bp, Artificial Sequence
  ENSG00000105829_33 (sequence is synthesized)
tcaacaaatatttattaactggctgccacatatccatcattgttctaaattctgcagatatagtagtcaattaagatccttccctcagtgaagacttaactttgagtggagagaacaaaa

SEQ ID NO: 152215 - DNA, 120 bp, Artificial Sequence
  ENSG00000105829_34 (sequence is synthesized)
aatggacaaataaaatatatagtatgtcaaatgataagtgctatgaaaaaaaatgactactagattcagcatgcatgtatactgacttgctctttaaattttaagagttttaggaaatgt

SEQ ID NO: 152216 - DNA, 81 bp, Artificial Sequence
  ENSG00000105829_35 (sequence is synthesized)
cagctcatggttcttggggctatgcagttttctgcttctacagaggcctcaggaaacttacaaccatggtggaatgcgaaa

SEQ ID NO: 152217 - DNA, 120 bp, Artificial Sequence
  ENSG00000105829_36 (sequence is synthesized)
agaggcctcaggaaacttacaaccatggtggaatgcgaaatggaagtagacaggagagagtttcagttttagtcttaaaagaaaaaaaaatacatctctaactaaccccagtccttgtgt

SEQ ID NO: 152218 - DNA, 120 bp, Artificial Sequence
  ENSG00000105829_37 (sequence is synthesized)
tagcaacaactactccttttgactggttagggaatgagcatctgtgacatgggcttgatgaagtcatggccaatgttaactttaaataagtttgaaactattgttgatacaaaacaaata

SEQ ID NO: 152219 - DNA, 120 bp, Artificial Sequence
  ENSG00000105829_38 (sequence is synthesized)
aattgcagaggattttttccaaacatcccataaatgcatagaattgaaagcaagtttcatttccaatagttaaagagtctaatgtatccacttttaattatagccaagatgtttaccatc

SEQ ID NO: 152220 - DNA, 120 bp, Artificial Sequence
  ENSG00000105829_39 (sequence is synthesized)
ttatttgatgttctgtgctgtgaactgttgggaatctattagctcagtattttgaatttcagataatgtatcctgtgttttttttttaataaaggtttatctgaccattaaattacaaaa

SEQ ID NO: 152221 - DNA, 120 bp, Artificial Sequence
  ENSG00000105835_0 (sequence is synthesized)
agtgacttaagcaacggagcgcggtgaagctcatttttctccttcctcgcagccgcgccagggagctcgcggcgcgcggcccctgtcctccggcccgagatgaatcctgcggcagaagcc

SEQ ID NO: 152222 - DNA, 120 bp, Artificial Sequence
  ENSG00000105835_1 (sequence is synthesized)
gagttcaacatcctcctggccaccgactcctacaaggttactcactataaacaatatccacccaacacaagcaaagtttattcctactttgaatgccgtgaaaagaagacagaaaactcc

SEQ ID NO: 152223 - DNA, 120 bp, Artificial Sequence
  ENSG00000105835_2 (sequence is synthesized)
aaattaaggaaggtgaaatatgaggaaacagtattttatgggttgcagtacattcttaataagtacttaaaaggtaaagtagtaaccaaagagaaaatccaggaagccaaagatgtctac

SEQ ID NO: 152224 - DNA, 120 bp, Artificial Sequence
  ENSG00000105835_3 (sequence is synthesized)
aaagaacatttccaagatgatgtctttaatgaaaagggatggaactacattcttgagaagtatgatgggcatcttccaatagaaataaaagctgttcctgagggctttgtcattcccaga

SEQ ID NO: 152225 - DNA, 120 bp, Artificial Sequence
  ENSG00000105835_4 (sequence is synthesized)
ggaaatgttctcttcacggtggaaaacacagatccagagtgttactggcttacaaattggattgagactattcttgttcagtcctggtatccaatcacagtggccacaaattctagagag

SEQ ID NO: 152226 - DNA, 120 bp, Artificial Sequence
  ENSG00000105835_5 (sequence is synthesized)
cagaagaaaatattggccaaatatttgttagaaacttctggtaacttagatggtctggaatacaagttacatgattttggctacagaggagtctcttcccaagagactgctggcatagga

SEQ ID NO: 152227 - DNA, 120 bp, Artificial Sequence
  ENSG00000105835_6 (sequence is synthesized)
gcatctgctcacttggttaacttcaaaggaacagatacagtagcaggacttgctctaattaaaaaatattatggaacgaaagatcctgttccaggctattctgttccagcagcagaacac

SEQ ID NO: 152228 - DNA, 120 bp, Artificial Sequence
  ENSG00000105835_7 (sequence is synthesized)
agtaccataacagcttgggggaaagaccatgaaaaagatgcttttgaacatattgtaacacagttttcatcagtgcctgtatctgtggtcagcgatagctatgacatttataatgcgtgt

SEQ ID NO: 152229 - DNA, 120 bp, Artificial Sequence
  ENSG00000105835_8 (sequence is synthesized)
gagaaaatatggggtgaagatctaagacatttaatagtatcaagaagtacacaggcaccactaataatcagacctgattctggaaaccctcttgacactgtgttaaaggttttggagatt

SEQ ID NO: 152230 - DNA, 120 bp, Artificial Sequence
  ENSG00000105835_9 (sequence is synthesized)
ttaggtaagaagtttcctgttactgagaactcaaagggttacaagttgctgccaccttatcttagagttattcaaggggatggagtagatattaataccttacaagagattgtagaaggc

SEQ ID NO: 152231 - DNA, 120 bp, Artificial Sequence
  ENSG00000105835_10 (sequence is synthesized)
atgaaacaaaaaatgtggagtattgaaaatattgccttcggttctggtggaggtttgctacagaagttgacaagagatctcttgaattgttccttcaagtgtagctatgttgtaactaat

SEQ ID NO: 152232 - DNA, 120 bp, Artificial Sequence
  ENSG00000105835_11 (sequence is synthesized)
ggccttgggattaacgtcttcaaggacccagttgctgatcccaacaaaaggtccaaaaagggccgattatctttacataggacgccagcagggaattttgttacactggaggaaggaaaa

SEQ ID NO: 152233 - DNA, 120 bp, Artificial Sequence
  ENSG00000105835_12 (sequence is synthesized)
ggagaccttgaggaatatggtcaggatcttctccatactgtcttcaagaatggcaaggtgacaaaaagctattcatttgatgaaataagaaaaaatgcacagctgaatattgaactggaa

SEQ ID NO: 152234 - DNA, 120 bp, Artificial Sequence
  ENSG00000105835_13 (sequence is synthesized)
gcagcacatcattaggctttatgactgggtgtgtgttgtgtgtatgtaatacataatgtttattgtacagatgtgtggggtttgtgttttatgatacattacagccaaattatttgttgg

SEQ ID NO: 152235 - DNA, 120 bp, Artificial Sequence
  ENSG00000105835_14 (sequence is synthesized)
tttatggacatactgccctttcattttttttcttttccagtgtttaggtgatctcaaattaggaaatgcatttaaccatgtaaaagatgagtgctaaagtaagctttttagggccctttg

SEQ ID NO: 152236 - DNA, 120 bp, Artificial Sequence
  ENSG00000105835_15 (sequence is synthesized)
ccaataggtagtcattcaatctggtattgatcttttcacaaataacagaactgagaaacttttatatataactgatgatcacataaaacagatttgcataaaattaccatgattgcttta

SEQ ID NO: 152237 - DNA, 120 bp, Artificial Sequence
  ENSG00000105835_16 (sequence is synthesized)
tgtttatatttaacttgtatttttgtacaaacaagattgtgtaagatatatttgaagtttcagtgatttaacagtctttccaacttttcatgatttttatgagcacagactttcaagaaa

SEQ ID NO: 152238 - DNA, 120 bp, Artificial Sequence
  ENSG00000105835_17 (sequence is synthesized)
atacttgaaaataaattacattgccttttgtccattaatcagcaaataaaacatggccttaacaaagttgtttgtgttattgtacaatttgaaaattatgtcgggacataccctatagaa

SEQ ID NO: 152239 - DNA, 120 bp, Artificial Sequence
  ENSG00000105835_18 (sequence is synthesized)
ttctacattaaagaaaataatggttcttactggaatgtctaggcactgtacagttattatatatcttggttgttgtattgtaccagtgaaatgccaaatttgaaaggcctgtactgcaat

SEQ ID NO: 152240 - DNA, 120 bp, Artificial Sequence
  ENSG00000105835_19 (sequence is synthesized)
tttatatgtcagagattgcctgtggctctaatatgcacctcaagattttaaggagataatgtttttagagagaatttctgcttccactatagaatatatacataaatgtaaaatacttac

SEQ ID NO: 152241 - DNA, 120 bp, Artificial Sequence
  ENSG00000105835_20 (sequence is synthesized)
aaaagtggaagtagtgtattttaaagtaattacacttctgaatttatttttcatattctatagttggtatgacttaaatgaattactggagtgggtagtgagtgtacttaaatgtttcaa

SEQ ID NO: 152242 - DNA, 120 bp, Artificial Sequence
  ENSG00000105835_21 (sequence is synthesized)
tcaattctgttatattttttattaagtttttaaaaaattaaattggatattaaattgtatggacatcatttattaattttaaactgaatgccctcaataagtaatactgaagcacattct

SEQ ID NO: 152243 - DNA, 120 bp, Artificial Sequence
  ENSG00000105835_22 (sequence is synthesized)
tgaagataaattatctccaatgaaaagcatgacatgtgtttcaatagaagaatcttaagttggctaaattcaaagtgcttgacatcaaaatgttctagagtgattagctactagattctg

SEQ ID NO: 152244 - DNA, 120 bp, Artificial Sequence
  ENSG00000105835_23 (sequence is synthesized)
aatcatacatcacatctgactagagaccagtttctttcgaatgattcttttatgtatgtagatctgttcttctgaggcagcggttggccaactatagcccaaaggccaaatttggacttc

SEQ ID NO: 152245 - DNA, 120 bp, Artificial Sequence
  ENSG00000105835_24 (sequence is synthesized)
tttttataaatgcagattgtctatggctgctttcccactactccagcctaaggtaaacagctgcaatagaagccaaatgagaatcgcaaagcccaaaatgtttattaacctgccctttac

SEQ ID NO: 152246 - DNA, 120 bp, Artificial Sequence
  ENSG00000105835_25 (sequence is synthesized)
acaaaattacacaaaaagtttcctgatctctgttctaagaaaaggagtgtgccttgcatttaaaaggaaatgttggtttctagggaagggaggaggctaaataattgatacggaattttc

SEQ ID NO: 152247 - DNA, 120 bp, Artificial Sequence
  ENSG00000105835_26 (sequence is synthesized)
ctcttttgtcttcttttttctcacttaagaatccgatactggaagactgatttagaaaagtttttaacatgacattaaatgtgaaattttaaaaattgaaaagccataaatcatctgttt

SEQ ID NO: 152248 - DNA, 120 bp, Artificial Sequence
  ENSG00000105835_27 (sequence is synthesized)
taaatagttacatgagaaaatgatcactagaataacctaattagaagtgttatcttcattaaatgttttttgtaagtggtattagaaagaatatgtttttcagatggttctttaaacatg

SEQ ID NO: 152249 - DNA, 120 bp, Artificial Sequence
  ENSG00000105835_28 (sequence is synthesized)
tagtgagaacaataagcattattcacttttagtaagtcttctgtaatccatgatataaaataattttaaaatgattttttaatgtatttgagtaaagatgagtagtattaagaaaaacac

SEQ ID NO: 152250 - DNA, 120 bp, Artificial Sequence
  ENSG00000105835_29 (sequence is synthesized)
acatttcttcacaaaatgtgctaaggggcgtgtaaagaatcaaaagaaactattaccaataatagttttgataatcacccataattttgtgtttaaacattgaaattatagtacagacag

SEQ ID NO: 152251 - DNA, 120 bp, Artificial Sequence
  ENSG00000105835_30 (sequence is synthesized)
tattctctgtgttctgtgaatttcagcagcttcagaatagagtttaatttagaaatttgcagtgaaaaaagctatctctttgttcacaaccataaatcaggagatggagattaattctat

SEQ ID NO: 152252 - DNA, 120 bp, Artificial Sequence
  ENSG00000105835_31 (sequence is synthesized)
tggctcttagtcacttggaactgattaattctgactttctgtcactaagcacttggtatttggccatctccattctgagcaccaaacggttaacacgaatgtccactagaactctgctgt

SEQ ID NO: 152253 - DNA, 120 bp, Artificial Sequence
  ENSG00000105835_32 (sequence is synthesized)
gtgtcacccttaaatcagtctaaatcttccagacaaaagcaaatggcatttatggatttaagtcattagattttcaactgacattaattaatccctcttgattgattatatcatcaagta

SEQ ID NO: 152254 - DNA, 120 bp, Artificial Sequence
  ENSG00000105835_33 (sequence is synthesized)
tttatatcttaaataggaggtaggatttctgtgttaagactcttatttgtaccctataattaaagtaaaatgttttttatgagtatcccttgttttcccttcttaaattgttatcaaaca

SEQ ID NO: 152255 - DNA, 120 bp, Artificial Sequence
  ENSG00000105835_34 (sequence is synthesized)
atttttataatgaaatctatcttggaaaattagaaagaaaaatggcaaggtatttattgttctgtttgccataatttagaactcacacttaagtattttgtagttttacattccttttta

SEQ ID NO: 152256 - DNA, 120 bp, Artificial Sequence
  ENSG00000105835_35 (sequence is synthesized)
acccattcagtggagaatgtcagcttttctcccaagttgtatgttaagtctattctaatatgtactcaacatcaagttataaacatgtaataaacatggaaataaagtttagctctatta

SEQ ID NO: 152257 - DNA, 120 bp, Artificial Sequence
  ENSG00000105835_36 (sequence is synthesized)
ttttatgggttgcagtacattcttaataagtacttaaaaggtattacttttcctagtatattttaaacactgcttattactcttaactcctttaggagttcttttagaatttttaacaaa

SEQ ID NO: 152258 - DNA, 120 bp, Artificial Sequence
  ENSG00000105835_37 (sequence is synthesized)
tctgttaatttggatgcattaaatcatataatttggtgtgtgtttgatgttctaagtatgagaaaagttttctgaaataaaaggtttttttttttttttggaaaccgagtttcgctcttg

SEQ ID NO: 152259 - DNA, 81 bp, Artificial Sequence
  ENSG00000105835_38 (sequence is synthesized)
tttttttggaaaccgagtttcgactcagcgcaacctccgcctcctggtttcaggcaattctcctgcctctgcctcccgagt

SEQ ID NO: 152260 - DNA, 120 bp, Artificial Sequence
  ENSG00000105835_39 (sequence is synthesized)
gcgtgagccaccactcctggccgaactaaaagttttgaaataagtttagaaaagtcattaatttttggaggctaatcttgtttgttatactttagtcattaattcaaagtaaaggagttg

SEQ ID NO: 152261 - DNA, 120 bp, Artificial Sequence
  ENSG00000105835_40 (sequence is synthesized)
ttaatgaactggaaactccttttgaattatggtagcaatcagaatatttttatattagccagttttaccttgaagacctatttttaaaaactacctgtgtctctggacttagttgcaaat

SEQ ID NO: 152262 - DNA, 120 bp, Artificial Sequence
  ENSG00000105835_41 (sequence is synthesized)
ctagggggaaaacagttcccaaacacattatacatgttggaaaagtttatctctaaccttttgaattaaacaatttcagaattgaaaacagtaaggtgaattttaggccaataactcttt

SEQ ID NO: 152263 - DNA, 120 bp, Artificial Sequence
  ENSG00000105835_42 (sequence is synthesized)
tctataatcttgactcttttaagattaggcagttcagatagtcttatactactgaaaacctagctagatatcagaagtaattattagtggcaagaataccaaagttaataccaaagtttt

SEQ ID NO: 152264 - DNA, 61 bp, Artificial Sequence
  ENSG00000105835_43 (sequence is synthesized)
cagagatccttcctgctcagcctctcaagtaactgggaccacaggctcgcaccaccatgcc

SEQ ID NO: 152265 - DNA, 120 bp, Artificial Sequence
  ENSG00000105835_44 (sequence is synthesized)
caggctccagagatccttcctgctcagcctctcaagtaactgggaccacaggctcgcaccaccatgcctggctacttttttatagtgacagggtctcaccatgttgaccaggctggtctc

SEQ ID NO: 152266 - DNA, 120 bp, Artificial Sequence
  ENSG00000105835_45 (sequence is synthesized)
gattacagacatgagccaccacgcctggccccaagatactttaaacgagtttactagttatcttgtattaagttaccagcaactgatagcacactttaatttagtcatacaacttaagaa

SEQ ID NO: 152267 - DNA, 120 bp, Artificial Sequence
  ENSG00000105835_46 (sequence is synthesized)
taatttagtcatacaacttaagaactttgtaaaatattactcatttttaattataactaaaatgtattgattacctattctaggccagcattattgtaagtggttcgtatgtcttaactc

SEQ ID NO: 152268 - DNA, 120 bp, Artificial Sequence
  ENSG00000105835_47 (sequence is synthesized)
attttgtcctcacaaacatcatataagtgggtactcgacttttatcctcatttacggataagaaaagttaattaaaagtgtgttgtttggggggcagacatttagtaattgtggaaatta

SEQ ID NO: 152269 - DNA, 120 bp, Artificial Sequence
  ENSG00000105835_48 (sequence is synthesized)
ctgacttaccaaccctaaagatgccacattctttacgaacgaagtgagacgtttcatttggatgtaagaagcttttgagtcatctcaaagttgaaaagtaccaaaattaatcgagagaaa

SEQ ID NO: 152270 - DNA, 120 bp, Artificial Sequence
  ENSG00000105835_49 (sequence is synthesized)
ttaaaggtaaattttcatatgtaactttattattagaatccctctgtaggccagctgcatcaatactacttttcatttatatacacacaatttcagagctgtgtggaccagtccccttta

SEQ ID NO: 152271 - DNA, 120 bp, Artificial Sequence
  ENSG00000105835_50 (sequence is synthesized)
ttttagagttgcagcccagagagagtaatagatttgcctgaggtcacacagtaatagcacagaaggataccaagacttatggattgttttactgtcaattagacatttgaatagatattt

SEQ ID NO: 152272 - DNA, 120 bp, Artificial Sequence
  ENSG00000105835_51 (sequence is synthesized)
tttagaatttgttactaataaagctatataatctcctataatttacttaacctttccaggcttcaatttcctcatctataaaatgacagactaaataatctttaaggtttcttctagtag

SEQ ID NO: 152273 - DNA, 120 bp, Artificial Sequence
  ENSG00000105835_52 (sequence is synthesized)
aatagaatgttctgagattttgtttaaatcaaattattgagagtgattgtttttaaaacctagttggctttcatctaattcattgccattttaagtgtgtattattttagagcaaactta

SEQ ID NO: 152274 - DNA, 120 bp, Artificial Sequence
  ENSG00000105835_53 (sequence is synthesized)
gaaaaacagcacatttctagtaacttacgacattcgatgaatgataaatgttcaagttagactaaaggaactttattccaacttctagtaactactttcttcatttttctctcatcagtt

SEQ ID NO: 152275 - DNA, 120 bp, Artificial Sequence
  ENSG00000105835_54 (sequence is synthesized)
taggtcttaggatctaccatctgttacttttcagtttctcatctaaataaaacaagatctgctgttcatattgtttaatttctcaggaagggtacattttgggctttgggtttatactgc

SEQ ID NO: 152276 - DNA, 120 bp, Artificial Sequence
  ENSG00000105835_55 (sequence is synthesized)
gagccttttttttgtttttcttgtatgtatacctaagtagtcatatgttttcacatggtcagagttttgataataatactctacctagcttctgaacagtttaataatagatttaatccg

SEQ ID NO: 152277 - DNA, 120 bp, Artificial Sequence
  ENSG00000105835_56 (sequence is synthesized)
gaaaacacagatccagagtgttactggcttacaaattggattgagcacagacattgcatcatcttagcagctctttttcaaacagatttgaagctgcttcaaataacaatctggtttata

SEQ ID NO: 152278 - DNA, 120 bp, Artificial Sequence
  ENSG00000105835_57 (sequence is synthesized)
gggctcggggcttgggcgtcgccggcgagcgcatgcccttccctgaagcgcggcctcttggcctggagctgggaccagttaggtaacggccccggggacccgcagtggagagtgagcggg

SEQ ID NO: 152279 - DNA, 120 bp, Artificial Sequence
  ENSG00000105835_58 (sequence is synthesized)
aacacagatccagagtgttactggcttacaaattggattgagatttgaagctgcttcaaataacaatctggtttataaaatgaaaatagaaaattatgatcttagaatgaagaagtgaat

SEQ ID NO: 152280 - DNA, 120 bp, Artificial Sequence
  ENSG00000105835_59 (sequence is synthesized)
gtcaggaggatcaggagggacaagagggatggaggcgaaaggctggatccttaatccaggccggagacaaagccgcgccagggagctcgcggcgcgcggcccctgtcctccggcccgaga

SEQ ID NO: 152281 - DNA, 120 bp, Artificial Sequence
  ENSG00000105835_60 (sequence is synthesized)
cacggtggaaaacacagatccagagtgttactggcttacaaattggattgagtttaggtcttaggatctaccatctgttacttttcagtttctcatctaaataaaacaagatctgctgtt

SEQ ID NO: 152282 - DNA, 120 bp, Artificial Sequence
  ENSG00000105835_61 (sequence is synthesized)
tagtgttgactgaggttgtctttattagaagtctcagccatgcctccagtttcgagatgaatctcaattcacaagttccactatgaatctcaattcacaagttccactaccaccaccacc

SEQ ID NO: 152283 - DNA, 120 bp, Artificial Sequence
  ENSG00000105835_62 (sequence is synthesized)
atcactgcccccagatagaatgagacttctaataacttgaaagacaagtctataaatatcctgtaatcgttttcactgtatcactttttcctggctacttttatccgataaaaacctcaa

SEQ ID NO: 152284 - DNA, 120 bp, Artificial Sequence
  ENSG00000105835_63 (sequence is synthesized)
tttatttttaagctattaaacatgcggacaaagggaatcttagttttatgcaaaaacgcaaccacgcatgagaactgcgcaagtctttcttggaatggtctgtatttgggtgaagtcatc

SEQ ID NO: 152285 - DNA, 120 bp, Artificial Sequence
  ENSG00000105835_64 (sequence is synthesized)
agacgtcattacacttctttattttggggttgccaactcgtttcccaggatttaaagactataacgatgataaaagtcagtgtcgcaccctgtcaaaggcttggcccgttgccttttcct

SEQ ID NO: 152286 - DNA, 120 bp, Artificial Sequence
  ENSG00000105835_65 (sequence is synthesized)
gcttttcaacgcaggctctttgctcgggaaaagtcaaaccatctctcaaaggatcaaagagctcagccatagacagagccgccggaggaaagcggagtcgctgcatcagatgaaaggggc

SEQ ID NO: 152287 - DNA, 120 bp, Artificial Sequence
  ENSG00000105835_66 (sequence is synthesized)
agggatacgttatgaaataggaaagcctttaccttagtaatactcttgttccctctccaaagattgtgtgtgtggttttggcgtagttggtatagttgggcttttcttcaacagcatgta

SEQ ID NO: 152288 - DNA, 120 bp, Artificial Sequence
  ENSG00000105835_67 (sequence is synthesized)
catgctgtgcttactgtcagtttaaaggcagtttgtaatataaagagataccttaagggtcacatgttagaatgctcacagacttcctacaaatggagtattaggtgttcttcagtggca

SEQ ID NO: 152289 - DNA, 120 bp, Artificial Sequence
  ENSG00000105835_68 (sequence is synthesized)
atgtttctgaaagccagatgtggattggttcagttatacctattaagtgcttaaaacttaaatgtaaattatgtatgtgcttttttgtaagggagtgtttagacatttctgatgattagt

SEQ ID NO: 152290 - DNA, 120 bp, Artificial Sequence
  ENSG00000105835_69 (sequence is synthesized)
tctgttcattttttaaaactactaattttttcactcttgtatttgtaactcagtgacattttacctaactgcagagccaggtacctacagtacatcttcatgaacttgagcaacacaaat

SEQ ID NO: 152291 - DNA, 120 bp, Artificial Sequence
  ENSG00000105849_0 (sequence is synthesized)
gtgggaaccttgacaagcagcatggctgcaggttgctcagaggcgccgcggccagcggcggcttctgatgggtctctggtagggcaggctggcgtcctgccttgcctagagttgccgact

SEQ ID NO: 152292 - DNA, 120 bp, Artificial Sequence
  ENSG00000105849_1 (sequence is synthesized)
tatgccgctgcttgtgcgctggtgaacagtcgctactcatgcctggtggccgggccgcaccaaaggcacatcgcgctgtcgccccgctaccttaacaggaaacgcaccggcattcgagaa

SEQ ID NO: 152293 - DNA, 120 bp, Artificial Sequence
  ENSG00000105849_2 (sequence is synthesized)
cagcttgatgcggagctccttcgctattctgagagccttttaggtgtccctattgcatatgataacatcaaagttgtgggagagcttggagatatttatgatgatcaaggacacattcat

SEQ ID NO: 152294 - DNA, 120 bp, Artificial Sequence
  ENSG00000105849_3 (sequence is synthesized)
cttaacattgaagccgattttgttattttctgccctgaaccagggcagaagcttatgggtatagttaataaagtgtcttctagccacattggctgtttagtacatgggtgtttcaatgcc

SEQ ID NO: 152295 - DNA, 120 bp, Artificial Sequence
  ENSG00000105849_4 (sequence is synthesized)
tccattcctaaacctgagcagttgtcagctgagcagtggcaaaccatggagataaacatgggtgatgaactagaatttgaagtatttcgtttagactcagatgctgctggagtattctgc

SEQ ID NO: 152296 - DNA, 120 bp, Artificial Sequence
  ENSG00000105849_5 (sequence is synthesized)
attcggggaaaactaaatatcacaagtttacaattcaagcgctctgaagtttctgaagaagttacagaaaatggcactgaggaagctgctaaaaaacctaaaaagaagaaaaagaagaaa

SEQ ID NO: 152297 - DNA, 120 bp, Artificial Sequence
  ENSG00000105849_6 (sequence is synthesized)
gacccagagacatatgaagtggacagtggtaccacaaagctagcagatgatgcagatgacactccaatggaagagtcagccctgcagaatactaataatgcgaatggcatctgggaggag

SEQ ID NO: 152298 - DNA, 120 bp, Artificial Sequence
  ENSG00000105849_7 (sequence is synthesized)
gagccaaagaaaaagaagaagaagaaaaagcaccaggaagttcaggaccaggaccctgttttccaaggcagtgactccagtggttaccaaagtgaccataaaaagaaaaaaaagaaaaga

SEQ ID NO: 152299 - DNA, 120 bp, Artificial Sequence
  ENSG00000105849_8 (sequence is synthesized)
aaacacagtgaagaggccgaatttaccccacctttgaaatgctcaccaaaaagaaaagggaaaagtaattttctttagtgtattttaaacacgattcagtttttaaaagatcgatctaca

SEQ ID NO: 152300 - DNA, 120 bp, Artificial Sequence
  ENSG00000105849_9 (sequence is synthesized)
tacaatagatgaataaatgttttcagtgatatgaaaaggttaagtatgccagtagtttacaaaacagaaaatacttaactaggagtaggaggctttatatgctaaaaatgataaaactga

SEQ ID NO: 152301 - DNA, 120 bp, Artificial Sequence
  ENSG00000105849_10 (sequence is synthesized)
ctgtaaattaatttggggaaagccagtattgttaaaataccattttatacaaaataaaaagctgctctcactgtcagctctcatattcttccaggttttgcactctacataaaattattt

SEQ ID NO: 152302 - DNA, 120 bp, Artificial Sequence
  ENSG00000105849_11 (sequence is synthesized)
ctacaatgtcaagactagccaaaggactttataatacaatattatattactaaagaatgagttaagtttgagattttgatgatttgattttgtgtgtgtttaataggcttcaccttatta

SEQ ID NO: 152303 - DNA, 120 bp, Artificial Sequence
  ENSG00000105849_12 (sequence is synthesized)
catgctattttattttgcttttttaaaaactcaggacattaactaattttaggttttcctttatcatggctttctacagtatttctattgtttaacataaaatagtttgccaaagaagtt

SEQ ID NO: 152304 - DNA, 120 bp, Artificial Sequence
  ENSG00000105849_13 (sequence is synthesized)
tctgaagtcttcacagctcttaaaagccaggccagtactgactgtgtggtggtaaatgctattcattattttcttttctttcttccaagtgcatgtgtgtccttgtcttcttaagtctga

SEQ ID NO: 152305 - DNA, 120 bp, Artificial Sequence
  ENSG00000105849_14 (sequence is synthesized)
gaggttgctggaaaggactgttttcttgtacttgttcatttgtgcctcagccattctagttttgttgtgtgttggaggacagtctaatgaagacaggataaatgtgattctgactagtgg

SEQ ID NO: 152306 - DNA, 120 bp, Artificial Sequence
  ENSG00000105849_15 (sequence is synthesized)
gaaatttcagattactttttaatgattggaatgggctataagatattgtgctgaagagaaaacagttgttctgttcactgctttcattgagaaaatgtggaatgtctcttgactaattga

SEQ ID NO: 152307 - DNA, 120 bp, Artificial Sequence
  ENSG00000105849_16 (sequence is synthesized)
tatttattcattttccacacacttgaccatctactttgtataacacattctgctaaggcccagggatacaatggcaaacaagatagatgtagttccttcccttgtggcatgtcataagag

SEQ ID NO: 152308 - DNA, 120 bp, Artificial Sequence
  ENSG00000105849_17 (sequence is synthesized)
aaacagatgtgcatatacacacaataaataagaaaattaataattgtattaagtggtatgaaaaaaagggggaggattgttcactcactgttacctgtgttagtatctgcaaatgcatga

SEQ ID NO: 152309 - DNA, 120 bp, Artificial Sequence
  ENSG00000105849_18 (sequence is synthesized)
atggttgaactcccatgtcagcatttttgttgccatttatttagtaccagacatagtgctggtctcacagcttaatatttggtaatgaataaattctgctagtggtatatgttgatctga

SEQ ID NO: 152310 - DNA, 120 bp, Artificial Sequence
  ENSG00000105849_19 (sequence is synthesized)
acttacaatgatgggatatagaattggcagagtggcagatgttcacaattgtctacaagtagatgtgctagacaatggaaggatgcaggccaacctctttgattacaattgagattcatg

SEQ ID NO: 152311 - DNA, 120 bp, Artificial Sequence
  ENSG00000105849_20 (sequence is synthesized)
tgactattgagccctggaaatgtagcttgtccaaattgagatgtgctgtcagtataaaatacataccagattttaaagatgtaccaaaaaatgtaaactatctcaatttttatattggtg

SEQ ID NO: 152312 - DNA, 120 bp, Artificial Sequence
  ENSG00000105849_21 (sequence is synthesized)
aaatcaatatgtcttggtatagtggcttaaataaaacaattttagcctttctcagtttatttttctgcaaaaagattaaaaattgtacatgaagctcatgttaactttcttttggtcagt

SEQ ID NO: 152313 - DNA, 120 bp, Artificial Sequence
  ENSG00000105849_22 (sequence is synthesized)
gctattttaaaggaagtatgagttgaaaaaaaattgaaataaactatatcatattactaggacttaatatagtggcatacccaggaaatgcttagtaagtgttcccttcacattttaaaa

SEQ ID NO: 152314 - DNA, 120 bp, Artificial Sequence
  ENSG00000105849_23 (sequence is synthesized)
tttgagtatacaatcatgtttgacaatatagaaatttaatttttagtgaaacaattctaaaccccttttccatagacacaagaaagatggcaaatttatgctattcctggaaaaatacat

SEQ ID NO: 152315 - DNA, 120 bp, Artificial Sequence
  ENSG00000105849_24 (sequence is synthesized)
tgtggcttagcaaataagcaagttcccacgttacttttgttttgcttcaagtaatacttctgccagttgtgttttatgaattaaacagggaacggcatgctgaacttgaaactagatttg

SEQ ID NO: 152316 - DNA, 120 bp, Artificial Sequence
  ENSG00000105849_25 (sequence is synthesized)
ttcctgcttttttcacaatgtgagtagttttgaaaagtcagatctggccatttgtctttcctagaatagcataactttgttcattgttttttttgtttgtctttctgacacagaaagact

SEQ ID NO: 152317 - DNA, 120 bp, Artificial Sequence
  ENSG00000105849_26 (sequence is synthesized)
gatgatggtgtccactatgtattcttcaaaacatttggcacatgctgcactaacctagtctatcttttctatcttggaatttgctcatacaaaccctatagcctagactagatcccttac

SEQ ID NO: 152318 - DNA, 120 bp, Artificial Sequence
  ENSG00000105849_27 (sequence is synthesized)
cctctctccagttcctatcattcacccatttcactgtgcaagacacctcactagtcaccagtgatacagaaatgacttttaagcagtttctgctcttaagggcttaccgttttgtctata

SEQ ID NO: 152319 - DNA, 120 bp, Artificial Sequence
  ENSG00000105849_28 (sequence is synthesized)
agatacacaagtataaatgacaagtacaaataacaatgaatgtttaatgctttacgtttagtgtttaagcttgttgttggaagagcagcattttgacccttggagaagaaaaactagctg

SEQ ID NO: 152320 - DNA, 120 bp, Artificial Sequence
  ENSG00000105849_29 (sequence is synthesized)
tggcattccaggtggagaacctgacagaggactaagaagttatctaatgtaaaagacctcaggcaccaccttcgcataaactttttccagacaaggctaaatgtgcatgcttcataacca

SEQ ID NO: 152321 - DNA, 120 bp, Artificial Sequence
  ENSG00000105849_30 (sequence is synthesized)
taattcttatttttctttaataaatatttttctacttgtaacactgtgcattatttcaaactgtttacctgtttgtaaagcttgtctcttaatcaaatttgtcttgaccaaataagtttc

SEQ ID NO: 152322 - DNA, 120 bp, Artificial Sequence
  ENSG00000105849_31 (sequence is synthesized)
ctgagggctggaattatgccttaactatatctatagtatttaacagtgaatcctttgtataatgaaagcatcaacagataattttaaattgataaataaaaagcacagtttcaaatggta

SEQ ID NO: 152323 - DNA, 120 bp, Artificial Sequence
  ENSG00000105851_0 (sequence is synthesized)
gcacttccttctcggctagattatctgaaactgttgtcggttcttgagatgatactaccaccgaatgtctgtgtttcattgtctagtccaacctgtattgtggatatctacaacgttccg

SEQ ID NO: 152324 - DNA, 120 bp, Artificial Sequence
  ENSG00000105851_1 (sequence is synthesized)
gcaatagttttgcaggtgcatcacatttttgtttttgttttgggaggaaaagggagggcacggcagccaggcttcatattcctacaagtgcatgcttcaagattactgtacttacagtgt

SEQ ID NO: 152325 - DNA, 120 bp, Artificial Sequence
  ENSG00000105851_2 (sequence is synthesized)
ttccaacatcttctcataaaaggggaaagcttcatagcctcaaccatgaaggaaaccagtcgcatagggcatggagctggagaactataaacagcccgtggtgctgagagaggacaactg

SEQ ID NO: 152326 - DNA, 120 bp, Artificial Sequence
  ENSG00000105851_3 (sequence is synthesized)
ccgaaggcgccggaggatgaagccgcgcagtgctgcggccagcctgtcctccatggagctcatccccatcgagttcgtgctgcccaccagccagcgcaaatgcaagagccccgaaacggc

SEQ ID NO: 152327 - DNA, 120 bp, Artificial Sequence
  ENSG00000105851_4 (sequence is synthesized)
gctgctgcacgtggccggccacggcaacgtggagcagatgaaggcccaggtgtggctgcgagcgctggagaccagcgtggcggcggacttctaccaccggctgggaccgcatcacttcct

SEQ ID NO: 152328 - DNA, 120 bp, Artificial Sequence
  ENSG00000105851_5 (sequence is synthesized)
cctgctctatcagaagaaggggcagtggtacgagatctacgacaagtaccaggtggtgcagactctggactgcctgcgctactggaaggccacgcaccggagcccgggccagatccacct

SEQ ID NO: 152329 - DNA, 120 bp, Artificial Sequence
  ENSG00000105851_6 (sequence is synthesized)
ggtgcagcggcacccgccctccgaggagtcccaagccttccagcggcagctcacggcgctgattggctatgacgtcactgacgtcagcaacgtgcacgacgatgagctggagttcacgcg

SEQ ID NO: 152330 - DNA, 120 bp, Artificial Sequence
  ENSG00000105851_7 (sequence is synthesized)
ccgtggcttggtgaccccgcgcatggcggaggtggccagccgcgaccccaagctctacgccatgcacccgtgggtgacgtccaagcccctcccggagtacctgtggaagaagattgccaa

SEQ ID NO: 152331 - DNA, 120 bp, Artificial Sequence
  ENSG00000105851_8 (sequence is synthesized)
caactgcatcttcatcgtcattcaccgcagcaccaccagccagaccattaaggtctcacccgacgacacccccggcgccatcctgcagagcttcttcaccaagatggccaagaagaaatc

SEQ ID NO: 152332 - DNA, 120 bp, Artificial Sequence
  ENSG00000105851_9 (sequence is synthesized)
tctgatggatattcccgaaagccaaagcgaacaggattttgtgctgcgcgtctgtggccgggatgagtacctggtgggcgaaacgcccatcaaaaacttccagtgggtgaggcactgcct

SEQ ID NO: 152333 - DNA, 120 bp, Artificial Sequence
  ENSG00000105851_10 (sequence is synthesized)
caagaacggagaagagattcacgtggtactggacacgcctccagacccggccctagacgaggtgaggaaggaagagtggccactggtggatgactgcacgggagtcaccggctaccatga

SEQ ID NO: 152334 - DNA, 120 bp, Artificial Sequence
  ENSG00000105851_11 (sequence is synthesized)
gcagcttaccatccacggcaaggaccacgagagtgtgttcaccgtgtccctgtgggactgcgaccgcaagttcagggtcaagatcagaggcattgatatccccgtcctgcctcggaacac

SEQ ID NO: 152335 - DNA, 120 bp, Artificial Sequence
  ENSG00000105851_12 (sequence is synthesized)
cgacctcacagtttttgtagaggcaaacatccagcatgggcaacaagtcctttgccaaaggagaaccagccccaaacccttcacagaggaggtgctgtggaatgtgtggcttgagttcag

SEQ ID NO: 152336 - DNA, 120 bp, Artificial Sequence
  ENSG00000105851_13 (sequence is synthesized)
tatcaaaatcaaagacttgcccaaaggggctctactgaacctccagatctactgcggtaaagctccagcactgtccagcaaggcctctgcagagtcccccagttctgagtccaagggcaa

SEQ ID NO: 152337 - DNA, 120 bp, Artificial Sequence
  ENSG00000105851_14 (sequence is synthesized)
agttcagcttctctattatgtgaacctgctgctgatagaccaccgtttcctcctgcgccgtggagaatacgtcctccacatgtggcagatatctgggaagggagaagaccaaggaagctt

SEQ ID NO: 152338 - DNA, 120 bp, Artificial Sequence
  ENSG00000105851_15 (sequence is synthesized)
caatgctgacaaactcacgtctgcaactaacccagacaaggagaactcaatgtccatctccattcttctggacaattactgccacccgatagccctgcctaagcatcagcccacccctga

SEQ ID NO: 152339 - DNA, 120 bp, Artificial Sequence
  ENSG00000105851_16 (sequence is synthesized)
cccggaaggggaccgggttcgagcagaaatgcccaaccagcttcgcaagcaattggaggcgatcatagccactgatccacttaaccctctcacagcagaggacaaagaattgctctggca

SEQ ID NO: 152340 - DNA, 120 bp, Artificial Sequence
  ENSG00000105851_17 (sequence is synthesized)
ttttagatacgaaagccttaagcacccaaaagcatatcctaagctatttagttcagtgaaatggggacagcaagaaattgtggccaaaacataccaattgttggccagaagggaagtctg

SEQ ID NO: 152341 - DNA, 120 bp, Artificial Sequence
  ENSG00000105851_18 (sequence is synthesized)
ggatcaaagtgctttggatgttgggttaacaatgcagctcctggactgcaacttctcagatgaaaatgtaagagccattgcagttcagaaactggagagcttggaggacgatgatgttct

SEQ ID NO: 152342 - DNA, 120 bp, Artificial Sequence
  ENSG00000105851_19 (sequence is synthesized)
gcattaccttctacaattggtccaggctgtgaaatttgaaccataccatgatagcgcccttgccagatttctgctgaagcgtggtttaagaaacaaaagaattggtcactttttgttttg

SEQ ID NO: 152343 - DNA, 120 bp, Artificial Sequence
  ENSG00000105851_20 (sequence is synthesized)
gttcttgagaagtgagatagcccagtccagacactatcagcagaggttcgctgtgattctggaagcctatctgaggggctgtggcacagccatgctgcacgactttacccaacaagtcca

SEQ ID NO: 152344 - DNA, 120 bp, Artificial Sequence
  ENSG00000105851_21 (sequence is synthesized)
agtaatcgagatgttacaaaaagtcacccttgatattaaatcgctctctgctgaaaagtatgacgtcagttcccaagttatttcacaacttaaacaaaagcttgaaaacctgcagaattc

SEQ ID NO: 152345 - DNA, 120 bp, Artificial Sequence
  ENSG00000105851_22 (sequence is synthesized)
ccactatggcttgagtttaaatgtgccgatcctacagccctatcaaatgaaacaattggaattatctttaaacatggtgatgatctgcgccaagacatgcttattttacagattctacga

SEQ ID NO: 152346 - DNA, 120 bp, Artificial Sequence
  ENSG00000105851_23 (sequence is synthesized)
atcatggagtctatttgggagactgaatctttggatctatgcctcctgccatatggttgcatttcaactggtgacaaaataggaatgatcgagattgtgaaagacgccacgacaattgcc

SEQ ID NO: 152347 - DNA, 120 bp, Artificial Sequence
  ENSG00000105851_24 (sequence is synthesized)
aaaattcagcaaagcacagtgggcaacacgggagcatttaaagatgaagtcctgaatcactggctcaaagaaaaatcccctactgaagaaaagtttcaggcagcagtggagagatttgtt

SEQ ID NO: 152348 - DNA, 120 bp, Artificial Sequence
  ENSG00000105851_25 (sequence is synthesized)
tattcctgtgcaggctactgtgtggcaacctttgttcttggaataggcgacagacacaatgacaatattatgatcaccgagacaggaaacctatttcatattgacttcgggcacattctt

SEQ ID NO: 152349 - DNA, 120 bp, Artificial Sequence
  ENSG00000105851_26 (sequence is synthesized)
gggaattacaaaagtttcctgggcattaataaagagagagtgccatttgtgctaacccctgacttcctctttgtgatgggaacttctggaaagaagacaagcccacacttccagaaattt

SEQ ID NO: 152350 - DNA, 120 bp, Artificial Sequence
  ENSG00000105851_27 (sequence is synthesized)
caggacatctgtgttaaggcttatctagcccttcgtcatcacacaaacctactgatcatcctgttctccatgatgctgatgacaggaatgccccagttaacaagcaaagaagacattgaa

SEQ ID NO: 152351 - DNA, 120 bp, Artificial Sequence
  ENSG00000105851_28 (sequence is synthesized)
tatatccgggatgccctcacagtggggaaaaatgaggaggatgctaaaaagtattttcttgatcagatcgaagtttgcagagacaaaggatggactgtgcagtttaattggtttctacat

SEQ ID NO: 152352 - DNA, 120 bp, Artificial Sequence
  ENSG00000105851_29 (sequence is synthesized)
cttgttcttggcatcaaacaaggagagaaacattcagcctaatactttaggctagaatcaaaaacaagttagtgttctatggtttaaattagcatagcaatcatcgaacttggatttcaa

SEQ ID NO: 152353 - DNA, 120 bp, Artificial Sequence
  ENSG00000105851_30 (sequence is synthesized)
atgcaatagacattgtgaaagctggcatttcagaagtatagctcttttcctacctgaactcttccctggagaaaagatgttggcattgctgattgtttggttaagcaatgtccagtgcta

SEQ ID NO: 152354 - DNA, 120 bp, Artificial Sequence
  ENSG00000105851_31 (sequence is synthesized)
ggattatttgcaggtttggttttttctcatttgtctgtggcattggagaatattctcggtttaaacagactaatgacttccttattgtccctgatattttgactatcttactattgagtg

SEQ ID NO: 152355 - DNA, 120 bp, Artificial Sequence
  ENSG00000105851_32 (sequence is synthesized)
cttctggaaattctttggaataattgatgacatctattttcatctgggtttagtctcaattttggttatctttgtgttcctcaagctctttaaagaaaaagatgtaatcgttgtaacctt

SEQ ID NO: 152356 - DNA, 120 bp, Artificial Sequence
  ENSG00000105851_33 (sequence is synthesized)
tgtctcattccttaaatgatgcttccaaacatctccttagtgtctgcaggtgttagtggtgtgctaaaagcaaggaaagcgagttagtcttttcagtgtcttttgcaattcaattctttt

SEQ ID NO: 152357 - DNA, 120 bp, Artificial Sequence
  ENSG00000105851_34 (sequence is synthesized)
gtcatgtataactgagacacacaaacacagcaggagaaatctaaaccgttgtgccttgaccttcctctgctggtcttgttccagggttatgaatatgaaaaaatagagatgagacttttt

SEQ ID NO: 152358 - DNA, 120 bp, Artificial Sequence
  ENSG00000105851_35 (sequence is synthesized)
gtgtcaactctgtccacaagagtgagttatctagtatgattagtatagctttctccagcatggcagcaggaagtaactacagggcctcttttatgcctgacatttcttcccttccttttt

SEQ ID NO: 152359 - DNA, 120 bp, Artificial Sequence
  ENSG00000105851_36 (sequence is synthesized)
ccctgcctccctttttcatcaattgcgatgctcccacaactctttacagacttgtgaaatcttcaagaacacctttactctataactcaaaaattagttgaaaaataattacttctcaag

SEQ ID NO: 152360 - DNA, 120 bp, Artificial Sequence
  ENSG00000105851_37 (sequence is synthesized)
gattattagaatcttaggtacttatttgtaaagatgtttagtgacttttttttcaagtatcttattaaaggaggcattctagaaaatatgaattagtttccaaatgccttaattttaaac

SEQ ID NO: 152361 - DNA, 120 bp, Artificial Sequence
  ENSG00000105851_38 (sequence is synthesized)
tttggcctgaacagttttttctttttcttaatggaagaagatatttaatatcttaaaaatattccaagttaggaagaacactacttgccttatccatttcccatttaaaggacttttaaa

SEQ ID NO: 152362 - DNA, 120 bp, Artificial Sequence
  ENSG00000105851_39 (sequence is synthesized)
ctttgacacatccttcagatttcctgaaaataattgaaatatcttactttaaaaatattttcatctctgaaatatctcgttatttattggaggtattgtttaaccttagagagaccatta

SEQ ID NO: 152363 - DNA, 120 bp, Artificial Sequence
  ENSG00000105851_40 (sequence is synthesized)
tgtttaaccttagagagaccattaaattatttataaaatattttgtaattacctgtagctaatacattacatagaaaaaaactatgttaacagtgtctctgtttaagtataatcagatat

SEQ ID NO: 152364 - DNA, 120 bp, Artificial Sequence
  ENSG00000105851_41 (sequence is synthesized)
ttaaaaatagatacctgtttgactttgaggtagtccagaccttttctttttttttttttttttaatgtgtgcaaaagcccaaaggttcctaagcctggctgcaaagaagaatcaacaggg

SEQ ID NO: 152365 - DNA, 89 bp, Artificial Sequence
  ENSG00000105851_42 (sequence is synthesized)
aaaggttcctaagcctggctgcaaagaagaatcaacagggacactttttaaaaacactcttatttaaaaaaaaaattagctgggtatag

SEQ ID NO: 152366 - DNA, 120 bp, Artificial Sequence
  ENSG00000105851_43 (sequence is synthesized)
caggaggattgcctgagcccaggaggtggaaactgcagagagtcatgatcatgtccttacactccagcctggataacagagcgagaccctgtctcaaaaaaataaaataaaaaataaaaa

SEQ ID NO: 152367 - DNA, 120 bp, Artificial Sequence
  ENSG00000105851_44 (sequence is synthesized)
aactgcaacacttcctctgcatctggatatgaagggagccccagaaaagcggaagaatttagacgcacactgggtcgcatagggcatggagctggagaactataaacagcccgtggtgct

SEQ ID NO: 152368 - DNA, 120 bp, Artificial Sequence
  ENSG00000105851_45 (sequence is synthesized)
gcaacacttcctctgcatctggatatgaagggagccccagaaaagcggaagaatttagacgcacactgggtaggtttgaatttgttttgttttcaaaaattaaacaaatgatccttcagc

SEQ ID NO: 152369 - DNA, 120 bp, Artificial Sequence
  ENSG00000105851_46 (sequence is synthesized)
taattactgtgggatgagacccagacatcaatatttttctagattcttcaggtgattctaattcacagccagagttggaagccctgcgtggcctttgaaggtctagatgattcttcttcc

SEQ ID NO: 152370 - DNA, 120 bp, Artificial Sequence
  ENSG00000105851_47 (sequence is synthesized)
ttgccctttgagcttttccccatctcacaggtatctagaaaaaaactcctcttctttggcaacctgtccttttaaaatcacactctacccacctgtacagaagaccatgccctataatga

SEQ ID NO: 152371 - DNA, 120 bp, Artificial Sequence
  ENSG00000105851_48 (sequence is synthesized)
aatgtttattcctatctataaatggaggataaacattttgtggcacttctggaccaactattccctactattcttttgaagaaaggcaggaagagtactttctaattcagaagaggatgt

SEQ ID NO: 152372 - DNA, 120 bp, Artificial Sequence
  ENSG00000105851_49 (sequence is synthesized)
tttcactattctgataaacaatagccaagttcagaccttgtacagattctttttatttgaattgctgaaataatttattgatgatgaaaaaaagattagagaggaatacatttatattta

SEQ ID NO: 152373 - DNA, 120 bp, Artificial Sequence
  ENSG00000105851_50 (sequence is synthesized)
gcttattggcacatgtgcatacatatttcctcttcaaatgaaccagttctttcatttcattatgctaatatatatatataacatatatatgctaatatatatataacatatatatgctaa

SEQ ID NO: 152374 - DNA, 82 bp, Artificial Sequence
  ENSG00000105851_51 (sequence is synthesized)
acagttgggcttgattcttccgtattccaaagagcataatttcagttctatagacttatagataaataaaaatcatctttgt

SEQ ID NO: 152375 - DNA, 120 bp, Artificial Sequence
  ENSG00000105851_52 (sequence is synthesized)
cagttctatagacttatagataaataaaaatcatctttgtgggcttccttcctttactgttcgcagtgaattacatgacgaacaacttctatacctttgaaaatgttctagaactagaat

SEQ ID NO: 152376 - DNA, 120 bp, Artificial Sequence
  ENSG00000105851_53 (sequence is synthesized)
catcctgctactgggaactacccacagctctatcttcaatgccaggtgaaaacacagatcacaagtcagatgaatcaggccaaagcaacttttatgtatatctaggactggcgacataat

SEQ ID NO: 152377 - DNA, 120 bp, Artificial Sequence
  ENSG00000105851_54 (sequence is synthesized)
ttgcagagcccagtgaacagtgaaaatgcagtcccatcattcaaaaattattaagaaattcgagatggcaacagcagttgtcacaccaagcacagtgcccttctgagcatgaggctctgt

SEQ ID NO: 152378 - DNA, 120 bp, Artificial Sequence
  ENSG00000105851_55 (sequence is synthesized)
gtgactgcatgggtccatgagaccagcactgtgtgggtctgaatgatggctttggtgttcagtttagcacacgcggtctaccacgtctgcatgagtggtaaatgtagtgcctgggtcaaa

SEQ ID NO: 152379 - DNA, 120 bp, Artificial Sequence
  ENSG00000105851_56 (sequence is synthesized)
atgttccttctgttcaaatcgaaatacctcatctctatggctctatggctgtacattaggacctagaacagtggcccattgctcttagactggaaccatgtccactaaaataaacctaag

SEQ ID NO: 152380 - DNA, 120 bp, Artificial Sequence
  ENSG00000105851_57 (sequence is synthesized)
cagatgttgtagacctagccccacaggactgcatttagctgcttcagtgacactttgatgaaagtatggagaagtggagacattatagataaaatatatcaattcccagagaaaactctt

SEQ ID NO: 152381 - DNA, 120 bp, Artificial Sequence
  ENSG00000105851_58 (sequence is synthesized)
gacttaaaaacttaactgtagtaaatatatctttttcaggtgatgaattatttttttaaaaaaggttacatataggaattctgcagtataatttggaggctattagtgctatattaatgg

SEQ ID NO: 152382 - DNA, 120 bp, Artificial Sequence
  ENSG00000105851_59 (sequence is synthesized)
aaattaattattttttaagtaagtccaaaaaataatctagaaagtaagtttccagagcaaatctgacctagcatttggtatgctaggctctgcttttcatgattttgaaataaatcataa

SEQ ID NO: 152383 - DNA, 120 bp, Artificial Sequence
  ENSG00000105851_60 (sequence is synthesized)
ttagacttaacaatatggagaaaataaacttgtatttttaagtgttctgttggcttattttctgtttcatccaactcaataattctgataaataaatttggttctagtttggtgcttgtc

SEQ ID NO: 152384 - DNA, 120 bp, Artificial Sequence
  ENSG00000105851_61 (sequence is synthesized)
atgcctcctgccatatggttgcatttcaactggtgacaaaatagatggaaagatctgtcacttattttagtattccagaattcacattatcaaagctattacacactctactatcaggta

SEQ ID NO: 152385 - DNA, 120 bp, Artificial Sequence
  ENSG00000105851_62 (sequence is synthesized)
accctgtaatttaaaaaaggaaaaggcacagattgccatctgaggaaggatatgctcagcatataaatgcttttatttattactattcaaaaccagccctttcctcttgtcattctggga

SEQ ID NO: 152386 - DNA, 120 bp, Artificial Sequence
  ENSG00000105851_63 (sequence is synthesized)
tattgaaaacatatcccacacaacttccatatcctccttctttcctttctattcctcataagaaaaccaatagcatagacctggaaaatagctctctggtcaaaaaaaaaaaaaaaaaaa

SEQ ID NO: 152387 - DNA, 120 bp, Artificial Sequence
  ENSG00000105852_0 (sequence is synthesized)
agtcgccgctgggcaccccgagaccatggggaagctcgtggcgctggtcctgctgggggtcggcctgtccttagtcggggagatgttcctggcgtttagagaaagggtgaatgcctctcg

SEQ ID NO: 152388 - DNA, 120 bp, Artificial Sequence
  ENSG00000105852_1 (sequence is synthesized)
agaagtggagccagtagaacctgaaaactgccaccttattgaggaacttgaaagtggctctgaagatattgatatacttcctagtgggctggcttttatctccagtggattaaaatatcc

SEQ ID NO: 152389 - DNA, 120 bp, Artificial Sequence
  ENSG00000105852_2 (sequence is synthesized)
aggcatgccaaactttgcgccagatgaaccaggaaaaatcttcttgatggatctgaatgaacaaaacccaagggcacaagcgctagaaatcagtggtggatttgacaaagaattatttaa

SEQ ID NO: 152390 - DNA, 120 bp, Artificial Sequence
  ENSG00000105852_3 (sequence is synthesized)
tccacatgggatcagtattttcatcgacaaagacaatactgtgtatctttatgttgtgaatcatccccacatgaagtccactgtggagatatttaaatttgaggaacaacaacgttctct

SEQ ID NO: 152391 - DNA, 120 bp, Artificial Sequence
  ENSG00000105852_4 (sequence is synthesized)
cctgtcattttttgagatgatcttggatcttcgctggacttatgttcttttctacagcccaagggaggttaaagtggtggccaaaggattttgtagtgccaatgggatcacagtctcagc

SEQ ID NO: 152392 - DNA, 120 bp, Artificial Sequence
  ENSG00000105852_5 (sequence is synthesized)
agaccagaagtatgtctatgtagctgatgtagcagctaagaacattcacataatggaaaaacatgataactgggatttaactcaactgaaggtgatacagttgggcaccttagtggataa

SEQ ID NO: 152393 - DNA, 120 bp, Artificial Sequence
  ENSG00000105852_6 (sequence is synthesized)
cctgactgtcgatcctgccacaggagacattttggcaggatgccatcctaatcctatgaagctactgaactataaccctgaggaccctccaggatcagaagtacttcgcatccagaatgt

SEQ ID NO: 152394 - DNA, 120 bp, Artificial Sequence
  ENSG00000105852_7 (sequence is synthesized)
tttgtctgagaagcccagggtgagcaccgtgtatgccaacaatggctctgtgcttcagggcacctctgtggcttctgtgtaccatgggaaaattctcataggcaccgtatttcacaaaac

SEQ ID NO: 152395 - DNA, 120 bp, Artificial Sequence
  ENSG00000105852_8 (sequence is synthesized)
tctgtactgtgagctctagactctagatagtaaaaaaaaaaaaaaaaagtctacatattttgtaaaagtaaactgataattgtatgataagtggcactgtaagtaaatagcaaacaccaa

SEQ ID NO: 152396 - DNA, 120 bp, Artificial Sequence
  ENSG00000105852_9 (sequence is synthesized)
cttaatgcagtagaactggtgtccttgcaagaagacaggcagatatacagggagaatgctatgtgaagatgaatactgacattggagtgatatatctacaagccaaggaatgcctgggac

SEQ ID NO: 152397 - DNA, 120 bp, Artificial Sequence
  ENSG00000105852_10 (sequence is synthesized)
tactggaatgccttgctggaagaggcaaggaaggatccttccctagaaccttcagagataacatggccctaccaataacacggttttggattcctagcctccaaaactgcgaggcaatac

SEQ ID NO: 152398 - DNA, 120 bp, Artificial Sequence
  ENSG00000105852_11 (sequence is synthesized)
atttctggtgtttaagccactgagtttgtggttctttgctgtgccagccctaggaaacacatgcagtgagggaggtacagcaaaggcgtcattaagccaaccgctgctaactgactgctt

SEQ ID NO: 152399 - DNA, 120 bp, Artificial Sequence
  ENSG00000105852_12 (sequence is synthesized)
gaaatcatggacttatcctccagtaatcagcgtaagctgcatctcaggacaatctggtcaaggagaaaaagggagaagggtttatccaccagccccatctcctattagtcaaaggtttgc

SEQ ID NO: 152400 - DNA, 120 bp, Artificial Sequence
  ENSG00000105852_13 (sequence is synthesized)
ctcaagaggccttcattttcccacattcttggttgttgtgcatgtgcaagtctagttttgtggtatcctatgactcaatgtcaacatgaaatctggaagtgggaggcaagaggcccacag

SEQ ID NO: 152401 - DNA, 120 bp, Artificial Sequence
  ENSG00000105852_14 (sequence is synthesized)
taggcatgagctgagacactgctaggctgcccctctgggaagtacatcagacctgtgcagaactggttgaaatagcagcagctggaacaaggtaggtgaggctatgaggatctaaagagg

SEQ ID NO: 152402 - DNA, 120 bp, Artificial Sequence
  ENSG00000105852_15 (sequence is synthesized)
agcctgagggtacactggcacaggcattgataagcacttacaagggggcataacagagagctacagaaacaaattgtgaggcagtttaacctaatttatgatgtcaggcaatactttttg

SEQ ID NO: 152403 - DNA, 120 bp, Artificial Sequence
  ENSG00000105852_16 (sequence is synthesized)
gagtaaagaatgcttaagctgagatacaaaaggtgagtagccgagtgaccttgggaaagtcattatatgtcaaaacttcaaagtatttcctgattcacccaaattttcctccctaaaatt

SEQ ID NO: 152404 - DNA, 120 bp, Artificial Sequence
  ENSG00000105852_17 (sequence is synthesized)
taatctaaaaatgtttaagcattattttttcaagtcactttttttttcttttcaaaaataaaaatgactttatttttcttacggattgtaagaataagacttgctctattttaaaatgtc

SEQ ID NO: 152405 - DNA, 120 bp, Artificial Sequence
  ENSG00000105852_18 (sequence is synthesized)
aatgatattgaagaacgtaagaaagaatatcacccataattccatctactcagagaaaatataaaggtccagatgaactgggttatgctatgataacaggacagcaaaaccctaacatct

SEQ ID NO: 152406 - DNA, 120 bp, Artificial Sequence
  ENSG00000105852_19 (sequence is synthesized)
ttttcatgcatgctatgtatccagtgtaggtgatttagggactcagtttcatattatcctcattaagggccctaggaggaccacagtctctatcatcataaaagttgctcattactgtgg

SEQ ID NO: 152407 - DNA, 120 bp, Artificial Sequence
  ENSG00000105852_20 (sequence is synthesized)
aaacatgagggaaacatggtgaagcaagcagtggttcttaaaatcttccatccacaagccactcacctcatttcatttcatttcattggccaaagcaagtcacatggctgtgcctaactg

SEQ ID NO: 152408 - DNA, 120 bp, Artificial Sequence
  ENSG00000105852_21 (sequence is synthesized)
caaggggatggggaagtgtaattcctgaaggaggataaccatagctatcagtgaactgcactacaactgtcacagataaccatgatcaacatttacaagtcaacagattttggggtttga

SEQ ID NO: 152409 - DNA, 120 bp, Artificial Sequence
  ENSG00000105852_22 (sequence is synthesized)
gatttatttgtgaatttatttcttttcactgatttctgtgaaagagaagagtaagaaaataacaaatggctaaagaaaacccatcagggcaatgcagaatcatgattttctgtggaattc

SEQ ID NO: 152410 - DNA, 120 bp, Artificial Sequence
  ENSG00000105852_23 (sequence is synthesized)
cttaatccatactagttcatgtatcctttttcaaattgatgaacgtattagtctatgtagagatgagtgattttgacaaggataaaggatatttaaatacctcatgggtctctttttcca

SEQ ID NO: 152411 - DNA, 120 bp, Artificial Sequence
  ENSG00000105852_24 (sequence is synthesized)
cgcttatggggaaagtgagctacttgcgtttccaaagactgccgagccgaattagtcccatttattttttgaaggttatgatcccccactttgctttctgaaggtcatgaccccctttta

SEQ ID NO: 152412 - DNA, 120 bp, Artificial Sequence
  ENSG00000105852_25 (sequence is synthesized)
ctttctgaacgtgatgacccctttcccagctcgccctcaacattctgcttgggaaaaaaggacgtccattggaaacgccggacttgggagagaggatcaggctaccagttggatgtttac

SEQ ID NO: 152413 - DNA, 66 bp, Artificial Sequence
  ENSG00000105852_26 (sequence is synthesized)
ggcaaatattgctgcctgatttttcttctggaagcttcatcccagaggggcatccgcctgtatgag

SEQ ID NO: 152414 - DNA, 120 bp, Artificial Sequence
  ENSG00000105852_27 (sequence is synthesized)
tctatcctttgcccttgacattttcgtggactcctttccttacgaggaagttacttccttacttaggcttacgtagtgaatatatgtgtggagggatcagttgtggccagggttcacact

SEQ ID NO: 152415 - DNA, 120 bp, Artificial Sequence
  ENSG00000105852_28 (sequence is synthesized)
aaatctgtcatcctaagcaatccatttgtttccttggactttaggttcttcccagttaaaggagggatgtggacttaaggatataaggacctcattccaaatttttacataactcttgaa

SEQ ID NO: 152416 - DNA, 120 bp, Artificial Sequence
  ENSG00000105852_29 (sequence is synthesized)
acacactttcctaacacactacaaaggaagataaatgagcaatacccctgccccttatgaaagtacaaagtatttgaccacttatgctaagttcagttacacaaaagctcttaggagaga

SEQ ID NO: 152417 - DNA, 120 bp, Artificial Sequence
  ENSG00000105852_30 (sequence is synthesized)
gcaccccgagaccatggggaagctcgtggcgctggtcctgctgggggtcggcctgtccttagtcggggagatgttcctggcgtttagggttgggttttatcttctacagagaaagggtga

SEQ ID NO: 152418 - DNA, 120 bp, Artificial Sequence
  ENSG00000105852_31 (sequence is synthesized)
atggaaaaacatgataactgggatttaactcaactgaaggtaagagtaccctgtctggcccacacaatctgacttcttaccttagtcccatacttgacccaggaatgtgccccttgaatg

SEQ ID NO: 152419 - DNA, 120 bp, Artificial Sequence
  ENSG00000105852_32 (sequence is synthesized)
aggaaaacatggctatttgagagcaatgccagtgagattatgcatgcgtttctaaaatacagaagcaaagccccctaaaaacaccaactttaggtgccagaagaagctgtaggggttgtg

SEQ ID NO: 152420 - DNA, 120 bp, Artificial Sequence
  ENSG00000105854_0 (sequence is synthesized)
atcgagccgggaagatggcaccgcccacggagctgctggccaggccggagcgaggcagcgcgcccggctcccgcgccatggggcggctggtggctgtgggcttgctggggatcgcgctgg

SEQ ID NO: 152421 - DNA, 120 bp, Artificial Sequence
  ENSG00000105854_1 (sequence is synthesized)
cgctcctgggcgagaggcttctggcactcagaaatcgacttaaagcctccagagaagtagaatctgtagaccttccacactgccacctgattaaaggaattgaagctggctctgaagata

SEQ ID NO: 152422 - DNA, 120 bp, Artificial Sequence
  ENSG00000105854_2 (sequence is synthesized)
ttgacatacttcccaatggtctggctttttttagtgtgggtctaaaattcccaggactccacagctttgcaccagataagcctggaggaatactaatgatggatctaaaagaagaaaaac

SEQ ID NO: 152423 - DNA, 120 bp, Artificial Sequence
  ENSG00000105854_3 (sequence is synthesized)
caagggcacgggaattaagaatcagtcgtgggtttgatttggcctcattcaatccacatggcatcagcactttcatagacaacgatgacacagtttatctctttgttgtaaaccacccag

SEQ ID NO: 152424 - DNA, 120 bp, Artificial Sequence
  ENSG00000105854_4 (sequence is synthesized)
aattcaagaatacagtggaaatttttaaatttgaagaagcagaaaattctctgttgcatctgaaaacagtcaaacatgagcttcttccaagtgtgaatgacatcacagctgttggaccgg

SEQ ID NO: 152425 - DNA, 120 bp, Artificial Sequence
  ENSG00000105854_5 (sequence is synthesized)
cacatttctatgccacaaatgaccactacttctctgatcctttcttaaagtatttagaaacatacttgaacttacactgggcaaatgttgtttactacagtccaaatgaagttaaagtgg

SEQ ID NO: 152426 - DNA, 120 bp, Artificial Sequence
  ENSG00000105854_6 (sequence is synthesized)
aagtatatctatgttgctgacatattggctcatgaaattcatgttttggaaaaacacactaatatgaatttaactcagttgaaggtacttgagctggatacactggtggataatttatct

SEQ ID NO: 152427 - DNA, 120 bp, Artificial Sequence
  ENSG00000105854_7 (sequence is synthesized)
attgatccttcctcgggggacatctgggtaggctgtcatcctaatggccagaagctcttcgtgtatgacccgaacaatcctccctcgtcagaggttctccgcatccagaacattctatct

SEQ ID NO: 152428 - DNA, 120 bp, Artificial Sequence
  ENSG00000105854_8 (sequence is synthesized)
gagaagcctacagtgactacagtttatgccaacaatgggtctgttctccaaggaagttctgtagcctcagtgtatgatgggaagctgctcataggcactttataccacagagccttgtat

SEQ ID NO: 152429 - DNA, 120 bp, Artificial Sequence
  ENSG00000105854_9 (sequence is synthesized)
tgtgaactctaaattgtacttttggcatgaaagtgcgataacttaacaattaattttctatgaattgctaattctgagggaatttaaccagcaacattgacccagaaatgtatggcatgt

SEQ ID NO: 152430 - DNA, 120 bp, Artificial Sequence
  ENSG00000105854_10 (sequence is synthesized)
gtagttaattttattccagtaaggaacggcccttttagttcttagagcacttttaacaaaaaaggaaaatgaacaggttctttaaaatgccaagcaagggacagaaaagaaagctgcttt

SEQ ID NO: 152431 - DNA, 120 bp, Artificial Sequence
  ENSG00000105854_11 (sequence is synthesized)
cgaataaagtgaatacattttgcacaaagtaagcctcacctttgccttccaactgccagaacatggattccactgaaatagagtgaattatatttccttaaaatgtgagtgacctcactt

SEQ ID NO: 152432 - DNA, 120 bp, Artificial Sequence
  ENSG00000105854_12 (sequence is synthesized)
ctggcactgtgactactatggctgtttagaactactgataacgtattttgatgttttgtacttacatctttgtttaccattaaaaagttggagttatattaaagactaactaaaatccca

SEQ ID NO: 152433 - DNA, 120 bp, Artificial Sequence
  ENSG00000105854_13 (sequence is synthesized)
attaaaggaattgtcagagcaaaggctttgagtcccagcttcccagtttgtgaccttgagcaattgcttaacttttccaaagcctccaatagtcttcactctaaaataaaagataatcat

SEQ ID NO: 152434 - DNA, 120 bp, Artificial Sequence
  ENSG00000105854_14 (sequence is synthesized)
atgagatattgtatgcagggtatttacaaggagcctggtacttggtgtacctaatgtatgttagttattattattaaattagaggagcaaaaatttctctagcattgactgctcctgaca

SEQ ID NO: 152435 - DNA, 120 bp, Artificial Sequence
  ENSG00000105854_15 (sequence is synthesized)
cagttgtggtgctggccaaattctttactttgctttctttgtcaatgtgaaaatagttttcttgacatttatggtatattatacatataatatatagatacactatatatataattatat

SEQ ID NO: 152436 - DNA, 120 bp, Artificial Sequence
  ENSG00000105854_16 (sequence is synthesized)
ctggcttgggcagacataggagttcttggcatcttcataggtccagtttttctggaggaagaagtaaccaactctgacacctgactggtctaaaattcccaggactccacagctttgcac

SEQ ID NO: 152437 - DNA, 120 bp, Artificial Sequence
  ENSG00000105854_17 (sequence is synthesized)
aagtttcacatcatgagcctaatgtaaggcgtgtccgggccgtcccgaaggtatctggggaaataggtttgtgaggacaaagaccagggccaggcccagggcggagcctccgcggccccg

SEQ ID NO: 152438 - DNA, 120 bp, Artificial Sequence
  ENSG00000105854_18 (sequence is synthesized)
tgctttctatgtaagtttctcactggaatagcgagtgagaaatgtgtttgaagactagggaaacgagaaaggtatgcgggctgctagagggtttcgggtgggttgtttgaaaaaggaagt

SEQ ID NO: 152439 - DNA, 120 bp, Artificial Sequence
  ENSG00000105854_19 (sequence is synthesized)
aacaagatcttggaaaacttcctccagcttttctaaatgtagagatgaagactctttgcccattgagatagtgttctttatttccccattgcattgcactaaaatattccaatgcaatct

SEQ ID NO: 152440 - DNA, 79 bp, Artificial Sequence
  ENSG00000105854_20 (sequence is synthesized)
cactaaaatattccaatgcaatctgtgagacggagtcttgttctggttgccccggctggagtgcagtggcatgatctca

SEQ ID NO: 152441 - DNA, 120 bp, Artificial Sequence
  ENSG00000105854_21 (sequence is synthesized)
cattagatcaacaaaaacctctttggtcaacctcttgatctgatgaaccctgtatttattcttctttcctaccctcactgtaaattattcttttttgtgtgtaattctatgtttagcatt

SEQ ID NO: 152442 - DNA, 120 bp, Artificial Sequence
  ENSG00000105854_22 (sequence is synthesized)
tgatttcttgcttgttttgtgacttctctgaactatttttgttgcgtctgtattgtttgtcaggtatggccgctgcagtctgtgttctgtgagccttgtggtcagctagtgaaggaagct

SEQ ID NO: 152443 - DNA, 120 bp, Artificial Sequence
  ENSG00000105854_23 (sequence is synthesized)
atttaaaaagtgttatattggcacaggaatagacatgagacattaaaataacaaaacagagagtccctaaatagaccaatatgtaaatgtcagagatctagcacatgataaaggtgatat

SEQ ID NO: 152444 - DNA, 120 bp, Artificial Sequence
  ENSG00000105854_24 (sequence is synthesized)
tttgaatcagtgggagaaggatggactgtatgccaggcactgttccaggcactgggatctagcagtgaacaaatttccacagtcagtatgtagatgtcacttttctccaccctcagctct

SEQ ID NO: 152445 - DNA, 120 bp, Artificial Sequence
  ENSG00000105855_0 (sequence is synthesized)
agagcgcgccagcaactcgggctctggactgcgggacgcctgagccgcgcactgaggcgaaaaggacaagggcacgcagcccccgccccgcgaagccgggctccggcacctcgcggaacc

SEQ ID NO: 152446 - DNA, 120 bp, Artificial Sequence
  ENSG00000105855_1 (sequence is synthesized)
tcccctcctgcgctcgcagccgcaggccccactccccgccagggagggagcggcgatgcctcgctctgtgcctgcgggtgtcggcgggtgcttctagggcgctcccagagccgcctcccc

SEQ ID NO: 152447 - DNA, 120 bp, Artificial Sequence
  ENSG00000105855_2 (sequence is synthesized)
ctgttgctggcatcccgagcttcctcccttgccagccaggacgctgccgacttgtctttgcccgctgctccgcagacggggctgcaaagctgcaactaatggtgttggcctccctgccca

SEQ ID NO: 152448 - DNA, 120 bp, Artificial Sequence
  ENSG00000105855_3 (sequence is synthesized)
cctgtggaagcaactgcgctgattgatgcgccacagacttttttcccctcgacctcgccggcgtcccctcccacagatccagcatcacccagtgaatgtacattagggtggtttcccccc

SEQ ID NO: 152449 - DNA, 120 bp, Artificial Sequence
  ENSG00000105855_4 (sequence is synthesized)
cagcttcgggctttgtttgggtttgattgtgtttggctcttcgctaagctgatttatgcagcagaagccccaccggctggagagaaacaaaagctcttttctttgtcccggagcaggctg

SEQ ID NO: 152450 - DNA, 120 bp, Artificial Sequence
  ENSG00000105855_5 (sequence is synthesized)
cggagcccttgcagagccctctctccagtcgccgccggggcccttggccgtcgaaggaggtgcttctcgcggagaccgcgggacccgccgtgccgagccgggagggccgcaggggccctg

SEQ ID NO: 152451 - DNA, 120 bp, Artificial Sequence
  ENSG00000105855_6 (sequence is synthesized)
agatgccgagcggtgcccgggcccgcttacctgcaccgcttgctccgagccgcggggtccgcctgctaggcctgcggaaaacgtcctagcgacactcggcccgcgggccccgaggtgcgc

SEQ ID NO: 152452 - DNA, 120 bp, Artificial Sequence
  ENSG00000105855_7 (sequence is synthesized)
ccgggaggcgcgagcccgcgtccggaaggcagtcaggcggcgggcgcggggcgggctgttttgcattatgtgcggctcggccctggctttttttaccgctgcatttgtctgcctgcaaaa

SEQ ID NO: 152453 - DNA, 120 bp, Artificial Sequence
  ENSG00000105855_8 (sequence is synthesized)
cgaccggcgaggtcccgcctcgttcctctgggcagcctgggtgttttcacttgttcttggactgggccaaggtgaagacaatagatgtgcatcttcaaatgcagcatcctgtgccaggtg

SEQ ID NO: 152454 - DNA, 120 bp, Artificial Sequence
  ENSG00000105855_9 (sequence is synthesized)
ccttgcgctgggtccagaatgtggatggtgtgttcaagaggatttcatttcaggtggatcaagaagtgaacgttgtgatattgtttccaatttaataagcaaaggctgctcagttgattc

SEQ ID NO: 152455 - DNA, 120 bp, Artificial Sequence
  ENSG00000105855_10 (sequence is synthesized)
aatagaatacccatctgtgcatgttataatacccactgaaaatgaaattaatacccaggtgacaccaggagaagtgtctatccagctgcgtccaggagccgaagctaattttatgctgaa

SEQ ID NO: 152456 - DNA, 120 bp, Artificial Sequence
  ENSG00000105855_11 (sequence is synthesized)
agttcatcctctgaagaaatatcctgtggatctttattatcttgttgatgtctcagcatcaatgcacaataatatagaaaaattaaattccgttggaaacgatttatctagaaaaatggc

SEQ ID NO: 152457 - DNA, 120 bp, Artificial Sequence
  ENSG00000105855_12 (sequence is synthesized)
atttttctcccgtgactttcgtcttggatttggctcatacgttgataaaacagtttcaccatacattagcatccaccccgaaaggattcataatcaatgcagtgactacaatttagactg

SEQ ID NO: 152458 - DNA, 120 bp, Artificial Sequence
  ENSG00000105855_13 (sequence is synthesized)
catgcctccccatggatacatccatgtgctgtctttgacagagaacatcactgagtttgagaaagcagttcatagacagaagatctctggaaacatagatacaccagaaggaggttttga

SEQ ID NO: 152459 - DNA, 120 bp, Artificial Sequence
  ENSG00000105855_14 (sequence is synthesized)
cgccatgcttcaggcagctgtctgtgaaagtcatatcggatggcgaaaagaggctaaaagattgctgctggtgatgacagatcagacgtctcatctcgctcttgatagcaaattggcagg

SEQ ID NO: 152460 - DNA, 120 bp, Artificial Sequence
  ENSG00000105855_15 (sequence is synthesized)
catagtggtgcccaatgacggaaactgtcatctgaaaaacaacgtctatgtcaaatcgacaaccatggaacacccctcactaggccaactttcagagaaattaatagacaacaacattaa

SEQ ID NO: 152461 - DNA, 120 bp, Artificial Sequence
  ENSG00000105855_16 (sequence is synthesized)
tgtcatctttgcagttcaaggaaaacaatttcattggtataaggatcttctacccctcttgccaggcaccattgctggtgaaatagaatcaaaggctgcaaacctcaataatttggtagt

SEQ ID NO: 152462 - DNA, 120 bp, Artificial Sequence
  ENSG00000105855_17 (sequence is synthesized)
ggaagcctatcagaagctcatttcagaagtgaaagttcaggtggaaaaccaggtacaaggcatctattttaacattaccgccatctgtccagatgggtccagaaagccaggcatggaagg

SEQ ID NO: 152463 - DNA, 120 bp, Artificial Sequence
  ENSG00000105855_18 (sequence is synthesized)
atgcagaaacgtgacgagcaatgatgaagttcttttcaatgtaacagttacaatgaaaaaatgtgatgtcacaggaggaaaaaactatgcaataatcaaacctattggttttaatgaaac

SEQ ID NO: 152464 - DNA, 120 bp, Artificial Sequence
  ENSG00000105855_19 (sequence is synthesized)
cgctaaaattcatatacacagaaactgcagctgtcagtgtgaggacaacagaggacctaaaggaaagtgtgtagatgaaacttttctagattccaagtgtttccagtgtgatgagaataa

SEQ ID NO: 152465 - DNA, 120 bp, Artificial Sequence
  ENSG00000105855_20 (sequence is synthesized)
atgtcattttgatgaagatcagttttcttctgagagttgcaagtcacacaaggatcagcctgtttgcagtggtcgaggagtttgtgtttgtgggaaatgttcatgtcacaaaattaagct

SEQ ID NO: 152466 - DNA, 120 bp, Artificial Sequence
  ENSG00000105855_21 (sequence is synthesized)
tggaaaagtgtatggaaaatactgtgaaaaggatgacttttcttgtccatatcaccatggaaatctgtgtgctgggcatggagagtgtgaagcaggcagatgccaatgcttcagtggctg

SEQ ID NO: 152467 - DNA, 120 bp, Artificial Sequence
  ENSG00000105855_22 (sequence is synthesized)
ggaaggtgatcgatgccagtgcccttcagcagcagcccagcactgtgtcaattcaaagggccaagtgtgcagtggaagaggcacgtgtgtgtgtggaaggtgtgagtgcaccgatcccag

SEQ ID NO: 152468 - DNA, 120 bp, Artificial Sequence
  ENSG00000105855_23 (sequence is synthesized)
gagcatcggccgcttctgtgaacactgccccacctgttatacagcctgcaaggaaaactggaattgtatgcaatgccttcaccctcacaatttgtctcaggctatacttgatcagtgcaa

SEQ ID NO: 152469 - DNA, 120 bp, Artificial Sequence
  ENSG00000105855_24 (sequence is synthesized)
aacctcatgtgctctcatggaacaacagcattatgtcgaccaaacttcagaatgtttctccagcccaagctacttgagaatatttttcatcattttcatagttacattcttgattgggtt

SEQ ID NO: 152470 - DNA, 120 bp, Artificial Sequence
  ENSG00000105855_25 (sequence is synthesized)
gcttaaagtcctgatcattagacaggtgatactacaatggaatagtaataaaattaagtcctcatcagattacagagtgtcagcctcaaaaaaggataagttgattctgcaaagtgtttg

SEQ ID NO: 152471 - DNA, 120 bp, Artificial Sequence
  ENSG00000105855_26 (sequence is synthesized)
cacaagagcagtcacctaccgacgtgagaagcctgaagaaataaaaatggatatcagcaaattaaatgctcatgaaactttcaggtgcaacttctaaaaaaagatttttaaacacttaat

SEQ ID NO: 152472 - DNA, 120 bp, Artificial Sequence
  ENSG00000105855_27 (sequence is synthesized)
gggaaactggaattgttaataattgctcctaaagattataattttaaaagtcacaggaggagacaaattgctcacggtcatgccagttgctggttgtacactcgaacgaagactgacaag

SEQ ID NO: 152473 - DNA, 120 bp, Artificial Sequence
  ENSG00000105855_28 (sequence is synthesized)
tatcctcatcatgatgtgactcacatagctgctgactttttcagagaaaaatgtgtcttactactgtttgagactagtgtcgttgtagcactttactgtaatatataacttatttagatc

SEQ ID NO: 152474 - DNA, 120 bp, Artificial Sequence
  ENSG00000105855_29 (sequence is synthesized)
agcatagaatgtagatcctctgaagagcactgattacactttacaggtacctgttatccctacgcttcccagagagaacaatgctgtgagagagtttagcattgtgtcactacaagggta

SEQ ID NO: 152475 - DNA, 120 bp, Artificial Sequence
  ENSG00000105855_30 (sequence is synthesized)
cagtaatccctgcactggacatgtgaggaaaaaaataatctggcaagtatattctaaggttgccaaacacttcaacagttggtggttgaatagacaagaacagctagatgaataaatgat

SEQ ID NO: 152476 - DNA, 120 bp, Artificial Sequence
  ENSG00000105855_31 (sequence is synthesized)
tcgtgtttcactctttcaagaggtgaacagatacaaccttaatcttaaaagattattgctttttaaagtgtgtagttttatgcatgtgtgtttatggtttgcttatttttgcaagatgga

SEQ ID NO: 152477 - DNA, 120 bp, Artificial Sequence
  ENSG00000105855_32 (sequence is synthesized)
tactaattccagcattctctcctctttgcctttatgttttgttttcttttttacaggataagtttatgtatgtcacagatgactggattaattaagtgctaagttactactgccataaaa

SEQ ID NO: 152478 - DNA, 120 bp, Artificial Sequence
  ENSG00000105855_33 (sequence is synthesized)
aactaataatacaatgtcactttatcagaatactagttttaaaagctgaatgttaataggggacactgtaaagtatcatcaaaacctgaatagcttcattgtgcacaagtgtggagtttt

SEQ ID NO: 152479 - DNA, 120 bp, Artificial Sequence
  ENSG00000105855_34 (sequence is synthesized)
gtatcctcttacctggtaaactgaagggattgtttggccatttcatttatcttatcattaattcacaagatagttagaaattctgcctcaagcaaagtaccacattttgaatgttttctt

SEQ ID NO: 152480 - DNA, 120 bp, Artificial Sequence
  ENSG00000105855_35 (sequence is synthesized)
agattttgattgcaagtagatatcagcattttttaaatgaaaagctatattatcttctcccttcaaggcagcctaaggatgttctttcccagaatcactccaacccttcttgccagaatt

SEQ ID NO: 152481 - DNA, 80 bp, Artificial Sequence
  ENSG00000105855_36 (sequence is synthesized)
gttctttcccagaatcactccaacccttcttgccagaattcataaaagtacaaaattggagaatagatgatatcttagaa

SEQ ID NO: 152482 - DNA, 120 bp, Artificial Sequence
  ENSG00000105855_37 (sequence is synthesized)
atgagccaccatgccaggctgctaattctcctttttagtgagttagggaactgagcctcagaaaacttaaacgatttctcagaaaacactcaagtgataaagtggccacattggaaagga

SEQ ID NO: 152483 - DNA, 120 bp, Artificial Sequence
  ENSG00000105855_38 (sequence is synthesized)
gtttttatcttctcattgtcaggccagtgttcattgcacaatatcatgctacctcttgaatctttaaaatattcaattggcaaatgtttttcaatgtgatttactcatgtcttaagtgta

SEQ ID NO: 152484 - DNA, 120 bp, Artificial Sequence
  ENSG00000105855_39 (sequence is synthesized)
tgaggaaagttcaaagcaaaatagaaaggaataattcaaactgaattgtccataatcagcttccagtctttcatgctaatcagcttcttaagagactgaagtatggcatacctacagggg

SEQ ID NO: 152485 - DNA, 120 bp, Artificial Sequence
  ENSG00000105855_40 (sequence is synthesized)
aattccttcgcaccatagcctgtatgaacagtgttccctggagttctccagtgctcagcttgagaccttgatacacgggccatgagccctgtcttccccaatggaaatttatttacactt

SEQ ID NO: 152486 - DNA, 120 bp, Artificial Sequence
  ENSG00000105855_41 (sequence is synthesized)
accttatccctatggacttagtctgattttattggctaggagtctaacagtcctgtgtggatatacagttttgcccatgacaacaaaggaatctatccgaaatatctttttttttataat

SEQ ID NO: 152487 - DNA, 120 bp, Artificial Sequence
  ENSG00000105855_42 (sequence is synthesized)
aaacttccaagatttgctgtcttccagcacttgagttaaagtactagatactgcattttgatgaagactaaccccatctcatattctaccctaaagagaactgaaaaacctataataagt

SEQ ID NO: 152488 - DNA, 120 bp, Artificial Sequence
  ENSG00000105855_43 (sequence is synthesized)
tgttctggagccaataaacacagcagctctgttagatgtcctctacagccaagcactttcaatgctaacttgaactgcatttccttcctcaaatgagagattgacataattcagtactgt

SEQ ID NO: 152489 - DNA, 120 bp, Artificial Sequence
  ENSG00000105855_44 (sequence is synthesized)
gagtcacttgtataagaaacctttgatcactaaaaataatgtaaaaattgggtttagtagcctaatacacataacgttcttcttaaaaaggaaaatggatggatgcctgacaaccctcca

SEQ ID NO: 152490 - DNA, 120 bp, Artificial Sequence
  ENSG00000105855_45 (sequence is synthesized)
aaagaaaaaagtgtaagatagccattaagatgatgacaatttttgaaatgaacattatgatatttatgaacaataaacaaatttccgtatggaatgaattatccaaaaagagtataacaa

SEQ ID NO: 152491 - DNA, 120 bp, Artificial Sequence
  ENSG00000105855_46 (sequence is synthesized)
aatgaaatccttaaaaatccagagtttatattttttttataccctcacttgtttgcactaactttatagtggaccaaggctgttaccataggaagggacaaacttccttgtaggcaactc

SEQ ID NO: 152492 - DNA, 120 bp, Artificial Sequence
  ENSG00000105855_47 (sequence is synthesized)
agtgttagacgatgattgtggttatgcttgcaaagtcttgtgcttatcttttttgtttttacttaaaaagctaatttttaaagattgtagggcttgtattttacttgaataattgatatc

SEQ ID NO: 152493 - DNA, 120 bp, Artificial Sequence
  ENSG00000105855_48 (sequence is synthesized)
ttcctgtgtaatgatttgtgagatgagaattaatatttgactagttagaattaattaaatggtaagggaacacagggtactcttaggttaaataatgtatgcaaatagagtctattttca

SEQ ID NO: 152494 - DNA, 120 bp, Artificial Sequence
  ENSG00000105855_49 (sequence is synthesized)
actaatatggccacaggagccttttgagattcattgatattaaacacaattaatgaaattttaaattgttaacagaattgagaacttgaacaacacttttagtactgcagcatttttgtg

SEQ ID NO: 152495 - DNA, 120 bp, Artificial Sequence
  ENSG00000105855_50 (sequence is synthesized)
ccctaaagtatgtaatgatttataaatgtgccatacatacactacaacataacatttgctttgttatgcattttatttctctggggacaccattgcactgcagtgcacacgtatttataa

SEQ ID NO: 152496 - DNA, 120 bp, Artificial Sequence
  ENSG00000105855_51 (sequence is synthesized)
acatttgttatatttttggaaacttgctaatatttattaagtcatagacttttctggaggacttaaaaattcactaaaaatctgattatgtcttaaatgttcagtttatctttggtttat

SEQ ID NO: 152497 - DNA, 120 bp, Artificial Sequence
  ENSG00000105855_52 (sequence is synthesized)
taaaataaaaaaaaaatctaagattaaacacagtagatatctctggaggcaattttccaaaactcaacattaaaatttgtggatgcatgagatgcaatccttcaaagaatgaatctgaaa

SEQ ID NO: 152498 - DNA, 120 bp, Artificial Sequence
  ENSG00000105855_53 (sequence is synthesized)
tatatttttaatatttacttaatatccactgaagatatctttatgcaagacaagagtcagccatcagacactgaaatatattatgatagattatgaagaattttctctgtagaattatat

SEQ ID NO: 152499 - DNA, 120 bp, Artificial Sequence
  ENSG00000105855_54 (sequence is synthesized)
tcttcctggaacctggtagagtagattagactcaaaggctttttcttccttttcttactcctgttttttccactcactcttcccaagagatttcctaaagcttcaagcttaataagccta

SEQ ID NO: 152500 - DNA, 120 bp, Artificial Sequence
  ENSG00000105855_55 (sequence is synthesized)
atagtgaaaaataactgaatttaatggtataatgaagttcttcatttccagacatctttaattgatcttaaagctcatttgagtctttgcccctgaacaaagacagacccattaaaatct

SEQ ID NO: 152501 - DNA, 120 bp, Artificial Sequence
  ENSG00000105855_56 (sequence is synthesized)
aagaattctaaattttcacaactgtttgagcttcttttcattttgaaggatttggaatatatatgttttcataaaagtatcaagtgaaatatagttacatgggagctcaatcatgtgcag

SEQ ID NO: 152502 - DNA, 120 bp, Artificial Sequence
  ENSG00000105855_57 (sequence is synthesized)
attgcattctgttatgttgactcaatatttaatttacaactatccttatttatattgacctcaagaactccattttatgcaatgcagaccactgagatatagctaacattctttcaaata

SEQ ID NO: 152503 - DNA, 120 bp, Artificial Sequence
  ENSG00000105855_58 (sequence is synthesized)
attttccttttcttttataattcctctatagcaaatttttatgtataactgattatacatatccatatttatatttcattgattccaagacatcactttttcaatttaacatctctgaaa

SEQ ID NO: 152504 - DNA, 120 bp, Artificial Sequence
  ENSG00000105855_59 (sequence is synthesized)
ttgtgacatttcttgcaactgttggcacttcagatgcagtgtttaaaattatgcttgaataaatattacactaatccaactttacctaaatgtttatgcatctaggcaaattttgttttc

SEQ ID NO: 152505 - DNA, 120 bp, Artificial Sequence
  ENSG00000105855_60 (sequence is synthesized)
ttataaagatttgagagcccatttatgacaaaatatgaaggcgaaatttaaggacaactgagtcacgcacaactcaacatggagcctaactgattatcagctcagatcccgcatatcttg

SEQ ID NO: 152506 - DNA, 120 bp, Artificial Sequence
  ENSG00000105855_61 (sequence is synthesized)
agtttacaaaagctctttcaggtccccatttatactttacgtgagtgcgaatgatttcagcaaaccctaacttaactaacaagaatgggtaggtatgtctacgtttcattaacaaatttt

SEQ ID NO: 152507 - DNA, 120 bp, Artificial Sequence
  ENSG00000105855_62 (sequence is synthesized)
tattatttttattctattatatgagatccttttatattatcatctcacttttaaacaaaattaactggaaaaatattacatggaactgtcatagttaggttttgcagcatcttacatgtc

SEQ ID NO: 152508 - DNA, 120 bp, Artificial Sequence
  ENSG00000105855_63 (sequence is synthesized)
ttgtatcaatggcaggagaaaaatatgataaaaacaatcagtgctgtgaaaaacaactttcttctagagtcctcttactttttattcttctttatcatttgtgggtttttcccccttggc

SEQ ID NO: 152509 - DNA, 120 bp, Artificial Sequence
  ENSG00000105855_64 (sequence is synthesized)
tctgatcactttaacttcaagcttatgtaacgactgttataaaactgcatatttaaattatttgaattatatgaaataattgttcagctatctgggcagctgttaatgtaaacctgagag

SEQ ID NO: 152510 - DNA, 120 bp, Artificial Sequence
  ENSG00000105855_65 (sequence is synthesized)
taataacactactcttttatctacctggaatacttttctgcataaaatttatctttgtaagctaactctattaatcaggtttcttctagcctctgcaacctacttcagttagaattgtct

SEQ ID NO: 152511 - DNA, 120 bp, Artificial Sequence
  ENSG00000105855_66 (sequence is synthesized)
aatactgctctattaatcaggtttctagcctctacaacctacttcagttaaaattgtctaatacagcaatatttaaaaaaaaaacactgcaattgtcaaggatggaaaatgtgtgatttg

SEQ ID NO: 152512 - DNA, 120 bp, Artificial Sequence
  ENSG00000105855_67 (sequence is synthesized)
tgtaaacaatttttaccaactttacattttcctacagataaatgtgaaattttgataagaagtctacgcaatgacaagtatggtacataaattttattaagaatattgagtataaagtac

SEQ ID NO: 152513 - DNA, 120 bp, Artificial Sequence
  ENSG00000105855_68 (sequence is synthesized)
aagaaaatatacatttgcacatattaatatagaaattcattttgtgtatatttaacatagcttttaaactattttacattagctacttcattatggtttcttgaacttctgaaaaaaatt

SEQ ID NO: 152514 - DNA, 120 bp, Artificial Sequence
  ENSG00000105855_69 (sequence is synthesized)
atggtttcttgaacttctgaaaaaaattagaaatgtattaaacttatcagtaacataaaaacttattttgtttcacctaacgaatactgcgtttgtaaaaataaatttaatatagaatat

SEQ ID NO: 152515 - DNA, 120 bp, Artificial Sequence
  ENSG00000105855_70 (sequence is synthesized)
aatatttgaatataaaatagctctaagaaagaagcaaattatcactgaacatatttcttattatttctggctttgaattatacgtaacttaaattgtcttaaatgatacagaatattgga

SEQ ID NO: 152516 - DNA, 120 bp, Artificial Sequence
  ENSG00000105855_71 (sequence is synthesized)
gaatatgatactttcacataatatactatgaacctgttcatataactctgattgactactaacttctgttttatgtatttattaaagagctgacactgtagtttgtggtgagatgtttat

SEQ ID NO: 152517 - DNA, 120 bp, Artificial Sequence
  ENSG00000105855_72 (sequence is synthesized)
ttttctaacagagcttataacagttaggacaaggcatttaattaatgcatcattctgtttagtagtaggtgttaatcaatatgaaattctctgttttaaaataaaaatgtaaaaatctaa

SEQ ID NO: 152518 - DNA, 120 bp, Artificial Sequence
  ENSG00000105855_73 (sequence is synthesized)
ctgcccgggctgcagccgcgcctgcgggcagccgaggcgaggcgctccggtagcgtggggaggtttcctagcaactctctgccctgagtgcacccggctacccgcaggtctggagccccc

SEQ ID NO: 152519 - DNA, 120 bp, Artificial Sequence
  ENSG00000105855_74 (sequence is synthesized)
gtcattcatgaactagaaagtggttcatcagaacccgtgaagccaggcatgtcatagagaggacaacttcagagtttctgggtccgatcccatcactgcctgtgagccaaatgaccaaaa

SEQ ID NO: 152520 - DNA, 120 bp, Artificial Sequence
  ENSG00000105855_75 (sequence is synthesized)
gaattcactttattctagcatctccctttcctcgtctctataacctcaaatttggtgtctgcttccaggtttttctctgtcaagaatgtttcatggcttgttatttcctgaccccaaacc

SEQ ID NO: 152521 - DNA, 120 bp, Artificial Sequence
  ENSG00000105855_76 (sequence is synthesized)
agtacttcattttagatttttactgcttcactaaggaaaatccttagagccctgaagtttgtgccaacttgctgtcaactgctgaatgctttagtgagggtagtttggaagagccttcaa

SEQ ID NO: 152522 - DNA, 120 bp, Artificial Sequence
  ENSG00000105855_77 (sequence is synthesized)
aagatagtacagaagcccagttgtcagccacatgtaacatgttagccatagaacatcaggcttcagagggaccccttctccctgtcacacctttgactggaagaaaataatctggagagt

SEQ ID NO: 152523 - DNA, 120 bp, Artificial Sequence
  ENSG00000105855_78 (sequence is synthesized)
cacagctctgggaatagctgtcagtcctgccatagaaggagggattttgagtattcggaggaatcagttgtctgatagaaagagctaagtcaaggagaaaggaggtggctgctggagggg

SEQ ID NO: 152524 - DNA, 120 bp, Artificial Sequence
  ENSG00000105855_79 (sequence is synthesized)
agaaggaaaacctgtcactgttggcaacattcttcagatgggatcttagggaaaacggtcagaaactcacttgggtgctcatgttcccaaatattctatatagcgcagtgcagcctagtt

SEQ ID NO: 152525 - DNA, 120 bp, Artificial Sequence
  ENSG00000105855_80 (sequence is synthesized)
tatgtattgaaagagcaggctctgaagaaacactgagttggattcaaatcctagttccaccagtttctaatgttataaacttgcacatattacctaatcactttgaacctcagatttcca

SEQ ID NO: 152526 - DNA, 120 bp, Artificial Sequence
  ENSG00000105855_81 (sequence is synthesized)
tacctctaaaatggaaatacaaattgaacccgcctcacagtcttgtgaggatgaaatgaagcaatgtgggaagcactgggcacagaggcatggcttaagaaatgggatttaggactatat

SEQ ID NO: 152527 - DNA, 120 bp, Artificial Sequence
  ENSG00000105855_82 (sequence is synthesized)
atagaactttgacaaggttctggaacaactcattcacggttaggaaactaggaggattgcctgcattaataacataacctcaggggaagcagccagttttaggactcagccactatccat

SEQ ID NO: 152528 - DNA, 120 bp, Artificial Sequence
  ENSG00000105855_83 (sequence is synthesized)
gccattaacaggagctgtccactccctgcaggctgacctgacgtcattgagaggaagaatgtattatttaattttggaagatccctcaccctttaggtgcggatgtgactgatgccaatg

SEQ ID NO: 152529 - DNA, 120 bp, Artificial Sequence
  ENSG00000105855_84 (sequence is synthesized)
attcctcaaccagcaaggctggaaggagaggcaagggagaggcaggctttttttttttttttctccccatgattaggttagataaatggtaacaacgtaaacctggcttgaataattttc

SEQ ID NO: 152530 - DNA, 120 bp, Artificial Sequence
  ENSG00000105855_85 (sequence is synthesized)
aaggctaatcaaaagtaaaacgtctctagaaaatttagacaggatgtatccagtttgcttgcactattatgtagcatgttaatctgccattccatatactttgctttctctttccttcta

SEQ ID NO: 152531 - DNA, 120 bp, Artificial Sequence
  ENSG00000105855_86 (sequence is synthesized)
cactacataagtaattggaaaataattaggatagaaacagcatcatcaatattacctagtttaatgccccatgttcctttctaacatctatggaagacatgatatgtcttgaagaattcc

SEQ ID NO: 152532 - DNA, 120 bp, Artificial Sequence
  ENSG00000105855_87 (sequence is synthesized)
cttcctctcctacctgttgtgtctgatgcagagtgtcatgcgtagtgagagttcagagcgtaggctcggagcatagttatactttcacagcatatatgataggaaaagtttcactgtcaa

SEQ ID NO: 152533 - DNA, 120 bp, Artificial Sequence
  ENSG00000105855_88 (sequence is synthesized)
agggaatatgatagaattctctcacttctgtgcaaattgctatgtttggaagtcaaaaagacccaggcgtgggtaggaaaaaaaaagttttcatatatatatatccccagaatactatat

SEQ ID NO: 152534 - DNA, 83 bp, Artificial Sequence
  ENSG00000105855_89 (sequence is synthesized)
aaaaaagttttcatatatatatatccccagaatactatattaaattgatgaaaataacaaccaataaaaagccaaccaggtca

SEQ ID NO: 152535 - DNA, 120 bp, Artificial Sequence
  ENSG00000105855_90 (sequence is synthesized)
atcgtgccactgcactccagcctggatcaggagggagactctgtctccgacacagaaaaaaaaagccaaccagagaaacttcagtctgagcttttccttctcaaataggttttagatgca

SEQ ID NO: 152536 - DNA, 120 bp, Artificial Sequence
  ENSG00000105855_91 (sequence is synthesized)
agcttttccttctcaaataggttttagatgcagaaagttggagtaggatttttgcttgtgtttttcttgtagaaatagtaaaaacataaggattagaagaaattaaaatgatataaaata

SEQ ID NO: 152537 - DNA, 120 bp, Artificial Sequence
  ENSG00000105855_92 (sequence is synthesized)
ccaaaaatgcaatatttgctatgtcattttctttggatgtaattgatatacactaaaaacatcagtgattttctttcttttaaacaggatttcatttcaggtggatcaagaagtgaacgt

SEQ ID NO: 152538 - DNA, 120 bp, Artificial Sequence
  ENSG00000105855_93 (sequence is synthesized)
gctaaattaattttttgcttataaaatctcactttgtttttaatgtaaagaacttaccaaattttatatttttatcttataaaataagaataaaaatatttggtgaggtggggaggtttc

SEQ ID NO: 152539 - DNA, 120 bp, Artificial Sequence
  ENSG00000105855_94 (sequence is synthesized)
tggggaggtttcttcatatctgaaaacttctgagatgaactgtagattgggctttttattttatatttctttaaatatttagtcagtttttatcaccaaaaaaaacaaaaaaacaaacaa

SEQ ID NO: 152540 - DNA, 120 bp, Artificial Sequence
  ENSG00000105855_95 (sequence is synthesized)
aatgttagtaactttgaatgaagcttcaatagttaggctgccatgtatataaatacctctttggaaattctgtatttttattttttgattgctccaaaattgctgaattatgatttgaca

SEQ ID NO: 152541 - DNA, 120 bp, Artificial Sequence
  ENSG00000105855_96 (sequence is synthesized)
cattttaaagagtttgtgccaacacgtcatctatctctccattactgtactgtgactggggataatgatgttgtctccgatgtgactacaaagaaatctcagttatcacaaagaaagtgg

SEQ ID NO: 152542 - DNA, 120 bp, Artificial Sequence
  ENSG00000105855_97 (sequence is synthesized)
gtcaaaagatgagaatttgattgcttagaaagagccttttttcttatcattttagatttctgattctaaataacatatgtcccactatgaaagaagaattagccttaaaaatacaagtgt

SEQ ID NO: 152543 - DNA, 120 bp, Artificial Sequence
  ENSG00000105855_98 (sequence is synthesized)
ctcacacaatattgccattagcctgtggaattttcagaaaaataaatctgtatggatcttttttcacaaaagactttatctttcttgcttctacaaattgcttagattactttacaatac

SEQ ID NO: 152544 - DNA, 120 bp, Artificial Sequence
  ENSG00000105855_99 (sequence is synthesized)
acattccaatttaccgaaacagctctgtcatctgttgtaccggaacaggattgatgcatccatcaatggagtttcataagccttcttgaggtgaatgtacaggaggaatcattcttactt

SEQ ID NO: 152545 - DNA, 120 bp, Artificial Sequence
  ENSG00000105855_100 (sequence is synthesized)
tctgggtatcatagattctcaaaataattttaatgaatattgattgttcatcaataattccaccaagcatcactttaaaaattagtgcagtattaaaaaaaactaatatcatatttcaac

SEQ ID NO: 152546 - DNA, 120 bp, Artificial Sequence
  ENSG00000105855_101 (sequence is synthesized)
taaattcctcaaaagcattttccagaagtgtttctcagctgttcaatgataagaaatcactgcacattcttatattcaccttaaaaattcacagcgcagattaaatattgaaagccttta

SEQ ID NO: 152547 - DNA, 120 bp, Artificial Sequence
  ENSG00000105855_102 (sequence is synthesized)
actgtcctatattaaaaaacatgtttaatcatctttatttttttgaataccaaatgcttatagtcttatttcctatttgcaaagaaattgtcatcagcattgagcttatctctaatttta

SEQ ID NO: 152548 - DNA, 120 bp, Artificial Sequence
  ENSG00000105855_103 (sequence is synthesized)
taagcatagattttcgtcgtataaagtttccctggcacaaaagaagtactcccttttcacacaactgtacaattttactgttaagtattccagaatgcttaagaagagcaaaataaactt

SEQ ID NO: 152549 - DNA, 120 bp, Artificial Sequence
  ENSG00000105855_104 (sequence is synthesized)
gaatttagacgttttattttctctttgatttgtggagtgaaaacgtagtgtagaagaaaacatatcttactatctcttactcctcaccaaggtgattcatttcggtatgtgtttgggaca

SEQ ID NO: 152550 - DNA, 120 bp, Artificial Sequence
  ENSG00000105855_105 (sequence is synthesized)
gaggggctaaattcagggagggatttaaataggaaaagacaaaagggaaagaataggttatgaacgcgaaaattctttccaaaagggctgcttttctcatgcgccacactccaaggagga

SEQ ID NO: 152551 - DNA, 84 bp, Artificial Sequence
  ENSG00000105855_106 (sequence is synthesized)
aaaagggctgcttttctcatgcgccacactccaaggaggaactagaagtagactgttgccctcctcacttcagcttgttctcct

SEQ ID NO: 152552 - DNA, 120 bp, Artificial Sequence
  ENSG00000105855_107 (sequence is synthesized)
attgttcttcctccagtggaacactagaaatctctagccaggaactagtgtggtcacatggctgtgggaaaatagaggatgtacaaataaaagttaaagctatttacgcagcagcgttgt

SEQ ID NO: 152553 - DNA, 120 bp, Artificial Sequence
  ENSG00000105855_108 (sequence is synthesized)
acccacgcacatcgttctagcctgacttactgttcgtcaactcaaacgtaatgtttacttgaggtaaaaaccacagtacacatctgtgttattgtacaaagtctaattacatgtttattt

SEQ ID NO: 152554 - DNA, 120 bp, Artificial Sequence
  ENSG00000105855_109 (sequence is synthesized)
actgtcatctgaaaaacaacgtctatgtcaaatcgacaaccatggtaatgcagcagtaaccgcttagtagatatgactcttttggttaaagtacaattttaaattggcaactcaactatt

SEQ ID NO: 152555 - DNA, 120 bp, Artificial Sequence
  ENSG00000105855_110 (sequence is synthesized)
tttgtaccaggaaattacctacaaaagaaagatacagaacaaggataagccatgagagagaatttatggaacagtgcaatctataaatactgatcaataaaatatatgaataaaacagtt

SEQ ID NO: 152556 - DNA, 120 bp, Artificial Sequence
  ENSG00000105855_111 (sequence is synthesized)
gtcttgggctggcacgaagagctgcccggccagagcatcccggccaggtgagtgtcagaagacaaattgaagtattcagctaaataagcaactgcaaaactgaatttattcctcttcaag

SEQ ID NO: 152557 - DNA, 120 bp, Artificial Sequence
  ENSG00000105855_112 (sequence is synthesized)
aactactcttcttgtatgttgagtgaccatttggctgccaagagaaactgctttgcctaggaaataatatggactgaaaaatcagtttcaaacacaaatgaaaaatattccttatgtttg

SEQ ID NO: 152558 - DNA, 120 bp, Artificial Sequence
  ENSG00000105855_113 (sequence is synthesized)
gtcatcttctttccacatcaaatatacatgtaaagatgtatataagatataatctgaagataatcaaacagctattaactggatttctgcatttcgcctatccttcaaaaccagcctcaa

SEQ ID NO: 152559 - DNA, 120 bp, Artificial Sequence
  ENSG00000105855_114 (sequence is synthesized)
gtctacctttatgttgagagagtgtatctttaactcatggtgttctctttctcctttcacatttcctgtaaactcatcatgaattgccttgtttattgttttgatttctcattcaacaac

SEQ ID NO: 152560 - DNA, 120 bp, Artificial Sequence
  ENSG00000105855_115 (sequence is synthesized)
tctgtgtttagggtaaccttagacttcagttttcctgaggagtttcagtttacacgtcttgcaccggtacaattaacagtgcccctttcaggttaaaaagtgtctcagtgtagttcataa

SEQ ID NO: 152561 - DNA, 120 bp, Artificial Sequence
  ENSG00000105855_116 (sequence is synthesized)
attatatagtcaccccatgtgtgcagcaatcagagctttttcaatgcaaagttgattatgatgggcataaatgaatcataataaaaagttctagtatgatcccatctgactgggcttctt

SEQ ID NO: 152562 - DNA, 120 bp, Artificial Sequence
  ENSG00000105855_117 (sequence is synthesized)
gtgatggcccatttcaacaccatgggtgtcattagtggcttcacaatggttcttcttgtaaattccctcatgacctagagttttgatttatgccatcctagcccactttaagctctgact

SEQ ID NO: 152563 - DNA, 120 bp, Artificial Sequence
  ENSG00000105855_118 (sequence is synthesized)
catgctgggattgccctaaacagggcagggcagactaatggaatgcattgcattgtcctaacatttcttaacctgcccaaggttgaacatgcttgtttgtttttcttttgctctccaaaa

SEQ ID NO: 152564 - DNA, 120 bp, Artificial Sequence
  ENSG00000105855_119 (sequence is synthesized)
atctttatgctagcgtaaaggcctgttgtaatcacataaattactcactatgtaacaggagaagttgaaatttgtccctgaaacataaagattatatataataaaagccttaaaaaccta

SEQ ID NO: 152565 - DNA, 120 bp, Artificial Sequence
  ENSG00000105856_0 (sequence is synthesized)
agacttggtaatggcgacgggtttggtaagtaggaaagtttcggttgaggagtaagagctgccgcgggagcagtaacccgcgcgggggaggccgacgtcggtcggagagggggtacgaga

SEQ ID NO: 152566 - DNA, 120 bp, Artificial Sequence
  ENSG00000105856_1 (sequence is synthesized)
gctgctggtggtgttgtcgtggccggagcggcccgcgcctgggctgccggcacttcgcggcagtcagagcaccataacatggtgtgggaagtgaagacaaatcagatgcctaatgcagta

SEQ ID NO: 152567 - DNA, 120 bp, Artificial Sequence
  ENSG00000105856_2 (sequence is synthesized)
cagaaactcctgttggtgatggacaagagagcctcaggaatgaatgactcattggagttgctgcagtgtaatgagaatttgccatcttcacctggatataactcctgtgatgaacacatg

SEQ ID NO: 152568 - DNA, 120 bp, Artificial Sequence
  ENSG00000105856_3 (sequence is synthesized)
gagcttgatgaccttcctgaacttcaggcagttcaaagtgatcctacccaatctggcatgtaccagctgagttcagatgtttcacatcaagaatacccaagatcatcttggaaccaaaat

SEQ ID NO: 152569 - DNA, 120 bp, Artificial Sequence
  ENSG00000105856_4 (sequence is synthesized)
acctcagacataccagaaactacttaccgtgaaaatgaggtggactggctaacagaattggcaaatatcgcgaccagtccacaaagtccactgatgcagtgctcattttacaatagatca

SEQ ID NO: 152570 - DNA, 120 bp, Artificial Sequence
  ENSG00000105856_5 (sequence is synthesized)
tctcctgtacacatcatagccactagcaaaagtttacattcctatgcacgccctccaccagtgtcctcttcttcgaagagtgaaccagccttccctcatcaccattggaaggaggaaaca

SEQ ID NO: 152571 - DNA, 120 bp, Artificial Sequence
  ENSG00000105856_6 (sequence is synthesized)
ccagtaagacacgaaagggcaaatagtgagtcagaatctggcattttctgcatgtcctccctgtcagatgatgatgatttgggatggtgcaattcctggccttcaactgtctggcactgt

SEQ ID NO: 152572 - DNA, 120 bp, Artificial Sequence
  ENSG00000105856_7 (sequence is synthesized)
tttttgaaaggcacacgactgtgctttcataagggaagcaataaggaatggcaagatgttgaagattttgctagagctgaaggctgtgataatgaggaagatcttcaaatgggcattcac

SEQ ID NO: 152573 - DNA, 120 bp, Artificial Sequence
  ENSG00000105856_8 (sequence is synthesized)
aagggctatggttctgatggtctaaagttgttatcacatgaagaaagtgtatcatttggcgagtctgtactgaagttgacttttgatcctggtacagtagaagatggtttacttaccgta

SEQ ID NO: 152574 - DNA, 120 bp, Artificial Sequence
  ENSG00000105856_9 (sequence is synthesized)
gagtgtaagctggaccaccctttctatgttaaaaataaaggttggtcatcattttatccaagcttgactgtggtacagcatggcattccatgttgtgaagttcatattggcgatgtatgt

SEQ ID NO: 152575 - DNA, 120 bp, Artificial Sequence
  ENSG00000105856_10 (sequence is synthesized)
ctacctcctggacaccccgatgccattaattttgatgattcaggtgtttttgatacatttaaaagctatgacttcacacctatggattcttctgcagtttatgtgttaagtagtatggct

SEQ ID NO: 152576 - DNA, 120 bp, Artificial Sequence
  ENSG00000105856_11 (sequence is synthesized)
ctgtggctcacctggatcatcacagctctcttccaattctttgtatgctaaagctgtcaaaaaccacagctcagggactgtgagtgccacttctcctaataagtgcaaaagaccaatgaa

SEQ ID NO: 152577 - DNA, 120 bp, Artificial Sequence
  ENSG00000105856_12 (sequence is synthesized)
tgccttcatgctttttgccaaaaaatacagagttgaatatactcagatgtatccagggaaagataacagagccataagtgtgatccttggtgacaggtggaagaaaatgaagaatgaaga

SEQ ID NO: 152578 - DNA, 120 bp, Artificial Sequence
  ENSG00000105856_13 (sequence is synthesized)
gagaagaatgtacacattagaagcaaaggctttggctgaagaacagaaacgtttaaatcctgactgttggaagaggaaaagaaccaattcaggctcacaacaacattaaaccaggatgct

SEQ ID NO: 152579 - DNA, 120 bp, Artificial Sequence
  ENSG00000105856_14 (sequence is synthesized)
tatgttcttaagtctatatttgcatatacattgactcttgatggaaagacttaagaagatcaaggtctcaccatttgtcctcaattcgtgtgaccataagatactgatagcattgagtct

SEQ ID NO: 152580 - DNA, 120 bp, Artificial Sequence
  ENSG00000105856_15 (sequence is synthesized)
tgaaatgatttaataatatgagtgaggatttgctttctccattagagcattaagctaaaactatcaacattttaaaccaaattgccttatttttcttccaaacttcatatatgtctatca

SEQ ID NO: 152581 - DNA, 120 bp, Artificial Sequence
  ENSG00000105856_16 (sequence is synthesized)
ggtaataataggcttgaaaattgatatcctgtggtgctaaagtacagtagaaagagaggagaagtgtatacatgttttattttaaattgtacgaaaggggaatttaaaaaatatgtaact

SEQ ID NO: 152582 - DNA, 120 bp, Artificial Sequence
  ENSG00000105856_17 (sequence is synthesized)
gctgtttatacattggctccttactgcttattaatctgtattgtacacatgatgaaatgaagcagaagctgggagtcggcctttcctctagtaaccaccacatggctcagcatctgtgcc

SEQ ID NO: 152583 - DNA, 120 bp, Artificial Sequence
  ENSG00000105856_18 (sequence is synthesized)
aaacataggcgctcctagtctggtcagtgccaagaggctaccagaacatggggcaggtggctggtgttggtgtcccagcctaagagccacctgctgcagttaccatggcatgctgagttg

SEQ ID NO: 152584 - DNA, 120 bp, Artificial Sequence
  ENSG00000105856_19 (sequence is synthesized)
atgcaccaggtggcagcagccatccgttattatttccaatggagacctagcccaggccaaggtaaagttagttaatagcattgggatatagtcactgtaatggtgctattaacaaacagt

SEQ ID NO: 152585 - DNA, 120 bp, Artificial Sequence
  ENSG00000105856_20 (sequence is synthesized)
caacaccattgtattttttaacttcgtgttctgtatctcctcagccatgtatcttaaatatattttgtcatcataatctttatggtgggggcagactttgcacttactgcagtgcaacac

SEQ ID NO: 152586 - DNA, 120 bp, Artificial Sequence
  ENSG00000105856_21 (sequence is synthesized)
ttgcactttaattttcctccaactgtctaaaattagagcaaatacattggcaatacagctgcttttgctctgagctacaatcatggcttttcatgttacttaccaagtggtgtttctggt

SEQ ID NO: 152587 - DNA, 120 bp, Artificial Sequence
  ENSG00000105856_22 (sequence is synthesized)
taggaatcacagctgtaaaattgatttcagttcatcacacttcttcatgatgttgcccctaaattttgcacactatattcttgtatattatttcaaataaatggaaaaaaaagttgctta

SEQ ID NO: 152588 - DNA, 120 bp, Artificial Sequence
  ENSG00000105856_23 (sequence is synthesized)
aacccccagggggttgaggggagggggaagacgaagcttgaaagacttggtaatggcgacgggtttgtcagagcaccataacatggtgtgggaagtgaagacaaatcagatgcctaatgc

SEQ ID NO: 152589 - DNA, 120 bp, Artificial Sequence
  ENSG00000105856_24 (sequence is synthesized)
aaaaacaagcccggagtccgggctgcggtcacatgatggggggaagggaggggaacgcgatgaatggcgaaagagggtgggggatggacttggcgtgaaccgggaggcaccgctctgtgt

SEQ ID NO: 152590 - DNA, 120 bp, Artificial Sequence
  ENSG00000105856_25 (sequence is synthesized)
gacccaaagaggaggcttggcaggcgattccagtctccgcctttcaacctatgctgccaccgcaggccgattgaaacaaaacaaaacaaaccaggcgaagtggacagccaggtttttgta

SEQ ID NO: 152591 - DNA, 120 bp, Artificial Sequence
  ENSG00000105856_26 (sequence is synthesized)
gctttaaatgctgcgtgctgtctagggtgtttcactctccgctgtgcactctacactcgagttcattcttagggagttttcagctacagtcgtttttagaaggagcactgacagcgagga

SEQ ID NO: 152592 - DNA, 120 bp, Artificial Sequence
  ENSG00000105856_27 (sequence is synthesized)
gttttgggatggtggttgataactaagacaaagtgctgaagaaatgatagaagttgcaaagagacgttagtgtactatacttggtgaatgttggaaactgcaggacctgctgtagggaag

SEQ ID NO: 152593 - DNA, 120 bp, Artificial Sequence
  ENSG00000105856_28 (sequence is synthesized)
aaaaaagttctagctggaaagaatgaggaaaccaaagagctctgcagagggagggggaagacaagacagactgcagctgtgcttctgtggaccccaagaacagcactgttcatacacaga

SEQ ID NO: 152594 - DNA, 120 bp, Artificial Sequence
  ENSG00000105856_29 (sequence is synthesized)
aaaattatcttgccttatccgtgcaggtgtactggcatgttggagcagttgttacaacctttaagaggttgtgttgatgctgtctctagcatttttatacttcaaaacctaataatgtta

SEQ ID NO: 152595 - DNA, 120 bp, Artificial Sequence
  ENSG00000105856_30 (sequence is synthesized)
tcacatcatcatataaagactgcctttcctcaagggtcatttactctcatagcatggcaagtcgaaatctcaggcaaacttcaaaagaatgtttgttctaaacattgagttggaaaaata

SEQ ID NO: 152596 - DNA, 120 bp, Artificial Sequence
  ENSG00000105856_31 (sequence is synthesized)
attttggaatgcagtgtttctagttgggttgaaagataagcattattaatccattaatatcacagtagaaaatttctctaataattttgggattgtctcaacagctttttttccttaatt

SEQ ID NO: 152597 - DNA, 120 bp, Artificial Sequence
  ENSG00000105856_32 (sequence is synthesized)
ggtgagggaccaataaggctggaggtgttggggtatgttagctgtcattcatggggacttgtgccattggcacagaatttctagattgaaaaatttcaaggaggagaagaaataggccca

SEQ ID NO: 152598 - DNA, 120 bp, Artificial Sequence
  ENSG00000105856_33 (sequence is synthesized)
ggaatggtggcaaacaagtctatatgataagctatcttggatagacttgtttcttataacttttccattactaaactagcatcttttaggttcagcgtttttagattaattgcaaaaaaa

SEQ ID NO: 152599 - DNA, 120 bp, Artificial Sequence
  ENSG00000105856_34 (sequence is synthesized)
ttacatgtgatatagtggggtcaatttgaagtatcattgaaagatgaagggaagatatcaatatttttatagtaggagggctggccaaagatgttttaaattcattgtgtacatgtgcct

SEQ ID NO: 152600 - DNA, 120 bp, Artificial Sequence
  ENSG00000105856_35 (sequence is synthesized)
gtttcttagtaaaatgcaggtcatatctgtttaaatttttcacaatttctttaaaaatagtggtcagtcagtagtcagatgagagggtggctgaactgaattttggcagttcttggttaa

SEQ ID NO: 152601 - DNA, 120 bp, Artificial Sequence
  ENSG00000105856_36 (sequence is synthesized)
tttagaatttcatgtgttcggacttttcctgtatcccttttctgttcatcctagtcaatgtcttatcattgcatacattttctggatgcttgagccatcagatatcagctagctttttaa

SEQ ID NO: 152602 - DNA, 120 bp, Artificial Sequence
  ENSG00000105856_37 (sequence is synthesized)
aatcacctttaagaaagcagtattttctaatagtaaatttataaacatcttatacatcttagctttcatatataggattactatgtattgatttgtaaacattcactgagtttaatttta

SEQ ID NO: 152603 - DNA, 120 bp, Artificial Sequence
  ENSG00000105856_38 (sequence is synthesized)
tgggtgacagagtgtgactatgtctcaaaaaaaaaacaaaacaacattgtcatgtctctgatttattttaggtttgtgtactgcccaaattgcatggcttgacatcatttcttaatgtcg

SEQ ID NO: 152604 - DNA, 120 bp, Artificial Sequence
  ENSG00000105856_39 (sequence is synthesized)
cattgtagactgatggaagtgctcattgtcattgtagacggatggaagtgctgattgatagaggagctctatatataataaaatgctgaacaataagctagttttggagggcttttacat

SEQ ID NO: 152605 - DNA, 120 bp, Artificial Sequence
  ENSG00000105856_40 (sequence is synthesized)
tgctgaaaggaaatacttatctagtactttattgtaaagatacatgacttgtgttagagaatctcttgagacttagcaataacattttatttttaagatatagaaatgatatgtctgttc

SEQ ID NO: 152606 - DNA, 120 bp, Artificial Sequence
  ENSG00000105856_41 (sequence is synthesized)
gataattctgattacaataaatgagtaacacttcaatacggttcatggtaactggaatagttaagtaaacttattctttaatagcttttattcaactcttaggttgacttttttgtttgt

SEQ ID NO: 152607 - DNA, 120 bp, Artificial Sequence
  ENSG00000105856_42 (sequence is synthesized)
caggcgtgagccactgtgcccggccaggttgactttaaagtaaaaagtttaagtggaatttttagggttatatgtaattattttataatacatagacaattaggttatctaccttagtag

SEQ ID NO: 152608 - DNA, 120 bp, Artificial Sequence
  ENSG00000105856_43 (sequence is synthesized)
taggttatctaccttagtagtaaggatctaccttttattatttgtgccatagcccaggctgcagtacagcggcgcaactcactgtagcctgtatctcccaggctcaatcctcccacctca

SEQ ID NO: 152609 - DNA, 120 bp, Artificial Sequence
  ENSG00000105856_44 (sequence is synthesized)
catctgcctgcctcccaaagtgcaagatctaccttttaaaatcatgttatttatctgttggaggacacggttctaacaattaacagttctatctttatggaacagcttttcacctgagtc

SEQ ID NO: 152610 - DNA, 120 bp, Artificial Sequence
  ENSG00000105856_45 (sequence is synthesized)
aactatggattgtacggggaactggcaatttgtagcaagctgccagagttgtcaaaacggtgaacttaagagctgtcctcagtagaagctggaaataaaaatcaactcaagtccttccta

SEQ ID NO: 152611 - DNA, 120 bp, Artificial Sequence
  ENSG00000105856_46 (sequence is synthesized)
taaaataaaattagatgaagtacatggaagtgctgtgtaggagttttgggatggtggttgataactaagacaaagtgctgaagaaatgatagaagttgcaaagagacgttagtgtactat

SEQ ID NO: 152612 - DNA, 120 bp, Artificial Sequence
  ENSG00000105865_0 (sequence is synthesized)
gcccgcccacccagcccatggctccaggcccacctggcgaactgactctcagcccgcgcctgggctaagcctggctaggagccgcgcaggtactcgagcagtgggcgcccagggtccgag

SEQ ID NO: 152613 - DNA, 120 bp, Artificial Sequence
  ENSG00000105865_1 (sequence is synthesized)
tgctctgcgcccagcgcaccgagggagccaaggccgtcgggccggcgctttcagctgtctctcgcagcagctcagggccgcgccccctgggctggcgtcgtgccctagccaaggagaagt

SEQ ID NO: 152614 - DNA, 120 bp, Artificial Sequence
  ENSG00000105865_2 (sequence is synthesized)
ttcagtcacgtgccagactttttcttaattacaaactgatagatggtccacatctcaactaacagtattgacgctgtaagagcatcagatttgaaacatatctgtattaatgaagagtga

SEQ ID NO: 152615 - DNA, 120 bp, Artificial Sequence
  ENSG00000105865_3 (sequence is synthesized)
ctgcatgcaaacgacaatatgtcaggaaagaaaaaaagatcccatagaaatgtttcattctggacagctggtaaaagtctgtgccccaatggttcgatattcaaagttggcttttaggac

SEQ ID NO: 152616 - DNA, 120 bp, Artificial Sequence
  ENSG00000105865_4 (sequence is synthesized)
actagtaagaaaatatagttgtgatctgtgttacacaccaatgattgttgccgctgattttgtcaaatctataaaagccagagacagcgaatttaccacaaatcaaggtgattgcccatt

SEQ ID NO: 152617 - DNA, 120 bp, Artificial Sequence
  ENSG00000105865_5 (sequence is synthesized)
gattgttcagtttgctgctaacgatgcaagacttttatctgatgctgctcgtatagtctgtccttatgcgaatggaatagacattaactgtggttgccctcagaggtgggcaatggcaga

SEQ ID NO: 152618 - DNA, 120 bp, Artificial Sequence
  ENSG00000105865_6 (sequence is synthesized)
aggttatggggcttgcttaataaacaagccagagcttgttcaagacatggtgaaacaagtaagaaatcaagtggaaacccctggattttcagtttctattaaaataaggatccatgatga

SEQ ID NO: 152619 - DNA, 120 bp, Artificial Sequence
  ENSG00000105865_7 (sequence is synthesized)
ccttaaaagaactgtagatctttgtcaaaaggctgaagcaacaggagtttcatggattacagtccatggaagaactgctgaagaaagacatcagccagtgcactatgattccattaaaat

SEQ ID NO: 152620 - DNA, 120 bp, Artificial Sequence
  ENSG00000105865_8 (sequence is synthesized)
aattaaggaaaatatgtctatacctgtaattgctaatggagacatcagaagcttaaaggaagcagaaaatgtgtggcggattactgggacagatggtgtgatggttgcaagaggactctt

SEQ ID NO: 152621 - DNA, 120 bp, Artificial Sequence
  ENSG00000105865_9 (sequence is synthesized)
caacatttaatgtacatgatggaaaagataacttcaaggcaggaaaaaagggtatttaatgctctgtcaagcacatcagcaatcatagattaccttacagaccattatggcatttgacta

SEQ ID NO: 152622 - DNA, 120 bp, Artificial Sequence
  ENSG00000105865_10 (sequence is synthesized)
gacttcccaaataattttaatatatacttttagacccacagtgaaaccacagaaggtcatattttgtaccttaaaccagtagctctcaaattttagtataaaaacaattcctgggagcgt

SEQ ID NO: 152623 - DNA, 120 bp, Artificial Sequence
  ENSG00000105865_11 (sequence is synthesized)
tttttaaaaatcagttgtagacaccaccctcagagattctgattaggtagatctggagtagacccagaaatacacagtttaaagaaaactcccagtggttcaaacatcctgatcatccta

SEQ ID NO: 152624 - DNA, 120 bp, Artificial Sequence
  ENSG00000105865_12 (sequence is synthesized)
ggcaaacattgacaaatactgctctgaatcctgttctatagatattggggggatgggtagagtgggaattttttcctaatcatgtttttaacattttaaaataaaatttaatactaagaa

SEQ ID NO: 152625 - DNA, 120 bp, Artificial Sequence
  ENSG00000105865_13 (sequence is synthesized)
attatggcttatagtatctataaattaacaagaagtatgcaggtgcaaaaaagtggtggaacaaataccaacatccatccaaaatgaaaaagaacaggaaattctgaatagaattgcact

SEQ ID NO: 152626 - DNA, 120 bp, Artificial Sequence
  ENSG00000105865_14 (sequence is synthesized)
cagaacttatattaaaaattccatttggttaatgacattaaatttggtacatttcaaaacttctaggtcctccaaagattgaaagcttaataatctcctacctaaaaagataaaattaat

SEQ ID NO: 152627 - DNA, 120 bp, Artificial Sequence
  ENSG00000105865_15 (sequence is synthesized)
tgcaatctaccatatcttaagtataggaaatttggtgtccaacctggagatgattatatatttgaaatatttcctagagaatagtaaccaggttttgtttttaactttaaaacctaatta

SEQ ID NO: 152628 - DNA, 120 bp, Artificial Sequence
  ENSG00000105865_16 (sequence is synthesized)
cttttgtgcctctcagccgttgattgtaactttaaagtcccatggttttggagtgttattaatagattttgttatcggtgggcatgcactgcaagaattaagtatctcagactgaaataa

SEQ ID NO: 152629 - DNA, 120 bp, Artificial Sequence
  ENSG00000105865_17 (sequence is synthesized)
aaccgttcataattaaagtattattttgttttgccaacatgaaaactgttataaggaaacaattatgtaaaactgtttaattcacgtttgggaatattgaatgaatccattttaacataa

SEQ ID NO: 152630 - DNA, 120 bp, Artificial Sequence
  ENSG00000105865_18 (sequence is synthesized)
atctgtgaagcaagtattaaacctcagaacaggggccgcgcggcgtaaggcaggagagcagagcggaggtttcagggagcttcgtttgccctccacactcacaagagtcacgcgttagtt

SEQ ID NO: 152631 - DNA, 120 bp, Artificial Sequence
  ENSG00000105865_19 (sequence is synthesized)
gctacacagctttatctgttccacgccttgattggcactcctggggtaataaaagcccgcaggaaatgcttgggaagaaaagttgctggggatgaacagtgaagagaattagggagagtc

SEQ ID NO: 152632 - DNA, 120 bp, Artificial Sequence
  ENSG00000105865_20 (sequence is synthesized)
ctgaagtcattgcaattacttcaaatatttaaacctgttttggttgaatgacttttaacttaatattctcacttgccaatgaaaaccatttctcctgagtactttttgatctgggaacat

SEQ ID NO: 152633 - DNA, 120 bp, Artificial Sequence
  ENSG00000105865_21 (sequence is synthesized)
gttttcctaatctcatattgatccacttagaaatgttgaatctatgaattttttatatctgcttctcttccagatcactagagaaatggatgcacttacatttcagtgctttcagaattt

SEQ ID NO: 152634 - DNA, 120 bp, Artificial Sequence
  ENSG00000105865_22 (sequence is synthesized)
ctctttgtacttttaacaaaagttaaagcctccctttaagtttcaccaaactttcaactttagctatgtagtatttaatgttaagaaacattactggtgccaagtgtagaaaataggaaa

SEQ ID NO: 152635 - DNA, 120 bp, Artificial Sequence
  ENSG00000105865_23 (sequence is synthesized)
tgtagaaaataggaaaaatatttgcactaaaatttcacaatgaaaagaaaataaaccaggaatcagtttttccgtgacaggttgaaaacatatttctttttttgagacagagtctcactc

SEQ ID NO: 152636 - DNA, 120 bp, Artificial Sequence
  ENSG00000105865_24 (sequence is synthesized)
gtggctgccaacgcggtccacagggtttgggctcccgaaacttcagggaagctggaggcatggggggggggggggtcgagttgaaatgaggaacacacagaaaccaagtgtccccaagac

SEQ ID NO: 152637 - DNA, 120 bp, Artificial Sequence
  ENSG00000105865_25 (sequence is synthesized)
tccagaaaagagggagccagtcccagagtaaataggttggctagaacagtacccaagccagggggccgggcggaggggagtggtcacgtccagactggaaaactttctgcaaagcaacgg

SEQ ID NO: 152638 - DNA, 120 bp, Artificial Sequence
  ENSG00000105865_26 (sequence is synthesized)
tagctttttttttttttaactatgtatgagtgtattttgtcaaatgccttttctgcatctatatgatcatgtgatttttattatttagcctgttaatatgatggattacattaattgatt

SEQ ID NO: 152639 - DNA, 120 bp, Artificial Sequence
  ENSG00000105865_27 (sequence is synthesized)
ttgactattgcaccttctgttttaaccggctttttctgacaacactccagcagggaatgatgtaggggagtggtgccacctcattgctatctgatagaaatccaagttctccacttggcc

SEQ ID NO: 152640 - DNA, 120 bp, Artificial Sequence
  ENSG00000105865_28 (sequence is synthesized)
tccttcgacatctggtgggtgaggagctcctcattactgcggggcagtgatgagagttccagttccccatagtgagggtagcctcatatgtgctgggcaataatgaaagtcctggctctc

SEQ ID NO: 152641 - DNA, 120 bp, Artificial Sequence
  ENSG00000105865_29 (sequence is synthesized)
cactatgcctcctctgacaccacaccaagcagggagggagaagagtgcttcattactgctggcaggcatggaagtccaggctccccttgtggcctccactgataccactgggctgggagt

SEQ ID NO: 152642 - DNA, 120 bp, Artificial Sequence
  ENSG00000105865_30 (sequence is synthesized)
gacctcagtggccaccagagatgaaagtttcagatccttacctggccttggtatcaatagaatgttggagcaccttgttacagcctttggagggtagaagtctaggattcccacttggcc

SEQ ID NO: 152643 - DNA, 120 bp, Artificial Sequence
  ENSG00000105865_31 (sequence is synthesized)
tttgctaatggagataaagccatagctttttctacagtatttggctggagtagaactgtctaaaagttttctgtcttactaggtcagacagaacattttcctggtcctttggttagagaa

SEQ ID NO: 152644 - DNA, 120 bp, Artificial Sequence
  ENSG00000105865_32 (sequence is synthesized)
ggcttttgttggggctggttttgtctgcatccattgttgtttccaggtggccagcttcttcaagtctaggatatttgagacaaaaataaaacccagagaactcaccaccctgtcattcct

SEQ ID NO: 152645 - DNA, 120 bp, Artificial Sequence
  ENSG00000105865_33 (sequence is synthesized)
caggtcctgaggtcactagcctatctggacatcttttcttcacctttcaaaattttcttgtgtttgttttatatataatatccaaggtttttagtaatacttaacaggaataatagggaa

SEQ ID NO: 152646 - DNA, 120 bp, Artificial Sequence
  ENSG00000105865_34 (sequence is synthesized)
ggtaagaaataagtacttgggttcttttaattggggggggaagaaatgagagtggggaagtaatgttaatttgattttcatttgttttgtttaacattaagccatattttcccattgtac

SEQ ID NO: 152647 - DNA, 120 bp, Artificial Sequence
  ENSG00000105865_35 (sequence is synthesized)
tgttttaagctaagcgatttattaaaatgatgttaagttttctacctagaaaaacatggattatcttaactgggataaattaattcagttacttttctgacaccatcatatctagtgacc

SEQ ID NO: 152648 - DNA, 120 bp, Artificial Sequence
  ENSG00000105865_36 (sequence is synthesized)
agtgaagaattttccagatagcctactagtaaaataaagcacctagaaataagagtaagtgaactcgagaatgataagagctaaaggaatcccagaactgctatgcagtttcattattcc

SEQ ID NO: 152649 - DNA, 120 bp, Artificial Sequence
  ENSG00000105865_37 (sequence is synthesized)
cttaaattattggcatgccaagccctataattgctagatgggagaatatagataaactgaactttaagcagcccaatttatgacaatccagatttaccctaaagaaaaactaaagactaa

SEQ ID NO: 152650 - DNA, 120 bp, Artificial Sequence
  ENSG00000105865_38 (sequence is synthesized)
tggtttaatgtagaaatctttaaaaaataaagatttctgtacgtacatttaaactttcctggtttacaaaaggtaccaaaattaattcttttgtaatcggattaaacatattaatgcaat

SEQ ID NO: 152651 - DNA, 120 bp, Artificial Sequence
  ENSG00000105866_0 (sequence is synthesized)
acagcccagcggcggccattcgcggaaaaagaggcagagcctgtgccagctacagcctcctccgagccaccgcgggcgggcgggaccggcctctcctcccgcctcgcccccacccccacc

SEQ ID NO: 152652 - DNA, 120 bp, Artificial Sequence
  ENSG00000105866_1 (sequence is synthesized)
cacctctatcccagtgtctccgtctgagggtttgtcctgttaatgcgggatgagcgatcagaagaaggaggaggaggaggaggcggcagcggcagcggcgatggctacagaaggagggaa

SEQ ID NO: 152653 - DNA, 120 bp, Artificial Sequence
  ENSG00000105866_2 (sequence is synthesized)
aacctctgagccagagaataacaataaaaaacccaaaacctcaggctcccaggactctcagccctctcctctggctttactggcagctacttgcagcaaaatagggactcctggtgaaaa

SEQ ID NO: 152654 - DNA, 120 bp, Artificial Sequence
  ENSG00000105866_3 (sequence is synthesized)
tcaagcaactggacaacaacaaattattatagatccaagtcaaggattggtgcaacttcaaaatcaaccacaacagctagaactggtaacaacgcaacttgctggaaacgcttggcaact

SEQ ID NO: 152655 - DNA, 120 bp, Artificial Sequence
  ENSG00000105866_4 (sequence is synthesized)
tgttgcctccactcctcctgcttcaaaagagaataacgtttctcaaccagcctctagttcgtctagttcttccagcagtaataacgggagtgcatctcctacaaaaactaaatcaggtaa

SEQ ID NO: 152656 - DNA, 120 bp, Artificial Sequence
  ENSG00000105866_5 (sequence is synthesized)
ttcttccacccctggtcaatttcaagtcatacaagtacaaaatccaagtggtagtgtacagtaccaagtaattccacaacttcagacagtggaaggtcaacaaattcaaatcaatccaac

SEQ ID NO: 152657 - DNA, 120 bp, Artificial Sequence
  ENSG00000105866_6 (sequence is synthesized)
tagtagttcatctctacaggatttgcagggtcaaattcagctcatttctgcaggtaataatcaagctatactcacagctgctaacaggacagcttctgggaatattcttgctcaaaacct

SEQ ID NO: 152658 - DNA, 120 bp, Artificial Sequence
  ENSG00000105866_7 (sequence is synthesized)
ggcaaatcagacagttccggtccaaattagacctggtgtttcaataccactgcagttacagactcttcctggtactcaggctcaagttgtaacaaccctaccaattaacattggaggagt

SEQ ID NO: 152659 - DNA, 120 bp, Artificial Sequence
  ENSG00000105866_8 (sequence is synthesized)
gactctagctttgccagtgataaacaacgtggctgccggaggagggactgggcaggttggccagcctgctgctactgctgatagtgggacttccaatgggaatcaattagtttccacacc

SEQ ID NO: 152660 - DNA, 120 bp, Artificial Sequence
  ENSG00000105866_9 (sequence is synthesized)
caccaacaccactacttctgccagtactatgccagaatctccctcctcctccactacctgcacaaccactgcttcaacgtctttgacaagcagtgacacattagtgagctcagcagatac

SEQ ID NO: 152661 - DNA, 120 bp, Artificial Sequence
  ENSG00000105866_10 (sequence is synthesized)
tggccagtatgcaagcacatcagccagtagttctgaacgcaccattgaagaatctcaaacacctgctgctactgagtctgaagcccagagctccagtcagcttcagcctaatggaatgca

SEQ ID NO: 152662 - DNA, 120 bp, Artificial Sequence
  ENSG00000105866_11 (sequence is synthesized)
gaatgcacaggatcaatcaaattctcttcagcaggtgcaaattgtaggccaacctatcttacagcagatccagatccaacagcctcagcaacagatcattcaggctattccaccacagtc

SEQ ID NO: 152663 - DNA, 120 bp, Artificial Sequence
  ENSG00000105866_12 (sequence is synthesized)
gtttcaactccagtcagggcagacgattcagaccatccagcagcagcctttacagaatgttcaacttcaagcagtaaatccgactcaggtgcttatcagggctccaactttaacaccttc

SEQ ID NO: 152664 - DNA, 120 bp, Artificial Sequence
  ENSG00000105866_13 (sequence is synthesized)
agggcaaatcagttggcaaactgtacaggttcagaatattcagagtctttcaaatttgcaagttcagaatgctgggttatcccaacaattaaccatcaccccagtgtcttcaagtggtgg

SEQ ID NO: 152665 - DNA, 120 bp, Artificial Sequence
  ENSG00000105866_14 (sequence is synthesized)
cacaactcttgctcagattgctcctgtggctgttgctggtgccccaataactttgaatactgcccagcttgcatcagtgcctaaccttcagacagtgagcgttgccaacctgggtgctgc

SEQ ID NO: 152666 - DNA, 120 bp, Artificial Sequence
  ENSG00000105866_15 (sequence is synthesized)
aggtgttcaagtgcagggagttcccgttacaatcactagtgttgcaggtcagcagcaaggacaagatggagtaaaagtccagcaagctactatagctcctgtaactgtagcagttggagg

SEQ ID NO: 152667 - DNA, 120 bp, Artificial Sequence
  ENSG00000105866_16 (sequence is synthesized)
aattgctaatgccacgataggtgctgttagtcctgaccaactcacacaagtgcatttgcagcaaggccagcagacttctgatcaagaggtacaacctggcaagaggcttcgaagagttgc

SEQ ID NO: 152668 - DNA, 120 bp, Artificial Sequence
  ENSG00000105866_17 (sequence is synthesized)
ctgttcctgtcctaattgtagggaaggagaaggaagaggcagtaatgaaccaggaaaaaagaagcagcatatctgtcatattgaaggatgtggtaaagtttatggcaaaacatctcattt

SEQ ID NO: 152669 - DNA, 120 bp, Artificial Sequence
  ENSG00000105866_18 (sequence is synthesized)
acgagcacatcttcgctggcatactggagaaagaccttttatatgcaactggatgttttgtggcaaaagattcacacggagtgatgagctccagagacatagaagaacccatacaggtga

SEQ ID NO: 152670 - DNA, 120 bp, Artificial Sequence
  ENSG00000105866_19 (sequence is synthesized)
aaagagatttgaatgcccggaatgttctaaaaggtttatgcggagtgatcatctctccaaacatgtcaaaacgcaccagaataaaaaaggtggtgggacagctcttgccattgttacctc

SEQ ID NO: 152671 - DNA, 120 bp, Artificial Sequence
  ENSG00000105866_20 (sequence is synthesized)
gggagaactggactcatctgttacagaggtgcttggctccccaagaattgtcacagttgcagccatttctcaagattcgaatccagcaactcccaatgtttcaaccaacatggaagaatt

SEQ ID NO: 152672 - DNA, 120 bp, Artificial Sequence
  ENSG00000105866_21 (sequence is synthesized)
ctgaaaagttatttataacagagacctctagtgctgcacttgtttacacacctttgaaaatctggaaatgggctggtcaagtggattacagagtaggaaattatgttttcattcttggct

SEQ ID NO: 152673 - DNA, 120 bp, Artificial Sequence
  ENSG00000105866_22 (sequence is synthesized)
tctttaagtattccagggtttggggtcaacacgtgaagtgttgaattttaaaaaatacaaaaagcagactgatgtactggaaacagaaaagtatttcctccatactataagttgtagttg

SEQ ID NO: 152674 - DNA, 120 bp, Artificial Sequence
  ENSG00000105866_23 (sequence is synthesized)
tttggaaatatatcacataacctttatacagaatcttcccatctcttaatatcatgtgttaacatgtttaaaaagaccttagtagtttgcaggctggaccttaattggacttattttctt

SEQ ID NO: 152675 - DNA, 120 bp, Artificial Sequence
  ENSG00000105866_24 (sequence is synthesized)
tgaaagtactttgttataaattcagtcagtaataatttacgtgtattctttttctctatagcacagaaaacagatagttaactgatgatagggataatactgtatttccttagcttgatt

SEQ ID NO: 152676 - DNA, 120 bp, Artificial Sequence
  ENSG00000105866_25 (sequence is synthesized)
tccaaaacagtaatctgagatgcatctcagatctttattaccactacattatagtagtgtgtatgcagacaatcagtgaagtccaattactttctccatttggagacacaagaggaacat

SEQ ID NO: 152677 - DNA, 120 bp, Artificial Sequence
  ENSG00000105866_26 (sequence is synthesized)
agagttaaatcttaggttaaattttaggttgacaccttaggaaaatgctgggaaaaaaatggttaaaacaaaactcatcatagcttcagaaaaataaaatgaggcatcttaacatgcaat

SEQ ID NO: 152678 - DNA, 120 bp, Artificial Sequence
  ENSG00000105866_27 (sequence is synthesized)
gttctaaagttaggattgattatattcctaaccctaggttgaaccacaaaatttcatttaaaatgtttatatttggaaatatttgcatagagtgtaaattgttctgtagtttcatatttt

SEQ ID NO: 152679 - DNA, 120 bp, Artificial Sequence
  ENSG00000105866_28 (sequence is synthesized)
gtaaatatgagttatgttgacaatgtgcagaattctttatgctttgatgtggtagccaaagaaagaattacacttttttccaaggccagcagaaaattctcttttaactacattgtaatt

SEQ ID NO: 152680 - DNA, 120 bp, Artificial Sequence
  ENSG00000105866_29 (sequence is synthesized)
cttgttttcctctactaaaaattggccagtcccattttatttctagtgctatgtaagaaggtaattaggaattataacacagtaatgtttttatgttacatcaataactgaattttccct

SEQ ID NO: 152681 - DNA, 120 bp, Artificial Sequence
  ENSG00000105866_30 (sequence is synthesized)
aaaaattagcctaatatataatagatatattatgaagcaaaacttttatttttgaaaaggcagaataattttcagtgaagtaagtgactaaagaaaaaaactatattattgtttatgcaa

SEQ ID NO: 152682 - DNA, 63 bp, Artificial Sequence
  ENSG00000105866_31 (sequence is synthesized)
taagtgactaaagaaaaaaactatattattgtttatgcaagggtcttacaggaaagggatggc

SEQ ID NO: 152683 - DNA, 78 bp, Artificial Sequence
  ENSG00000105866_32 (sequence is synthesized)
gaaagggtcttactaggaaagatggccaaaagtttcatatgaaaaaaattggattataaaccagtaacttaaatatta

SEQ ID NO: 152684 - DNA, 120 bp, Artificial Sequence
  ENSG00000105866_33 (sequence is synthesized)
agtttcatatgaaaaaaattggattataaaccagtaacttaaatattaataaggatattttatgttttaaaaaagtatttacacagaatcataatcagtgaaattgaccatttgaaaact

SEQ ID NO: 152685 - DNA, 120 bp, Artificial Sequence
  ENSG00000105866_34 (sequence is synthesized)
ttacctacctgctcaatttattaacatcattgctttggggactgtttgaatataggtacgtgttttcttgtgcattctctataatttcaggaaaagtactaatgcgaattctcttccaaa

SEQ ID NO: 152686 - DNA, 120 bp, Artificial Sequence
  ENSG00000105866_35 (sequence is synthesized)
attgtgatgtttcttgtatttttgatgaaggagaaatactgtaatgatcactgtttacactatgtacactttaggccagccctttgtagcgttatataaaactgaaggtcttttgtgctt

SEQ ID NO: 152687 - DNA, 120 bp, Artificial Sequence
  ENSG00000105866_36 (sequence is synthesized)
tcagtttgtataaaaaagctttgagattaaaggaaaaaaaaaatttttacactgtggttataaatttcaagtttcttaaagcttttgtagacttgtaacagagtctttaaatttaagttg

SEQ ID NO: 152688 - DNA, 120 bp, Artificial Sequence
  ENSG00000105866_37 (sequence is synthesized)
gattttgtaaattgttttgtatattttatttaatgtactcttaacaactgatgtatctggctttaaaacatcagaattggtttgttgttttgtttggtacagaggagcatttggtagtgt

SEQ ID NO: 152689 - DNA, 120 bp, Artificial Sequence
  ENSG00000105866_38 (sequence is synthesized)
gtgttcattttaattttattatataggagctgaaacatcaaatatatattttatctatcattatgctacacaatcagtgctataaatttttttatgcaaagaaactttcttaatgtttta

SEQ ID NO: 152690 - DNA, 120 bp, Artificial Sequence
  ENSG00000105866_39 (sequence is synthesized)
tgtttcctcagagtgacactttttgttgttgttaataccaagtatgaacactctgcatcattattccatgaaccagttctaatgcaaacctatgtatgtccattagaaatggaagttatt

SEQ ID NO: 152691 - DNA, 120 bp, Artificial Sequence
  ENSG00000105866_40 (sequence is synthesized)
ttttaatcaacaatgaggcctattataaatttatcagatgaatctagatagctttatagcatataaaatatgttaatttgtgttagcaggtgcacatttcaccactgaaattagaaatat

SEQ ID NO: 152692 - DNA, 120 bp, Artificial Sequence
  ENSG00000105866_41 (sequence is synthesized)
tttgacagtctgttctgcataccattctgagtctacttttctgtctttagaagaatcgtaaatttcagtgtcctttatttgactcagtgggatatagctgttataagtaatagggcacag

SEQ ID NO: 152693 - DNA, 120 bp, Artificial Sequence
  ENSG00000105866_42 (sequence is synthesized)
atgtgcagtagagtcttgtttaatggcatttcactgttcattccctttaccaccgttataaaacttttctttattgtaattatcagtgcaaagctatgtatttatcatggtaaaactcca

SEQ ID NO: 152694 - DNA, 120 bp, Artificial Sequence
  ENSG00000105866_43 (sequence is synthesized)
gtgttagaatagttttttcttacagtatactttctttggttaggtttgtgtatgtgttgctgattacattagaacttgatgttaagtcatttatcacactctcatgagagcagtaataaa

SEQ ID NO: 152695 - DNA, 120 bp, Artificial Sequence
  ENSG00000105866_44 (sequence is synthesized)
agtgtgtaatctaggagaaaaagttaatttgtcaaacttagataagcatgatgtttaggtcctatttttcaattttataactgttttattgcaacaatatttgtatttaagtctccattt

SEQ ID NO: 152696 - DNA, 120 bp, Artificial Sequence
  ENSG00000105866_45 (sequence is synthesized)
taatgccttgtggtgtttttttatgcatgtcactaagttgtcatcccacataaattgatgtgcagcatagggtattaaatctacataatgattttaaaacagaaatagttgatggtaaaa

SEQ ID NO: 152697 - DNA, 120 bp, Artificial Sequence
  ENSG00000105866_46 (sequence is synthesized)
aaacagaaatagttgatggtaaaatgtaaatgttttgcaaaaattccttataaaaagttttgtagtaacatttcacttgtaaattttttttgtaaaaaaaaaaaaatgaaaaaaaaagat

SEQ ID NO: 152698 - DNA, 120 bp, Artificial Sequence
  ENSG00000105866_47 (sequence is synthesized)
catattctagaatttagacaattattctgccagcaaagcctctggggctgtaattgacatttttacagtgctgatttgtataaaatttgttttttgtggatttggaaataaaatcatgta

SEQ ID NO: 152699 - DNA, 120 bp, Artificial Sequence
  ENSG00000105866_48 (sequence is synthesized)
caagttgttgcctgcaataacaattgcaagtaacctattaaaaattcccttgagtttaacatgtttcatttaattatgtatactataaagcagcaataaattatttgaactatcaaccta

SEQ ID NO: 152700 - DNA, 120 bp, Artificial Sequence
  ENSG00000105866_49 (sequence is synthesized)
tcaggctcccaggtaaaagcaaacaaattaaaaaaattcatcacgacacattaggagagagagggagttatgccctttgaatgtccagaagtaacagaataaaatgtttatccactcaaa

SEQ ID NO: 152701 - DNA, 120 bp, Artificial Sequence
  ENSG00000105875_0 (sequence is synthesized)
acccctaaagacgctagcgctgcgatggcggaggccgtggagcgcactgacgagctggtccgggagtacctgctcttccgcgggttcacgcacacactgcggcagctggacgccgagatc

SEQ ID NO: 152702 - DNA, 120 bp, Artificial Sequence
  ENSG00000105875_1 (sequence is synthesized)
aaggcggacaaggagaaggggttccgggtggataagattgtggaccagctgcagcagttaatgcaggtgtatgacttggctgcccttcgggattattggagctacttggagcgtcggctc

SEQ ID NO: 152703 - DNA, 120 bp, Artificial Sequence
  ENSG00000105875_2 (sequence is synthesized)
ttcagccgcttggaggatatatacagacccacaatccacaagctgaaaaccagcctgtttcgattttatcttgtctacacaatccagacaaacagaaatgacaaggctcaggagttcttt

SEQ ID NO: 152704 - DNA, 120 bp, Artificial Sequence
  ENSG00000105875_3 (sequence is synthesized)
gcaaagcaggccacggaactccagaaccaggctgagtggaaggattggtttgtcctgcccttcctgccatccccggacaccaaccccacctttgctacctacttttctcgacagtgggct

SEQ ID NO: 152705 - DNA, 120 bp, Artificial Sequence
  ENSG00000105875_4 (sequence is synthesized)
gacaccttcattgtgtccctgcacaacttcctgagcgtcctgtttcagtgcatgccagtccctgtgatcctgaactttgatgcggagtgtcagaggactaaccaggttcaagaagaaaat

SEQ ID NO: 152706 - DNA, 120 bp, Artificial Sequence
  ENSG00000105875_5 (sequence is synthesized)
gaagttctgcgtcagaagctttttgcattgcaagctgaaatccaccgactgaagaaagaggagcaacagccagaagaggaagaggccttggtccaacacaaattgcctccttatgtctcc

SEQ ID NO: 152707 - DNA, 120 bp, Artificial Sequence
  ENSG00000105875_6 (sequence is synthesized)
aacatggaccgcctgggggactcggaacttgccatggtgtgcagccaaaggaatgcctccctctcccagtcacctcgtgtgggcttcctgtcctcgctgctgcctcagagtaagaagagc

SEQ ID NO: 152708 - DNA, 120 bp, Artificial Sequence
  ENSG00000105875_7 (sequence is synthesized)
ccctcaaggttgtcgcctgctcagggccctcctcaacctcagagctcggccaagaaagagtccttcggtggtcagggcaccaagggaaaggacccgacgtccggagccaaggatgggaag

SEQ ID NO: 152709 - DNA, 120 bp, Artificial Sequence
  ENSG00000105875_8 (sequence is synthesized)
agcctcctcagcgggctggccactggggagtccggttggtcacagcaccggcagcggcgcctgcaggaccatggcaaggagaggaaggagcttttctccacaaccacttcccagtgtgca

SEQ ID NO: 152710 - DNA, 120 bp, Artificial Sequence
  ENSG00000105875_9 (sequence is synthesized)
gagaagaaaccagaagccagtggcccagaggctgagccctgcccagagctccacacggagccagtggagccactgactcgggcatcctcggcaggccctgagggtggaggagtccgcccc

SEQ ID NO: 152711 - DNA, 120 bp, Artificial Sequence
  ENSG00000105875_10 (sequence is synthesized)
gagcagccctttattgtgctgggacaggaggagtacggggaacaccactcatccatcatgcactgcagagtggactgctctgggaggagagtcgccagcttagacgtagatggggtcatc

SEQ ID NO: 152712 - DNA, 120 bp, Artificial Sequence
  ENSG00000105875_11 (sequence is synthesized)
aaagtgtggtccttcaaccccatcatgcagaccaaagcatcctccatttccaaatcaccgctgctgtctttggaatgggccaccaaacgggacagactgctcttgctgggcagtggtgtg

SEQ ID NO: 152713 - DNA, 120 bp, Artificial Sequence
  ENSG00000105875_12 (sequence is synthesized)
ggaacagtgcgtctctatgacacggaagccaagaagaatctctgtgaaatcaatatcaacgacaacatgcccagaatcctgtctcttgcgtgcagccccaacggggcctctttcgtctgt

SEQ ID NO: 152714 - DNA, 120 bp, Artificial Sequence
  ENSG00000105875_13 (sequence is synthesized)
tcggcagcagctccgagcctcacttcccaggtggacttctcagcaccagacatcggcagcaagggcatgaaccaggttcctggcaggctgctgctgtgggacacgaaaaccatgaagcag

SEQ ID NO: 152715 - DNA, 120 bp, Artificial Sequence
  ENSG00000105875_14 (sequence is synthesized)
cagctccagttctccctggatccagaacccattgctatcaactgtacagccttcaatcacaacgggaacctgctggtcacaggggcagctgatggcgtcatccggctgtttgacatgcag

SEQ ID NO: 152716 - DNA, 120 bp, Artificial Sequence
  ENSG00000105875_15 (sequence is synthesized)
cagcatgagtgcgcgatgagctggagggcccactacggggaggtctactctgtggagttcagctatgatgagaacaccgtgtacagcatcggcgaggacgggaagttcatccagtggaac

SEQ ID NO: 152717 - DNA, 120 bp, Artificial Sequence
  ENSG00000105875_16 (sequence is synthesized)
atccacaagagtggcctcaaggtatccgagtacagcctcccctcagatgccacgggcccctttgtgctgtctggatacagcggctacaagcaggttcaagtccccaggggccgactcttc

SEQ ID NO: 152718 - DNA, 120 bp, Artificial Sequence
  ENSG00000105875_17 (sequence is synthesized)
gcttttgactcggagggaaattacatgctgacatgttctgccacaggcggcgtcatctacaagctgggtggcgatgagaaggttctggagagctgcttgagcctaggtggccaccgagcc

SEQ ID NO: 152719 - DNA, 120 bp, Artificial Sequence
  ENSG00000105875_18 (sequence is synthesized)
cctgtggtcaccgtggactggagcactgccatggactgtgggacctgcctcaccgcctccatggatggcaagatcaagctgaccaccctcctggcccataaagcctgatgacttgcccca

SEQ ID NO: 152720 - DNA, 120 bp, Artificial Sequence
  ENSG00000105875_19 (sequence is synthesized)
tattatctgcggtggggggaggagatataggacaggaaaaccacgtgctccactccagctccctgccagtgcagtgactctgcagggaaagactggcaaggaggctcaggtgcttccatc

SEQ ID NO: 152721 - DNA, 120 bp, Artificial Sequence
  ENSG00000105875_20 (sequence is synthesized)
tgtggtgactggaatgggacccacgtggagtaggtgacatatgcttcccagagactggtattgtggctgtgccaggagtacatgtgagactatgggaggaaagctccggaagaaggagaa

SEQ ID NO: 152722 - DNA, 120 bp, Artificial Sequence
  ENSG00000105875_21 (sequence is synthesized)
acattgcagtggctactgtgttggcccagtagaaattgacagtattttgtatatatgtgcccatttatctttttcttttttaaaaaaagagaatactcttgtggtcccctgatgtctctt

SEQ ID NO: 152723 - DNA, 120 bp, Artificial Sequence
  ENSG00000105875_22 (sequence is synthesized)
tctaggatgtgtgtcactttgcttcagtgacagccctcccacccagcctggctctgctggccctgaactgaacctctccaggctctcctgttgctttgccatggagccaggtcagctctc

SEQ ID NO: 152724 - DNA, 120 bp, Artificial Sequence
  ENSG00000105875_23 (sequence is synthesized)
tgtctgttctgctgggtaacaaggtttggcagttcctgtttctctgggcttaagtcaaggccacagaattctttttcttccctgaaagctggcagcttttgttacagaagattctcagga

SEQ ID NO: 152725 - DNA, 120 bp, Artificial Sequence
  ENSG00000105875_24 (sequence is synthesized)
tgaaggcaggggctgaggcctctgctactggctgcccctttccatccagtggctgctgtttcccaagacaggctaagcgtttcttatctgaaatgcttgggacaggagtgttacagattt

SEQ ID NO: 152726 - DNA, 120 bp, Artificial Sequence
  ENSG00000105875_25 (sequence is synthesized)
tggattttttcagactttggaatatttgcatatatacataatgaggtatcttggtaggtctcatgtctaaacatgaaattcattcatgttttatatataccttatacatgtagcctgaag

SEQ ID NO: 152727 - DNA, 120 bp, Artificial Sequence
  ENSG00000105875_26 (sequence is synthesized)
gtaactctatacagtattttaaataattttgtacatgaaacaaagtattgattgtggtcaggtgtggtattttccacttgtggtgtcatgttggtgctcacagttttggggctgggcacg

SEQ ID NO: 152728 - DNA, 120 bp, Artificial Sequence
  ENSG00000105875_27 (sequence is synthesized)
acccaactcaaaaaaaaaaaaagttttgggttatggagcatttttgattttggatctttgggttaaggacgctcaacctgtacctttttcatttggtggctcctctcattcctccaactg

SEQ ID NO: 152729 - DNA, 120 bp, Artificial Sequence
  ENSG00000105875_28 (sequence is synthesized)
aacatctttgtggaaagatgatggctgcctgcacccactgctggcgaatggtgagaaggtagagcaagggggccaagttgctgctggtgggcacctggggttcaggccggcccaactgtg

SEQ ID NO: 152730 - DNA, 120 bp, Artificial Sequence
  ENSG00000105875_29 (sequence is synthesized)
gctgagccgatctgtagctgagctgagtgtcaaccagctgtgtccacaccctgcctgaggcctgccctctcctccctggctggggtgggaccttgaagaggcatatcttcccactaggtg

SEQ ID NO: 152731 - DNA, 120 bp, Artificial Sequence
  ENSG00000105875_30 (sequence is synthesized)
aggaggaacaagagcctcactccccttctccctcttgcctttcacagctgaggcagagcttatgggaggagtcactatgggagtgatggacctgggctttggtctccagtgtttggcagg

SEQ ID NO: 152732 - DNA, 120 bp, Artificial Sequence
  ENSG00000105875_31 (sequence is synthesized)
ggcgaccttatcactgagctggggaaggcagctgccatgagtcattttaagtctctgagctccagcccagttctaggggcacaaggctggagtagggatactcctagttacctgcttgag

SEQ ID NO: 152733 - DNA, 120 bp, Artificial Sequence
  ENSG00000105875_32 (sequence is synthesized)
gaaaagcacgaagaaattggtaccaaagtcttggctttgttctgggagttgagggaaaagtagggaggtatttaagtggcttgattatgagaaaacaccagagacagtagtaaatagtta

SEQ ID NO: 152734 - DNA, 120 bp, Artificial Sequence
  ENSG00000105875_33 (sequence is synthesized)
tttaccgatttttacccatttctaccctggtaatcctccctgcaaatgaagaaaaccaagacttctttatttattatctttccccatctgtattgaaacagtgatcttacttatctcacc

SEQ ID NO: 152735 - DNA, 120 bp, Artificial Sequence
  ENSG00000105875_34 (sequence is synthesized)
cagtgattctgtaggacatttaaaaagtggtcatgggtttcattggagtgagaatggtattaacgtttcctcttgtcatctcaaagttttctctccccttaataccatctctacagcttg

SEQ ID NO: 152736 - DNA, 120 bp, Artificial Sequence
  ENSG00000105875_35 (sequence is synthesized)
ctgagatgctttaaggatcacagagacacaaagaaaatttgaaccctacgcttctcccatcccacttcttactccatcccgggtgagcgctcgtcctcaaataaagcatgttggaacttc

SEQ ID NO: 152737 - DNA, 120 bp, Artificial Sequence
  ENSG00000105875_36 (sequence is synthesized)
aggtatggggttgtcctgaacacccctggggacactcatgcagctactgaggaacactgtggggggtcttctcttctctctcttctgagttctgcagctgtgcagagtgtgcttttgctt

SEQ ID NO: 152738 - DNA, 120 bp, Artificial Sequence
  ENSG00000105875_37 (sequence is synthesized)
aattggtttcaatggcttgtattttggttatttgggttcatcatttgcctggcttttctgtggtccatttctcccatgcagcatttccctaagtaggggccagaaaatgcaggcctctag

SEQ ID NO: 152739 - DNA, 120 bp, Artificial Sequence
  ENSG00000105875_38 (sequence is synthesized)
aagtgctctcagaagatgacttctgtgattaagctggcttgggaacctttgcatactcatccttcccttaggttaattgtgctaagcagcctgtggtgggctcctggagacctggttccc

SEQ ID NO: 152740 - DNA, 120 bp, Artificial Sequence
  ENSG00000105875_39 (sequence is synthesized)
tcggtttcacccagtcacccagacttgcttggtcacaggattcctttctcctgtgctgcctgaggcccagctgcctgtattgctgcactgagggccatgtgcccacacagtgggaggctg

SEQ ID NO: 152741 - DNA, 120 bp, Artificial Sequence
  ENSG00000105875_40 (sequence is synthesized)
tggcccaggcccttctgtactgagccctgggctctggggactcccctcactggccagtgtgggccacagcctgctctttgtggcattacagctgcttctgtttctgccagatactcccga

SEQ ID NO: 152742 - DNA, 120 bp, Artificial Sequence
  ENSG00000105875_41 (sequence is synthesized)
ctggtactgtggtgacaacagacccctaaggctcagatcataagttctggcatttcaggattcaagatgcacttgggggccacccagagccccataatgtctgaagttcctctgttattt

SEQ ID NO: 152743 - DNA, 120 bp, Artificial Sequence
  ENSG00000105875_42 (sequence is synthesized)
ttttttattgttgaactcctcctcctgcctctctgaggaagcacttgcaggagcatccggaccccagggctggtagagagtgccctggccgatgcccccagcctggattgtgtctagtgt

SEQ ID NO: 152744 - DNA, 120 bp, Artificial Sequence
  ENSG00000105875_43 (sequence is synthesized)
agaagttcaaggtcagctctcacgtctttgtttaattttaaagtgaggctcattgtagccagatttcccctgaactgcctggatgcgtagaggaggggcctcacccccacagcctgccca

SEQ ID NO: 152745 - DNA, 120 bp, Artificial Sequence
  ENSG00000105875_44 (sequence is synthesized)
ccaccatcaaggccgcaggctgccaagtgtggtccgcggggctggtcctttcccaagcctaatgccccatctcctgtgcaggatccagcctcaggaccaaagtgcaccctccctctgtgg

SEQ ID NO: 152746 - DNA, 120 bp, Artificial Sequence
  ENSG00000105877_0 (sequence is synthesized)
gtcccaggccttcgcttcggcctgcgaggctacagctgtgcgcagtggcgcggctgctaagtagcagcaggtgggagactagggtctgcgctcgcggcgaccgcggaggagggtgggcgc

SEQ ID NO: 152747 - DNA, 120 bp, Artificial Sequence
  ENSG00000105877_1 (sequence is synthesized)
ctgcggaggtgtcctcgctcacttcggggggcccagagtctcgggtgaggagccagccggcctcgcgttccctcggacggttgcccaatggcagcccaggtggcagcccgggaggcgcga

SEQ ID NO: 152748 - DNA, 120 bp, Artificial Sequence
  ENSG00000105877_2 (sequence is synthesized)
gacttcagagaagccccgacccttcgcctaacctcgggggccggcctggaggcagtgggcgctgtggagctcgaggaggaggaggagaacgaggaggaggcggcggccaggagagcgcgg

SEQ ID NO: 152749 - DNA, 120 bp, Artificial Sequence
  ENSG00000105877_3 (sequence is synthesized)
agtttcgcccaagacgcgcgggtgcgcttcctcggcggccgcctggcgatgatgctggggttcacggaggagaaatggagccagtatttggaaagcgaggacaaccggcaggttcttggg

SEQ ID NO: 152750 - DNA, 120 bp, Artificial Sequence
  ENSG00000105877_4 (sequence is synthesized)
gagtttctggaaagcaccagcccggcttgccttgtgtttagcttcgccgcctcggggcgccttgcggcttcccaggagattccaagagatgcaaaccataaacttgtttttatttccaag

SEQ ID NO: 152751 - DNA, 120 bp, Artificial Sequence
  ENSG00000105877_5 (sequence is synthesized)
aagattactgaaagcattggagtaaatgacttttctcaagtggttttatttggagagttacctgcgttgtctcttggacatgtatctgctttccttgatgagattttagtgccagttctt

SEQ ID NO: 152752 - DNA, 120 bp, Artificial Sequence
  ENSG00000105877_6 (sequence is synthesized)
tctaataagaacaaccataagtcctggtcctgttttacttcacaagatatggaatatcacatagaagtcatgaaaaagaagatgtatatttttaggggcaaaatgtctagaagaactctt

SEQ ID NO: 152753 - DNA, 120 bp, Artificial Sequence
  ENSG00000105877_7 (sequence is synthesized)
ctaccaattcccactgttgcaggaaagatggatctggatcagaattgttcagagaacaagccaccgtcaaacgaaaggataatacttcatgcaattgaatctgtggttattgaatggtca

SEQ ID NO: 152754 - DNA, 120 bp, Artificial Sequence
  ENSG00000105877_8 (sequence is synthesized)
catcaaatccaagaaattatagaaagagattcagtgcagcgtttgttgaatggtcttcacttgtctcctcaagcagaactagatttctggatgatgaggagagaaaatctgtcatgcatt

SEQ ID NO: 152755 - DNA, 120 bp, Artificial Sequence
  ENSG00000105877_9 (sequence is synthesized)
tatgatcaacttcaggcacctgttgtcctcaaaatggttaagatcctgacaactaaacaaagcagctattttcctactctgaaggacatttttctggctgtggaaaatgctcttctcgaa

SEQ ID NO: 152756 - DNA, 120 bp, Artificial Sequence
  ENSG00000105877_10 (sequence is synthesized)
gcccaagatgtggaactttacctgagacctctgaggagacacatccagtgtctccaggagacggaattcccacagacacgcatattaatcgctccattatttcataccatctgtctgatc

SEQ ID NO: 152757 - DNA, 120 bp, Artificial Sequence
  ENSG00000105877_11 (sequence is synthesized)
tggagtcattccaagttttataacaccccagctcgggttatagttttattgcaagagttttgtaatctcttcattaaccaggcaacagcttacctttcacctgaggaccttttgagggga

SEQ ID NO: 152758 - DNA, 120 bp, Artificial Sequence
  ENSG00000105877_12 (sequence is synthesized)
gaaatagaagagtcactggaaaaggtgcaggtggctgttaacatcttaaagactttcaaaaactcctttttcaactatagaaaaaaattggcaagctactttatgggaagaaagctgaga

SEQ ID NO: 152759 - DNA, 120 bp, Artificial Sequence
  ENSG00000105877_13 (sequence is synthesized)
ccatgggatttccagtctcatctggtgttttgcagatttgacaagtttcttgatcgtttaataaaaatagaggatatatttgccaccactttggaatttgaaaagctggaaagactggaa

SEQ ID NO: 152760 - DNA, 120 bp, Artificial Sequence
  ENSG00000105877_14 (sequence is synthesized)
tttggtggtaccaaaggagcaattttaaatggacaagtccacgagatgagtgaagaacttatggaactctgtaaactttttaaacagagcacttatgacccatctgattgcactaacatg

SEQ ID NO: 152761 - DNA, 120 bp, Artificial Sequence
  ENSG00000105877_15 (sequence is synthesized)
gagtttgaaagtgattatgtggcatttaagtccaaaactctggaatttgacagaaggcttgggacaattatttgtgaagctttctttaactgcaatggcttagaagctgcatttaagctt

SEQ ID NO: 152762 - DNA, 120 bp, Artificial Sequence
  ENSG00000105877_16 (sequence is synthesized)
ttgaccatatttggaaattttctagagaagccagttgtcatggaaattttcagcctacattacagcacactagtgcatatgtttaatacagagctggatgtgtgtaagcaactgtataat

SEQ ID NO: 152763 - DNA, 120 bp, Artificial Sequence
  ENSG00000105877_17 (sequence is synthesized)
gaacacatgaaacagattgaatgtggtcatgtagttcttaacaagaacatgccatttacctcaggaaatatgaaatgggcccagcaggttctccaacgacttcaaatgttttggtcaaac

SEQ ID NO: 152764 - DNA, 120 bp, Artificial Sequence
  ENSG00000105877_18 (sequence is synthesized)
ttcgcatctctccgttatctatttttgggcaatcctgatcacgctttagtttatcaaaagtatgttgaaatgaccactttgcttgatcaatttgaaagtcgtatctataatgaatggaaa

SEQ ID NO: 152765 - DNA, 120 bp, Artificial Sequence
  ENSG00000105877_19 (sequence is synthesized)
agtaatgtggatgaaatctgtgaattcaatttgaatcaacccttggttaaattcagtgccataaatggtcttctctgtgtcaattttgacccaaagctagtggctgtattgagagaagtg

SEQ ID NO: 152766 - DNA, 120 bp, Artificial Sequence
  ENSG00000105877_20 (sequence is synthesized)
aaatatcttttgatgttgaagaaacaagacataccagattcagctttagccatcttcaagaaaaggaacactattttaaagtacattggaaatcttgaccttcttgtgcaagggtataat

SEQ ID NO: 152767 - DNA, 120 bp, Artificial Sequence
  ENSG00000105877_21 (sequence is synthesized)
aaactcaaacagacgctcctggaagttgaataccctctgattgaagatgagctgagggctattgacgagcagctgacagcagccacaacgtggctgacatggcaggatgactgctggggc

SEQ ID NO: 152768 - DNA, 120 bp, Artificial Sequence
  ENSG00000105877_22 (sequence is synthesized)
tacatcgagagggtgagggcagccacgtccgagttggagcacagagttgagcgcacacagaaaaacgtgaaggtgatccagcagaccatgaggggctgggccaggtgcgtgctacctccc

SEQ ID NO: 152769 - DNA, 120 bp, Artificial Sequence
  ENSG00000105877_23 (sequence is synthesized)
aggagagagcacagacgagaggcagccttcaccttggaggacaagggtgatttgtttacaaaaaaatacaagttaatccaaggagatggctgcaagatccacaacttggtcgaggaaaat

SEQ ID NO: 152770 - DNA, 120 bp, Artificial Sequence
  ENSG00000105877_24 (sequence is synthesized)
aggaagctcttcaaagccaatccctctctggatacctggaaaatttatgtagaattcattgacgacattgtggtggaaggcttttttcaggctataatgcacgacttagacttctttctg

SEQ ID NO: 152771 - DNA, 120 bp, Artificial Sequence
  ENSG00000105877_25 (sequence is synthesized)
aagaatacagagaaacaattgaaaccggcaccgttttttcaagcacaaatgatcttgttgcctcctgagattgtgtttaaaccttccctagacagagaggctggggatggcttctatgat

SEQ ID NO: 152772 - DNA, 120 bp, Artificial Sequence
  ENSG00000105877_26 (sequence is synthesized)
cttgtagaagaaatgttatgcaatagttttagaatgtctgcccagatgaaccgaatagcaacacacctggaaattaaaaattatcagaatgatatggataacatgttaggcctggcagag

SEQ ID NO: 152773 - DNA, 120 bp, Artificial Sequence
  ENSG00000105877_27 (sequence is synthesized)
gtcaggcaggagatcatgaacagagtggtgaatgtcatcaacaaagtcttagatttcagaaacaccctggagacccacacttacctctgggtggatgatcgagctgagtttatgaagcat

SEQ ID NO: 152774 - DNA, 120 bp, Artificial Sequence
  ENSG00000105877_28 (sequence is synthesized)
tttctcttgtatggccatgctgtgtcttccgatgaaatggatgctcatgcaaatgaagaaattcccgaacaaccaccaactcttgagcaattcaaagaacagattgacatttatgaagct

SEQ ID NO: 152775 - DNA, 120 bp, Artificial Sequence
  ENSG00000105877_29 (sequence is synthesized)
ttgtatgttcaaatgagcaaatttgaggactttagagtgtttgatagttggttcaaggtggacatgaagcctttcaaagtgagcttgttaaccataattaagaaatggagctggatgttt

SEQ ID NO: 152776 - DNA, 120 bp, Artificial Sequence
  ENSG00000105877_30 (sequence is synthesized)
caggagcatcttttgagatttgtcattgacagtctgaatgagctacaagaatttataaaggagacagattccggacttcagagagaattaaatgaaggtgatcatgatggtttagttgac

SEQ ID NO: 152777 - DNA, 120 bp, Artificial Sequence
  ENSG00000105877_31 (sequence is synthesized)
atcatggtgcatcttctggctgtaagaagccgacagagagctactgatgaactctttgaacctctaaaagaaacgatcaccctcttggaaagctatggccagaagatgcctgagcaggtc

SEQ ID NO: 152778 - DNA, 120 bp, Artificial Sequence
  ENSG00000105877_32 (sequence is synthesized)
tatattcagctagaggaattacctgaaagatgggaaactaccaaaaagatcgcagcaactgtcagacatgaagtctcacctctccataatgcggaagtcactcttataaggaaaaaatgt

SEQ ID NO: 152779 - DNA, 120 bp, Artificial Sequence
  ENSG00000105877_33 (sequence is synthesized)
attttgtttgacgcaaagcaggcagagttcagagagagattcagacactatgcccctcttggatttaatgcagaaaatccatacacagcgcttgataaggcaaatgaagagcttgaggcc

SEQ ID NO: 152780 - DNA, 120 bp, Artificial Sequence
  ENSG00000105877_34 (sequence is synthesized)
ttagaagaagaaatgttgcagatgcaagaatctactcgtctttttgaagtggctcttccagagtacaaacaaatgaaacagtgtcgcaaagaaataaaattgctcaagggactgtgggat

SEQ ID NO: 152781 - DNA, 120 bp, Artificial Sequence
  ENSG00000105877_35 (sequence is synthesized)
gtcattatttatgttcgaagaagcattgataattggactaaaacccagtggagacagattcatgtggaacagatggatgtagaactcagaaggtttgccaaggaaatttggtcactcaac

SEQ ID NO: 152782 - DNA, 120 bp, Artificial Sequence
  ENSG00000105877_36 (sequence is synthesized)
aaggaagtccgcgtctgggatgcttacacgggcctggaaggcacagttaaggacatgacagcctccctgagggccatcacagagttacagagccctgccctcagggacaggcattggcac

SEQ ID NO: 152783 - DNA, 120 bp, Artificial Sequence
  ENSG00000105877_37 (sequence is synthesized)
cagctgatgaaagctattggggtcaagtttttaataaatgaagccacaactttggcagatttgttagcactgcggttacacagagtggaagatgatgtccgaaggattgtggacaaggcg

SEQ ID NO: 152784 - DNA, 120 bp, Artificial Sequence
  ENSG00000105877_38 (sequence is synthesized)
gtgaaagagctggggactgagaaggttattactgaaatcagtcagacctgggcaaccatgaagttttcttacgaagttcactatcgaacaggcattccattactaaagtctgatgaacaa

SEQ ID NO: 152785 - DNA, 120 bp, Artificial Sequence
  ENSG00000105877_39 (sequence is synthesized)
ctttttgaaactctagagcacaaccaagttcagttgcagactcttcttcaaagcaagtatgtagaatatttcattgagcaagtgttaagctggcaaaataaattaaacatagcagacttg

SEQ ID NO: 152786 - DNA, 120 bp, Artificial Sequence
  ENSG00000105877_40 (sequence is synthesized)
gtcatcttcacttggatggaagtccagcgaacttggtctcacctggaaagcatttttgtctgttcagaagatattcgaatccagcttgtgaaagatgctagaagatttgatggggtggat

SEQ ID NO: 152787 - DNA, 120 bp, Artificial Sequence
  ENSG00000105877_41 (sequence is synthesized)
gctgaatttaaggagttaatgttcaagacagccaaagtagaaaatgtgttagaagcaacgtgcagacctaatctctatgaaaaacttaaagatttacagtccaggctttctctttgtgaa

SEQ ID NO: 152788 - DNA, 120 bp, Artificial Sequence
  ENSG00000105877_42 (sequence is synthesized)
aaagctctcgctgaatacctggaaaccaagcgcatagcctttcctcgcttctatttcgtctcttctgctgatttacttgacattctctcaaaaggagctcagcctaaacaggtaacatgt

SEQ ID NO: 152789 - DNA, 120 bp, Artificial Sequence
  ENSG00000105877_43 (sequence is synthesized)
caccttgccaaacttttcgacagcattgcagatctgcagtttgaagacaatcaggatgtttctgcacacagggcagttggaatgtacagcaaagaaaaggagtatgtcccattccaagcc

SEQ ID NO: 152790 - DNA, 120 bp, Artificial Sequence
  ENSG00000105877_44 (sequence is synthesized)
gagtgtgaatgtgtgggccatgtggaaacatggcttctgcaacttgaacagactatgcaagaaacggtgcgtcattctataacagaagccatagtggcctacgaggaaaaacctagggaa

SEQ ID NO: 152791 - DNA, 120 bp, Artificial Sequence
  ENSG00000105877_45 (sequence is synthesized)
ctgtggatttttgatttcccagctcaggttgcactaaccagctcacaaatatggtggaccacagatgtaggaatagccttcagtagactggaagaaggctacgaaacagccctgaaggat

SEQ ID NO: 152792 - DNA, 120 bp, Artificial Sequence
  ENSG00000105877_46 (sequence is synthesized)
ttccataaaaaacagatttctcagctgaatacactgattacacttttgctgggagaacttccacctggagacagacagaagatcatgacaatttgtaccatagatgtccatgccagagac

SEQ ID NO: 152793 - DNA, 120 bp, Artificial Sequence
  ENSG00000105877_47 (sequence is synthesized)
gtggtggcaaaacttatttctcagaaggttgtcagtccccaagcttttacatggctgtctcaacttcgtcaccgatgggaggatacccagaaacactgctttgttaatatttgtgatgcc

SEQ ID NO: 152794 - DNA, 120 bp, Artificial Sequence
  ENSG00000105877_48 (sequence is synthesized)
cagttccagtacttctatgaatacttaggaaacagccctcgactagtgatcactcctctaactgacaggtgttatattaccttaactcaatcacttcatctaaccatgagtggggctcct

SEQ ID NO: 152795 - DNA, 120 bp, Artificial Sequence
  ENSG00000105877_49 (sequence is synthesized)
gctggcccagctggtaccgggaaaacagagaccaccaaagacctaggacgtgcccttggcatgatggtctatgtattcaactgttcagagcaaatggactacaaatccataggcaatatc

SEQ ID NO: 152796 - DNA, 120 bp, Artificial Sequence
  ENSG00000105877_50 (sequence is synthesized)
tataagggattggtgcagacaggagcttggggctgctttgatgagttcaaccgaatctctgtggaagttctgtcagtggtggcagtacaagtgaaaatgattcatgatgccatcagaaac

SEQ ID NO: 152797 - DNA, 120 bp, Artificial Sequence
  ENSG00000105877_51 (sequence is synthesized)
aggaagaagagatttgtatttcttggggaagctatcacactgaagccatcagttggaatatttattactatgaacccgggttatgctggtcgaaccgaattaccggaaaatctcaaagct

SEQ ID NO: 152798 - DNA, 120 bp, Artificial Sequence
  ENSG00000105877_52 (sequence is synthesized)
cttttcagaccctgtgccatggtggcccctgacattgagctaatctgtgaaatcttgttagttgctgaaggttttgtggatgcgcgtgcattagcccgaaagttcattacgttgtacacg

SEQ ID NO: 152799 - DNA, 120 bp, Artificial Sequence
  ENSG00000105877_53 (sequence is synthesized)
ctttgcaaggagcttctctccaagcaggatcattacgactggggacttcgtgctattaagtctgtcttggttgtggctggatctctgaaacgaggagataaaaatagacccgaagatcag

SEQ ID NO: 152800 - DNA, 120 bp, Artificial Sequence
  ENSG00000105877_54 (sequence is synthesized)
gtactcatgagagcattaagggatttcaatatgcccaaaatagtgactgacgacatcccagtgtttctgggcctggtcggtgacctgtttccagccctggatgtgccccggaggaggaag

SEQ ID NO: 152801 - DNA, 120 bp, Artificial Sequence
  ENSG00000105877_55 (sequence is synthesized)
ctgcactttgaacagatggtcaggcagtctaccctggagctccgcctgcagcctgaagagagcttcatcctcaaagttgtccagcttgaggaactgttggctgtgcggcactcggtcttt

SEQ ID NO: 152802 - DNA, 120 bp, Artificial Sequence
  ENSG00000105877_56 (sequence is synthesized)
gtagttggaaatgcaggcacaggaaagagtaagattttgagaacactgaaccgaacatatgttaacatgaaacagaagccggtttggaatgacttaaaccctaaagctgtgacaacagat

SEQ ID NO: 152803 - DNA, 120 bp, Artificial Sequence
  ENSG00000105877_57 (sequence is synthesized)
gaactctttggtttcatacatcatgctacccgagaatggaaagatggcaagattgtttactcttattttataggtctcttctcatccattctacgagaacaagcaaatcttaagcatgat

SEQ ID NO: 152804 - DNA, 120 bp, Artificial Sequence
  ENSG00000105877_58 (sequence is synthesized)
ggaccaaaatggatagtcctggatggcgatattgaccccatgtggattgaatcactgaatactgtaatggatgataacaaggtgctgaccctcgccagcaatgagcgcattgcactcact

SEQ ID NO: 152805 - DNA, 120 bp, Artificial Sequence
  ENSG00000105877_59 (sequence is synthesized)
agagctggtattctgtatgtgaacccacaagatctgggctggaatccgtatgtggccagttggatagacagaaggcggcatcaatcagaaaaggccaatttgactattctttttgataaa

SEQ ID NO: 152806 - DNA, 120 bp, Artificial Sequence
  ENSG00000105877_60 (sequence is synthesized)
tatgtccctgcatgcttggataaactgagaacaagctttaaaaccatcacttcaattcctgagagtagcctggtgcagactctatgtgttcttttggagtgcttgctgactcctgaaaat

SEQ ID NO: 152807 - DNA, 120 bp, Artificial Sequence
  ENSG00000105877_61 (sequence is synthesized)
gtaccttctgacagcccaaaagaagtttatgaagtctattttgtatttgcttgtatctgggcttttggaggcaccctgctacaagatcagatttctgattatcaagctgacttcagtcgg

SEQ ID NO: 152808 - DNA, 120 bp, Artificial Sequence
  ENSG00000105877_62 (sequence is synthesized)
tggtggcagaaagagatgaaagcagtgaaatttccgtcgcagggaacaatctttgattattatgtggaccacaaaactaagaaattattgccctgggctgacaaaattgcccagtttact

SEQ ID NO: 152809 - DNA, 120 bp, Artificial Sequence
  ENSG00000105877_63 (sequence is synthesized)
atggatccagatgtgcctctgcagacagttctcgttcacacaacagagacagctcgtcttagatatttcatggagttgttgcttgagaaaggaaaacctctaatgctagtaggaaatgca

SEQ ID NO: 152810 - DNA, 120 bp, Artificial Sequence
  ENSG00000105877_64 (sequence is synthesized)
ggagtgggaaaaacagtctttgtaggtgacacattggcaagtctctctgaggattacatagtatcccgtgtgcctttcaactactacacgacatccacagctctgcaaaaaattcttgag

SEQ ID NO: 152811 - DNA, 120 bp, Artificial Sequence
  ENSG00000105877_65 (sequence is synthesized)
aaacccctagagaaaaaagctggtcataactatggtcctggaggaaataaaaaattgatttattttatcgacgacatgaacatgcctgaagtggacttatatggcaccgttcagcctcac

SEQ ID NO: 152812 - DNA, 120 bp, Artificial Sequence
  ENSG00000105877_66 (sequence is synthesized)
accctgatccggcagcatattgattatggacattggtatgatagacagaaggtgatgcttaaagaaatccataactgccagtatgtcgcctgcatgaatccgatggtgggcagcttcacc

SEQ ID NO: 152813 - DNA, 120 bp, Artificial Sequence
  ENSG00000105877_67 (sequence is synthesized)
atcaatcccaggctacagagacatttcacagtgtttgcattcaattttccatctttggatgcactaaacaccatctatggccaaatctttagcttccatttccaacagcaagcatttgct

SEQ ID NO: 152814 - DNA, 120 bp, Artificial Sequence
  ENSG00000105877_68 (sequence is synthesized)
ccatcaattctcaggagtggccccactttgatccaggcaacaatagcattccatcagacaatgatgtgtaactttttacccacggctattaaattccactacatctttaatctgagagat

SEQ ID NO: 152815 - DNA, 120 bp, Artificial Sequence
  ENSG00000105877_69 (sequence is synthesized)
ttatcaaacgtcttccaggggattttatttgcttctcctgagtgtttaaaaggtccacttgatttaatacatctgtggcttcatgaatctgcccgtgtttatggagacaaactgatagac

SEQ ID NO: 152816 - DNA, 120 bp, Artificial Sequence
  ENSG00000105877_70 (sequence is synthesized)
aaaaaagattgtgatttgtttcagagaagaatgctggaaactgcttataaatattttgaaggtatagatagtcacatgctgcttcaacagcccctcatttattgccactttgctgataga

SEQ ID NO: 152817 - DNA, 120 bp, Artificial Sequence
  ENSG00000105877_71 (sequence is synthesized)
gggaaggacccacattacatgccagtgaaggactgggaagtgctgaagacgattcttacagaaacgttagacaactacaatgaactaaatgctgccatgcacctagttttgtttgaagat

SEQ ID NO: 152818 - DNA, 120 bp, Artificial Sequence
  ENSG00000105877_72 (sequence is synthesized)
gccatgcaacatgtgtgtcgcatcagccggatcttacgaacccctcagggctgtgctctcttggttggagttgggggcagtggcaagcagagcttgtccaggctggcagcttaccttcgt

SEQ ID NO: 152819 - DNA, 120 bp, Artificial Sequence
  ENSG00000105877_73 (sequence is synthesized)
ggccttgaggtctttcagatcactctgaccgagggctatggaatccaggaacttcgggtagatcttgccaatttgtacatccgaactggagccaagaacatgcccactgtgttcctgctg

SEQ ID NO: 152820 - DNA, 120 bp, Artificial Sequence
  ENSG00000105877_74 (sequence is synthesized)
acagatgcccaggttctagatgagagcttcctcgtgctgattaatgacttgctggcatcaggagaaatcccagatctgttcagcgatgaagatgtggacaagataatttctggaattcat

SEQ ID NO: 152821 - DNA, 120 bp, Artificial Sequence
  ENSG00000105877_75 (sequence is synthesized)
aatgaagttcatgctctgggcatggtagactccagggaaaactgttggaaattctttatggccagggtgcgactacagctcaaaatcattttgtgtttctctccagttggtcgcacgctg

SEQ ID NO: 152822 - DNA, 120 bp, Artificial Sequence
  ENSG00000105877_76 (sequence is synthesized)
agagttagagctcggaagttcccagccatagttaactgcacggctattgactggtttcatgcgtggccgcaggaggctctggtctccgtcagcaggaggttcattgaggaaaccaaggga

SEQ ID NO: 152823 - DNA, 120 bp, Artificial Sequence
  ENSG00000105877_77 (sequence is synthesized)
attgagccagtgcacaaagactctattagccttttcatggcacatgttcacaccactgtaaatgaaatgagtaccagatattaccagaatgagagaagacacaactataccaccccaaag

SEQ ID NO: 152824 - DNA, 120 bp, Artificial Sequence
  ENSG00000105877_78 (sequence is synthesized)
agttttctagaacaaatatcactgtttaagaacctgttgaagaagaagcaaaatgaggtatccgagaaaaaagaacgcctggtgaacggcatccaaaagctaaaaaccacagcctctcag

SEQ ID NO: 152825 - DNA, 120 bp, Artificial Sequence
  ENSG00000105877_79 (sequence is synthesized)
gtgggagatctaaaagccagacttgcctctcaagaagccgagctgcaactgagaaatcatgatgccgaagctctgatcacaaagatcggccttcagacggagaaagtgagccgggaaaag

SEQ ID NO: 152826 - DNA, 120 bp, Artificial Sequence
  ENSG00000105877_80 (sequence is synthesized)
accatcgctgatgctgaggagcgaaaggtgacagccattcagactgaagtgttccagaaacagagagaatgtgaagctgacttactcaaggctgagcctgcactggtggctgctacagct

SEQ ID NO: 152827 - DNA, 120 bp, Artificial Sequence
  ENSG00000105877_81 (sequence is synthesized)
gcactcaatacactcaacagggtcaacctcagtgagctgaaagcctttcccaaccctcccatcgcagttaccaatgttactgcagccgtgatggtccttctggctcctcggggaagagtg

SEQ ID NO: 152828 - DNA, 120 bp, Artificial Sequence
  ENSG00000105877_82 (sequence is synthesized)
cccaaagaccgaagttggaaagcagctaaagtcttcatgggaaaggttgatgattttttgcaagcattaattaactatgacaaagagcacattccagagaactgtctaaaagtggtgaat

SEQ ID NO: 152829 - DNA, 120 bp, Artificial Sequence
  ENSG00000105877_83 (sequence is synthesized)
gaacactatttgaaagacccagagtttaatccaaacctgattcgaaccaaatcttttgcagcagctggcctgtgtgcctgggtcatcaacatcattaaattctatgaggtctactgtgat

SEQ ID NO: 152830 - DNA, 120 bp, Artificial Sequence
  ENSG00000105877_84 (sequence is synthesized)
gtggagccaaaacgccaagcattagcccaagcaaacttagaactggctgcagctactgaaaaactagaggctatcaggaaaaagcttgtggatctggatcgaaatctgagcagactcacg

SEQ ID NO: 152831 - DNA, 120 bp, Artificial Sequence
  ENSG00000105877_85 (sequence is synthesized)
gcttcatttgaaaaagcaacagctgagaaagtccggtgtcaagaagaggtgaaccaaaccaacaaaaccatcaaattagctaacagacttgtcaaggaacttgaggcaaagaagattcgc

SEQ ID NO: 152832 - DNA, 120 bp, Artificial Sequence
  ENSG00000105877_86 (sequence is synthesized)
tggggtcaatccattaagtcctttgaagctcaagagaagacactctgtggagatgttcttctcacggcggcatttgtgtcttacgtcggacccttcacaaggcagtatcgccaggagctg

SEQ ID NO: 152833 - DNA, 120 bp, Artificial Sequence
  ENSG00000105877_87 (sequence is synthesized)
gtgcactgcaagtgggttccctttcttcaacagaaggtttccattccactaaccgaaggcctggacttgatatccatgttgacggatgatgctacaattgccgcctggaataacgaagga

SEQ ID NO: 152834 - DNA, 120 bp, Artificial Sequence
  ENSG00000105877_88 (sequence is synthesized)
ctgcccagtgacagaatgtccaccgaaaatgccgctatcctaacacactgtgagcgctggcctctggtgatagatccccagcaacagggaattaagtggatcaagaataagtatggaatg

SEQ ID NO: 152835 - DNA, 120 bp, Artificial Sequence
  ENSG00000105877_89 (sequence is synthesized)
gacctgaaagtcacacatttgggccagaaagggtttttgaatgccattgaaactgctttggcctttggtgatgtcatcttaattgaaaatctcgaggaaacgatagatccagtcctggat

SEQ ID NO: 152836 - DNA, 120 bp, Artificial Sequence
  ENSG00000105877_90 (sequence is synthesized)
ccactacttggcaggaacacaattaaaaaaggaaagtatatcaggattggagataaagaatgtgaatttaacaagaactttcgccttatccttcacacaaaattggcaaatcctcactat

SEQ ID NO: 152837 - DNA, 120 bp, Artificial Sequence
  ENSG00000105877_91 (sequence is synthesized)
aagccggaattacaagctcagacaactctcctcaatttcacagtcacagaagatggtctagaagcccagctgctggcagaggttgtcagtattgaaaggccagatttggagaaacttaag

SEQ ID NO: 152838 - DNA, 120 bp, Artificial Sequence
  ENSG00000105877_92 (sequence is synthesized)
ttggtattgacaaagcaccaaaatgattttaaaattgagctcaagtatctggaagacgatctccttttgcgcctttctgcggcagagggaagctttctggatgacaccaaactggtagag

SEQ ID NO: 152839 - DNA, 120 bp, Artificial Sequence
  ENSG00000105877_93 (sequence is synthesized)
agattggaggcaacaaagaccaccgtggcagagatagagcacaaggtgattgaagccaaagaaaatgaaagaaaaatcaacgaggcccgagaatgttacagaccagtggcagcaagagca

SEQ ID NO: 152840 - DNA, 120 bp, Artificial Sequence
  ENSG00000105877_94 (sequence is synthesized)
tctcttctttattttgttattaatgacctccaaaaaatcaaccccctctaccaattctctttgaaggcttttaacgtgctgttccacagagcgatcgagcaggctgacaaggtggaagac

SEQ ID NO: 152841 - DNA, 120 bp, Artificial Sequence
  ENSG00000105877_95 (sequence is synthesized)
atgcagggacgcatctctatcctgatggagagcatcacccatgctgtcttcctctacaccagccaggcgctgtttgagaaggacaagctcaccttcctgtcccagatggcttttcagatt

SEQ ID NO: 152842 - DNA, 120 bp, Artificial Sequence
  ENSG00000105877_96 (sequence is synthesized)
ttgttgagaaagaaagagatagaccctcttgaattggatttcctgcttcgattcacagttgaacacactcatctgagtcccgttgacttcctaacttctcagtcatggagtgctatcaag

SEQ ID NO: 152843 - DNA, 120 bp, Artificial Sequence
  ENSG00000105877_97 (sequence is synthesized)
gcaattgccgtcatggaagaatttcgaggcatagaccgagatgtggaaggatctgccaagcagtggaggaagtgggtagaatccgagtgtccagaaaaagaaaaattacctcaagaatgg

SEQ ID NO: 152844 - DNA, 120 bp, Artificial Sequence
  ENSG00000105877_98 (sequence is synthesized)
aagaagaaaagtttaatacagaagctgattcttctgagagcaatgcgccctgacagaatgacgtatgctctcagaaattttgtagaggaaaaactgggtgcgaagtatgtggagaggacc

SEQ ID NO: 152845 - DNA, 120 bp, Artificial Sequence
  ENSG00000105877_99 (sequence is synthesized)
agattggacttagttaaagcattcgaagaaagcagcccagccacccccatattcttcatcctgtctccgggggtagatgcccttaaagacctggagattcttggcaaaagacttggcttt

SEQ ID NO: 152846 - DNA, 120 bp, Artificial Sequence
  ENSG00000105877_100 (sequence is synthesized)
acaattgactctggaaaattccacaatgtgtctttaggacaaggtcaggagacggtggcagaagtggccctggagaaagcttccaaaggaggacactgggtcatcctccaaaatgttcat

SEQ ID NO: 152847 - DNA, 120 bp, Artificial Sequence
  ENSG00000105877_101 (sequence is synthesized)
ttggtagccaagtggctaggaaccttggagaagctccttgaaagattcagccaaggaagccacagagattacagggttttcatgagtgctgagtctgcacctacaccagatgagcatatc

SEQ ID NO: 152848 - DNA, 120 bp, Artificial Sequence
  ENSG00000105877_102 (sequence is synthesized)
atccctcaaggactcctggaaaattccattaagatcactaatgaacccccaacagggatgctggccaatttgcatgccgccctgtacaactttgatcaggatacacttgaaatatgctcc

SEQ ID NO: 152849 - DNA, 120 bp, Artificial Sequence
  ENSG00000105877_103 (sequence is synthesized)
aaggagcaggagtttaaaagcatccttttttctctctgctacttccacgcctgtgttgctgggagactgaggtttggcccccagggctggagccgaagctatccttttaatcctggagac

SEQ ID NO: 152850 - DNA, 120 bp, Artificial Sequence
  ENSG00000105877_104 (sequence is synthesized)
ctcaccatttgtgccagtgtcctctacaactacttagaggcaaactctaaagtcccatgggaagatctccgttatctctttggtgagatcatgtatggaggccacatcacagatgactgg

SEQ ID NO: 152851 - DNA, 120 bp, Artificial Sequence
  ENSG00000105877_105 (sequence is synthesized)
gatcgcaaactgtgtcgggtgtatttagaagaattcatgaatccatctctgactgaagatgaactgatgctggcaccaggttttgctgccccaccctacctagattatgcaggctaccac

SEQ ID NO: 152852 - DNA, 120 bp, Artificial Sequence
  ENSG00000105877_106 (sequence is synthesized)
cagtacatagaggagatgcttcctccagaaagcccggcactgtatggcctccacccaaatgctgaaatagaattcctgacagtgacatccaacactctcttcagaactttgctggagatg

SEQ ID NO: 152853 - DNA, 120 bp, Artificial Sequence
  ENSG00000105877_107 (sequence is synthesized)
cagcccaggaatgcactcagtggtgatgaactggggcagtctacagaagaaaaggttaagaatgtcttggatgacattttggagaaacttccagaagagttcaacatggcagagataatg

SEQ ID NO: 152854 - DNA, 120 bp, Artificial Sequence
  ENSG00000105877_108 (sequence is synthesized)
caaaaaaattcaaatagaagcccatatgttcttgtttgcttccaagaatgtgagaggatgaatattctcattcgggaaatacgtatatcacttgaacaactggaccttagtttgaagggg

SEQ ID NO: 152855 - DNA, 120 bp, Artificial Sequence
  ENSG00000105877_109 (sequence is synthesized)
gaattggcattatctcctgctgtggaagcccagcagtttgcattgagttatgacacggtaccagacacttggagcaaactggcttatccttctacttatggcctagcccagtggttcaat

SEQ ID NO: 152856 - DNA, 120 bp, Artificial Sequence
  ENSG00000105877_110 (sequence is synthesized)
gacctcctcctgcgatgccgagaactcgatacttggacacaagaccttacccttccggctgtcgtgtggctctccggcttcttcaaccctcagtccttcttaactgcaatcatgcagacg

SEQ ID NO: 152857 - DNA, 120 bp, Artificial Sequence
  ENSG00000105877_111 (sequence is synthesized)
atggctcgaaaaaatgagtggcccctggataaaacgcgcttgactgctgatgttaccaaaaaaacaaaggaagattatggacacccgccaagggaaggtgcatacctccacggactcttc

SEQ ID NO: 152858 - DNA, 120 bp, Artificial Sequence
  ENSG00000105877_112 (sequence is synthesized)
atggagggcgcccgctgggacacccaagcaggaaccattgttgaagcccgtctcaaggagctggcatgccctatgccggtcatctttgcaaaagccacccccgtggacagacaagaaacc

SEQ ID NO: 152859 - DNA, 120 bp, Artificial Sequence
  ENSG00000105877_113 (sequence is synthesized)
aaacagacctacgagtgccctgtgtatagaaccaaactgagaggccccagctacatctggaccttcaggctgaagagcgaagagaagactgcaaaatgggttctggctggagtggctctg

SEQ ID NO: 152860 - DNA, 120 bp, Artificial Sequence
  ENSG00000105877_114 (sequence is synthesized)
cttctagaagcgtaaggtaacactggcattcctctagcctctgctggagtgcagtgaggattttctagcatgttgctgcactgttcccatgcacattattctaactttttagtaactcac

SEQ ID NO: 152861 - DNA, 120 bp, Artificial Sequence
  ENSG00000105877_115 (sequence is synthesized)
acgtgcattcttttttcaacgctatccttagagtgaaagtcagaaaaaaatactagaaactaactcagggctgagcgtggtggcacacgactgtaatcccagttactcaggaggtaggag

SEQ ID NO: 152862 - DNA, 84 bp, Artificial Sequence
  ENSG00000105877_116 (sequence is synthesized)
tggcacacgactgtaatcccagttactcaggaggtaggagaatcacttgaacctaggaggcaactcctgggcaacagaacaaga

SEQ ID NO: 152863 - DNA, 120 bp, Artificial Sequence
  ENSG00000105877_117 (sequence is synthesized)
catatgtgaacatgcaaaagcaatgcagccggaaagaacggagattttaatttttaacaaacaacaaattaaattattagcccttaaactctttcaaaatataaaagcagcaggccccag

SEQ ID NO: 152864 - DNA, 120 bp, Artificial Sequence
  ENSG00000105877_118 (sequence is synthesized)
gtgagtcctgaaggaagaggctagcactctgtaaggcctccagtgtccagtgtctacaatgttgatggtccccttttgttcagtcaagttttaataaaaataaaactgttctacagttaa

SEQ ID NO: 152865 - DNA, 120 bp, Artificial Sequence
  ENSG00000105877_119 (sequence is synthesized)
ctttctcaggactttccagattttagcactgaaagtatcacatccctgaaatccacttgctagaaacccctcagtccggagcaaatcagggcatttggtcctcttatgcagaggcgtgga

SEQ ID NO: 152866 - DNA, 120 bp, Artificial Sequence
  ENSG00000105877_120 (sequence is synthesized)
tggtgctaaggaatgttagagggtagggaggggcagagggtggcagcttccaagaagcagattctggatattcttagcaaaagccggaaagaaaatggctttcctgcaacccatatggct

SEQ ID NO: 152867 - DNA, 64 bp, Artificial Sequence
  ENSG00000105877_121 (sequence is synthesized)
gggcacttctctctgctgccgccaaggaaagaaggacatgtttgcttcccttccaccatgattt

SEQ ID NO: 152868 - DNA, 120 bp, Artificial Sequence
  ENSG00000105877_122 (sequence is synthesized)
cttttcacatgattcatggaacagtttactttatatcataggtggaggtctcctttctcagtgattctcataaggagctcagcaggccaatgctatgatgatacaagggcattttttaaa

SEQ ID NO: 152869 - DNA, 120 bp, Artificial Sequence
  ENSG00000105877_123 (sequence is synthesized)
tctttaatttggattttttaaaagttcatttttgattccattattacattgagtataagtaaatctctttatgtatcagtgactcttagaattgactaatctgagagagagttgtaagtc

SEQ ID NO: 152870 - DNA, 120 bp, Artificial Sequence
  ENSG00000105877_124 (sequence is synthesized)
aggaagcagtaagctcatcctctgtaaataaatccacttttccttttgtatatttaatgcttaaaattggtatttcataccctaaaacccattgcataatttaaattatcacactttttt

SEQ ID NO: 152871 - DNA, 120 bp, Artificial Sequence
  ENSG00000105877_125 (sequence is synthesized)
cgcctcggggcgccttgcggcttcccaggaggtaagaggcgacgggcaaggggacctgcccatccaacaaaactacccaggggagacagcccagtcgctcccctttggattcccgcgggg

SEQ ID NO: 152872 - DNA, 120 bp, Artificial Sequence
  ENSG00000105877_126 (sequence is synthesized)
actcgggcactttaacaaacttggcttgaagtccccatcctgaggcccgcaggactcctccccacgtgcacccactctgcagttcagcagctgcagattccaagagatgcaaaccataaa

SEQ ID NO: 152873 - DNA, 120 bp, Artificial Sequence
  ENSG00000105877_127 (sequence is synthesized)
ccatctgctcatgatccagcccctgcctgctcggccttgatatttacccttccgccatgtttgtggagtgattgctcatggctcttctaatgataaattcatctcaccctttgtactata

SEQ ID NO: 152874 - DNA, 120 bp, Artificial Sequence
  ENSG00000105877_128 (sequence is synthesized)
ttctccacccatactaaactacttttagtttatctggtatatagtagtacctgccaaaatggctccagattgaaattttaattagaatgtttgtggaggagtgaggccttcattcggagt

SEQ ID NO: 152875 - DNA, 120 bp, Artificial Sequence
  ENSG00000105877_129 (sequence is synthesized)
gatcattacgactggggacttcgtgctattaagtctgtcttggttgtggctggatctctgaaacgaggagataaaaatagacccgaagatcaggcttaacaggaagcatgactgggagaa

SEQ ID NO: 152876 - DNA, 120 bp, Artificial Sequence
  ENSG00000105877_130 (sequence is synthesized)
ggtggcaggagagagagagaatgaaggggaaagtgccacacacttttaaaccatcggatctcgtgagaacagcaaggaggaaatccacccacttgatgatccaatcacctcccactaagc

SEQ ID NO: 152877 - DNA, 72 bp, Artificial Sequence
  ENSG00000105877_131 (sequence is synthesized)
cctcctctacatatcaccatgtgtatgtgcaatatgacttgggaaataacaacaacaacaacaaaaaaccca

SEQ ID NO: 152878 - DNA, 120 bp, Artificial Sequence
  ENSG00000105879_0 (sequence is synthesized)
actgtgctctgcgagccgaatcatggatcacactgacaatgagttacaaggcactaatagttctggatccttgggtggtcttgatgttcgcagacgaattcctataaagctcatctccaa

SEQ ID NO: 152879 - DNA, 120 bp, Artificial Sequence
  ENSG00000105879_1 (sequence is synthesized)
acaagcaaacaaagcgaaacctgcaccgcgaactcaaagaactataaacaggatgcctgcaaaggctccacctggtgatgaagaaggatttgattataatgaagaagaacggtatgactg

SEQ ID NO: 152880 - DNA, 120 bp, Artificial Sequence
  ENSG00000105879_2 (sequence is synthesized)
taaagggggtgagctgtttgcaaatcagcgaagatttcctggacaccttttttgggactttcagataaacatcttaggtgaaaaggatgatacaccagttcatttctgtgacaagtgtgg

SEQ ID NO: 152881 - DNA, 120 bp, Artificial Sequence
  ENSG00000105879_3 (sequence is synthesized)
attgcctattaaaatctatgggagaatgattccatgcaagcatgttttttgctatgactgtgctattttacatgaaaaaaagggagataagatgtgtccaggctgtagtgatcctgtgca

SEQ ID NO: 152882 - DNA, 120 bp, Artificial Sequence
  ENSG00000105879_4 (sequence is synthesized)
gcgaattgagcagtgtacacgaggttctctcttcatgtgtagcattgttcaagggtgcaagagaacatatttgtctcagagagacttacaggctcatatcaaccatcgccatatgagagc

SEQ ID NO: 152883 - DNA, 120 bp, Artificial Sequence
  ENSG00000105879_5 (sequence is synthesized)
tggaaaacctgttacccgtgcttcacttgaaaatgttcatcctcctattgccccaccaccaactgaaatccctgagcgttttataatgccaccagacaagcaccatatgagccatattcc

SEQ ID NO: 152884 - DNA, 120 bp, Artificial Sequence
  ENSG00000105879_6 (sequence is synthesized)
gccaaagcagcacatcatgatgccaccacctcctttgcaacatgtgccacatgagcactataatcagccacatgaggatattcgtgctcctccagcagaattgtccatggctccacctcc

SEQ ID NO: 152885 - DNA, 120 bp, Artificial Sequence
  ENSG00000105879_7 (sequence is synthesized)
acctcgatcggtcagtcaggaaacctttcgtatttcaacaagaaaacacagcaatttaataaccgtccctattcaggatgactcaaattcaggtgctagagaaccaccacctcctgcccc

SEQ ID NO: 152886 - DNA, 120 bp, Artificial Sequence
  ENSG00000105879_8 (sequence is synthesized)
agcacctgctcaccatcatcctgaatatcagggtcaaccagtggtatcgcaccctcatcatattatgcctccacagcaacattatgcaccacccccacctcctccaccaccaataagcca

SEQ ID NO: 152887 - DNA, 120 bp, Artificial Sequence
  ENSG00000105879_9 (sequence is synthesized)
tccaatgccacatcctccccaggctgcaggtactcctcacttggtatatagccaagctccacctccaccaatgacctctgctccaccaccaataacccctccccctggacatattattgc

SEQ ID NO: 152888 - DNA, 120 bp, Artificial Sequence
  ENSG00000105879_10 (sequence is synthesized)
ccagatgccaccttatatgaatcatcctcctccaggacctcccccacctcaacatggtggtccacctgtaactgcaccccctcctcaccattataatcctaactcattaccccagttcac

SEQ ID NO: 152889 - DNA, 120 bp, Artificial Sequence
  ENSG00000105879_11 (sequence is synthesized)
tgaagatcaaggaactctgagccctccatttacacaaccagggggaatgagtcctggtatatggcctgcaccaagagggccaccaccacctccacgattgcagggtccgccttctcaaac

SEQ ID NO: 152890 - DNA, 120 bp, Artificial Sequence
  ENSG00000105879_12 (sequence is synthesized)
cccacttcctggaccacatcatccagatcagacaagatatagaccgtattaccaatgataatagtattttgaatggaagatatgagggggaaaaaaacttatgtgtagtcaatcttttaa

SEQ ID NO: 152891 - DNA, 120 bp, Artificial Sequence
  ENSG00000105879_13 (sequence is synthesized)
gctttgactgttttgggaaggaagagtacctcttatcgaggtagtataaaacacatagggtcttgtttcttaaaatggttttaaatcttgaccttaagattgatttcaagtaccatactg

SEQ ID NO: 152892 - DNA, 120 bp, Artificial Sequence
  ENSG00000105879_14 (sequence is synthesized)
tagtacagataagtggctcagttgagcacagctatattttaacatctctttgttcccctagtttagtaaattgacccagaggtgaccatttgtaaaaaatttgaaaaaatttttcattgt

SEQ ID NO: 152893 - DNA, 120 bp, Artificial Sequence
  ENSG00000105879_15 (sequence is synthesized)
tttacttcaaaagtattgttttgttaaacccaacgtttagtttttcttgtgatacattttgttaacctgtgtaaaaggattaaatttcaatatggttgtaaaaatgctatttttatgtga

SEQ ID NO: 152894 - DNA, 120 bp, Artificial Sequence
  ENSG00000105879_16 (sequence is synthesized)
taaaccatatgttttaccactaatttcccaaagttataataaaatcctgaaagtaaaaatctactagaatttgctgtaaggcagactgttaaatgatagagaattatttcacattttagg

SEQ ID NO: 152895 - DNA, 120 bp, Artificial Sequence
  ENSG00000105879_17 (sequence is synthesized)
cactgaaatgttgaggtttcgaggtatagtaagtatacaatgcacttcacttggatgccttttcatttttaggcagcctcaggagcaccaaaatacattggaattctagtactaagatat

SEQ ID NO: 152896 - DNA, 120 bp, Artificial Sequence
  ENSG00000105879_18 (sequence is synthesized)
atttgttcgtaatgttaaaagacattactaattatttggaaagagatggccaaaataatcaactctacaggcttcaagctggtgggggaatgctgttactcattaatgcttttttactga

SEQ ID NO: 152897 - DNA, 120 bp, Artificial Sequence
  ENSG00000105879_19 (sequence is synthesized)
atggtcggaatcacatatgcaccacacatactgatcttaagtaacattattttatagaactgtttaaatgggtttaaatggtgttctttagatgaaatgtgttctgttttgttcattgtc

SEQ ID NO: 152898 - DNA, 120 bp, Artificial Sequence
  ENSG00000105879_20 (sequence is synthesized)
ttaaactgaatagggctgaataggctttatgtaattcttcatttcatggtagagtttgatgctgtgtttaagtgggttcttgtttataggattttcaactacagtttgaatgccatggag

SEQ ID NO: 152899 - DNA, 120 bp, Artificial Sequence
  ENSG00000105879_21 (sequence is synthesized)
gaatttgaataatatattaatgaaggacatattcttgtaatcacaaatttgcatttgctcaggtttcattgctgtgtgataggatttttcctctaacttgaaatttaaaaacttttattt

SEQ ID NO: 152900 - DNA, 120 bp, Artificial Sequence
  ENSG00000105879_22 (sequence is synthesized)
cctattccttttgtcggtaaagcagtctgaatttggaacattttatcatggagtcaacagtgaagactaccagataattttgtattggagaagaggaaataacagctaaattgtggattt

SEQ ID NO: 152901 - DNA, 120 bp, Artificial Sequence
  ENSG00000105879_23 (sequence is synthesized)
cagtgctttacatggtgcctttcgagtcagcttttacattataggggcttgttatagtttagctaagatgaccacttaacagtttatacagaactcatatgtataaatcaacattcttag

SEQ ID NO: 152902 - DNA, 120 bp, Artificial Sequence
  ENSG00000105879_24 (sequence is synthesized)
gatattatttatatcctttgaataaatccctgtgaagtttttcctccccactaaaatggtgcataataaaacatgaaatatgtagtatgcagatatcatttattagatagtttgtagtgt

SEQ ID NO: 152903 - DNA, 120 bp, Artificial Sequence
  ENSG00000105879_25 (sequence is synthesized)
atacatttagaacatacttcttttgacaaagggtgatctgattgctaatttaccattttattctgtcaggtacaggtgaaacaaattctcatcttgaatgatcagatgcaaaatcatttc

SEQ ID NO: 152904 - DNA, 120 bp, Artificial Sequence
  ENSG00000105879_26 (sequence is synthesized)
tgaaccctagagcagaagttagaaataacaaaatggccgtttcaaccttgactggccaaaaataactaataaacttttttgttttaagtcaggcaagtgattttctacatttagcagttt

SEQ ID NO: 152905 - DNA, 120 bp, Artificial Sequence
  ENSG00000105879_27 (sequence is synthesized)
gaaagtccagtgttaatgcaatatttctagtgagaaatgcttgttattaaaagcatgggagtgatagtgtgaaatggtggtgagtgcttctatcatattactgtaggtacttggactggt

SEQ ID NO: 152906 - DNA, 120 bp, Artificial Sequence
  ENSG00000105879_28 (sequence is synthesized)
gcaaacttgattccttttcatccccctgtttaggagctattaaaatattactgttaaaaatccaaaccattctttgttccatgtaataagaaaatagccaaaatcactttagagcttctc

SEQ ID NO: 152907 - DNA, 120 bp, Artificial Sequence
  ENSG00000105879_29 (sequence is synthesized)
aactatttatgaagagctatcctgcttttattgaaagtcactagagttgaatgtggtaagaaaccacttagcctatgtattggacgagaaaatcagtatcatgataaaattttgaattaa

SEQ ID NO: 152908 - DNA, 120 bp, Artificial Sequence
  ENSG00000105879_30 (sequence is synthesized)
gagaacccttgtagagtttttaaaaaatgatttattttcaattaggtttaagaaatctatgttatgcagggaggcatatcagatgaatgttgtagcagacaaaagttttaaatcgtgtta

SEQ ID NO: 152909 - DNA, 120 bp, Artificial Sequence
  ENSG00000105879_31 (sequence is synthesized)
gacttgaattcatcaattgtttgaatgagggtgggtgggtagaaggataacaaaattactgttagtgtttctttccttacggaaaaagatgtgaatcccagccttatttcagggaagcct

SEQ ID NO: 152910 - DNA, 120 bp, Artificial Sequence
  ENSG00000105879_32 (sequence is synthesized)
ttgaagctatgatggacataagtctaaattaaatgtatgtatgtttcattatattgctcttaagactactgaggtggcagtttaattcttaaaaacaataaaatggaagcataaatacta

SEQ ID NO: 152911 - DNA, 120 bp, Artificial Sequence
  ENSG00000105879_33 (sequence is synthesized)
ttcgcgcgctcgctctttctgcctccgcccgaactatgcctgagtccctcacaggagttggatagtagaggcgagagaaggaagtctttgcaggccaaaattgggacaacctgcttggac

SEQ ID NO: 152912 - DNA, 120 bp, Artificial Sequence
  ENSG00000105879_34 (sequence is synthesized)
tctttctgttttatctgattgcttcggacagtctgtgtgatcttatagctacctctttttgtcttacatattctattcattcttcaaccttcttgtttgacttctcattgtagcacattg

SEQ ID NO: 152913 - DNA, 120 bp, Artificial Sequence
  ENSG00000105879_35 (sequence is synthesized)
tatttttattttcctttataaatattttttgatttggttccttttgttgttgaaagcaatactgcccattgttcagtaatctcaacagtattgcagaaagcataacattaaaagtaaaat

SEQ ID NO: 152914 - DNA, 120 bp, Artificial Sequence
  ENSG00000105879_36 (sequence is synthesized)
ggtttatcattgtttaatgactaagtttgcaaaattttaaataagtatgaaataactaagggaagtattggaatactatgaatttaatatgattatcttgacaaattgttgaattcttat

SEQ ID NO: 152915 - DNA, 120 bp, Artificial Sequence
  ENSG00000105879_37 (sequence is synthesized)
ggcgatgtaggccttcgggaagggagagccccggctctgttttatttagcccagctgctctggcctacgttatggagactggcgggtagattgcggtctccgagtcgcggaatcctcttt

SEQ ID NO: 152916 - DNA, 120 bp, Artificial Sequence
  ENSG00000105879_38 (sequence is synthesized)
acgctgggagtggacgggcgagaatgggttggagacttcctgctgtctcagtcagctttgggcgggtgctgcagtggtcaccccctgtcgtctctccgatcctttatggactagaggggt

SEQ ID NO: 152917 - DNA, 120 bp, Artificial Sequence
  ENSG00000105879_39 (sequence is synthesized)
gaaagaagggagtctgatagagtttttggaatcaaactcggagcagtttttctacctaaaccaaaagcatgccccgcgcttcggctgaggtccttactcatcatttgagggtatttacaa

SEQ ID NO: 152918 - DNA, 120 bp, Artificial Sequence
  ENSG00000105880_0 (sequence is synthesized)
agcagtcagccggccggagacagagacttcacgactcccagtctcctcctcgccgcggccgccgcctcctccttctctcctcctcctcttcctcctcctccctcgctcccacagccatgt

SEQ ID NO: 152919 - DNA, 120 bp, Artificial Sequence
  ENSG00000105880_1 (sequence is synthesized)
ctgcttagaccagagcagccccacagccaactagggcagctgccgccgccacaacagcaaggacagccgctgccgccgcccgtgagcgatgacaggagtgtttgacagaagggtccccag

SEQ ID NO: 152920 - DNA, 120 bp, Artificial Sequence
  ENSG00000105880_2 (sequence is synthesized)
catccgatccggcgacttccaagctccgttccagacgtccgcagctatgcaccatccgtctcaggaatcgccaactttgcccgagtcttcagctaccgattctgactactacagccctac

SEQ ID NO: 152921 - DNA, 120 bp, Artificial Sequence
  ENSG00000105880_3 (sequence is synthesized)
ggggggagccccgcacggctactgctctcctacctcggcttcctatggcaaagctctcaacccctaccagtatcagtatcacggcgtgaacggctccgccgggagctacccagccaaagc

SEQ ID NO: 152922 - DNA, 120 bp, Artificial Sequence
  ENSG00000105880_4 (sequence is synthesized)
ttatgccgactatagctacgctagctcctaccaccagtacggcggcgcctacaaccgcgtcccaagcgccaccaaccagccagagaaagaagtgaccgagcccgaggtgagaatggtgaa

SEQ ID NO: 152923 - DNA, 120 bp, Artificial Sequence
  ENSG00000105880_5 (sequence is synthesized)
tgccggaacgcgccgagctggccgcctcgctgggattgacacaaacacaggtgaaaatctggtttcagaacaaaagatccaagatcaagaagatcatgaaaaacggggagatgcccccgg

SEQ ID NO: 152924 - DNA, 120 bp, Artificial Sequence
  ENSG00000105880_6 (sequence is synthesized)
agcacagtcccagctccagcgacccaatggcgtgtaactcgccgcagtctccagcggtgtgggagccccagggctcgtcccgctcgctcagccaccaccctcatgcccaccctccgacct

SEQ ID NO: 152925 - DNA, 120 bp, Artificial Sequence
  ENSG00000105880_7 (sequence is synthesized)
ccaaccagtccccagcgtccagctacctggagaactctgcatcctggtacacaagtgcagccagctcaatcaattcccacctgccgccgccgggctccttacagcacccgctggcgctgg

SEQ ID NO: 152926 - DNA, 120 bp, Artificial Sequence
  ENSG00000105880_8 (sequence is synthesized)
cctccgggacactctattagatgggctgctctctcttactctcttttttgggactactgtgttttgctgttctagaaaatcataaagaaaggaattcatatggggaagttcggaaaactg

SEQ ID NO: 152927 - DNA, 120 bp, Artificial Sequence
  ENSG00000105880_9 (sequence is synthesized)
aaaaagattcatgtgtaaagcttttttttgcatgtaagttattgcatttcaaaagaccccccctttttttacagaggactttttttgcgcaactgtggacactttcaatggtgccttgaa

SEQ ID NO: 152928 - DNA, 120 bp, Artificial Sequence
  ENSG00000105880_10 (sequence is synthesized)
atctatgacctcaacttttcaaaagacttttttcaatgttattttagccatgtaaataagtgtagatagaggaattaaactgtatattctggataaataaaattatttcgaccatgaaaa

SEQ ID NO: 152929 - DNA, 120 bp, Artificial Sequence
  ENSG00000105880_11 (sequence is synthesized)
ctggccgcctcgctgggattgacacaaacacaggtaaatacggcgctgccatgcactagacctgcctgagctgcacgtctggttgggtcgcgcggttcagtctcgatgggactggagctg

SEQ ID NO: 152930 - DNA, 120 bp, Artificial Sequence
  ENSG00000105880_12 (sequence is synthesized)
ttttgacagtacccgtgagaaactaacagacccaaagacatcagcccctatgctttaactcggtgagtcaggccttgagacggtggggatggtattcatcagcggtctggagatacctcc

SEQ ID NO: 152931 - DNA, 120 bp, Artificial Sequence
  ENSG00000105887_0 (sequence is synthesized)
aagtgtaaaggttcctgcctctcctcggccaggcggaacctctctgctgggcccggtggccgcaaaagaactttctttctcccgcccgaacggtcgccgcggccaactgcctcgcccgcc

SEQ ID NO: 152932 - DNA, 120 bp, Artificial Sequence
  ENSG00000105887_1 (sequence is synthesized)
tggcagcctaaccctccttctcttcttctcctctccggcttcgcgcggccctgcctccctctcgcccggcggcatccgcttgctgctgccaccgcctcctcatcttctgcccggccaacc

SEQ ID NO: 152933 - DNA, 120 bp, Artificial Sequence
  ENSG00000105887_2 (sequence is synthesized)
ggcctgccccgctgcagtgatgtgcgacaaggagttcatgtgggccctgaaaaacggagacttggatgaggtgaaagactatgtggccaagggagaagatgtcaaccggacactagaagg

SEQ ID NO: 152934 - DNA, 120 bp, Artificial Sequence
  ENSG00000105887_3 (sequence is synthesized)
tggaaggaaacctcttcattatgcagcagattgtgggcagcttgaaatcctggaatttctgctgctgaaaggagcagatattaatgctccagataaacatcatattactcctcttctgtc

SEQ ID NO: 152935 - DNA, 120 bp, Artificial Sequence
  ENSG00000105887_4 (sequence is synthesized)
tgctgtctatgagggtcatgtttcctgtgtgaaattgcttctgtcaaagggtgctgataagactgtgaaaggcccagatggactgaccgcctttgaagccactgacaaccaggcaatcaa

SEQ ID NO: 152936 - DNA, 120 bp, Artificial Sequence
  ENSG00000105887_5 (sequence is synthesized)
agctcttctccagtgatggatggatggactgataactccggaagaatgactctcctgtggcctcacactgctgcctgtctgtctgtcactctctatctgccagcttcttcagctaaatac

SEQ ID NO: 152937 - DNA, 120 bp, Artificial Sequence
  ENSG00000105887_6 (sequence is synthesized)
tttaagaggggtgaggggagagagaaattcataacaaatccgactaccagaaaaaaaaaattgttttggaggaggggcaaaaggaaccatgatcaggcttttactgggattcctgatcaa

SEQ ID NO: 152938 - DNA, 120 bp, Artificial Sequence
  ENSG00000105887_7 (sequence is synthesized)
gtaagcctcttccctttctaataaaatatacaccttatacccaagggagagcaaagacaaaatacaccagtaacatttgaccttttcagctccctagctaatttattagattgtgttgaa

SEQ ID NO: 152939 - DNA, 120 bp, Artificial Sequence
  ENSG00000105887_8 (sequence is synthesized)
ggtctgattctacaaaggccaactctacatatttggtagccctaactgtctgagcagtagtggctgctgtgatgtaaacttagggtgctgagataagcaattagctctagccttctgcct

SEQ ID NO: 152940 - DNA, 120 bp, Artificial Sequence
  ENSG00000105887_9 (sequence is synthesized)
taagaatgcactctactggggatttcctggcatagttaagagcgctgcctataaggttggtgaccaaatctttcctcggtgactttaagctttatgtgaaagcttagttaaggtgaggag

SEQ ID NO: 152941 - DNA, 120 bp, Artificial Sequence
  ENSG00000105887_10 (sequence is synthesized)
gggcacactcctaaattgctggatgactgaactttggattttctctcccctttcacatggatttcatgtctctttagataaaactgactagttttatttataaaatcttaagttttggaa

SEQ ID NO: 152942 - DNA, 120 bp, Artificial Sequence
  ENSG00000105887_11 (sequence is synthesized)
gtctaaaggagaaaccattccagtatgcatatttttttctcctctagattcatacatttatatagcattgaaacactttcaaactcctgctggtagtaaaaggggatttaaaaatagaat

SEQ ID NO: 152943 - DNA, 120 bp, Artificial Sequence
  ENSG00000105887_12 (sequence is synthesized)
catagccataagcctgttagtatcatatgaagagagaacagttatcttagtacctatggattttctttatttgctgtttgaatggattgaccttggttatgtgttgagaattaaggaaca

SEQ ID NO: 152944 - DNA, 120 bp, Artificial Sequence
  ENSG00000105887_13 (sequence is synthesized)
ttctttgaaatgcctctctcagacccatcttggaggctgattacttactgcaccaaagctatcactggggtgagatttactgtttggacaaatttagccccatcccttcaaaaatacact

SEQ ID NO: 152945 - DNA, 120 bp, Artificial Sequence
  ENSG00000105887_14 (sequence is synthesized)
tgtaaccaggtttcccagagttgttgataggcttctgctgaacatatgccaacccacctgcataatatatttttgttgcttttataaatcatgcattacataaagtgtgacaacttcaaa

SEQ ID NO: 152946 - DNA, 120 bp, Artificial Sequence
  ENSG00000105887_15 (sequence is synthesized)
atttacacatatttccaaatatttatttcatgagcagtacagctaattaaaatatataagcttaaattttatatcttacatttaaaatattaagattcctttgacttgccatccatataa

SEQ ID NO: 152947 - DNA, 120 bp, Artificial Sequence
  ENSG00000105887_16 (sequence is synthesized)
gcttgctaaaaatattaagaccaagtcatgcaataattgaatgtacctcaaatttttaggggagggtgggttagggactgatactcagattgtggataataattgaattggtttttaaag

SEQ ID NO: 152948 - DNA, 120 bp, Artificial Sequence
  ENSG00000105887_17 (sequence is synthesized)
gcaacatagcattctacagcagggttaatctattatcaagaacagtcaccctggttaataacaagttttactgatcagttgctggttggttggttggttggcatgtgggtgtgtgggtgt

SEQ ID NO: 152949 - DNA, 120 bp, Artificial Sequence
  ENSG00000105887_18 (sequence is synthesized)
ataggtgtgtgtgggtgtgtgtgtgtatttttccccatgagtcctttttttaatcctgtggctttttcacttacaactagcctaaccctgtaattttcctacatccaagaaaacaatcac

SEQ ID NO: 152950 - DNA, 120 bp, Artificial Sequence
  ENSG00000105887_19 (sequence is synthesized)
aaagtagtggtttaaatactttgttgtatttggctaattttgctgtcttaatgcagcctattaagagttgggttaaaaatcagtaatcagtactttattacatcactgaactaaaatatg

SEQ ID NO: 152951 - DNA, 120 bp, Artificial Sequence
  ENSG00000105887_20 (sequence is synthesized)
gagacatcctcattgaaaatggagggcactctatcagtctataactatcaacgtagtgcaacagggtgttttgatacctttgttttcacctcttgacataatgctatttaaaggcttgaa

SEQ ID NO: 152952 - DNA, 120 bp, Artificial Sequence
  ENSG00000105887_21 (sequence is synthesized)
tttttccctttatataattttcacctttactttcaaagtgttttgttgtagttggctattgcagagagtgcattgtcctatcattcctaaacctggtctgctttctacattcatggtatg

SEQ ID NO: 152953 - DNA, 120 bp, Artificial Sequence
  ENSG00000105887_22 (sequence is synthesized)
gaaaccatgtgattctttgtacagtttatcctgatgttgcttgtaatgcagtagaggctatttcgccttcgcttttctttctcgacctttttgtaaaccctataattatgaagcgattgc

SEQ ID NO: 152954 - DNA, 120 bp, Artificial Sequence
  ENSG00000105887_23 (sequence is synthesized)
ttgagaaaataacatataaacatagaatagaatagactgaccaagatggttcacagtttctttttttaactaggttatttataatgtatttctgaaccacttggcagacaaattcacaac

SEQ ID NO: 152955 - DNA, 120 bp, Artificial Sequence
  ENSG00000105887_24 (sequence is synthesized)
acttaatgttcatattttgagtaaaggaagctaaaaccatgtttgctttctggtactacatgcattagcgaaaggttaagtaagttttgttctccactgaagtaatacttaacatctcag

SEQ ID NO: 152956 - DNA, 120 bp, Artificial Sequence
  ENSG00000105887_25 (sequence is synthesized)
aaaaaattttgcatgttctgtagttttgtattaaatcagtcatttcatatgcactatatcaagtacaaacaggtagtttacctgtttatagtagtgtactaacaaagtctcccttgcagc

SEQ ID NO: 152957 - DNA, 120 bp, Artificial Sequence
  ENSG00000105887_26 (sequence is synthesized)
ttcagactgttatctataggcttatcgttcaaatacagcacttgaatatcccaagtagttcttctacgcatagctcacctttctaaacccagttaagcatggaagagaggtagtaggtag

SEQ ID NO: 152958 - DNA, 120 bp, Artificial Sequence
  ENSG00000105887_27 (sequence is synthesized)
gtgcagtgtgtggaagctgcaaacaagtaggccttttattcattgatatcttttcccaagtactggattttaaatctgtatgtatctgtttgatttttttttctaatatttcagttgagc

SEQ ID NO: 152959 - DNA, 120 bp, Artificial Sequence
  ENSG00000105887_28 (sequence is synthesized)
tgctgttttcttccatgcaatattgtatactcaattgtgtatagaagaagctggtgagagtgccctcctacataaataagcaattgcagtgttttgcatgcaaaatataaaaaatttaaa

SEQ ID NO: 152960 - DNA, 120 bp, Artificial Sequence
  ENSG00000105887_29 (sequence is synthesized)
ttgtcctgattctattttgtaaatggagaaacaatcatatctttctaagcggtaatggaggaagactagtgctttgtgcattttgatatatttgagttcattttttccacaatgtcatac

SEQ ID NO: 152961 - DNA, 120 bp, Artificial Sequence
  ENSG00000105887_30 (sequence is synthesized)
ttttgacgcagttgggtttctcataagtatcctagttcatgtacatccgaatgctaaataatactgtgttttaagttttgtgttgcaagaacaaatggaataaacttgaattgtgctaca

SEQ ID NO: 152962 - DNA, 120 bp, Artificial Sequence
  ENSG00000105889_0 (sequence is synthesized)
ggggccggcacctcccggcagcagcggcagctgagactcacggtcaagctacggcgaggagtgggtggctgaagccatactattttatagaattaatggaaagcagaaaagacatcacaa

SEQ ID NO: 152963 - DNA, 120 bp, Artificial Sequence
  ENSG00000105889_1 (sequence is synthesized)
accaagaagaaatttggaaaatgaagcctaggagaaatttagaagacaacgattatttgcaaacagcccatgctgatgaatttgactgcccttcagaacttcagcacgcacaggaactct

SEQ ID NO: 152964 - DNA, 120 bp, Artificial Sequence
  ENSG00000105889_2 (sequence is synthesized)
ttccacagtggcacttgccaattaaaatagctgctgttatggcatctctgacttttctttacactcttctgagggaagtaattcaccctttagcaacttcccatcaacaatatttttata

SEQ ID NO: 152965 - DNA, 120 bp, Artificial Sequence
  ENSG00000105889_3 (sequence is synthesized)
aaattccaatcctggtcatcaacaaagtcttgccaatggtttccatcactctcttggcattggtttacctaccaggtgtgatagcagcaattgtccaagttcataatggaaccaagtata

SEQ ID NO: 152966 - DNA, 120 bp, Artificial Sequence
  ENSG00000105889_4 (sequence is synthesized)
cgatcctacagatacaagttgctaaactgggcatatcaacaggtccaacaaaataaagaagatgcctggattgagcatgatgtttggagaatggagatttatgtgtctctgggaattgtg

SEQ ID NO: 152967 - DNA, 120 bp, Artificial Sequence
  ENSG00000105889_5 (sequence is synthesized)
ggactggcaatactggctctgttggctgtgacatctattccatctgtgagtgactctttgacatggagagaatttcactatattcaggtacatggtaggatcaacttcctgaccttgtga

SEQ ID NO: 152968 - DNA, 120 bp, Artificial Sequence
  ENSG00000105889_6 (sequence is synthesized)
cagatcctgccagtaacatgagaggaaatgagaacgaggctttggagcacagcattggattgctcatgcagaacaccacccagtgccctttccctctgccacaatgaacagccatgctgc

SEQ ID NO: 152969 - DNA, 120 bp, Artificial Sequence
  ENSG00000105889_7 (sequence is synthesized)
aggtgacggctgctctgtcaacatggatccggcagggcagatgagtggatcccccagcggactcatgagagagcaaacaaaaagtccatatgtgttgtgctaatccactgagattgtgtt

SEQ ID NO: 152970 - DNA, 120 bp, Artificial Sequence
  ENSG00000105889_8 (sequence is synthesized)
ggttgttacggagcctaacctagcctatcccgacacgaggatcagacatgataatcaaatgtgtttataaagtgttggatggaaatattctgacaacattaaaagactctacccaaggaa

SEQ ID NO: 152971 - DNA, 120 bp, Artificial Sequence
  ENSG00000105889_9 (sequence is synthesized)
aatatgcccccgggtaatcttatacacgctgaagtctgagaaccactgctctagagaaatgcacaaacgttccttagtggagattaaacaaaaggcgaggggttggagggcgcgaaacgg

SEQ ID NO: 152972 - DNA, 120 bp, Artificial Sequence
  ENSG00000105889_10 (sequence is synthesized)
acctcaagggcagggcagacggcatttgagaggaaactgggagaggccggagtgcgacttggggagtcttagcctccaaggacgttcccgaaccctgcggacgcggggcgccagcaggtg

SEQ ID NO: 152973 - DNA, 120 bp, Artificial Sequence
  ENSG00000105889_11 (sequence is synthesized)
tagaagacaacgattatttgcatgaggacacgggagagaccagcatgctaaaaagacctgtgcttttgcatttgcagcaaacagcccatgctgatgaatttgactgcccttcagaacttc

SEQ ID NO: 152974 - DNA, 120 bp, Artificial Sequence
  ENSG00000105889_12 (sequence is synthesized)
ggagagaatttcactatattcaggctatactgactggaagcctggtagctttgtgcaactttcaggccactaaactggccaagacacaactggtaggcacaccaaatttctggcaggagc

SEQ ID NO: 152975 - DNA, 120 bp, Artificial Sequence
  ENSG00000105889_13 (sequence is synthesized)
agcagtgtggaatccatttcccaccaccttccaagactaggagttatatatacttcattttatcagcagccagcccttcaaagggaaatgttagctctcacatgtttcagcttcatctag

SEQ ID NO: 152976 - DNA, 120 bp, Artificial Sequence
  ENSG00000105889_14 (sequence is synthesized)
aaaatctcaataaaaaagacaagttattgctgatcatctttcagatttaagcatgcatgaaagtgagaaccttgttccctgctcatacatcttacatacttgcagaccagaccatggtag

SEQ ID NO: 152977 - DNA, 120 bp, Artificial Sequence
  ENSG00000105889_15 (sequence is synthesized)
tcgcgctctggaggctcaggcgccgcgtggggccggcacctcccggcagcagcggcagctgagactcacggtcaagctacggcgaggagtggggttgaccagaagactgggcacatcatt

SEQ ID NO: 152978 - DNA, 120 bp, Artificial Sequence
  ENSG00000105889_16 (sequence is synthesized)
aattcagcacaactcaccattcccactggaaacatactggcaattcacatcttccaaacaaggaccaacctcttactccaaaagaaaaatggtggctgaagccatactattttatagaat

SEQ ID NO: 152979 - DNA, 120 bp, Artificial Sequence
  ENSG00000105889_17 (sequence is synthesized)
cagatgaatgcatgatatctcttggtaaaatggcccagaagaaacacaggaaggagttatgaaaagataacacccgtaagtgtgactacacattttgtgatccagtcatcatttctgtgg

SEQ ID NO: 152980 - DNA, 120 bp, Artificial Sequence
  ENSG00000105889_18 (sequence is synthesized)
gacccaggtggctggggtggcagctgatcatgtcaggaggactcctctgcacaacatcacaagcacaggagagaatgctaaacttgattgggagctcacagaagacccctggaacccaga

SEQ ID NO: 152981 - DNA, 120 bp, Artificial Sequence
  ENSG00000105889_19 (sequence is synthesized)
gcaataagggaaatttggacccagagatacattcagagagaagatgatgtgaaggcacaggaaggatgccctgtgaacatcaggaccaatgcctgcaaacctaggagagaggtctacaac

SEQ ID NO: 152982 - DNA, 120 bp, Artificial Sequence
  ENSG00000105889_20 (sequence is synthesized)
agatccttccctcgcagccctcagatcgaactgaccctgcaagtaccttgattttggacttctggcttccagaactgagcaacaataactttctgttgaagccgtccagttttgaagcca

SEQ ID NO: 152983 - DNA, 120 bp, Artificial Sequence
  ENSG00000105889_21 (sequence is synthesized)
cccagtctgtggtgcttggttaccgcggccctagcaaacttgcctgaggctttccaaatcacagccccgttttgtcacaggggaagaattctaagaagttctttatttggccaagtgagg

SEQ ID NO: 152984 - DNA, 120 bp, Artificial Sequence
  ENSG00000105889_22 (sequence is synthesized)
gatagaagaataatgagcatttccctcatcacagctctgacaactgcctcagccacacacggcttaggagattggccacttcctccgccttcagcttgcagggggcttcagtaataaatg

SEQ ID NO: 152985 - DNA, 120 bp, Artificial Sequence
  ENSG00000105889_23 (sequence is synthesized)
cattgacacaggcctcatttgggggtctcctcaggcacttcccccttggctcctgaggccagaacccgaccctgctgtgtctctcttccatgcatctttttgccatctctgctctctgga

SEQ ID NO: 152986 - DNA, 120 bp, Artificial Sequence
  ENSG00000105889_24 (sequence is synthesized)
atctgcaacaatatgagggtgctcaggactttgatgttgctactgacctcagcatgccccagtccaaacctaccttcttcctcctgggcccacatccgcttctgctccccacttccccag

SEQ ID NO: 152987 - DNA, 120 bp, Artificial Sequence
  ENSG00000105889_25 (sequence is synthesized)
tgtcttcattcttttcatcacatgctgaccaaagactcatctttaggcactctctatgtcccttctgctacatccactctgttgccacatctcctgaattcttctgtctgatttcttctc

SEQ ID NO: 152988 - DNA, 120 bp, Artificial Sequence
  ENSG00000105889_26 (sequence is synthesized)
actcttcctttccaccctggatcagtccattggggccgcatgtcaggacaccggatgacactgtttggacacctggaaggatcgggtaaaagatacagagaagtctaaggagggataggg

SEQ ID NO: 152989 - DNA, 120 bp, Artificial Sequence
  ENSG00000105889_27 (sequence is synthesized)
tgagtctgggatgggctgtggattaggcaccaggtaaagctaattggggggtgggtgaggaatggggtgagggtatctattgcatctattttatggtaataaaaggaagttgaaagttca

SEQ ID NO: 152990 - DNA, 120 bp, Artificial Sequence
  ENSG00000105889_28 (sequence is synthesized)
aggccgagcacacccagccccctcagacccaggcatttctgcgtcctctggtttggagggaacccagggggctgaggtgaagcaagccaggactgtttctctgactcttctggaagacga

SEQ ID NO: 152991 - DNA, 120 bp, Artificial Sequence
  ENSG00000105889_29 (sequence is synthesized)
cccgctgctcgggccgcctcatcactgcgggccacgagtgcccttcttcattccagacatggtgctttgaacaatttgacttggaggcaagattgcgatatagaaaatgggccactgtgg

SEQ ID NO: 152992 - DNA, 120 bp, Artificial Sequence
  ENSG00000105889_30 (sequence is synthesized)
aggagataaggaaatctgacacagctagaaagcaatggaaaacactaagagttgcatcagatgttgaagaggaactgatattatgggataaaaaatgattctttaagggagataactggt

SEQ ID NO: 152993 - DNA, 120 bp, Artificial Sequence
  ENSG00000105889_31 (sequence is synthesized)
catttaaaggatgtttccctatagagcagtttctagattgactctgtggaacagtctacaatagatttaatatggttaggattttgcctaattctgattgaaaataaacccgaagaagga

SEQ ID NO: 152994 - DNA, 120 bp, Artificial Sequence
  ENSG00000105889_32 (sequence is synthesized)
gtggagaaggtgggacaaataggtctgggtgaggcctgagagtctgcattttcaataagcatctagatagtgcctgctgtttatggactacactttgaataacaaggacttagaagatga

SEQ ID NO: 152995 - DNA, 120 bp, Artificial Sequence
  ENSG00000105889_33 (sequence is synthesized)
agaacaaagagcttcatatagatcagcaacactctttggtgttcttcctcctgtgttcaagtcagtgattacatatcctttttggacctcagtttccagtcctgccaaataagggactaa

SEQ ID NO: 152996 - DNA, 120 bp, Artificial Sequence
  ENSG00000105889_34 (sequence is synthesized)
ggctggatcatgtttcaagctgtcctgaagagacctctaactctgcagagaagcctcaggaccccaccccctcaccccaagaaaagtgtgaggctagtgtgaggaggaagaggagcagag

SEQ ID NO: 152997 - DNA, 120 bp, Artificial Sequence
  ENSG00000105889_35 (sequence is synthesized)
aagccaatggagaaggaactattctttagaaagatgaatgcatgatatctcttggtaaaatggcccagaagaaacacaggaaggagttatgaaaagataacacccgtaagtgtgactaca

SEQ ID NO: 152998 - DNA, 120 bp, Artificial Sequence
  ENSG00000105889_36 (sequence is synthesized)
cattttgtgatccagtcatcatttctgtaagtctggaattttgtttttgcacgcttctttaaggttgccttttccaccttccatcctgtttccttaaaaacagcaaataacaatctacaa

SEQ ID NO: 152999 - DNA, 120 bp, Artificial Sequence
  ENSG00000105889_37 (sequence is synthesized)
tagaagatcgtcagggaaatagaaaaaaaaatctgaaatctccaagtaggttctactttgtgtggttccaactaaatgaactaaatttgtgtttaaagattgtaagtctacatgtaatgg

SEQ ID NO: 153000 - DNA, 120 bp, Artificial Sequence
  ENSG00000105889_38 (sequence is synthesized)
tgaaagctgaaggttttacactgcacagaaatagtgatttccccccgtggagggcaagaagaccggaataggaggggtgggtgggggaatcaatgtgtaggccaaatatttgaaatttca

SEQ ID NO: 153001 - DNA, 120 bp, Artificial Sequence
  ENSG00000105889_39 (sequence is synthesized)
gaaggaagagtggatgtgttttgatgctattccttttcctctcagcataaatttgcaagcatgtactgtaaatgaattttcatgtcttttcaggatgtttccctatagagcagtttctag

SEQ ID NO: 153002 - DNA, 120 bp, Artificial Sequence
  ENSG00000105889_40 (sequence is synthesized)
agaaaggtttcaacggtgacctgccaacagctcccaaatctacaggtttcacccaatttttgactcatgacctgttgacaacctccgcctggatatgtcatgggtttcctcaaaacccaa

SEQ ID NO: 153003 - DNA, 120 bp, Artificial Sequence
  ENSG00000105889_41 (sequence is synthesized)
catttacaaaactgaacatcctcaaaacatcttccctttctcaccattcctctcagttaacagcatctccatatactccatcacttgggtggaacatatcagagtccacttagctttctt

SEQ ID NO: 153004 - DNA, 120 bp, Artificial Sequence
  ENSG00000105889_42 (sequence is synthesized)
cacaagcctttaatggaggaaatatttattgagtatctaccatgtgccacccactgtgccaaccactgtccatatgatggtgaataaccaagacaagggcttgctctcatggagcttgca

SEQ ID NO: 153005 - DNA, 120 bp, Artificial Sequence
  ENSG00000105889_43 (sequence is synthesized)
gtcttgtggagaaaaagataatagaaagtaaagacatactttactttcaggtagtgagtagtgctgaaaataaagcagtgggagagagagtgatagtggaagctactttagaaaatgtag

SEQ ID NO: 153006 - DNA, 120 bp, Artificial Sequence
  ENSG00000105889_44 (sequence is synthesized)
ccagagagggcctctcagagagaccacttgaatgatgagaagggccgtgaaaagaagggggatgataaaggaaactgcaagtacctgagccctgagacagttaaaaaaaacatctgagag

SEQ ID NO: 153007 - DNA, 120 bp, Artificial Sequence
  ENSG00000105889_45 (sequence is synthesized)
accagtgtctggagtttgggctgagcagagatgaacttggccaaaccacgctggacttgtacaatgtggtaaaaatgatggatttaactgcactttatcttaatatatctcttttatcaa

SEQ ID NO: 153008 - DNA, 120 bp, Artificial Sequence
  ENSG00000105889_46 (sequence is synthesized)
caccttcctttccacgctcccagccgcattgtttatcaagaacctgttacatttcacttgactatttaccttctcaacttttccaactcctcttcctcaggcacctttgctggctcttct

SEQ ID NO: 153009 - DNA, 120 bp, Artificial Sequence
  ENSG00000105889_47 (sequence is synthesized)
ctttctctctttacccgctatctctcagcaggcctcagacttctctcctgtctctcccaagagtgctaccctagaccagcctgcctcagattctgtttcggcctagaagggccaaacatc

SEQ ID NO: 153010 - DNA, 120 bp, Artificial Sequence
  ENSG00000105889_48 (sequence is synthesized)
tggtttgtcatcttccttgggttttagcacattatcacacacacattaggtcttagcacattattagaactcgcaaatcccttatttgatagaagaactgatttcctttttaaccctaat

SEQ ID NO: 153011 - DNA, 120 bp, Artificial Sequence
  ENSG00000105889_49 (sequence is synthesized)
tcctctcccctacccccatttgaatgtgtatcttttcatttggatgtgttcttgtggaatgtccattttatttgtatgcacttattttaaattctgtaaatgatattatagtatcccttc

SEQ ID NO: 153012 - DNA, 120 bp, Artificial Sequence
  ENSG00000105889_50 (sequence is synthesized)
atatagaatatgttggctttaccccataaaaaataacaaatgtttttcaacagcaaagatcttgtacttgttccagttaataatgtgctctcctgttgttttccctattgcttctaatta

SEQ ID NO: 153013 - DNA, 120 bp, Artificial Sequence
  ENSG00000105889_51 (sequence is synthesized)
gccgtcgaggatgtaccgaatttgtttgtcaattcgttctgaagagatgaatgcatgatatctcttggtaaaatggcccagaagaaacacaggaaggagttatgaaaagataacacccgt

SEQ ID NO: 153014 - DNA, 120 bp, Artificial Sequence
  ENSG00000105894_0 (sequence is synthesized)
attctccatttcccttccgttccctccctgtcagggcgtaattgagtcaaaggcaggatcaggttccccgccttccagtccaaaaatcccgccaagagagccccagagcagaggaaaatc

SEQ ID NO: 153015 - DNA, 120 bp, Artificial Sequence
  ENSG00000105894_1 (sequence is synthesized)
caaagtggagagaggggaagaaagagaccagtgagtcatccgtccagaaggcggggagagcagcagcggcccaagcaggagctgcagcgagccgggtacctggactcagcggtagcaacc

SEQ ID NO: 153016 - DNA, 120 bp, Artificial Sequence
  ENSG00000105894_2 (sequence is synthesized)
tcgccccttgcaacaaaggcagactgagcgccagagaggacgtttccaactcaaaaatgcaggctcaacagtaccagcagcagcgtcgaaaatttgcagctgccttcttggcattcattt

SEQ ID NO: 153017 - DNA, 120 bp, Artificial Sequence
  ENSG00000105894_3 (sequence is synthesized)
tcatactggcagctgtggatactgctgaagcagggaagaaagagaaaccagaaaaaaaagtgaagaagtctgactgtggagaatggcagtggagtgtgtgtgtgcccaccagtggagact

SEQ ID NO: 153018 - DNA, 120 bp, Artificial Sequence
  ENSG00000105894_4 (sequence is synthesized)
gtgggctgggcacacgggagggcactcggactggagctgagtgcaagcaaaccatgaagacccagagatgtaagatcccctgcaactggaagaagcaatttggcgcggagtgcaaatacc

SEQ ID NO: 153019 - DNA, 120 bp, Artificial Sequence
  ENSG00000105894_5 (sequence is synthesized)
agttccaggcctggggagaatgtgacctgaacacagccctgaagaccagaactggaagtctgaagcgagccctgcacaatgccgaatgccagaagactgtcaccatctccaagccctgtg

SEQ ID NO: 153020 - DNA, 120 bp, Artificial Sequence
  ENSG00000105894_6 (sequence is synthesized)
agaaaaaggaaggcaagaaacaggagaagatgctggattaaaagatgtcacctgtggaacataaaaaggacatcagcaaacaggatcagttaactattgcatttatatgtaccgtaggct

SEQ ID NO: 153021 - DNA, 120 bp, Artificial Sequence
  ENSG00000105894_7 (sequence is synthesized)
ttgtattcaaaaattatctatagctaagtacacaataagcaaaaacaaaaagaaaagaaaatttttgtagtagcgttttttaaatgtatactatagtaccagtaggggcttataataaag

SEQ ID NO: 153022 - DNA, 120 bp, Artificial Sequence
  ENSG00000105894_8 (sequence is synthesized)
gactgtaatcttatttaggaagttgacttatagtacatgataaatgatagacaattgaggtaagttttttgaaattatgtgacattttacattaaattttttttacattttttgggcagc

SEQ ID NO: 153023 - DNA, 120 bp, Artificial Sequence
  ENSG00000105894_9 (sequence is synthesized)
aatttaaatgttatgactatgtaaactacttctcttgttaggtaatttttttcacctagatttttttcccaattgagaaaaatatatactaaacaaaatagcaataaaacataatcactc

SEQ ID NO: 153024 - DNA, 120 bp, Artificial Sequence
  ENSG00000105894_10 (sequence is synthesized)
tatttgaagaaaatatcttgttttctgccaatagattttttaaaatgtagtcagcaaaatgggggtggggaagcagagcatgtcctagttcaatgttgactttttttttttttaaagaaa

SEQ ID NO: 153025 - DNA, 120 bp, Artificial Sequence
  ENSG00000105894_11 (sequence is synthesized)
agcattaagacataaaattctttcactttggcagaagcatttgttttcttgatgaaattatttttccatctgaggaaaaaaatactaggaaaataaatcaaggtgatgctgaaaaaaaaa

SEQ ID NO: 153026 - DNA, 120 bp, Artificial Sequence
  ENSG00000105926_0 (sequence is synthesized)
ggctggctgcgcgcgcggaggcagcggcgggggcgaccggagctggggcagagtggggagcgagggagggggaggagagagagggaggcggagggcagtgagagacgcatttccagttct

SEQ ID NO: 153027 - DNA, 120 bp, Artificial Sequence
  ENSG00000105926_1 (sequence is synthesized)
caactacgagccacgagtttgcagatggggctgctcggcggcgcctgtggctgagggagagcagcggcggcggggagcgaccgggagcggcggcagcggcggcgcggaggcggctgaggt

SEQ ID NO: 153028 - DNA, 120 bp, Artificial Sequence
  ENSG00000105926_2 (sequence is synthesized)
gcgagccgcaatgcagcaagtcttggaaaaccttacggagctgccctcgtctactggagcagaagaaatagacctaattttcctcaagggaattatggagaatcctattgtaaaatcact

SEQ ID NO: 153029 - DNA, 120 bp, Artificial Sequence
  ENSG00000105926_3 (sequence is synthesized)
tgctaaggctcatgagaggctagaagattccaaactagaagctgtcagtgacaataacttggaattagtcaatgaaattcttgaagacatcactcctctaataaatgtggatgaaaatgt

SEQ ID NO: 153030 - DNA, 120 bp, Artificial Sequence
  ENSG00000105926_4 (sequence is synthesized)
ggcagaattggttggtatactcaaagaacctcacttccagtcactgttggaggcccatgatattgtggcatcaaagtgttatgattcacctccatcaagcccagaaatgaataattcttc

SEQ ID NO: 153031 - DNA, 120 bp, Artificial Sequence
  ENSG00000105926_5 (sequence is synthesized)
tatcaataatcagttattaccagtagatgccattcgtattcttggtattcacaaaagagctggggaaccactgggtgtgacatttagggttgaaaataatgatctggtaattgcccgaat

SEQ ID NO: 153032 - DNA, 120 bp, Artificial Sequence
  ENSG00000105926_6 (sequence is synthesized)
cctccatgggggaatgatagatcgacaaggtctacttcatgtgggagatataattaaagaagtcaatggccatgaggttggaaataatccaaaggaattacaagaattactgaaaaatat

SEQ ID NO: 153033 - DNA, 120 bp, Artificial Sequence
  ENSG00000105926_7 (sequence is synthesized)
tagtggaagtgtcaccctaaaaatcttaccaagttatagagataccattactcctcaacaggtatttgtgaagtgtcattttgattataatccatacaatgacaacctaataccttgcaa

SEQ ID NO: 153034 - DNA, 120 bp, Artificial Sequence
  ENSG00000105926_8 (sequence is synthesized)
agaagcaggattgaagttttccaaaggagagattcttcagattgtaaatagagaagatccaaattggtggcaggctagccatgtaaaagagggaggaagcgctggtctcattccaagcca

SEQ ID NO: 153035 - DNA, 120 bp, Artificial Sequence
  ENSG00000105926_9 (sequence is synthesized)
gttcctggaagagaagagaaaggcatttgttagaagagactgggacaattcaggacctttttgtggaactataagtagcaaaaaaaagaaaaagatgatgtatctcacaaccagaaatgc

SEQ ID NO: 153036 - DNA, 120 bp, Artificial Sequence
  ENSG00000105926_10 (sequence is synthesized)
agaatttgatcgtcatgaaatccagatatatgaggaggtagccaaaatgcctcccttccagagaaaaacattagtattgataggagctcaaggtgtaggccgaagaagcttgaaaaacag

SEQ ID NO: 153037 - DNA, 120 bp, Artificial Sequence
  ENSG00000105926_11 (sequence is synthesized)
gttcatagtattgaatcccactagatttggaactacggtgccatttacttcacggaaaccaagggaagatgaaaaagatggccaggcatataagtttgtgtcacgatctgagatggaagc

SEQ ID NO: 153038 - DNA, 120 bp, Artificial Sequence
  ENSG00000105926_12 (sequence is synthesized)
agatattaaagctggaaagtatttggaacatggggaatatgaaggaaatctctatggaaccaaaattgattctattcttgaggttgtccaaactggacggacttgcattctggatgtcaa

SEQ ID NO: 153039 - DNA, 120 bp, Artificial Sequence
  ENSG00000105926_13 (sequence is synthesized)
cccacaagcactgaaagtattgaggacatcagagtttatgccctatgtggtatttattgcggctccggagctagagacgttacgtgccatgcacaaggctgtggtggatgcaggaatcac

SEQ ID NO: 153040 - DNA, 120 bp, Artificial Sequence
  ENSG00000105926_14 (sequence is synthesized)
taccaagcttctgaccgactctgacttgaagaaaacagtggatgaaagtgcacggattcagagagcatacaaccactattttgatttgatcatcataaatgataatctagacaaagcctt

SEQ ID NO: 153041 - DNA, 120 bp, Artificial Sequence
  ENSG00000105926_15 (sequence is synthesized)
tgaaaaactgcaaactgccatagagaaactgagaatggaaccacagtgggtcccaatcagctgggtttactgatgattcagtaaggttaacaatgaaaattaaactcttaaaaagtgact

SEQ ID NO: 153042 - DNA, 120 bp, Artificial Sequence
  ENSG00000105926_16 (sequence is synthesized)
gcaacaaataaaccttctactgagaaaatacatcacagatagaagattatctgctaagtccaggcatttttatggtgtagattgaaataatagtacacttctgaatttttatataaaatg

SEQ ID NO: 153043 - DNA, 120 bp, Artificial Sequence
  ENSG00000105926_17 (sequence is synthesized)
tggttggaaggtgtactaatatataatttatcttaatttttctaactttgtatggataatctttctattcatatcacataaagaaatgcgttgaagcattttgtatatgttttgatttag

SEQ ID NO: 153044 - DNA, 120 bp, Artificial Sequence
  ENSG00000105926_18 (sequence is synthesized)
tacccttgcctttttcatcaaaggaattttcaaatcattcactctaacattggtctcatattttcactgtgataatgaatattacttgaaatagttttgtaaagctgtcatttagttcag

SEQ ID NO: 153045 - DNA, 120 bp, Artificial Sequence
  ENSG00000105926_19 (sequence is synthesized)
tattcaaatagtgaagggttagtcttaatagaagaaaatatagttattgaccttccttcttataaatttcttacaaaagcagaattttaagtcagtgttatagctagtctactaccatct

SEQ ID NO: 153046 - DNA, 120 bp, Artificial Sequence
  ENSG00000105926_20 (sequence is synthesized)
aaatctgacatcaaaagtctgatcagtttacgtattttcattatttcggagatgtatggctatccattctaatttatacagctatattagttttgtctcttcatttctatctttactgaa

SEQ ID NO: 153047 - DNA, 120 bp, Artificial Sequence
  ENSG00000105926_21 (sequence is synthesized)
aaattgaagagcaataccttgcactctcttttgaggttattctttttatttgttgcagtgatatgatgctaactaatttaacatgtacacagtaagctctggggctggaagcaaggtcat

SEQ ID NO: 153048 - DNA, 120 bp, Artificial Sequence
  ENSG00000105926_22 (sequence is synthesized)
gcagactgagagagtgccttatcctgtaaaaccttacagcaaaatgacacttgaagaaagtttattttcacatgtaaaattttgactgacaaaaggaacctactactttaaacaatggtt

SEQ ID NO: 153049 - DNA, 120 bp, Artificial Sequence
  ENSG00000105926_23 (sequence is synthesized)
ttattagaacatggtcagcaaatgtatcatgcctctgcaaattttagtgatgtttagagatgcctctaagtttgcagttggaggtttttgtgcttttagaaatgtgatgtgatccttagg

SEQ ID NO: 153050 - DNA, 120 bp, Artificial Sequence
  ENSG00000105926_24 (sequence is synthesized)
gtacctgttttgtctgttgtgttgagaaccaaacccattgaacaacttaaaaaattgggaaataattgtcagctattttgtatacatacacacaaaatatatacattatataatatgtat

SEQ ID NO: 153051 - DNA, 74 bp, Artificial Sequence
  ENSG00000105926_25 (sequence is synthesized)
tatatataaaatgttttgtatattttttacatatctgttaaaaaatgtactttgtgctggagtacagtggcgcg

SEQ ID NO: 153052 - DNA, 90 bp, Artificial Sequence
  ENSG00000105926_26 (sequence is synthesized)
gtggcgcgatctcagcccgctctcgtgcctcagcctcccaagtaattgagattacagttgggtgccaccatgtccggctaatttttgtat

SEQ ID NO: 153053 - DNA, 120 bp, Artificial Sequence
  ENSG00000105926_27 (sequence is synthesized)
ctgcacctagccaagaagtgtactttttgtttaatgattaccgaaagaagttctcctttagaagcattgacttatacaaattcccacattcacctcagttaatatcttcctttaggattc

SEQ ID NO: 153054 - DNA, 120 bp, Artificial Sequence
  ENSG00000105926_28 (sequence is synthesized)
ttggataatagaaattcttcctaaaacatactcagagatgcagctcattattaaattaaggtaaccacattctgtattgttgctagcttttcatgtaaacattattcacactttaaagga

SEQ ID NO: 153055 - DNA, 120 bp, Artificial Sequence
  ENSG00000105926_29 (sequence is synthesized)
ttaggtgtttaaatattgatggtcatctttgtctggtgttaggtgccagacacctggctgctgaatttgttttttccctcaccaaagttgtcatttggaacgccagctgggaggactttg

SEQ ID NO: 153056 - DNA, 120 bp, Artificial Sequence
  ENSG00000105926_30 (sequence is synthesized)
aaggaaaagaaaatatatgacaataggcagtattgacacattgtttaaaatctttttcacaataaaacaaaacacccaagttgtcatattgttaaagttggaaatctataggtttttctt

SEQ ID NO: 153057 - DNA, 120 bp, Artificial Sequence
  ENSG00000105926_31 (sequence is synthesized)
tttttttttttctttttttgattctagatttcatggccagaacacaaattcacgtttcttgtcctaggacagggaattggtgacaaaatggattatactattttaataacagtggaaact

SEQ ID NO: 153058 - DNA, 120 bp, Artificial Sequence
  ENSG00000105926_32 (sequence is synthesized)
aactttcaaactacatgtgtttacaccaaattcttggcttctcaaagcaacatgaattaaagcacagtatcaaggtgatgccctatgacaatgtttcaacacacacttgaaattttaaga

SEQ ID NO: 153059 - DNA, 120 bp, Artificial Sequence
  ENSG00000105926_33 (sequence is synthesized)
gaaatttcagttcttcactcaggaaatgtgctgtattctctaatgtactttcatgctgcagcatggagcctctttaaacagctttgggataattatagcagcacaagaagtttatctgca

SEQ ID NO: 153060 - DNA, 120 bp, Artificial Sequence
  ENSG00000105926_34 (sequence is synthesized)
acttagaaaatatacttaaaggaattatttctattataaatggtattcatgattgactacttaattaatgcacattagatttctcctaatataaaatgaaatgatgcagtttagttcatt

SEQ ID NO: 153061 - DNA, 120 bp, Artificial Sequence
  ENSG00000105926_35 (sequence is synthesized)
tgaaatgatgcagtttagttcatttcagtctagatgcccgtactaacaagaatacagttagataagttcattgtatctcaatgaagaatcattgaacttgaaacccaagtcccaaatgaa

SEQ ID NO: 153062 - DNA, 120 bp, Artificial Sequence
  ENSG00000105926_36 (sequence is synthesized)
tctgcaggaatgagcagtgctctgcgggggcaaacagccccagaggtcccagggttcttcctaggtaatgagagtatagctgtgatcaaggaaatgtgaacttctcttttgggaagatct

SEQ ID NO: 153063 - DNA, 120 bp, Artificial Sequence
  ENSG00000105926_37 (sequence is synthesized)
gcgataattagctttatggaagcgaaaatggtttagagtggtgttgagcaattgttaagagttgaaatagacacacacatgcatgtgcttttgggaaacatgatgtgccaacgtattaat

SEQ ID NO: 153064 - DNA, 120 bp, Artificial Sequence
  ENSG00000105926_38 (sequence is synthesized)
gtgcctgagggctccttgtggataggtcagtgtccacatttcagcactcagggcatgactgtacacaacctaagactatatatatattttttcattttcaaatgtacaaatacccataga

SEQ ID NO: 153065 - DNA, 120 bp, Artificial Sequence
  ENSG00000105926_39 (sequence is synthesized)
ggtgatgtgcctggataagtcatttaaccatagcttagtgaaataaatgtgatggccctaaaaagtagaattttcactttcattacagccatgcctttattatgcagtctccatttctgt

SEQ ID NO: 153066 - DNA, 120 bp, Artificial Sequence
  ENSG00000105926_40 (sequence is synthesized)
gtgatatttggtaatatcacatgtcaaatacatcaggactttgtttattttggctaactctaactatacaattgctgaacatagctttctgaaatagaaattataagagaaacccagtat

SEQ ID NO: 153067 - DNA, 120 bp, Artificial Sequence
  ENSG00000105926_41 (sequence is synthesized)
gcctacagcattagtagcctaaatcctagattctagaatccaataaatttatagtagttcttaagaagtttcctttaaagcaacaaatagattattaaggcaaatttagataataaccca

SEQ ID NO: 153068 - DNA, 120 bp, Artificial Sequence
  ENSG00000105926_42 (sequence is synthesized)
agttagcaataaaaccatgtgacattatagattatgtccagatactaactgctttgaccataatatcccaatgacaataaaaaatgatccttggtttaaaaattattaaatggtacttat

SEQ ID NO: 153069 - DNA, 120 bp, Artificial Sequence
  ENSG00000105926_43 (sequence is synthesized)
ttttatgtataacaagtgtcatgatcccagtgactggagttgattttcaaggtggatagccatagagttaggtaaaattattttgaattggcaaactaaagataacaattttgaaaattg

SEQ ID NO: 153070 - DNA, 120 bp, Artificial Sequence
  ENSG00000105926_44 (sequence is synthesized)
ctcaaaataataatctacttaaattttacttttgtaacttctgaaacagtactccattatccagaaatcacaggctagagagccaataattttgtagtaatgaaccttaactaaacatga

SEQ ID NO: 153071 - DNA, 120 bp, Artificial Sequence
  ENSG00000105926_45 (sequence is synthesized)
gtaatgaaccttaactaaacatgaaaaaggcaatcctgaagttttatgtacatagatagcagttcattttttaaatgttcgagttgccatatattatgtatgtgtgtgtgtgtgtgtata

SEQ ID NO: 153072 - DNA, 120 bp, Artificial Sequence
  ENSG00000105926_46 (sequence is synthesized)
tatacagctatgtgtataatatgtaaaattctcccaaaatgtatgaatataaaactgaatgtattcattcatgtaattataactagcattctaaaatttttaattactcccatttctttg

SEQ ID NO: 153073 - DNA, 120 bp, Artificial Sequence
  ENSG00000105926_47 (sequence is synthesized)
tttctttgacattctgaaactttttttagattgttttaaaacgctctggttccaccttgaagctgataatctttctgaaaaatatatgagaaactcagaaagtagtcattattataataa

SEQ ID NO: 153074 - DNA, 120 bp, Artificial Sequence
  ENSG00000105926_48 (sequence is synthesized)
atttaattttcttagggaaaaagggcagggttctggatggaaacccctttggaaattcttatttaaacttttgaatgaatctttaatatgattcaggctgagattatgatacctgccctt

SEQ ID NO: 153075 - DNA, 120 bp, Artificial Sequence
  ENSG00000105926_49 (sequence is synthesized)
gtcttatttcaagaggtttgctgtgagaattcatgtaataacatctgtaatgtatttggaatttttgggagaaattcattcttttaaataatgggattattgtatatagtacaaatgaat

SEQ ID NO: 153076 - DNA, 120 bp, Artificial Sequence
  ENSG00000105926_50 (sequence is synthesized)
actcacaaaatttaagaatacatttgactaataattgagcatcttgtcagtttttatgcaagcatatattgtatacctgaggaagatgacagttctataatttttttaaggtaaggttat

SEQ ID NO: 153077 - DNA, 120 bp, Artificial Sequence
  ENSG00000105926_51 (sequence is synthesized)
ttttaaattgcatttttgttctaacgttttgcaatttatattctttttaaaatatttcccataattcatcatgctagcttctgtgttcttggaatagtttttgaaaaatgcagagattcg

SEQ ID NO: 153078 - DNA, 120 bp, Artificial Sequence
  ENSG00000105926_52 (sequence is synthesized)
aacatgagtccttaatatactaaacagtgaaagaatgatgatatctcatttctaaagtaagcatggttcacaccactttggcaatacactgcagtactttttaaaaaatattctctagtg

SEQ ID NO: 153079 - DNA, 120 bp, Artificial Sequence
  ENSG00000105926_53 (sequence is synthesized)
ataaaagtaaagacagggtactggccaagatcctaattctgacttctgactgtgtgatcttcgatgaaatttatatttccctttatcattactattctacttgttaagtaaggctaagtt

SEQ ID NO: 153080 - DNA, 120 bp, Artificial Sequence
  ENSG00000105926_54 (sequence is synthesized)
aatatttgtcttcgccttaaattctgatttgtaatttgtaactctgatgtggtagctgtgatatggtgaactgaaaaatccttattaggctactttatctgttctcttttagttatttta

SEQ ID NO: 153081 - DNA, 120 bp, Artificial Sequence
  ENSG00000105926_55 (sequence is synthesized)
aagtgtacctgtttctgaagtaatgtagtgaatggtgaatacttttcaggaattcttccagttttaaaatagccccaaagatacagtttcagctggtggaaggtctgttctgctctctta

SEQ ID NO: 153082 - DNA, 120 bp, Artificial Sequence
  ENSG00000105926_56 (sequence is synthesized)
gtcctaatcagaaagtcccttttatcttataatcccatactaaatccaaacccttagcaaatccttgctgccaaccagaccactcacaaatcaaacaaaatgtaagcaagcaatccagta

SEQ ID NO: 153083 - DNA, 120 bp, Artificial Sequence
  ENSG00000105926_57 (sequence is synthesized)
ctcggttacaccagaagactctgatctttgcccccgaaaactgtcctactttatccttatacctgaaatcactgcatacctgaaatcactgcagccctactgttttacccataccattaa

SEQ ID NO: 153084 - DNA, 120 bp, Artificial Sequence
  ENSG00000105926_58 (sequence is synthesized)
tttaaaaaggcatctatttctttatagaaagaaacattcacagtgaggtcttagtttgtgaacctcaaaatccagatattaatccactttagttattactttgtaattgcttctcagtca

SEQ ID NO: 153085 - DNA, 120 bp, Artificial Sequence
  ENSG00000105926_59 (sequence is synthesized)
ttggctgataatgcaatggtgtgataaatttgacttatctccacatacaaaagtcgatcagaagggatagttctcttcctttttttcccctcctactggctcttactgttttctaatctc

SEQ ID NO: 153086 - DNA, 120 bp, Artificial Sequence
  ENSG00000105926_60 (sequence is synthesized)
cagtgtaaatggaatgaacacatctatagttaaggtaaatgccaccaatcagaagattgagtgatttactgcttgtaaagcaactgtctttgaatcttatgaaataggtggtgttgctac

SEQ ID NO: 153087 - DNA, 120 bp, Artificial Sequence
  ENSG00000105926_61 (sequence is synthesized)
cacagaagccaaaaaggtcttaaaattggaaatagatgtctttattgtacttcagccaacagcaagccaggggaaggaacatacataaatatgacaggtcatatatgaaatttggctctc

SEQ ID NO: 153088 - DNA, 120 bp, Artificial Sequence
  ENSG00000105926_62 (sequence is synthesized)
ctcctatcaaagtagcctaggagcttggaggaagcctaattaactaaaacaggaaaaaagcatactcatctgatgtaaaaactcatcagctgtaaattaccaacattaaaccagaagtca

SEQ ID NO: 153089 - DNA, 120 bp, Artificial Sequence
  ENSG00000105926_63 (sequence is synthesized)
ttaccagttaaaatgtgtggttttcatcttattcttaaataggagaggtggacagtagtgtaagtaacattgctttaaagacataaagcttgtcctggtaaacatggtctaaatgagaaa

SEQ ID NO: 153090 - DNA, 120 bp, Artificial Sequence
  ENSG00000105926_64 (sequence is synthesized)
tgcctccatcttttcaggtagaaccagatttcaggcatagctcagctacatctgtatttgaaatacaataaaaatatttcttatgtctctgtattctcttttaaaaagaactgctgactg

SEQ ID NO: 153091 - DNA, 120 bp, Artificial Sequence
  ENSG00000105926_65 (sequence is synthesized)
gctcctgtctcttcagtaacactgatttttttttaaagaagtgatatgttggactctgttgtagaagaatgagcactagtattcagcaacaagtgcaatttctccatgttatgttgagct

SEQ ID NO: 153092 - DNA, 120 bp, Artificial Sequence
  ENSG00000105926_66 (sequence is synthesized)
ctgttggagcctatggtgagtatttgatgtgaaaaccttgctgtgggaattttttattcttccttttccccccacgccagttcgttttggtaagtcttttatttgaacacaagacgcatg

SEQ ID NO: 153093 - DNA, 120 bp, Artificial Sequence
  ENSG00000105926_67 (sequence is synthesized)
cttttttaaacctctagtttttgaagtaactgtagaagagaatctttaaaaaaaaaaatggagggcagaatgcttgttagcaatctgaaaatcaaagctgaacaagctgcttaaagtttc

SEQ ID NO: 153094 - DNA, 120 bp, Artificial Sequence
  ENSG00000105926_68 (sequence is synthesized)
tgattaagaagtttaaaaagaaaaattaattgctactgctttccaggtaattgtattattagtttctgtataaaagaaacattattgctgttgtataaataaaattttcctgtggtacaa

SEQ ID NO: 153095 - DNA, 120 bp, Artificial Sequence
  ENSG00000105926_69 (sequence is synthesized)
gcgagccggactaaatcattttgctactttaaaaaaatcacgaaagtacattatttgaagtttggagaagaaagggatttggtaacaaaggacagccatttccattttaagcagctaaac

SEQ ID NO: 153096 - DNA, 120 bp, Artificial Sequence
  ENSG00000105926_70 (sequence is synthesized)
gggagtcgcggtggagcctgaatggagagccggcctgggggcggcgttgctgtgactgacacctccggggtctgtcccgagagggggtgattccgccggctcccggttctctcccgagct

SEQ ID NO: 153097 - DNA, 120 bp, Artificial Sequence
  ENSG00000105926_71 (sequence is synthesized)
cggagttggtaggggaggaggctttctccaactaccgccgctacttccgaggtacgagactccagttgtttggccaaagtggctgtgggccgagcacaggctgccgcgggggcgttcgct

SEQ ID NO: 153098 - DNA, 120 bp, Artificial Sequence
  ENSG00000105926_72 (sequence is synthesized)
tgaagtactaaatacattgtcagttacaattaaatcagagtggtttgacaaggattttttaaattcagtggcaagtgatacaactatagtatttttaattgtgctatgtgttttaggtat

SEQ ID NO: 153099 - DNA, 120 bp, Artificial Sequence
  ENSG00000105926_73 (sequence is synthesized)
tagactgtgtacctacttttcatgctcatgagaggctagaagattccaaactagaagctgtcagtgacaataacttggaattagtcaatgaaattcttgaagacatcactcctctaataa

SEQ ID NO: 153100 - DNA, 120 bp, Artificial Sequence
  ENSG00000105926_74 (sequence is synthesized)
ttcaggacctttttgtggaactataagtagcaaaaaaaagaaaaagatgatgtatctcacaaccagaaatgcagttgcagaggatgacagaaataaaaaacagctctatgaatcagaaat

SEQ ID NO: 153101 - DNA, 120 bp, Artificial Sequence
  ENSG00000105928_0 (sequence is synthesized)
agatactactccaggcacgggcattaggggctcccacaggctggacaggccttggactttcctggttgaaccgtgaggccgcggtgtcagtccacactccactgtgggtggcgggttcgg

SEQ ID NO: 153102 - DNA, 120 bp, Artificial Sequence
  ENSG00000105928_1 (sequence is synthesized)
ccccgcgaggaggcgccgctctcaaaccccacggtcccgcgcagcgaagaggcgaggcggccgcggaaggcaggcgcagcccactcttcccgagaggccccgacatctcccggataatct

SEQ ID NO: 153103 - DNA, 120 bp, Artificial Sequence
  ENSG00000105928_2 (sequence is synthesized)
ggagctttcaaaatgtttgccaaagcaaccaggaattttcttagagaagttgatgctgatggtgacctgattgcagtatcaaatctgaatgactctgataagttacagcttctaagtctg

SEQ ID NO: 153104 - DNA, 120 bp, Artificial Sequence
  ENSG00000105928_3 (sequence is synthesized)
gtgacaaaaaagaagagattctggtgctggcagagacccaagtaccagtttttatccctcacccttggcgatgtactcatagaagaccaatttccgagtccagtggtcgtggagtcggac

SEQ ID NO: 153105 - DNA, 120 bp, Artificial Sequence
  ENSG00000105928_4 (sequence is synthesized)
tttgtgaaatacgagggcaagtttgcaaaccacgtgagtggaaccctggagactgcactggggaaggtcaagctgaacctggggggcagcagccgcgtagagagccagtcttcatttgga

SEQ ID NO: 153106 - DNA, 120 bp, Artificial Sequence
  ENSG00000105928_5 (sequence is synthesized)
accctgaggaagcaggaggtggatttgcagcagctcatcagagactctgccgagagaacaataaatctgagaaaccctgtgctccagcaggtgctggaaggaaggaatgaggtcctgtgc

SEQ ID NO: 153107 - DNA, 120 bp, Artificial Sequence
  ENSG00000105928_6 (sequence is synthesized)
gttttgacacagaagatcacgacgatgcagaagtgtgtgatctctgagcacatgcaggtcgaggagaagtgtggtggcatcgtgggcatccagaccaagacggtgcaggtgtcagcgacg

SEQ ID NO: 153108 - DNA, 120 bp, Artificial Sequence
  ENSG00000105928_7 (sequence is synthesized)
gaggatgggaatgtcaccaaggactccaacgtggtgctggagatcccagctgccaccaccattgcctacggtgtcattgagttatacgtgaaactggacggccagttcgagttctgcctt

SEQ ID NO: 153109 - DNA, 120 bp, Artificial Sequence
  ENSG00000105928_8 (sequence is synthesized)
ctccgagggaagcaaggtggcttcgagaacaagaagagaattgactctgtctacctggaccccctggtctttcgagagtttgcattcatagacatgccagatgctgcgcatgggatatct

SEQ ID NO: 153110 - DNA, 120 bp, Artificial Sequence
  ENSG00000105928_9 (sequence is synthesized)
tcccaggatggaccattaagtgttttaaagcaagcgaccctgctcctggagaggaatttccatccatttgcggagctgcctgagccacaacagacagctttgagtgacatcttccaggcg

SEQ ID NO: 153111 - DNA, 120 bp, Artificial Sequence
  ENSG00000105928_10 (sequence is synthesized)
tgaactactcatggtcctggaaccagtgtgcgatgacctggtcagcggcctctcgcccacagtggcggtgctgggggagctgaagccccggcagcagcaggaccttgtggccttcctgca

SEQ ID NO: 153112 - DNA, 120 bp, Artificial Sequence
  ENSG00000105928_11 (sequence is synthesized)
gctggtggggtgcagcttacagggtgggtgtccgggccccgaggatgcaggcagcaagcagctgtttatgacagcctacttcttggtcagtgccctcgcagaaatgccagatagcgcagc

SEQ ID NO: 153113 - DNA, 120 bp, Artificial Sequence
  ENSG00000105928_12 (sequence is synthesized)
agctctgctgggcacttgctgcaaactccagatcattcccacactgtgccacttgcttcgtgctctgtctgatgatggagtatctgatcttgaagacccaaccttgactcccctgaaaga

SEQ ID NO: 153114 - DNA, 120 bp, Artificial Sequence
  ENSG00000105928_13 (sequence is synthesized)
tacagaaaggtttgggattgtgcagcgcttgtttgcctcagctgacattagtctggagagactgaagtcatctgtgaaagctgtcattctgaaggactctaaagtcttcccactgcttct

SEQ ID NO: 153115 - DNA, 120 bp, Artificial Sequence
  ENSG00000105928_14 (sequence is synthesized)
ttgtataaccctgaatggactctgtgctttaggcagagaacattcatgatgtcatatgtgaactagaagtacgtgttactggccaaggctatttttcagaactgttaaaggtcatatgca

SEQ ID NO: 153116 - DNA, 120 bp, Artificial Sequence
  ENSG00000105928_15 (sequence is synthesized)
cgttaaaagttgaccaatgaaatgaatttacagaacagtttaagaagtggtgacattttgcatgatgaatgacctgacttttagccaccaggtactctttaaacagttttccttatcaga

SEQ ID NO: 153117 - DNA, 120 bp, Artificial Sequence
  ENSG00000105928_16 (sequence is synthesized)
ggccctcctgtgctggtgacccagcatctgagttaggttccagcatgtaaagagctgggagggcggagaattcttagcatacattcagacgttttttctgcacaataataagtccatctg

SEQ ID NO: 153118 - DNA, 120 bp, Artificial Sequence
  ENSG00000105928_17 (sequence is synthesized)
tcacttgcattccactttttgttacatagaaagagtctgaccctttaatccaaaaggtctttttacattgtgaatgctgtgggaaggcaatttctctgcacacaagaggctacgttttgg

SEQ ID NO: 153119 - DNA, 120 bp, Artificial Sequence
  ENSG00000105928_18 (sequence is synthesized)
aagtgatgtatgttatttgatgactgaaaatgaactgtaaatgctcctagagtatattcctctgctgaacaaaattaaacttcaaaaaaatctaacagtaacacacccctgcttgggacc

SEQ ID NO: 153120 - DNA, 120 bp, Artificial Sequence
  ENSG00000105928_19 (sequence is synthesized)
ctagctatatgcattttatgtgaccttgccatgcttcagtgaacatactaattctatgtctagcacatgttgatttcctatgtattctgggtattctattaaaggaaactttgaactatg

SEQ ID NO: 153121 - DNA, 120 bp, Artificial Sequence
  ENSG00000105928_20 (sequence is synthesized)
tccttaactcttagttgtacaaatggtgagagccacacaagctgccaaccctccagccacccagattctgtgtcctccctttcttaaggctgaggctttataaacctgattttgactaca

SEQ ID NO: 153122 - DNA, 120 bp, Artificial Sequence
  ENSG00000105928_21 (sequence is synthesized)
aactactcatggtcctggaaccagtggtgagccctgagacatctcaaggcagtgttttcactggggttttctggaacaggggaggaggcaggatggaattgtgttaaaggttcccccgcc

SEQ ID NO: 153123 - DNA, 120 bp, Artificial Sequence
  ENSG00000105928_22 (sequence is synthesized)
tccttttctccctacagctgtctcttttctgactcttgggtcctgcgttttctaagtgcagacaggtagctggcatcgggtggagggaggtgttaatttcctagggctgcctcaacaaac

SEQ ID NO: 153124 - DNA, 120 bp, Artificial Sequence
  ENSG00000105928_23 (sequence is synthesized)
ctgagggcttaaaaaaccaggaatttattctctcatagttttggagcccaaaagtccaaagtctaggtgtctgcagggccacacttcccccagaggatctaggagagaattctgctgcct

SEQ ID NO: 153125 - DNA, 120 bp, Artificial Sequence
  ENSG00000105928_24 (sequence is synthesized)
tgtctccttccagctgcggatggctcctagtgttcctggctcatggcagcagcactccagcctctgctctgtctccatgtgggcttcccctctgtgtgtgtgtgtgtgtcttctccttta

SEQ ID NO: 153126 - DNA, 120 bp, Artificial Sequence
  ENSG00000105928_25 (sequence is synthesized)
ctgtctgttataaagacaccatcattggatttagggcccaccccaatctaggatgatctcattttgatttccttactttaattacatctgcaaagactaaggtcacgttcttaggttcca

SEQ ID NO: 153127 - DNA, 120 bp, Artificial Sequence
  ENSG00000105928_26 (sequence is synthesized)
ggtaacatatgttggtgggccactactcagactactgcaagggggtcgtgtggtggaatctataaagtcagcctgttccatttagaacagagaaataaataggcttttgcactgttgtgt

SEQ ID NO: 153128 - DNA, 120 bp, Artificial Sequence
  ENSG00000105928_27 (sequence is synthesized)
tttgcagcagaaggatatcctggggaggtcaagttccttaactcttagttgtacaaatggtgagagccacacaagctgccaaccctccagccacccagattctgtgtcctccctttctta

SEQ ID NO: 153129 - DNA, 120 bp, Artificial Sequence
  ENSG00000105928_28 (sequence is synthesized)
tttgttggaagtggctgggcttttggtcaagcaacataatgtgtgtagggatcgaattttatggggaagatggatgggtcttctgctccactgagttacgtctaagatgtgccatcaagg

SEQ ID NO: 153130 - DNA, 120 bp, Artificial Sequence
  ENSG00000105928_29 (sequence is synthesized)
gtgggaggctgatgggaaaccccccttcggtctcgagtctgtgcctttccatccagcacaagcctccctactctcccggagggcccttctccctcctcccccagggaaggccacagtggg

SEQ ID NO: 153131 - DNA, 120 bp, Artificial Sequence
  ENSG00000105928_30 (sequence is synthesized)
tgcccctttgcctacaaaagcaagcatctccctgacaggctgtggttcactccggagtcccagcagagctgagtggcagcaactttcatttgccaactgctctcctccagcatttcagtc

SEQ ID NO: 153132 - DNA, 120 bp, Artificial Sequence
  ENSG00000105928_31 (sequence is synthesized)
cttctgatctttgcaaacttgttattccccaccctgcgtgctcctgtctggggcaagggggctgtggagagcattcaaccatccaatgtactaggctgggaggcagagctgtggctgggc

SEQ ID NO: 153133 - DNA, 120 bp, Artificial Sequence
  ENSG00000105928_32 (sequence is synthesized)
ccagatgcacagcttctgcactggtcctgaaatggcctcccaggggagcagccatccagttactgtggaacaatctctgccacctctgtacccctcccatccggaactcgccatgccaca

SEQ ID NO: 153134 - DNA, 120 bp, Artificial Sequence
  ENSG00000105928_33 (sequence is synthesized)
gtgcctgtcacgaggaagctgggcttcctattccctctcagaaaagccagttgtggcaaaccagtccccacagcttcccttcatggtgacactagtcaggacacatagtttctgatacat

SEQ ID NO: 153135 - DNA, 120 bp, Artificial Sequence
  ENSG00000105928_34 (sequence is synthesized)
tcagggttcctccctagcaccacacagaaacagacccagtaatcttcagtttttaaagaattaatctgagagaatgcctgtcccaactctatgtgctgataaatatatgctctgtcttgt

SEQ ID NO: 153136 - DNA, 120 bp, Artificial Sequence
  ENSG00000105928_35 (sequence is synthesized)
tccaactcatggataaatatagttttgactggtaaactgaaacaggacataagacagagccctgcggaactccactagagactttctcccaatgttaacatccgggtattagagtctttc

SEQ ID NO: 153137 - DNA, 120 bp, Artificial Sequence
  ENSG00000105928_36 (sequence is synthesized)
agaacaggcattctgtcaggagctaatacacaggccagagttctccgacttgtgagaggtcttttcttcatataccccattacttattgcagcatttctatcaatagcctggatcagtga

SEQ ID NO: 153138 - DNA, 120 bp, Artificial Sequence
  ENSG00000105928_37 (sequence is synthesized)
tgccaagtaggtaacacagggccagcatcatgaaagcaccacagtccccttctacttgagcctagacacagcatcaaattctctgcaactggctgggtgtggtggcccccatctgtaatc

SEQ ID NO: 153139 - DNA, 120 bp, Artificial Sequence
  ENSG00000105928_38 (sequence is synthesized)
gagcccaggagttcaagaccagcctagggaacatggcaagacctcatctgtacaaaaaataaattagccaggcatggtggtgtgtacctctgtagtcccagctacttgaggggctgtgga

SEQ ID NO: 153140 - DNA, 120 bp, Artificial Sequence
  ENSG00000105928_39 (sequence is synthesized)
tacctctgtagtcccagctacttgaggggctgtggaggattgcttgagcccaggaattcaaggatgcagtgaactatggacgccattgcagtccagcttggaaaaaaaaaaaaatctctg

SEQ ID NO: 153141 - DNA, 120 bp, Artificial Sequence
  ENSG00000105928_40 (sequence is synthesized)
caagcttgcacgcaggcagcaggccacgcagttgacacataatgtgagactgacttgctgtttctgaattggaaactcagaggtagtgaaatctttaggtgcagctggcaatgtctaaat

SEQ ID NO: 153142 - DNA, 120 bp, Artificial Sequence
  ENSG00000105928_41 (sequence is synthesized)
ttttcaaccaatcctgccctttatttttctgaactgtgatctcatttatatgtcagtcccagtggaggccaggctggcatacagcccttccatttgtgctcttgctaatcctccgccctt

SEQ ID NO: 153143 - DNA, 120 bp, Artificial Sequence
  ENSG00000105928_42 (sequence is synthesized)
ctgagttcattttttttcctcttaatataatcttctctccttaaaaactgaggaaagtgctggaatagaaaatggggtcttcgtaggtcctcacaccagtttctggctaatagctgtttt

SEQ ID NO: 153144 - DNA, 120 bp, Artificial Sequence
  ENSG00000105928_43 (sequence is synthesized)
cagcacttcagtcccacatgtgacctgtctcctgggaagcttcctccactattttgtaaccttaagcaactccaaaggtctcaactccttggactctatttgtaaaatagaattggtaca

SEQ ID NO: 153145 - DNA, 120 bp, Artificial Sequence
  ENSG00000105928_44 (sequence is synthesized)
tggaagagcaatcaaaataatttcagttcaagaaacatttaacaagcttatactatgttttaggcagtgctaggtaaatatcaagtcttggccctccaggaaatcagagtcaagtagtaa

SEQ ID NO: 153146 - DNA, 120 bp, Artificial Sequence
  ENSG00000105928_45 (sequence is synthesized)
aattagtgggtaagctcggtaatgcagatgctgttctttcatttctgtgcccctagcacctagtgtaccacactcaagatagcagctaaatgggtaatatgggactcaggtatttccaag

SEQ ID NO: 153147 - DNA, 120 bp, Artificial Sequence
  ENSG00000105928_46 (sequence is synthesized)
ctggatacgctaggccacataggctttccgtcttcaccttcctgctttggggtaagagactacttgagaaactgtggatcttctcttcagacaaatgcatacacatttgaataccacatt

SEQ ID NO: 153148 - DNA, 120 bp, Artificial Sequence
  ENSG00000105928_47 (sequence is synthesized)
aggttctctgaaagaagcatccccctggctgctgccccacccccttaatagcctacactctctcttgagaacgagccatgtactctctgggtcacacctcaacaacacactgtctttaca

SEQ ID NO: 153149 - DNA, 120 bp, Artificial Sequence
  ENSG00000105928_48 (sequence is synthesized)
aataaggctgctaacacatggcaggaacaactgagttcctaaccagtccctcggctacctgattcagcacgtgactcattcttttttgccttttcagctcaaagcttgtacccccaaggg

SEQ ID NO: 153150 - DNA, 120 bp, Artificial Sequence
  ENSG00000105928_49 (sequence is synthesized)
actatggtccttttaagaactgtatctgtgttttccctgggaggtgtttaatatccactttgaataacactgatctggcattcccttccctggggcttggcaagggcccttctggtgcag

SEQ ID NO: 153151 - DNA, 120 bp, Artificial Sequence
  ENSG00000105928_50 (sequence is synthesized)
cccctagcctggcacagctctgctccaactttctgctgttgctgctcctggcctcaggccacgctgcactgataaagctacactgcattttcctccccaaaatgattggtgatggggtag

SEQ ID NO: 153152 - DNA, 120 bp, Artificial Sequence
  ENSG00000105928_51 (sequence is synthesized)
agccctttatagtttacacagtattctgacatatgcaaaaacaaaacaactatggtaaatgaggaaactgaggctgagagaggtgtacctgaggctgcagcctgaatgtgtggagggtct

SEQ ID NO: 153153 - DNA, 120 bp, Artificial Sequence
  ENSG00000105928_52 (sequence is synthesized)
caaacatcactcttctgtcaccagatggcagggtctgcttttccatgctgtttcctttccttcccccagagtctgggcagttctttccatttggtaaattgaatgtcaaggagtatcctc

SEQ ID NO: 153154 - DNA, 120 bp, Artificial Sequence
  ENSG00000105928_53 (sequence is synthesized)
tgtggaatgcagagctggcagctgggttcctacatctgttttctacaaggtctttgctgcccatttagcaccattcattcactaactcagcaactgctgagtacctcccctgcctggctg

SEQ ID NO: 153155 - DNA, 120 bp, Artificial Sequence
  ENSG00000105928_54 (sequence is synthesized)
gcgggaaagtactaaaatataagttaggtgccatccaggggctggctctgttcccatggacttgtttttttggactgtgactgtgatttttctctcctgcagaaatgccagatagcgcag

SEQ ID NO: 153156 - DNA, 120 bp, Artificial Sequence
  ENSG00000105928_55 (sequence is synthesized)
ttaaaagggcgacagatttgatctctgccgatcaataaacatgtattgaatgcgcttgtgttgaaatttcatgaggagcacattctttagtctggaattgcttgactgttcttagcctga

SEQ ID NO: 153157 - DNA, 120 bp, Artificial Sequence
  ENSG00000105928_56 (sequence is synthesized)
gtggggggagacttgggaagcactttcaaaggatgttacttcaggcaaatatgtacttccttcaatcacatgatttataaaatgcgaacggtaaaaatgctctgtcctgcatttttgaat

SEQ ID NO: 153158 - DNA, 120 bp, Artificial Sequence
  ENSG00000105928_57 (sequence is synthesized)
attaactttagaagccaggaagtcatgacccccctctggctctataattttctgatgaaaaaaagaagaaagcaagtgagaggcgcgtaaaaaagttcaaaaataagagctcttttcagt

SEQ ID NO: 153159 - DNA, 120 bp, Artificial Sequence
  ENSG00000105928_58 (sequence is synthesized)
ctttgaagtcttgaagaaaaccccacatttattcattgtttggctttcggtaaatacatcttaccacactatagctcatcattattcttacctcatatttattcaacattcaaaaaataa

SEQ ID NO: 153160 - DNA, 120 bp, Artificial Sequence
  ENSG00000105928_59 (sequence is synthesized)
ttcaacatgaaacttagaagggacaaacattaaaccacattggagcagggaaccgattccgggatgactccaggtctttgtgttatatcgacctgccagaacaataaatctgagaaaccc

SEQ ID NO: 153161 - DNA, 120 bp, Artificial Sequence
  ENSG00000105928_60 (sequence is synthesized)
actgctttccagaggactcgactgctttggagactgtgggaagagagggaaagaggtctgaagagcgtagattgtcccaagacatggtccctggacacatgggctgcactgggggagggg

SEQ ID NO: 153162 - DNA, 120 bp, Artificial Sequence
  ENSG00000105928_61 (sequence is synthesized)
tgtggtgagggatgcctggagcaatgccaccctctcctccaacattggtgtggggcaaagttccaccagcacagtagagggctgggctgtgtcctctgggcatcaacctgggctctgcat

SEQ ID NO: 153163 - DNA, 120 bp, Artificial Sequence
  ENSG00000105928_62 (sequence is synthesized)
cagacacactgggcatcaaccccggtgccatgatgtcctatgaggtctcaggcaagttgctgaatcttgctgagtcttggcttccctgtctctggaaggtgaagggcatttcttcacagg

SEQ ID NO: 153164 - DNA, 120 bp, Artificial Sequence
  ENSG00000105928_63 (sequence is synthesized)
gctgtgtgaagatttaatgagatgaggcctatgaagcgcctggcacagtggtcatttattaattcctccacctttgctattaatagcattatcatcattattgttaccccacctcctctc

SEQ ID NO: 153165 - DNA, 120 bp, Artificial Sequence
  ENSG00000105928_64 (sequence is synthesized)
cacaagtatgaagccagacatgctgaacttgactttcctctgctgatcacgagtgtgttcaaagcgcagagacccagctgttgtcacggaagaaaatccaagctttggttcagcgtgtct

SEQ ID NO: 153166 - DNA, 120 bp, Artificial Sequence
  ENSG00000105928_65 (sequence is synthesized)
gctcactttaggtgttcacagccccttccctcctcatgttcccaatgagaagaggttgtgttcactcatgaaagctgtgtgaccgctccttagggacatgagtgggtaaatgtaacataa

SEQ ID NO: 153167 - DNA, 120 bp, Artificial Sequence
  ENSG00000105928_66 (sequence is synthesized)
cagctgtttatgacagcctacttcttggtcagtgccctcgcagaaatgccagatagcgcagcagctctgctgggcacttgctgcaaactccagatcattcccacactgtgccacttggta

SEQ ID NO: 153168 - DNA, 120 bp, Artificial Sequence
  ENSG00000105928_67 (sequence is synthesized)
cttaccacaacagctcttcaagacacattaagtaagtattgttattaaccccacttttatacacatcccaccccatgggaagactgagacccagaggaaaatgatttgtccaaataactt

SEQ ID NO: 153169 - DNA, 120 bp, Artificial Sequence
  ENSG00000105928_68 (sequence is synthesized)
gttagcaggtccaggacttcatccttgtctttcgactccaactcttatacttttcccattgtttggagagaattttggccaaggtttggtgttacattacaataaaggggcctgacacca

SEQ ID NO: 153170 - DNA, 120 bp, Artificial Sequence
  ENSG00000105929_0 (sequence is synthesized)
ataacgctacctgccgagcaagccgagtggagggaggcaaaggccaggctgaggatcagggtggcccgggtggcagcggggaggcgctgcatgctggaggctgtgctgagtgcccggtgc

SEQ ID NO: 153171 - DNA, 120 bp, Artificial Sequence
  ENSG00000105929_1 (sequence is synthesized)
aggtgagccggtcctgcggagttgtgccgagtgcctgctgcagtctcatttccagttcctccatgacgtggcaagtgaagacaggaatgaaaggaatgtaaagcagcttttctctgaaga

SEQ ID NO: 153172 - DNA, 120 bp, Artificial Sequence
  ENSG00000105929_2 (sequence is synthesized)
gaagaagagagagagacacagccaagaccgaggctgggccaagatggtgtctgtgtttcgaagcgaggagatgtgtttgtcacaactgtttctccaggtggaagctgcatattgctgtgt

SEQ ID NO: 153173 - DNA, 120 bp, Artificial Sequence
  ENSG00000105929_3 (sequence is synthesized)
ggctgagctcggagagctcggattggttcagttcaaagatttaaatatgaatgtgaacagctttcaaaggaaatttgtgaatgaagtcagaaggtgtgaatcactggagagaatcctccg

SEQ ID NO: 153174 - DNA, 120 bp, Artificial Sequence
  ENSG00000105929_4 (sequence is synthesized)
ttttctggaagacgagatgcaaaatgagattgtagttcagttgctcgagaaaagcccactgaccccgctcccacgggaaatgattaccctggagactgttctagaaaaactggaaggaga

SEQ ID NO: 153175 - DNA, 120 bp, Artificial Sequence
  ENSG00000105929_5 (sequence is synthesized)
gttacaggaagccaaccagaaccagcaggccttgaaacaaagcttcctagaactgacagaactgaaatacctcctgaagaaaacccaagacttctttgagacggaaaccaatttagctga

SEQ ID NO: 153176 - DNA, 120 bp, Artificial Sequence
  ENSG00000105929_6 (sequence is synthesized)
tgatttctttactgaggacacttctggcctcctggagttgaaagcagtgcctgcatatatgaccggaaagttggggttcatagccggtgtgatcaacagggagaggatggcttcctttga

SEQ ID NO: 153177 - DNA, 120 bp, Artificial Sequence
  ENSG00000105929_7 (sequence is synthesized)
gcggttactgtggcgaatctgccgaggaaacgtgtacttgaagttcagtgagatggacgcccctctggaggatcctgtgacgaaagaagaaattcagaagaacatattcatcatatttta

SEQ ID NO: 153178 - DNA, 120 bp, Artificial Sequence
  ENSG00000105929_8 (sequence is synthesized)
ccaaggagagcagctcaggcagaaaatcaagaagatctgtgatgggtttcgagccactgtctacccttgcccagagcctgcggtggagcgcagagagatgttggagagcgtcaatgtgag

SEQ ID NO: 153179 - DNA, 120 bp, Artificial Sequence
  ENSG00000105929_9 (sequence is synthesized)
gctggaagatttaatcaccgtcataacacaaacagagtctcaccgccagcgcctgctgcaggaagccgctgccaactggcactcctggctcatcaaggtgcagaagatgaaagctgtcta

SEQ ID NO: 153180 - DNA, 120 bp, Artificial Sequence
  ENSG00000105929_10 (sequence is synthesized)
ccacatcctgaacatgtgcaacatcgacgtcacccagcagtgtgtcatcgccgagatctggttcccggtggcagatgccacacgtatcaagagggcactggagcaaggcatggaactaag

SEQ ID NO: 153181 - DNA, 120 bp, Artificial Sequence
  ENSG00000105929_11 (sequence is synthesized)
tggctcctccatggcccccatcatgaccacagtgcaatctaaaacagcccctcccacatttaacaggaccaataaattcacagctggcttccagaatattgttgatgcctatggtgtcgg

SEQ ID NO: 153182 - DNA, 120 bp, Artificial Sequence
  ENSG00000105929_12 (sequence is synthesized)
cagctaccgggagataaacccagccccctacaccatcatcactttccccttcctgttcgctgtgatgtttggagactgtggtcatggaaccgtgatgctcctggctgcactttggatgat

SEQ ID NO: 153183 - DNA, 120 bp, Artificial Sequence
  ENSG00000105929_13 (sequence is synthesized)
ttgctctcccagaagacagacaatgagatttggaacaccttcttccacgggcgctatctgatcctacttatgggcatcttctccatctacacgggtttgatctacaatgactgcttctcc

SEQ ID NO: 153184 - DNA, 120 bp, Artificial Sequence
  ENSG00000105929_14 (sequence is synthesized)
aagtccttgaacatctttggctcttcttggagtgtccaacccatgttcagaaacggcacatggaatactcatgtaatggaggaaagtctatatctgcagctggacccagccataccagga

SEQ ID NO: 153185 - DNA, 120 bp, Artificial Sequence
  ENSG00000105929_15 (sequence is synthesized)
gtgtattttggaaatccatacccgtttgggattgatccgatttggaacttggcttcaaacaaactcacatttctgaactcgtataaaatgaagatgtcggtgatcctgggaattgtccag

SEQ ID NO: 153186 - DNA, 120 bp, Artificial Sequence
  ENSG00000105929_16 (sequence is synthesized)
atggttttcggtgtcatcctcagccttttcaatcacatatacttcagaagaactctcaacatcattctgcaatttatccctgagatgatttttatcctgtgtctgtttggatacctggtt

SEQ ID NO: 153187 - DNA, 120 bp, Artificial Sequence
  ENSG00000105929_17 (sequence is synthesized)
ttcatgatcattttcaaatggtgctgctttgacgtccatgtatctcagcacgcccccagcatcctcatccacttcatcaacatgtttctgtttaactacagtgactcttccaacgcaccc

SEQ ID NO: 153188 - DNA, 120 bp, Artificial Sequence
  ENSG00000105929_18 (sequence is synthesized)
ctctacaaacatcagcaagaagtccaaagtttctttgtggttatggctttgatttctgtgccgtggatgcttctgattaagccgtttattcttagagccagtcatcggaaatcccagctg

SEQ ID NO: 153189 - DNA, 120 bp, Artificial Sequence
  ENSG00000105929_19 (sequence is synthesized)
caggcatccaggatccaagaagatgccactgagaacattgaaggtgatagctccagcccttctagccgttctggccagaggacttctgcagatacccacggggctctggacgaccatgga

SEQ ID NO: 153190 - DNA, 120 bp, Artificial Sequence
  ENSG00000105929_20 (sequence is synthesized)
gaagagttcaactttggagacgtctttgtccaccaagccatccacaccatcgagtactgcctgggctgcatttcaaacacagcctcctacctgcggctctgggccctcagcctggctcat

SEQ ID NO: 153191 - DNA, 120 bp, Artificial Sequence
  ENSG00000105929_21 (sequence is synthesized)
gcacaactgtctgaagtgctctggactatggtgatgaacagcggccttcagacgcgaggctggggaggaatcgtcggggtttttattatttttgccgtatttgctgtcctgacagtagcc

SEQ ID NO: 153192 - DNA, 120 bp, Artificial Sequence
  ENSG00000105929_22 (sequence is synthesized)
atccttctgatcatggagggcctctctgctttcctgcacgccctgcgactgcactgggttgagttccagaacaagttctatgtcggggatggttacaagttttctccattctcctttaaa

SEQ ID NO: 153193 - DNA, 120 bp, Artificial Sequence
  ENSG00000105929_23 (sequence is synthesized)
cacatcctggatggcacagccgaggagtaggctgagggctgcacctcccacggtggtcaccatgccaatgaaggaagttcagtcttgtctttgatatcagcccctgcaaggcgctcaatg

SEQ ID NO: 153194 - DNA, 120 bp, Artificial Sequence
  ENSG00000105929_24 (sequence is synthesized)
ggaaggttgttcttggctcacctgaagcatgaaactgtgtattatttggacgtcagcctgtggatttgatacgacttaaccacgtcagaggaaggactttggcaagtgatattgtcttca

SEQ ID NO: 153195 - DNA, 120 bp, Artificial Sequence
  ENSG00000105929_25 (sequence is synthesized)
tgtggggtattaattctcaaataataaagtaattgacaaatgaggggagaatgctaaacagatgtcttcttgcaatattttaaatattgtatttgagaaaataaacatctgagtcattca

SEQ ID NO: 153196 - DNA, 120 bp, Artificial Sequence
  ENSG00000105929_26 (sequence is synthesized)
aacagagctgcctcctggctctttgggagcctgggaggagaaggagccgggaggggcgctgcggggaagccacctgcggattcactggctgctgctccgcccaggactgctagcaagcac

SEQ ID NO: 153197 - DNA, 120 bp, Artificial Sequence
  ENSG00000105929_27 (sequence is synthesized)
ggagggctgccagacctggggctccctgctccgtgcgtcaggttggggaaaccaccgtctgccccagaccctgacccaggacccgcctggaggaagctgggaccgaggctgggccaagat

SEQ ID NO: 153198 - DNA, 120 bp, Artificial Sequence
  ENSG00000105929_28 (sequence is synthesized)
agttcctccatgacgtggcaagtgaagacaggaatgaaaggaatgtaaagcagcttttctctgaagagaagaagagagagagacacagccaagggtcaatgggaaactgcaacaacacaa

SEQ ID NO: 153199 - DNA, 120 bp, Artificial Sequence
  ENSG00000105929_29 (sequence is synthesized)
aacagaactgcagcctcaattcacagcacaagtgacgtactgggaacccttatgactgggactccttttccagtggccaaagacgcagttattctaggataggctggccatctaactaaa

SEQ ID NO: 153200 - DNA, 120 bp, Artificial Sequence
  ENSG00000105929_30 (sequence is synthesized)
gtcagcaaacgatgtcttagcagaaaaggggatgcagaatgctttgcagcaagaactcacctgtttcctttggaatatattaaacacaggtttcgagccactgtctacccttgcccagag

SEQ ID NO: 153201 - DNA, 120 bp, Artificial Sequence
  ENSG00000105929_31 (sequence is synthesized)
gaaaggcttaaggaaacccgcatgcaaatcgtggagctgtggcagggaatctgaggtgggggccccgaggctgtgctgaggcctcaggcgttgtgtgtctcccctccgcagccccctaca

SEQ ID NO: 153202 - DNA, 120 bp, Artificial Sequence
  ENSG00000105929_32 (sequence is synthesized)
attgttataggtgaaaattgttcaatatcagcaattttctgtggttcaaatggaatagccccggtgaaaattcctaagaatttaaacatcgccctcctcccttataagcagagccagaag

SEQ ID NO: 153203 - DNA, 120 bp, Artificial Sequence
  ENSG00000105929_33 (sequence is synthesized)
cgagggagggactggccctacttggggctattccacaagaaaagctgctgggaagacccaacgattcagtgcagttaaacttgtcttctgattctgagctcccatcataagcaaggcact

SEQ ID NO: 153204 - DNA, 120 bp, Artificial Sequence
  ENSG00000105939_0 (sequence is synthesized)
gcttttagtttctcttctttctaaagaaggctcgcggagcccggctggagaacctcaccctcgccgagcctagaaccgagagggggccaccccaggcggtcaccagcagatttgcccgcg

SEQ ID NO: 153205 - DNA, 120 bp, Artificial Sequence
  ENSG00000105939_1 (sequence is synthesized)
cgttctctttctttccacccagttgcccttgcggccggctgtaaacctgccactaggacccggtcggtgagatctagcctcttgacctgagagccgagagtggatcgctgggctgggcta

SEQ ID NO: 153206 - DNA, 120 bp, Artificial Sequence
  ENSG00000105939_2 (sequence is synthesized)
acggcgacggagagcgcgccctcgctgactccgggcgcgcccagcagtagcaccgcccgcgcccgcccctggacacttgtaagtttcgatttccgatttccgcggaaccgagtcccgcgc

SEQ ID NO: 153207 - DNA, 120 bp, Artificial Sequence
  ENSG00000105939_3 (sequence is synthesized)
cgcggcagagccagcacagccagcgcgccatggcggacccggaggtgtgctgcttcatcaccaaaatcctgtgcgcccacgggggccgcatggccctggacgcgctgctccaggagatcg

SEQ ID NO: 153208 - DNA, 120 bp, Artificial Sequence
  ENSG00000105939_4 (sequence is synthesized)
cgctgtctgagccgcagctctgtgaggtgctgcaggtggccgggcccgaccgctttgtggtgttggagaccggcggcgaggccgggatcacccgatcggtggtggccaccactcgagccc

SEQ ID NO: 153209 - DNA, 120 bp, Artificial Sequence
  ENSG00000105939_5 (sequence is synthesized)
gggtctgccgtcgcaagtactgccagagaccctgcgataacctgcatctctgcaaactcaacttgctgggccggtgcaactattcgcagtccgagcggaatttatgcaaatattctcatg

SEQ ID NO: 153210 - DNA, 120 bp, Artificial Sequence
  ENSG00000105939_6 (sequence is synthesized)
aggttctctcagaagagaacttcaaagtcctgaaaaatcacgaactctctggactgaacaaagaggaattagcagtgctcctcctccaaagtgatcctttttttatgcccgagatatgca

SEQ ID NO: 153211 - DNA, 120 bp, Artificial Sequence
  ENSG00000105939_7 (sequence is synthesized)
aaagttataagggagagggtcggcagcagatttgtaaccagcagccaccgtgttcaagactccacatctgtgaccacttcacccgagggaactgtcgttttcccaactgcctccggtccc

SEQ ID NO: 153212 - DNA, 120 bp, Artificial Sequence
  ENSG00000105939_8 (sequence is synthesized)
ataacctgatggacagaaaggtgctggccatcatgagggagcacgggctgaaccccgacgtggtccagaacatccaggacatctgcaacagcaagcacatgcagaagaatcccccagggc

SEQ ID NO: 153213 - DNA, 120 bp, Artificial Sequence
  ENSG00000105939_9 (sequence is synthesized)
ccagagctccttcttcacatcgtagaaacatggcatatagggctagaagcaagagtagagatcggttctttcagggcagccaagaatttcttgcgtctgcttcagcgtctgctgagaggt

SEQ ID NO: 153214 - DNA, 120 bp, Artificial Sequence
  ENSG00000105939_10 (sequence is synthesized)
cctgcacacctagtccagatcagatcagccacagggcttccctggaggacgcgcctgtggacgatctcacccgcaagttcacgtatctggggagtcaggatcgcgctcggcctccctcag

SEQ ID NO: 153215 - DNA, 120 bp, Artificial Sequence
  ENSG00000105939_11 (sequence is synthesized)
gctcgtccaaggctactgatcttggaggaacaagtcaggccgggacaagccagaggtttttagagaacggcagtcaagaggacctcttgcatggaaatccaggcagcacttaccttgctt

SEQ ID NO: 153216 - DNA, 120 bp, Artificial Sequence
  ENSG00000105939_12 (sequence is synthesized)
ccaattcaacatcagcccccaactggaagagcctcacatcctggacgaatgaccaaggcgccaggagaaagactgtgttttctcccacgctacctgccgcccgctcttctcttggctctc

SEQ ID NO: 153217 - DNA, 120 bp, Artificial Sequence
  ENSG00000105939_13 (sequence is synthesized)
tgcaaacacctgaagctgtgaccaccagaaagggcacaggcttgctttcctcagactacaggatcatcaatggcaaaagtggaactcaggacatccagcctggccctctttttaataata

SEQ ID NO: 153218 - DNA, 120 bp, Artificial Sequence
  ENSG00000105939_14 (sequence is synthesized)
atgctgatggagtggccacagatataacttctaccagatccttaaattacaaaagcactagcagcggtcacagagaaatatcatcacctaggattcaggatgctggacctgcttcccgag

SEQ ID NO: 153219 - DNA, 120 bp, Artificial Sequence
  ENSG00000105939_15 (sequence is synthesized)
atgtccaggccactggcagaatcgcagatgatgctgacccaagagtagcacttgttaacgattctttatctgatgtcacaagtaccacatcttctagggtggatgatcatgactcagagg

SEQ ID NO: 153220 - DNA, 120 bp, Artificial Sequence
  ENSG00000105939_16 (sequence is synthesized)
aaatttgtcttgaccatctgtgtaagggttgtccgcttaatggtagctgcagcaaagtccacttccatctgccttaccggtggcagatgcttattggtaaaacctggacggactttgagc

SEQ ID NO: 153221 - DNA, 120 bp, Artificial Sequence
  ENSG00000105939_17 (sequence is synthesized)
acatggagacgatcgagaaaggctactgtaaccccggaatccacctctgttctgtaggaagttatacaatcaattttcgggtaatgagttgtgattcctttcccatccgacgcctctcca

SEQ ID NO: 153222 - DNA, 120 bp, Artificial Sequence
  ENSG00000105939_18 (sequence is synthesized)
ctccttcttctgtcaccaagccagccaattctgtcttcaccaccaaatggatttggtattggaagaatgaatctggcacatggattcagtatggagaagagaaagacaaacggaaaaatt

SEQ ID NO: 153223 - DNA, 120 bp, Artificial Sequence
  ENSG00000105939_19 (sequence is synthesized)
caaacgtcgactcttcatacctggagtctctctatcaatcctgtccgaggggagttgtgccatttcaggcgggctcacggaactatgagctgagtttccaagggatgattcagacaaaca

SEQ ID NO: 153224 - DNA, 120 bp, Artificial Sequence
  ENSG00000105939_20 (sequence is synthesized)
tagcttccaaaactcaaaaggatgtcatcagaagaccaacatttgtgcctcagtggtatgtgcagcagatgaagagagggccagaccatcagccagcaaagacctcgtcagtgtctttaa

SEQ ID NO: 153225 - DNA, 120 bp, Artificial Sequence
  ENSG00000105939_21 (sequence is synthesized)
ctgcgacctttcgtcctcaggaggacttttgcttcctatcctcaaagaaatataagttgtcagagatccatcacctacatccagaatatgtcagagtaagtgagcattttaaagcttcca

SEQ ID NO: 153226 - DNA, 120 bp, Artificial Sequence
  ENSG00000105939_22 (sequence is synthesized)
tgaaaaatttcaagattgaaaagataaagaagatcgagaactcagagctcctggataaatttacatggaagaaatcgcagatgaaggaagaaggaaaactcctattttatgcgacaagcc

SEQ ID NO: 153227 - DNA, 120 bp, Artificial Sequence
  ENSG00000105939_23 (sequence is synthesized)
gtgcctatgtggaatctatctgttcgaataattttgacagtttcctacatgaaactcatgaaaacaaatacggaaaaggaatttactttgcaaaagatgccatctattcccacaaaaatt

SEQ ID NO: 153228 - DNA, 120 bp, Artificial Sequence
  ENSG00000105939_24 (sequence is synthesized)
gcccgtatgatgccaaaaacgtcgttatgtttgtagcccaagttctggttggaaagtttactgaaggaaatataacgtacacgagccctcctccacagttcgacagctgtgtggatacca

SEQ ID NO: 153229 - DNA, 120 bp, Artificial Sequence
  ENSG00000105939_25 (sequence is synthesized)
gatcgaatccctccgtttttgtcatctttcagaaagatcaggtttacccacaatatgtgattgaatatactgaagacaaagcctgcgtgattagttagaaccgatgaatacagcgtcaga

SEQ ID NO: 153230 - DNA, 120 bp, Artificial Sequence
  ENSG00000105939_26 (sequence is synthesized)
aggatgccataaccattctgttcctttacagaactaaattgccgcagacaggagttaaagttttatattttcctgctcagttatctaatgtcttagatcagtggtccccaaattttgcta

SEQ ID NO: 153231 - DNA, 120 bp, Artificial Sequence
  ENSG00000105939_27 (sequence is synthesized)
catattagaatcatctgggaggttttaaacaaattctgatgcccaggttgcaccccatgccaatgaaatcatttctgggcgtcagcgccaggcagttgtatttttttttttttttttttt

SEQ ID NO: 153232 - DNA, 120 bp, Artificial Sequence
  ENSG00000105939_28 (sequence is synthesized)
gattacaggtatgagccaccatgcccggctggcagttgtattttttaaagcccttctgatgattccaatgtgttggaaagtttaccttgtctcagatgtaactggtaaaggctgatttct

SEQ ID NO: 153233 - DNA, 120 bp, Artificial Sequence
  ENSG00000105939_29 (sequence is synthesized)
tttaccttgtctcagatgtaactggtaaaggctgatttctaaattttctgtaattgcagcaacctttctctcctgtctacccttttagtttactgtatgccatggttttgttttggttac

SEQ ID NO: 153234 - DNA, 120 bp, Artificial Sequence
  ENSG00000105939_30 (sequence is synthesized)
attgaaagaaagttaatttggaaaatttgggagaaatctaatcatgcctattaaggatgtaagacattacagccttagaagaaagattgtgaaaagctggggagaaaatgcttaaggaca

SEQ ID NO: 153235 - DNA, 120 bp, Artificial Sequence
  ENSG00000105939_31 (sequence is synthesized)
tgctaggggaaaaaaaagtaaaattgaagtgctattgcagacatggctgcagtactgtaccttatcattctgatgaaactgatttggagcacccttttctttatcgctacatttatttag

SEQ ID NO: 153236 - DNA, 120 bp, Artificial Sequence
  ENSG00000105939_32 (sequence is synthesized)
gggacaaactccatccaggttgactctctctggaatgcggtaataagagctggcaagtaaggctcagagagaagcaaccaactggagttaattgcccatttgggctctttgtataattat

SEQ ID NO: 153237 - DNA, 120 bp, Artificial Sequence
  ENSG00000105939_33 (sequence is synthesized)
ggcaaagtagacatttatgttctaattaatatgattacagagaaggctttttctcaggtcaggcttttcatgaaagtattttgagaacaatgaattgcaataaccagcttcacacaagca

SEQ ID NO: 153238 - DNA, 120 bp, Artificial Sequence
  ENSG00000105939_34 (sequence is synthesized)
taactgataaacgcgagtgctattgtagtcttggcaagtgagccaagaacctaggagcagggccattcctactgaaggacgggccccctacggagatgaaatttgtttcctggtgagcac

SEQ ID NO: 153239 - DNA, 120 bp, Artificial Sequence
  ENSG00000105939_35 (sequence is synthesized)
agaatcagaacaaagaacaatatcccaaagaggccctgtgtctaccaggagcttctttttccaaatgtaatggattatgtggaattgtagtgccatcggtttttacttagagcccttgac

SEQ ID NO: 153240 - DNA, 120 bp, Artificial Sequence
  ENSG00000105939_36 (sequence is synthesized)
gtgcttggaccaatatttccttccttcttatgaaccaggtttttccttctgattttcccttttcaacattccttaccagtcaccaaagtttcctgttataatttcttttagcagacaagt

SEQ ID NO: 153241 - DNA, 120 bp, Artificial Sequence
  ENSG00000105939_37 (sequence is synthesized)
tataagtcagatttaattagcatcagagttgattttatattagtcagattttggatcatcacagagatctccacaactccttggcttaaacagctccaccggtaaaaaaaaaaaaaaaaa

SEQ ID NO: 153242 - DNA, 120 bp, Artificial Sequence
  ENSG00000105939_38 (sequence is synthesized)
aaaaaaaaaaaaatagtttttttagagtagagttattttctgggagagttactacaaatgcttattctcattgacttatttctttcatggtaactttcgttttggagtgttcattttctg

SEQ ID NO: 153243 - DNA, 120 bp, Artificial Sequence
  ENSG00000105939_39 (sequence is synthesized)
aacttgaccctcacattgtaggggtgcagtttgtccaactctttccaacagcccattagacaccactagctggatatttcacaggcatctttgattcaatatgtccaaagtggaactctc

SEQ ID NO: 153244 - DNA, 120 bp, Artificial Sequence
  ENSG00000105939_40 (sequence is synthesized)
catctacctccctcacatgaacctgttcctctctcaggatctgtatgtaagtgaaaagcatcaccatctacccattggctcaagcagaaatctggaagtcatctttgactccttcctctc

SEQ ID NO: 153245 - DNA, 120 bp, Artificial Sequence
  ENSG00000105939_41 (sequence is synthesized)
cctcctgataaacatctaagcagtttctaagtctagttttacctcttaaatatctctgttcccttctaagttgtttgctgtgttttcttcagagcaagaaggttatattttttaaaattt

SEQ ID NO: 153246 - DNA, 120 bp, Artificial Sequence
  ENSG00000105939_42 (sequence is synthesized)
acttagtaatgcacattcaaaacacacatcaagtcttcaggataaagttcaaaaccgctgtcatggccccatgtgatctctccctcccctacccctctatcatttagtttcttctgcgca

SEQ ID NO: 153247 - DNA, 120 bp, Artificial Sequence
  ENSG00000105939_43 (sequence is synthesized)
agccactctggcttcctttcagttttgtggttcccatttttagctagttcagtggttttcaatgggcatttctgcctttttttttctaaacgacaaatagaaatacatcttctttattat

SEQ ID NO: 153248 - DNA, 120 bp, Artificial Sequence
  ENSG00000105939_44 (sequence is synthesized)
cctccaaatccaattcagaggtaatatgctccacctacacacaattttagaaataaattaaaaattaaataaaactaatatgaacataaagaggaaataaaaggtacctaacttgggcac

SEQ ID NO: 153249 - DNA, 120 bp, Artificial Sequence
  ENSG00000105939_45 (sequence is synthesized)
agctgtaactgaagacctaatgaagtagtcagatgcttacaactatttataatgcatcaatttgaacttagaaggtaggagatcagatcatatgtgggaaaatgtaaaagcagggatatc

SEQ ID NO: 153250 - DNA, 120 bp, Artificial Sequence
  ENSG00000105939_46 (sequence is synthesized)
agtgggcattagaataaaaactagggatacaataacttctttgcatatgacaatacttatttgtatataagagaaagaacgaaataacctttattgaaataaagatactatgcaagaaaa

SEQ ID NO: 153251 - DNA, 120 bp, Artificial Sequence
  ENSG00000105939_47 (sequence is synthesized)
tgtacagttgtcgaagtggagaaaatgaggatatattcttgcagacgagctataggtcatacatgaatgtctagtgagacattcaaaattcgtatagggtgcagagtaatttcttattgt

SEQ ID NO: 153252 - DNA, 120 bp, Artificial Sequence
  ENSG00000105939_48 (sequence is synthesized)
gaggaactgtccaatgtattgcaagatgttctgcatacttggctctcacatactaaatgctagtagcgcccccacccccacgcccagtcacggtgacaaccacaaaccctatcagatcta

SEQ ID NO: 153253 - DNA, 120 bp, Artificial Sequence
  ENSG00000105939_49 (sequence is synthesized)
ttcacctttttcagagcagatattttgtaacattctctttgctgacctgaaatgactcatagataatacaatctacttacacacatgaatttcttaaaaaaatcaatttaatgccctaac

SEQ ID NO: 153254 - DNA, 120 bp, Artificial Sequence
  ENSG00000105939_50 (sequence is synthesized)
tctcttattaaggagaaatagaaaagaagaaatttataatgaaaagaagatgaatttcattatgtaaacgctcaggcatgactacgctgtttgaaacagacagatgtttactcttccttg

SEQ ID NO: 153255 - DNA, 120 bp, Artificial Sequence
  ENSG00000105939_51 (sequence is synthesized)
taatgagtaggtttggatttaagagccgattagaggctacttcctgtaaacaagtacaggaaaatgaaactagacgggtgggggacactagaatgaaaaccagtgttagggtaaagacaa

SEQ ID NO: 153256 - DNA, 120 bp, Artificial Sequence
  ENSG00000105939_52 (sequence is synthesized)
aacagactatgtacataatctgtatatgggaaaagaaagagcgaaattaccttacttaaggataataggacaagacaaattacagattgtctcagagaaaacaaatgagttactctctcg

SEQ ID NO: 153257 - DNA, 120 bp, Artificial Sequence
  ENSG00000105939_53 (sequence is synthesized)
gacaagctgtaggtcctacctaaatgtccagcaggacattagacagtcgtacagggtacagaataattcttcgttgtgtggcactaacccacacactgcaggacatcgttctccctggct

SEQ ID NO: 153258 - DNA, 120 bp, Artificial Sequence
  ENSG00000105939_54 (sequence is synthesized)
gcatccactcagtgctgggagtagtccccagttattatgaaaccaccaataacccactgaccacagtgagaaccactgattttttccactgacctactgaatatctagcatccttagatt

SEQ ID NO: 153259 - DNA, 120 bp, Artificial Sequence
  ENSG00000105939_55 (sequence is synthesized)
ggctcaactgttactttcctaaggagtccttctacagaataggtcagatcttggcctcccaaaccccttatttttaaaatactttgcgccttgctttgataatttgtattatgtatccaa

SEQ ID NO: 153260 - DNA, 120 bp, Artificial Sequence
  ENSG00000105939_56 (sequence is synthesized)
actgaaattatctgctttctgcattagaatgtaagccccctgagggttgagtcagtctgtcttgtttgctgtgccacgcctgatgcccagcccagcagcatgctttgtacactgatatat

SEQ ID NO: 153261 - DNA, 120 bp, Artificial Sequence
  ENSG00000105939_57 (sequence is synthesized)
tgggtaaattttgttgaataaattaagctcaactatttgtatttcaatagttgagttgtattgcttcctgttcttcaagcttaatttgaactgtctaataaaaagaagtaattaatttgg

SEQ ID NO: 153262 - DNA, 120 bp, Artificial Sequence
  ENSG00000105939_58 (sequence is synthesized)
aggccactggcagaatcgcagatgatgctgacccaagagtagcacttgttaacggtaaatacaaagggaagacactttgggctagtacatttgttcatgatataccaaatggctctagtc

SEQ ID NO: 153263 - DNA, 120 bp, Artificial Sequence
  ENSG00000105939_59 (sequence is synthesized)
aagtagtggataaaactactgatgtagaaaaaactggtgccactggttttggcttaacaatggcagtcaaggcagaaaaagatatgttacgtactggaagtcagagtctgaggaacctgg

SEQ ID NO: 153264 - DNA, 120 bp, Artificial Sequence
  ENSG00000105939_60 (sequence is synthesized)
tccccaccacacctggggaatccactgcccctgcacaagtcagcactctgcctcagtcacctgctgccctttcctcaagcaacagagctgcagtctggggggcccaagggcagaactgca

SEQ ID NO: 153265 - DNA, 120 bp, Artificial Sequence
  ENSG00000105939_61 (sequence is synthesized)
cccaggttcctgtttcctctgccagcgagctcacaaggaagacaacaggctctgctcagtattctttatctgatgtcacaagtaccacatcttctagggtggatgatcatgactcagagg

SEQ ID NO: 153266 - DNA, 120 bp, Artificial Sequence
  ENSG00000105939_62 (sequence is synthesized)
agcagatgaagagagggccagagtaagtgttctgaagcagctgtttgctgacagatgcttgagatgttcatgccctgggctcatcaagtcactcgtgaatctggagcctgttttcctgaa

SEQ ID NO: 153267 - DNA, 120 bp, Artificial Sequence
  ENSG00000105939_63 (sequence is synthesized)
aagttcctgtttgcattactctgcagtttccatttgcattatcgatgagtaagatgcttgttaagcagcatggtgtgactgaaaggatactagatcggaaaatgaattttctttctgaaa

SEQ ID NO: 153268 - DNA, 120 bp, Artificial Sequence
  ENSG00000105939_64 (sequence is synthesized)
gggaagtctgagcgagtctcctaaatactctgggctttagcttctccagctgtgaagagctggattgatgcagtacacctaaggaataatcatatatactgggtttttgttttgctgtgg

SEQ ID NO: 153269 - DNA, 61 bp, Artificial Sequence
  ENSG00000105939_65 (sequence is synthesized)
tactgggtttttgttttgctgtggattcttttttttttttttttttttagaacctcagtct

SEQ ID NO: 153270 - DNA, 120 bp, Artificial Sequence
  ENSG00000105939_66 (sequence is synthesized)
tgagccaccgtgcctggctttgctgtggattcttttgggtgtcttttgttttcctacacgatttatagaggatgaggggcggagaaagagatagaaaaaagggatgagctagctgttaga

SEQ ID NO: 153271 - DNA, 120 bp, Artificial Sequence
  ENSG00000105939_67 (sequence is synthesized)
gcaagggttttggtgagagataatattgattgaagggattttaaaggaaatgttgctgtgggggattcattgtaactctccttgtgaactgctcagtaaactctacattgttcatgaaca

SEQ ID NO: 153272 - DNA, 120 bp, Artificial Sequence
  ENSG00000105948_0 (sequence is synthesized)
agaacgtgctgtgtggatgcggcgaaacgctgaggcgcggccttcgctgtgtggtggggactcacaagaccgacgtcaagatgatgctttcaagggccaaacctgctgtaggcagaggcg

SEQ ID NO: 153273 - DNA, 120 bp, Artificial Sequence
  ENSG00000105948_1 (sequence is synthesized)
tacagcacactgacaaaagaaagaagaaaggtaggaagattccaaaactagaggagctactttcaaaaagagatttcactggagctattaccctgttggagttcaaacgtcatgttgggg

SEQ ID NO: 153274 - DNA, 120 bp, Artificial Sequence
  ENSG00000105948_2 (sequence is synthesized)
aagaagaagaggatactaatttgtggattggatattgtgcctttcacctgggtgactacaagagagctctggaggaatacgaaaatgctacaaaagaggaaaattgtaattctgaagtct

SEQ ID NO: 153275 - DNA, 120 bp, Artificial Sequence
  ENSG00000105948_3 (sequence is synthesized)
gggtgaacctagcttgcacctacttctttcttgggatgtataaacaagctgaagcagctggatttaaagcttcaaaaagccgactccaaaaccgcctcctcttccacttggctcacaagt

SEQ ID NO: 153276 - DNA, 120 bp, Artificial Sequence
  ENSG00000105948_4 (sequence is synthesized)
gatatatataagcgaatactgctagataacagggaataccttgcccttaatgtttatgtggccctctgctactacaagttggattactatgatgtgtctcaagaagttttggctgtttac

SEQ ID NO: 153277 - DNA, 120 bp, Artificial Sequence
  ENSG00000105948_5 (sequence is synthesized)
cttcagcaaattcctgatagtaccatcgcactcaatcttaaagcctgtaaccattttcgcctttacaatggcagagcagctgaggcagaactcaaaagcttgatggacaatgcttcttca

SEQ ID NO: 153278 - DNA, 120 bp, Artificial Sequence
  ENSG00000105948_6 (sequence is synthesized)
tcctttgaatttgctaaagaactcatcaggcacaatctggtgaataacgatttcccgtcttgactgagttcagtcctactctgctttggtacatcacagcaattagaaagattaataaaa

SEQ ID NO: 153279 - DNA, 120 bp, Artificial Sequence
  ENSG00000105948_7 (sequence is synthesized)
ggagatgcgccagcaagtaatgctttactccaagggaacccctcctcactgtggaggagataagttttaaagtactaatctgtttccttaaggaaatccttgttgggagaacaggaatat

SEQ ID NO: 153280 - DNA, 120 bp, Artificial Sequence
  ENSG00000105948_8 (sequence is synthesized)
atttaatatttggaaagaagcacaaggcagtgtagatccaggtgtctgtttttttgagaaagacaaaggaacgtatccctctgtggtttaaaataaatgggaaatatttttgcatctttg

SEQ ID NO: 153281 - DNA, 120 bp, Artificial Sequence
  ENSG00000105948_9 (sequence is synthesized)
tagttgatgtcattcctgaagctaggctaaacttggtgatttactaccttcgtcaagatgtacaagaagcttataacttaattaaggatctggaacctactactcctcaggagtatattc

SEQ ID NO: 153282 - DNA, 120 bp, Artificial Sequence
  ENSG00000105948_10 (sequence is synthesized)
tcaaaggagtggtcaatgcagcccttggccaggaaatgggttcaagggatcatatgaaaattgcccagcagttcttccagttggtgggaggatcagctagtgaatgtgatacaataccag

SEQ ID NO: 153283 - DNA, 120 bp, Artificial Sequence
  ENSG00000105948_11 (sequence is synthesized)
atgcccaagccaaagctgcaacaggcaataccagtgagggcgaagaggcgttcctcttgatccaaagtgagaagatgaaaaatgattacatttacctcagctggttagctcggtgctata

SEQ ID NO: 153284 - DNA, 120 bp, Artificial Sequence
  ENSG00000105948_12 (sequence is synthesized)
ttatgaataagaaaccaagactagcctgggaactttatcttaagatggaaacctccggcgagtccttcagtctcttacagctcattgctaatgactgctacaagatgggccagttttact

SEQ ID NO: 153285 - DNA, 120 bp, Artificial Sequence
  ENSG00000105948_13 (sequence is synthesized)
attctgccaaagcttttgatgtccttgagaggctggatcctaaccctgaatattgggaaggcaaacggggtgcctgtgtgggcattttccagatgatcatagctgggagagaacccaaag

SEQ ID NO: 153286 - DNA, 120 bp, Artificial Sequence
  ENSG00000105948_14 (sequence is synthesized)
agacccttcgagaagtgctccatttactgagaagcacaggtaacacccaagtagaatacatgatccggatcatgaagaaatgggccaaagaaaacagagtgtccatctaaaatagcgcca

SEQ ID NO: 153287 - DNA, 120 bp, Artificial Sequence
  ENSG00000105948_15 (sequence is synthesized)
gcgtcctaggaaccagcttctactttgacataaaactggaaatcattttcactccagtttaatctgtgatacagggctctgttttattgacattttccttccttgctctttaagcctcaa

SEQ ID NO: 153288 - DNA, 120 bp, Artificial Sequence
  ENSG00000105948_16 (sequence is synthesized)
ggtcagagactgacttgctgagacttagtctcctggctgaacagagtgccatagtctgtgaccctgtatgatcctagtagcaataagattttggacttatctggtgcctttcttccaaaa

SEQ ID NO: 153289 - DNA, 120 bp, Artificial Sequence
  ENSG00000105948_17 (sequence is synthesized)
atgctcagagtacttttatgcaatttactgactttaaggaaaacagtataacttttttttgttagcattttatggcattgtctcctggctgcaataacaaacatctttgatgttcaagaa

SEQ ID NO: 153290 - DNA, 120 bp, Artificial Sequence
  ENSG00000105948_18 (sequence is synthesized)
actttatcaaactgtccagtcattaataggatagatttatgggattactctttcagtaattaaattgttgatgataataacatgttacagcgcagtaagatgagtattgcaatgttttaa

SEQ ID NO: 153291 - DNA, 120 bp, Artificial Sequence
  ENSG00000105948_19 (sequence is synthesized)
aaggtgagtactatgaaaaaaattgtagtacctctaaaggtattcaagaaacaatgtttatgaatctcactagtccattatagtttggtaccataattattttaggtaacaaagcaggtt

SEQ ID NO: 153292 - DNA, 74 bp, Artificial Sequence
  ENSG00000105948_20 (sequence is synthesized)
tagtttggtaccataattattttaggtaacaaagcaggttaggtttttgttaatgtatcttgcttaacaaacat

SEQ ID NO: 153293 - DNA, 120 bp, Artificial Sequence
  ENSG00000105948_21 (sequence is synthesized)
aaacatcagttttgaaagtagggctacagtgatttatatgtattgtgggcacttattaatgtaacgataataaaacatgaatcgtataaagtcctttgagggaatctcctaatggctagg

SEQ ID NO: 153294 - DNA, 120 bp, Artificial Sequence
  ENSG00000105948_22 (sequence is synthesized)
ctctctgtcgtaagtcatattccagccccaggcttctgagctcttataacatacaactgagcattcttaagctcacaacctatttccagaaaagagacccacatctttctatgttttata

SEQ ID NO: 153295 - DNA, 120 bp, Artificial Sequence
  ENSG00000105948_23 (sequence is synthesized)
ctacctttgtttttacaccatatagtttttttctattagtttaaggtacctagtgttacaggtctagaaagtgcagagccatccctacctagaagagaatagatgggaagagaactgaaa

SEQ ID NO: 153296 - DNA, 120 bp, Artificial Sequence
  ENSG00000105948_24 (sequence is synthesized)
gaaagaattcctcaagcactgaagtcaggaaaatccccgtaggcactgtattagttgttccatttatcccagcactccacttgtggatgaaggagttgtatagaaaggagatgagaaaat

SEQ ID NO: 153297 - DNA, 120 bp, Artificial Sequence
  ENSG00000105948_25 (sequence is synthesized)
ggcaggagtggaagcagccaagaagagatcgatgactgaagatctccttcaccttcaggactgtctcaaggggttatttcacctctactcatgaggatggccagtttttctgtcttttat

SEQ ID NO: 153298 - DNA, 120 bp, Artificial Sequence
  ENSG00000105948_26 (sequence is synthesized)
ctttagacccatatataatcagttcagagcacaaatcaaaataaactggcctaaataactgaattctaggaagcaaagctacatcttttttcatatgccaaagcttctgtttcctcatgt

SEQ ID NO: 153299 - DNA, 120 bp, Artificial Sequence
  ENSG00000105948_27 (sequence is synthesized)
tgttcctactttttaaataataaatggctctcagcatcttaggaactagatgggtcccatctgggtagaacctgctataatttttagaatcactcttgtaattcttacctcacttaaaat

SEQ ID NO: 153300 - DNA, 120 bp, Artificial Sequence
  ENSG00000105948_28 (sequence is synthesized)
attaggaaacacagtaatagaaaagacagggagaactcgtctgcaggttttggcagtgaaatttgtcttccagtgaattgctattattttcaaattgcctatagtcaaaaagcttttcca

SEQ ID NO: 153301 - DNA, 120 bp, Artificial Sequence
  ENSG00000105948_29 (sequence is synthesized)
ttgatggagacttactttcaaatgagcttgtgttgaattcagcactctagattctctctgacattttcctgtcttttgggaaaaaaaagcagatattccaaaaatggcagaaatctaatt

SEQ ID NO: 153302 - DNA, 120 bp, Artificial Sequence
  ENSG00000105948_30 (sequence is synthesized)
tttgtaaactttttcatctataggattgagccaaaaaacatacatactattttaaagaaaggtaccatctaattcttttattaaagatagctacttctgaaatgtcttaacagagtttca

SEQ ID NO: 153303 - DNA, 120 bp, Artificial Sequence
  ENSG00000105948_31 (sequence is synthesized)
agattgcaaagtagtattgcatagctggttttcttacatgtgatgatggaggagagaggaagacccagacttaggcatgtagtgaaatatgtacagtttctggcatcagtgtactattta

SEQ ID NO: 153304 - DNA, 120 bp, Artificial Sequence
  ENSG00000105948_32 (sequence is synthesized)
tggcatcagtgtactatttatagtctatagcatacattacttgcaaatgggaaaagtattttataattatttttgtacctcaaaataattattatattctactgtattatattcaaatta

SEQ ID NO: 153305 - DNA, 120 bp, Artificial Sequence
  ENSG00000105948_33 (sequence is synthesized)
gacacaatggctaaagaaggaagagttaaaatctctatcacatagatattgatttctctaacaacactaatatgaatctttacatgtcttttccactctcacaattttagtttaatgatg

SEQ ID NO: 153306 - DNA, 120 bp, Artificial Sequence
  ENSG00000105948_34 (sequence is synthesized)
tgtatcatttaactttaaggcgtctctgtacgttatcccattttattggggaattccataaagggttttataacgtcatctctgaatcttgggagaataactagctatgtgtttctaaga

SEQ ID NO: 153307 - DNA, 120 bp, Artificial Sequence
  ENSG00000105948_35 (sequence is synthesized)
aggagtatattctcaaaggagtggtcaatgcagcccttggccaggaaatgggttcagtgagtatgaaatcactgataatctataggttgcaaagttataagtgtatggaagagaacaaaa

SEQ ID NO: 153308 - DNA, 120 bp, Artificial Sequence
  ENSG00000105948_36 (sequence is synthesized)
tgactatcaaagtgcaagcagcaataggctctcctgtagctccttttatttctccatatcccccaatccagactccactgagaaaagaatgttatgttatttagagacaaaaaaaaaaaa

SEQ ID NO: 153309 - DNA, 120 bp, Artificial Sequence
  ENSG00000105953_0 (sequence is synthesized)
attcgggtggagctgagccggagacaggcagttgtgaaaaacttcaggacaaaaatgtttcatttaaggacttgtgctgctaagttgaggccattgacggcttcccagactgttaagaca

SEQ ID NO: 153310 - DNA, 120 bp, Artificial Sequence
  ENSG00000105953_1 (sequence is synthesized)
ttttcacaaaacagaccagcagcagctaggacatttcaacagattcggtgctattctgcacctgttgctgctgagccctttctcagtgggactagttcgaactatgtggaggagatgtac

SEQ ID NO: 153311 - DNA, 120 bp, Artificial Sequence
  ENSG00000105953_2 (sequence is synthesized)
tgtgcttggctggaaaaccccaaaagtgtacataagtcatgggacattttttttcgcaacacgaatgccggagccccaccgggcactgcctaccagagtccccttcccctgagccgaggc

SEQ ID NO: 153312 - DNA, 120 bp, Artificial Sequence
  ENSG00000105953_3 (sequence is synthesized)
tccctggctgctgtggcccatgcacagtccctggtagaagcacagcccaacgtggacaagctcgtggaggaccacctggcagtgcagtcgctcatcagggcatatcagatacgagggcac

SEQ ID NO: 153313 - DNA, 120 bp, Artificial Sequence
  ENSG00000105953_4 (sequence is synthesized)
catgtagcacagctggaccccctggggattttggatgctgatctggactcctccgtgcccgctgacattatctcatccacagacaaacttgggttctatggcctggatgagtctgacctc

SEQ ID NO: 153314 - DNA, 120 bp, Artificial Sequence
  ENSG00000105953_5 (sequence is synthesized)
gacaaggtcttccacttgcccaccaccactttcatcgggggacaggaatcagcacttcctctgcgggagatcatccgtcggctggagatggcctactgccagcatattggggtggagttc

SEQ ID NO: 153315 - DNA, 120 bp, Artificial Sequence
  ENSG00000105953_6 (sequence is synthesized)
atgttcatcaatgacctggagcagtgccagtggatccggcagaagtttgagacccctgggatcatgcagttcacaaatgaggagaaacggaccctgctggccaggcttgtgcggtccacc

SEQ ID NO: 153316 - DNA, 120 bp, Artificial Sequence
  ENSG00000105953_7 (sequence is synthesized)
aggtttgaggagttcctacagcggaagtggtcctctgagaagcgctttggtctagaaggctgcgaggtactgatccctgccctcaagaccatcattgacaagtctagtgagaatggcgtg

SEQ ID NO: 153317 - DNA, 120 bp, Artificial Sequence
  ENSG00000105953_8 (sequence is synthesized)
gactacgtgatcatgggcatgccacacagagggcggctgaacgtgcttgcaaatgtcatcaggaaggagctggaacagatcttctgtcaattcgattcaaagctggaggcagctgatgag

SEQ ID NO: 153318 - DNA, 120 bp, Artificial Sequence
  ENSG00000105953_9 (sequence is synthesized)
ggctccggagatgtgaagtaccacctgggcatgtatcaccgcaggatcaatcgtgtcaccgacaggaacattaccttgtccttggtggccaacccttcccaccttgaggccgctgacccc

SEQ ID NO: 153319 - DNA, 120 bp, Artificial Sequence
  ENSG00000105953_10 (sequence is synthesized)
gtggtgatgggcaagaccaaagccgaacagttttactgtggcgacactgaagggaaaaaggtcatgtccatcctgttgcatggggatgctgcatttgctggccagggcattgtgtacgag

SEQ ID NO: 153320 - DNA, 120 bp, Artificial Sequence
  ENSG00000105953_11 (sequence is synthesized)
accttccacctcagcgacctgccatcctacacaactcatggcaccgtgcacgtggtcgtcaacaaccagatcggcttcaccaccgaccctcggatggcccgctcctccccctaccccact

SEQ ID NO: 153321 - DNA, 120 bp, Artificial Sequence
  ENSG00000105953_12 (sequence is synthesized)
gacgtggcccgagtggtgaatgcccccattttccacgtgaactcagatgaccccgaggctgtcatgtacgtgtgcaaagtggcggccgagtggaggagcaccttccacaaggacgtggtt

SEQ ID NO: 153322 - DNA, 120 bp, Artificial Sequence
  ENSG00000105953_13 (sequence is synthesized)
gtcgatttggtgtgttaccggcgcaacggccacaacgagatggatgagcccatgttcacgcagccgctcatgtacaagcagatccgcaagcagaagcctgtgttacagaagtacgctgag

SEQ ID NO: 153323 - DNA, 120 bp, Artificial Sequence
  ENSG00000105953_14 (sequence is synthesized)
ctgctggtgtcgcagggtgtggtcaaccagcctgagtatgaggaggaaatttccaagtatgataagatctgtgaggaagcttttgccagatctaaagatgagaagatcttgcacattaag

SEQ ID NO: 153324 - DNA, 120 bp, Artificial Sequence
  ENSG00000105953_15 (sequence is synthesized)
cactggctggactctccctggcctggcttcttcaccctggacgggcagcccaggagcatgtcctgcccctccacgggtctgacggaggatattctgacacacatcgggaatgtggctagt

SEQ ID NO: 153325 - DNA, 120 bp, Artificial Sequence
  ENSG00000105953_16 (sequence is synthesized)
tctgtgcctgtggaaaactttactattcatggagggctgagccggatcttgaagactcgtggggaaatggtgaagaaccggactgtggactgggctctagcggagtacatggcgtttggc

SEQ ID NO: 153326 - DNA, 120 bp, Artificial Sequence
  ENSG00000105953_17 (sequence is synthesized)
catccccatgaaccatctctggcccaatcaggccccctatactgtgtgcaacagctcactgtctgagtacggcgtgctgggctttgagctgggcttcgccatggccagtcctaatgccct

SEQ ID NO: 153327 - DNA, 120 bp, Artificial Sequence
  ENSG00000105953_18 (sequence is synthesized)
ggtcctctgggaagcccaatttggtgacttccacaacacggcccagtgtatcatcgaccagttcatctgcccgggacaagccaagtgggtgcggcagaatggcatcgtgttgctgctgcc

SEQ ID NO: 153328 - DNA, 120 bp, Artificial Sequence
  ENSG00000105953_19 (sequence is synthesized)
ccatggcatggagggcatgggtccagaacattcctccgcccgcccagagcggttcttgcagatgtgcaacgatgacccagatgtcctgccagaccttaaagaagccaacttcgacatcaa

SEQ ID NO: 153329 - DNA, 120 bp, Artificial Sequence
  ENSG00000105953_20 (sequence is synthesized)
tcagctatatgactgcaattgggttgttgtcaactgctccactcctggcaacttcttccacgtgctacgacgccagatcctgctgccattccggaagccgttaattatcttcacccccaa

SEQ ID NO: 153330 - DNA, 120 bp, Artificial Sequence
  ENSG00000105953_21 (sequence is synthesized)
atccctgttgcgccaccccgaggccagatccagctttgatgagatgcttccaggaacccacttccagcgggtgatcccagaagatggccctgcagctcagaacccagaaaatgtcaaaag

SEQ ID NO: 153331 - DNA, 120 bp, Artificial Sequence
  ENSG00000105953_22 (sequence is synthesized)
gcttctcttctgcaccggcaaagtgtattatgacctcacccgggagcgcaaagcacgcgacatggtggggcaggtggccatcacaaggattgagcagctgtcgccattcccctttgacct

SEQ ID NO: 153332 - DNA, 120 bp, Artificial Sequence
  ENSG00000105953_23 (sequence is synthesized)
cctgctgaaggaggtgcagaagtaccccaatgctgagctggcctggtgccaggaggagcacaagaaccaaggctactatgactacgtgaagccaagacttcggaccaccatcagccgcgc

SEQ ID NO: 153333 - DNA, 120 bp, Artificial Sequence
  ENSG00000105953_24 (sequence is synthesized)
caagcccgtctggtatgccggccgggacccagcggctgctccagccaccggcaacaagaagacccacctgacggagctgcagcgcctcctggacacggccttcgacctggacgtcttcaa

SEQ ID NO: 153334 - DNA, 120 bp, Artificial Sequence
  ENSG00000105953_25 (sequence is synthesized)
gaacttctcgtagatgctgcctagggttgcttgggccactgccctctccacacccatgactgccccttgcttctcaactaaagaatagtgcctcagcgctgcccacaccaccgccctcct

SEQ ID NO: 153335 - DNA, 120 bp, Artificial Sequence
  ENSG00000105953_26 (sequence is synthesized)
cgctgtgccaccacccctccctctgctctcataggagttaggctgtcgtccccctccagtgcttggctgccccacaggccacacgctgcccaggctctgctgacttctgagcagttttcc

SEQ ID NO: 153336 - DNA, 120 bp, Artificial Sequence
  ENSG00000105953_27 (sequence is synthesized)
aggaggccggggggagcaggaggaggaaaggtagcccccgagggatgtccttggggaggggtcagctctggccacaatcctccccaccagtctcacccactaggataggaactgggcctt

SEQ ID NO: 153337 - DNA, 120 bp, Artificial Sequence
  ENSG00000105953_28 (sequence is synthesized)
gtgtgctggcttccgctgtcacccagcaaggcacaggctcctgtatttgagactaggatagcttcatcttgagcctgagccttagaatctgtagaggagcctggagtcggatctagccat

SEQ ID NO: 153338 - DNA, 120 bp, Artificial Sequence
  ENSG00000105953_29 (sequence is synthesized)
ggctggcagaggtttctagggtgggccccagccgtggcgtgaactgaggatgacccggggcagctggcaggagagagccttggcctgacctggcacagaaagggcagcttcagtctctgc

SEQ ID NO: 153339 - DNA, 120 bp, Artificial Sequence
  ENSG00000105953_30 (sequence is synthesized)
agtgtccattatctgctgttccttcgagggttccaggctgtgtgtggggcccaagcatgccccacccacccctcctgggcccaggcagcacctggagcccacagagtctgtgtgtagcca

SEQ ID NO: 153340 - DNA, 120 bp, Artificial Sequence
  ENSG00000105953_31 (sequence is synthesized)
ggaagccccgctcaggtagccaccaccggggcactggctgctctgtcttggtcctgttaaccctccacctcctctcttggactccctccccaccccaaccactctttctttctcctttaa

SEQ ID NO: 153341 - DNA, 120 bp, Artificial Sequence
  ENSG00000105953_32 (sequence is synthesized)
cccaatggagactttctgatgcatcgttttctttgctgtgccaaagcaggtcagaagagggagaggaggggctgggggtgaggggccaggccatggccaaggggccagctgcccctcatt

SEQ ID NO: 153342 - DNA, 120 bp, Artificial Sequence
  ENSG00000105953_33 (sequence is synthesized)
tatcactctgaccttcacagggacagatctgatttatttattttggttaaaaaaaaaaaaaaggaacagaaacaactttgcattgcattggcttgacccataaactaagttatatccgtg

SEQ ID NO: 153343 - DNA, 120 bp, Artificial Sequence
  ENSG00000105953_34 (sequence is synthesized)
aacagttttactgtggcgacactgaagggaaaaaggtaaggcccagagagaggcgtgcaaggcagatcgtcaaggccccatgttccagcatggagttccgctcaccaacataacccagag

SEQ ID NO: 153344 - DNA, 78 bp, Artificial Sequence
  ENSG00000105953_35 (sequence is synthesized)
tgttccagcatggagttccgctcaccaacataacccagagccctgggtgcatctagactttaaaaaaatatttaaagt

SEQ ID NO: 153345 - DNA, 120 bp, Artificial Sequence
  ENSG00000105953_36 (sequence is synthesized)
ttcttctctttttgctcacctggggagttccttcccctttccataaactgtggtccctgcatggctgtgccccatccctcctcatctggcttgtcctgcccacatcgccctgcagggttc

SEQ ID NO: 153346 - DNA, 120 bp, Artificial Sequence
  ENSG00000105953_37 (sequence is synthesized)
tgagagagcagctgtttcctccttgagtgccagttgtgagtctgggctcatctggtacctgagggtgtattgctttgcaggggattctcacattgcctgcctctggaggactgcaaagtc

SEQ ID NO: 153347 - DNA, 120 bp, Artificial Sequence
  ENSG00000105953_38 (sequence is synthesized)
tttggagccccggagtggggtgtcggcgcctcattcgggtggagctgagccggagacaggcagcgtccttgtgaactttccgcttggatcctgactctgctgttagtagcctatgacctt

SEQ ID NO: 153348 - DNA, 120 bp, Artificial Sequence
  ENSG00000105954_0 (sequence is synthesized)
ataaacattgggctgcacatagagacttaattttagatttagacaaaatggaaattatttcatcaaaactattcattttattgactttagccacttcaagcttgttaacatcaaacattt

SEQ ID NO: 153349 - DNA, 120 bp, Artificial Sequence
  ENSG00000105954_1 (sequence is synthesized)
tttgtgcagatgaattagtgatgtccaatcttcacagcaaagaaaattatgacaaatattctgagcctagaggatacccaaaaggggaaagaagcctcaattttgaggaattaaaagatt

SEQ ID NO: 153350 - DNA, 120 bp, Artificial Sequence
  ENSG00000105954_2 (sequence is synthesized)
ggggaccaaaaaatgttattaagatgagtacacctgcagtcaataaaatgccacactccttcgccaacttgccattgagatttgggaggaacgttcaagaagaaagaagtgctggagcaa

SEQ ID NO: 153351 - DNA, 120 bp, Artificial Sequence
  ENSG00000105954_3 (sequence is synthesized)
cagccaacctgcctctgagatctggaagaaatatggaggtgagcctcgtgagacgtgttcctaacctgccccaaaggtttgggagaacaacaacagccaaaagtgtctgcaggatgctga

SEQ ID NO: 153352 - DNA, 120 bp, Artificial Sequence
  ENSG00000105954_4 (sequence is synthesized)
ctgctattcaagaaaatagatgatgcagaattgaaacaagaaaaataagaaacctggagcctgtccctaaagctgtggcctgtaatctacaaatggctctatagcgaagaccacacggaa

SEQ ID NO: 153353 - DNA, 120 bp, Artificial Sequence
  ENSG00000105954_5 (sequence is synthesized)
gagtagctacatacacttcatcagctatggatcatcaacggcaatttttccttgtcagtacagctataatagtatcttgaaagttgtaaaaaaattaaagcatatttgttacgtaaagtt

SEQ ID NO: 153354 - DNA, 120 bp, Artificial Sequence
  ENSG00000105954_6 (sequence is synthesized)
aaaatgatttttgtctgaataaaaaaaaagcattgcaaatgctttagaaatctctgataatggagagagagacagaggaccctcctcactaccctatataaaaatcattggcacagttac

SEQ ID NO: 153355 - DNA, 120 bp, Artificial Sequence
  ENSG00000105954_7 (sequence is synthesized)
acttaataaaaaaaattaaacagaagagcaccctgaaaaacattatgatggaaattaaatagtatgccagaataacatggttgacaaataagtgaacaaggattaaaaatcacttacaaa

SEQ ID NO: 153356 - DNA, 120 bp, Artificial Sequence
  ENSG00000105954_8 (sequence is synthesized)
cgtgtttctgtacaccctttctatcgtgtcaaatgttaatgaatctgtgatcaattgaaatgtaaatgtctgtgtaaaactacaaaataaaaactcttagactttagggagaaaagaaaa

SEQ ID NO: 153357 - DNA, 80 bp, Artificial Sequence
  ENSG00000105963_0 (sequence is synthesized)
actcgctcagcgaccgcggcggagacacgagcggcggcggcggagcccagagggcggcgggaatgcggaaccggcgcgcg

SEQ ID NO: 153358 - DNA, 80 bp, Artificial Sequence
  ENSG00000105963_1 (sequence is synthesized)
ccggccccggccccggcatcggcatcgcgggcgcatcgcggccatggccaaggagcggcgcagggcggtcctggagctgc

SEQ ID NO: 153359 - DNA, 120 bp, Artificial Sequence
  ENSG00000105963_2 (sequence is synthesized)
tgcagcggccggggaacgcgcgctgcgcggactgcggcgccccggatcccgactgggcctcctacactctgggcgtcttcatctgcctgagctgctcgggaatccaccggaatatccccc

SEQ ID NO: 153360 - DNA, 120 bp, Artificial Sequence
  ENSG00000105963_3 (sequence is synthesized)
aggtcagcaaggtgaagtccgtccgcctggacgcctgggaggaggcccaagtggagttcatggcctcccacgggaacgacgccgcgagagccaggtttgagtccaaagtaccctccttct

SEQ ID NO: 153361 - DNA, 120 bp, Artificial Sequence
  ENSG00000105963_4 (sequence is synthesized)
actaccggcccacgccctccgactgccagctccttcgagagcagtggatccgggccaagtacgagcgacaggagttcatctacccggagaagcaggagccctactcggcagggtaccgtg

SEQ ID NO: 153362 - DNA, 120 bp, Artificial Sequence
  ENSG00000105963_5 (sequence is synthesized)
agggttttctctggaagcgtggccgggacaacgggcagtttttgagccggaagtttgtgctgacagaacgagagggtgctctgaagtatttcaacagaaatgatgccaaggagcccaagg

SEQ ID NO: 153363 - DNA, 120 bp, Artificial Sequence
  ENSG00000105963_6 (sequence is synthesized)
ccgtgatgaagatcgagcacctgaacgccaccttccagccggccaagatcggccacccccacggcctgcaggtcacctacctgaaggacaacagcacccgtaacatcttcatctaccatg

SEQ ID NO: 153364 - DNA, 120 bp, Artificial Sequence
  ENSG00000105963_7 (sequence is synthesized)
aggacgggaaggagattgtggactggttcaatgcactccgagctgctcgcttccactacctgcaggtggcattcccaggggccggcgacgcagatctggtgccaaagctctccaggaact

SEQ ID NO: 153365 - DNA, 120 bp, Artificial Sequence
  ENSG00000105963_8 (sequence is synthesized)
acctgaaggaaggctacatggagaagacggggcccaagcaaacggaaggcttccggaagcgctggttcaccatggatgaccgcaggctcatgtacttcaaagaccccctggacgccttcg

SEQ ID NO: 153366 - DNA, 120 bp, Artificial Sequence
  ENSG00000105963_9 (sequence is synthesized)
cccagggccaccactggccacatggcatcaccatcgtcacgcccgaccgcaagtttctgtttgcctgcgagacggagtccgaccagagggagtgggtggcggccttccagaaggcggtgg

SEQ ID NO: 153367 - DNA, 120 bp, Artificial Sequence
  ENSG00000105963_10 (sequence is synthesized)
acaggcccatgctgccccaggagtacgcagtggaggcgcacttcaagcataaaccttagcgagtgcggctggaggaccacggacattggactcactgtggctggacggaggggacccgtg

SEQ ID NO: 153368 - DNA, 120 bp, Artificial Sequence
  ENSG00000105963_11 (sequence is synthesized)
gatgggggggctctggcgtcctgaggccacctggccccacctgctcctcagggcagcccggcgcggccaggtagggcccgagcttcagcttccaggatgcttctctggaacctcaaggca

SEQ ID NO: 153369 - DNA, 120 bp, Artificial Sequence
  ENSG00000105963_12 (sequence is synthesized)
ggcagcccaggccctgggcctgatctctaaccccgtcatgctgctgctgaccacacccagccaacctgcccctccctgacccggggccccctttcctccagggcccagtctggctcccga

SEQ ID NO: 153370 - DNA, 120 bp, Artificial Sequence
  ENSG00000105963_13 (sequence is synthesized)
gctcagacacagcccccaggagccgcccaccacggctgtgggaacttccaggcctcagcgcagagccctgcttggggccagcacggtgggcagctgccggccgctggggactgggccctg

SEQ ID NO: 153371 - DNA, 120 bp, Artificial Sequence
  ENSG00000105963_14 (sequence is synthesized)
ctcgcatgccgccccgccctccccccacctccacgactatttattgagcgcctgttgtgtgtcacggggctatgagggccgtggggtgtttgggtggattatccacacaggtcccggccc

SEQ ID NO: 153372 - DNA, 120 bp, Artificial Sequence
  ENSG00000105963_15 (sequence is synthesized)
ctgcccgggctggagttgccacagcctgtgctcctggtcctcacctggaggggccagcaggctgccgtcccaccacacgtggcctctgcgcccagcacggtgctcgccgacagtggtgtc

SEQ ID NO: 153373 - DNA, 120 bp, Artificial Sequence
  ENSG00000105963_16 (sequence is synthesized)
tgaacccttggggacgagggcctgggccgcggtgaggccaccagaggcaggagtggccctgggggtcccgggcactgtcgcgcttgctgcaggcggcccagccgtgtatttatttttcac

SEQ ID NO: 153374 - DNA, 120 bp, Artificial Sequence
  ENSG00000105963_17 (sequence is synthesized)
ctatctccttcctgtcaaggcaggccgggctccagggctccccttgcgtggggcatgtaggtgggggaggcgtctgcaggtcacctggggggcccagccctctcccagccttgcctggct

SEQ ID NO: 153375 - DNA, 120 bp, Artificial Sequence
  ENSG00000105963_18 (sequence is synthesized)
gagctgtgttccaggggagccctggacaagccctcataggcagggagggggtttccgaggccaggcatccgccgccccgtgtcgcatcctggaataaaatgtggctctggcatggttcca

SEQ ID NO: 153376 - DNA, 120 bp, Artificial Sequence
  ENSG00000105963_19 (sequence is synthesized)
tttccttctccctcagcctgtttcgtaaacatgttctgggtccctgcagtgtgtccctgcagagtcccctcagagactctgtcctagccacatctgggtctctcgctcaccagcccatct

SEQ ID NO: 153377 - DNA, 120 bp, Artificial Sequence
  ENSG00000105963_20 (sequence is synthesized)
gtaattccctgggagtggaaaaggctggggcggctgcctgtgcacctgggccgtgccgggcctgtgtgtgggtcgtggtttctgcaatggtattggcttcactcgagctccttcgagagc

SEQ ID NO: 153378 - DNA, 120 bp, Artificial Sequence
  ENSG00000105963_21 (sequence is synthesized)
gtgagctggggagctgggtgaacgaggaagccctcgctctctggggcagagatgggggtcacaggatgcagccagctctctcccacgggacacccggtgtgggtggacttgggggttgaa

SEQ ID NO: 153379 - DNA, 120 bp, Artificial Sequence
  ENSG00000105963_22 (sequence is synthesized)
acggtggggcaaacctcagacccatcctcaaaaggggcctggcccctgggccccctttgccgggaccccgtcgttagggacgctggctccttccctgtcccaggggagggtcgatcactc

SEQ ID NO: 153380 - DNA, 120 bp, Artificial Sequence
  ENSG00000105963_23 (sequence is synthesized)
tggcagcaccggctggagggctcctctctgcccatcccagcgaagccctggagccctcagccccagcaagccccccgtggagcaggtgtccgggctggacagggctctgcatgcatgtct

SEQ ID NO: 153381 - DNA, 120 bp, Artificial Sequence
  ENSG00000105963_24 (sequence is synthesized)
ggggctcctggaacacagcaccacatgcccggcggcccagagcaacagaaatctactttcttccagctctggaggctggaggctcaaggctgcttctcccgaggcctctccggggtgctt

SEQ ID NO: 153382 - DNA, 62 bp, Artificial Sequence
  ENSG00000105963_25 (sequence is synthesized)
ccttctcccttctcccttctcccttctcccttctcccttctcctttctcctttccctttctc

SEQ ID NO: 153383 - DNA, 120 bp, Artificial Sequence
  ENSG00000105963_26 (sequence is synthesized)
ctttccctttccctttccctgcccatcttcctatctccctgtctcctccatgtcccctctccccgtccgtctccccctgtccgtgtcccccgtccgtgtcccccgtgtcttctccccatg

SEQ ID NO: 153384 - DNA, 120 bp, Artificial Sequence
  ENSG00000105963_27 (sequence is synthesized)
agccaagagtaaagatgggcacctttccagaggtcaccagctccaggctgtaggctgaacaggaggcccagggcgcaggttataatgtcatggggccaagggtctgggcagaccccagga

SEQ ID NO: 153385 - DNA, 120 bp, Artificial Sequence
  ENSG00000105963_28 (sequence is synthesized)
ggggcgctgggtctaggggcaggggacagccaggctgaagtctagacccagagggcacccgacgtggggctgggtgccaggcctgggctatgggccctctgttccagggtgctggcccac

SEQ ID NO: 153386 - DNA, 120 bp, Artificial Sequence
  ENSG00000105963_29 (sequence is synthesized)
cccacgctctccagaggaccagggcggctccctggagagcagttttgctctctgcccactctcggtaggggccacagctccaagggcgtttataaacagatgagcctcccttctcccacc

SEQ ID NO: 153387 - DNA, 120 bp, Artificial Sequence
  ENSG00000105963_30 (sequence is synthesized)
accccaagacttgcttgagctacaaaataaggatcttcataaaaatagcaccatctgaaaggaaggcaagttggcccaggccccagcagcaccagggccacagagtgagcttggatggca

SEQ ID NO: 153388 - DNA, 120 bp, Artificial Sequence
  ENSG00000105963_31 (sequence is synthesized)
gcccccgaccctgtccagcccggcccggcccggcccttcggcccttcggcccttctcaggacttcgccgggggaggctgcacctgccctcccgcagaggggcagcccctgtgtagcagcc

SEQ ID NO: 153389 - DNA, 120 bp, Artificial Sequence
  ENSG00000105963_32 (sequence is synthesized)
ccggcctcagcgtgggcacaggggccaggcctgcggcaggactgctgggagctgaggtgccggggaggaggaaggggctgggctctgggggaagcggcccctctgtggggaccccagccc

SEQ ID NO: 153390 - DNA, 120 bp, Artificial Sequence
  ENSG00000105963_33 (sequence is synthesized)
tgttccagtttgttttcagccgggtgtactgcattaaccctgcaagaagaaaatggaaagaatttgaaaagatgctggggtgtgcagaggaagggcacgcgagtctgggaagagatcccg

SEQ ID NO: 153391 - DNA, 120 bp, Artificial Sequence
  ENSG00000105963_34 (sequence is synthesized)
tcaggcccgggtggcgcaggaaggtgggtgcttggacggtacgggagggtaggcacttgagctaggcggcatgagaaggcgggaagtcgggctgggcagcgtgggaaggcgggtgcttgg

SEQ ID NO: 153392 - DNA, 120 bp, Artificial Sequence
  ENSG00000105967_0 (sequence is synthesized)
attcattactcacggctagatcgtttactttggttgtcccttctggcatggtgcatatgttatgggaagagggattataatttggtgctgtttgtagagatgacaacactgataaaatcc

SEQ ID NO: 153393 - DNA, 120 bp, Artificial Sequence
  ENSG00000105967_1 (sequence is synthesized)
actcattgctggtcccagcacacctggaaagttctgcaaggcctcagctacagaaagcccagagacagaaagtaaactctttcatgacccttgatcatcagatcatcaatccaactctta

SEQ ID NO: 153394 - DNA, 120 bp, Artificial Sequence
  ENSG00000105967_2 (sequence is synthesized)
aatggtcacaacctgcagtgccaagtggtgggcctcttgtgcagcatgcacacacaactctggacagtgatgctggcctcacagaaaacccactcaccaagttactagctattgggaaag

SEQ ID NO: 153395 - DNA, 120 bp, Artificial Sequence
  ENSG00000105967_3 (sequence is synthesized)
aagatgacaatgcacaatggcatatggaggacgttattgaggatataatcggtatggaatcaagttttaaagaggaaggagcagactctcctctgctaatgcaaagaacattatctggaa

SEQ ID NO: 153396 - DNA, 120 bp, Artificial Sequence
  ENSG00000105967_4 (sequence is synthesized)
gtattttggatgtgtatagcggtgaacaaggaatttcaccaattaacatggggcttacaagtgcttcttgtccaagtagtctaccaatgaaaagagaaattacagaaactgacactagag

SEQ ID NO: 153397 - DNA, 120 bp, Artificial Sequence
  ENSG00000105967_5 (sequence is synthesized)
ctttagcaaaagagagacaaaaaaaggacaaccacaacctcattgaaagaagaagaaggtataatattaattaccgaatcaaggagcttggcactcttattccaaagtctaatgatcctg

SEQ ID NO: 153398 - DNA, 120 bp, Artificial Sequence
  ENSG00000105967_6 (sequence is synthesized)
atatgcgctggaacaaaggaaccattctaaaagcatcagtggagtacatcaagtggctacaaaaagaacaacagagagcccgagaattggaacacagacagaagaaattagagcaggcta

SEQ ID NO: 153399 - DNA, 120 bp, Artificial Sequence
  ENSG00000105967_7 (sequence is synthesized)
acaggcgacttctacttcggattcaggaactagaaattcaggctcgtactcatggtctgccaaccctggcttcacttggcacggttgatttaggtgctcatgtcaccaaacagcagagcc

SEQ ID NO: 153400 - DNA, 120 bp, Artificial Sequence
  ENSG00000105967_8 (sequence is synthesized)
atcctgagcagaattcagtagactattgccaacaactgactgtgtctcaggggccaagccctgagctctgtgatcaagctatagccttttctgatcctttgtcatacttcacagatttat

SEQ ID NO: 153401 - DNA, 120 bp, Artificial Sequence
  ENSG00000105967_9 (sequence is synthesized)
catttagtgctgcattgaaagaggaacaaagattggatggcatgctattggatgacacaatctctccatttggaacagatcctctgctatctgccacttcccctgcagtttccaaagaaa

SEQ ID NO: 153402 - DNA, 120 bp, Artificial Sequence
  ENSG00000105967_10 (sequence is synthesized)
gcagtaggagaagtagctttagctcagatgatggtgatgaattataagaaataaacagacccaattcatcaactggaaagcaattctatgctggtgctatgcaattatgctctgtgtttc

SEQ ID NO: 153403 - DNA, 120 bp, Artificial Sequence
  ENSG00000105967_11 (sequence is synthesized)
atatgttgctttggcttattttttttcttaaaggaatgtgttgttcatgaaaaactgatagaagcaacagaagaattcgcaggaagaaaaatcatagtgttaatgaattattgagggcga

SEQ ID NO: 153404 - DNA, 120 bp, Artificial Sequence
  ENSG00000105967_12 (sequence is synthesized)
aaaaaaggtgttttcttctttgactacggagtccaaatccacttaaattctgttttcctgaaaagaggtacagcataagaaatagctctttattgatgttttaaaagcagcaacttggtg

SEQ ID NO: 153405 - DNA, 120 bp, Artificial Sequence
  ENSG00000105967_13 (sequence is synthesized)
gtgtactactggaactaatgactgcaaagtgttaaacgactgaaatatacaaacagtctcttagttactcatttccatcttctcttcaactttcacatcagtcttccggaatcaagatca

SEQ ID NO: 153406 - DNA, 120 bp, Artificial Sequence
  ENSG00000105967_14 (sequence is synthesized)
acatatcaggtggtcattgcctttctccattgtctagtagacatgtctaaagttcaaactttataggataaataaatgtataatagattatctgtcacttgtggttgaaaggcaaatcta

SEQ ID NO: 153407 - DNA, 120 bp, Artificial Sequence
  ENSG00000105967_15 (sequence is synthesized)
caataaatgtgagaattttccacaataaaatatggataacttataaaaacattggttactaaaattagatcctcattttattgtagttggttcaattacactaattctaaaagcatccat

SEQ ID NO: 153408 - DNA, 120 bp, Artificial Sequence
  ENSG00000105967_16 (sequence is synthesized)
gcatatttatatctccagtctctgttcaggaaaaggaacatattgaatattttcctcaggaatatggaccagaattgtatcccttcacacaaacatacacatacacatatgcacatcatt

SEQ ID NO: 153409 - DNA, 120 bp, Artificial Sequence
  ENSG00000105967_17 (sequence is synthesized)
caggtagtatatgttcttttgttttcttcatgcttctgactgcatcagaatcacattccaaattctcttttcttatgaagaagagatgtcagatcatcaattttagtaaataaaatataa

SEQ ID NO: 153410 - DNA, 120 bp, Artificial Sequence
  ENSG00000105967_18 (sequence is synthesized)
aatgtccccctgcaaggacagttttcaggtacttaaaacttttcatcagtattggacagaaatcaattagttgttgatttggtttttctccaaatggataaaatattgaaaattgaattg

SEQ ID NO: 153411 - DNA, 120 bp, Artificial Sequence
  ENSG00000105967_19 (sequence is synthesized)
ccaattgacaaaataattattacaacaaactatttcttattattttcagttctgagaggaacgtaaggttctatttctataaacacttagagtgtcctatgatctttggttgcactgtta

SEQ ID NO: 153412 - DNA, 120 bp, Artificial Sequence
  ENSG00000105967_20 (sequence is synthesized)
gcatttattataagcacttataactatgatgcttcatttagatttttatctcttgcgcttgttttaggttaggaaattaagttaccaagcacgttgctctgtgctggacctccaagagtg

SEQ ID NO: 153413 - DNA, 120 bp, Artificial Sequence
  ENSG00000105967_21 (sequence is synthesized)
atcatccgatcaatgagtattcatggaggcatactcagaactgcagtgagtcctgagaaaatgtagaagagttgaaaaagatatggtcttactcctaaggtagttaatgagaatgcatga

SEQ ID NO: 153414 - DNA, 120 bp, Artificial Sequence
  ENSG00000105967_22 (sequence is synthesized)
aaaacaaaaacaaaagatagaagacatatagaataaaaaatctaagcataaactgtaaatacagaaggtcagagaaaatgaaaatgactgacaaactttatgggaacagcagaatttgac

SEQ ID NO: 153415 - DNA, 120 bp, Artificial Sequence
  ENSG00000105967_23 (sequence is synthesized)
ttctctttgaaaggcattaattgagtgaaagtgagggcatataaaggaataataccaaccaaatgataaaagtgagaataataggggaagtatctttataggactttaattagaaagatc

SEQ ID NO: 153416 - DNA, 120 bp, Artificial Sequence
  ENSG00000105967_24 (sequence is synthesized)
tggatgccctagaagatgtctgttggggagttctgaagcataagactgacaacaggttgtgaaggcccttagaaaactatggtgaaataatatagtattaatataatagaaacaaatctt

SEQ ID NO: 153417 - DNA, 120 bp, Artificial Sequence
  ENSG00000105967_25 (sequence is synthesized)
tttagtagcagggaggatgctaaaaactaaaatatatattactaatgagtgagatgtaatctttcatgaatattaagctttgggataaattttgaaaggatcttttagttgcttctcaca

SEQ ID NO: 153418 - DNA, 120 bp, Artificial Sequence
  ENSG00000105967_26 (sequence is synthesized)
tggaaaatatgtcactatgaaatgtgagaccctaatgctgataaaagtagaaaaatagtaaatcattatggtataataattatctcaggcttagcttgtatcatttgctcagaatttgga

SEQ ID NO: 153419 - DNA, 120 bp, Artificial Sequence
  ENSG00000105967_27 (sequence is synthesized)
ttctgggtacagtcattaaagcctgatagataaattcatctgaaatatgccatgtgaaacagctattagatacatcttctcaataattttcaagacgatattacatacttttaattttat

SEQ ID NO: 153420 - DNA, 120 bp, Artificial Sequence
  ENSG00000105967_28 (sequence is synthesized)
aacaaaattccacttcattatctgagttgataatttgattaaatgttaaaaattatagataaggaatatattttggagttcatagaaaacacaccactttattagatagagactggcttc

SEQ ID NO: 153421 - DNA, 120 bp, Artificial Sequence
  ENSG00000105967_29 (sequence is synthesized)
agttctcattttatctgctcttctcatttcttcatattttgagtagacttgcactgatgatgtcattactcagtcattattttctgttctgttaaggtacaactactgggccttgaaatc

SEQ ID NO: 153422 - DNA, 120 bp, Artificial Sequence
  ENSG00000105967_30 (sequence is synthesized)
tatccttcacaatcttggctgagataaggacttggcacaggatgatagagcctggacacaagagatctggagagggaactgctatttgctgctacattcagattatgagatgtcagggaa

SEQ ID NO: 153423 - DNA, 120 bp, Artificial Sequence
  ENSG00000105967_31 (sequence is synthesized)
ctgtaaaaagggtaatgaatttttaaagagagtaaagagttatgctgtgtcccggtcaactgaaatacattaaaaattaattagatggtagttcttaactttttaaggcagataccttga

SEQ ID NO: 153424 - DNA, 120 bp, Artificial Sequence
  ENSG00000105967_32 (sequence is synthesized)
gaatctagtgagttatagaccctctccctagaaaagtatagaactgtttatatggacaataattcacatgcattcagagatcttagggatctcctgaatgttttcttggatcccaagtga

SEQ ID NO: 153425 - DNA, 120 bp, Artificial Sequence
  ENSG00000105967_33 (sequence is synthesized)
aaaattcctgaatcaggtctcttaggtgtgcggttaatgtcatgtataacaatggggggacccttacttatctaaatataattatcccaatcctaataatgatgaggttgcataggaaag

SEQ ID NO: 153426 - DNA, 120 bp, Artificial Sequence
  ENSG00000105967_34 (sequence is synthesized)
taatagtgtaccaaactttagattattcactaaaaaagttgttcatttatgaagtagtcgtttatcaaacatgtcctccccactcagcaaactatgccttctatttattatatatgggtc

SEQ ID NO: 153427 - DNA, 120 bp, Artificial Sequence
  ENSG00000105967_35 (sequence is synthesized)
agtttcactataattactgagtgttataaacatctgaccataacattttgaaatgatgcaaataaatttccaaacaaaaatagtgtgaatttaaaagcaaattatttgagtatctaagaa

SEQ ID NO: 153428 - DNA, 120 bp, Artificial Sequence
  ENSG00000105967_36 (sequence is synthesized)
acaagatagacttctagaaaaatttgactctctagaatatttcttgcagaaatgagatttttcataatagtaaaagaggcatatgtttatcaaacaatgctgtcacaaaaagcatcaact

SEQ ID NO: 153429 - DNA, 120 bp, Artificial Sequence
  ENSG00000105967_37 (sequence is synthesized)
tgtcacaaaaagcatcaactgtaatgggactattaatgcataattattgatttattcattcaattaatatacaattatcccttttcatttaaagatttaattcataattacaattataat

SEQ ID NO: 153430 - DNA, 120 bp, Artificial Sequence
  ENSG00000105967_38 (sequence is synthesized)
atacaataattttattgtttttcattcttttttcaacaaaatatcccatccaatcattttttatattattaaatattggctgctttttcttggattcacattaaacagccctttccaact

SEQ ID NO: 153431 - DNA, 120 bp, Artificial Sequence
  ENSG00000105967_39 (sequence is synthesized)
tccaattgtcttaaaataatgatgacctcctgtgagtagatacagctctttacaatttttttctttagtgccttttcttcttgaatttttcctatatcaaatggagaatatatgtacaga

SEQ ID NO: 153432 - DNA, 120 bp, Artificial Sequence
  ENSG00000105967_40 (sequence is synthesized)
tggtattttctcagtttataggcatatcagtgaccatggctttctttatataggtttttaaaaaagccctaaataataaatagccagatgagctggggacattgagaaatagccttcctc

SEQ ID NO: 153433 - DNA, 120 bp, Artificial Sequence
  ENSG00000105967_41 (sequence is synthesized)
ttcctttttcaactcatttttttcccacctacatgactgtaaatcaaatatttaatagctcttacttaaaaaaacagatacaaagaatgtcttgatttggtgtgctcatttaccataatg

SEQ ID NO: 153434 - DNA, 120 bp, Artificial Sequence
  ENSG00000105967_42 (sequence is synthesized)
tcatgaggggaattagatttcacaactttaaaaggaatatatttttattttattttgaaaaactgagtcatataggaattttcttatacttcaaggcatcatggaaacacttttttcctg

SEQ ID NO: 153435 - DNA, 120 bp, Artificial Sequence
  ENSG00000105967_43 (sequence is synthesized)
tttggatattgtggaatttaaacgttcaaataaataaatggcataactaagtgttccaaatttttttacaatgtctttgaccctattcaaacactttaggtatttactgaccgtctgatg

SEQ ID NO: 153436 - DNA, 120 bp, Artificial Sequence
  ENSG00000105967_44 (sequence is synthesized)
tgtaagatgtggaataaaactggaatcaattaattatttcactgtgttatcagcgcaagatcaaccatctgggtttcttaaagacacccgaaggattgaattttgtttcagtattgataa

SEQ ID NO: 153437 - DNA, 120 bp, Artificial Sequence
  ENSG00000105967_45 (sequence is synthesized)
tggcatagtctctatgtgctacatggaattacatcatttatccctccagtgccctatatgttgataagtatgtcagtttgacttagtatacatatatacagagatttcattacatttacc

SEQ ID NO: 153438 - DNA, 120 bp, Artificial Sequence
  ENSG00000105967_46 (sequence is synthesized)
taataaatacaaaatacatttcgagtgttactgatctcctatgttacatgagcctcctgtaatcattgtgcattgatgttccaatgttttattgtttgtatgaattttaatttgaaaaca

SEQ ID NO: 153439 - DNA, 120 bp, Artificial Sequence
  ENSG00000105967_47 (sequence is synthesized)
aggaaacaatccaaaagcagaaaaaatagcttttcttaaaattttcagtgctacattttccctctgaggtccatagagatttgaatgtataggagattatccgaaaacagctattttgat

SEQ ID NO: 153440 - DNA, 120 bp, Artificial Sequence
  ENSG00000105967_48 (sequence is synthesized)
taaaaaatatatctcccaggattcaaccaacttaatgatgaagtactattgtctactgctttatacataaaagggaactttttatctgcttgtaaagggatttttatgtgtatttctgca

SEQ ID NO: 153441 - DNA, 120 bp, Artificial Sequence
  ENSG00000105967_49 (sequence is synthesized)
taatcagatgacttctattgtgttttctactgatgaaattctctgtaaaatgtctttttcttacattatccaacaggcataaagaataacagtaaagacttttgtgtttgtaatactacc

SEQ ID NO: 153442 - DNA, 120 bp, Artificial Sequence
  ENSG00000105967_50 (sequence is synthesized)
tcttttatccctgcactactgttttattgcaaaaattctatattgtcactgtattttttccatagaatataaattttgttcttgtgctaaagctggtagtttatgtagcagacaaaatat

SEQ ID NO: 153443 - DNA, 120 bp, Artificial Sequence
  ENSG00000105967_51 (sequence is synthesized)
acaaataaaagaagagactgattttgctgaaagaattatatataatcaagaagttacatattgttctttaaatatgatactgaattttaaaagcaaacgaaattcaagaatcttatctaa

SEQ ID NO: 153444 - DNA, 120 bp, Artificial Sequence
  ENSG00000105967_52 (sequence is synthesized)
cagcatagcagttgcttatggcatacaaggctaaaattaattcagctatttaatcttaataattattatgtagttaaaaatctttgactttaatagtgttttacatatacaaatagctga

SEQ ID NO: 153445 - DNA, 120 bp, Artificial Sequence
  ENSG00000105967_53 (sequence is synthesized)
agtaacattcctataattttaatctgacattggttagatcaagaaaacattgttaataagactgtagaatttgtaattattgctatttttcatttttaataacaaagtaatgtgtcttat

SEQ ID NO: 153446 - DNA, 120 bp, Artificial Sequence
  ENSG00000105967_54 (sequence is synthesized)
tttctaagaaaatggagaactttggtgtactttaatacatacaaaaatctttgtaaaaataccttaaaatgtaccaatattttctttgcatatattaaatgaaagactataattatgaaa

SEQ ID NO: 153447 - DNA, 120 bp, Artificial Sequence
  ENSG00000105967_55 (sequence is synthesized)
ctttagtgtagaagtttccacacagttctcttggttattgtttgcaagtttaaggaaaagaaaatgatgaaggagaaagagaaaaccattgctattgtgaaggttatagacacttcaaag

SEQ ID NO: 153448 - DNA, 120 bp, Artificial Sequence
  ENSG00000105967_56 (sequence is synthesized)
aaaaagaggagaagtgggagtaaacagaaagataatgcttatggtacatacaaaacaaatggagagattgagtctcacggattcttcgcctgagccaccagcaaaggtgatgccatgctg

SEQ ID NO: 153449 - DNA, 120 bp, Artificial Sequence
  ENSG00000105967_57 (sequence is synthesized)
ctatgaatgggcagaaaaagcctgactgaactagtgacttttcagtgaagatgtgaatgtggagtgtgcatcaagagccatccaagtcaaaatctaggaaaagaaaattccatggagaga

SEQ ID NO: 153450 - DNA, 120 bp, Artificial Sequence
  ENSG00000105967_58 (sequence is synthesized)
ctgaaacacaggggttctacaaacacagaacaagctagaaagcatttgactccctgttataccagtcacagcctattctccaccaacaaatataggataagagaggttcctgcttgacac

SEQ ID NO: 153451 - DNA, 120 bp, Artificial Sequence
  ENSG00000105967_59 (sequence is synthesized)
ggtcattgaaataattgcctatgatgataccatcacatgagtcctatcaatgatttagttccctagagaaaatcagaaagtaaaagtgagaagaaaagaagagaaatatgttacaagctt

SEQ ID NO: 153452 - DNA, 120 bp, Artificial Sequence
  ENSG00000105967_60 (sequence is synthesized)
taactggacttcaatttcagctgaaagaacaattaggagaaaaggagagaagacttcaaatcagccaggaaatcagtgcccatagaacagagttccacatgcagttttcatacaaaccag

SEQ ID NO: 153453 - DNA, 120 bp, Artificial Sequence
  ENSG00000105967_61 (sequence is synthesized)
aaaaagaggagaagtgggagtaaacagaaagataatgcttatggtacatacaaaacaaatggagagattgagtctcacggattcttcgcctgagccaccagcaaaggaccatgttaactg

SEQ ID NO: 153454 - DNA, 120 bp, Artificial Sequence
  ENSG00000105967_62 (sequence is synthesized)
gaaaaagaggagaagtgggagtaaacagaaagataatgcttatggtacatacaaaacaaatggagagattgagtctcacggattcttcgcctgagccaccagcaaagagtcctatcaatg

SEQ ID NO: 153455 - DNA, 120 bp, Artificial Sequence
  ENSG00000105967_63 (sequence is synthesized)
gccatgagtcacatagcttacacatgactcagctgtcatcagttttcttcattggtctcatttattttttctcttattaacaattatttttccttttgaaggataattttactgcttttt

SEQ ID NO: 153456 - DNA, 120 bp, Artificial Sequence
  ENSG00000105967_64 (sequence is synthesized)
caggatcaagatggctgaatatgtatatatgtatatatgtatatacacatatatgtgtatatatgtgtgtatgtgtgcatgtatatatatatacacatatataatgacaacaaattacaa

SEQ ID NO: 153457 - DNA, 120 bp, Artificial Sequence
  ENSG00000105967_65 (sequence is synthesized)
ctcatttcataaatgcacacattattatcctaatcaaataataatactaagtaaaacatttgtttctctacattatattggacattaaattctcccctccttctttcatttctttccaac

SEQ ID NO: 153458 - DNA, 120 bp, Artificial Sequence
  ENSG00000105967_66 (sequence is synthesized)
attgctatggatttcattgcctcaaggcatgttgtgacagtgtatattaagtcacttctcatctgttcatataatccaaaatatcaaaatatgggcttttataactctcaagatttttta

SEQ ID NO: 153459 - DNA, 120 bp, Artificial Sequence
  ENSG00000105967_67 (sequence is synthesized)
acagtgagaaattaatcaggaagaataaatagatgactttctgctatctccaaatggctatattgtagtctgagccactatggaaccatcatcagtcataacctttgtagaacaatgaga

SEQ ID NO: 153460 - DNA, 120 bp, Artificial Sequence
  ENSG00000105967_68 (sequence is synthesized)
ccaaacttaaaaaaaagtctgagtaattttctcagagttatttttcatgcatcagaaatgtatcaatttcattatttgcaaagattattcataatttgtattgtattactcttcatttta

SEQ ID NO: 153461 - DNA, 120 bp, Artificial Sequence
  ENSG00000105968_0 (sequence is synthesized)
gcggcggtcggtgctgcgagagcggcggcggcggcgcgggtcggcagcgggagggcgcgcggccgagcggaggcggagtcggcgccgagaacatggctggaggcaaagctggaaaggaca

SEQ ID NO: 153462 - DNA, 120 bp, Artificial Sequence
  ENSG00000105968_1 (sequence is synthesized)
gtgggaaggccaaggctaaggcagtatctcgctcacagagagctgggctacagtttcctgtgggccgcatccacagacacttgaagactcgcaccacaagccatggaagggtgggtgcca

SEQ ID NO: 153463 - DNA, 120 bp, Artificial Sequence
  ENSG00000105968_2 (sequence is synthesized)
ctgctgccgtgtacagtgctgcgattctggagtacctcactgcagaggtgctggagctggcaggtaatgcttctaaggatctcaaagtaaagcgtatcactccgcgtcacttgcagcttg

SEQ ID NO: 153464 - DNA, 120 bp, Artificial Sequence
  ENSG00000105968_3 (sequence is synthesized)
atcaaggctaccatagctgggggtggtgtgatccctcacatccacaaatctctgattggaaagaagggacagcagaaaactgcttagagggatgctttaaccaaccctcttcctccccgt

SEQ ID NO: 153465 - DNA, 120 bp, Artificial Sequence
  ENSG00000105968_4 (sequence is synthesized)
cattgtactgtaactgggacagaagaaataatggggatatgtggaatttttaacaacagttaaatggaaaagcatagacaattactgtagacatgataaaagaaacatttgtatgttctt

SEQ ID NO: 153466 - DNA, 120 bp, Artificial Sequence
  ENSG00000105968_5 (sequence is synthesized)
agactcgaagtttgataaaagtaccttttcatgtggtgacagttgtgtgttgattggctaggtttctcccgtgtgttttatacaaaaatggaattgataaaccattttttacaaaattaa

SEQ ID NO: 153467 - DNA, 120 bp, Artificial Sequence
  ENSG00000105968_6 (sequence is synthesized)
taaatctataacaattctaagcttttcataatgatctgaataaatatttcaccttctagccatatgtaatgctatttttattttagccagttctttgtctaaatttcatatgatacttaa

SEQ ID NO: 153468 - DNA, 120 bp, Artificial Sequence
  ENSG00000105968_7 (sequence is synthesized)
agcctgatgtttaacatatttcccatacttttttaactgtgtttgaaaaatgagttggagaagttgcataacatacactggaaagggttgaaataaatacacttgaaaagtgggtcagga

SEQ ID NO: 153469 - DNA, 120 bp, Artificial Sequence
  ENSG00000105968_8 (sequence is synthesized)
agtgggtcaggatcaatgaaagtgagaggtaagttggtggttcttaatcttctttggataaccctcaaagaacctcgtgaaagctgtggttacagctgggcacggtggctcacacctgta

SEQ ID NO: 153470 - DNA, 120 bp, Artificial Sequence
  ENSG00000105968_9 (sequence is synthesized)
gcaaggttttgctgatttagtggaacaagattctactgggatgtgtgctgagctgaaccaaggaactgcccgaatgtgctgaacaaggacatttgcttctcagatacgtgaattcaattt

SEQ ID NO: 153471 - DNA, 120 bp, Artificial Sequence
  ENSG00000105968_10 (sequence is synthesized)
taagcaagattcttgatctgcttcagagcagctttgatttaaagtaatttcagagcgcttttccttgcatgagtaattttctgaatgtataaaatattctatttatgtttgaccttttgg

SEQ ID NO: 153472 - DNA, 120 bp, Artificial Sequence
  ENSG00000105968_11 (sequence is synthesized)
ataaactgtgttgctgcagtgttggtccacactaccatcctaagtgaagacttagtaagtctgaggatctccaggcactggaaagagtgagaacctgggagtgaaagggttatagttagt

SEQ ID NO: 153473 - DNA, 120 bp, Artificial Sequence
  ENSG00000105968_12 (sequence is synthesized)
gttcatttttcgggttttgtttcatagggagtcctgagtggggtaacctgaaatgttttaacagttgaagatcatcctattcctatccccagtaaaaataggcctttccacaatcttcta

SEQ ID NO: 153474 - DNA, 120 bp, Artificial Sequence
  ENSG00000105968_13 (sequence is synthesized)
ccagttaacttagctttttttttttttttttcctttaatagagtctcattcttgtcacccagactggagtgcgatggcacgatcttggctcactgcaaccctccctcccgggttccagcg

SEQ ID NO: 153475 - DNA, 120 bp, Artificial Sequence
  ENSG00000105968_14 (sequence is synthesized)
tcctgacctcaggcgatccgcccgtctaagccttccaaagtgctgggattactggcaggaaccaccaggcccagccaaccagcatttcttaaggtgaaaatacatggtgttaatttatat

SEQ ID NO: 153476 - DNA, 120 bp, Artificial Sequence
  ENSG00000105968_15 (sequence is synthesized)
tttgagtgagacccagtccagctgctataactgcttggacacttggcagaggacagagtactgcaaaagtgtctaagggagacagcattttgccttgggtgctgtagatgtacaagagag

SEQ ID NO: 153477 - DNA, 120 bp, Artificial Sequence
  ENSG00000105968_16 (sequence is synthesized)
gttccaggagggggtgataggcagaattttggtccccatcaccttccctgcccagtgttatgcctatgaatgtgttacattatgtggtaaaagggactttgcagatgtaactaaaatttc

SEQ ID NO: 153478 - DNA, 120 bp, Artificial Sequence
  ENSG00000105968_17 (sequence is synthesized)
taaaatagagatattatcctggattacctgggggaacccagtgtaattacatgaacccttaaaaatggaagaggatgcaggagtcagattcaaaggaaggcccaaggtgctattgctgac

SEQ ID NO: 153479 - DNA, 120 bp, Artificial Sequence
  ENSG00000105968_18 (sequence is synthesized)
ttgaagatagaggggccatgtggaaatcaagagaaggaagtgaatccttccagtgagcttggaagaaagcaccttgaggcacagatgagaagcttggccttacctgatgccttgatttta

SEQ ID NO: 153480 - DNA, 120 bp, Artificial Sequence
  ENSG00000105968_19 (sequence is synthesized)
tgtggtaatttgttggctttaggcccctgagggtagagatttatggcttgtgttacaagtagagagcagtggagagttgggctttgtaattctttcaagggtgattgtagttctggagtc

SEQ ID NO: 153481 - DNA, 120 bp, Artificial Sequence
  ENSG00000105968_20 (sequence is synthesized)
ctatctacctgggttcagatctttgttggccagtccctggctgtgtgacttcactgctttaagcctctgtcttcatccttaaagtggtgatgatagtacctacctcactctgatctctga

SEQ ID NO: 153482 - DNA, 120 bp, Artificial Sequence
  ENSG00000105968_21 (sequence is synthesized)
atgagaacacatgtaagacacttagcacagttcctggtgctcaaagagttccaacacctgaaagcaccatggccctgtttgtttttcagtcaagatttctaaaagccgttattaccagag

SEQ ID NO: 153483 - DNA, 120 bp, Artificial Sequence
  ENSG00000105968_22 (sequence is synthesized)
gttcagtgagaacatgggcagggtaaactcaaaatggagaacataaaaactgggactcccagaccagtcacttagaagactgctgcaggaagtaccaaggtcgttaagaatcagtaataa

SEQ ID NO: 153484 - DNA, 120 bp, Artificial Sequence
  ENSG00000105968_23 (sequence is synthesized)
taataagtaatgtgtgaatccattagaatgttgagaagtagacctttgacatttcagaaaaatgtatatctcagacacagccatatgtattgttatccctgagttggaagagcatcacag

SEQ ID NO: 153485 - DNA, 120 bp, Artificial Sequence
  ENSG00000105968_24 (sequence is synthesized)
ggcatagtttcacaaaagcttcaaaaaatatactaattgctggtaatatgtgaactaacagaaaaaaatagccatgttaaaataggagtgcctgacaattagctctattcatcttgtctc

SEQ ID NO: 153486 - DNA, 120 bp, Artificial Sequence
  ENSG00000105968_25 (sequence is synthesized)
ctagctgtaagcaccctagattcaaattatgcacctagaaaactaaattactatgtatgttataggcctttgaaatggatacatgaaaattagtgaaatcagaatgaacgtttcgcctgc

SEQ ID NO: 153487 - DNA, 120 bp, Artificial Sequence
  ENSG00000105968_26 (sequence is synthesized)
caaagatatgtatttttataagtgatacaagggccccatgagctccatggccacatctgtacaaaacaggccctcctttcaggaactggtctcgagagagcaaaggggtcaactccctaa

SEQ ID NO: 153488 - DNA, 120 bp, Artificial Sequence
  ENSG00000105968_27 (sequence is synthesized)
atggcagctgagacagtcctccctggtggcatggccctgtttcctgttgatatggtgatagttggagagtcaaatttttaccagaatttgtgaatatcatctctggttaatgattacaca

SEQ ID NO: 153489 - DNA, 120 bp, Artificial Sequence
  ENSG00000105968_28 (sequence is synthesized)
aaaccttttaaaattttaaaaaattatttctaattctataaataaactctgcagttgtacagccactgtacagctaacatctcaacactggaaatgaggctggtttcttccagtttggct

SEQ ID NO: 153490 - DNA, 120 bp, Artificial Sequence
  ENSG00000105968_29 (sequence is synthesized)
cagattcttcagggaagcccagttaagacaaacagctctctatactcaatccttactttgctgagaagatacaggcctgcccactcgctcccacctgctcttcacgaggagtcctttatt

SEQ ID NO: 153491 - DNA, 120 bp, Artificial Sequence
  ENSG00000105968_30 (sequence is synthesized)
cctgcatgtttcctgttctttgggacctttaggagctaacctccacagatgctgatagtctgtagagtcaggaataccatgtaacatgttgaagtagactaaagattagttctttggcaa

SEQ ID NO: 153492 - DNA, 120 bp, Artificial Sequence
  ENSG00000105968_31 (sequence is synthesized)
tagcccagtctggacttactatgtacttttgaaaataaaactgcttatttgtaaactctgtaattaggaccttttgctatttgagttatattcctttctaacttcaaacgtctgcattca

SEQ ID NO: 153493 - DNA, 120 bp, Artificial Sequence
  ENSG00000105968_32 (sequence is synthesized)
tgtataatagccattttatgcacagatgaggtgattcccacactttttttcgcagatgtttcattatctggatgagtgtattacataataaatttgaataatggtagtcttccaaatgac

SEQ ID NO: 153494 - DNA, 120 bp, Artificial Sequence
  ENSG00000105968_33 (sequence is synthesized)
aaaaagcaagctagttgatttgtcaattttgagtttaaatgttttgactgcttatcagcaaaaaaaatcaaagaatagcatactaatattaatggaaatgcagagtatatttaattggca

SEQ ID NO: 153495 - DNA, 120 bp, Artificial Sequence
  ENSG00000105968_34 (sequence is synthesized)
tgattttttcatggatgtgtgcttcatttgatctattgtatgtagctcgtgatcacattttctgttggttaacattgttcctagcttatatgatggaattaaatatattctgtgtaaaaa

SEQ ID NO: 153496 - DNA, 120 bp, Artificial Sequence
  ENSG00000105968_35 (sequence is synthesized)
ggcggcggcggcgcgggtcggcagcgggagggcgcgcggccgagcggaggcggagtcggcgccgagaacatgtttcctgtgggccgcatccacagacacttgaagactcgcaccacaagc

SEQ ID NO: 153497 - DNA, 120 bp, Artificial Sequence
  ENSG00000105971_0 (sequence is synthesized)
gcaccgcgccagccgggctgcagcggccgcgcaccaaggctgcgatggggctggagacggagaaggcggacgtacagctcttcatggacgacgactcctacagccaccacagcggcctcg

SEQ ID NO: 153498 - DNA, 120 bp, Artificial Sequence
  ENSG00000105971_1 (sequence is synthesized)
agtacgccgaccccgagaagttcgcggactcggaccaggaccgggatccccaccggctcaactcgcatctcaagctgggcttcgaggatgtgatcgcagagccggtgactacgcactcct

SEQ ID NO: 153499 - DNA, 120 bp, Artificial Sequence
  ENSG00000105971_2 (sequence is synthesized)
ttgacaaagtgtggatctgcagccatgccctctttgaaatcagcaaatacgtaatgtacaagttcctgacggtgttcctggccattcccctggccttcattgcgggaattctctttgcca

SEQ ID NO: 153500 - DNA, 120 bp, Artificial Sequence
  ENSG00000105971_3 (sequence is synthesized)
ccctcagctgtctgcacatctggattttaatgccttttgtaaagacctgcctaatggttctgccttcagtgcagacaatatggaagagtgtgacagatgttatcattgctccattgtgta

SEQ ID NO: 153501 - DNA, 120 bp, Artificial Sequence
  ENSG00000105971_4 (sequence is synthesized)
cgagcgtaggacgatgcttctcttctgtcagcctgcaactgagccaggattgaatacttggaccccaggtctggagattgggatactgtaatacttctttgttattataacataaaagca

SEQ ID NO: 153502 - DNA, 120 bp, Artificial Sequence
  ENSG00000105971_5 (sequence is synthesized)
ccactgttctgttcatttcctagctgttctaattaagaaaactattaagatgagcaaccacatttagaaatgtttattgacaggtcttttcaaataatgcttttctaattaatagccaaa

SEQ ID NO: 153503 - DNA, 120 bp, Artificial Sequence
  ENSG00000105971_6 (sequence is synthesized)
gatttcatatctaactttgtaaccagaattatacagtaagttgacaccacttagatttaaaggcagacagttttgctttagtacaatagtatacattttataatgatgaacttataatga

SEQ ID NO: 153504 - DNA, 120 bp, Artificial Sequence
  ENSG00000105971_7 (sequence is synthesized)
ttaagggacatttctataaaaatactacaatagttttatgcacaacttcccattaaaaatgagatttcttatttgtttgtctgtttttactctgggagtaatactttttaaattaccttt

SEQ ID NO: 153505 - DNA, 120 bp, Artificial Sequence
  ENSG00000105971_8 (sequence is synthesized)
acatatatagtcactggcatactgagaatatacaatgatcctggaaattgcagtaacaaaagcacacaacgattatagtaactataagatacaataaaacaaataaatatgaaagtagat

SEQ ID NO: 153506 - DNA, 120 bp, Artificial Sequence
  ENSG00000105971_9 (sequence is synthesized)
tcatgaaaatgtattcctttaaaatattgttttcctacaggcctatttaacaagatgtttcattttactgtatattttgtagttaatataaatgttgctctaatcagattgcttaaaagc

SEQ ID NO: 153507 - DNA, 120 bp, Artificial Sequence
  ENSG00000105971_10 (sequence is synthesized)
atttttattatatttatgttgttgaactaatatatgaaataagtaaatgtagctcccacaaggtaaacttcattggtaagattgcactgttctgattatgtaagcatttgtacatcttct

SEQ ID NO: 153508 - DNA, 120 bp, Artificial Sequence
  ENSG00000105971_11 (sequence is synthesized)
ttggaaataaaagataaaagagcgatacacaaagctttcttttctaacttttccaagcaaaatctaaaatgttttatgacatttttctggctgtgatcttaaaataattcatatctaaat

SEQ ID NO: 153509 - DNA, 120 bp, Artificial Sequence
  ENSG00000105971_12 (sequence is synthesized)
tcactttactttcaagtaatattggtgctatttaacattttacagtaaatgttacttctgatactttagtacaatttcaactacagtgattcatgtagagagacaggggagttgtcaact

SEQ ID NO: 153510 - DNA, 120 bp, Artificial Sequence
  ENSG00000105971_13 (sequence is synthesized)
tgggctactgaactacatgcataaactaaaaactaacagctacaaacttttaagatttctctaatattggtatgtaacacaggataaagttattcttgtcattttgaactgtagagtcct

SEQ ID NO: 153511 - DNA, 88 bp, Artificial Sequence
  ENSG00000105971_14 (sequence is synthesized)
aggataaagttattcttgtcattttgaactgtagagtcctatttcagtgtgatgaatcactgttgctttgaaaaatctcattatttct

SEQ ID NO: 153512 - DNA, 120 bp, Artificial Sequence
  ENSG00000105971_15 (sequence is synthesized)
aaaagaaaaatctcattatttcaaaatgatagacatataccaaaaacaagtctataatgtgagtagttactaaaatttacacatcttaaaagtgtgtaaatgcttaaatttcagaattac

SEQ ID NO: 153513 - DNA, 120 bp, Artificial Sequence
  ENSG00000105971_16 (sequence is synthesized)
catcagaacctcaattgacattcctttgaatacgctaataagtgacaaataagattaataagatttttcaaaatcgccaggactggtgaatataaatgatgattgaactggaataatatt

SEQ ID NO: 153514 - DNA, 120 bp, Artificial Sequence
  ENSG00000105971_17 (sequence is synthesized)
ggggaccaaatcaaatgaatgattaaattatgaagctcatatccttttgaaggtagttgcaaagagacatttcaaaactgccctaggccattgcagcatccttagatgggacgcataatc

SEQ ID NO: 153515 - DNA, 120 bp, Artificial Sequence
  ENSG00000105971_18 (sequence is synthesized)
attaccttaaagcatcaccactcattttgaccatatagattttattatgttagtttaaaaggtcaatcagcctcatgactttatagttatgtcttgtatttaaaaacattttttatacat

SEQ ID NO: 153516 - DNA, 120 bp, Artificial Sequence
  ENSG00000105971_19 (sequence is synthesized)
ttggttatgttgataaaccaaaaacatttgattaataaaatatctatttgaataaattatgagctatcctttcaaacagctattggcaagttttaaacccaaaatatatacacatagttc

SEQ ID NO: 153517 - DNA, 120 bp, Artificial Sequence
  ENSG00000105971_20 (sequence is synthesized)
tgtaataaaactgtttgacttctcaagtaacatgacttccttatttctgaacagtactggttactttcaaaatgaatttttattgagattttccattaactatttttttcaaagactcaa

SEQ ID NO: 153518 - DNA, 120 bp, Artificial Sequence
  ENSG00000105971_21 (sequence is synthesized)
attttgtaccaagtaaatccaggctttatgtacaaacatgttgtttgttttatttggggctgggggaggtatatgatgagcagacttctcggaattcataataaattttctaaaagccta

SEQ ID NO: 153519 - DNA, 120 bp, Artificial Sequence
  ENSG00000105971_22 (sequence is synthesized)
cccatgccactatgctatctctaattctgccatccagaccgagcaaacgtacttaagacctttgtgtaagatcagaaaatcataagacagcattaaaaagtactatacaggaggagatgg

SEQ ID NO: 153520 - DNA, 120 bp, Artificial Sequence
  ENSG00000105971_23 (sequence is synthesized)
aacaagatggccaaatagaagcctccagcaatcatctccccgaaaggaattgaacaactatcaaaacaaaattgaacaactatctaaacaaaaaagtaccttcataaaaaacaaaaatca

SEQ ID NO: 153521 - DNA, 120 bp, Artificial Sequence
  ENSG00000105971_24 (sequence is synthesized)
attgtgaggcctccccagccacgtgaaacccttggcaggtcaccttgttctagcagatagaaactgaatcaatatgggaagagccagaatttggacaaggttcaccaaacattcacactg

SEQ ID NO: 153522 - DNA, 120 bp, Artificial Sequence
  ENSG00000105971_25 (sequence is synthesized)
aaggttcaccaaacattcacactgatgccaggtgggccaagaaaaagggaatgtcctgcctctgagacatatgaaggagggtcttttcatattaaattgttttcctggcagcacctgaac

SEQ ID NO: 153523 - DNA, 120 bp, Artificial Sequence
  ENSG00000105971_26 (sequence is synthesized)
caaaggatcagacttaaaataagtctttttccaatgttatgttgaaattggatacgacatttctcacaaaacttctaagtcaaacagtgatgagaaactactgcctaaaagtgggcctac

SEQ ID NO: 153524 - DNA, 120 bp, Artificial Sequence
  ENSG00000105971_27 (sequence is synthesized)
atcaaatcgttatggtctcgtaccaagatgtcttttgactgaggaagctaagaatacggctccttgttctcaccagtggactcctcctcagcagcaggggctcccttccccactacccat

SEQ ID NO: 153525 - DNA, 120 bp, Artificial Sequence
  ENSG00000105971_28 (sequence is synthesized)
gagggagatggtggcagttcaacaggaaaatgttgatattatggattcccataaggattcatgtcttctattcactttaatgaacagttgttgggcaacaattctagaagagttccaatt

SEQ ID NO: 153526 - DNA, 120 bp, Artificial Sequence
  ENSG00000105971_29 (sequence is synthesized)
ctcatcaggagaatggacaaggtggagaagcagagaaaatgcaatgagtagaatgtctaagtcatcactttggaattgactgaacataaataaaaatgagaaagatacgtaaaaaagaag

SEQ ID NO: 153527 - DNA, 120 bp, Artificial Sequence
  ENSG00000105971_30 (sequence is synthesized)
ggaatggatgccacagcccccattttgccaacgaggcagctgaggttcccagaggctcaataccagcaccatgagccgcagcacgcaaggcaaacacagccggaggattttaatgccttt

SEQ ID NO: 153528 - DNA, 120 bp, Artificial Sequence
  ENSG00000105971_31 (sequence is synthesized)
cgcaccatcttggaatcaggggacggccctcaccagacaactaaatctgcagacaccttggacttcccagcctccagaactgtctttctggcaactgtctaaacataaaccagagaaggg

SEQ ID NO: 153529 - DNA, 120 bp, Artificial Sequence
  ENSG00000105971_32 (sequence is synthesized)
caaggcagactcaggaaggacaaatagaaggctattttcataaatcgggcatacaatggtggacaaaacagctgcctttcttccccgtatggagcttacagtatagtgaatatttcatgg

SEQ ID NO: 153530 - DNA, 120 bp, Artificial Sequence
  ENSG00000105971_33 (sequence is synthesized)
gactagtatctacagaaggtgttttgggaagcacagctttggagagagtaatttgccaacattgcacagaataaaggcaccatgagggcccaaggaaggaaaagatttgcagctgtcttg

SEQ ID NO: 153531 - DNA, 120 bp, Artificial Sequence
  ENSG00000105971_34 (sequence is synthesized)
ttacagacagcccaaactaaatgggatcttggaggtcagccaaagacagaggctctcttgaagaggactcctgggactccagaaatggaggagacattaaatgagaaagcacttcctcct

SEQ ID NO: 153532 - DNA, 120 bp, Artificial Sequence
  ENSG00000105971_35 (sequence is synthesized)
ctggatactgtgtaatctttatcaggaccacacaatgtgcctttatgtgtgatgatagtggacagatgtgatatttccaatggattctatcttgcttgcttatttatgtattgctcagac

SEQ ID NO: 153533 - DNA, 120 bp, Artificial Sequence
  ENSG00000105971_36 (sequence is synthesized)
ttcagcctttagtctgaaacaaaataagttagaacgttcattgcttctaatttataatgaggaactactgatcggctttctgagactgcatattaggtttcatgtcacagatgtttatat

SEQ ID NO: 153534 - DNA, 120 bp, Artificial Sequence
  ENSG00000105971_37 (sequence is synthesized)
gaatgacatcatgtagtatatactcttttccttctggcttctttcactcagcataaatatttaagattcatctgtgttgcaacatatgaaggagggtcttttcatattaaattgttttcc

SEQ ID NO: 153535 - DNA, 120 bp, Artificial Sequence
  ENSG00000105971_38 (sequence is synthesized)
ctgagacccgcacccttccccggtcccacccgtcaccaggccgcccgcgtagccaggaattcttagccaggttcctgtgcgcccaccgtgaccctaagagaagaggcggacgccctggca

SEQ ID NO: 153536 - DNA, 120 bp, Artificial Sequence
  ENSG00000105971_39 (sequence is synthesized)
cgtccttccctcctgcttcccccgcccaaagcgctcccggttcccggggcgtcaggttggctgacagttcggggtccctgcgtcctgtctcctcagctgggcttcgaggatgtgatcgca

SEQ ID NO: 153537 - DNA, 120 bp, Artificial Sequence
  ENSG00000105971_40 (sequence is synthesized)
caccaccacatgtgcagcatccctctgggtctcttccatgacaaccctgtgggaagccaggcaagtgagaatcaatgtaaacatgaagttcatgctgcttactgtgtcgtgataatgtcc

SEQ ID NO: 153538 - DNA, 120 bp, Artificial Sequence
  ENSG00000105971_41 (sequence is synthesized)
ggctattttcataaatcggtgatcagaagaacatattccatttcctgagatgaaaaaatccttaggaagagaaagttttaaggaaaccaagagttccattatggacaaaaccaccaccac

SEQ ID NO: 153539 - DNA, 120 bp, Artificial Sequence
  ENSG00000105971_42 (sequence is synthesized)
atgtgcagcatccctctgggtctcttccatgacaaccctgtgggaagccagcttggcaggtcaccttgttctagcagatagaaactgaatcaatatgggaagagccagaatttggacaag

SEQ ID NO: 153540 - DNA, 120 bp, Artificial Sequence
  ENSG00000105971_43 (sequence is synthesized)
gttcaccaaacattcacactgatgccagaactggagtgcaggtcccagcttcccatactgtggagtggccatgcgttgtctggcccgtgaaatgtgagcagagggatctgtgtaacttac

SEQ ID NO: 153541 - DNA, 120 bp, Artificial Sequence
  ENSG00000105971_44 (sequence is synthesized)
aggctcagcatgaaatatcacccatgtgacctccatatactttctcatgaaggtcagccaaagacagaggctctcttgaagaggactcctgggactccagaaatggaggagacattaaat

SEQ ID NO: 153542 - DNA, 120 bp, Artificial Sequence
  ENSG00000105971_45 (sequence is synthesized)
gcatcagttcccaagcagtaggaagaactggaaggccttgaaaggcaatgcgcttcctttagaataacagtttgggcttggagtttcaacaggagaaagaatgattttaatgccttttgt

SEQ ID NO: 153543 - DNA, 120 bp, Artificial Sequence
  ENSG00000105971_46 (sequence is synthesized)
ttgcatacataaggctgggctgagtgtggaggcgggtacctggaagccacacttcttaccacaggctgctctcggggccctgttgtgactcgtacctgcggttctgggcaggactcttct

SEQ ID NO: 153544 - DNA, 120 bp, Artificial Sequence
  ENSG00000105971_47 (sequence is synthesized)
ttctttcattgccttttattcagtcactgcctgtgcttggggtaaaacaaaagtgatctctgagcagaatgccgctgacagtagaattggatgaggatgtcagacctggttaagcagtag

SEQ ID NO: 153545 - DNA, 120 bp, Artificial Sequence
  ENSG00000105971_48 (sequence is synthesized)
tgtggaggggctgcttcaactttgcccctggcagatggcaaggatgggacccagaggaaagggaggtgtgtgcagttaaggcgagggtcccccccagtacaaacgaatgaaaactccagc

SEQ ID NO: 153546 - DNA, 120 bp, Artificial Sequence
  ENSG00000105971_49 (sequence is synthesized)
tgcgggataatgaatgagaaggcctccaaattactttttcactgatgaaacacaaatggaagtggcatataattaaaggggaaagaaatatggaagcccactgtatattgataggatatt

SEQ ID NO: 153547 - DNA, 120 bp, Artificial Sequence
  ENSG00000105971_50 (sequence is synthesized)
ttgagtaactctattcatactcaaaatgtgtcctaaactgtagagaactttcttaagcatcttttaaattttttatggaaaatgtcatattttaccaataaatgttgttgtgttagaaaa

SEQ ID NO: 153548 - DNA, 120 bp, Artificial Sequence
  ENSG00000105974_0 (sequence is synthesized)
acagttttcatccagccacgggccagcatgtctgggggcaaatacgtagactcggagggacatctctacaccgttcccatccgggaacagggcaacatctacaagcccaacaacaaggcc

SEQ ID NO: 153549 - DNA, 120 bp, Artificial Sequence
  ENSG00000105974_1 (sequence is synthesized)
atggcagacgagctgagcgagaagcaagtgtacgacgcgcacaccaaggagatcgacctggtcaaccgcgaccctaaacacctcaacgatgacgtggtcaagattgactttgaagatgtg

SEQ ID NO: 153550 - DNA, 120 bp, Artificial Sequence
  ENSG00000105974_2 (sequence is synthesized)
attgcagaaccagaagggacacacagttttgacggcatttggaaggccagcttcaccaccttcactgtgacgaaatactggttttaccgcttgctgtctgccctctttggcatcccgatg

SEQ ID NO: 153551 - DNA, 120 bp, Artificial Sequence
  ENSG00000105974_3 (sequence is synthesized)
gcactcatctggggcatttacttcgccattctctctttcctgcacatctgggcagttgtaccatgcattaagagcttcctgattgagattcagtgcatcagccgtgtctattccatctac

SEQ ID NO: 153552 - DNA, 120 bp, Artificial Sequence
  ENSG00000105974_4 (sequence is synthesized)
gtccacaccgtctgtgacccactctttgaagctgttgggaaaatattcagcaatgtccgcatcaacttgcagaaagaaatataaatgacatttcaaggatagaagtatacctgatttttt

SEQ ID NO: 153553 - DNA, 120 bp, Artificial Sequence
  ENSG00000105974_5 (sequence is synthesized)
ttccttttaattttcctggtgccaatttcaagttccaagttgctaatacagcaacaatttatgaattgaattatcttggttgaaaataaaaagatcactttctcagttttcataagtatt

SEQ ID NO: 153554 - DNA, 120 bp, Artificial Sequence
  ENSG00000105974_6 (sequence is synthesized)
atgtctcttctgagctatttcatctatttttggcagtctgaatttttaaaacccatttaaatttttttccttacctttttatttgcatgtggatcaaccatcgctttattggctgagata

SEQ ID NO: 153555 - DNA, 120 bp, Artificial Sequence
  ENSG00000105974_7 (sequence is synthesized)
tgaacatattgttgaaaggtaatttgagagaaatatgaagaactgaggaggaaaaaaaaaaaaaagaaaagaaccaacaacctcaactgcctactccaaaatgttggtcattttatgtta

SEQ ID NO: 153556 - DNA, 120 bp, Artificial Sequence
  ENSG00000105974_8 (sequence is synthesized)
agggaagaattccagggtatggccatggagtgtacaagtatgtgggcagattttcagcaaactcttttcccactgtttaaggagttagtggattactgccattcacttcataatccagta

SEQ ID NO: 153557 - DNA, 120 bp, Artificial Sequence
  ENSG00000105974_9 (sequence is synthesized)
ggatccagtgatccttacaagttagaaaacataatcttctgccttctcatgatccaactaatgccttactcttcttgaaattttaacctatgatattttctgtgcctgaatatttgttat

SEQ ID NO: 153558 - DNA, 120 bp, Artificial Sequence
  ENSG00000105974_10 (sequence is synthesized)
gtctaactcagcaactcgctttaggtcagcagcctccctgaagaccaaaattagaatatccatgacctagttttccatgcgtgtttctgactctgagctacagagtctggtgaagctcac

SEQ ID NO: 153559 - DNA, 120 bp, Artificial Sequence
  ENSG00000105974_11 (sequence is synthesized)
ttctgggcttcatctggcaacatctttatccgtagtgggtatggttgacactagcccaatgaaatgaattaaagtggaccaatagggctgagctctctgtgggctggcagtcctggaagc

SEQ ID NO: 153560 - DNA, 120 bp, Artificial Sequence
  ENSG00000105974_12 (sequence is synthesized)
cagctttccctgcctctcatcaactgaatgaggtcagcatgtctattcagcttcgtttattttcaagaataatcacgctttcctgaatccaaactaatccatcaccggggtggtttagtg

SEQ ID NO: 153561 - DNA, 120 bp, Artificial Sequence
  ENSG00000105974_13 (sequence is synthesized)
gctcaacattgtgttcccatttcagctgatcagtgggcctccaaggaggggctgtaaaatggaggccattgtgtgagcctatcagagttgctgcaaacctgacccctgctcagtaaagca

SEQ ID NO: 153562 - DNA, 120 bp, Artificial Sequence
  ENSG00000105974_14 (sequence is synthesized)
cttgcaaccgtctgttatgctgtgacacatggcccctccccctgccaggagctttggacctaatccaagcatccctttgcccagaaagaagatgggggaggaggcagtaataaaaagatt

SEQ ID NO: 153563 - DNA, 120 bp, Artificial Sequence
  ENSG00000105974_15 (sequence is synthesized)
gaagtattttgctggaataagttcaaattcttctgaactcaaactgaggaatttcacctgtaaacctgagtcgtacagaaagctgcctggtatatccaaaagctttttattcctcctgct

SEQ ID NO: 153564 - DNA, 120 bp, Artificial Sequence
  ENSG00000105974_16 (sequence is synthesized)
catattgtgattctgcctttggggacttttcttaaaccttcagttatgatttttttttcatacacttattggaactctgcttgatttttgcctcttccagtcttcctgacactttaatta

SEQ ID NO: 153565 - DNA, 120 bp, Artificial Sequence
  ENSG00000105974_17 (sequence is synthesized)
ccaacctgttacctactttgactttttgcatttaaaacagacactggcatggatatagttttacttttaaactgtgtacataactgaaaatgtgctatactgcatactttttaaatgtaa

SEQ ID NO: 153566 - DNA, 120 bp, Artificial Sequence
  ENSG00000105974_18 (sequence is synthesized)
agatatttttatctttatatgaagaaaatcacttaggaaatggctttgtgattcaatctgtaaactgtgtattccaagacatgtctgttctacatagatgcttagtccctcatgcaaatc

SEQ ID NO: 153567 - DNA, 120 bp, Artificial Sequence
  ENSG00000105974_19 (sequence is synthesized)
aattactggtccaaaagattgctgaaattttatatgcttactgatatattttacaattttttatcatgcatgtcctgtaaaggttacaagcctgcacaataaaaatgtttaacggttaaa

SEQ ID NO: 153568 - DNA, 120 bp, Artificial Sequence
  ENSG00000105974_20 (sequence is synthesized)
agagtacagaggggtgtggtgtcctctgcgagatcctcttaaaaagctggctacgcgcaggcggtttctgtgcacggagccgtagctgtcggagcggttagttcgatttcgagctcgagg

SEQ ID NO: 153569 - DNA, 120 bp, Artificial Sequence
  ENSG00000105974_21 (sequence is synthesized)
tttcccccgccgccaggctgacttctcatcgcttgtttttctttttgcatttttcctcccaccgccgttgccgccctccccgtcctggccgtccgccctccgccctctgcagggacatct

SEQ ID NO: 153570 - DNA, 120 bp, Artificial Sequence
  ENSG00000105974_22 (sequence is synthesized)
ggcaggcgcgccctgcagagtacagaggggtgtggtgtcctctgcgagatcctcttaaaaagctggctacgcgcaggcggtttctgtgcacggagccgtagctgtcggagcgggacatct

SEQ ID NO: 153571 - DNA, 120 bp, Artificial Sequence
  ENSG00000105974_23 (sequence is synthesized)
taaagcacagcccagggaaacctcctcacagttttcatccagccacgggccagcatgtctgggggcaaatacgtagactcggaggtaggcatccgtgggggggcgccggctcgggcgtgc

SEQ ID NO: 153572 - DNA, 120 bp, Artificial Sequence
  ENSG00000105974_24 (sequence is synthesized)
ggggagtgtccgcttctgctatctgcctctccaaatatcccgactgctgccctggccccagccctctctccacttcggagcactcctctggcgttggcaccgctgaggaatgggcctggg

SEQ ID NO: 153573 - DNA, 120 bp, Artificial Sequence
  ENSG00000105974_25 (sequence is synthesized)
cggggaggtgaagagaagccaggaatgttttatgttttcctaatggagagggggcctagggagcccctgagctaggaggacacggaaaaggggattggggtcctgagattgggtctgttg

SEQ ID NO: 153574 - DNA, 120 bp, Artificial Sequence
  ENSG00000105974_26 (sequence is synthesized)
ggcccaggacgcgttttctggatgggtctaggatgctcccttgtcgcgggacccccgcggtccggccctgcctgctgggggttcgaagaggtggagtgcagggtggaggtgttatttacc

SEQ ID NO: 153575 - DNA, 120 bp, Artificial Sequence
  ENSG00000105974_27 (sequence is synthesized)
cgagtcctggggacagtccccgggactctccgccaggcgcccagaccggcaggtcccgcaggcggcgcgcggtgtgtttgcactttccaaagttcttgaaccatctcaagaactccttct

SEQ ID NO: 153576 - DNA, 120 bp, Artificial Sequence
  ENSG00000105974_28 (sequence is synthesized)
gcatcttggcgtctggcaggggtgttccgagagaggtagacctcccctccccaaactgccaccatcacttccaacgccctccacgcgctggagctctgcccgggtgtggaaacctcgtct

SEQ ID NO: 153577 - DNA, 120 bp, Artificial Sequence
  ENSG00000105974_29 (sequence is synthesized)
tccaacacgtagctgcccttcagccacccgcccgcagcctgggagtgccctgagggtgggtcgggggagctgcgcagggacatctctacaccgttcccatccgggaacagggcaacatct

SEQ ID NO: 153578 - DNA, 120 bp, Artificial Sequence
  ENSG00000105974_30 (sequence is synthesized)
acaccccaccccgccccctacacgcgcacacacacacacacacagagttttgtgggtttgatgtgtgggagctcccgcagtcggcagaaacgttacatctcccttcccccatctcccccc

SEQ ID NO: 153579 - DNA, 120 bp, Artificial Sequence
  ENSG00000105974_31 (sequence is synthesized)
aatagttagttcagctgaaattcagctaaagtgagttttgtagaagttcctataactacacttttatcctagcaaatgagcctattgacctcagcaacagacggcccatactccttggga

SEQ ID NO: 153580 - DNA, 120 bp, Artificial Sequence
  ENSG00000105974_32 (sequence is synthesized)
agcgataaagggaacattccacgggtcgggcggctgctgttggatcttagataaagctggaagggattaccggggcagggggacatctctacaccgttcccatccgggaacagggcaaca

SEQ ID NO: 153581 - DNA, 120 bp, Artificial Sequence
  ENSG00000105974_33 (sequence is synthesized)
agttcccttaaagcacagcccagggaaacctcctcacagttttcatccagccacgggccagcatgtctgggggcaaatacgtagactcggagggcaacatctacaagcccaacaacaagg

SEQ ID NO: 153582 - DNA, 120 bp, Artificial Sequence
  ENSG00000105976_0 (sequence is synthesized)
aggtgacccggaggccctcgccgcccgcggcgccccgagcgctttgtgagcagatgcggagccgagtggagggcgcgagccagatgcggggcgacagctgacttgctgagaggaggcggg

SEQ ID NO: 153583 - DNA, 120 bp, Artificial Sequence
  ENSG00000105976_1 (sequence is synthesized)
gaggcgcggagcgcgcgtgtggtccttgcgccgctgacttctccactggttcctgggcaccgaaagataaacctctcataatgaaggcccccgctgtgcttgcacctggcatcctcgtgc

SEQ ID NO: 153584 - DNA, 120 bp, Artificial Sequence
  ENSG00000105976_2 (sequence is synthesized)
tcctgtttaccttggtgcagaggagcaatggggagtgtaaagaggcactagcaaagtccgagatgaatgtgaatatgaagtatcagcttcccaacttcaccgcggaaacacccatccaga

SEQ ID NO: 153585 - DNA, 120 bp, Artificial Sequence
  ENSG00000105976_3 (sequence is synthesized)
atgtcattctacatgagcatcacattttccttggtgccactaactacatttatgttttaaatgaggaagaccttcagaaggttgctgagtacaagactgggcctgtgctggaacacccag

SEQ ID NO: 153586 - DNA, 120 bp, Artificial Sequence
  ENSG00000105976_4 (sequence is synthesized)
attgtttcccatgtcaggactgcagcagcaaagccaatttatcaggaggtgtttggaaagataacatcaacatggctctagttgtcgacacctactatgatgatcaactcattagctgtg

SEQ ID NO: 153587 - DNA, 120 bp, Artificial Sequence
  ENSG00000105976_5 (sequence is synthesized)
gcagcgtcaacagagggacctgccagcgacatgtctttccccacaatcatactgctgacatacagtcggaggttcactgcatattctccccacagatagaagagcccagccagtgtcctg

SEQ ID NO: 153588 - DNA, 120 bp, Artificial Sequence
  ENSG00000105976_6 (sequence is synthesized)
actgtgtggtgagcgccctgggagccaaagtcctttcatctgtaaaggaccggttcatcaacttctttgtaggcaataccataaattcttcttatttcccagatcatccattgcattcga

SEQ ID NO: 153589 - DNA, 120 bp, Artificial Sequence
  ENSG00000105976_7 (sequence is synthesized)
tatcagtgagaaggctaaaggaaacgaaagatggttttatgtttttgacggaccagtcctacattgatgttttacctgagttcagagattcttaccccattaagtatgtccatgcctttg

SEQ ID NO: 153590 - DNA, 120 bp, Artificial Sequence
  ENSG00000105976_8 (sequence is synthesized)
aaagcaacaattttatttacttcttgacggtccaaagggaaactctagatgctcagacttttcacacaagaataatcaggttctgttccataaactctggattgcattcctacatggaaa

SEQ ID NO: 153591 - DNA, 120 bp, Artificial Sequence
  ENSG00000105976_9 (sequence is synthesized)
tgcctctggagtgtattctcacagaaaagagaaaaaagagatccacaaagaaggaagtgtttaatatacttcaggctgcgtatgtcagcaagcctggggcccagcttgctagacaaatag

SEQ ID NO: 153592 - DNA, 120 bp, Artificial Sequence
  ENSG00000105976_10 (sequence is synthesized)
gagccagcctgaatgatgacattcttttcggggtgttcgcacaaagcaagccagattctgccgaaccaatggatcgatctgccatgtgtgcattccctatcaaatatgtcaacgacttct

SEQ ID NO: 153593 - DNA, 120 bp, Artificial Sequence
  ENSG00000105976_11 (sequence is synthesized)
tcaacaagatcgtcaacaaaaacaatgtgagatgtctccagcatttttacggacccaatcatgagcactgctttaataggacacttctgagaaattcatcaggctgtgaagcgcgccgtg

SEQ ID NO: 153594 - DNA, 120 bp, Artificial Sequence
  ENSG00000105976_12 (sequence is synthesized)
atgaatatcgaacagagtttaccacagctttgcagcgcgttgacttattcatgggtcaattcagcgaagtcctcttaacatctatatccaccttcattaaaggagacctcaccatagcta

SEQ ID NO: 153595 - DNA, 120 bp, Artificial Sequence
  ENSG00000105976_13 (sequence is synthesized)
atcttgggacatcagagggtcgcttcatgcaggttgtggtttctcgatcaggaccatcaacccctcatgtgaattttctcctggactcccatccagtgtctccagaagtgattgtggagc

SEQ ID NO: 153596 - DNA, 120 bp, Artificial Sequence
  ENSG00000105976_14 (sequence is synthesized)
atacattaaaccaaaatggctacacactggttatcactgggaagaagatcacgaagatcccattgaatggcttgggctgcagacatttccagtcctgcagtcaatgcctctctgccccac

SEQ ID NO: 153597 - DNA, 120 bp, Artificial Sequence
  ENSG00000105976_15 (sequence is synthesized)
cctttgttcagtgtggctggtgccacgacaaatgtgtgcgatcggaggaatgcctgagcgggacatggactcaacagatctgtctgcctgcaatctacaaggttttcccaaatagtgcac

SEQ ID NO: 153598 - DNA, 120 bp, Artificial Sequence
  ENSG00000105976_16 (sequence is synthesized)
cccttgaaggagggacaaggctgaccatatgtggctgggactttggatttcggaggaataataaatttgatttaaagaaaactagagttctccttggaaatgagagctgcaccttgactt

SEQ ID NO: 153599 - DNA, 120 bp, Artificial Sequence
  ENSG00000105976_17 (sequence is synthesized)
taagtgagagcacgatgaatacattgaaatgcacagttggtcctgccatgaataagcatttcaatatgtccataattatttcaaatggccacgggacaacacaatacagtacattctcct

SEQ ID NO: 153600 - DNA, 120 bp, Artificial Sequence
  ENSG00000105976_18 (sequence is synthesized)
atgtggatcctgtaataacaagtatttcgccgaaatacggtcctatggctggtggcactttacttactttaactggaaattacctaaacagtgggaattctagacacatttcaattggtg

SEQ ID NO: 153601 - DNA, 120 bp, Artificial Sequence
  ENSG00000105976_19 (sequence is synthesized)
gaaaaacatgtactttaaaaagtgtgtcaaacagtattcttgaatgttataccccagcccaaaccatttcaactgagtttgctgttaaattgaaaattgacttagccaaccgagagacaa

SEQ ID NO: 153602 - DNA, 120 bp, Artificial Sequence
  ENSG00000105976_20 (sequence is synthesized)
gcatcttcagttaccgtgaagatcccattgtctatgaaattcatccaaccaaatcttttattagtggtgggagcacaataacaggtgttgggaaaaacctgaattcagttagtgtcccga

SEQ ID NO: 153603 - DNA, 120 bp, Artificial Sequence
  ENSG00000105976_21 (sequence is synthesized)
gaatggtcataaatgtgcatgaagcaggaaggaactttacagtggcatgtcaacatcgctctaattcagagataatctgttgtaccactccttccctgcaacagctgaatctgcaactcc

SEQ ID NO: 153604 - DNA, 120 bp, Artificial Sequence
  ENSG00000105976_22 (sequence is synthesized)
ccctgaaaaccaaagcctttttcatgttagatgggatcctttccaaatactttgatctcatttatgtacataatcctgtgtttaagccttttgaaaagccagtgatgatctcaatgggca

SEQ ID NO: 153605 - DNA, 120 bp, Artificial Sequence
  ENSG00000105976_23 (sequence is synthesized)
atgaaaatgtactggaaattaagggaaatgatattgaccctgaagcagttaaaggtgaagtgttaaaagttggaaataagagctgtgagaatatacacttacattctgaagccgttttat

SEQ ID NO: 153606 - DNA, 120 bp, Artificial Sequence
  ENSG00000105976_24 (sequence is synthesized)
gcacggtccccaatgacctgctgaaattgaacagcgagctaaatatagagtggaagcaagcaatttcttcaaccgtccttggaaaagtaatagttcaaccagatcagaatttcacaggat

SEQ ID NO: 153607 - DNA, 120 bp, Artificial Sequence
  ENSG00000105976_25 (sequence is synthesized)
tgattgctggtgttgtctcaatatcaacagcactgttattactacttgggtttttcctgtggctgaaaaagagaaagcaaattaaagatctgggcagtgaattagttcgctacgatgcaa

SEQ ID NO: 153608 - DNA, 120 bp, Artificial Sequence
  ENSG00000105976_26 (sequence is synthesized)
gagtacacactcctcatttggataggcttgtaagtgcccgaagtgtaagcccaactacagaaatggtttcaaatgaatctgtagactaccgagctacttttccagaagatcagtttccta

SEQ ID NO: 153609 - DNA, 120 bp, Artificial Sequence
  ENSG00000105976_27 (sequence is synthesized)
tatcctctgacagacatgtcccccatcctaactagtggggactctgatatatccagtccattactgcaaaatactgtccacattgacctcagtgctctaaatccagagctggtccaggca

SEQ ID NO: 153610 - DNA, 120 bp, Artificial Sequence
  ENSG00000105976_28 (sequence is synthesized)
gtgcagcatgtagtgattgggcccagtagcctgattgtgcatttcaatgaagtcataggaagagggcattttggttgtgtatatcatgggactttgttggacaatgatggcaagaaaatt

SEQ ID NO: 153611 - DNA, 120 bp, Artificial Sequence
  ENSG00000105976_29 (sequence is synthesized)
cactgtgctgtgaaatccttgaacagaatcactgacataggagaagtttcccaatttctgaccgagggaatcatcatgaaagattttagtcatcccaatgtcctctcgctcctgggaatc

SEQ ID NO: 153612 - DNA, 120 bp, Artificial Sequence
  ENSG00000105976_30 (sequence is synthesized)
tgcctgcgaagtgaagggtctccgctggtggtcctaccatacatgaaacatggagatcttcgaaatttcattcgaaatgagactcataatccaactgtaaaagatcttattggctttggt

SEQ ID NO: 153613 - DNA, 120 bp, Artificial Sequence
  ENSG00000105976_31 (sequence is synthesized)
cttcaagtagccaaaggcatgaaatatcttgcaagcaaaaagtttgtccacagagacttggctgcaagaaactgtatgctggatgaaaaattcacagtcaaggttgctgattttggtctt

SEQ ID NO: 153614 - DNA, 120 bp, Artificial Sequence
  ENSG00000105976_32 (sequence is synthesized)
gccagagacatgtatgataaagaatactatagtgtacacaacaaaacaggtgcaaagctgccagtgaagtggatggctttggaaagtctgcaaactcaaaagtttaccaccaagtcagat

SEQ ID NO: 153615 - DNA, 120 bp, Artificial Sequence
  ENSG00000105976_33 (sequence is synthesized)
gtgtggtcctttggcgtgctcctctgggagctgatgacaagaggagccccaccttatcctgacgtaaacacctttgatataactgtttacttgttgcaagggagaagactcctacaaccc

SEQ ID NO: 153616 - DNA, 120 bp, Artificial Sequence
  ENSG00000105976_34 (sequence is synthesized)
gaatactgcccagaccccttatatgaagtaatgctaaaatgctggcaccctaaagccgaaatgcgcccatccttttctgaactggtgtcccggatatcagcgatcttctctactttcatt

SEQ ID NO: 153617 - DNA, 120 bp, Artificial Sequence
  ENSG00000105976_35 (sequence is synthesized)
ggggagcactatgtccatgtgaacgctacttatgtgaacgtaaaatgtgtcgctccgtatccttctctgttgtcatcagaagataacgctgatgatgaggtggacacacgaccagcctcc

SEQ ID NO: 153618 - DNA, 120 bp, Artificial Sequence
  ENSG00000105976_36 (sequence is synthesized)
ttctgggagacatcatagtgctagtactatgtcaaagcaacagtccacactttgtccaatggttttttcactgcctgacctttaaaaggccatcgatattctttgctcttgccaaaattg

SEQ ID NO: 153619 - DNA, 120 bp, Artificial Sequence
  ENSG00000105976_37 (sequence is synthesized)
cactattataggacttgtattgttatttaaattactggattctaaggaatttcttatctgacagagcatcagaaccagaggcttggtcccacaggccacggaccaatggcctgcagccgt

SEQ ID NO: 153620 - DNA, 120 bp, Artificial Sequence
  ENSG00000105976_38 (sequence is synthesized)
gacaacactcctgtcatattggagtccaaaacttgaattctgggttgaattttttaaaaatcaggtaccacttgatttcatatgggaaattgaagcaggaaatattgagggcttcttgat

SEQ ID NO: 153621 - DNA, 120 bp, Artificial Sequence
  ENSG00000105976_39 (sequence is synthesized)
cacagaaaactcagaagagatagtaatgctcaggacaggagcggcagccccagaacaggccactcatttagaattctagtgtttcaaaacacttttgtgtgttgtatggtcaataacatt

SEQ ID NO: 153622 - DNA, 120 bp, Artificial Sequence
  ENSG00000105976_40 (sequence is synthesized)
acacttttgtgtgttgtatggtcaataacatttttcattactgatggtgtcattcacccattaggtaaacattcccttttaaatgtttgtttgttttttgagacaggatctcactctgtt

SEQ ID NO: 153623 - DNA, 69 bp, Artificial Sequence
  ENSG00000105976_41 (sequence is synthesized)
tagctgggactacaggcgcacaccaccataaggctggtttcaaactcctggactcaagaaatccaccca

SEQ ID NO: 153624 - DNA, 120 bp, Artificial Sequence
  ENSG00000105976_42 (sequence is synthesized)
tggttggaagaatatttataggcaatacagtcaaagtttcaaaatagcatcacacaaaacatgtttataaatgaacaggatgtaatgtacatagatgacattaagaaaatttgtatgaaa

SEQ ID NO: 153625 - DNA, 120 bp, Artificial Sequence
  ENSG00000105976_43 (sequence is synthesized)
taatttagtcatcatgaaatatttagttgtcatataaaaacccactgtttgagaatgatgctactctgatctaatgaatgtgaacatgtagatgttttgtgtgtatttttttaaatgaaa

SEQ ID NO: 153626 - DNA, 120 bp, Artificial Sequence
  ENSG00000105976_44 (sequence is synthesized)
actcaaaataagacaagtaatttgttgataaatatttttaaagataactcagcatgtttgtaaagcaggatacattttactaaaaggttcattggttccaatcacagctcataggtagag

SEQ ID NO: 153627 - DNA, 120 bp, Artificial Sequence
  ENSG00000105976_45 (sequence is synthesized)
caaagaaagggtggatggattgaaaagattagcctctgtctcggtggcaggttcccacctcgcaagcaattggaaacaaaacttttggggagttttattttgcattagggtgtgttttat

SEQ ID NO: 153628 - DNA, 120 bp, Artificial Sequence
  ENSG00000105976_46 (sequence is synthesized)
gttaagcaaaacatactttagaaacaaatgaaaaaggcaattgaaaatcccagctatttcacctagatggaatagccaccctgagcagaactttgtgatgcttcattctgtggaattttg

SEQ ID NO: 153629 - DNA, 120 bp, Artificial Sequence
  ENSG00000105976_47 (sequence is synthesized)
tgcttgctactgtatagtgcatgtggtgtaggttactctaactggttttgtcgacgtaaacatttaaagtgttatattttttataaaaatgtttatttttaatgatatgagaaaaatttt

SEQ ID NO: 153630 - DNA, 120 bp, Artificial Sequence
  ENSG00000105976_48 (sequence is synthesized)
gttaggccacaaaaacactgcactgtgaacattttagaaaaggtatgtcagactgggattaatgacagcatgattttcaatgactgtaaattgcgataaggaaatgtactgattgccaat

SEQ ID NO: 153631 - DNA, 120 bp, Artificial Sequence
  ENSG00000105976_49 (sequence is synthesized)
acaccccaccctcattacatcatcaggacttgaagccaagggttaacccagcaagctacaaagagggtgtgtcacactgaaactcaatagttgagtttggctgttgttgcaggaaaatga

SEQ ID NO: 153632 - DNA, 120 bp, Artificial Sequence
  ENSG00000105976_50 (sequence is synthesized)
ttataactaaaagctctctgatagtgcagagacttaccagaagacacaaggaattgtactgaagagctattacaatccaaatattgccgtttcataaatgtaataagtaatactaattca

SEQ ID NO: 153633 - DNA, 120 bp, Artificial Sequence
  ENSG00000105976_51 (sequence is synthesized)
cagagtattgtaaatggtggatgacaaaagaaaatctgctctgtggaaagaaagaactgtctctaccagggtcaagagcatgaacgcatcaatagaaagaactcggggaaacatcccatc

SEQ ID NO: 153634 - DNA, 120 bp, Artificial Sequence
  ENSG00000105976_52 (sequence is synthesized)
aacaggactacacacttgtatatacattcttgagaacactgcaatgtgaaaatcacgtttgctatttataaacttgtccttagattaatgtgtctggacagattgtgggagtaagtgatt

SEQ ID NO: 153635 - DNA, 120 bp, Artificial Sequence
  ENSG00000105976_53 (sequence is synthesized)
cttctaagaattagatacttgtcactgcctatacctgcagctgaactgaatggtacttcgtatgttaatagttgttctgataaatcatgcaattaaagtaaagtgatgcaacatcttgta

SEQ ID NO: 153636 - DNA, 80 bp, Artificial Sequence
  ENSG00000105976_54 (sequence is synthesized)
agacacgtgctggggcgggcaggcgagcgcctcagtctggtcgcctggcggtgcctccggccccaacgcgcccgggccgc

SEQ ID NO: 153637 - DNA, 120 bp, Artificial Sequence
  ENSG00000105976_55 (sequence is synthesized)
ccaaccaaatcttttattagtacttggtggaaagaacctctcaacattgtcagttttctattttgctttgccagtggtgggagcacaataacaggtgttgggaaaaacctgaattcagtt

SEQ ID NO: 153638 - DNA, 120 bp, Artificial Sequence
  ENSG00000105976_56 (sequence is synthesized)
aggtgggattcctgcattcctctcatgatgtaaataaggaagccagtgtaattatgttattctcaggcttaaaataaatcattaaagctcatttatgtgtgggttttggctcatcaactc

SEQ ID NO: 153639 - DNA, 120 bp, Artificial Sequence
  ENSG00000105982_0 (sequence is synthesized)
ggcagacgtccctgggttccggtgttcgcggaggagtcgagcagaagaatagaaggaaggtgataggatgtgatgatagaatttgtgatagccaagcaacaacttttcctaattcggcat

SEQ ID NO: 153640 - DNA, 120 bp, Artificial Sequence
  ENSG00000105982_1 (sequence is synthesized)
gttaaaaaataagggtcactcatctaagaaagataacttggcagtcaatgcagttgctttacaagatcacattttacatgatcttcaacttcgaaatctttcagttgcagatcattctaa

SEQ ID NO: 153641 - DNA, 120 bp, Artificial Sequence
  ENSG00000105982_2 (sequence is synthesized)
gacacaagtacaaaagaaagagaacaaatctctaaaaagagatacaaaggcaataatagatactggacttaaaaaaactacacagtgccccaaactagaagactcagaaaaagaatatgt

SEQ ID NO: 153642 - DNA, 120 bp, Artificial Sequence
  ENSG00000105982_3 (sequence is synthesized)
tcttgatcccaaaccgccgccgttgactttggcacagaagttgggcctcattgggcctccaccacctccactgtcatcagatgaatgggagaaggtgaaacagcgctctctcctgcaagg

SEQ ID NO: 153643 - DNA, 120 bp, Artificial Sequence
  ENSG00000105982_4 (sequence is synthesized)
ggactccgtgcaaccatgccccatctgtaaagaagaattcgagcttcgtcctcaggtgctgctttcatgctcccatgtgttccacaaagcatgtcttcaggcttttgaaaagttcacaaa

SEQ ID NO: 153644 - DNA, 120 bp, Artificial Sequence
  ENSG00000105982_5 (sequence is synthesized)
taagaaaacctgtcctctctgtagaaagaaccagtatcaaacccgagtgatacacgatggggcccgcctgttcagaatcaagtgtgtgaccagaatccaagcctactggagaggatgtgt

SEQ ID NO: 153645 - DNA, 120 bp, Artificial Sequence
  ENSG00000105982_6 (sequence is synthesized)
tgttagaaagtggtacagaaacctgaggaaaacagtacctcccacagatgccaagttaagaaaaaaattctttgaaaaaaagttcacagaaatcagccaccgcatcctgtgctcatacaa

SEQ ID NO: 153646 - DNA, 120 bp, Artificial Sequence
  ENSG00000105982_7 (sequence is synthesized)
ccaacattgaagagctctttgcagaaatcgatcagtgcttggccataaatcgaagtgttcttcagcagttggaagaaaaatgtggccatgagatcacagaagaggaatgggagaaaatcc

SEQ ID NO: 153647 - DNA, 120 bp, Artificial Sequence
  ENSG00000105982_8 (sequence is synthesized)
aagtgcaggctctgcgccgggagacccacgagtgctccatctgcctggcccctctctccgctgctggcggtcagcgcgtgggtgcaggcaggcgttccagagagatggccctcctgtcct

SEQ ID NO: 153648 - DNA, 120 bp, Artificial Sequence
  ENSG00000105982_9 (sequence is synthesized)
gctcacatgtgttccaccatgcgtgtctgctggcactagaggagttctccgtgggagacaggcctcctttccatgcctgtcctctctgccgctcctgctaccagaagaagattcttgaat

SEQ ID NO: 153649 - DNA, 120 bp, Artificial Sequence
  ENSG00000105982_10 (sequence is synthesized)
gttgaattcatagtcaaggaaagttaggtaattctgaggaaaaaagtttaccatcattttggatgaactgcatgagttctgggttaagtactacaatgtaatctgtttcccagggaaata

SEQ ID NO: 153650 - DNA, 120 bp, Artificial Sequence
  ENSG00000105982_11 (sequence is synthesized)
agctattggtagttgtaggaaatcttagtatattttaaaagctgacatcccacctaattttaatctttggtctctaaaaagtaaatttcaaatttatgagtttaatcacttcaaatatga

SEQ ID NO: 153651 - DNA, 120 bp, Artificial Sequence
  ENSG00000105982_12 (sequence is synthesized)
atagcaaaaaatgagagcttgcttacttctaaaaattgaggttaagatatagctagtgtctgaacgacactccttaaagtaagttccaaatgtaaaacactccttaagttccaaatgttt

SEQ ID NO: 153652 - DNA, 120 bp, Artificial Sequence
  ENSG00000105982_13 (sequence is synthesized)
tccgctaatagtctgtcctaaagcctttgccattcctaatactcgttttgtaataattgctgtatttctgtgtaataaaatataaaaataaaatattcagtggtattcaacatcaaaaaa

SEQ ID NO: 153653 - DNA, 120 bp, Artificial Sequence
  ENSG00000105982_14 (sequence is synthesized)
tatattttgaatacatctgtcttcataaaatacaccatgtccaaaatctaaaagggccaattccaaattattccaccagctttgaagggaattgaagcaagaataacaagacagaagaat

SEQ ID NO: 153654 - DNA, 120 bp, Artificial Sequence
  ENSG00000105982_15 (sequence is synthesized)
gggttccggtgttcgcggaggagtcgaggcacggagaggcttcgggggagggacggaaagaagggtggcccgccaggcgggcggggtccatggattcggggtgagggccgtccgcggcct

SEQ ID NO: 153655 - DNA, 120 bp, Artificial Sequence
  ENSG00000105982_16 (sequence is synthesized)
gcagaatgaaacttccgcatgtttcgaagacccatgtctcggggcacatggttcgcatttcagtttaagtaactttctgctgtgatgaaactaacccgcgtggcctcttcccgtcctgtg

SEQ ID NO: 153656 - DNA, 120 bp, Artificial Sequence
  ENSG00000105982_17 (sequence is synthesized)
cacttggggtcaggaaggctaacagaggtggtaaaactttgagacttacttcactttgagggctttttaaaaatgggtgagatgctgctaaaaatcctgtttaactttagttggctttcc

SEQ ID NO: 153657 - DNA, 120 bp, Artificial Sequence
  ENSG00000105982_18 (sequence is synthesized)
aacctagatgttcaaatacttctagactttcttttctagttaaatcataaaattaggttaaatcaaagcaacttctgtttggccattttgtgctaattgtttaaataaacttatctcttc

SEQ ID NO: 153658 - DNA, 120 bp, Artificial Sequence
  ENSG00000105982_19 (sequence is synthesized)
ccccatctgtaaagaagaattcgagcttcgtcctcaggtgtttagcatacgagggtgagctagagagctcctgggctgtttcctagggacgaggcccagagctggagcctaagattccaa

SEQ ID NO: 153659 - DNA, 120 bp, Artificial Sequence
  ENSG00000105982_20 (sequence is synthesized)
gcttcctttttccagtttcatcctcctgtgtgagcctcacacacttccattttgttttccattaattaaagtgtgtgaagagctaaacaccctcattaaatagttttgtttgtttactaa

SEQ ID NO: 153660 - DNA, 120 bp, Artificial Sequence
  ENSG00000105982_21 (sequence is synthesized)
ggaaaccagcttaatttttcccatctcctgggctatatgtaaatgaagacatctgctgcacatctcatagtaatgaaaatagaagctgcctataaaaataaagcccccacatgctaccat

SEQ ID NO: 153661 - DNA, 120 bp, Artificial Sequence
  ENSG00000105982_22 (sequence is synthesized)
cataggatgtacagccaactttaaaccagtatgacctcatcttaactacatctgcaaagaccctatttccaaataaggtcaacatccagaggttccagcacagaagttgggcctcattgg

SEQ ID NO: 153662 - DNA, 120 bp, Artificial Sequence
  ENSG00000105982_23 (sequence is synthesized)
cccttcctcttaaccactatttatgctttagttttacttttgggggacttatttaacaatttcccattccttgtccccatatgaaaaggacagtcctaccccatcagcctgtggcttcag

SEQ ID NO: 153663 - DNA, 120 bp, Artificial Sequence
  ENSG00000105982_24 (sequence is synthesized)
cagtaggtgctggaaattctgtatttattatcactattaactcctttcctagaatatggagatgagttactgtgtgttctgttcctgagagcagtgtctctgatcttcagagatcattcg

SEQ ID NO: 153664 - DNA, 120 bp, Artificial Sequence
  ENSG00000105982_25 (sequence is synthesized)
tctcgggtgttcattctcaatttggtaaaggaccgccatgcacgattgcgtcatccttcctttacattctttccagttttttatcttcagtcgttgacagtcagttgtgttctctgggct

SEQ ID NO: 153665 - DNA, 120 bp, Artificial Sequence
  ENSG00000105982_26 (sequence is synthesized)
actcttagtaatttctaatatgtcatagtaggttgtctcttaaatcagaagtgattttttgtcacctcttatacaattttaattacagatttgatagtcattttaccttatatatataaa

SEQ ID NO: 153666 - DNA, 120 bp, Artificial Sequence
  ENSG00000105982_27 (sequence is synthesized)
tatttttcatgtgcacacatcattttataagaactcttgaagataaaggcccactgaaagtgttggtggtctcagcccattgaactggacgagaactggcccaggttgctggaaacaagt

SEQ ID NO: 153667 - DNA, 120 bp, Artificial Sequence
  ENSG00000105982_28 (sequence is synthesized)
gaagcaaccattacaatgtgccttgtgttatcttgtaaagtagccagtgaaggttaagtttcagcgttcagtgctcaggtgttcaaatgctgcagccttcagcttcatggaaaaaggaaa

SEQ ID NO: 153668 - DNA, 120 bp, Artificial Sequence
  ENSG00000105982_29 (sequence is synthesized)
cgaaaaataacaaaaagcaagtgaccaagagcagtcggggcagggagacctgatcaaacaagttcctcagtttctaattcagtgtctcccacagagagatggaactttacaaggcagatt

SEQ ID NO: 153669 - DNA, 120 bp, Artificial Sequence
  ENSG00000105982_30 (sequence is synthesized)
catagctctgtcccactggacgttgggtccgctgccctgtggccatcccacctccccacaaatactgttttttgttttatccttggttcatcccaactgctgcctcctcgtcctgagccc

SEQ ID NO: 153670 - DNA, 120 bp, Artificial Sequence
  ENSG00000105982_31 (sequence is synthesized)
tcatcgctcggaacgccccgctctgatccccgtgtctgcttttctgagcacactcttgcccgcccccgcatgtcctgcccgttcctactggttccctctgccttgcttaaaatgtgccag

SEQ ID NO: 153671 - DNA, 120 bp, Artificial Sequence
  ENSG00000105982_32 (sequence is synthesized)
tttttcaaagcctagctgaagctttcttccaatttctttggtcttctctaaacctctattgtatgtttaaacaacaccatctaagagatcaagaagaacagaagtatgaatgctattcta

SEQ ID NO: 153672 - DNA, 120 bp, Artificial Sequence
  ENSG00000105983_0 (sequence is synthesized)
agtcagagctgctcgtctgaggctgctgaggcgacggccggtgtcgtggtcgcggtacctgttccaacacggctcgcgggcccgtgccggctccggtccccggcgcggctgtccgagccc

SEQ ID NO: 153673 - DNA, 120 bp, Artificial Sequence
  ENSG00000105983_1 (sequence is synthesized)
ctgcggcgggcggacgatggtgtggcggagcacgcggacgcgggcggcgcggcggcgggcatgaaggaggatggaagggcaggacgaggtgtcggcgcgggagcagcacttccacagcca

SEQ ID NO: 153674 - DNA, 120 bp, Artificial Sequence
  ENSG00000105983_2 (sequence is synthesized)
agtgcgggagtccacgatatgtttccttctttttgccattctctacgttgtttcctacttcatcatcacaagatacaagagaaaatcagatgaacaagaagatgaagatgccatcgtcaa

SEQ ID NO: 153675 - DNA, 120 bp, Artificial Sequence
  ENSG00000105983_3 (sequence is synthesized)
caggatttcgttgtttttgagcacgttcactctcgcagtgtcagctggggctgttttgcttttacccttctcaatcatcagcaatgaaatcctgctttcttttcctcagaactactatat

SEQ ID NO: 153676 - DNA, 120 bp, Artificial Sequence
  ENSG00000105983_4 (sequence is synthesized)
tcagtggctaaatggctccctgattcatggtttgtggaatcttgcttcccttttttccaacctttgtttatttgtattgatgccctttgcctttttctttctggaatcagaaggctttgc

SEQ ID NO: 153677 - DNA, 120 bp, Artificial Sequence
  ENSG00000105983_5 (sequence is synthesized)
tggcctgaaaaagggaatccgagcccgcattttagagactttggtcatgcttcttcttcttgcgttactcattcttgggatagtgtgggtagcttcagcactcattgacaacgatgccgc

SEQ ID NO: 153678 - DNA, 120 bp, Artificial Sequence
  ENSG00000105983_6 (sequence is synthesized)
aagcatggaatctttatatgatctctgggagttctatctaccctatttatattcctgtatatcattgatgggatgtttgttacttctcttgtgtacaccagttggcctttctcgtatgtt

SEQ ID NO: 153679 - DNA, 120 bp, Artificial Sequence
  ENSG00000105983_7 (sequence is synthesized)
cacagtgatgggtcagttgctagtgaagccaacaattcttgaagacctggatgaacaaatttatatcattaccttagaggaagaagcactccagagacgactaaatgggctgtcttcatc

SEQ ID NO: 153680 - DNA, 120 bp, Artificial Sequence
  ENSG00000105983_8 (sequence is synthesized)
ggtggaatacaacataatggagttggaacaagaacttgaaaatgtaaagactcttaagacaaaattagagaggcgaaaaaaggcttcagcatgggaaagaaatttggtgtatcccgctgt

SEQ ID NO: 153681 - DNA, 120 bp, Artificial Sequence
  ENSG00000105983_9 (sequence is synthesized)
tatggttctccttcttattgagacatccatctcggtcctcttggtggcttgtaatattctttgcctattggttgatgaaacagcaatgccaaaaggaacaagggggcctggaataggaaa

SEQ ID NO: 153682 - DNA, 120 bp, Artificial Sequence
  ENSG00000105983_10 (sequence is synthesized)
tgcctctctttctacgtttggttttgtgggagctgcgcttgaaatcattttgattttctatcttatggtgtcctctgttgtcggcttctatagccttcgattttttggaaactttactcc

SEQ ID NO: 153683 - DNA, 120 bp, Artificial Sequence
  ENSG00000105983_11 (sequence is synthesized)
caagaaagatgacacaactatgacaaagatcattggaaattgtgtgtccatcttggttttgagctctgctctgcctgtgatgtcgagaacactgggaatcactagatttgatctacttgg

SEQ ID NO: 153684 - DNA, 120 bp, Artificial Sequence
  ENSG00000105983_12 (sequence is synthesized)
cgactttggaaggtttaattggctgggaaatttctatattgtattatcctacaatttgctttttgctattgtgacaacattgtgtctggtccgaaaattcacctctgcagttcgagaaga

SEQ ID NO: 153685 - DNA, 120 bp, Artificial Sequence
  ENSG00000105983_13 (sequence is synthesized)
acttttcaaggccctagggcttcataaacttcacttaccaaatacttcaagggattcagaaacagccaagccttctgtaaatgggcatcagaaagcactgtgagacgcacagacggcgtc

SEQ ID NO: 153686 - DNA, 120 bp, Artificial Sequence
  ENSG00000105983_14 (sequence is synthesized)
ttctgccaccaagagacccgagaactccagattcacgacattcctgtcccatgtagaagcatttccattcaaccgtggcccctcttcagaacctagacctatcagtgccatttttttttc

SEQ ID NO: 153687 - DNA, 120 bp, Artificial Sequence
  ENSG00000105983_15 (sequence is synthesized)
ataatctacgaagaacttggctatggctgatcttttttaaatttaactttctgatggaccctgtagtttccagttaagtgcagattccttacagacatatagaacagcgcattcttctgt

SEQ ID NO: 153688 - DNA, 120 bp, Artificial Sequence
  ENSG00000105983_16 (sequence is synthesized)
agacatttgctcatgttggtaaatacaatcacccatatgaaaaaattgttttcacctgatatgaaaatgttagaaaaggcaaactccgggacttctaaagatttacttaaatcccattat

SEQ ID NO: 153689 - DNA, 120 bp, Artificial Sequence
  ENSG00000105983_17 (sequence is synthesized)
gtactttattcagaatgtagaagctgacttgaaaggcatccttggtactaagtgaagcttattcagaaaatgcatttttcaaatgcaatggcaactgcttgtagatatcatttttgcagt

SEQ ID NO: 153690 - DNA, 120 bp, Artificial Sequence
  ENSG00000105983_18 (sequence is synthesized)
gtatgttggagctgtaatggttgcaattatgtttcttatttccttaaaagcaaaaagcgtagtttctgatttatgttatagaatgatactgattagactttgagccaaggggaaaatact

SEQ ID NO: 153691 - DNA, 120 bp, Artificial Sequence
  ENSG00000105983_19 (sequence is synthesized)
aaattcttttaaacctggagccttagagagccacaggaatatcttctgttgtacagtctaataagctgtggtaggaagtatcatgtaatcacagtttaatgacagtttatgtatatatat

SEQ ID NO: 153692 - DNA, 120 bp, Artificial Sequence
  ENSG00000105983_20 (sequence is synthesized)
aattcagtattccctctgataacatagttgccagtgtttaatacacttgtaacttggatttttaccttataggctatatgtatactcagttttttaaagcatttttttcagagatcactt

SEQ ID NO: 153693 - DNA, 120 bp, Artificial Sequence
  ENSG00000105983_21 (sequence is synthesized)
aattccccatgcttctgcaatgcatataaaaactataaatgccgagtggtagaaactcctctttcttcatagtcctcaggctttggttacatttgcatatgccatttgaagcctccagct

SEQ ID NO: 153694 - DNA, 120 bp, Artificial Sequence
  ENSG00000105983_22 (sequence is synthesized)
tttaccagtttaacatccaaagttcacagcatcagcattcatggtgtaagaacagttttgcagtataacacgatctgataatcattcagttattaaattgtaaataattattgggatggt

SEQ ID NO: 153695 - DNA, 120 bp, Artificial Sequence
  ENSG00000105983_23 (sequence is synthesized)
ttcttggctttaagtccactgaataaaaactatgaaattgcactctgtgtcaaccatccactaggatagaataccgaaatctgtgcatgcaaaaataggagatgggcccatttgcacaca

SEQ ID NO: 153696 - DNA, 120 bp, Artificial Sequence
  ENSG00000105983_24 (sequence is synthesized)
attcgtagttatgcagtctgctatataaatatgttcacatgcactgtgtgtatgaaaatagatggtctgtgttcagacaaaagtaaaacatttttttcaaattgttacatttaaaggttt

SEQ ID NO: 153697 - DNA, 120 bp, Artificial Sequence
  ENSG00000105983_25 (sequence is synthesized)
tctgggagaaatttatgaaacgcaggctgtgtctatttgacatcagaaatttccactttaaaccaaaataataagaaactttaatctgtatatttacaacctttgttgagtacacttccc

SEQ ID NO: 153698 - DNA, 120 bp, Artificial Sequence
  ENSG00000105983_26 (sequence is synthesized)
ccttatttatacgtctgcatttccttccgagcttcacatctttctaaaatgcagcttggttttaaaataaaagaacattcattttgtgattctaaacaagcttcagtaaataccaccagt

SEQ ID NO: 153699 - DNA, 120 bp, Artificial Sequence
  ENSG00000105983_27 (sequence is synthesized)
atagtactggtgaatttctcagcataaaatcgacatacctaaaaagttaataaaattcagctcttttccaatttcattgttatgcctattgaagtattaattgccaggtttgatttttag

SEQ ID NO: 153700 - DNA, 120 bp, Artificial Sequence
  ENSG00000105983_28 (sequence is synthesized)
tgaagcttggagtccatactttgagcagaccaagtgaagggaagaacagaaagaaactcaggagtagagtaatatcacttctcacttacaccactttcaggcacatccaaagagttccta

SEQ ID NO: 153701 - DNA, 120 bp, Artificial Sequence
  ENSG00000105983_29 (sequence is synthesized)
gatacttggaaaatgtctgaaaatttttaagtaaaatactaaacttttcagtgtttagctcaactttttgttcatttggaagtttctctccatccgaggacttaagccagttttggattt

SEQ ID NO: 153702 - DNA, 120 bp, Artificial Sequence
  ENSG00000105983_30 (sequence is synthesized)
gtaagccctgagtacaatacacttcctggaggcatcctcactgctgttgaagcaaaggatatgcatggggtggaaggacggcttcgaacctgggactcatatgccttgagaacaaataga

SEQ ID NO: 153703 - DNA, 120 bp, Artificial Sequence
  ENSG00000105983_31 (sequence is synthesized)
ttgttacagccttgggctgctgcgtaatcacggttcctcgaggctcttcctgagcacatgcccaagcatctgcctctggagagactgactccaaatgcaggtgcttccattggagctagg

SEQ ID NO: 153704 - DNA, 120 bp, Artificial Sequence
  ENSG00000105983_32 (sequence is synthesized)
tcggaggctgctttatatgacgaactccagaaatggatgccagaatacggaggccaaacgttctgagtcctggtaaggacagtcgctctgggggtcctcattttactgcagttcctgcac

SEQ ID NO: 153705 - DNA, 120 bp, Artificial Sequence
  ENSG00000105983_33 (sequence is synthesized)
aggcagagctgcagatgctcatcatcaggtcaattctggagctacagttttgtttctgactggatagggatgcaccagtgactgtcacatcaagcagtccttttattctctctcctttag

SEQ ID NO: 153706 - DNA, 120 bp, Artificial Sequence
  ENSG00000105983_34 (sequence is synthesized)
tatcgattttaaagggcattaggcactatggttccagagtttcttggggaaaacttgcagattcttattaattggttctgcaatacttaaataaattattttacaattataagttttcag

SEQ ID NO: 153707 - DNA, 120 bp, Artificial Sequence
  ENSG00000105983_35 (sequence is synthesized)
attataacatttgtattaatttttactgattttccaagatacttcttagatttactatttacgtagctttatgtacattctctgtaaaaatagacctctaaatatgaggctttacatgaa

SEQ ID NO: 153708 - DNA, 120 bp, Artificial Sequence
  ENSG00000105983_36 (sequence is synthesized)
atttgtacacacatacacactaatgttagctccttaaattgctgcactaaggtgctggttagtagagatggacggagcctctcgcgttttgctctcagatgtgttaaaggcgcacgtgta

SEQ ID NO: 153709 - DNA, 120 bp, Artificial Sequence
  ENSG00000105983_37 (sequence is synthesized)
cctgctctcagcggcagtgcggcctccccatctgctgggtgcccatggccctccctgcagcctcagtgatgacctcgtctgccagggacacaggttttcatcatttacaggctcttatgt

SEQ ID NO: 153710 - DNA, 120 bp, Artificial Sequence
  ENSG00000105983_38 (sequence is synthesized)
gctagttttgttggtagcacgttatttaatgcataaaggcagaattcttacaagtttttttttttaatgtgaacatagatgcagcaccgactttttaaacttgaaaaaactggtataatg

SEQ ID NO: 153711 - DNA, 120 bp, Artificial Sequence
  ENSG00000105983_39 (sequence is synthesized)
ttaacttttaaaaataacatttggacacactagtaattgatttttgtttacagattgttttgtttacaaattgttagtctttgtttctatgagatacttttagtgtgactttttaaatgt

SEQ ID NO: 153712 - DNA, 120 bp, Artificial Sequence
  ENSG00000105983_40 (sequence is synthesized)
cttagaaattaaaagttgtacaaaaagtgatttcatatttggtttataagcatttatatgtggggtttatttgttcttttgttttttccatcttaaatattatcatggctaaaacttaag

SEQ ID NO: 153713 - DNA, 120 bp, Artificial Sequence
  ENSG00000105983_41 (sequence is synthesized)
ggtatttatagtttaattccatttcagttttatagagggcagtaattattctgatgaatgttgaattaagaaatggatattttctttctctgttgtgcagttattggtagatcaatttct

SEQ ID NO: 153714 - DNA, 120 bp, Artificial Sequence
  ENSG00000105983_42 (sequence is synthesized)
tataacccacaatgtagcatcaataattgatagcatgtattttatttaattacttgaattatttagacttgatttctctaattttttccataaaaggactgaacagcacctacttgtggt

SEQ ID NO: 153715 - DNA, 120 bp, Artificial Sequence
  ENSG00000105983_43 (sequence is synthesized)
ctggacagcttaacccagagttcctggaagaataaatgctgttagcatctggttaatttactggcagacagaagcctacttacagtggctttcaactttttgaccacagtaagaaataac

SEQ ID NO: 153716 - DNA, 120 bp, Artificial Sequence
  ENSG00000105983_44 (sequence is synthesized)
ctctctctctctctctctctctgtctctcagatacgtataagcaaaaatttaacaagacagtacttgtttttcctaagtgtgcatgctggcatcttctgttttattatttttaaaaatac

SEQ ID NO: 153717 - DNA, 120 bp, Artificial Sequence
  ENSG00000105983_45 (sequence is synthesized)
ggcatcttctgttttattatttttaaaaatactagacacagacactaagttactttgtggcctcctaatagatggcagacttcagtttgaaaagcatccctttggaatgtggtttaaaag

SEQ ID NO: 153718 - DNA, 120 bp, Artificial Sequence
  ENSG00000105983_46 (sequence is synthesized)
aagaaataatacaaagacctttttggagttttttttttttttggtttttgaatattgtttaggtaaaaattattgctgcaaacacaactgaagcaaaagtactgtgtacgcaaattactt

SEQ ID NO: 153719 - DNA, 120 bp, Artificial Sequence
  ENSG00000105983_47 (sequence is synthesized)
gttgcactgtagaaaatgtaatatcaggagaagttcctaaaactcacaaatatatacaaaatttcaaaacttggtgattgatccatatgtcttgaaggaatattaggcaataaacttacc

SEQ ID NO: 153720 - DNA, 120 bp, Artificial Sequence
  ENSG00000105983_48 (sequence is synthesized)
ttttcaagagaagttatttaacttccaattctgtgttctttaattaggaaaaaattttttcaaggttaactataatcaaataggaacttcacacaaaacctcattattcttggatatgga

SEQ ID NO: 153721 - DNA, 120 bp, Artificial Sequence
  ENSG00000105983_49 (sequence is synthesized)
tttggtgttctgctgttacttctaaaggtggtacagaagtcaagtttatgagcctggattatgaacagcagggcggccctgatgtgagtggttgtggaggactagagtgatgtagaagaa

SEQ ID NO: 153722 - DNA, 120 bp, Artificial Sequence
  ENSG00000105983_50 (sequence is synthesized)
tctgttgtgtctgagtgtgaggaggtggagagtcacgtgtgggctatgggtctgagaactgaagttttaacagttactaaaactgttttgtggctgttgtaatgtcttctcctttccttt

SEQ ID NO: 153723 - DNA, 120 bp, Artificial Sequence
  ENSG00000105983_51 (sequence is synthesized)
cctttgaaaagctgttactgaatgaacgatgccgcttacaaacactgacacttcagaaccaagcatatttgatactgctgtagctatttatattgattctgcaacttctctttaacagca

SEQ ID NO: 153724 - DNA, 120 bp, Artificial Sequence
  ENSG00000105983_52 (sequence is synthesized)
tcttgaagtcatccacagttgttctatatggactccacagtagagtcagagaactaagtgacaagtggagcatcgtcctcctcctgctcacttcctcctcgccacctctctggcctggct

SEQ ID NO: 153725 - DNA, 120 bp, Artificial Sequence
  ENSG00000105983_53 (sequence is synthesized)
atccttcagtctgaagagtgattcactttttcttttctttttagtctttactgtggaatctcatcaaagacttggaagcaggggtggtgagaggggcctggggcgtggtgtggagggtcg

SEQ ID NO: 153726 - DNA, 120 bp, Artificial Sequence
  ENSG00000105983_54 (sequence is synthesized)
agttctttgtcgtcccacagtcacccccaggaccaccttgcgaagccgaaaatacacatctgcattttaccgacaaggaacgccactgagaaagctgcagacatttgcctggggtcacgc

SEQ ID NO: 153727 - DNA, 120 bp, Artificial Sequence
  ENSG00000105983_55 (sequence is synthesized)
ttacagtgggcagatgaactggatgtaaatacaggccagtacaaccgcagtctcattttttctttgttttaggttttcagtttcttgttcattcatgtaccttacagttctattatctgg

SEQ ID NO: 153728 - DNA, 120 bp, Artificial Sequence
  ENSG00000105983_56 (sequence is synthesized)
ttgataaagattcatgacaggtatcctcattctagattataacctttattcttatcaaatgcctccagtcccacaattcgctaagaattctctttctggacttgatagtgatttaatgat

SEQ ID NO: 153729 - DNA, 120 bp, Artificial Sequence
  ENSG00000105983_57 (sequence is synthesized)
tccccccgcccatggaatggtaggctcctaattaagtggatttaaaggcaaaaagggatgtgtgagaaggcacaagaagtggcttcatcttgcaaggtgactgtcagacaagtgggttcc

SEQ ID NO: 153730 - DNA, 120 bp, Artificial Sequence
  ENSG00000105983_58 (sequence is synthesized)
aacctgttaaaataagggaggaatggccacatcccgtagggactgctgtagctgaccaggaagacacaatgagggcagcagacagggctctccctgtccgctgagtcctcccatgaactc

SEQ ID NO: 153731 - DNA, 120 bp, Artificial Sequence
  ENSG00000105983_59 (sequence is synthesized)
atgtttccaaaggccccactctttcttggtcagtgtcccagtttttatagaagagacctgatgaggctgtggagtaattgtataaaagcttgcactgttttcctgacttgacctgacaat

SEQ ID NO: 153732 - DNA, 120 bp, Artificial Sequence
  ENSG00000105983_60 (sequence is synthesized)
gtggcgttatcttcaaattgtccagagaagtagctacttcattcaggtcctttttagcgttctgtggttgcaacttggtctcgcaagctttcgatgggcgcgccattccatggccacttt

SEQ ID NO: 153733 - DNA, 120 bp, Artificial Sequence
  ENSG00000105983_61 (sequence is synthesized)
tcagtaagaaaattgcctgattttctgttaactgtcacaggctgccctggaccattcctcagaactcatgggattttcgcgaccctcatcctcagtgaagttagatgaccattcctgcct

SEQ ID NO: 153734 - DNA, 120 bp, Artificial Sequence
  ENSG00000105983_62 (sequence is synthesized)
ttcatcccaccgattttcctaagtatctgttgcctgcaactaacactagttcctgtgtcagtaaagtactgcacttggttgcaaagaatagagatggactctgccaacataggcacggaa

SEQ ID NO: 153735 - DNA, 120 bp, Artificial Sequence
  ENSG00000105983_63 (sequence is synthesized)
ggtttacggggtggatggcatggctcacagatgtgatgagaaagccccggaagaagtgttgggcacagccttaggcacaacctttcctgggctcttcccatcactgaatgatccatgtat

SEQ ID NO: 153736 - DNA, 120 bp, Artificial Sequence
  ENSG00000105983_64 (sequence is synthesized)
ctccgggactctccttctagatccaaagtttagggcggcggaatcggactgctctggcctttgacacgtgcctgtgctttgcctgtcaacgctatggggagagagatgtcagcttacaga

SEQ ID NO: 153737 - DNA, 120 bp, Artificial Sequence
  ENSG00000105983_65 (sequence is synthesized)
aaattgaggttctgtgattcagtttccctctgctctcttagaataaaagtgcttactcattgtttaaagcattctccaaattagtctgcaaattttttgatagtatacatccttaaaaaa

SEQ ID NO: 153738 - DNA, 120 bp, Artificial Sequence
  ENSG00000105983_66 (sequence is synthesized)
caggcgtgagccaccgtgcccggctgcatgtgtgtattatatatagcatatgcagtttatacctttaaaacctttaatattatattgtgttttccataccttttatgttcttcaaaacca

SEQ ID NO: 153739 - DNA, 120 bp, Artificial Sequence
  ENSG00000105983_67 (sequence is synthesized)
ttgtgttttccataccttttatgttcttcaaaaccatttttagtggtgtaacctgagccatgtatttagcaatatattaagctagtggttttcaaaggctatttcgtcattttaaagggt

SEQ ID NO: 153740 - DNA, 120 bp, Artificial Sequence
  ENSG00000105983_68 (sequence is synthesized)
ggaaccatttatccctccagtgacttgctacctgcatttttttcagatttgcaatagaaaacagctgagttgttcctcaggcaccaaacccaccctgtcctctttgtgaaacatttcact

SEQ ID NO: 153741 - DNA, 120 bp, Artificial Sequence
  ENSG00000105983_69 (sequence is synthesized)
tcaccagtaaactgttgttgagcatctagaggatttttaaattttcattattatttgggtttctgacaatttctttacatggaaattagaatgaaaattattaggctaatgagtattaat

SEQ ID NO: 153742 - DNA, 120 bp, Artificial Sequence
  ENSG00000105983_70 (sequence is synthesized)
agccataaacttaataacagtgaatattagtatctttaaaatcttttccattttcatgggtagaaggtagtttctcattattgtaatgttaatttaaaaaatttttagtcagataggaca

SEQ ID NO: 153743 - DNA, 80 bp, Artificial Sequence
  ENSG00000105983_71 (sequence is synthesized)
tatcattttatttttatttatttattttattattataatttttttgagatgaagtgttgctctgttgcccaggctggagt

SEQ ID NO: 153744 - DNA, 120 bp, Artificial Sequence
  ENSG00000105983_72 (sequence is synthesized)
ccgtgcccagcccatgtatattttatttgattaatgtcctttgcccttttttgtggttgttgcttttttcatattgaatttatgatctctttgtttgaacacatcagcttttcatttcaa

SEQ ID NO: 153745 - DNA, 120 bp, Artificial Sequence
  ENSG00000105983_73 (sequence is synthesized)
ttttttacatgtttttctgattgttattttgctttttaatattaattgcttttttccagaatttgaatattttttataatatttggtttttctttttctcttggtgtctctaattgtttt

SEQ ID NO: 153746 - DNA, 120 bp, Artificial Sequence
  ENSG00000105983_74 (sequence is synthesized)
tgtgtttagaagattgtttcccaccctgagatatgacagctagttgtcccaataccattaattgaatattcttttctgtactgattttttatgcttcattttcagtaagctaaatattat

SEQ ID NO: 153747 - DNA, 120 bp, Artificial Sequence
  ENSG00000105983_75 (sequence is synthesized)
attagcgtttgtttctgggctcaggtatgcaggttttggagtcagatagacctgggcttgaatttcaaatctgtctgaaacccttagcaaccttgagcatattgtttacgctttcagagt

SEQ ID NO: 153748 - DNA, 120 bp, Artificial Sequence
  ENSG00000105983_76 (sequence is synthesized)
ctcagtcttttatctataaaatgaccatatcaaggtctagtttatagaattattatatgtagtaagtggaatatatgtatagtataaagtacctagtctattgcctggtggccaagagta

SEQ ID NO: 153749 - DNA, 120 bp, Artificial Sequence
  ENSG00000105983_77 (sequence is synthesized)
cgctctgggaccccaggggcttcctctctgggcgggtgtgcggctcgcgcctcggggtgtggacggcggccccgccagtgcgcgcccccgcgctccgccgccaggccagatatgtttcct

SEQ ID NO: 153750 - DNA, 120 bp, Artificial Sequence
  ENSG00000105983_78 (sequence is synthesized)
ttctgaagtcatcaattctcaaaatccaattctaatttttggatagaagtatggaaaatattcacccagcacattacaatagctttatcatattaattttagaaagcacatgtaagcaaa

SEQ ID NO: 153751 - DNA, 120 bp, Artificial Sequence
  ENSG00000105983_79 (sequence is synthesized)
tatgtgtggataatccaatctcctattggaatttgcatatttaaggagctgacagattttatcctcaggggattaaatgaggaaatggccttaatttaattgcttggtcataagaaagaa

SEQ ID NO: 153752 - DNA, 120 bp, Artificial Sequence
  ENSG00000105983_80 (sequence is synthesized)
tacagtgggcagatgaactggatgtaaatacagaattacctaactttccttgactatgaattcaacattcaagaatcttcttctggtagcaggagcggcagagaggacaggcatggaaag

SEQ ID NO: 153753 - DNA, 120 bp, Artificial Sequence
  ENSG00000105983_81 (sequence is synthesized)
cacgcgctgaccgccagcagcggagagaggggccaggcagatggagcactcgtgggtctcccggcgcagagcctgcggcacacaggacgggaagaggccacgcgggttagtttcatcaca

SEQ ID NO: 153754 - DNA, 120 bp, Artificial Sequence
  ENSG00000105983_82 (sequence is synthesized)
gcagaaagttacttaaactgaaatgcgaaccatgtgccccgagacatgggtcttcgaaacatgcggaagtttcattctgtgttaaaatcacatgcattttatttatatatatacatatat

SEQ ID NO: 153755 - DNA, 120 bp, Artificial Sequence
  ENSG00000105983_83 (sequence is synthesized)
ggaacaagaacttgaaaatgtaaagactcttaagacaaaattaggtattgtactttttttttcttgacttgtgtattggccttggtttcttattaaagactttactgtagtctgaaatat

SEQ ID NO: 153756 - DNA, 120 bp, Artificial Sequence
  ENSG00000105983_84 (sequence is synthesized)
tagaaaatttatgaaatctttatgttaaaacttttgacctgcccaaaatcattaataaagactatcttacagtttggggagaggataagtttacatttattcactttttttggttttata

SEQ ID NO: 153757 - DNA, 120 bp, Artificial Sequence
  ENSG00000105983_85 (sequence is synthesized)
tatatacaaaatgacttttcaaaggttcacaggttcaaagatgttgctccattgccttctcacttgcattatttccaacaagtcatctgtcatacttatcttttaatgtgtcttttttct

SEQ ID NO: 153758 - DNA, 120 bp, Artificial Sequence
  ENSG00000105983_86 (sequence is synthesized)
ataatcatgtcatcttgacaagtaacttaaattacatttgagataagtaatttttcttgagcttattaaaattgttaacatggtgcctgaatttgttgatgaaatcagtctaatgtcatg

SEQ ID NO: 153759 - DNA, 120 bp, Artificial Sequence
  ENSG00000105983_87 (sequence is synthesized)
tcttgttggcctttgaaagtctagatgttatttcaaagtagtaaacattcataatttcaactgtcttattttatgaaacagctgttttagggaaaccaatataatggtgtcatcaaattc

SEQ ID NO: 153760 - DNA, 120 bp, Artificial Sequence
  ENSG00000105983_88 (sequence is synthesized)
gcacctgtgtctgcccagaggggctggtcagcacaccctttacaatgaaggctcacaaagtacacaactccaagtgccagtccatgaaagcagttcgcatagacttttcatgcagttgag

SEQ ID NO: 153761 - DNA, 120 bp, Artificial Sequence
  ENSG00000105983_89 (sequence is synthesized)
tctaatttatattttactatccacttaccctatgtaaccaaatatcatttttacacttattaacaattcatacttttttcttccttaagaggaattaaagcatttcctcaatgagaaaaa

SEQ ID NO: 153762 - DNA, 120 bp, Artificial Sequence
  ENSG00000105983_90 (sequence is synthesized)
ctcgacctcctgggctcaagtgattctccaacctcagcctcctgagtatcctgcactacagatgaacaagaagatgaagatgccatcgtcaacaggatttcgttgtttttgagcacgttc

SEQ ID NO: 153763 - DNA, 120 bp, Artificial Sequence
  ENSG00000105989_0 (sequence is synthesized)
gcttctgctctgggcacgcatggcgcccgcacacggagtctgacctgatgcagacgcaagggggttaatatgaacgcccctctcggtggaatctggctctggctccctctgctcttgacc

SEQ ID NO: 153764 - DNA, 120 bp, Artificial Sequence
  ENSG00000105989_1 (sequence is synthesized)
tggctcacccccgaggtcaactcttcatggtggtacatgagagctacaggtggctcctccagggtgatgtgcgataatgtgccaggcctggtgagcagccagcggcagctgtgtcaccga

SEQ ID NO: 153765 - DNA, 120 bp, Artificial Sequence
  ENSG00000105989_2 (sequence is synthesized)
catccagatgtgatgcgtgccattagccagggcgtggccgagtggacagcagaatgccagcaccagttccgccagcaccgctggaattgcaacaccctggacagggatcacagccttttt

SEQ ID NO: 153766 - DNA, 120 bp, Artificial Sequence
  ENSG00000105989_3 (sequence is synthesized)
ggcagggtcctactccgaagtagtcgggaatctgcctttgtttatgccatctcctcagctggagttgtatttgccatcaccagggcctgtagccaaggagaagtaaaatcctgttcctgt

SEQ ID NO: 153767 - DNA, 120 bp, Artificial Sequence
  ENSG00000105989_4 (sequence is synthesized)
gatccaaagaagatgggaagcgccaaggacagcaaaggcatttttgattggggtggctgcagtgataacattgactatgggatcaaatttgcccgcgcatttgtggatgcaaaggaaagg

SEQ ID NO: 153768 - DNA, 120 bp, Artificial Sequence
  ENSG00000105989_5 (sequence is synthesized)
aaaggaaaggatgccagagccctgatgaatcttcacaacaacagagctggcaggaaggctgtaaagcggttcttgaaacaagagtgcaagtgccacggggtgagcggctcatgtactctc

SEQ ID NO: 153769 - DNA, 120 bp, Artificial Sequence
  ENSG00000105989_6 (sequence is synthesized)
aggacatgctggctggccatggccgacttcaggaaaacgggcgattatctctggaggaagtacaatggggccatccaggtggtcatgaaccaggatggcacaggtttcactgtggctaac

SEQ ID NO: 153770 - DNA, 120 bp, Artificial Sequence
  ENSG00000105989_7 (sequence is synthesized)
gagaggtttaagaagccaacgaaaaatgacctcgtgtattttgagaattctccagactactgtatcagggaccgagaggcaggctccctgggtacagcaggccgtgtgtgcaacctgact

SEQ ID NO: 153771 - DNA, 120 bp, Artificial Sequence
  ENSG00000105989_8 (sequence is synthesized)
tcccggggcatggacagctgtgaagtcatgtgctgtgggagaggctacgacacctcccatgtcacccggatgaccaagtgtgggtgtaagttccactggtgctgcgccgtgcgctgtcag

SEQ ID NO: 153772 - DNA, 120 bp, Artificial Sequence
  ENSG00000105989_9 (sequence is synthesized)
gactgcctggaagctctggatgtgcacacatgcaaggcccccaagaacgctgactggacaaccgctacatgaccccagcaggcgtcaccatccaccttcccttctacaaggactccattg

SEQ ID NO: 153773 - DNA, 120 bp, Artificial Sequence
  ENSG00000105989_10 (sequence is synthesized)
gatctgcaagaacactggacctttgggttctttctggggggatatttcctaaggcatgtggcctttatctcaacggaagccccctcttcctccctgggggccccaggatgggggggccac

SEQ ID NO: 153774 - DNA, 120 bp, Artificial Sequence
  ENSG00000105989_11 (sequence is synthesized)
acgctgcacctaaagcctaccctattctatccatctcctggtgttctgcagtcatctcccctcctggcgagttctctttggaaatagcatgacaggctgttcagccgggagggtggtggg

SEQ ID NO: 153775 - DNA, 120 bp, Artificial Sequence
  ENSG00000105989_12 (sequence is synthesized)
cccagaccactgtctccacccaccttgacgtttcttctttctagagcagttggccaagcagaaaaaaaagtgtctcaaaggagctttctcaatgtcttcccacaaatggtcccaattaag

SEQ ID NO: 153776 - DNA, 120 bp, Artificial Sequence
  ENSG00000105989_13 (sequence is synthesized)
aaattccatacttctctcagatgggaacagtaaagaaagcagaatcaactgcccctgacttaactttaacttttgaaaagaccaagacttttgtctgatcaagtggttttacagctacca

SEQ ID NO: 153777 - DNA, 120 bp, Artificial Sequence
  ENSG00000105989_14 (sequence is synthesized)
cccttaggggtaattggtaattacctggagaagaatggctttcaatacccttttaagtttaaaatgtgtatttttcaaggcatttattgccatattaaaatctgatgtaacaaggtgggg

SEQ ID NO: 153778 - DNA, 120 bp, Artificial Sequence
  ENSG00000105989_15 (sequence is synthesized)
acgtgtgtcctttggtactatggtgtgttgtatctttgtaagagcaaaagcctcagaaagggattgctttgcattactgtccccttgatataaaaaatctttagggaatgagagttcctt

SEQ ID NO: 153779 - DNA, 120 bp, Artificial Sequence
  ENSG00000105989_16 (sequence is synthesized)
agggaattaaaaagaagatgaatggtctggcaatattctgtaactattgggtgaatatggtggaaaataatttagtggatggaatatcagaagtatatctgtacagatcaagaaaaaaag

SEQ ID NO: 153780 - DNA, 120 bp, Artificial Sequence
  ENSG00000105989_17 (sequence is synthesized)
ggagaataaaattcctatctcatattatgcatgtgacccatggaatctcataactgaaagacttgaaggatgaaaattttggggatacaagattggtgaactaaaatgctgacagagagg

SEQ ID NO: 153781 - DNA, 120 bp, Artificial Sequence
  ENSG00000105989_18 (sequence is synthesized)
tttccagagctaactcgtgcctggggcggccttacaataagcagatgcctgaaagaagtcggccacgtccgccgtctgctaatgcccatcacccttcaagcccagtttaaagacctgtca

SEQ ID NO: 153782 - DNA, 120 bp, Artificial Sequence
  ENSG00000105989_19 (sequence is synthesized)
tatttaattgtatttatttgatgcttacaagatgatgtgatactgtagcctaaagcaaatgacacatagcattgcttataaagttggtaaccctgctatattatattgcaaacaaatcgt

SEQ ID NO: 153783 - DNA, 120 bp, Artificial Sequence
  ENSG00000105989_20 (sequence is synthesized)
aacttggagactatgtttaagggactcaactgtaattatgggagcatcagtatgcaaatagtggttggcttctgccatcagccaaaagatgacattcagggaaaatggagaggctgcctg

SEQ ID NO: 153784 - DNA, 120 bp, Artificial Sequence
  ENSG00000105989_21 (sequence is synthesized)
caccgtttttttatgttaaatgaaagaaaggtgaaatagctacttctcgtcttcttgaaaaatttggttcttattctgtatatgacttccttacagtgctacattaacaggatatttcat

SEQ ID NO: 153785 - DNA, 120 bp, Artificial Sequence
  ENSG00000105989_22 (sequence is synthesized)
tacatgcatctggtatcaaattattggttcttcctcattctttaataccatacagtaaggtcatttagactgagactcgtacaaaacaacctactggagtactttgccatagttaacatt

SEQ ID NO: 153786 - DNA, 120 bp, Artificial Sequence
  ENSG00000105989_23 (sequence is synthesized)
tgcctccagccctcttaaaaatgtcagaattcatcccctttccctcattcccaaattgttgtctaacttttccaaagtgactctttcctccttttattctatggattcggatggtgggaa

SEQ ID NO: 153787 - DNA, 120 bp, Artificial Sequence
  ENSG00000105989_24 (sequence is synthesized)
cagtggaatgacagtagctgctctgagcttggtgtgaagaaggccaggcacatgggcagctgctcagtcttcagttaccctgaaggttggtgtgaattccttcatgagagtgcgaaggca

SEQ ID NO: 153788 - DNA, 120 bp, Artificial Sequence
  ENSG00000105989_25 (sequence is synthesized)
ctttcatgggggtcccacagccatcagcccttcctcctgctggatgaactgtgaaatcatcaatccaggctgtgtttcaaattggaaaggatcttaggagacatctcagcttcctttagt

SEQ ID NO: 153789 - DNA, 120 bp, Artificial Sequence
  ENSG00000105989_26 (sequence is synthesized)
ttggggaaattgagaccaagagaggcgaagggattggtgcacatatcaggcattgcccaatgctccatcacaaataggaccacactcttgagtgtttgagatagtgtaggactttatcca

SEQ ID NO: 153790 - DNA, 120 bp, Artificial Sequence
  ENSG00000105989_27 (sequence is synthesized)
ttaaatgaaactagcttctcccagaattaactcagtggattttaaataattttagcttccaatggtgtgtttgctactttttttatgcctggtatgtttagatctgacattctttttatg

SEQ ID NO: 153791 - DNA, 120 bp, Artificial Sequence
  ENSG00000105989_28 (sequence is synthesized)
ctgagatatatccctcctggtaagtagcaaggggacaaggatatccacgtaggaacctacataaattgtcctaatccataagggagattatggcaaccatcgcaagtggcagtgggtcct

SEQ ID NO: 153792 - DNA, 120 bp, Artificial Sequence
  ENSG00000105989_29 (sequence is synthesized)
gccactgaggtgggaaaaataagagaatgaaatattgctatcggcttttacttctgaaagaggaaatgtctattgttcgggaaaaaaattacacaacaaatgaaggtaattttaaactcc

SEQ ID NO: 153793 - DNA, 120 bp, Artificial Sequence
  ENSG00000105989_30 (sequence is synthesized)
tttgccttagagcttggtagaggatcagtattccaggaacctgaaatacactgaaactctcaattatctgaggcttttaaggggaatatatggcacaaattagccaaaacaaaataattg

SEQ ID NO: 153794 - DNA, 120 bp, Artificial Sequence
  ENSG00000105989_31 (sequence is synthesized)
ggaaatccccttataaattccctctttattaaaatcttactataaattgaagttttctaggtccaagataatgtccattaattttctacaatatctgaaaaagtttccacaataggacat

SEQ ID NO: 153795 - DNA, 120 bp, Artificial Sequence
  ENSG00000105989_32 (sequence is synthesized)
taatccacaaccaagaagtgaccatggtacctgttgaaatactttctgctacaagtaacagatcccaaaggcactaaaaaaaggaggaaagtttactaacttggatcacaaaaagtctgg

SEQ ID NO: 153796 - DNA, 120 bp, Artificial Sequence
  ENSG00000105989_33 (sequence is synthesized)
cggtagggcaggtccaaagtgggctcatcgagcagctcaacagcatccccagaacccagatcttcacatctgtcaagtgtgcctgcagcttgctgcctgtcggcattgctgccctcaggt

SEQ ID NO: 153797 - DNA, 120 bp, Artificial Sequence
  ENSG00000105991_0 (sequence is synthesized)
ctccggccccatggaggaagtgagaaagttggcacagtcacgccgggcttcgcaggaccaggtcactcagtgacagatggacaatgcaagaatgaactccttcctggaataccccatact

SEQ ID NO: 153798 - DNA, 120 bp, Artificial Sequence
  ENSG00000105991_1 (sequence is synthesized)
tagcagtggcgactcggggacctgctcagcccgagcctacccctcggaccataggattacaactttccagtcgtgcgcggtcagcgccaacagttgcggcggcgacgaccgcttcctagt

SEQ ID NO: 153799 - DNA, 120 bp, Artificial Sequence
  ENSG00000105991_2 (sequence is synthesized)
gggcaggggggtgcagatcggttcgccccaccaccaccaccaccaccaccatcgccacccccagccggctacctaccagacttccgggaacctgggggtgtcctactcccactcaagttg

SEQ ID NO: 153800 - DNA, 120 bp, Artificial Sequence
  ENSG00000105991_3 (sequence is synthesized)
tggtccaagctatggctcacagaacttcagtgcgccttacagcccctacgcgttaaatcaggaagcagacgtaagtggtgggtacccccagtgcgctcccgctgtttactctggaaatct

SEQ ID NO: 153801 - DNA, 120 bp, Artificial Sequence
  ENSG00000105991_4 (sequence is synthesized)
ctcatctcccatggtccagcatcaccaccaccaccagggttatgctgggggcgcggtgggctcgcctcaatacattcaccactcatatggacaggagcaccagagcctggccctggctac

SEQ ID NO: 153802 - DNA, 120 bp, Artificial Sequence
  ENSG00000105991_5 (sequence is synthesized)
gtataataactccttgtcccctctccacgccagccaccaagaagcctgtcgctcccccgcatcggagacatcttctccagcgcagacttttgactggatgaaagtcaaaagaaaccctcc

SEQ ID NO: 153803 - DNA, 120 bp, Artificial Sequence
  ENSG00000105991_6 (sequence is synthesized)
caaaacagggaaagttggagagtacggctacctgggtcaacccaacgcggtgcgcaccaacttcactaccaagcagctcacggaactggagaaggagttccacttcaacaagtacctgac

SEQ ID NO: 153804 - DNA, 120 bp, Artificial Sequence
  ENSG00000105991_7 (sequence is synthesized)
gcgcgcccgcagggtggagatcgctgcatccctgcagctcaacgagacccaagtgaagatctggttccagaaccgccgaatgaagcaaaagaaacgtgagaaggagggtctcttgcccat

SEQ ID NO: 153805 - DNA, 120 bp, Artificial Sequence
  ENSG00000105991_8 (sequence is synthesized)
ctctccggccaccccgccaggaaacgacgagaaggccgaggaatcctcagagaagtccagctcttcgccctgcgttccttccccggggtcttctacctcagacactctgactacctccca

SEQ ID NO: 153806 - DNA, 120 bp, Artificial Sequence
  ENSG00000105991_9 (sequence is synthesized)
acttcttacccaaagcacatgcttagcttatctttctttccatttacagtctctttcttcctttctaatcctatctggggagctcctggccaggataatatatttgcagataattctgga

SEQ ID NO: 153807 - DNA, 120 bp, Artificial Sequence
  ENSG00000105991_10 (sequence is synthesized)
ccagagacttggtgcggggttaacaccttcatccagattgggtgccagcatacattttctggtgggccttaacatccctcctgcttttaggagaattcacagaacctactgttcctttca

SEQ ID NO: 153808 - DNA, 120 bp, Artificial Sequence
  ENSG00000105991_11 (sequence is synthesized)
gatgaccttttggaaaatagttccctttgccaacagaaacatgccagaaggaatcttctcatcttttatctaactatatgtacagctctcccctcccttgtccttgaaagtaggatatag

SEQ ID NO: 153809 - DNA, 120 bp, Artificial Sequence
  ENSG00000105991_12 (sequence is synthesized)
cgaaaggcgagtccaggagctcaggaagaagagatgcactatatgtttacacaattaattcatcccttaatttaagtcattttcatgtgtgtgagtttgctggttgtaaatactttgtcc

SEQ ID NO: 153810 - DNA, 120 bp, Artificial Sequence
  ENSG00000105991_13 (sequence is synthesized)
taagagatttatctttatacagattttctagaaatgtttaggttactaaaacagggtgggcaaactctctaaactggtacaattttataggtgaaagaaaaaattccctcatttaaaccc

SEQ ID NO: 153811 - DNA, 120 bp, Artificial Sequence
  ENSG00000105991_14 (sequence is synthesized)
aatcagatgcctcagagggtagccttgatttgttcttacagttaagaagccctgcagagcacaaacttcagaaacccggcttcctgtgctaagtctttcccaatctctacccctttcttc

SEQ ID NO: 153812 - DNA, 120 bp, Artificial Sequence
  ENSG00000105991_15 (sequence is synthesized)
tcgggccaccctctgtttaaaatttgtgctgggttattcagaacctaaaagtattattcaaaccaatttcttccttccacagttatcttagctggatataatgtattttcagctcaattg

SEQ ID NO: 153813 - DNA, 120 bp, Artificial Sequence
  ENSG00000105991_16 (sequence is synthesized)
ttaatgtgatggatggcacaatgaatgtatattttgtgttattcgtgaatagtcttttgcatgtcgcacaatgtttgatgtccccaaagtaccacactgagttctatcagttatcctttg

SEQ ID NO: 153814 - DNA, 120 bp, Artificial Sequence
  ENSG00000105991_17 (sequence is synthesized)
tgagcctatgatattccccatttcctgtacaatcatgaacagctctgagatcctggagtgatatgatccagagcagagtttacgggtcttaggatgtctgtaataaataaatatactcaa

SEQ ID NO: 153815 - DNA, 120 bp, Artificial Sequence
  ENSG00000105993_0 (sequence is synthesized)
agttgacgccgccgtgccgccgccgcgtgacgcatttcctgtttgttgttggagaaaggagagaaaggaaagcgcgaggagccgccgccaccaccagcgcagcagtcctggagctgtgag

SEQ ID NO: 153816 - DNA, 120 bp, Artificial Sequence
  ENSG00000105993_1 (sequence is synthesized)
gagattcgggccgtcaccctgcctcccctgcgtcccgccaccggccgcttctgtcctcggacccattccaacaatctcgtaaaacatggtggattactatgaagttctaggcgtgcagag

SEQ ID NO: 153817 - DNA, 120 bp, Artificial Sequence
  ENSG00000105993_2 (sequence is synthesized)
acatgcctcacccgaggatattaaaaaggcatatcggaaactggcactgaagtggcatccagataaaaatcctgagaataaagaagaagcagagagaaaattcaagcaagtagcggaggc

SEQ ID NO: 153818 - DNA, 120 bp, Artificial Sequence
  ENSG00000105993_3 (sequence is synthesized)
atatgaagtgctgtcggatgctaagaaacgggacatctatgacaaatatggcaaagaaggattaaatggtggaggaggaggtggaagtcattttgacagtccatttgaatttggcttcac

SEQ ID NO: 153819 - DNA, 120 bp, Artificial Sequence
  ENSG00000105993_4 (sequence is synthesized)
attccgtaacccagatgatgtcttcagggaattttttggtggaagggacccattttcatttgacttctttgaagacccttttgaggacttctttgggaatcgaaggggtccccgaggaag

SEQ ID NO: 153820 - DNA, 120 bp, Artificial Sequence
  ENSG00000105993_5 (sequence is synthesized)
cagaagccgagggacggggtcgtttttctctgcgttcagtggatttccgtcttttggaagtggattttcttcttttgatacaggatttacttcatttgggtcactaggtcacgggggcct

SEQ ID NO: 153821 - DNA, 120 bp, Artificial Sequence
  ENSG00000105993_6 (sequence is synthesized)
aaatcgatatcaacttcaactaaaatggttaatggcagaaaaatcactacaaagagaattgtcgagaacggtcaagaaagagtagaagttgaagaagatggccagttaaagtccttaaca

SEQ ID NO: 153822 - DNA, 120 bp, Artificial Sequence
  ENSG00000105993_7 (sequence is synthesized)
ataaatggtaaggagcagctgctgcgcttggataacaagtaattcaacgcacgcacttaacagaaatgttaaactataacaagcaccatttgaggattaacaggaacatttttttgaaga

SEQ ID NO: 153823 - DNA, 120 bp, Artificial Sequence
  ENSG00000105993_8 (sequence is synthesized)
tttcaaacgaactcgactttcagtataattgtacctaaagtatttataaacagctcatcggagcctctatttgtcatagacttttgagttgattgttgggaccacataataggaccattt

SEQ ID NO: 153824 - DNA, 120 bp, Artificial Sequence
  ENSG00000105993_9 (sequence is synthesized)
tttttttgtctttaaaattgttgtaaatctctgtatgcactttgcttttttattaaacgtactccaaggtgagtcttgactctttagtgtaggacaagattgtacactaacaccagcatg

SEQ ID NO: 153825 - DNA, 120 bp, Artificial Sequence
  ENSG00000105993_10 (sequence is synthesized)
gacctgcttttcattgtgtctgaaatgtgagccacgtagtgtcggcctgctgtgaagttaacattgccaggacgattcttctacagaaataatttcaatttttttcagtatttagtagtg

SEQ ID NO: 153826 - DNA, 120 bp, Artificial Sequence
  ENSG00000105993_11 (sequence is synthesized)
aaagatattaatacattaatggtaatacatttctggtttaatataaattaaggatgttttctagttgtgcatgaatgctggcaacttagtaagttttgacaattgtttaaatatgtaatg

SEQ ID NO: 153827 - DNA, 120 bp, Artificial Sequence
  ENSG00000105993_12 (sequence is synthesized)
ttaagcttaggtttaaaaaagtaaagctggtaaactgggtctttgtcatttgctttaaaaaaaaaaaaaaagaaaataaatgcgaatgtgttggtgcattcttcctgagtgggatctgga

SEQ ID NO: 153828 - DNA, 120 bp, Artificial Sequence
  ENSG00000105993_13 (sequence is synthesized)
gagcttgggtgaagaaactgaacaccacctgcaactcgaggagggaaagagaagagtagttgtgtctacagataatacaggggagaaacgtggagctcctgcctgccgcaggcacgaaga

SEQ ID NO: 153829 - DNA, 120 bp, Artificial Sequence
  ENSG00000105993_14 (sequence is synthesized)
cgaagccgccccggcctgcctcgctgctgagacacgcgcctcactgtctctctgaggaggagggcgagcaggaccgacctcgggcacccgggccctgggaccccctcgcgtccgcagcag

SEQ ID NO: 153830 - DNA, 120 bp, Artificial Sequence
  ENSG00000105993_15 (sequence is synthesized)
gagtgagacttctctgggtgccagaggacagcgaggacacaaaccgcgcctgggctgctgtgttctgacctgagcgggcgtgggcggtcgggcggggcgggaggaggtagcctcgctctg

SEQ ID NO: 153831 - DNA, 120 bp, Artificial Sequence
  ENSG00000105993_16 (sequence is synthesized)
ctcctctcccgctcgcggcgccccacgccacggtggctccgggccccccaccgttaaaacggggtccgcgtgtcctgtacgcagcgtgttgctccgcaaaggatgacagagctgccacgg

SEQ ID NO: 153832 - DNA, 120 bp, Artificial Sequence
  ENSG00000105993_17 (sequence is synthesized)
cagtgcgaggtgctgcttttaccgtagacgtgccttttcgtagctttcagcgtagagcttgaggcctgtggcttaggccgggtggtctcgtgctggtggggtctgcgtttgcccctgccc

SEQ ID NO: 153833 - DNA, 120 bp, Artificial Sequence
  ENSG00000105993_18 (sequence is synthesized)
ctccgtcagcttcaccttctcgtgccttcttctgcgctgggtgcagaacaaaagaccccctcaagtcaagcctccttgtgaagcgtagtctgcccgcccaccccccgtggggttcttggc

SEQ ID NO: 153834 - DNA, 120 bp, Artificial Sequence
  ENSG00000105993_19 (sequence is synthesized)
cgccctgccctcctcccacctgttagggagccggatagtctctgaagtgagtgccccggagaagttctgggtcaccctgaggacgtgctgtgcatgtaggcttggccctgactgcgtcct

SEQ ID NO: 153835 - DNA, 120 bp, Artificial Sequence
  ENSG00000105993_20 (sequence is synthesized)
aaagcccagggtccatgtagtgtgaatcgtgcgtcagttggaagtatttgtgcctcttctggttcttatcaccgcacgcggtgaggtgaccccagccgctcatgtcgtgcaggaagacat

SEQ ID NO: 153836 - DNA, 120 bp, Artificial Sequence
  ENSG00000105993_21 (sequence is synthesized)
ggatggttgatccctgggtttgggggaccgaagcggatgtcgtgaggttacttctgtggacttgggccgaacagcactgtctaagcaggacatgaaaagaagggggaagcgtctctcctt

SEQ ID NO: 153837 - DNA, 120 bp, Artificial Sequence
  ENSG00000105993_22 (sequence is synthesized)
ttcccttcatggaactttccattgaaaaattagccccttccagtccttctcggatgaagcacagttgccggttacgcttccgaggaggacggaaggtgcacccccagccgtgagagcctc

SEQ ID NO: 153838 - DNA, 120 bp, Artificial Sequence
  ENSG00000105993_23 (sequence is synthesized)
aggatgtgccgcctgtgggtgggcacggcagcccctccagccggccgcccacctgccgtgctgcgctcacctttgctgtgtgagtctgtgctgtgtcactgagtgacagacagaggcagt

SEQ ID NO: 153839 - DNA, 120 bp, Artificial Sequence
  ENSG00000105993_24 (sequence is synthesized)
tgcaggctgcatgcacccagaaagaactccccctgcactaagcgggcatgggggaggctccccagggtccctgcactgagcggggtgggggaggctccccacggttccctgcactgagcg

SEQ ID NO: 153840 - DNA, 120 bp, Artificial Sequence
  ENSG00000105993_25 (sequence is synthesized)
gggtgggggagactccccacggttccctgcactgagcgggcgtggggaaggttcccaggatccctgcactgagcggggtgggggagactccccacggttccctgcactgagcgggcgtgg

SEQ ID NO: 153841 - DNA, 120 bp, Artificial Sequence
  ENSG00000105993_26 (sequence is synthesized)
ggaaggttcccaggatccctgcactgagcgggcgtggggaaggttcccaggatccctgcactgagcgggcgtaggggaggctccccaggatccctgcactgagcgggcgttggggaggct

SEQ ID NO: 153842 - DNA, 120 bp, Artificial Sequence
  ENSG00000105993_27 (sequence is synthesized)
ccccagggtctgttgtgcgctcctggtactggagggtctgatggccgtagggagggtgcactgtttgtcgatgggtctttgcaaggtgcaggatagagcagggttgtagctgtagtgtcc

SEQ ID NO: 153843 - DNA, 120 bp, Artificial Sequence
  ENSG00000105993_28 (sequence is synthesized)
ctgaaccactggggttaggaggccaccggaagcctggcctgctaggggccttgtgatttcgcaggccccgagaacgtggtgtgcaggtgcgggccgcctgggggagccatgtttaaagtg

SEQ ID NO: 153844 - DNA, 120 bp, Artificial Sequence
  ENSG00000105993_29 (sequence is synthesized)
cggtgaggctcctggaacggcacccaccgcaggcccgaggccacacctgtatgtcagaactgggcgggtcttctcctcccaggccttcagcgcctgtggctatggctgtgggcgggactg

SEQ ID NO: 153845 - DNA, 120 bp, Artificial Sequence
  ENSG00000105993_30 (sequence is synthesized)
atacgggcaggcaggcgctgttctccccacgtattctcggcttccccgccatacaccgtttctgagtggggagaactggttgactgctgaatcccaacacaaatccttagagcaaagagg

SEQ ID NO: 153846 - DNA, 120 bp, Artificial Sequence
  ENSG00000105993_31 (sequence is synthesized)
ccagtgatggcttttgtttctgcccggatcctctttgtggatcttccgttttgcggcttttcctctcatttgtttcctttttttaatcgcttcatgagatcttgaagataccaaagtaac

SEQ ID NO: 153847 - DNA, 120 bp, Artificial Sequence
  ENSG00000105993_32 (sequence is synthesized)
catcaaagatttaaagacgtgatttttatacaaatatataacgaacacgtcagagacttttacttaagttcttactgagagatgacaaagctgactcaaaggatgagtcaagaaaccgct

SEQ ID NO: 153848 - DNA, 120 bp, Artificial Sequence
  ENSG00000105993_33 (sequence is synthesized)
gcagagttggagacagaactggagtgaaattgcaaagcagggtggttttggtctctgcagaggccatttgcgactcactcaccaactccggtgtcagggtgctggtgggtgacagggaag

SEQ ID NO: 153849 - DNA, 120 bp, Artificial Sequence
  ENSG00000105993_34 (sequence is synthesized)
aggttgagcaagcctccgcccctgcaggctcgctcattatacaatgagcacctgcaccaccaaatccgaacaactgtacatgcttacagagaagggcacgtgctagtgtgggagtgacaa

SEQ ID NO: 153850 - DNA, 120 bp, Artificial Sequence
  ENSG00000105993_35 (sequence is synthesized)
agtcacacgggtgcagaccccttagctccagcctgctgggtgttctgacgaatggactttgtagcgataacacaggctcctgagtcaggatactggtttgctgcatttctgcgtcactga

SEQ ID NO: 153851 - DNA, 120 bp, Artificial Sequence
  ENSG00000105993_36 (sequence is synthesized)
aggtctcgctttccccgaagccccttgtcacagaaaacccatgactcttggccaggcctctgggtgcctggaagatcccactatcatctttttgtgggatttgcatgtcctggtcaaggt

SEQ ID NO: 153852 - DNA, 120 bp, Artificial Sequence
  ENSG00000105993_37 (sequence is synthesized)
tcctgtaaaaggaatacagtgaggagaccggccacccgacagtattgatggcccccactttggcctccagccgtctgacccgtccctgaatcgagcaggtcctgtcggagctcccaggag

SEQ ID NO: 153853 - DNA, 120 bp, Artificial Sequence
  ENSG00000105993_38 (sequence is synthesized)
tgagcgagcttccactcacagggtcacagccaggtgtgcagcccccaggcctgggcggttctagggcatgattttttttaggctggaaatgagctctcacttgagatgcacccctcaaaa

SEQ ID NO: 153854 - DNA, 120 bp, Artificial Sequence
  ENSG00000105993_39 (sequence is synthesized)
ggaagcaggaatgtcggggagcgcggggtgcagggggtgccctgtcacagtcagcggggagcgcctgtccctgctgcgtggtgtggggttcccgtggctggcatttgctgctgtgtggag

SEQ ID NO: 153855 - DNA, 120 bp, Artificial Sequence
  ENSG00000105993_40 (sequence is synthesized)
tcctcaaacccagcgctcgccctgcctgcgttcagaggacagaggcaccaccgggaacccaccggatcctcactcaggctttggaaaggccgagtgatgttttgtgtttgtgaattccac

SEQ ID NO: 153856 - DNA, 120 bp, Artificial Sequence
  ENSG00000105993_41 (sequence is synthesized)
acatactgtaggagtatcaagaacacgtaactgttaaaaaaggaaaagtaaaattactgaacaggaaagaaagaataaagcaggtcctttgtttttttggctgaggaaagcagcctgccc

SEQ ID NO: 153857 - DNA, 120 bp, Artificial Sequence
  ENSG00000105993_42 (sequence is synthesized)
tggaacgctgtagaatgtctccctttttgtgaagcacagcatggagctctcggaactgaagatgggaatctaaccctgccctcagctttcaacagctcgaagtttgtctttttaatgaaa

SEQ ID NO: 153858 - DNA, 120 bp, Artificial Sequence
  ENSG00000105993_43 (sequence is synthesized)
ctaatttgtgtatttatacttaagggttttcaagtccttaaacttgataagaaaacttaagtcgttttctatcaggacaagtttttaagtagtcactggtgggagagcgtgcctctgtgg

SEQ ID NO: 153859 - DNA, 120 bp, Artificial Sequence
  ENSG00000105993_44 (sequence is synthesized)
actgtgcccaaggctggcggtcccacgaagtcccagagcccgcgagccggtgcccaaggccatgtctgtgatttgcaggaggttcaggtgacaggaaggcctgctctgtttttctcactt

SEQ ID NO: 153860 - DNA, 120 bp, Artificial Sequence
  ENSG00000105993_45 (sequence is synthesized)
tctcggctcactgcaacctctgcctcaagggttccagcgattttcctgcctcacctccccagtggccggaactacaggtgcttgccaccacttctggctcatttttgtatttttagtaga

SEQ ID NO: 153861 - DNA, 87 bp, Artificial Sequence
  ENSG00000105993_46 (sequence is synthesized)
aatagtggaggcttgaagaacaccggaaagtggtttccttgtaccggacccgcccctcccccaccatcccggcagccccagggcggg

SEQ ID NO: 153862 - DNA, 120 bp, Artificial Sequence
  ENSG00000105993_47 (sequence is synthesized)
acccgcccctcccccaccatcccggcagccccagggcgggtgagggcgactgcagtgtggtcacctcaggctttccgtccctagctcataaaggcccagtggcagcagttgctttaaagg

SEQ ID NO: 153863 - DNA, 120 bp, Artificial Sequence
  ENSG00000105993_48 (sequence is synthesized)
agctccgttactccctttgttctggggtcttggtaaagtttgctttgctgaagcggaggaaccgcaggcggtgctgacccccccaccccgcccccatcccacggggtcccttgggtcccg

SEQ ID NO: 153864 - DNA, 120 bp, Artificial Sequence
  ENSG00000105993_49 (sequence is synthesized)
gggcacgaggctcctctgagggacacggcctccaagagctggctctgccctggccgccctccacagtcacggcggctccccgcatgctcctcgggacggagatctcctggcttcctcccg

SEQ ID NO: 153865 - DNA, 120 bp, Artificial Sequence
  ENSG00000105993_50 (sequence is synthesized)
cttcctttcctctgcgttttccgcagagccgcctccctgctttggaagcaggtactcagcggcctctgcagccgccaacggcacacaggcctctctctgttcgttctttctttccgtaac

SEQ ID NO: 153866 - DNA, 120 bp, Artificial Sequence
  ENSG00000105993_51 (sequence is synthesized)
cgtagcttgaggcacatttcctaaatatgcagcatggaacgcttggcggttctgaacgcgcatctcgtgctgctcctgtagggcggttaggacgcgctcctctggcgaggaaggtggcag

SEQ ID NO: 153867 - DNA, 120 bp, Artificial Sequence
  ENSG00000105993_52 (sequence is synthesized)
cctccactgtgcacgggtcacaggcgagtgtggtgtggtgtggttgtgggtggggtgtggactggatctgcaggcttgtccctctctcgtggagagctgtcggggtccaggcagtgctca

SEQ ID NO: 153868 - DNA, 120 bp, Artificial Sequence
  ENSG00000105993_53 (sequence is synthesized)
gtggtgagagccacagcacatttgaaagtccacatgtgtttgccccactgtggtccaggacatgtgtgagccacactcagtggacttgcacctgtgacatgttggtcagcgtggcggccg

SEQ ID NO: 153869 - DNA, 120 bp, Artificial Sequence
  ENSG00000105993_54 (sequence is synthesized)
tcagctgggtgtggaatgcatctgattggagcctggcacccggcctaccatgattgtgattctctggggcgagtcctgagtgtgggcagggcctcaggcccccaagagggctgtgagcag

SEQ ID NO: 153870 - DNA, 120 bp, Artificial Sequence
  ENSG00000105993_55 (sequence is synthesized)
gcaccttcctgtgaggcacgatgccaccatgtgaagttgtgtgggtctttggagagttctggcaggttgagggcctgtgcgtgtgggacccaggcctgccctgcctgctgccggccatgt

SEQ ID NO: 153871 - DNA, 120 bp, Artificial Sequence
  ENSG00000105993_56 (sequence is synthesized)
tccctctgcccagtcatgttgacaattgtggccaaattcaacatcgggcctgtttcctgcacccacgttggcacacactgagttcaagacagtttctgcagaaatgaatccagaggtgtt

SEQ ID NO: 153872 - DNA, 120 bp, Artificial Sequence
  ENSG00000105993_57 (sequence is synthesized)
tatttctggcacgttggatcagacgttcagagggtgggcgtctttctccatgcacttcagctggatcagtcagtgtcagccattgactttagcaacagggaaatgaaagactttcctcaa

SEQ ID NO: 153873 - DNA, 120 bp, Artificial Sequence
  ENSG00000105993_58 (sequence is synthesized)
taagaaatgggactttctcacgctggatggcacagagctggcaaacatgaggccagtccacaccaaggctttgcctgcagaaaggctgcactgtggccagcgggggaagcggaggagaca

SEQ ID NO: 153874 - DNA, 120 bp, Artificial Sequence
  ENSG00000105993_59 (sequence is synthesized)
cctgtggacaccctccccacaggattgaaagaaggtggcaagaggaagaagcagaagcagagagaggagtcgaagaagaagaagtcgaccaaaggcaatcactagaccggacttgaggca

SEQ ID NO: 153875 - DNA, 120 bp, Artificial Sequence
  ENSG00000105993_60 (sequence is synthesized)
cgcggtgcacccccagacgctggcgctccaccgtgctcggcatgcggtcgtgcacacgcgctaggtagcagcgtcggtcaggactgtctcgaggccacactcgctcggcaggattatgcg

SEQ ID NO: 153876 - DNA, 120 bp, Artificial Sequence
  ENSG00000105993_61 (sequence is synthesized)
atcacggatcagtcagagcagggtcaggagacggggctgacggcacgggtggcggggacagacgtttgggacttggccgcgactctctgcttctctccagctctcaatctgctgcatttt

SEQ ID NO: 153877 - DNA, 120 bp, Artificial Sequence
  ENSG00000105993_62 (sequence is synthesized)
cctctagtgcttccggatcctcttcattcttttcggctactcaaccactccgcatgctgctggaatatttctggctttagaagtacaggagggcgcagatggctaactgagtaacattca

SEQ ID NO: 153878 - DNA, 120 bp, Artificial Sequence
  ENSG00000105993_63 (sequence is synthesized)
tgaaatgaggctttctgtggcggcgtagtgtttggaattagaaggtaattcagtagagtgtaacttagagaatattgcaagtgacacattgaatcctgcccgtcagggcaccttttcctc

SEQ ID NO: 153879 - DNA, 120 bp, Artificial Sequence
  ENSG00000105993_64 (sequence is synthesized)
agagcaatccggccacacgaatagaaggctgtcgtgaatcacatcagatgtaaaatcattccttctgtttactcttttaattttcatcctttgcaggtagtgcaaattcaacttcaaata

SEQ ID NO: 153880 - DNA, 120 bp, Artificial Sequence
  ENSG00000105993_65 (sequence is synthesized)
tggtgtaggttttgctagattccatatttttttcttggatttttgctaattatttttagcaaaaaatttttgctcagtggcactctccctagtgtccatgggttagggccatgctgggga

SEQ ID NO: 153881 - DNA, 120 bp, Artificial Sequence
  ENSG00000105993_66 (sequence is synthesized)
aaacgggccggtatttacacacgcgcaaaacacccagagacggcacaaggaggttgaactcatgtttcagttcgcgaacattgactccttacgaaagtcacttcattctaactagatgcg

SEQ ID NO: 153882 - DNA, 120 bp, Artificial Sequence
  ENSG00000105993_67 (sequence is synthesized)
cccacttccggtcattatttcgtttgcatgatgtattgcttcttcacgttttgtttttattgagcacggagtagaattccagggctgccttgacttcttccctgcatgctccctcccagt

SEQ ID NO: 153883 - DNA, 120 bp, Artificial Sequence
  ENSG00000105993_68 (sequence is synthesized)
gactttccttccctttcacatgaggatctgccgttcatgttgctttctcctttgtcctcttggacttgagggcattgtgaaaagctttgctgtgatttaaaaatgccagcaattttaatc

SEQ ID NO: 153884 - DNA, 120 bp, Artificial Sequence
  ENSG00000105993_69 (sequence is synthesized)
tagcagtgttgaagctgggaattttttggcgcaatccatgtagcagtgacccaggcttgggagccagaaacaagtgtgacctgggattttatttaacacaactgttgccaaagagttggc

SEQ ID NO: 153885 - DNA, 120 bp, Artificial Sequence
  ENSG00000105993_70 (sequence is synthesized)
tttgtttatttggttttggcggggagaggagtggtatttgatgctttctgtggacaatgtaaccctaaacacatcatgtattttaaatgccacctacataaataaaacataagcatattg

SEQ ID NO: 153886 - DNA, 120 bp, Artificial Sequence
  ENSG00000105993_71 (sequence is synthesized)
accaccagcgcagcagtcctggagctgtgaggagattcgggccgtcaccctgcctcccctgcgtcccgccaccggccgcttctgtcctcgaaacgggagtggcttgcggagcaggaatgc

SEQ ID NO: 153887 - DNA, 120 bp, Artificial Sequence
  ENSG00000105993_72 (sequence is synthesized)
cgcagccgtgccgccaagttcggagggagaagaagcaggtgggggaccgcaaagccctgtttctagaactccggacggattgttcagaagtttgtggaagagcaggctgcctttctcact

SEQ ID NO: 153888 - DNA, 120 bp, Artificial Sequence
  ENSG00000105993_73 (sequence is synthesized)
gtcctgtgttctgatcggtgattctcatggtgaccaagcgaggaagaaggcccgctcttccaacaccatggcttctcttctggggcacacgagaagacccttttgaggacttctttggga

SEQ ID NO: 153889 - DNA, 120 bp, Artificial Sequence
  ENSG00000105993_74 (sequence is synthesized)
gctgctatatgtatgtagtcactgagcagcctgctgacgggtttgaggaagtggccggtgaggacttggagcctagtgaggagttagtagagctgcccagggtggaggaggccacagagg

SEQ ID NO: 153890 - DNA, 120 bp, Artificial Sequence
  ENSG00000105993_75 (sequence is synthesized)
gtcttgggcacagtttgggtcaggcacttttgttagctgtctcctgttagagtcttctcaaccactgggacttcctgagtggtgcactgggtgacctgagaggtcaggattaaacatgta

SEQ ID NO: 153891 - DNA, 120 bp, Artificial Sequence
  ENSG00000105993_76 (sequence is synthesized)
accatgtttacatccgtccttcatcaaccctcacaggacagggcagtgtttgggttgaagtcctgtgttctgatcggtgattctcatggtgaccaagcgaggaagaaggcccgctcttcc

SEQ ID NO: 153892 - DNA, 120 bp, Artificial Sequence
  ENSG00000105993_77 (sequence is synthesized)
aacaccatggcttctcttctggggcacacgaggctctcaggatttacacactggggaagctgctgctccatggctgctatatgtatgtagtcactgagcagcctgctgacgaagaccctt

SEQ ID NO: 153893 - DNA, 120 bp, Artificial Sequence
  ENSG00000105993_78 (sequence is synthesized)
atactaatgtggtaatcagtgaactatttgcttccgtttccttcagtcactattccctggcgaagtctccacgcgctcccgttcgccggggaacttagggtatccgggcttccctaaatt

SEQ ID NO: 153894 - DNA, 120 bp, Artificial Sequence
  ENSG00000105993_79 (sequence is synthesized)
gacaagcgggggccggcgccttcgcccgccttcgctggccgccgcttggtttgttcttcttctccttcggggacttctccgcccgcgcccgcgcccgcgccccagctttcgtcccgctgt

SEQ ID NO: 153895 - DNA, 120 bp, Artificial Sequence
  ENSG00000105993_80 (sequence is synthesized)
gcggagatgccacccagctccaccgcaggaccgcggagcgagaggcggcagacgcgctccgggggccgccggtcaagaggaagatgaagggcgcgacgacttcgcggtttccagaatggg

SEQ ID NO: 153896 - DNA, 120 bp, Artificial Sequence
  ENSG00000105993_81 (sequence is synthesized)
ctccttctggcccaacaataagtgccatttggaatcttctcggccttctctgtgccttccgcgcgtctgggctccccggagagaaaggaaagcgcgaggagccgccgccaccaccagcgc

SEQ ID NO: 153897 - DNA, 120 bp, Artificial Sequence
  ENSG00000105993_82 (sequence is synthesized)
ggcattgatggtcctcgttcctgtaactggtcctgtggacacagccactttcttccactgcccattctgtggtcttgtggccttcagcaggcacctcactggttgtggttctttctggtg

SEQ ID NO: 153898 - DNA, 120 bp, Artificial Sequence
  ENSG00000105993_83 (sequence is synthesized)
aggtaaagtaaaaaagaagttggtagcacatttgattaacacgtgtcttaagatttatttctaaggtataaaagtatgatcagttgtttataaatccaaaagtaataatacatgctgggt

SEQ ID NO: 153899 - DNA, 120 bp, Artificial Sequence
  ENSG00000105993_84 (sequence is synthesized)
ttaagatttgaaaatgggaatgaggtgagaggaggaggaggtcttgcccctccaccccagttggagccccacaggaacgttgtagcacgtgctgtatagttgtgatgcccgcggtcggag

SEQ ID NO: 153900 - DNA, 120 bp, Artificial Sequence
  ENSG00000105993_85 (sequence is synthesized)
ccccacgggagcattgtagcacgcgctgtatggttgtgcgttgtagcgtgcgctgtatagttgtgatgcccacaggcttccttgcatttctctccagctctgctagccacgaacacttca

SEQ ID NO: 153901 - DNA, 120 bp, Artificial Sequence
  ENSG00000105993_86 (sequence is synthesized)
agtctgcacttcacatgcttgcttgcctgtgcatggttacgcacgctcagcaacttagttccacgttttgggatgagttgagttccctgacgtagaattgctgggttgagggttttttat

SEQ ID NO: 153902 - DNA, 120 bp, Artificial Sequence
  ENSG00000105993_87 (sequence is synthesized)
aataaaaatattggttttattttgggggctgaaggttttaaaagcttaatacatacttctagattgcttttcaaaacgacagaaaccagcacatgataagtagctcttacttgaaataag

SEQ ID NO: 153903 - DNA, 120 bp, Artificial Sequence
  ENSG00000105993_88 (sequence is synthesized)
gacttgtctgatctcaagtggcaacttttaactggtctttaaatattataaattttgaaattattttaatgtttcttagcactgtttctgttacaaatgagacttcatttttagggtaat

SEQ ID NO: 153904 - DNA, 120 bp, Artificial Sequence
  ENSG00000105993_89 (sequence is synthesized)
ttgtgattttaatatttgaaattatacgagttaaaattcagtgaatacctgaattgtgaaaaattatatttaagctacaaaatgtcagtagagaaataaacaagataaagatttttttca

SEQ ID NO: 153905 - DNA, 120 bp, Artificial Sequence
  ENSG00000105993_90 (sequence is synthesized)
tacaagaaaatggaacggaaaagcattggccttctcataacatagtactcagccagcttttgaggtagcttctgtagatgatgatataattatgaatgtcattgtcttaatttagcttag

SEQ ID NO: 153906 - DNA, 120 bp, Artificial Sequence
  ENSG00000105993_91 (sequence is synthesized)
aatgcaaaccagttaaaatcacttggttagtactgttaccactgagacacgggttcaagatgcatgtaaaagctcagtgccttgtggacaacttctaagggtttagttgccatggattta

SEQ ID NO: 153907 - DNA, 120 bp, Artificial Sequence
  ENSG00000105993_92 (sequence is synthesized)
aagaaattgtgactaaaccaatgttttagcattgataaatgggaaattgcggaaggatgtaaacgtagagtttaactctacaacttggcttagggactcaggtatggacagtgagaataa

SEQ ID NO: 153908 - DNA, 120 bp, Artificial Sequence
  ENSG00000105993_93 (sequence is synthesized)
cttggtttagggactcagatatggacagtgagactggccacatgagtgcctttctcactgtcacactcttacccaggttggagtgcagtggctgtcgacaggtgtgatcatagctccctg

SEQ ID NO: 153909 - DNA, 120 bp, Artificial Sequence
  ENSG00000105993_94 (sequence is synthesized)
tgtcgacaggtgtgatcatagctccctgcagccttgaattcctgggctcaagcagtcctgcctcagcctcccaaggaggtgggactaaagatggtgtgccaccacacctggctaattttt

SEQ ID NO: 153910 - DNA, 120 bp, Artificial Sequence
  ENSG00000105993_95 (sequence is synthesized)
atgttgcccaggttggtcttgaacccctgacctccagggatctctcctgccttggcctcctcaggagctggaactacagatatatgctaatgtcttcaatttatggaaatgcagaaatgc

SEQ ID NO: 153911 - DNA, 120 bp, Artificial Sequence
  ENSG00000105993_96 (sequence is synthesized)
tttttttttttttttttttttgagatggactcatgttctgctgcccaggctggagtgctgtggtgtgatcttagctcactgtatcctccacctccggggttcaagcaattttcgtgcctc

SEQ ID NO: 153912 - DNA, 84 bp, Artificial Sequence
  ENSG00000105993_97 (sequence is synthesized)
cactgtatcctccacctccggggttcaagcaattttcgtgcctcagcctcctgggtggctgagactacagatgcccaccaccac

SEQ ID NO: 153913 - DNA, 120 bp, Artificial Sequence
  ENSG00000105993_98 (sequence is synthesized)
cggcctcccaaagtactgggattatagctgtgagccactgcaccctcccggaaatgctttttaacggtcacctcctaggggagatgaagagagttaccgcataatcagttttaactgtat

SEQ ID NO: 153914 - DNA, 120 bp, Artificial Sequence
  ENSG00000105993_99 (sequence is synthesized)
ataatcagttttaactgtatttgtaatgtttgtttctttacctgggaggatatgttgtagatacgtgagatagaatacctaagtgacacaatggtgtgcaggctatggctgcaaagtaga

SEQ ID NO: 153915 - DNA, 120 bp, Artificial Sequence
  ENSG00000105993_100 (sequence is synthesized)
aagtttctaaatagcatgcttggatttttatttgaattggatgaagtttttgtgtcctagagaaattcacaaaatgttcctagtttcagataaaaggttatgatttaacatctttgcttt

SEQ ID NO: 153916 - DNA, 120 bp, Artificial Sequence
  ENSG00000105993_101 (sequence is synthesized)
tgttctttcttgtctttgaatagaacagtgggggacggtaaggtctgtttgcaaagtacctatgaccatcttacattatttttatgggtggggggcattgactgtggaatgtgggcagta

SEQ ID NO: 153917 - DNA, 120 bp, Artificial Sequence
  ENSG00000105993_102 (sequence is synthesized)
acttgcacagtcagtaaccgtttgagtaacttcttgttggcatccccattctggcactcctcctctaggtctccacctcacacgctggtttgtgggcggaggggcaggttggtgcgtggg

SEQ ID NO: 153918 - DNA, 120 bp, Artificial Sequence
  ENSG00000105993_103 (sequence is synthesized)
ggctgtgcatgccttcttcctcttctgtctcttggccaccttttccaaaaagtcaccagtgaccaattctcccagtgtttctttgggactcaatgccttgggcttggcattgggtaaagc

SEQ ID NO: 153919 - DNA, 120 bp, Artificial Sequence
  ENSG00000105993_104 (sequence is synthesized)
caactggccagtttcattctgacgagctctatagtagtccggtgtggacctctgccctccctgctctgcggaagcttcctcagcctttgcttctcactatttactatttgcgggtcctgg

SEQ ID NO: 153920 - DNA, 120 bp, Artificial Sequence
  ENSG00000105993_105 (sequence is synthesized)
gggtacccagcgtctcagggttttggctgcccacctgtacgtcggtcctttcaaactgtggtcagagtcaacctcaggtgctgcttttctctagtcactgcattttttttttttagtaga

SEQ ID NO: 153921 - DNA, 120 bp, Artificial Sequence
  ENSG00000105993_106 (sequence is synthesized)
gacaaagtcttgctgtgttgtccagcctggattcaaactcctgagctcaaggaatcctcccactcagcctccagagtagctggatcaagtcactcttgttcataacctcagttgcttcat

SEQ ID NO: 153922 - DNA, 120 bp, Artificial Sequence
  ENSG00000105993_107 (sequence is synthesized)
gaatctcgatttctgcttgatttcagtgcttgctgttgtatccttgtgtgctgcagtatttattgttaacatttgtgactcaaatgtatccactccctgctttggttgctctggcctgca

SEQ ID NO: 153923 - DNA, 120 bp, Artificial Sequence
  ENSG00000105993_108 (sequence is synthesized)
agtaggccgtactaattctgtagttggtcctagcttgcctttgtctttaccttgcatgcgtttatgtcttaatgcacctattaggattccttgcttttatcacaggtttcccatttttct

SEQ ID NO: 153924 - DNA, 120 bp, Artificial Sequence
  ENSG00000105993_109 (sequence is synthesized)
gaaaaaattacagtaattattaacgcagaacccaggtaaattaaaaaggtttgtatgctttatgaatttttagtaagtactcattgattgataacagcaacagaggaaaacaaaacggtc

SEQ ID NO: 153925 - DNA, 120 bp, Artificial Sequence
  ENSG00000105993_110 (sequence is synthesized)
agttccgatcttgatttccaggagcactttgtgtttccacttggcagcgtgatgcttcctcatgtcggtgattttctgttgagacatcttcaagcatcatcttacgtctgcttgttaaca

SEQ ID NO: 153926 - DNA, 120 bp, Artificial Sequence
  ENSG00000105993_111 (sequence is synthesized)
tttgttcagatttgatttcagctaatccttaaaagttttttgagacatcaaacttagaataaaaggaatttcctttgccgagattcatcaggtatttacacttagcttacatggccacac

SEQ ID NO: 153927 - DNA, 120 bp, Artificial Sequence
  ENSG00000105993_112 (sequence is synthesized)
gtgtgtgtgtgtgtgtgtgtgtgggcgcgcgcatgttagggtaatccatttttctgtttgtttctgaattgctttggagaaggcaactcagactccaaggaatacaacagctgccgtgtg

SEQ ID NO: 153928 - DNA, 120 bp, Artificial Sequence
  ENSG00000105993_113 (sequence is synthesized)
caacagctgccgtgtgaagcttttctcacttttccagtggtcgtagcaggaacagcgtcttgacctcacatcagtgacgtgaaaagagctgagtttgaagtgcatattggtcctccataa

SEQ ID NO: 153929 - DNA, 120 bp, Artificial Sequence
  ENSG00000105993_114 (sequence is synthesized)
agaatgtgtgtatgtgctgtttttttaattaagtctggtaatttatttgatacaatgtattgtagttttagttgaattaaactagttagtaaaactgttggtgaggtagtgtttcagtta

SEQ ID NO: 153930 - DNA, 120 bp, Artificial Sequence
  ENSG00000105993_115 (sequence is synthesized)
ctctgtagataagctcttttgttaaaacctcttaagttttttgttcctgaatatgttacaaacatctattttctcttactgtagctatcacatgaggaaaaaaacttgaaaaaaagactt

SEQ ID NO: 153931 - DNA, 120 bp, Artificial Sequence
  ENSG00000105993_116 (sequence is synthesized)
cctcaggtgatccacccgcctcggcttcgcaaagtgctggattacaggtgtgagcccgcgcgtccggctgtcactttaaagagtattataagagggcacttcataacttgggcaggtatt

SEQ ID NO: 153932 - DNA, 120 bp, Artificial Sequence
  ENSG00000105993_117 (sequence is synthesized)
tagtcatcctgaacgtgtcgctgtggactgggtgtcaccgcgggaccgcacagacaccttactgtcgtctgctgtaaaggacccattccaacaatctcgtaaaacatggtggattactat

SEQ ID NO: 153933 - DNA, 120 bp, Artificial Sequence
  ENSG00000105993_118 (sequence is synthesized)
aatccctaggtttaatctctgttatcttaacagcagttagtacttataaaatcataatactcttttagttagagtgctttaaaatatgtgtatacctttcgtagaatagcattgtggatt

SEQ ID NO: 153934 - DNA, 120 bp, Artificial Sequence
  ENSG00000105993_119 (sequence is synthesized)
tgccagctttttttggtatacaggtctgcgcttaacctacattttctcctaatcttcctaagaatgtcgtgcttggaaatcttctcctcttaatataataatcaaggccagaatgtaatg

SEQ ID NO: 153935 - DNA, 120 bp, Artificial Sequence
  ENSG00000105993_120 (sequence is synthesized)
aaattcttagttaaaaaggggcaacatatgttctgcatcagtaggtggaaagtaacgcagttggaaaatctcactaaccttcatgctgtctaacctcctttgtagttaaaacaaaagtgc

SEQ ID NO: 153936 - DNA, 120 bp, Artificial Sequence
  ENSG00000105993_121 (sequence is synthesized)
tttttctaaggctcccgcactcgcgtctgaaaccagaaacgggagtggcttgcggagcaggaatgccgcagccgtgccgccaagttcggagggagaagaagcaggacccattccaacaat

SEQ ID NO: 153937 - DNA, 120 bp, Artificial Sequence
  ENSG00000105996_0 (sequence is synthesized)
agtttaatagtagcgcggtccccatacggctgtaatcagtgaattagaaaaaaaacaccctagcagcgatattctatgatagattttttttcctctgcgctcgcctttttcctaggcctt

SEQ ID NO: 153938 - DNA, 120 bp, Artificial Sequence
  ENSG00000105996_1 (sequence is synthesized)
gcccccccaaagcccctccaaaagagggaactttttctctgagggggctccaaggagaaggccatgaattacgaatttgagcgagagattggttttatcaatagccagccgtcgctcgct

SEQ ID NO: 153939 - DNA, 120 bp, Artificial Sequence
  ENSG00000105996_2 (sequence is synthesized)
gagtgcctgacatcttttccccctgtcgctgatacatttcaaagttcatcaatcaagacctcgacgctttcacactcgacactgattcctcctccttttgagcagaccattcccagcctg

SEQ ID NO: 153940 - DNA, 120 bp, Artificial Sequence
  ENSG00000105996_3 (sequence is synthesized)
ggcgctggcggccgccccaagccgagccccgcgggcagccgcggcagcccggtgcccgccggcgccctgcagccgcccgagtacccctggatgaaggagaagaaggcggccaagaaaacc

SEQ ID NO: 153941 - DNA, 120 bp, Artificial Sequence
  ENSG00000105996_4 (sequence is synthesized)
gagaagaaggcggccaagaaaaccgcacttctgccggccgccgccgccgccgccaccgccgcagccaccggccctgcttgcctcagccacaaagaatccctggaaatcgccgatggcagc

SEQ ID NO: 153942 - DNA, 120 bp, Artificial Sequence
  ENSG00000105996_5 (sequence is synthesized)
ggcgggggatcgcggcgcctgagaactgcttacaccaacacacagcttctagagctggaaaaagaatttcatttcaacaagtacctttgcagaccccgaagggtggagattgcagcgctg

SEQ ID NO: 153943 - DNA, 120 bp, Artificial Sequence
  ENSG00000105996_6 (sequence is synthesized)
ctggatttgactgagagacaagtgaaagtgtggtttcagaaccggaggatgaagcacaagaggcagacccagtgcaaggaaaaccaaaacagcgaagggaaatgtaaaagccttgaggac

SEQ ID NO: 153944 - DNA, 120 bp, Artificial Sequence
  ENSG00000105996_7 (sequence is synthesized)
aaagtagaggaggacgaggaagagaagacgctctttgagcaagcccttagcgtctctggggcccttctggagagggaaggctacacttttcagcaaaatgccctctctcagcagcaggct

SEQ ID NO: 153945 - DNA, 120 bp, Artificial Sequence
  ENSG00000105996_8 (sequence is synthesized)
cccaatggacacaatggcgactcccaaagtttcccagtctcgcctttaaccagcaatgagaaaaatctgaaacattttcagcaccagtcacccactgttcccaactgcttgtcaacaatg

SEQ ID NO: 153946 - DNA, 120 bp, Artificial Sequence
  ENSG00000105996_9 (sequence is synthesized)
ggccagaactgtggagctggcctaaacaatgacagtcctgaggcccttgaggtcccctctttgcaggactttagcgttttctccacagattcctgcctgcagctttcagatgcagtttca

SEQ ID NO: 153947 - DNA, 120 bp, Artificial Sequence
  ENSG00000105996_10 (sequence is synthesized)
cccagtttgccaggttccctcgacagtcccgtagatatttcagctgacagcttagacttttttacagacacactcaccacaatcgacttgcagcatctgaattactaaaaacattaaagc

SEQ ID NO: 153948 - DNA, 120 bp, Artificial Sequence
  ENSG00000105996_11 (sequence is synthesized)
aaaacaaagcatcaccaaacaaaaactcctttgaccaggtggttttgccttcttttatttgggagtttattttttattttcttcttgacctaccccttccctcctttaagtgttgaggat

SEQ ID NO: 153949 - DNA, 120 bp, Artificial Sequence
  ENSG00000105996_12 (sequence is synthesized)
tttctgtttagtgattccctgacccagtttcaaacagagccatcttttacagattattttggagttttagttgttttaaacctaactcaacaaccctttatgtgattcctgagagcagta

SEQ ID NO: 153950 - DNA, 120 bp, Artificial Sequence
  ENSG00000105996_13 (sequence is synthesized)
tgaggcctgcaagaaagtgatcatataattgtatcttcactttctttttatttttgtattacattgggatgcattgtcatgcatattttttgtagaataaattctcctttgctataagta

SEQ ID NO: 153951 - DNA, 120 bp, Artificial Sequence
  ENSG00000105996_14 (sequence is synthesized)
ggtctctgggaccctcttccttctccgggctgccccgagagtggctgtggggggaggggagagtgggctgggagagaaggaggagagggagagatgcttggttgccttgtccctgcccct

SEQ ID NO: 153952 - DNA, 120 bp, Artificial Sequence
  ENSG00000105996_15 (sequence is synthesized)
gtgggttcaggagtgggtttgatggagaggaaaggggatcctgcgctctacaatgagacatatatatttttaggaagtggggggaaactttcccgaacttgtgtaatgtgggatgattta

SEQ ID NO: 153953 - DNA, 120 bp, Artificial Sequence
  ENSG00000105996_16 (sequence is synthesized)
tttgagttggaactgacctcctcctgtctagttgtcctagagtttggctttttgacagtaatgaagagtgatagatcgctcttgctcagctaagcagctgacgcattaattataaattgt

SEQ ID NO: 153954 - DNA, 120 bp, Artificial Sequence
  ENSG00000105996_17 (sequence is synthesized)
ggaggagacggggtctgcccaggctgggctcccaggaaaggcagcacaatagctctactgcatccaggggcggccattttgttgcagttgatcttttctgctatatttattctccagtgg

SEQ ID NO: 153955 - DNA, 120 bp, Artificial Sequence
  ENSG00000105997_0 (sequence is synthesized)
actaacgctggactccatttgactcttttgcaggctacgtgtgccgcctggccattcaaactgtcaattttaggtccagaagtgtccaaaccacaagttctcaaaactctctgaaaaatg

SEQ ID NO: 153956 - DNA, 120 bp, Artificial Sequence
  ENSG00000105997_1 (sequence is synthesized)
gctccctccgagttaagcaattctgaaaggcattctctgggaaaagtctgtggaggagagagggatcttcttgcaaataatgtggtctcaggcaaggacacagcatcttggctgtctgct

SEQ ID NO: 153957 - DNA, 120 bp, Artificial Sequence
  ENSG00000105997_2 (sequence is synthesized)
aaaaaaaaaaaatgcctagactctcagtggaaattgagtgtcaagctgcaaaatctcaaatggcagactatcatcatttaagagcgcctggacaccggaaaaggcgattccctgagcgcc

SEQ ID NO: 153958 - DNA, 120 bp, Artificial Sequence
  ENSG00000105997_3 (sequence is synthesized)
tggagttggagacaattcctggttcagaatttaaacatctttctaggtctgcgcggggcggccattggcggcggagtgtcacgtgaccgcgggggcgtgccaatgtgcgccctcacgggt

SEQ ID NO: 153959 - DNA, 120 bp, Artificial Sequence
  ENSG00000105997_4 (sequence is synthesized)
gtcaaacccctgtcagagtgtgcgatcaagatcgtgaaacaacgcgatgcaaaaagcgacctactacgacagctcggcgatctacggtggctacccctaccaggcagccaacgggttcgc

SEQ ID NO: 153960 - DNA, 120 bp, Artificial Sequence
  ENSG00000105997_5 (sequence is synthesized)
ttataatgccaatcagcagccgtacccggcgtccgccgctttgggcgccgacggcgagtaccaccgacccgcctgctccctccagtctccctccagcgccgggggccaccccaaggcaca

SEQ ID NO: 153961 - DNA, 120 bp, Artificial Sequence
  ENSG00000105997_6 (sequence is synthesized)
cacacgaactgagtgaggcgtgcctgcgcaccctgagcgccccacctagccagcctccaagcctgggagagccgcccctgcacccgccgccgccccaggccgcgccccctgccccacagc

SEQ ID NO: 153962 - DNA, 120 bp, Artificial Sequence
  ENSG00000105997_7 (sequence is synthesized)
tcagcccgcacctcagccccctgcacctacccctgccgcgcccccgcctccctcttctgcctcccctcctcagaatgccagcaacaaccctacccctgccaacgcggccaagagccccct

SEQ ID NO: 153963 - DNA, 120 bp, Artificial Sequence
  ENSG00000105997_8 (sequence is synthesized)
gctcaactcacccacagtggccaaacaaatcttcccctggatgaaagagtctcgacaaaacacaaagcagaaaaccagcagctccagctcaggcgaaagctgcgctggcgacaagagccc

SEQ ID NO: 153964 - DNA, 120 bp, Artificial Sequence
  ENSG00000105997_9 (sequence is synthesized)
gccggggcaggcttcgtccaagcgcgcgcgcacggcctacacgagcgcgcagctggtggagctggagaaagagttccacttcaaccgctacctgtgccggccgcgccgggtggagatggc

SEQ ID NO: 153965 - DNA, 120 bp, Artificial Sequence
  ENSG00000105997_10 (sequence is synthesized)
caatctgctgaacctcactgagcgccagatcaagatctggttccagaatcgccgcatgaagtacaaaaaggatcagaagggcaagggcatgctaacgtcatcggggggccagtctccaag

SEQ ID NO: 153966 - DNA, 120 bp, Artificial Sequence
  ENSG00000105997_11 (sequence is synthesized)
cgcagccccgtgccccccggagccggtggctatctgaactctatgcattcgctggtcaacagcgtcccgtatgagccccagtcgcccccgcccttctccaagcccccccagggtacctac

SEQ ID NO: 153967 - DNA, 120 bp, Artificial Sequence
  ENSG00000105997_12 (sequence is synthesized)
ctacgggctgccccccgcctcctaccctgcgtccctgcccagctgcgcacccccgccacccccacagaagcgctacacggcggcaggggcgggcgcagggggcacccccgactatgaccc

SEQ ID NO: 153968 - DNA, 120 bp, Artificial Sequence
  ENSG00000105997_13 (sequence is synthesized)
gctcatggcctgcagggcaacggcagctatgggaccccacacatacagggaagccccgtcttcgtggggggcagctatgtggagcccatgagcaactccgggccagccctctttggtcta

SEQ ID NO: 153969 - DNA, 120 bp, Artificial Sequence
  ENSG00000105997_14 (sequence is synthesized)
actcacctcccccacgctgcctcgggcgccatggactatgggggtgccgggccgctgggcagcggccaccaccacgggccggggcctggggagccgcaccccacctacacggaccttacc

SEQ ID NO: 153970 - DNA, 120 bp, Artificial Sequence
  ENSG00000105997_15 (sequence is synthesized)
ggccaccatccttctcagggaagaattcaggaagcacccaagctcacccacctgtgatagtgggcttggggctacgcgccaggagagtctccccccacccaccttttttctttggttgct

SEQ ID NO: 153971 - DNA, 120 bp, Artificial Sequence
  ENSG00000105997_16 (sequence is synthesized)
tttttttttttttttttttaggttcttcctgccctttccttccttccttttctctcttctccgccccgcactccgtttcccggtttcccccctcgttggtaaggcgtttttatagtttat

SEQ ID NO: 153972 - DNA, 120 bp, Artificial Sequence
  ENSG00000105997_17 (sequence is synthesized)
gtgacgtagcaatcttggttgctggaatggctgtatcatagcgatatttatctcttcctgctcctcgataggccactggccctgcaccctttaccttctccactctttgatcagaaacag

SEQ ID NO: 153973 - DNA, 120 bp, Artificial Sequence
  ENSG00000105997_18 (sequence is synthesized)
ggtatatgaacaaattttctagtcgagttttcaatgtgaatttgttcttacattatggctcccgaggggaagcgattactttttttaattttaaattttttttttaattgcacttcttgt

SEQ ID NO: 153974 - DNA, 120 bp, Artificial Sequence
  ENSG00000105997_19 (sequence is synthesized)
aaagagtgagaaaaaaaatcaaaggcgctttgaaacaggggctctctgtgcaaggatgactaagtgtacgtctttccgtgtgtgtatgctggtgaacagtcagatttatttatatttttt

SEQ ID NO: 153975 - DNA, 120 bp, Artificial Sequence
  ENSG00000105997_20 (sequence is synthesized)
tgcaagcattgaataatctaagttttaaatattatttatccccatccgttcgtatttatattaaagaattctgtaccctgatggttcagaagggttcttgggccttttgttcaattgtgt

SEQ ID NO: 153976 - DNA, 120 bp, Artificial Sequence
  ENSG00000105997_21 (sequence is synthesized)
attggcgtacttagaattttttttatttgaaagagaaatataattcctttaaacggtaacgatacaataaaaccagagaagatccagcttttgaaaacagtgatttaggtttgtaacatc

SEQ ID NO: 153977 - DNA, 120 bp, Artificial Sequence
  ENSG00000105997_22 (sequence is synthesized)
cggcaaaactgaaaaaaaaaatctgtaaacgcgaaaaatactagatttgttttgagagttcttcattccttgctgctcacattctgagaaacaaaaagaaataaagtttttattctgaat

SEQ ID NO: 153978 - DNA, 120 bp, Artificial Sequence
  ENSG00000105997_23 (sequence is synthesized)
tctcactagcctcagagcactctcagaagttcagaaactaagaccagaaaagagaagatttttagacagctcatgaaacggtctgcgcggggcggccattggcggcggagtgtcacgtga

SEQ ID NO: 153979 - DNA, 120 bp, Artificial Sequence
  ENSG00000105997_24 (sequence is synthesized)
gcatggggcctggccaggctattcgcctggaagctcggcgaattctcaggatggcggctggggctccaggcggctgcggcagctctggtaacgccgtgcggcgggccagctgggctgccc

SEQ ID NO: 153980 - DNA, 120 bp, Artificial Sequence
  ENSG00000105997_25 (sequence is synthesized)
ggttcccagctgctgcggaggcaggctgagggcgcaggggctgccgagtgctgtgcacggaagaaacaaagacatcccggcccaaggcgcagcgggagcgcacaggtgccccgcggccca

SEQ ID NO: 153981 - DNA, 120 bp, Artificial Sequence
  ENSG00000105997_26 (sequence is synthesized)
gccgggggataacgcagggcggtcttctgctccatgctcttcctcgggtcaaagcggaccaactaacgcctaaacctcggtattagccagccgcgcagaggatgccgagcactttccggg

SEQ ID NO: 153982 - DNA, 120 bp, Artificial Sequence
  ENSG00000105997_27 (sequence is synthesized)
agcaatcggactcctggtctcctccggggatgcttcgcggtctgttatcgcgtcaggaggaaagaattgctccaaaaatctgcacgcggagcgaaacagtttgaaagggactgaggctca

SEQ ID NO: 153983 - DNA, 120 bp, Artificial Sequence
  ENSG00000105997_28 (sequence is synthesized)
cccaggtctccagcaaacggaggactgaactggggagagtcaccctgagccagcccttccctggactgccggaatcccagcattagcttcctgctgaatgtagtatttggcattctctga

SEQ ID NO: 153984 - DNA, 120 bp, Artificial Sequence
  ENSG00000105997_29 (sequence is synthesized)
atttatttcctctccttcccccacccagctttctttttatggccccagggggagggggagagagcaaggagatcggtatctttgtaataaaactgcaattttataaatttttcatttgat

SEQ ID NO: 153985 - DNA, 120 bp, Artificial Sequence
  ENSG00000105997_30 (sequence is synthesized)
attcttttgctccgctccgtcctgcctgcttcggagctctgccttccagccgggctcggctgtgctttgtccggagatggcgagcgaagggaagccccggccaggccaggcctggcggct

SEQ ID NO: 153986 - DNA, 120 bp, Artificial Sequence
  ENSG00000105997_31 (sequence is synthesized)
cccgctggagattgggcgcgctccgttcccggcgccgcggcagcagctttgcaactcgcaacctggctaatttcctgcgtcctctggcaccaggaaagaggacaattcttctctcgggct

SEQ ID NO: 153987 - DNA, 120 bp, Artificial Sequence
  ENSG00000105997_32 (sequence is synthesized)
cccagtcggccctgggcgagccgtgctggagcagcgaggcggccacgctctgcgcggcggtgaccgggcctcggggtctccagcccgcctgccatctcggctgatgctgagggtccgtgc

SEQ ID NO: 153988 - DNA, 120 bp, Artificial Sequence
  ENSG00000105997_33 (sequence is synthesized)
ccatcccgcgccgaggggacccggccgggccgccaagccaggccgggggccagagcccgtgtcggagcctgagcccgagcctgcgctcgtcagaagttaaggtctgcgcggggcggccat

SEQ ID NO: 153989 - DNA, 120 bp, Artificial Sequence
  ENSG00000105997_34 (sequence is synthesized)
acggagctggcaggccctcaccagatcttggggccttttccgcagggtttctgcgagtccagggagcgcgccgcgtccggggaaacagcgcctggacaccggaaaaggcgattccctgag

SEQ ID NO: 153990 - DNA, 80 bp, Artificial Sequence
  ENSG00000106003_0 (sequence is synthesized)
gctggactgcgccgccggagcgacgggcttcgggtcggtgcaaggcaggcgcacggggaagggcgcgccgcgcggccgcc

SEQ ID NO: 153991 - DNA, 80 bp, Artificial Sequence
  ENSG00000106003_1 (sequence is synthesized)
tgctggcgctggcgggcgcgctgctcgcctgcctgctggtgctcaccgccgacccgccgccgcctccactgcccgccgag

SEQ ID NO: 153992 - DNA, 80 bp, Artificial Sequence
  ENSG00000106003_2 (sequence is synthesized)
ggggcgctggtccgcgacgtgcacagtctgtccgagtacttcagcctgctcacccgcgcgcgcagagatgcgggcccgcc

SEQ ID NO: 153993 - DNA, 120 bp, Artificial Sequence
  ENSG00000106003_3 (sequence is synthesized)
gcccggggctgccccccgccccgccgacggccacccgcgccccctggccgagccgctcgcgccccgagacgtcttcatcgctgtcaagaccaccaaaaagttccaccgcgcgcgcctcga

SEQ ID NO: 153994 - DNA, 120 bp, Artificial Sequence
  ENSG00000106003_4 (sequence is synthesized)
cctgctgctggagacctggatctcgcgccacaaggagatgacgttcatcttcactgacggggaagatgaggccctggccaggcacacgggcaacgtggtcatcacaaactgctcggccgc

SEQ ID NO: 153995 - DNA, 120 bp, Artificial Sequence
  ENSG00000106003_5 (sequence is synthesized)
ccacagccgccaggcgctgtcctgcaagatggccgtggagtatgaccgcttcatcgagtccggcaggaagtggttctgccacgtggacgatgacaactacgtcaacctgcgggccctgct

SEQ ID NO: 153996 - DNA, 120 bp, Artificial Sequence
  ENSG00000106003_6 (sequence is synthesized)
gcggctgctggccagctacccgcacacgcgggacgtctacgtcggcaagcccagcctggacaggcccatccaggccatggagcgggtcagcgagaacaaggtgcgtcctgtccacttctg

SEQ ID NO: 153997 - DNA, 120 bp, Artificial Sequence
  ENSG00000106003_7 (sequence is synthesized)
gtttgccacgggcggcgctggcttctgcatcagccgtgggctggctctgaagatgagcccgtgggccagcgggggtcacttcatgaatacggctgagcggatccggctgcctgatgactg

SEQ ID NO: 153998 - DNA, 120 bp, Artificial Sequence
  ENSG00000106003_8 (sequence is synthesized)
caccatcggctacatcgtggaggccctgctgggtgtgcccctcatccgcagcggcctcttccactcccacctggagaacctgcagcaggtgcccacctcggagctccacgagcaggtgac

SEQ ID NO: 153999 - DNA, 120 bp, Artificial Sequence
  ENSG00000106003_9 (sequence is synthesized)
gctgagctacggtatgtttgaaaacaagcggaacgccgtccacgtgaaggggcccttctcggtggaggccgacccatccaggttccgctccatccactgccacctgtacccggacacacc

SEQ ID NO: 154000 - DNA, 120 bp, Artificial Sequence
  ENSG00000106003_10 (sequence is synthesized)
caatccctgggcgcccctggtatccaaagggcccagggaccctgttgcgctgccctggcctcggcattcgaggctcccctagggccgtgcctgtgcgtgtgcgtgtgcgtgtgtgtgtgt

SEQ ID NO: 154001 - DNA, 120 bp, Artificial Sequence
  ENSG00000106003_11 (sequence is synthesized)
gtgtactgcatgcccacccgggtagcaggctgctgggcagttctgctctgtggaggggcgggcaccagcgccacttatgtgcctctgctccgagggccagtgggctgcagggcctgcttg

SEQ ID NO: 154002 - DNA, 120 bp, Artificial Sequence
  ENSG00000106003_12 (sequence is synthesized)
gaggaaggatttgtgtgtcggaggccactccgagggcaattctgttaggatttttggatctttctacagctacggggctccgggctactttgcagggatgcgatgcgtaggtgcctttct

SEQ ID NO: 154003 - DNA, 120 bp, Artificial Sequence
  ENSG00000106003_13 (sequence is synthesized)
cttcctgctgaccacaagctctgtgctgggggtacctgtgccctgaagtcctggcccctgtgtcatagccccaagtacgactcactgagccatgctcattgcaggggaggctgggtctgg

SEQ ID NO: 154004 - DNA, 120 bp, Artificial Sequence
  ENSG00000106003_14 (sequence is synthesized)
gggtgcgtgacccaatccccttcctcctggcctggacgctgtggcttaagagtaacagcagccaccgcccagttccagtggccccacgaagcccccagtggctggctgtccagctgggca

SEQ ID NO: 154005 - DNA, 120 bp, Artificial Sequence
  ENSG00000106003_15 (sequence is synthesized)
aacagtggcacccctcccagctcttctgagtggggagtcttccaggcctcctcagaggtcttccctttgcctccccaggacagggtgagtcagagctcagcatttaatctcctctccaaa

SEQ ID NO: 154006 - DNA, 120 bp, Artificial Sequence
  ENSG00000106003_16 (sequence is synthesized)
gtagagagcaagtcgcccacagtgggcgtgtctgtaaatattgtgacagtatttttttactgtgctgttttttttgaaaggggatgggtaaaaagtagggtgttcttgttttttgcttgg

SEQ ID NO: 154007 - DNA, 120 bp, Artificial Sequence
  ENSG00000106003_17 (sequence is synthesized)
gagggtgggggtgggggagggtcttattttatcttatcttttctgtggatcagaaaaaacagaagccaaactcggggtcatctttgtttttaaagctgaagtgggactgtctggcactct

SEQ ID NO: 154008 - DNA, 120 bp, Artificial Sequence
  ENSG00000106003_18 (sequence is synthesized)
gtgtatttatgcgttccagcatctggaacctcccatccctgccctcctcctgtgtagctgccacctccccgctgggcccagcatggctcacctgtcccgtgggctgtgtttcttgttgtt

SEQ ID NO: 154009 - DNA, 120 bp, Artificial Sequence
  ENSG00000106003_19 (sequence is synthesized)
tttctctttgcaaagacatagctaggaaagcgaatgataagggaaaagttctcagggaattgaagtgttgttgctatggtgacgtccttttgctgtgaataaaggtgctctttgcagcaa

SEQ ID NO: 154010 - DNA, 120 bp, Artificial Sequence
  ENSG00000106003_20 (sequence is synthesized)
agactaagctgcaacactggcagagcctcccaaggaagggaggagggaggacagaggccaaggcggctcctggccaccctcgcagcttcctccctccctggccacaaggacccaaagctc

SEQ ID NO: 154011 - DNA, 120 bp, Artificial Sequence
  ENSG00000106003_21 (sequence is synthesized)
agagggatggatgaacagacaggaaggctcaggctggacacgtattgtatgagtgccaagcagatctgggcatggagcaaatgctcaggaaggctgtgggatgagcacatgaaatggatg

SEQ ID NO: 154012 - DNA, 120 bp, Artificial Sequence
  ENSG00000106003_22 (sequence is synthesized)
gatggatggatggatggatggatgagtggagcccaacaccagctctcaggtcctacggaggtggcctctctcagcagacgttcatcttcactgacggggaagatgaggccctggccaggc

SEQ ID NO: 154013 - DNA, 120 bp, Artificial Sequence
  ENSG00000106003_23 (sequence is synthesized)
gtgccggcaggcccaggcgggcgccggcgactcctggccccgccctggcggccccctcctcttccgcagagcgctcctggcagggggcggccgcgtgctggcacagacgttcatcttcac

SEQ ID NO: 154014 - DNA, 120 bp, Artificial Sequence
  ENSG00000106003_24 (sequence is synthesized)
tgaccgcttcatcgagtccggcaggaagtgagtgtggccccgggggacccccatctccctgcccgagcctggcagcgcccgccccggcatgccctcccccgatggccctgccttgtcctc

SEQ ID NO: 154015 - DNA, 120 bp, Artificial Sequence
  ENSG00000106003_25 (sequence is synthesized)
ggagggttttgctctttgtgtgggtgtgtgagtggctatgatcctagttgtccagctgctgcgtggagaataagtaaagcaggtctgaatgacaccaggtcgctgctgtcttgcggctga

SEQ ID NO: 154016 - DNA, 120 bp, Artificial Sequence
  ENSG00000106003_26 (sequence is synthesized)
gaggcgctcagactccaagccaggcaggccgtgggtccggccgccccacagctggtaatgctgcacctccctctcctgtgatgtggccccaggccccgaccccgctcaggggtggtggga

SEQ ID NO: 154017 - DNA, 120 bp, Artificial Sequence
  ENSG00000106003_27 (sequence is synthesized)
agagtcctggagagcaggagcagtgccggagcccccactgcagctggtcccagcccctgcagagatccagacgcttgttttttaaatacagcagctctgcggtgcttttccttcctcaaa

SEQ ID NO: 154018 - DNA, 120 bp, Artificial Sequence
  ENSG00000106004_0 (sequence is synthesized)
ataaattgtgcaagggtgctatagacgcacaaacgaccgcgagccacaaatcaagcacacatatcaaaaaacaaatgagctcttattttgtaaactcattttgcggtcgctatccaaatg

SEQ ID NO: 154019 - DNA, 120 bp, Artificial Sequence
  ENSG00000106004_1 (sequence is synthesized)
gcccggactaccagttgcataattatggagatcatagttccgtgagcgagcaattcagggactcggcgagcatgcactccggcaggtacggctacggctacaatggcatggatctcagcg

SEQ ID NO: 154020 - DNA, 120 bp, Artificial Sequence
  ENSG00000106004_2 (sequence is synthesized)
tcggccgctcgggctccggccactttggctccggagagcgcgcccgcagctacgctgccagcgccagcgcggcgcccgccgagcccaggtacagccagccggccacgtccacgcactctc

SEQ ID NO: 154021 - DNA, 120 bp, Artificial Sequence
  ENSG00000106004_3 (sequence is synthesized)
ctcagcccgatccgctgccctgctccgccgtggccccctcgcccggcagcgacagccaccacggcgggaaaaactccctaagcaactccagcggcgcctcggccgacgccggcagcaccc

SEQ ID NO: 154022 - DNA, 120 bp, Artificial Sequence
  ENSG00000106004_4 (sequence is synthesized)
acatcagcagcagagagggggttggcacggcgtccggagccgaggaggacgcccctgccagcagcgagcaggcgagtgcgcagagcgagccgagcccggcgccgcccgcccaaccccaga

SEQ ID NO: 154023 - DNA, 120 bp, Artificial Sequence
  ENSG00000106004_5 (sequence is synthesized)
tctacccctggatgcgcaagctgcacataagtcatgacaacataggcggcccggaaggcaaaagggcccggacggcctacacgcgctaccagaccctggagctggagaaggagttccact

SEQ ID NO: 154024 - DNA, 120 bp, Artificial Sequence
  ENSG00000106004_6 (sequence is synthesized)
gataataagctgaaaagcatgagcatggccgcggcaggaggggccttccgtccctgagtatctgagcgtttaaagtactgagcagtattagcggatcccgcgtagtgtcagtactaaggt

SEQ ID NO: 154025 - DNA, 120 bp, Artificial Sequence
  ENSG00000106004_7 (sequence is synthesized)
gactttctgaaactcccttgtgttccttctgtgaagaagccctgttctcgttgccctaattcatcttttaatcatgagcctgtttattgccattatagcgcctgtataagtagatctgct

SEQ ID NO: 154026 - DNA, 120 bp, Artificial Sequence
  ENSG00000106004_8 (sequence is synthesized)
ttctgttcatctctttgtcctgaatggctttgtcttgaaaaaaaatagatgttttaacttatttatatgaagcaagctgtgttacttgaagtaactataacaaaaaaagaaaagagaaaa

SEQ ID NO: 154027 - DNA, 120 bp, Artificial Sequence
  ENSG00000106004_9 (sequence is synthesized)
aaaaacacacaaaaagtcccccttcaatctcgtttagtgccaatgttgtgtgttgcactcaagttgtttaactgtgcatgtgcgtggaagtgttcctgtctcaatagctccaagctgtta

SEQ ID NO: 154028 - DNA, 120 bp, Artificial Sequence
  ENSG00000106004_10 (sequence is synthesized)
aagatatttttattcaaactacctatattccttgtgtaattaatgctgttgtagaggtgacttgatgagacacaacttgttcgacgtgtagtgactagtgactctgtgatgaaaactgtg

SEQ ID NO: 154029 - DNA, 120 bp, Artificial Sequence
  ENSG00000106004_11 (sequence is synthesized)
actccaagcggtgtgtccctgcgtgcctttataggaccctttgcacgaactctggaagtggctcttataagcgcagcttcagtgatgtatgtttttgtgaacaaagttacaaatattgtc

SEQ ID NO: 154030 - DNA, 76 bp, Artificial Sequence
  ENSG00000106004_12 (sequence is synthesized)
agtgatgtatgtttttgtgaacaaagttacaaatattgtccaagtctggctgttttaagcaaactgtgggaaaaaa

SEQ ID NO: 154031 - DNA, 120 bp, Artificial Sequence
  ENSG00000106006_0 (sequence is synthesized)
cacagtcctgcagaggggcgcgcaaatgagttcctattttgtgaatcccactttccccgggagccttcccagcggccaggactccttcttgggccagctgcccctctaccaggctggcta

SEQ ID NO: 154032 - DNA, 120 bp, Artificial Sequence
  ENSG00000106006_1 (sequence is synthesized)
tgacgcgctgaggcccttcccggcctcgtacggggcgtcgagtctcccggacaagacgtacacctcaccttgtttctaccaacagtccaactcggtcctggcctgcaaccgggcgtccta

SEQ ID NO: 154033 - DNA, 120 bp, Artificial Sequence
  ENSG00000106006_2 (sequence is synthesized)
cgagtacggggcctcgtgtttctattctgataaggacctcagtggcgcctcgccctcgggcagtggcaagcagaggggccccggggactacctgcacttttctcccgagcagcagtacaa

SEQ ID NO: 154034 - DNA, 120 bp, Artificial Sequence
  ENSG00000106006_3 (sequence is synthesized)
acccgacagcagcagcgggcagggcaaagcactccatgacgaaggcgccgaccggaagtacacgagcccggtttacccttggatgcagcggatgaactcctgcgcgggtgctgtgtatgg

SEQ ID NO: 154035 - DNA, 120 bp, Artificial Sequence
  ENSG00000106006_4 (sequence is synthesized)
acacgcgctaccagacactggagctggagaaggagttccacttcaaccgctacctgacacggcgccgccgcatcgagatcgccaacgcgctctgcctcaccgagcgccagatcaagatct

SEQ ID NO: 154036 - DNA, 120 bp, Artificial Sequence
  ENSG00000106006_5 (sequence is synthesized)
ggttccagaaccgccgcatgaagtggaaaaaggaaaacaagctcatcaattccacgcagcccagcggggaggactcagaggcaaaggcgggcgagtagatgcctgggcagggaccaggcc

SEQ ID NO: 154037 - DNA, 120 bp, Artificial Sequence
  ENSG00000106006_6 (sequence is synthesized)
agcgctgcaacctccttcggctttgcccccttgccctcgcctgttccccaacttttctccccgcctgctcccatctgggggcttccgcagcttcaggggagcccggagctttgcaagcgt

SEQ ID NO: 154038 - DNA, 66 bp, Artificial Sequence
  ENSG00000106006_7 (sequence is synthesized)
gcttccgcagcttcaggggagcccggagctttgcaagcgtctgtgcatttatttcttcacacacag

SEQ ID NO: 154039 - DNA, 120 bp, Artificial Sequence
  ENSG00000106006_8 (sequence is synthesized)
gtagtcctgaggcctgtaggcctggctgctctgaggaggattggctatggcaaagaaggacggctttggctccaggagagggctgtgaagggcagaggccgcacctgtgtgctttgggct

SEQ ID NO: 154040 - DNA, 120 bp, Artificial Sequence
  ENSG00000106006_9 (sequence is synthesized)
ctggtctgggctagcgagctggctggaccgaggtggccttcaaggtcccacacctacatactcccagaccaccctccaggctggcagaggtggagctgttcaatgggcagcccagggcaa

SEQ ID NO: 154041 - DNA, 120 bp, Artificial Sequence
  ENSG00000106009_0 (sequence is synthesized)
gggcgaggggtggttgcggcggaggacgcaaccgagcgggcctgcggcctcaccatggacccagaatgcgcccagctgctcccggctctctgtgctgttctggtagatcccaggcagccg

SEQ ID NO: 154042 - DNA, 120 bp, Artificial Sequence
  ENSG00000106009_1 (sequence is synthesized)
gtggcagatgacacctgtttggagaagctcctggactggtttaaaacggtcactgaaggagagtccagtgtcgtgctgctgcaggagcacccctgcctggtggagctgctgtcccatgtg

SEQ ID NO: 154043 - DNA, 120 bp, Artificial Sequence
  ENSG00000106009_2 (sequence is synthesized)
ctgaaagtccaggacctgagttctggggtcctctccttctcactgcgcctggcaggaaccttcgcagcccaggaaaactgcttccagtatcttcagcagggggagttactaccagggctc

SEQ ID NO: 154044 - DNA, 120 bp, Artificial Sequence
  ENSG00000106009_3 (sequence is synthesized)
tttggggagccaggacccctcggccgagcaacctgggccgtccccaccgtgcgcagcggctggatccagggcctgcgctccctggcacagcaccccagcgccctgcgcttcctggccgac

SEQ ID NO: 154045 - DNA, 120 bp, Artificial Sequence
  ENSG00000106009_4 (sequence is synthesized)
catggtgcggtcgacaccatcttctccctgcagggagactccagcctgtttgtggcctcggcggccagtcagctcctggtgcacgtcctggctttgtccatgcgaggtggagccgagggg

SEQ ID NO: 154046 - DNA, 120 bp, Artificial Sequence
  ENSG00000106009_5 (sequence is synthesized)
cagccctgcctgccggggggtgactggcccgcgtgtgcccagaagatcatggatcacgttgaagagtccttgtgctccgcggccacccccaaggtcactcaggccctgaacgtcctgacc

SEQ ID NO: 154047 - DNA, 120 bp, Artificial Sequence
  ENSG00000106009_6 (sequence is synthesized)
acgaccttcgggcgctgccagagcccctggacggaagccctgtgggtgcggctgagtccccgcgtggcctgtctgctggagagagaccccatccccgccgcacactcgttcgtggacctg

SEQ ID NO: 154048 - DNA, 120 bp, Artificial Sequence
  ENSG00000106009_7 (sequence is synthesized)
cttctctgtgtggctcgttctcccgtgttcagttcttccgacggcagcctgtgggagacagtggcgcgggctctgagctgcctgggtcccacccacatgggacccctggctttggggatc

SEQ ID NO: 154049 - DNA, 120 bp, Artificial Sequence
  ENSG00000106009_8 (sequence is synthesized)
ctgaagctcgagcactgtccacaggcactgaggacccaggccttccaggtccttctccagcccctggcctgtgtcctgaaggccacggttcaggcccccggacccccaggcttgctggac

SEQ ID NO: 154050 - DNA, 120 bp, Artificial Sequence
  ENSG00000106009_9 (sequence is synthesized)
gggacggcagacgatgccacgacggtggacacactcctggcctccaagtcgtcctgcgccggcctcctgtgccgcaccctggctcacctggaggagctgcagccgctgccccagcgccct

SEQ ID NO: 154051 - DNA, 120 bp, Artificial Sequence
  ENSG00000106009_10 (sequence is synthesized)
tcaccgtggccccaggcgtctctactgggggctacagtgactgtcctgcggctctgtgacggctcggctgcccctgcctccagtgtggggggccacctctgtgggaccctggcgggctgc

SEQ ID NO: 154052 - DNA, 120 bp, Artificial Sequence
  ENSG00000106009_11 (sequence is synthesized)
ccctcgacttcctggggacgctgtcacaggggacaggcccccaggagctggtgacgcaggcgcttgctgtcctcctggagtgcctcgagagccccggctccagccccacggttctgaaga

SEQ ID NO: 154053 - DNA, 120 bp, Artificial Sequence
  ENSG00000106009_12 (sequence is synthesized)
aggccttccaggccacgctcaggtggctcctgagctcacccaagacccccggctgctctgatctcggccccctcatcccgcagttcctcagagagctgttccctgtgctgcagaaacgcc

SEQ ID NO: 154054 - DNA, 120 bp, Artificial Sequence
  ENSG00000106009_13 (sequence is synthesized)
tgtgccacccctgctgggaggtgagggactccgccctcgagttcctgacccagctgagcaggcactggggaggacaggctgacttcagatgcgcactcttggcttcagaggtgcctcagc

SEQ ID NO: 154055 - DNA, 120 bp, Artificial Sequence
  ENSG00000106009_14 (sequence is synthesized)
tggccctgcagctcctccaggaccctgagagttatgtccgagcgagtgcagtgaccgccatggggcagctgtccagccagggcctgcacgcccccaccagccctgagcatgcagaggccc

SEQ ID NO: 154056 - DNA, 120 bp, Artificial Sequence
  ENSG00000106009_15 (sequence is synthesized)
ggcagagcctgttcctggagctcctgcacatcctctccgtagactcggagggcttcccacggcgggcggtcatgcaagtcttcactgagtggctgcgggacggccacgccgacgcggccc

SEQ ID NO: 154057 - DNA, 120 bp, Artificial Sequence
  ENSG00000106009_16 (sequence is synthesized)
aggacacggagcagttcgtggccactgtgctgcaggcggcgagccgagacctggactgggaggtccgcgcccagggcctggagctggccctcgtgttcctgggccagactttggggccgc

SEQ ID NO: 154058 - DNA, 120 bp, Artificial Sequence
  ENSG00000106009_17 (sequence is synthesized)
cgcgtacccactgcccctatgccgtggccctacccgaggtggccccagcccagccactcaccgaggcactgagggctctctgccacgtggggctctttgacttcgccttttgtgccttgt

SEQ ID NO: 154059 - DNA, 120 bp, Artificial Sequence
  ENSG00000106009_18 (sequence is synthesized)
ttgactgcgaccgccctgtggcgcagaagtcttgtgacctccttctcttcctgagggacaagattgcttcctacagcagcctgcgggaggccaggggcagccccaacactgcctccgcag

SEQ ID NO: 154060 - DNA, 120 bp, Artificial Sequence
  ENSG00000106009_19 (sequence is synthesized)
aggccaccctgccgaggtggcgggcgggtgagcaggcccagcccccaggggaccaggagcctgaggctgtgctggccatgctcaggtccctagacctggagggcctgcggagcacgctgg

SEQ ID NO: 154061 - DNA, 120 bp, Artificial Sequence
  ENSG00000106009_20 (sequence is synthesized)
ccgagagcagcgaccacgtggaaaagagtccccagtccctcctgcaggacatgctggccacgggaggcttcctgcagggggacgaggccgactgctactgagcagaaccagagtctgcca

SEQ ID NO: 154062 - DNA, 120 bp, Artificial Sequence
  ENSG00000106009_21 (sequence is synthesized)
ctggggctcaggaccaagggaggcagcaccatgtccttctgtgggacactgccagccccagggctccagcccagcccggtggatcctctggggaagccaggaccaggagagaagcaaggt

SEQ ID NO: 154063 - DNA, 120 bp, Artificial Sequence
  ENSG00000106009_22 (sequence is synthesized)
caagaaatcccacagtttgatgtattaaagaaatgacttatttctactcaaaataaatggcattgaagtctttctttaaccctttttgagttaatttaataataatgatctgagacaagg

SEQ ID NO: 154064 - DNA, 120 bp, Artificial Sequence
  ENSG00000106009_23 (sequence is synthesized)
tgctgtcctcctggagtgcctcgagagccccggctccagccccacggcctctgcggatggggccttcacacagggccacagagctgctgctcagagagcttcacgatgcaggttctgaag

SEQ ID NO: 154065 - DNA, 120 bp, Artificial Sequence
  ENSG00000106009_24 (sequence is synthesized)
tggggggcctgggtgggcaactgttttcctcggataacgcccagggatgtcccactggcagccggagactctctgaggacatggcctgcagtgaagcggcaccggggtgaccctggaacc

SEQ ID NO: 154066 - DNA, 120 bp, Artificial Sequence
  ENSG00000106009_25 (sequence is synthesized)
ctcatggggaaaggcctgtcttgggctgggcgcctccagtgccggagccatggcagtctcagccaggcctcgaatggggttttgagggtgggggagtaatttttctctctggggtctccc

SEQ ID NO: 154067 - DNA, 120 bp, Artificial Sequence
  ENSG00000106009_26 (sequence is synthesized)
cggtggtggggatagagagcgaggagaggagggaggcagaggcagtgggacccacccctgactccaccccgtcccgtgcaggcctctgcggatggggccttcacacagggccacagagct

SEQ ID NO: 154068 - DNA, 120 bp, Artificial Sequence
  ENSG00000106009_27 (sequence is synthesized)
gctgctcagagagcttcacgatgcaggtggctgcatggggcgggcccagggcctcttgttggtgaagatacatcagcacgcaggggtgtgtggggccgtggggagcaggggcactggtca

SEQ ID NO: 154069 - DNA, 120 bp, Artificial Sequence
  ENSG00000106009_28 (sequence is synthesized)
ggcggcctgcggggaattctggacaagggaaatgaggtggcaccaagacggccctgggcgtgggctttgggttctcctaagcgccatttgtgaatgtgcctactccacagcccctcacgg

SEQ ID NO: 154070 - DNA, 120 bp, Artificial Sequence
  ENSG00000106009_29 (sequence is synthesized)
agctgggccctggcaggtacagaccttgtgccacctgccgctgagcagacagcagacaactttggaggaagggcccagggcttcttgggatcctaaggaaaaggtgccctgcgtaattgg

SEQ ID NO: 154071 - DNA, 120 bp, Artificial Sequence
  ENSG00000106009_30 (sequence is synthesized)
tcatgttttgatgtagaaatcccgttgcctgggttgtgggtcttctggtgagggctgccaccacctcctcctgctcacagtctgggaagccggttctgcagcatattctgccctattaaa

SEQ ID NO: 154072 - DNA, 120 bp, Artificial Sequence
  ENSG00000106009_31 (sequence is synthesized)
atcagcccaggaggggcgtggggctcacagctgtgattactgtgcgttggggggccgaggtggggggatcaatggagcccaggacttttgaggccagcctgggcaacatagcaagatccc

SEQ ID NO: 154073 - DNA, 120 bp, Artificial Sequence
  ENSG00000106009_32 (sequence is synthesized)
atctctacaaaaaaatagaaaaattagccccaggagtatagctcaggggtagagcatttgactgcaaaaattagccaggcgtggtgatgtgtgcctctagccccagctactcatgaggct

SEQ ID NO: 154074 - DNA, 120 bp, Artificial Sequence
  ENSG00000106009_33 (sequence is synthesized)
gcctgggaggtggaggctgcagtgaactgtgattgcagtccagcctggatgacacattgagaccctgtctctaaaaaagaaggaagcccagcgttcccttctctctccacttcctgtccc

SEQ ID NO: 154075 - DNA, 120 bp, Artificial Sequence
  ENSG00000106009_34 (sequence is synthesized)
ctctctccacttcctgtccccattgctgtccctggagtacgggcagcacaggtgaaggcgagggggacagacagacagcctgcccctccgtctcccgtggccctgcagcccaccctatct

SEQ ID NO: 154076 - DNA, 120 bp, Artificial Sequence
  ENSG00000106009_35 (sequence is synthesized)
gcagctgctgctgtgggcagcgcctgcagcagtgactgccgaggccctggggctgtgctgggtgtgggacctgtgcgcttcgccttctgtctccccagcacccctccacttagacatggt

SEQ ID NO: 154077 - DNA, 120 bp, Artificial Sequence
  ENSG00000106009_36 (sequence is synthesized)
tacctccatttgacagatgggtaaactgaggattggagggccgtgtgctcactgcgcagcatgggaaggtgtcagagcgggctgtggccctagactgcatgtccggggccagcccccatc

SEQ ID NO: 154078 - DNA, 120 bp, Artificial Sequence
  ENSG00000106009_37 (sequence is synthesized)
aaaaaaaaaaaaaaaacaacaagaaggaacgaattgggaagcatcacaagctgtgtgtgtttaacgctcggggggaggaggtgcttgtctccagggagcttcagttcctgttcttttttg

SEQ ID NO: 154079 - DNA, 120 bp, Artificial Sequence
  ENSG00000106009_38 (sequence is synthesized)
ttgtctccagggagcttcagttcctgttcttttttgcttttgagtggagaggcatttgggggcatcttggggggccctctgctatttgtatcttccctgaggccctctgcctcccccagc

SEQ ID NO: 154080 - DNA, 120 bp, Artificial Sequence
  ENSG00000106009_39 (sequence is synthesized)
gggtgctgggagctggggcaggcagggaggttgagagcgcagccctcatggcaggggagttccggacaccagggacagtcaggcggccgtgcggggtgtgactgggtggtgcgtgggttg

SEQ ID NO: 154081 - DNA, 120 bp, Artificial Sequence
  ENSG00000106009_40 (sequence is synthesized)
cgcgcggcagcttctgaaggttctttagcaacagaataattgtttcagaccaaagctctgcgagatccccagaggtgagaaggatgcgggagctgctctgctcagagcagggtggtcctg

SEQ ID NO: 154082 - DNA, 120 bp, Artificial Sequence
  ENSG00000106009_41 (sequence is synthesized)
ccgacgccctgcgctccgctgccctcccacctgtcccccaccgcagctttggttgggggtttcggagctccccagcacacacaccatgcgggtggggggcctgggggcggtgcaacggca

SEQ ID NO: 154083 - DNA, 120 bp, Artificial Sequence
  ENSG00000106009_42 (sequence is synthesized)
gagcctggggtcaggacaggtgggaaggccgtggatggcctgccagtgttccaggtgggctcacaataggggtggaagtgacctcaggacctgctgcccacagggcccaggggtaccatg

SEQ ID NO: 154084 - DNA, 120 bp, Artificial Sequence
  ENSG00000106009_43 (sequence is synthesized)
agggtccagctctgagctccggggtctccgaatgtttaggagagagtagaccgggggaggatggaggaacaggcccggccctgcaggaatgcattgtggggacactgcctccacctaggc

SEQ ID NO: 154085 - DNA, 120 bp, Artificial Sequence
  ENSG00000106009_44 (sequence is synthesized)
ccagacgtgagggcaggtccctcccacagagtggacgctgtacacacctgggggcaccccatccctgtccccctgagcgggcactgcccctctctctgggtgcatggccaggccctcctg

SEQ ID NO: 154086 - DNA, 120 bp, Artificial Sequence
  ENSG00000106009_45 (sequence is synthesized)
gaggcccctcagtatctgctcctaaggacatcaggagtgtcaggcccatctccttggtcaggcctgtcctccccgccactctgtcccatggcatcccctggccagtggcctgcagagaat

SEQ ID NO: 154087 - DNA, 120 bp, Artificial Sequence
  ENSG00000106009_46 (sequence is synthesized)
gtttctcggggggtgtcccaaccccctggctgatttgccccaggcttgctggggacattaggagcacagccaacttgtctcgcagccagggtcgcggcactcacctcgcgtttgtctcca

SEQ ID NO: 154088 - DNA, 120 bp, Artificial Sequence
  ENSG00000106009_47 (sequence is synthesized)
gcagaacctgggtccctgcggctgggggaagggagatggatgagagtagctggctcgccacccccgccccactttaatcacacccaggcctccctccaagagcaaaggggaccggggaca

SEQ ID NO: 154089 - DNA, 120 bp, Artificial Sequence
  ENSG00000106009_48 (sequence is synthesized)
tggccatctcccctggtgagctgctgctctgcacctaggtcctggcctgtgctgtgggtggtgaccgtggggtggctggtgaccgtggggaggctgaagtgctctctaagggagctcttc

SEQ ID NO: 154090 - DNA, 120 bp, Artificial Sequence
  ENSG00000106009_49 (sequence is synthesized)
aggtgagtgtgttctgtacggctttggcgtggggctatccctgtgcccccactctcctttctgctcggaggcacccgggaactgctgtccctctctgtttcttctctggggtgggggctg

SEQ ID NO: 154091 - DNA, 120 bp, Artificial Sequence
  ENSG00000106009_50 (sequence is synthesized)
aggggtgcaggggccgtgcaggaggtttcagctggcggatgaggccttgttctgctccttcccagagttgatggggagggtcctagggtgggggtgggggtggtttatccactcacctct

SEQ ID NO: 154092 - DNA, 120 bp, Artificial Sequence
  ENSG00000106009_51 (sequence is synthesized)
tggaggcagcaggggctgggtggaatggctcagctggctctgagggcagggtgagcctggccccaaggtcaccctgacctgtcccttcccaccctagagctgttccctgtgctgcagaaa

SEQ ID NO: 154093 - DNA, 120 bp, Artificial Sequence
  ENSG00000106009_52 (sequence is synthesized)
gcgcctgcctgtccccagcccctctcagcttgaactccttccttcaagtctgggccctcgaggcttccagagcggcctccaggggtgcagtctcagttccccacgccagccgtctccgtc

SEQ ID NO: 154094 - DNA, 120 bp, Artificial Sequence
  ENSG00000106012_0 (sequence is synthesized)
gcgcacgcgcatggtcgccccagggggaacgcaggtcgcttacccggctgggtaggtcggcggcctggttgccatggcagcggggtcgcgggccggcgccagggaaggccccgaggctgc

SEQ ID NO: 154095 - DNA, 120 bp, Artificial Sequence
  ENSG00000106012_1 (sequence is synthesized)
ggccagggctgcccgcggattcccagacccggacgcccgagccagcaaccctgaggggcggccgggcagcgccgccaccatgttcctgggcaccggggagccggccttggacacgggaga

SEQ ID NO: 154096 - DNA, 120 bp, Artificial Sequence
  ENSG00000106012_2 (sequence is synthesized)
gagatgacagtctgtctgcagtcacctttgactctgatgtggagacgaaagcaaaaaggaaagctttccacaaacctccacccacatcgccaaagtcaccttatctctctaagccgagaa

SEQ ID NO: 154097 - DNA, 120 bp, Artificial Sequence
  ENSG00000106012_3 (sequence is synthesized)
aagtggcctcctggaggtccctcaggacggcagggagcatgcctctgggcggccgagcgtccctgaccccgcagaagctgtggctgggaaccgcaaagccaggaagtctgacccaggccc

SEQ ID NO: 154098 - DNA, 120 bp, Artificial Sequence
  ENSG00000106012_4 (sequence is synthesized)
tgaactcacccctcacctgggagcatgcgtggactggcgtccccggcggcactcctgactgtctgacagacaccttcagagtgaagaggccacatctcaggcgctctgccagcaacggtc

SEQ ID NO: 154099 - DNA, 120 bp, Artificial Sequence
  ENSG00000106012_5 (sequence is synthesized)
atgtccctgggactcctgtctacagagaaaaagaagatatgtatgacgagattattgagttaaagaagtcattgcacgtgcagaagagcgacgtggacctgatgagaacgaagctccggc

SEQ ID NO: 154100 - DNA, 120 bp, Artificial Sequence
  ENSG00000106012_6 (sequence is synthesized)
gcctggaggaggaaaacagcaggaaggaccggcagatagagcagctcctggatcccagccgcggcacggattttgttcggactctggcagagaaaaggcccgatgccagttgggtcatta

SEQ ID NO: 154101 - DNA, 120 bp, Artificial Sequence
  ENSG00000106012_7 (sequence is synthesized)
acgggctgaagcagaggatcctgaagctggaacagcagtgcaaggagaaggacggcaccatcagcaaactccagaccgatatgaagactaccaacctggaagagatgcggatcgccatgg

SEQ ID NO: 154102 - DNA, 120 bp, Artificial Sequence
  ENSG00000106012_8 (sequence is synthesized)
agacatactacgaggaggtgcatcgtctccagaccctcttggcaagttctgaaaccaccggaaagaagcccctgggggagaagaagacgggcgccaaaaggcagaagaagatgggcagtg

SEQ ID NO: 154103 - DNA, 120 bp, Artificial Sequence
  ENSG00000106012_9 (sequence is synthesized)
ccctcctgagcttgtcccggagtgtccaggagctcacggaagagaaccagagcctgaaggaggacctggaccgcgtgctgagcacctccccaaccatctccaagacacagggttatgtgg

SEQ ID NO: 154104 - DNA, 120 bp, Artificial Sequence
  ENSG00000106012_10 (sequence is synthesized)
agtggagcaagccccggctgctgaggcgcattgtggagctggagaagaaactaagtgtgatggagagctcaaaatcacacgccgcagagccagtcagatcacacccgccagcctgccttg

SEQ ID NO: 154105 - DNA, 120 bp, Artificial Sequence
  ENSG00000106012_11 (sequence is synthesized)
catccagctctgcgctgcacagacagccacgaggggaccgcaacaaggaccacgagcgtctccgaggggctgtgagagacctgaaggaagagcggaccgcgctgcaggagcagctgctgc

SEQ ID NO: 154106 - DNA, 120 bp, Artificial Sequence
  ENSG00000106012_12 (sequence is synthesized)
agagagatttggaggtgaagcagctcctgcaggcgaaggccgacctggagaaggagctggagtgcgcgagggagggcgaggaggagaggagagagcgagaggaggttttgagagaggaga

SEQ ID NO: 154107 - DNA, 120 bp, Artificial Sequence
  ENSG00000106012_13 (sequence is synthesized)
ttcagacacttaccagcaagctccaagaattgcaagaaatgaagaaagaagagaaagaggattgcccggaagttcctcataaggcccaagagctcccagctcccactcccagcagcaggc

SEQ ID NO: 154108 - DNA, 120 bp, Artificial Sequence
  ENSG00000106012_14 (sequence is synthesized)
actgcgagcaagactggccgccggattccagcgaggaggggctcccgcggccccgctccccctgctctgatgggagaagagacgccgcggccagagtcctgcaggcccagtggaaggtgt

SEQ ID NO: 154109 - DNA, 120 bp, Artificial Sequence
  ENSG00000106012_15 (sequence is synthesized)
acaagcacaagaaaaaaaaggctgttctggatgaggcggctgtggtgcttcaggcagctttcaggggacatctcacgcggacaaagctcttagcaagcaaagcacatggctcagagccac

SEQ ID NO: 154110 - DNA, 120 bp, Artificial Sequence
  ENSG00000106012_16 (sequence is synthesized)
ccagcgtgccaggcctcccagaccagagctctcctgtgccccgcgttccgagccccatcgcccaggccacgggcagccctgtgcaggaggaggccatcgtcatcatccagtccgctctgc

SEQ ID NO: 154111 - DNA, 120 bp, Artificial Sequence
  ENSG00000106012_17 (sequence is synthesized)
gggcacacctggcccgggccaggcacagtgctaccggtaaaagaaccaccaccgcagcttctaccaggaggagatcggcttcagccacacacggggacgcctcctccccacccttcctcg

SEQ ID NO: 154112 - DNA, 120 bp, Artificial Sequence
  ENSG00000106012_18 (sequence is synthesized)
cagctcttcctgacccctctccctcagggccacaggccttggcacctctacctggggatgacgtcaactccgatgattccgacgatattgtcattgcaccgtctctgcccacgaagaact

SEQ ID NO: 154113 - DNA, 120 bp, Artificial Sequence
  ENSG00000106012_19 (sequence is synthesized)
ttccagtttaggtccccgtcactgtctccacgccgtgatggcagcgctgccgaggacataggaaccacgactggaaagataatttatcgtgttaggagaagaacgatgatacctacttaa

SEQ ID NO: 154114 - DNA, 120 bp, Artificial Sequence
  ENSG00000106012_20 (sequence is synthesized)
cacctcagcatctgcgtcgtgtctctttgtgcttttgtttgtggaaggagacccaaatgcctttactttattctctggggagggccagcggctcgcatccccctcatctccagctgcagc

SEQ ID NO: 154115 - DNA, 120 bp, Artificial Sequence
  ENSG00000106012_21 (sequence is synthesized)
tcggatggtggattttcagtgccaacagacacatctgccgtgaactcgcagatgccagggagccctgtagtgacacgttctctgacagcaccttgccgcctgcccacgaccttgaccgtg

SEQ ID NO: 154116 - DNA, 120 bp, Artificial Sequence
  ENSG00000106012_22 (sequence is synthesized)
aggagctgctatccgcaaccagcgccgacaccatgccccctcttcctggtgacaccctcaacaaccaggatttgctcgatctcagcccagcaggccaggcagacacaccccgctgtgcct

SEQ ID NO: 154117 - DNA, 120 bp, Artificial Sequence
  ENSG00000106012_23 (sequence is synthesized)
taggaaggtgtgagaccggcttcccccatccccacagcaaaacacggcctgtcccaagccagtgaggagctaaagacacccaggtccccaaatgatcttactccatgccccacccgctca

SEQ ID NO: 154118 - DNA, 120 bp, Artificial Sequence
  ENSG00000106012_24 (sequence is synthesized)
caccgtcctttcccgtcacccttgctatcccctggagcactgccctccagagctgcccttcccaggaaggaatttggttggattctgtcactgtggagaccaagattttttaaaattccc

SEQ ID NO: 154119 - DNA, 120 bp, Artificial Sequence
  ENSG00000106012_25 (sequence is synthesized)
aattacaaaagcagcatcacacttgcttctgagaacagcagggtgatgtctgttcccaagctggtggcgggagccttagcctgtgtggggccacccggggaagaggaggagaggagggtg

SEQ ID NO: 154120 - DNA, 120 bp, Artificial Sequence
  ENSG00000106012_26 (sequence is synthesized)
aggaggcaggctcgccgttccaagggacagcataggctcgtggtggggcgtgttgcatctggtgtctgggacagtccccgtcaccccatgtgtgcggcctctgcactcccaagctccatg

SEQ ID NO: 154121 - DNA, 120 bp, Artificial Sequence
  ENSG00000106012_27 (sequence is synthesized)
gctgggctgggctgggctgggctgggctgggccgggcgtgcggagcctgtggagccagcagctgcagaggcctaggagggagttcctgggggaagcgcacagtgtccagtgcccatctct

SEQ ID NO: 154122 - DNA, 120 bp, Artificial Sequence
  ENSG00000106012_28 (sequence is synthesized)
agcccttgctggggcgtcaagaggaagagccttagacctgggcgggccttcaggggcatctagacccctgcacagcccaggcctggtgtctgcatttccacagcacccctgtggggactc

SEQ ID NO: 154123 - DNA, 120 bp, Artificial Sequence
  ENSG00000106012_29 (sequence is synthesized)
ctgccggggctggccgctgtctcaggagagacccaatggttagaaagcccctttttacacagctgacagcttctcccaaggcttccgtccacggggacaggcttaacccctgggcgcctt

SEQ ID NO: 154124 - DNA, 120 bp, Artificial Sequence
  ENSG00000106012_30 (sequence is synthesized)
ttctgcagcatggcggccttctgagtcacctaagctgagcctgggtcattctctgtggcggtcagaaggccgatggccccaacacagtggcttgtgaaagggagagaggaggctctgcat

SEQ ID NO: 154125 - DNA, 120 bp, Artificial Sequence
  ENSG00000106012_31 (sequence is synthesized)
gtccacctgctctatgggaggaggacacaggtgtccccagcccagcctgttctctcccagtcactcagggatggggccacccaaagtgcaggacccgccccaccctgcggttcgaagcct

SEQ ID NO: 154126 - DNA, 120 bp, Artificial Sequence
  ENSG00000106012_32 (sequence is synthesized)
ggcccctgtctccacttagcttctgtttctgcagtgggtggaagcgagtcagcggggggcctggcttgtgtacgtgttttccttatttggtctgtgggttgccaagtccatttttttttc

SEQ ID NO: 154127 - DNA, 120 bp, Artificial Sequence
  ENSG00000106012_33 (sequence is synthesized)
cactgaactggctggtaacttgatggactgtgtaactgacacaggccctctttagacccctgccttcaccccacccgcccgggtccactccctggggcgctgtcccaagccatccctgct

SEQ ID NO: 154128 - DNA, 120 bp, Artificial Sequence
  ENSG00000106012_34 (sequence is synthesized)
tgccagctcaaagcttcaggtcctaggagccagtccacctcgaaagccctgagaaagtgagacacctgcacattcgctgggggagaccctccgttctcttgtggcagctgctcccacttg

SEQ ID NO: 154129 - DNA, 120 bp, Artificial Sequence
  ENSG00000106012_35 (sequence is synthesized)
ttaaaccaagctgtttctgcgggacgtgctcactcttgggaaccagtggcctagagctttgggttacaggcatggagagggctttcctgcctcaggcttggaggccaatgttccatacat

SEQ ID NO: 154130 - DNA, 120 bp, Artificial Sequence
  ENSG00000106012_36 (sequence is synthesized)
aaaccgccatgtcctctggtgcagctgggctgctcttttaaaagccagcatccatcttgaagctcgctgggtaaatggcaatgcattctcaagccagtgtcttcagctgatgcccagtgt

SEQ ID NO: 154131 - DNA, 120 bp, Artificial Sequence
  ENSG00000106012_37 (sequence is synthesized)
ccagtgctggtcaccagtcccctttgctgggtacagcctgcctggctgttctgtggtcctggaacgctgcagtgtggttttgttccatggagacagtaccaagcggagaggcctccttgc

SEQ ID NO: 154132 - DNA, 120 bp, Artificial Sequence
  ENSG00000106012_38 (sequence is synthesized)
ccacggccccagggcctgggggccaggggttctggccctgcggggacttaggcaggaggggaagagaagcccatggagccatgggaggggtgagctgtgggcggggcctagtcatgggag

SEQ ID NO: 154133 - DNA, 120 bp, Artificial Sequence
  ENSG00000106012_39 (sequence is synthesized)
gggtgagctgtgggcggggcgagctgtgggtggggcctagccatgggagaggtgagctgtgaatggggctagctatgggtggggtgagctgtggacagggcctagccatgggaaaggtga

SEQ ID NO: 154134 - DNA, 120 bp, Artificial Sequence
  ENSG00000106012_40 (sequence is synthesized)
gctgtgggcggggcctagtcacgggagaggtgagctgtgggcggggcctagtcatgggaggggtgagctgtggatggggcctagccatgggaggggtgagctgtgagtggggctgagcca

SEQ ID NO: 154135 - DNA, 120 bp, Artificial Sequence
  ENSG00000106012_41 (sequence is synthesized)
tgggagcagcaagctggtggagtgggctgggcggagctgtgggggctgctggcagggcctaggaaagtagacaactcccgggggagacgaagtagagagtgagtccccaagaaagggact

SEQ ID NO: 154136 - DNA, 120 bp, Artificial Sequence
  ENSG00000106012_42 (sequence is synthesized)
cctgccccagcgtcaagtgccaaagcaggccccatctaccacttcagggtcgacgttggtggcaggtgttgttcacggtgtactgattgtcactgcaacacctccacatcaccttgaact

SEQ ID NO: 154137 - DNA, 120 bp, Artificial Sequence
  ENSG00000106012_43 (sequence is synthesized)
tcaagaacagcagcaaagctgtatctgctatcagaggctgttaggtagtccagctttaaaataacacactctttctctatcccatgccctttaaacaagcagccacaggagatgtcagtc

SEQ ID NO: 154138 - DNA, 120 bp, Artificial Sequence
  ENSG00000106012_44 (sequence is synthesized)
tccagggcctggccccactgtgttgacagcagtcacgtctgttgagctgacactgctgaggctgaagctggccccgtgcaggtggctggtgagccacaggtgcagtacccggaggtgtgc

SEQ ID NO: 154139 - DNA, 120 bp, Artificial Sequence
  ENSG00000106012_45 (sequence is synthesized)
tctcccctagaggcctgtccccaactcctcccctagaggcctattcccgctgctcacagacctcagcagaggcaccagctggagggctccagggacatccttggagatacaggaggcttt

SEQ ID NO: 154140 - DNA, 120 bp, Artificial Sequence
  ENSG00000106012_46 (sequence is synthesized)
cctggcacagggcacagctcttaggaggcctttgtaggacgctgtctccccagcgtgtcctgctcatccaggatggggagaaagaggaggaggccccaggctcagaagccagggacagac

SEQ ID NO: 154141 - DNA, 120 bp, Artificial Sequence
  ENSG00000106012_47 (sequence is synthesized)
tgccgacgattaccaaactgaatccaggcagtgccatgaccctgggtgtcccttggttcacatcacccaccagacagctgcggagagagtgcagggaggggctgggaccaaacaggccag

SEQ ID NO: 154142 - DNA, 120 bp, Artificial Sequence
  ENSG00000106012_48 (sequence is synthesized)
aaaccagcagaaaagaggcagaagtgaggtgggtgtgcctggggcacgaagccagcgccggggggatttcagtggagccttacagccaggctccgtgcggactgtgatgccagagaggcg

SEQ ID NO: 154143 - DNA, 120 bp, Artificial Sequence
  ENSG00000106012_49 (sequence is synthesized)
tgcagcctctgggcaagtcgggagagggcttgggtggtccccacaaggcagaagaggtggaagggccagagaagaccaccaagaccaccgttcccgcaggcctggggtgagtgacctgac

SEQ ID NO: 154144 - DNA, 120 bp, Artificial Sequence
  ENSG00000106012_50 (sequence is synthesized)
tgagactagcgggcagagccaagcagggctaaactccaacccagggcccggtgttggacaaagtagctttttctttgctcgtttgtctgtgtattaagaagagactaaaatagccaaacg

SEQ ID NO: 154145 - DNA, 120 bp, Artificial Sequence
  ENSG00000106012_51 (sequence is synthesized)
acgctggtcgcatgcgctggctgtggtctgtctgctgaatgtctatttttgtctcctgacgagacgtgaggaccatgcccttgatccctccgatggaccagaaacccccttccttgcaaa

SEQ ID NO: 154146 - DNA, 120 bp, Artificial Sequence
  ENSG00000106012_52 (sequence is synthesized)
aaaaaggcaattgaattaggaaaagatagcccaacctagctcagatccaccaagataagcacagcaaagcttggctgcatttttgaggaataaaaacctgcagaaagcaccgataacctt

SEQ ID NO: 154147 - DNA, 120 bp, Artificial Sequence
  ENSG00000106012_53 (sequence is synthesized)
caagatctgaatgagattctattataacccgtctaaacgattgcaaaattcctcctttggttttggaagcagcgtttgctctcccgtggctcggattctctgaggaccagggagttgaca

SEQ ID NO: 154148 - DNA, 120 bp, Artificial Sequence
  ENSG00000106012_54 (sequence is synthesized)
cacaaaccccgccatgggtccgagccagctatttctcaaggctcccacctcgccaagctcccaagggcctgctggcagtgcctacgctgtgccaactaccctgtctggtacagaccacgg

SEQ ID NO: 154149 - DNA, 120 bp, Artificial Sequence
  ENSG00000106012_55 (sequence is synthesized)
ctgggtaagcacccttaaaagcaacagaaatgacgtctggaagctgaaatgtgaaactgtcaagatggcttaggagaggaaggagtggacccgctggtctttggcattttgtatttagaa

SEQ ID NO: 154150 - DNA, 120 bp, Artificial Sequence
  ENSG00000106012_56 (sequence is synthesized)
ttattctaactttatacataatgtataggccgatcttttggaagggataaggttttcattcttgtgcaactcattattctcattattggccttttaaataaaaagttgttttgcagtgtg

SEQ ID NO: 154151 - DNA, 120 bp, Artificial Sequence
  ENSG00000106012_57 (sequence is synthesized)
cgcagaggccgccgcttccaggaagctctccgggacgccgcgccctcgcctctgggcgcctgcgagtctgcggcccgcaggtgacggagctcacggtaatgtttgactagagtcaccacg

SEQ ID NO: 154152 - DNA, 120 bp, Artificial Sequence
  ENSG00000106012_58 (sequence is synthesized)
ctcgtggattttgttttcctatttctgtctttctgaagttcatgtgttgagctcacatgttgctgtccggcacctctgaatccacgtgttggcttttccagagtcaccttatctctctaa

SEQ ID NO: 154153 - DNA, 120 bp, Artificial Sequence
  ENSG00000106012_59 (sequence is synthesized)
cccgagccagcaaccctgaggggcggccgggcagcgccgccaccatgttcctgggcaccggggagccggccttggacacgagtcaccttatctctctaagccgagcgtccctgaccccgc

SEQ ID NO: 154154 - DNA, 120 bp, Artificial Sequence
  ENSG00000106012_60 (sequence is synthesized)
tgtgtcgggacggaagggaggagtgtcccatctggagctgcctctgaactaagcgtcgccttatgccaggaaggcccacaacagggccccgccttggcccagcttgtcctttgtgcctgg

SEQ ID NO: 154155 - DNA, 120 bp, Artificial Sequence
  ENSG00000106012_61 (sequence is synthesized)
aattgccgaggtccttgctgtctttattttttgctctcagctccaacaggaccgaggtggcttcctccttcaggccagcatttctcctgtttgtttgttgagtaaaaccgtgttattgtt

SEQ ID NO: 154156 - DNA, 120 bp, Artificial Sequence
  ENSG00000106012_62 (sequence is synthesized)
gtgtggctgtgccctgtggcctgccgtgtctacgtgtcatcacctgccttcaagaaacatttgcagatgtgcctgaggaggcctggccaaggatttcgattggaggattgaccagaatca

SEQ ID NO: 154157 - DNA, 120 bp, Artificial Sequence
  ENSG00000106012_63 (sequence is synthesized)
tgtgttttgtgtgttgccttcacgttgtggaagctcctctgagaatgtgtggctgtcacgtgggtgcggcatatactgcccttagcttggcagtgctgccaacactgcacctgttctgtt

SEQ ID NO: 154158 - DNA, 120 bp, Artificial Sequence
  ENSG00000106012_64 (sequence is synthesized)
cagggttagagttgacacgtttccatttgcagtgttcacagactcctcatagtgaccacgtgttgatggccaacgcgtgttcaatgccgcccgtgttcgttatagattctacatcctgcc

SEQ ID NO: 154159 - DNA, 120 bp, Artificial Sequence
  ENSG00000106012_65 (sequence is synthesized)
ttccagcttagagctagaaagtgctgtttcaaagcagagccacctttttaggaagacattgcacacaaggacaagtttactttgccacctaatgttttcctaaataagtttatcaggaga

SEQ ID NO: 154160 - DNA, 120 bp, Artificial Sequence
  ENSG00000106012_66 (sequence is synthesized)
ttgcaggaacaaaatgtgactgagtgtagtgagtgtgtgacggccgtgtgaagaagcgtcctctctccctcccaggaggcactgccagacagagttaagggagtttaatgagaagcacgt

SEQ ID NO: 154161 - DNA, 120 bp, Artificial Sequence
  ENSG00000106012_67 (sequence is synthesized)
ctgcacttgtgtgctcgcctagacgctgtctctcagcagtacaagagaccgctgtcatgtggtctgcagaccagtgtggaacagctctctcctccacattagtgagactcacctgataag

SEQ ID NO: 154162 - DNA, 120 bp, Artificial Sequence
  ENSG00000106012_68 (sequence is synthesized)
agaggccgccgcttccaggaagctctccgggacgccgcgccctcgcctctgggcgcctgcgagtctgcggcccgcaggtgacggagctcacggtagtcaccttatctctctaagccgaga

SEQ ID NO: 154163 - DNA, 120 bp, Artificial Sequence
  ENSG00000106012_69 (sequence is synthesized)
gctaaagagatctggaaacagctggctgtgtggatgtacccagggcatcttcgtcagggatgttaagatgtgcagacacccaagtgaccatcctaggaagattacactcccaggtcccta

SEQ ID NO: 154164 - DNA, 120 bp, Artificial Sequence
  ENSG00000106012_70 (sequence is synthesized)
gaaacaggaggcagggcacgcaaggccacgcaggagcggcgcgtcggccaggaggcggcagggtcgtgcggaagacctgggccagggcctttatcatgagaaggagagggcgaggtgagg

SEQ ID NO: 154165 - DNA, 120 bp, Artificial Sequence
  ENSG00000106012_71 (sequence is synthesized)
cgaggtttatttcttgtttcaaaattcggatttgtattttgttgaaaagtaggtgaggggatatttaaagatgtgttgattccttttctttttttttcgagatggaatctcgctctgtgg

SEQ ID NO: 154166 - DNA, 90 bp, Artificial Sequence
  ENSG00000106012_72 (sequence is synthesized)
ttttaggagagacggggtttctccgcttaggtgatttgcacatcttggcctcccaaagtgcaggaattacaggcgtgagccaccgcgccc

SEQ ID NO: 154167 - DNA, 120 bp, Artificial Sequence
  ENSG00000106012_73 (sequence is synthesized)
gtgagccaccgcgcccggcaagtccttcttttcatgaaaccaaaccagaccccaacgttaagtataaaatacatgagaaatagagacatcaaataaatatttcgataatttcccactttc

SEQ ID NO: 154168 - DNA, 120 bp, Artificial Sequence
  ENSG00000106013_0 (sequence is synthesized)
agcatttccactttcgtcaggtactggagagggctgccggccggatgccagggcagaggggcagggcggacggctaggagttcaagaaacatcctggtctgagggaaaggctgcagcctg

SEQ ID NO: 154169 - DNA, 120 bp, Artificial Sequence
  ENSG00000106013_1 (sequence is synthesized)
caccgccatgaataagcttttcagcttctggaagaggaagaatgagacccgcagccagggctacaaccttcgagaaaaggatttaaagaaacttcacagagctgcttcagtcggggattt

SEQ ID NO: 154170 - DNA, 120 bp, Artificial Sequence
  ENSG00000106013_2 (sequence is synthesized)
gaagaagctgaaggaataccttcagatcaagaaatatgatgtaaatatgcaggacaaaaaatacagaacacctttgcacctagcctgtgctaatggacatacagatgttgtacttttcct

SEQ ID NO: 154171 - DNA, 120 bp, Artificial Sequence
  ENSG00000106013_3 (sequence is synthesized)
aattgagcaacaatgcaaaataaatgtccgggatagtgaaaacaaatccccattgattaaggcagtacagtgtcaaaatgaggattgtgctactattcttctaaactttggtgcagaccc

SEQ ID NO: 154172 - DNA, 120 bp, Artificial Sequence
  ENSG00000106013_4 (sequence is synthesized)
agatctgagggatattcgttataatactgttcttcactatgctgtttgtggtcaaagtttgtcattagttgaaaaactgcttgaatacgaagctgatcttgaagcgaaaaataaggatgg

SEQ ID NO: 154173 - DNA, 120 bp, Artificial Sequence
  ENSG00000106013_5 (sequence is synthesized)
ttcttgctgtcagtggtgaaccaccatgtttagtaaagcttcttcttcagcaaggtgtggaattatgttacgaaggtattgtggattcacagctgaggaatatgtttatttccatggttt

SEQ ID NO: 154174 - DNA, 120 bp, Artificial Sequence
  ENSG00000106013_6 (sequence is synthesized)
tactgcatagatacccacaattcactgcgagccatggaaagaagaaacatgctaaatagacaccttattcttggcactacatgtgactaaaggaagatatggaacccatttctacaattt

SEQ ID NO: 154175 - DNA, 120 bp, Artificial Sequence
  ENSG00000106013_7 (sequence is synthesized)
ctttgccgcttccttgaattggaaaaatgtactttgaaagaaccgttaagtgaactattataatatttttgctgactacccagttgaagaaaagtttgttaattggatgggatttttttt

SEQ ID NO: 154176 - DNA, 120 bp, Artificial Sequence
  ENSG00000106013_8 (sequence is synthesized)
ttttcacgttagaagacatgaagaaattttaaaagataaacatctatattgtgaaccatcagctgaaaagataaatttgtgttcaatatataggcagaaaaaaatttgtgtcaaaatgtt

SEQ ID NO: 154177 - DNA, 120 bp, Artificial Sequence
  ENSG00000106013_9 (sequence is synthesized)
gaatggaataataatgaggaaactgtgttaggcatgtattaaaacatttaaataaaataaaaatacatttcagctacaaagtgaaggaaaacattataaataatcctgtataaatcaaaa

SEQ ID NO: 154178 - DNA, 120 bp, Artificial Sequence
  ENSG00000106013_10 (sequence is synthesized)
ggtctttgctaggtctggaggtagagcagatgctgaggcgttcaaaggaaggcggtgcctgtggacaagcaggcttgcacaggatctggcccgtgccgaccagggcgccaggaccctgaa

SEQ ID NO: 154179 - DNA, 120 bp, Artificial Sequence
  ENSG00000106013_11 (sequence is synthesized)
ggcactacatgtgactaaaggaagtttggagcttattcttggggactattctaagcctgaggaaccaacaacccaaggtactaggctcttggagccttacattcttcacatttagaagag

SEQ ID NO: 154180 - DNA, 120 bp, Artificial Sequence
  ENSG00000106013_12 (sequence is synthesized)
ttcacatttagaagagtctcactctggtaacccaggctgagtgcagaggtacaatcatggatcactgcagccttaaccttctaggttaaatcaatcctcccacctcagcatcccaagtag

SEQ ID NO: 154181 - DNA, 86 bp, Artificial Sequence
  ENSG00000106013_13 (sequence is synthesized)
ggctcattgtaacctccgccttctgaagctaggactacagccatgtaggatgtgcctccttcttctttgccttttggcatgattgt

SEQ ID NO: 154182 - DNA, 120 bp, Artificial Sequence
  ENSG00000106013_14 (sequence is synthesized)
aggatgtgcctccttcttctttgccttttggcatgattgtaagtttcctgaggactccacaaccatgctgcctgtacagcctgcagaactgctcataggcagaaggaacttgccttgttt

SEQ ID NO: 154183 - DNA, 120 bp, Artificial Sequence
  ENSG00000106013_15 (sequence is synthesized)
aagatgagactttggactctggacttttgagttaattctgaaatgaccatgtaggacatgccttcttcctcttcttcttccaccatggttgtaagtttcttgaggcctccacagccatgc

SEQ ID NO: 154184 - DNA, 120 bp, Artificial Sequence
  ENSG00000106013_16 (sequence is synthesized)
tgccttgatggagcttacagtctagaagagaagatagatattaaacaaagtcttcacctacaatgatgggaagactacaaaagatgaggaaaataaagcccagagtgttccagtgatggg

SEQ ID NO: 154185 - DNA, 120 bp, Artificial Sequence
  ENSG00000106013_17 (sequence is synthesized)
cctcgattcactcagcttcaagtcggccagactccaatgcgcaggctcaatcagtcagacttggtatttgtctttctggatcatgctggggtatgattctcattgcggacagaataacaa

SEQ ID NO: 154186 - DNA, 120 bp, Artificial Sequence
  ENSG00000106013_18 (sequence is synthesized)
caagaagaccttgagaataagcatcaatttgtgagccccaagggcgaagaagctttcctgaagcaacaacaggaacaggaagcaaaaaggatttgaaatgaaatagcaagggtctcacac

SEQ ID NO: 154187 - DNA, 120 bp, Artificial Sequence
  ENSG00000106013_19 (sequence is synthesized)
tgtagctcaggctggagtgcagtggagcgatctcaacttagtgccagctccgcctcccgggttcaagagagtcttctgcctcagcctcagtagtagctgggattacagatagagtaccaa

SEQ ID NO: 154188 - DNA, 120 bp, Artificial Sequence
  ENSG00000106013_20 (sequence is synthesized)
agatataatttgaagagaggaaacacagtaacactgcatttttatataaaatatgataccttttgattggaaaaataaccagccaaaaataaaaagaaaacaattcatgtatctcaaaaa

SEQ ID NO: 154189 - DNA, 120 bp, Artificial Sequence
  ENSG00000106013_21 (sequence is synthesized)
gagcttattcttggggactattctaagcctgaggaaccaacaacccaagggctggaacttgcatgaggcaaacaagacacctggaacacaaattttaaggatatccttactctcaggtgc

SEQ ID NO: 154190 - DNA, 120 bp, Artificial Sequence
  ENSG00000106013_22 (sequence is synthesized)
tctagatggcttttatcctacaccactccgctgaatgactttataagaacacctttgcacctagcctgtgctaatggacatacagatgttgtacttttcctaattgagcaacaatgcaaa

SEQ ID NO: 154191 - DNA, 120 bp, Artificial Sequence
  ENSG00000106018_0 (sequence is synthesized)
catgctggaggcggcggaaccgcggggacctaggacggaggcggcgggcgctgggcggcccccggcacgctgagctcgggatgcggacgctgctgcctcccgcgctgctgacctgctggc

SEQ ID NO: 154192 - DNA, 120 bp, Artificial Sequence
  ENSG00000106018_1 (sequence is synthesized)
ctgctgacctgctggctgctcgcccccgtgaacagcattcacccagaatgccgatttcatctggaaatacaggaggaagaaacaaaatgtgcagagcttctgaggtctcaaacagaaaaa

SEQ ID NO: 154193 - DNA, 120 bp, Artificial Sequence
  ENSG00000106018_2 (sequence is synthesized)
cacaaagcctgcagtggcgtctgggacaacatcacgtgctggcggcctgccaatgtgggagagaccgtcacggtgccctgcccaaaagtcttcagcaatttttacagcaaagcaggaaac

SEQ ID NO: 154194 - DNA, 120 bp, Artificial Sequence
  ENSG00000106018_3 (sequence is synthesized)
ataagcaaaaactgtacgagtgacggatggtcagagacgttcccagatttcgtcgatgcctgtggctacagcgacccggaggatgagagcaagatcacgttttatattctggtgaaggcc

SEQ ID NO: 154195 - DNA, 120 bp, Artificial Sequence
  ENSG00000106018_4 (sequence is synthesized)
atttatacactgggctacagtgtctctctgatgtctcttgcaacaggaagcataattctgtgcctcttcaggaagctgcactgcaccaggaattacatccacctgaacctgttcctgtcc

SEQ ID NO: 154196 - DNA, 120 bp, Artificial Sequence
  ENSG00000106018_5 (sequence is synthesized)
ttcatcctgagagccatctcagtgctggtcaaggacgacgttctctactccagctctggcacgttgcactgccctgaccagccatcctcctgggtgggctgcaagctgagcctggtcttc

SEQ ID NO: 154197 - DNA, 120 bp, Artificial Sequence
  ENSG00000106018_6 (sequence is synthesized)
ctgcagtactgcatcatggccaacttcttctggctgctggtggaggggctctacctccacaccctcctggtggccatgctcccccctagaaggtgcttcctggcctacctcctgatcgga

SEQ ID NO: 154198 - DNA, 120 bp, Artificial Sequence
  ENSG00000106018_7 (sequence is synthesized)
tggggcctccccaccgtctgcatcggtgcatggactgcggccaggctctacttagaagacaccggttgctgggatacaaacgaccacagtgtgccctggtgggtcatacgaataccgatt

SEQ ID NO: 154199 - DNA, 120 bp, Artificial Sequence
  ENSG00000106018_8 (sequence is synthesized)
ttaatttccatcatcgtcaattttgtccttttcattagtattatacgaattttgctgcagaagttaacatccccagatgtcggcggcaacgaccagtctcagtacaagaggctggccaag

SEQ ID NO: 154200 - DNA, 120 bp, Artificial Sequence
  ENSG00000106018_9 (sequence is synthesized)
tccacgctcctgcttatcccgctgttcggcgtccactacatggtgtttgccgtgtttcccatcagcatctcctccaaataccagatactgtttgagctgtgcctcgggtcgttccagggc

SEQ ID NO: 154201 - DNA, 120 bp, Artificial Sequence
  ENSG00000106018_10 (sequence is synthesized)
ctggtggtggccgtcctctactgtttcctgaacagtgaggtgcagtgcgagctgaagcgaaaatggcgaagccggtgcccgaccccgtccgcgagccgggattacagggtctgcggttcc

SEQ ID NO: 154202 - DNA, 120 bp, Artificial Sequence
  ENSG00000106018_11 (sequence is synthesized)
tccttctcccgcaacggctcggagggcgccctgcagttccaccgcggctcccgcgcccagtccttcctgcaaacggagacctcggtcatctagccccacccctgcctgtcggacgcggcg

SEQ ID NO: 154203 - DNA, 120 bp, Artificial Sequence
  ENSG00000106018_12 (sequence is synthesized)
ggaggcccacggttcggggcttctgcggggctgagacgccggcttcctccttccagatgcccgagcaccgtgtcgggcaggtcagcgcggtcctgactccgtcaagctggttgtccacta

SEQ ID NO: 154204 - DNA, 120 bp, Artificial Sequence
  ENSG00000106018_13 (sequence is synthesized)
aaccccatacctggaattggagtcgtgttgtcattgactcgatttaaactccagcatttagataatcttgtgcaaaatgtgtttcagccgtatagtggatccactttttttttttttttt

SEQ ID NO: 154205 - DNA, 62 bp, Artificial Sequence
  ENSG00000106018_14 (sequence is synthesized)
ctctgtcgcccaggctggactgcagtggcctgatctcagctgggactacaggcgcccgccaa

SEQ ID NO: 154206 - DNA, 120 bp, Artificial Sequence
  ENSG00000106018_15 (sequence is synthesized)
ggattaaggcgtgagccactgcgcccggcccaagagaataggggagccaaggaggaaatgtggaaacgcagttgtgtggcccagcacgagcctgggcgaccaccgggtgacatccgtccc

SEQ ID NO: 154207 - DNA, 120 bp, Artificial Sequence
  ENSG00000106018_16 (sequence is synthesized)
acatcagggcggcctcccaggtcccataagggtagccccctcatctgcaggacagagggaagccagtcagggcccccctgacgttaggaccaggagaaatcaacaggagggcagcccgtc

SEQ ID NO: 154208 - DNA, 120 bp, Artificial Sequence
  ENSG00000106018_17 (sequence is synthesized)
ctctctcttggggcgcccacccggcccggctgagccctgccccacccaactccacagggctgttttgcctccccacggaaggcgggctgaggagacaaccagatcaggagagcaaggtca

SEQ ID NO: 154209 - DNA, 120 bp, Artificial Sequence
  ENSG00000106018_18 (sequence is synthesized)
tgaaggaggggacctctccacacaggtgttccgtgggaccctcagcagctctggctctgcctcaggaggtcacctgccgccctgtgggagccgcagagcctgacgctcagccccaggcca

SEQ ID NO: 154210 - DNA, 120 bp, Artificial Sequence
  ENSG00000106018_19 (sequence is synthesized)
gctgcggccaggcctgcgggcccctggtgatggggttacgtggggtgcgggatacagctgagtgggaaccggaaacctattctctttttaacaaaaataatcttaggataagaattattt

SEQ ID NO: 154211 - DNA, 120 bp, Artificial Sequence
  ENSG00000106018_20 (sequence is synthesized)
taacaacatataaaactgtttcaagccctcctccccagagctggcgctcagcagccctagcggctgctccttcaggcgaagggtggtttgcagatgtggggagggtgtctggggacgttg

SEQ ID NO: 154212 - DNA, 120 bp, Artificial Sequence
  ENSG00000106018_21 (sequence is synthesized)
ctgagccagctgcagaagggtggggatatcagggcacagtctccatgtgtgtgccaagccctggcccccacagcgctcgatggacctcagcaagctgcccagccctggcccaggtgcccc

SEQ ID NO: 154213 - DNA, 120 bp, Artificial Sequence
  ENSG00000106018_22 (sequence is synthesized)
gactgtgggactcagttgttctgagcacatttgactccacttttcccttaaaaatgaatgtcttgttcctgtgcattggtggcatcacagaccccagctggggcgcgatgtcaaaggtcg

SEQ ID NO: 154214 - DNA, 120 bp, Artificial Sequence
  ENSG00000106018_23 (sequence is synthesized)
ggacagctgtgccgggaggcagccacagggaagctcacacatcctgtcagtgtcaccttggtttgcaaaacccatatccccggtaaaatgaggccggacagaggggctgttaggacagca

SEQ ID NO: 154215 - DNA, 120 bp, Artificial Sequence
  ENSG00000106018_24 (sequence is synthesized)
aagcagcagtgtccagagacccctcaatccccaaaggtccgcaccctgtcctgcacaccctgggccacgccggccacacccctctgctgcaacaagctcatccctggacttctgggagaa

SEQ ID NO: 154216 - DNA, 120 bp, Artificial Sequence
  ENSG00000106018_25 (sequence is synthesized)
tgaacccgaggttggtttggggagacaggtgaggcggtcggatctacagaacaacccaccatttctgggggccgcagaggatccatcacagacggatactggggagtaaacggcccaggc

SEQ ID NO: 154217 - DNA, 120 bp, Artificial Sequence
  ENSG00000106018_26 (sequence is synthesized)
caggtgcccaggaaaggacggctgagcatgtggagcgagagggaggcaggtggacgctgcagaccccaggttcagtgcggcccctcggctgttcctcccctgtagggtttggacagaccc

SEQ ID NO: 154218 - DNA, 120 bp, Artificial Sequence
  ENSG00000106018_27 (sequence is synthesized)
acccccagccttgcccagctttcaaaggacaaaagggagcatcccccacctactctcaggtttttgaggaaacaaagatttgtggtaactgaaggtgttgggtcagtggccaggtgccga

SEQ ID NO: 154219 - DNA, 120 bp, Artificial Sequence
  ENSG00000106018_28 (sequence is synthesized)
cactgagctgtgacccagaggggacgctgaggaagtgggcgtgagtggacgtgtcaggtggttaccaggcactggttgttgatggtcggtggttgggtgtgggcagtcatcagtcatcag

SEQ ID NO: 154220 - DNA, 120 bp, Artificial Sequence
  ENSG00000106018_29 (sequence is synthesized)
gtgtgctcaggggacaatctcccctcaaccgcacatgtgccactgttcagcggagctgactggtttctcctggtagaggggccggctgtttcctgacagatgcctggtgagcaggggaag

SEQ ID NO: 154221 - DNA, 120 bp, Artificial Sequence
  ENSG00000106018_30 (sequence is synthesized)
caggacccagtggtcagcaggtgtctttaactgtcattgtgtgtggaatgtcgcagactcctccacgtggcgggaatgagctgtgtaaatacttcaataaagcctgacttcacatctgca

SEQ ID NO: 154222 - DNA, 120 bp, Artificial Sequence
  ENSG00000106018_31 (sequence is synthesized)
ctgctggctgctcgcccccgtgagtgcgcccgcgacccccgccccacggcgcctcggacccggttctccccttccgagaagagcgctcctcccgccggtcttcgccttcctcccgggtgc

SEQ ID NO: 154223 - DNA, 120 bp, Artificial Sequence
  ENSG00000106018_32 (sequence is synthesized)
tggagcgcgggcggggtccgggagagggagcggggtcgcccggggtccggagcttcctcccggagagcgtgaagcgctgagctccggtcccgccgggttgcgggactcgggttgggaggc

SEQ ID NO: 154224 - DNA, 120 bp, Artificial Sequence
  ENSG00000106018_33 (sequence is synthesized)
tgcctgcgcccttccccgcgccccaccgtccggggtttgctggaaacgggatcgtttcttcctggacgcgtcaacgatgagctcgttcggggccgtcccgggagctgggagctgcgggcg

SEQ ID NO: 154225 - DNA, 120 bp, Artificial Sequence
  ENSG00000106018_34 (sequence is synthesized)
aaacttcactccccagggctcccatccctggtgacaaagatcacagcagctggcactgcagatgcctttgtgggaggcaccatctgatcatcccgccaaccctcctgcaaccctgcaagg

SEQ ID NO: 154226 - DNA, 120 bp, Artificial Sequence
  ENSG00000106018_35 (sequence is synthesized)
acacaccagcctcccagggtgccaggaggagcctgccagagacccccagagcggcctgccccaaatcacctctgagagcagcagcttttctgaaggaagcctcccctcatggtcctcagg

SEQ ID NO: 154227 - DNA, 120 bp, Artificial Sequence
  ENSG00000106018_36 (sequence is synthesized)
cccagcaggtgccaagctcaatgccagccacgagggcattggctcatcgagtgatgggaacggggacagcaaggcggccacagagagggtggtctcagccatggacacagtacggcggaa

SEQ ID NO: 154228 - DNA, 120 bp, Artificial Sequence
  ENSG00000106018_37 (sequence is synthesized)
caggaagcctcgtgtgtggtatacactggtgataaagcaagtcccatgcagtctgagatggcaagggaccttctagggaaagggcagtgacccagaagcccgactgctcggctggctccc

SEQ ID NO: 154229 - DNA, 120 bp, Artificial Sequence
  ENSG00000106018_38 (sequence is synthesized)
gcactccgtcctgtggtcagagtgtgtttcctcccctctgtgaacctggtctcctccccagtgtgaggacaggggctctcgccttcttcagggagttgctgggaggacaaaatggagtat

SEQ ID NO: 154230 - DNA, 120 bp, Artificial Sequence
  ENSG00000106018_39 (sequence is synthesized)
atgtaaaagtcatttcctagataagggggagcatgtcgtaagagtctcttgaaatttaattgatgtttatgtcattgacattgaaataatgagaaaataaatccaaatccagagctcaaa

SEQ ID NO: 154231 - DNA, 120 bp, Artificial Sequence
  ENSG00000106025_0 (sequence is synthesized)
gcgctgagagtttgtgcagctggccctggctgccgccgctgcctcgtccggactcggagaggacttgggagggacagcggcgctgggaggtggcttagcagagactttccagcaactgct

SEQ ID NO: 154232 - DNA, 120 bp, Artificial Sequence
  ENSG00000106025_1 (sequence is synthesized)
gcccaggacttttttttttttttttctttttcccaggaggcggcgacggcggcggcggggggagaggaagagaaagaagcgtctccagctgaagccaatgcagccctccggctctccgcg

SEQ ID NO: 154233 - DNA, 120 bp, Artificial Sequence
  ENSG00000106025_2 (sequence is synthesized)
aagaagttccctgccccgatgagcccccgccgtgcgtccccgactatccccaggcgggcgtggggcaccgggcccagcgccgacgatcgctgccgttttgcccttgggagtaggatgtgg

SEQ ID NO: 154234 - DNA, 120 bp, Artificial Sequence
  ENSG00000106025_3 (sequence is synthesized)
tgaaaggatggggcttctcccttacggggctcacaatggccagagaagattccgtgaagtgtctgcgctgcctgctctacgccctcaatctgctcttttggttaatgtccatcagtgtgt

SEQ ID NO: 154235 - DNA, 120 bp, Artificial Sequence
  ENSG00000106025_4 (sequence is synthesized)
tggcagtttctgcttggatgagggactacctaaataatgttctcactttaactgcagaaacgagggtagaggaagcagtcattttgacttactttcctgtggttcatccggtcatgattg

SEQ ID NO: 154236 - DNA, 120 bp, Artificial Sequence
  ENSG00000106025_5 (sequence is synthesized)
ctgtttgctgtttccttatcattgtggggatgttaggatattgtggaacggtgaaaagaaatctgttgcttcttgcatggtactttggaagtttgcttgtcattttctgtgtagaactgg

SEQ ID NO: 154237 - DNA, 120 bp, Artificial Sequence
  ENSG00000106025_6 (sequence is synthesized)
cttgtggcgtttggacatatgaacaggaacttatggttccagtacaatggtcagatatggtcactttgaaagccaggatgacaaattatggattacctagatatcggtggcttactcatg

SEQ ID NO: 154238 - DNA, 120 bp, Artificial Sequence
  ENSG00000106025_7 (sequence is synthesized)
cttggaatttttttcagagagagtttaagtgctgtggagtagtatatttcactgactggttggaaatgacagagatggactggcccccagattcctgctgtgttagagaattcccaggat

SEQ ID NO: 154239 - DNA, 120 bp, Artificial Sequence
  ENSG00000106025_8 (sequence is synthesized)
gttccaaacaggcccaccaggaagatctcagtgacctttatcaagagggttgtgggaagaaaatgtattcctttttgagaggaaccaaacaactgcaggtgctgaggtttctgggaatct

SEQ ID NO: 154240 - DNA, 120 bp, Artificial Sequence
  ENSG00000106025_9 (sequence is synthesized)
ccattggggtgacacaaatcctggccatgattctcaccattactctgctctgggctctgtattatgatagaagggagccggggacagaccaaatgatgtccttgaagaatgacaactctc

SEQ ID NO: 154241 - DNA, 120 bp, Artificial Sequence
  ENSG00000106025_10 (sequence is synthesized)
tccatggcaaacagctttaatacacactttgagatggaggagttataaaaagaaatgtcacagaagaaaaccacaaacttgttttactggacttgtgaatttttgagtacatactatgtg

SEQ ID NO: 154242 - DNA, 120 bp, Artificial Sequence
  ENSG00000106025_11 (sequence is synthesized)
tttcagaaatatgtagaaataaaaatgttgccataaaataacacctaagcatatactattctatgctttaaaatgaggatggaaaagtttcatgtcataagtcaccacctggacaataat

SEQ ID NO: 154243 - DNA, 120 bp, Artificial Sequence
  ENSG00000106025_12 (sequence is synthesized)
tgatgcccttaaaatgctgaagacagatgtcatacccactgtgtagcctgtgtatgacttttactgaacacagttatgttttgaggcagcatggtttgattagcatttccgcatccatgc

SEQ ID NO: 154244 - DNA, 120 bp, Artificial Sequence
  ENSG00000106025_13 (sequence is synthesized)
aaacgagtcacatatggtgggactggagccatagtaaaggttgatttacttctaccaactagtatataaagtactaattaaatgctaacataggaagttagaaaatactaataactttta

SEQ ID NO: 154245 - DNA, 120 bp, Artificial Sequence
  ENSG00000106025_14 (sequence is synthesized)
ttactcagcgatctattcttctgatgctaaataaattatatatcagaaaactttcaatattggtgactacctaaatgtgatttttgctggttactaaaatattcttaccacttaaaagag

SEQ ID NO: 154246 - DNA, 120 bp, Artificial Sequence
  ENSG00000106025_15 (sequence is synthesized)
caagctaacacattgtcttaagctgatcagggattttttgtatataagtctgtgttaaatctgtataattcagtcgatttcagttctgataatgttaagaataaccattatgaaaaggaa

SEQ ID NO: 154247 - DNA, 120 bp, Artificial Sequence
  ENSG00000106025_16 (sequence is synthesized)
aatttgtcctgtatagcatcattatttttagcctttcctgttaataaagctttactattctgtcctgggcttatattacacatataactgttatttaaatacttaaccactaattttgaa

SEQ ID NO: 154248 - DNA, 120 bp, Artificial Sequence
  ENSG00000106025_17 (sequence is synthesized)
aattaccagtgtgatacataggaatcattattcagaatgtagtctggtctttaggaagtattaataagaaaatttgcacataacttagttgattcagaaaggacttgtatgctgtttttc

SEQ ID NO: 154249 - DNA, 120 bp, Artificial Sequence
  ENSG00000106025_18 (sequence is synthesized)
tcccaaatgaagactctttttgacactaaacactttttaaaaagcttatctttgccttctccaaacaagaagcaatagtctccaagtcaatataaattctacagaaaatagtgttctttt

SEQ ID NO: 154250 - DNA, 120 bp, Artificial Sequence
  ENSG00000106025_19 (sequence is synthesized)
tctccagaaaaatgcttgtgagaatcattaaaacatgtgacaatttagagattctttgttttatttcactgattaatatactgtggcaaattacacagattattaaatttttttacaaga

SEQ ID NO: 154251 - DNA, 120 bp, Artificial Sequence
  ENSG00000106025_20 (sequence is synthesized)
gtatagtatatttatttgaaatgggaaaagtgcattttactgtattttgtgtattttgtttatttctcagaatatggaaagaaaattaaaatgtgtcaataaatattttctagagagtaa

SEQ ID NO: 154252 - DNA, 120 bp, Artificial Sequence
  ENSG00000106025_21 (sequence is synthesized)
attccttcgacgccaccattttaaagggatttactgcacggacttctcccaagttcctaggcattatcttctggaccctatcctgcagaggtgaagcgtccctttggggactctcgctgg

SEQ ID NO: 154253 - DNA, 120 bp, Artificial Sequence
  ENSG00000106025_22 (sequence is synthesized)
accccttcaccccccttctcaaacacaaatattatcatataataaaagcctgcttctctatgcttataacccagcctccattccttcgacgccaccattttaaagggatttactgcacgg

SEQ ID NO: 154254 - DNA, 120 bp, Artificial Sequence
  ENSG00000106025_23 (sequence is synthesized)
aatctgttgcttcttgcatggtactttggaagtttgcttgtcattttctgtgtagaactggcttgtggcgtttggacatatgaacaggaacttatgagcgaagagagtcatttggcaatt

SEQ ID NO: 154255 - DNA, 120 bp, Artificial Sequence
  ENSG00000106025_24 (sequence is synthesized)
gaacagtaaaatagaagtcatttctggtgctgatgtagtcttcaaagattctttggtgaatctactattgtgcttcgagactgttttgaatactaagtagtaaccacagactagtggcta

SEQ ID NO: 154256 - DNA, 120 bp, Artificial Sequence
  ENSG00000106025_25 (sequence is synthesized)
ctctgcacactccaatttacatgtcagtggtgctttggcacactcacacatatgtatctctgtgaagacactcatgcttccaatgtacaacggcactaagttccagtacaatggtcagat

SEQ ID NO: 154257 - DNA, 120 bp, Artificial Sequence
  ENSG00000106025_26 (sequence is synthesized)
agtgccgagcacagctgtcctcgaggaggggcgtggagtgagggaggttttcaagagcgtctcatcagaatgcacagggctccgccgcgtgtcccctgagaacgcgagtttactgtgcga

SEQ ID NO: 154258 - DNA, 120 bp, Artificial Sequence
  ENSG00000106025_27 (sequence is synthesized)
attcacacccgagctgcgggacggggtagaggggtgcggagttggagtgcccaggaactgtcctaactagaagggcgctcattctctcgggcttgccggtggcgcctctgacgtgtccgg

SEQ ID NO: 154259 - DNA, 120 bp, Artificial Sequence
  ENSG00000106028_0 (sequence is synthesized)
gtgcgccggaagtgatcccctgcgtggctgggctgctcgggttagatcgtcaggaaaagcctaaagattagactgtaagaaaagaaaatagaagccatgtttcgaagacctgtattacag

SEQ ID NO: 154260 - DNA, 120 bp, Artificial Sequence
  ENSG00000106028_1 (sequence is synthesized)
gtacttcgtcagtttgtaagacatgagtccgaaacaactaccagtttggttcttgaaagatccctgaatcgtgtgcacttacttgggcgagtgggtcaggaccctgtcttgagacaggtg

SEQ ID NO: 154261 - DNA, 120 bp, Artificial Sequence
  ENSG00000106028_2 (sequence is synthesized)
actgggtgatgtcagtcaaaagacaacatggcacagaatatcagtattccggccaggcctcagagacgtggcatatcaatatgtgaaaaaggggtctcgaatttatttggaagggaaaat

SEQ ID NO: 154262 - DNA, 120 bp, Artificial Sequence
  ENSG00000106028_3 (sequence is synthesized)
agactatggtgaatacatggataaaaataatgtgaggcgacaagcaacaacaatcatagctgataatattatatttctgagtgaccagacgaaagagaaggagtagaaaggatgattctt

SEQ ID NO: 154263 - DNA, 120 bp, Artificial Sequence
  ENSG00000106028_4 (sequence is synthesized)
ctttggccatcatttggtacagtctcatttccaagtcatgtataatctttatggcttccaaggacaagaattaaaatactcttttacgtaaaatgagtaataatcttttttctgactgtc

SEQ ID NO: 154264 - DNA, 120 bp, Artificial Sequence
  ENSG00000106028_5 (sequence is synthesized)
cctccccagccatgttggcggctgccctaggattgctgatgcccattgcaggggctgaatttctcattggcctggttggaaatggagtccctgtggtctgcagttttagaggatgggtca

SEQ ID NO: 154265 - DNA, 120 bp, Artificial Sequence
  ENSG00000106028_6 (sequence is synthesized)
acctctccctatggtgtggctggctagcccgggggtctctacgctgcttggtctttgttaacggagatgaaggcagtaatttttcagtaacaggtttcagatataagtcccttggtgatg

SEQ ID NO: 154266 - DNA, 120 bp, Artificial Sequence
  ENSG00000106028_7 (sequence is synthesized)
ctaatatttatggaggccttactatgcattaagaacttttttagaagtttagaaaatggcagtgaataaagcagatacaaatctctgctctaagggagcttgcatagtaatgaaatttga

SEQ ID NO: 154267 - DNA, 120 bp, Artificial Sequence
  ENSG00000106028_8 (sequence is synthesized)
gaagacagtggattggaagtgggattaactcagaatcaaaattttgtcgatgggttggaggaagaggaagttatttgggaccaaaaagacatacaggtgtgagtttatttgggagggagg

SEQ ID NO: 154268 - DNA, 120 bp, Artificial Sequence
  ENSG00000106028_9 (sequence is synthesized)
ggtgtccacctctccctatggtgtggctggctagcccgggggtctctacgctgcttggtctttgttaacggagatgaaggaaaagcctaaagattagactgtaagaaaagaaaatagaag

SEQ ID NO: 154269 - DNA, 120 bp, Artificial Sequence
  ENSG00000106028_10 (sequence is synthesized)
gtgcgccggaagtgatcccctgcgtggctgggctgctcgggttagatcgtcaggtgagggaggaagggatagccagcgcgaaggaagtgctggagtcgtgtgttttggctgcgcgtgatc

SEQ ID NO: 154270 - DNA, 120 bp, Artificial Sequence
  ENSG00000106028_11 (sequence is synthesized)
cttttaactacaggggcaaaagacctttgagctcacccacccacctctatactcatttgatatggaggattggggacgattttgccagtgtaaattatgttcactaaaacaaaaaaaaag

SEQ ID NO: 154271 - DNA, 120 bp, Artificial Sequence
  ENSG00000106028_12 (sequence is synthesized)
ttcaggtttattcacacgtaataggaatcattaatttttaaaatgtgtgtgtgttgcttgaatttaaccagtgagaggacattaaaggtctttagtgacctaaagactgtaggaatcatt

SEQ ID NO: 154272 - DNA, 120 bp, Artificial Sequence
  ENSG00000106028_13 (sequence is synthesized)
gttccaacttttttcttaaggcatgtagttgcttttttgaccatctacctcctgtgttgctaaacgttcctcttcccccatctttccacactgaagagagcatctcaagtctcagtggtc

SEQ ID NO: 154273 - DNA, 120 bp, Artificial Sequence
  ENSG00000106028_14 (sequence is synthesized)
accagagatttcactatgtagaaaatgccttctcattccacttagtatgggtcctcacttttccagacactagcccaccttgagccagcttagactaccatttttcctcacttaccacat

SEQ ID NO: 154274 - DNA, 120 bp, Artificial Sequence
  ENSG00000106028_15 (sequence is synthesized)
tcgggcaccagctcctgtagattcttctttggctctcctactccccatcctcctgtgaagaccaatgaagaaccagttcctccatgactctgtcattttccccaccttaatcctatattc

SEQ ID NO: 154275 - DNA, 120 bp, Artificial Sequence
  ENSG00000106028_16 (sequence is synthesized)
taacctgtatgtatctttaatctatttttttctgtattgaaatgtgaaacatgaaaaagttattgcttcttaacactaacgttacagtattaaaatgtctttaaataagagttaaaagtt

SEQ ID NO: 154276 - DNA, 120 bp, Artificial Sequence
  ENSG00000106028_17 (sequence is synthesized)
taatttaaaaaattatccaagttaaataatcctttcctaatcttctccagtagatttttgtgtgccccaaatgagacattgttattataaatctctgtgtaagatttatgaggtctagct

SEQ ID NO: 154277 - DNA, 120 bp, Artificial Sequence
  ENSG00000106028_18 (sequence is synthesized)
tgtctgagcactcaaatgacatttccagaatcatgacacaggttctcattagcagtttgattctatagtatgttgtactcatatctttattttcttatctgccctctgctcctaagttta

SEQ ID NO: 154278 - DNA, 120 bp, Artificial Sequence
  ENSG00000106028_19 (sequence is synthesized)
gtgataggattagatagccaacagcaccctggggattggtgtttatttgattggtggacttctgctttttatattaacagtactgccacttcaaaaatgtttctctgatagaatggctag

SEQ ID NO: 154279 - DNA, 120 bp, Artificial Sequence
  ENSG00000106028_20 (sequence is synthesized)
ctctctgagctctgaattcagtgatgtgtactcccatctttacaggagctcttgaaattaaggaggcagcagagggcttcgggaaagcagtagcattggtgtcaagggccctgggtcctt

SEQ ID NO: 154280 - DNA, 120 bp, Artificial Sequence
  ENSG00000106028_21 (sequence is synthesized)
gagatcacttgccacatacttcctgcaggagcttgggcaggtgatgcagtctctctgaggtgttttctcagccctaaatgggaataattttacataacttgtagatttagttttagaatt

SEQ ID NO: 154281 - DNA, 120 bp, Artificial Sequence
  ENSG00000106028_22 (sequence is synthesized)
gataatagataaatcccttagctgatattcagtaatgattgctgctattatgtggtagtgactacctttgctgacagtgatgtgactttgacttggacagtcgagtctttgtgtttaatc

SEQ ID NO: 154282 - DNA, 120 bp, Artificial Sequence
  ENSG00000106028_23 (sequence is synthesized)
tgctcgggttagatcgtcaggaaaagcctaaagattagactgtaagaaaagaaaatagaagccatgtttcgaagacctgtattacagctaatgaaagctggattttgaaaatacttggca

SEQ ID NO: 154283 - DNA, 120 bp, Artificial Sequence
  ENSG00000106028_24 (sequence is synthesized)
tcatcagtcgtgcggaggaccgcgtgatttccttccagttctcctcggttttcaggtggtggcgccatcttcggaaaagcctaaagattagactgtaagaaaagaaaatagaagccatgt

SEQ ID NO: 154284 - DNA, 120 bp, Artificial Sequence
  ENSG00000106028_25 (sequence is synthesized)
tagaccttttttgatgcactaaaaacaggaaatttcctatgaaatatttataaaaactgtattaggctaagctcactactgaagctgtttaatttttgcaatagccttgtgaagtaggta

SEQ ID NO: 154285 - DNA, 120 bp, Artificial Sequence
  ENSG00000106028_26 (sequence is synthesized)
ttatgtatcataatttttgcttattttaaaatgaaacactttagattagtcatattaggtatcctaattccttttaaggtctgaaggagcaaccaggggaaggcagtttcatagacacag

SEQ ID NO: 154286 - DNA, 120 bp, Artificial Sequence
  ENSG00000106028_27 (sequence is synthesized)
ggaatctgactttggaatatgttcctgttgctgtgtcagaaagtcattcatgtgattagttttagaatgtattgttttgttggaatgtaacctatctctcgttctctaaaccagcagacc

SEQ ID NO: 154287 - DNA, 120 bp, Artificial Sequence
  ENSG00000106028_28 (sequence is synthesized)
aaccagcagaccccaacctttttggcactgataactggtttcatggaagacaatttttccatggaggaggggggtgccgtggggatggtttcaagatgaaactgttccacctcagatcat

SEQ ID NO: 154288 - DNA, 74 bp, Artificial Sequence
  ENSG00000106028_29 (sequence is synthesized)
agttagattctcataaggagtgcacaccctagatccctcgcatgagcggtttataatggggttcttcttggtca

SEQ ID NO: 154289 - DNA, 120 bp, Artificial Sequence
  ENSG00000106028_30 (sequence is synthesized)
tgcttgctcgctgcttgctgctcacctcctgctgtgcagccaggttcctaacaggccacagaactctactagtcctcagccctggaggttggggactctcctctaactggctgttcgtta

SEQ ID NO: 154290 - DNA, 120 bp, Artificial Sequence
  ENSG00000106028_31 (sequence is synthesized)
tgcctgagagtaaggctttgcatttattccacacctcctgacacttgtttgatcattgcatatgttattaatgaatctacttattaaattattaattataaagcatctcttttaactctc

SEQ ID NO: 154291 - DNA, 120 bp, Artificial Sequence
  ENSG00000106028_32 (sequence is synthesized)
ctttggtctaatgatggattaaatcagtacccatgttggatctaaatttcttaatttctaaagtctactgtaaccaaaatacagtagtaatataccagttgtttatactaaaaaaaaaaa

SEQ ID NO: 154292 - DNA, 120 bp, Artificial Sequence
  ENSG00000106028_33 (sequence is synthesized)
caatcatagctggtaagaagcttgtgaaaatagctgtttttttctttttctccttttcttttttaaaagcttggctacactgtaactaactagggttaagagtaccagtacttatgagtt

SEQ ID NO: 154293 - DNA, 120 bp, Artificial Sequence
  ENSG00000106028_34 (sequence is synthesized)
aacttttgaataaagcctaaaactgaattatccatcccagtacttattgttgagaattacaaaaactctgaatgtattgtcttttggaaggatctagccctaaccaggaagaagcgtatg

SEQ ID NO: 154294 - DNA, 120 bp, Artificial Sequence
  ENSG00000106028_35 (sequence is synthesized)
ccaagataagaattacactaatgtgagtgtgcagatttattcggaacctctttggtacttagtatgtgaaatttctatttgaaattaagatttttttaattttattttttttgagccaga

SEQ ID NO: 154295 - DNA, 62 bp, Artificial Sequence
  ENSG00000106028_36 (sequence is synthesized)
gcctcctgagtagctaggattataggtgcgtgccacaccacctggctaatttttgtaatttt

SEQ ID NO: 154296 - DNA, 120 bp, Artificial Sequence
  ENSG00000106028_37 (sequence is synthesized)
acaggcatgagccactgtgcccagccaagaagtttttaattttctctttttttgtttttgttttgagacagggtctccctctgtcaaccaggctggagtgcaatggtgtgatcacagctt

SEQ ID NO: 154297 - DNA, 120 bp, Artificial Sequence
  ENSG00000106028_38 (sequence is synthesized)
cacagcttactgcagcctctacctccccaggctcaggtgatcttcccacctcagccttctcccaagtagctgggacaacaggtgtacaccatcatgcctggctaatttgtcaattttttt

SEQ ID NO: 154298 - DNA, 120 bp, Artificial Sequence
  ENSG00000106031_0 (sequence is synthesized)
atgcggctcgggctatgacagcctccgtgctcctccacccccgctggatcgagcccaccgtcatgtttctctacgacaacggcggcggcctggtggccgacgagctcaacaagaacatgg

SEQ ID NO: 154299 - DNA, 80 bp, Artificial Sequence
  ENSG00000106031_1 (sequence is synthesized)
acaagaacatggaaggggcggcggcggctgcagcagcggctgcagcggcggcggctgccggggccgggggcgggggcttc

SEQ ID NO: 154300 - DNA, 80 bp, Artificial Sequence
  ENSG00000106031_2 (sequence is synthesized)
cctgatggcgcacccggcgcccttggcgccaggagccgcgtccgcctacagcagcgcccccggggaggcgcccccgtcgg

SEQ ID NO: 154301 - DNA, 80 bp, Artificial Sequence
  ENSG00000106031_3 (sequence is synthesized)
gccgccgcgtcgtcctcgggaggtcccggcccggcgggcccggcgggcgcagaggccgccaagcaatgcagcccctgctc

SEQ ID NO: 154302 - DNA, 120 bp, Artificial Sequence
  ENSG00000106031_4 (sequence is synthesized)
gctcggcagcggcgcagagctcgtcggggcccgcggcgctgccctatggctacttcggcagcggctactacccgtgcgcccgcatgggcccgcaccccaacgccatcaagtcgtgcgcgc

SEQ ID NO: 154303 - DNA, 120 bp, Artificial Sequence
  ENSG00000106031_5 (sequence is synthesized)
agcccgcctcggccgccgccgccgccgccttcgcggacaagtacatggataccgccggcccagctgccgaggagttcagctcccgcgctaaggagttcgccttctaccaccagggctacg

SEQ ID NO: 154304 - DNA, 120 bp, Artificial Sequence
  ENSG00000106031_6 (sequence is synthesized)
cagccgggccttaccaccaccatcagcccatgcctggctacctggatatgccagtggtgccgggcctcgggggccccggcgagtcgcgccacgaacccttgggtcttcccatggaaagct

SEQ ID NO: 154305 - DNA, 120 bp, Artificial Sequence
  ENSG00000106031_7 (sequence is synthesized)
accagccctgggcgctgcccaacggctggaacggccaaatgtactgccccaaagagcaggcgcagcctccccacctctggaagtccactctgcccgacgtggtctcccatccctcggatg

SEQ ID NO: 154306 - DNA, 120 bp, Artificial Sequence
  ENSG00000106031_8 (sequence is synthesized)
ccagctcctataggagggggagaaagaagcgcgtgccttataccaaggtgcaattaaaagaacttgaacgggaatacgccacgaataaattcattactaaggacaaacggaggcggatat

SEQ ID NO: 154307 - DNA, 120 bp, Artificial Sequence
  ENSG00000106031_9 (sequence is synthesized)
cagccacgacgaatctctctgagcggcaggtcacaatctggttccagaacaggagggttaaagagaaaaaagtcatcaacaaactgaaaaccactagttaatggattaaaaatagagcaa

SEQ ID NO: 154308 - DNA, 120 bp, Artificial Sequence
  ENSG00000106031_10 (sequence is synthesized)
gaaggcaacttgaagaaacgcttcagaactcgttgctttgcccagataatgataataatgcttaataataattgaagaatgggaaagagaaagagacagagactggcattttcctctccc

SEQ ID NO: 154309 - DNA, 120 bp, Artificial Sequence
  ENSG00000106031_11 (sequence is synthesized)
gaaggagatctctttctctttaatggaatctacaactgttttaaaactttaagaaaggtaaagactgccagttcttccgccaaccccatcagcccagcccgttaaatgtcaaacgtcaac

SEQ ID NO: 154310 - DNA, 120 bp, Artificial Sequence
  ENSG00000106031_12 (sequence is synthesized)
ccccaaaatacgcaatttcagataagttacgcagttactgaaatcttgtaagtatttaagtgatcgttacattttaggacactgcgttagatggtaataatctggaagttggttacaaac

SEQ ID NO: 154311 - DNA, 120 bp, Artificial Sequence
  ENSG00000106031_13 (sequence is synthesized)
gcaagaggccattgtaaacatctgcttgtccttcttaggtcgccattccctttgcatgttaagcgtctgctcaggtaaatcttagtgaaattcctaccgttgttgtacgttctgcaaaac

SEQ ID NO: 154312 - DNA, 120 bp, Artificial Sequence
  ENSG00000106031_14 (sequence is synthesized)
attttatgtatagatttagaggggaaacgagaaggtactgaaataatgatcttggaatatttgctgtgaagggagaaagggagagaaaactcttctgaggatcatttgtcttggtagtat

SEQ ID NO: 154313 - DNA, 120 bp, Artificial Sequence
  ENSG00000106031_15 (sequence is synthesized)
agtaaaaccaaccagctgaacctttcaggctacaagagaacccgggtcggtaatgtctttttaagaataatttttaattgcttataacaagcatattttgtggcatttgaactatattta

SEQ ID NO: 154314 - DNA, 120 bp, Artificial Sequence
  ENSG00000106031_16 (sequence is synthesized)
ctgctccaatatccgttattttccaaaggattttgtatctttttgaaaatgtttacatcatcagatgatccacagaattcactttatgtgagatctcccgagagtttccatcccaacatg

SEQ ID NO: 154315 - DNA, 120 bp, Artificial Sequence
  ENSG00000106031_17 (sequence is synthesized)
atggactttggtttgaacacaattcgttttttcatttgaattggcatttcccaatatttgctaaacatttgctggagaaatcatttttcttttttcttttttagaaaactcagaatgaaa

SEQ ID NO: 154316 - DNA, 120 bp, Artificial Sequence
  ENSG00000106031_18 (sequence is synthesized)
attcattcccctgaaatatttaggtgtctatattctatattttgatctattaagggattagtatttttccatgtttattgtgttatcagagtgcattagaaagattagtgattcatcttc

SEQ ID NO: 154317 - DNA, 120 bp, Artificial Sequence
  ENSG00000106031_19 (sequence is synthesized)
acagcacatttttaatcaagcagttatttcaaccagcacattcgttttgttcatattcactatagaatgatatcttgtaaataaagacattcagcacactgtgaaaatgtatttgtgcac

SEQ ID NO: 154318 - DNA, 120 bp, Artificial Sequence
  ENSG00000106031_20 (sequence is synthesized)
tgccattaaaatctgcagaaaatactctttactttcctatgctaaatgtgcactgcacagaaagaaaaggagcaggtttatcttatataaaccaaggaccattctttattattattcagt

SEQ ID NO: 154319 - DNA, 120 bp, Artificial Sequence
  ENSG00000106031_21 (sequence is synthesized)
acttcttttgctaccaaatttttaagaaaagggagaaatccctcataactaaaatcctaaaaaatgataagtgcttcaaggagattaaagtgtcaggtattacaaaagggagagaaaaga

SEQ ID NO: 154320 - DNA, 120 bp, Artificial Sequence
  ENSG00000106031_22 (sequence is synthesized)
aaggaggaagagatagtatgaattcccaggctccctgtggaaaatgaaaaccagttgttttgtagcagcaatgcctaggctgtcgtattttaaaatctgctgttgggtctgcatgtgtct

SEQ ID NO: 154321 - DNA, 120 bp, Artificial Sequence
  ENSG00000106031_23 (sequence is synthesized)
gagagggcaggttttgatatttgttgaaatgacaggactacgaaaggccttaaaccttgaccttgacgaaaaaaaagacaatttgtgaccttgacttttgacagctcatgaattggcctt

SEQ ID NO: 154322 - DNA, 120 bp, Artificial Sequence
  ENSG00000106031_24 (sequence is synthesized)
agctggattagtagatcaagggcgccacctcgcgttgacaagcctccttgtaattcttcaaccaagggaatcaagagctcttacctccttgactttagagattcagtactcaattatttg

SEQ ID NO: 154323 - DNA, 120 bp, Artificial Sequence
  ENSG00000106031_25 (sequence is synthesized)
gctccagctggagcaaatttgaatatatgtaaattatacatgtccctgtatatatgtaaatatatataatatgtgtacacatgtatacatttgcatattagtgcttgtgtgtgcttgtat

SEQ ID NO: 154324 - DNA, 120 bp, Artificial Sequence
  ENSG00000106031_26 (sequence is synthesized)
atatatttgtagaatctgtacagatatcatatcattaattgctaatgacgcaagatattgtaatttaaggtgatttctagaattgaggtacaaaatgtactttacaagatgaagccttgt

SEQ ID NO: 154325 - DNA, 120 bp, Artificial Sequence
  ENSG00000106031_27 (sequence is synthesized)
tccttttctctaatggccaaatttgatttgtcttcacagtggcttgctctgcatcagatttctgcagatctgctttaaagctgtacatttttgttacagtctaagatgtgttcttaaatc

SEQ ID NO: 154326 - DNA, 120 bp, Artificial Sequence
  ENSG00000106031_28 (sequence is synthesized)
accattccttcctggtcctcaccctccagggtggtctcacactgtaattagagctattgaggagtctttacagcaaattaagattcagatgccttgctaagtctagagttctagagttat

SEQ ID NO: 154327 - DNA, 120 bp, Artificial Sequence
  ENSG00000106031_29 (sequence is synthesized)
gtttcagaaagtctaagaaacccacctcttgagaggtcagtaaagaggacttaatatttcatatctacaaaatgaccacaggattggatacagaacgagagttatcctggataactcaga

SEQ ID NO: 154328 - DNA, 120 bp, Artificial Sequence
  ENSG00000106031_30 (sequence is synthesized)
gctgagtactgctccagggtggtgtgcaatcttatattgatgcttgtgaatctgccatttgatttgtaggataaataaatatgtttaatattaacaacttccatcaaaactataataata

SEQ ID NO: 154329 - DNA, 120 bp, Artificial Sequence
  ENSG00000106031_31 (sequence is synthesized)
atattatatctactgttgacctctaacaacaatcaggtgctgtattcagagtcataaagaatacatatgtatgtttgtatatttaatatacacataggataatgtgtttttgtcaaatct

SEQ ID NO: 154330 - DNA, 120 bp, Artificial Sequence
  ENSG00000106031_32 (sequence is synthesized)
atgctatgcgcatatgtattaaaatgttggtggaatcagtagccgtgggatgcagaattgtgagatgcaggctaattttatctttacgttagaggaaagtaatagtgaatggaagaacca

SEQ ID NO: 154331 - DNA, 120 bp, Artificial Sequence
  ENSG00000106031_33 (sequence is synthesized)
gattcatcattttatggaaaataatattgattggttacaaaagtggctgccggaaacctctccaacctctcctgaggactcacaacttctttatagatgagaattacgaaagagtctcta

SEQ ID NO: 154332 - DNA, 120 bp, Artificial Sequence
  ENSG00000106031_34 (sequence is synthesized)
aagctgtctcaaaaacaggctggtgttgaaacatacatatcgaaaggtctcgagaaattcaattatattttgctgccctgaggattttcactccacttgtggaaacaaatgataatgttg

SEQ ID NO: 154333 - DNA, 120 bp, Artificial Sequence
  ENSG00000106031_35 (sequence is synthesized)
cttcagacccacctctccacctcttgttccaaacagtactccatttccaaatgagctgccatcaagccaaagtaacaactttctcccaaaatgtttaaagtggtggaaaatcccctcaaa

SEQ ID NO: 154334 - DNA, 120 bp, Artificial Sequence
  ENSG00000106031_36 (sequence is synthesized)
gctggatcaaactgtgtgtttaagaacagctccaaaagggactcttctgttgacaggggatatttttctttagatgtaagaaatattctgagcctcgagcctaggaaggaggccaacagc

SEQ ID NO: 154335 - DNA, 120 bp, Artificial Sequence
  ENSG00000106031_37 (sequence is synthesized)
agctctccagccgggatcccgcccctttcgaaagccatcaccactacaggaaccctgggtaaagtagtagccttctttttttctctctctagtttttgaaactgtaatgacagaagacat

SEQ ID NO: 154336 - DNA, 120 bp, Artificial Sequence
  ENSG00000106031_38 (sequence is synthesized)
ttcagggttgttgtggggattttttccccccagttctaaaatggtcattgatagtgtcgatcttacctaactctcctcctatttaaaatttctgtggatctaccagataacctaaagtgg

SEQ ID NO: 154337 - DNA, 120 bp, Artificial Sequence
  ENSG00000106031_39 (sequence is synthesized)
gcatggattatttattatggctcctttaatgcccaaatagcaatcagtctaaaaccttaaaacaaaaacaaaaacaaaaacaaaaatcaaggagagaccagccacctcctgaaaaatagg

SEQ ID NO: 154338 - DNA, 120 bp, Artificial Sequence
  ENSG00000106031_40 (sequence is synthesized)
aataatagtatcagccactgacccatggataatgttgttgaaagcctgattaaagtatttttttctaaaaagaaaactcttcctgaattaagaaaataaaaatgggactttaaaaaaaaa

SEQ ID NO: 154339 - DNA, 120 bp, Artificial Sequence
  ENSG00000106034_0 (sequence is synthesized)
ctctgctcccgccgggcgtgcagcgggcgcgcgcgcgtgtgtttatgtgtctgtgtgcgtgtgtgtgtgtgtctctctctgtgtgtgtgtgagatgaattggagtcatacgactgggtgt

SEQ ID NO: 154340 - DNA, 120 bp, Artificial Sequence
  ENSG00000106034_1 (sequence is synthesized)
ttccttccgagtggttttcatcagcaatccattaggaaatcatggaaactttttttttcctggctaaaaggatgaaaactgagtcatccacttttgactgtcatccatggaagagctctt

SEQ ID NO: 154341 - DNA, 120 bp, Artificial Sequence
  ENSG00000106034_2 (sequence is synthesized)
attaaaagcctcagactttcgggacctatgattctttggcacaaccttttggaaaattcttaagcagggatgaagcaaacttgattggagttggggaaaaagaagacagattagtatttt

SEQ ID NO: 154342 - DNA, 120 bp, Artificial Sequence
  ENSG00000106034_3 (sequence is synthesized)
tcatgctgacaaaaaatagctgctatgacttttcccgcaacgtggacaggggccaagtgaagctgaactggtcatggtctgtcgcccagtgttcccttgtcgtcggcgattttgcccccg

SEQ ID NO: 154343 - DNA, 120 bp, Artificial Sequence
  ENSG00000106034_4 (sequence is synthesized)
acccttcttggtgggcttagtggtggcaatctgtctcttctaccagactctgaccctccgagggtcgaggaagctcacagccgctgcccctggggctgtcccacacacatccactgaaac

SEQ ID NO: 154344 - DNA, 120 bp, Artificial Sequence
  ENSG00000106034_5 (sequence is synthesized)
ccaggcaagcagatgcaagaaaggattctctcaggacaaacagtgcttccttctctctggtaatgcccaggaaaccagaaaggtcaaagaatcaatggagacacactttggcagccatgg

SEQ ID NO: 154345 - DNA, 120 bp, Artificial Sequence
  ENSG00000106034_6 (sequence is synthesized)
ccgaagggccatactctacaggcctcctttctacagcaaaacagagcttcagctacaccagcacattctgactcaacatggctatacggttgtcatcgctgaagaaaggctcaatgctgg

SEQ ID NO: 154346 - DNA, 120 bp, Artificial Sequence
  ENSG00000106034_7 (sequence is synthesized)
cctagggccggggctactagaacaaggtgatctgggctcttgggatctgctcatttgcctgtcttctaagaaagcagaaggaacaccctgtatatccaaggaagtcatgtgccagttagg

SEQ ID NO: 154347 - DNA, 120 bp, Artificial Sequence
  ENSG00000106034_8 (sequence is synthesized)
tttacatcaaaaggcaaacagattaccagaaatacagcagccactttgcagaaaggaaggattatgtcaaatagttagaagattcccagaactgcaacttccagtgagtccctctgtgtg

SEQ ID NO: 154348 - DNA, 120 bp, Artificial Sequence
  ENSG00000106034_9 (sequence is synthesized)
tctggatcagggaatgcaattaaagccgagtacttcgagtcaccttttaaaaacagtgaagccacgtgtgtggaaaccaggggactggagtcgtgaacagctgaatgaaacgacagtcct

SEQ ID NO: 154349 - DNA, 120 bp, Artificial Sequence
  ENSG00000106034_10 (sequence is synthesized)
tgctccacatgaaacaatctttcgagccgaagatctatctgtgattcttaaagcgtatgtgttggtgacgtccttaacccctttgcgtgcattcattcattcgacgggcacagtttggaa

SEQ ID NO: 154350 - DNA, 120 bp, Artificial Sequence
  ENSG00000106034_11 (sequence is synthesized)
tccaccaaagaaaaaacgcttcactgtcaagctgcaaacattttttgagacattcctgagagccagttcacctcaacaggcttttgacattatgaaggaagcaattggcaaactactgct

SEQ ID NO: 154351 - DNA, 120 bp, Artificial Sequence
  ENSG00000106034_12 (sequence is synthesized)
agcggctgaagtattcagtgaaacatctactctgggaccaaagaccttccatagatgcagattctgctttcaacttctaacttttgatattggttatggcagtttcatgtaccctgtagt

SEQ ID NO: 154352 - DNA, 120 bp, Artificial Sequence
  ENSG00000106034_13 (sequence is synthesized)
gctccaggtacacgagcatttaaattttcaagattatgataatatggattttgaggaccaaaatacagaagaattccttttaaatgacactttcaattttctcttccctaatgaatcatc

SEQ ID NO: 154353 - DNA, 120 bp, Artificial Sequence
  ENSG00000106034_14 (sequence is synthesized)
actttccatattttctgagatatttcagagactttatagatcagatgttttcaagggtgaaaactatcaaaaggaactaaatcagtgtctgtccttagaagaaattaactcaattatgac

SEQ ID NO: 154354 - DNA, 120 bp, Artificial Sequence
  ENSG00000106034_15 (sequence is synthesized)
tttcataaaggaacttggaagtctgggacaattccaactgctcttcccatctactactcctgggattcagtcactgatgcatgaattttatgatgtggcaaatcctgtgggaaatcctgg

SEQ ID NO: 154355 - DNA, 120 bp, Artificial Sequence
  ENSG00000106034_16 (sequence is synthesized)
ctcagtcctgacccaatactggtctcttttaaatgtatttgaacaatttcagttcatgaataaaaagacacagccacatccactggaatggaattctttcacagaagataagaacattga

SEQ ID NO: 154356 - DNA, 120 bp, Artificial Sequence
  ENSG00000106034_17 (sequence is synthesized)
aaaaccacaagtgccatttgatgcaatagaaaataaaaaagctgcagttccacaaattaaaaatgaaaataaagaaatacattgcagtgatgatgaaaacacaccatgtcatatcaagca

SEQ ID NO: 154357 - DNA, 120 bp, Artificial Sequence
  ENSG00000106034_18 (sequence is synthesized)
gatcttcacacatccacatttggaactaaatcctgactttcatccaaagatcaaagattattactgtgaagtcccatttgatgtggtaacagtgacaattggagtggaaactcctaagtg

SEQ ID NO: 154358 - DNA, 120 bp, Artificial Sequence
  ENSG00000106034_19 (sequence is synthesized)
tctgtgcaaggtgcacctgtacgagcaggcagggccaagctttgccagctaccctctgggcttaggaatgaacaaaatctcaatatttgttgtggatgaatctccagcacacggtgagac

SEQ ID NO: 154359 - DNA, 120 bp, Artificial Sequence
  ENSG00000106034_20 (sequence is synthesized)
tctgatcacgtacaaactcaccatctatagagaagaccgcccaagtctgcccttgtttgaggccttcacagcatgtggttttgtgcaggattgtggtttgctgattcatccagaggaaac

SEQ ID NO: 154360 - DNA, 120 bp, Artificial Sequence
  ENSG00000106034_21 (sequence is synthesized)
ctgtgggttacagcctatttcttctgactacattgaagccattttacagtctgaactaaaaagatgtccatctggggacatgaaaggccagtggattgtgccttgccttagttgttcgga

SEQ ID NO: 154361 - DNA, 120 bp, Artificial Sequence
  ENSG00000106034_22 (sequence is synthesized)
aataacctggcagccccacaactgccaatatggtgtcctaactaagcctcaactccagcagtgcctgggaggaaggaagattctgttcattggagattcaaccaacagagggatcatgta

SEQ ID NO: 154362 - DNA, 120 bp, Artificial Sequence
  ENSG00000106034_23 (sequence is synthesized)
ctatcttattgaaaggctgaatgaaacgttgcaggaatggcagaaagtacatggcactaaattctatcacaacgtcaatggtgggaagactttgatcagttattcctactatccccagtt

SEQ ID NO: 154363 - DNA, 120 bp, Artificial Sequence
  ENSG00000106034_24 (sequence is synthesized)
ctggataagcccttcattgagaccaacatttgaaaatgcacttgaacacctcttgcaaagatcacgtcccctagagaatactggccagactgtattggttgttggtggtgttcagtggct

SEQ ID NO: 154364 - DNA, 120 bp, Artificial Sequence
  ENSG00000106034_25 (sequence is synthesized)
taattccaatcacctgcaaattattcacaaagttttgaagagggaaaatttactcaatatcctagtgatcatcaaaactttgggaattggatttcatctgccagtggatggagtacattt

SEQ ID NO: 154365 - DNA, 120 bp, Artificial Sequence
  ENSG00000106034_26 (sequence is synthesized)
cttaacacagagtgaagtacagaacttatggaaagaaaatttgattattctggatactgcaaaaaaacatggctatgaagtagttgacacattcactataacaatggggcgttacaaaga

SEQ ID NO: 154366 - DNA, 120 bp, Artificial Sequence
  ENSG00000106034_27 (sequence is synthesized)
gtttctacaggggaagtgtggatgtcatttccatgaggtagtgaaatcaaagttatccaaagaatataactttattaaaatgaaaagatcaagaaatcatatcatgggaagatatttcag

SEQ ID NO: 154367 - DNA, 120 bp, Artificial Sequence
  ENSG00000106034_28 (sequence is synthesized)
caatcaaagcaaactacaacaaggcactgtaacaaattttcgatcgccatatcatgtcagaggtccaataaatcaggtttgttctgaaatccttctcagcaggatgtgtgcaaataaaag

SEQ ID NO: 154368 - DNA, 120 bp, Artificial Sequence
  ENSG00000106034_29 (sequence is synthesized)
gactatgtaggctccctgcaggagagctgaatctggagctggagacgagctagtcacccggacaatggtctaggagccaagcgctgcacatcgcacacatttgggatcgaccacacacac

SEQ ID NO: 154369 - DNA, 120 bp, Artificial Sequence
  ENSG00000106034_30 (sequence is synthesized)
ttgtgcacaccagcacatgcatgcacaccagtacacacacagttaaataatgataacacttcttacagctttatgaattcaagatgtgaccttgaacaccagtccatttcacagtgaaag

SEQ ID NO: 154370 - DNA, 120 bp, Artificial Sequence
  ENSG00000106034_31 (sequence is synthesized)
atatacctagagaaacgttacttgaagcataattattaaccagaaccactgtgggccaggtatggcattgtgataataaagagaaatatagacacttaaaattatgtgaaaaaaaggata

SEQ ID NO: 154371 - DNA, 120 bp, Artificial Sequence
  ENSG00000106034_32 (sequence is synthesized)
atgctctttcatgttgtcttaccatatctataggtacatcaatattgaaaaggagaaaaaccaatgacattccactggcaagtagaagttgtcctttcattctttaccaggagaaaatgt

SEQ ID NO: 154372 - DNA, 120 bp, Artificial Sequence
  ENSG00000106034_33 (sequence is synthesized)
gatgtttatgatggcttaggctttgtgaatctaatgcttatgaaaaacatttcttcctatactttttaaattttattactgaaaggaaaagaacaggaatgttccacaagggaatttgaa

SEQ ID NO: 154373 - DNA, 120 bp, Artificial Sequence
  ENSG00000106034_34 (sequence is synthesized)
gagattctgtgagagagatatgaaatattttatagttaaaacaccaatatattcaactttacacttcttgtgtttttcataaacattccctcttgtcttatctgtgtacttcgatgggta

SEQ ID NO: 154374 - DNA, 120 bp, Artificial Sequence
  ENSG00000106034_35 (sequence is synthesized)
actgcagtctgaattaatgaaatatgtaattttaaagtaagtaacaaaatgtagttcctcatgtattactgtactatgtttcattgatgatattacttaaatcttgtgtttgccattaca

SEQ ID NO: 154375 - DNA, 120 bp, Artificial Sequence
  ENSG00000106034_36 (sequence is synthesized)
gccctatgtaacttaaaattacaattatattttatgtaaatattttgcaaaggactatgcattctgaaatgcataggtgctttttcccaccaagcatttgcatatgtccacaaatagtat

SEQ ID NO: 154376 - DNA, 120 bp, Artificial Sequence
  ENSG00000106034_37 (sequence is synthesized)
tatgttactagtatctatattttgattttcctgagcaactgtatcaaatccaaatttagattagacaaaaaattattattttaattaaactgtggcatacatataatacatacctaatta

SEQ ID NO: 154377 - DNA, 120 bp, Artificial Sequence
  ENSG00000106034_38 (sequence is synthesized)
tagtagtgagaactatttcttttatctctttaggttcaaaatggtgaatttctttattatatgaatgctttgttgtgagataacatcacactgttacaatggattttagaggtttgtctt

SEQ ID NO: 154378 - DNA, 120 bp, Artificial Sequence
  ENSG00000106034_39 (sequence is synthesized)
ttttgggtggggtgggaagctgagagggttaattcaatacatggctgaaattaccaaatgtataaatacctcattttcactaccatacaagaaaaaaacacctattttgattgatcagtt

SEQ ID NO: 154379 - DNA, 80 bp, Artificial Sequence
  ENSG00000106034_40 (sequence is synthesized)
atacaagaaaaaaacacctattttgattgatcagttcttttgtatgaatatccacctcctttaaatactctatttttata

SEQ ID NO: 154380 - DNA, 120 bp, Artificial Sequence
  ENSG00000106034_41 (sequence is synthesized)
tcacttgatataaacaatacaaatctgcatcttacagatgataatttttttagaagaatgatacagaattaactttaaaaataaaacttttctaatatacacttaaatgcaaacatcatt

SEQ ID NO: 154381 - DNA, 120 bp, Artificial Sequence
  ENSG00000106034_42 (sequence is synthesized)
aattttcagtgatttttttaatgacataaaacgttaccaatgtgtgcagcctctccatcatgttttaacatactgtatactctatagcagtattacagtcagtatttcatataattttct

SEQ ID NO: 154382 - DNA, 120 bp, Artificial Sequence
  ENSG00000106034_43 (sequence is synthesized)
ttagacctaactgttaccatctgactgaggttactctggtatttatctcttcgctgctgaaataataatggattttagaaacaattgtaataatatcattaataaatgtcttactagtaa

SEQ ID NO: 154383 - DNA, 78 bp, Artificial Sequence
  ENSG00000106034_44 (sequence is synthesized)
attttccctttcacttggccctcattcgctcctgcctgccaccatgtaaggcaaacagattaccagaaatacagcagc

SEQ ID NO: 154384 - DNA, 120 bp, Artificial Sequence
  ENSG00000106034_45 (sequence is synthesized)
caatccagtcatcctgggaccctaaatgacctccctgccccacccctgcacataaacctgacttgaatcacctggactatttttctgagagagtaataaactttaattgggtttgaccta

SEQ ID NO: 154385 - DNA, 120 bp, Artificial Sequence
  ENSG00000106034_46 (sequence is synthesized)
ttccaagttttttgggctatctgttacagtgcttagcttatctcacctaatacagggactatgcaaccaagaaactggaaataaaaacaaagataattaaaccattttataataagccta

SEQ ID NO: 154386 - DNA, 120 bp, Artificial Sequence
  ENSG00000106034_47 (sequence is synthesized)
aaaactaaatgaagggaagcatacaaaaggctgaaagcaagactgctttaaaaccggaggaaaattgaggaactgctaaggcaacctggcctgagttcagctgtgcaacaggcactttgg

SEQ ID NO: 154387 - DNA, 120 bp, Artificial Sequence
  ENSG00000106034_48 (sequence is synthesized)
gttttaatcttttgcgttcttcaatgctgttttcagactccagatatactttggtattgttttctctcttcctgcaaagctgaggcagagtcggactcctttactgtgagttgaaagatg

SEQ ID NO: 154388 - DNA, 120 bp, Artificial Sequence
  ENSG00000106034_49 (sequence is synthesized)
tgagaataaggcattgctggaagcaacagtttggcagcctggggtacactcaggttattcgttacaactattattatttgatgtctttttttaaactcaggtcatccacttttgactgtc

SEQ ID NO: 154389 - DNA, 120 bp, Artificial Sequence
  ENSG00000106034_50 (sequence is synthesized)
agatgcaagaaaggattctctcaggacaaacagtgcttccttctctctggtaatgcccaggaaaccagaaaggttgagttttttggcttctcagggcagccactagagaagctcgcccct

SEQ ID NO: 154390 - DNA, 120 bp, Artificial Sequence
  ENSG00000106034_51 (sequence is synthesized)
gggtgggggtcgtcctgcaggtgcaaaggtgaagtggactctccttttcaatcagtactgtgagtaggagcttccaggtctgtgcttcagagacagtgaaaacgctgtccttagtttgat

SEQ ID NO: 154391 - DNA, 120 bp, Artificial Sequence
  ENSG00000106034_52 (sequence is synthesized)
gaccatcaaggaagagcccaagaggagattggcgcagttgtcagctaaacctgctcctgcaaaagtggaagcgaagctgaaaaaggcagcagcgaaggataaatcttcaggcaaaaatgt

SEQ ID NO: 154392 - DNA, 120 bp, Artificial Sequence
  ENSG00000106034_53 (sequence is synthesized)
gcaaacaaaagggaaaaggagagcaaagggaaaacaggccaaagtggcaaaccaagaaactaaagaagatttacctgcagaaaacggggaaatgaaaactgaggagagtccagcctctga

SEQ ID NO: 154393 - DNA, 120 bp, Artificial Sequence
  ENSG00000106034_54 (sequence is synthesized)
tgaagcaggagagaaagaaaccaagtctgattaatacagtataccatgtcttaccagcagtccctgactcccctcttgtacaatccagaggaatatttttaccaattattttgtaaatgc

SEQ ID NO: 154394 - DNA, 120 bp, Artificial Sequence
  ENSG00000106034_55 (sequence is synthesized)
tttttagtagctctagaaacatttttaagaaggagggaatcccacctcctcccattttttaaatgtaaatgccttttttttttttagaggtaaaatcatttgctggttgtttattttttt

SEQ ID NO: 154395 - DNA, 120 bp, Artificial Sequence
  ENSG00000106034_56 (sequence is synthesized)
ttttggcacaaccagaaaatagtgtgggatattgaattatgggaggctttgactgtctcgggtgtcagcttaacattccatagatgggggttagtttttatatcctataaaacaaagcat

SEQ ID NO: 154396 - DNA, 120 bp, Artificial Sequence
  ENSG00000106034_57 (sequence is synthesized)
attaaatggaaatatgaagtcagtcctgcatttaatgtcttgaacattttaaattacttctatgcccttgctgttttttagtagaattgttttccaaagaaaaccactccttgatcctgg

SEQ ID NO: 154397 - DNA, 120 bp, Artificial Sequence
  ENSG00000106034_58 (sequence is synthesized)
cttctccctgtcagaattgtgtgcactctgtaagatctgtggttgtggtagtcctgttttcctaataacgttgttatgctgtgaaagattaaaaatttgaatatgtagtgtatatgctat

SEQ ID NO: 154398 - DNA, 120 bp, Artificial Sequence
  ENSG00000106034_59 (sequence is synthesized)
tcagttgtgaattggtgaaatgtatgtaacagcttatcaacatgtgaagatattgatagccccttaaggaaaatttgcttccaaattttaagctggaaagtcgctggaataactttaaaa

SEQ ID NO: 154399 - DNA, 120 bp, Artificial Sequence
  ENSG00000106034_60 (sequence is synthesized)
aagaattacaatacgtggctttttagattttcggtatgtatgttaagaattgtgtacaagtttaagtgtctgtactgatccacatccaataaaatctcaattatgaaagaaaaaaaaaaa

SEQ ID NO: 154400 - DNA, 120 bp, Artificial Sequence
  ENSG00000106034_61 (sequence is synthesized)
ttttgctacccagcagagcagcagagccaacacaatgtgcaggagaattgggtcttcctagcttctgacagcatccagagaagtttctgattgtggtttgctgattcatccagaggaaac

SEQ ID NO: 154401 - DNA, 120 bp, Artificial Sequence
  ENSG00000106038_0 (sequence is synthesized)
agaggcggtgcggcacagaggagcgctcgcttcacaaggtgaccctagctcccaccgccaccgccgcggtcgcggtccagaccgcgctccagcagctccgcgccctcccaggcacccggc

SEQ ID NO: 154402 - DNA, 120 bp, Artificial Sequence
  ENSG00000106038_1 (sequence is synthesized)
ctttctttctccctcttgcaaccaagatccgtccggccgctggagacccagggagccggggttaggaactcacttggggctttcccctcccccaccggagagccccgggatggagagccg

SEQ ID NO: 154403 - DNA, 120 bp, Artificial Sequence
  ENSG00000106038_2 (sequence is synthesized)
aaaggacatggttgtgtttctggatgggggtcagcttggcactctggttggcaagagagtctcaaatttgtccgaagccgtgggcagcccgctgccggagccgcccgagaaaatggtgcc

SEQ ID NO: 154404 - DNA, 120 bp, Artificial Sequence
  ENSG00000106038_3 (sequence is synthesized)
gaaaatggtgccccgtggttgcctgagccctcgggccgtccctccggccacccgggagcgcggcgggggaggcccggaggaggagccggtagatggactcgcaggcagcgcggcggggcc

SEQ ID NO: 154405 - DNA, 120 bp, Artificial Sequence
  ENSG00000106038_4 (sequence is synthesized)
ccaggtagctggggcggccatgctcggcccaggacccccggccccctcagtcgacagcctctccggacaggggcaacccagtagctcggacaccgagtcggatttctatgaagaaatcga

SEQ ID NO: 154406 - DNA, 120 bp, Artificial Sequence
  ENSG00000106038_5 (sequence is synthesized)
ggtgagctgcaccccggactgcgccaccgggaacgccgagtaccagcacagcaaagggtccggctccgaggcgctggtcggcagtccgaacggagggagcgagacccccaagagcaacgg

SEQ ID NO: 154407 - DNA, 120 bp, Artificial Sequence
  ENSG00000106038_6 (sequence is synthesized)
cggcagtggtgggggcggctcgcaaggcaccctggcgtgcagcgccagtgaccagatgcgtcgttaccgcaccgccttcacccgagagcagattgcgcggctggagaaggaattctaccg

SEQ ID NO: 154408 - DNA, 120 bp, Artificial Sequence
  ENSG00000106038_7 (sequence is synthesized)
ggagaactacgtatccaggccgcggagatgtgagctggcggccgccctaaacctgccggaaaccaccatcaaggtgtggttccagaaccggcgcatgaaggacaagcggcagcgcctggc

SEQ ID NO: 154409 - DNA, 120 bp, Artificial Sequence
  ENSG00000106038_8 (sequence is synthesized)
catgacgtggccgcacccggcggaccccgccttctacacttacatgatgagccatgcggcggccgcgggcggcctgccctaccccttcccatcgcacctgcccctgccctactactcgcc

SEQ ID NO: 154410 - DNA, 120 bp, Artificial Sequence
  ENSG00000106038_9 (sequence is synthesized)
ggtgggcctgggcgccgcatccgccgcctccgccgccgcctcgcccttcagcggctcgctgcgcccgctcgacacgttccgcgtgctgtcgcagccctacccgcggcccgaactgctgtg

SEQ ID NO: 154411 - DNA, 120 bp, Artificial Sequence
  ENSG00000106038_10 (sequence is synthesized)
gcacggactgggcgcctctgccggcggcccctgctcctgcctcgcctgtcacagcggcccggccaacgggctggcgccccgggctgccgccgcctcggacttcacctgtgcctccacctc

SEQ ID NO: 154412 - DNA, 120 bp, Artificial Sequence
  ENSG00000106038_11 (sequence is synthesized)
tggaccagagggaggaggtgcccctcactagataaggggccgccggctggctgccggctccatgacgcccgtggggtcaccccccggccccgggactcagccagcctcgctcctcgctcc

SEQ ID NO: 154413 - DNA, 120 bp, Artificial Sequence
  ENSG00000106038_12 (sequence is synthesized)
tcgctcctcgcccctaggacgccaagggggaaaggagagggcggaaaaggaccagcgggatccggccgcaagaattggaaagcctaggaagtggcggtggctggcgcgtttggggagcag

SEQ ID NO: 154414 - DNA, 120 bp, Artificial Sequence
  ENSG00000106038_13 (sequence is synthesized)
gagtggggatagggaagcagagcttgagagaccttcctccggggcagcctccggacccaccgccccccaccagggtcgaggctgtagctccaaagctaaacaaaacttagcagcaacagc

SEQ ID NO: 154415 - DNA, 120 bp, Artificial Sequence
  ENSG00000106038_14 (sequence is synthesized)
aaccaatatccagtccctcggcccctcggcccctcaccctccacctcacactcccttctcaccgggccccctctccccagccaaggcccaagcactggaaagggaaattgctgtctctct

SEQ ID NO: 154416 - DNA, 120 bp, Artificial Sequence
  ENSG00000106038_15 (sequence is synthesized)
gaacaaaatgctgtgtatgcagagcaggtagagattaatctttgccagcttttccaaggcatgacaaggggctggtggatggcaacataccagtcatttggaggagagagtgagagatga

SEQ ID NO: 154417 - DNA, 120 bp, Artificial Sequence
  ENSG00000106038_16 (sequence is synthesized)
tttactaccagggagaatccagccccttggcatgggacctggagcctcgactacacagcatcttctgggtctggcgtctgccagcacctgatctctttcctcattcccagctttgtgaca

SEQ ID NO: 154418 - DNA, 120 bp, Artificial Sequence
  ENSG00000106038_17 (sequence is synthesized)
cttctcaacttgcggctccatctctccctgcccccacttttttgttggccagggaggctgcagatgccccaggagccctttgccgcttctatgaggccaagccttttttccctgggccca

SEQ ID NO: 154419 - DNA, 120 bp, Artificial Sequence
  ENSG00000106038_18 (sequence is synthesized)
gcacacaccctgattagcaagtgatgtgtgcgaggagggtttgtgaatgttgaatgtgtaataatgatcaccatggagctggccactgaccccagagctgagctgttaacaaggcgccca

SEQ ID NO: 154420 - DNA, 120 bp, Artificial Sequence
  ENSG00000106038_19 (sequence is synthesized)
gggaagagcttagggagtgggaacttcacctccctctctcggtatctggcggtaaattagaggcaattttcatcctttgcttgttcaccttcacttcaccaggaactttctggccctacc

SEQ ID NO: 154421 - DNA, 120 bp, Artificial Sequence
  ENSG00000106038_20 (sequence is synthesized)
ctttgcattgggtattttacaactttctctcattttcttcccaagctaccactggagcttgactttcagataccagtgggagccttctgtcccttttggggaccctgtctgtggcctcca

SEQ ID NO: 154422 - DNA, 120 bp, Artificial Sequence
  ENSG00000106038_21 (sequence is synthesized)
ccagggtttgtttagagccactcccaaatcctcactcccacactcatccttgcagccagtttttgaggaagaggagaacgtgtaaccccaatgcaagcttcaccctgactgagagggagt

SEQ ID NO: 154423 - DNA, 120 bp, Artificial Sequence
  ENSG00000106038_22 (sequence is synthesized)
ggttcttcctgtagggaatgaatttggtttgatttggggttttcctttgaagcccaaagaacttgctgttatgattcgttaaccatattgcaataaaagctggacataattctcacttta

SEQ ID NO: 154424 - DNA, 120 bp, Artificial Sequence
  ENSG00000106038_23 (sequence is synthesized)
tgggaacttcacctccctctctcggtatctggcggcttctcccgcttggttgcttccattattccccaactgcggaaacaccagccaccatatgtccgccggagaataagcgtgagtgtc

SEQ ID NO: 154425 - DNA, 120 bp, Artificial Sequence
  ENSG00000106038_24 (sequence is synthesized)
aaggtgtccagacggatggcattctcaaagtagggatcttagcatcctctccatacatcatcacccaagaatggtagaggaaagagtaggagtggggttacagataggagagaaaggagg

SEQ ID NO: 154426 - DNA, 120 bp, Artificial Sequence
  ENSG00000106038_25 (sequence is synthesized)
ttgaggccacaaaattggcatttctctaattatcaaccccctcctccaccatcctgccaccatttgttatggcaaagttctctttctgtgccccttccctaataaagaaatcctcagtca

SEQ ID NO: 154427 - DNA, 120 bp, Artificial Sequence
  ENSG00000106038_26 (sequence is synthesized)
cggacaccgagtcggatttctatgaagaaatcgagcctccttcccataaccctcagaacaacctggactccactcacatatactaagggtccggctccgaggcgctggtcggcagtccga

SEQ ID NO: 154428 - DNA, 120 bp, Artificial Sequence
  ENSG00000106049_0 (sequence is synthesized)
gtgggcgagccagccagtcccgctgcacacgctcgcagtctgtgggccctccgggaggcggcggaggtcaccgcggggagaggggcgggcgcagcatggcagcctccttacggctcctcg

SEQ ID NO: 154429 - DNA, 120 bp, Artificial Sequence
  ENSG00000106049_1 (sequence is synthesized)
gagctgcctccggtctccggtactggagccggcggctgcggccggcagccggcagctttgcagcggtgtgttctaggtcagtggcttcaaagactccagttggattcattggactgggca

SEQ ID NO: 154430 - DNA, 120 bp, Artificial Sequence
  ENSG00000106049_2 (sequence is synthesized)
acatggggaatccaatggcaaaaaatctcatgaaacatggctatccacttattatttatgatgtgttccctgatgcctgcaaagagtttcaagatgcaggtgaacaggtagtatcttccc

SEQ ID NO: 154431 - DNA, 120 bp, Artificial Sequence
  ENSG00000106049_3 (sequence is synthesized)
cagcagatgttgctgaaaaagctgacagaattattacaatgctgcccaccagtatcaatgcaatagaagcttattccggagcaaatgggattctaaaaaaagtgaagaagggctcattat

SEQ ID NO: 154432 - DNA, 120 bp, Artificial Sequence
  ENSG00000106049_4 (sequence is synthesized)
taatagattccagcactattgatcctgcagtttcaaaagaattggccaaagaagttgagaaaatgggagcagttttcatggatgcccctgtttctggtggtgtaggagctgcacgatctg

SEQ ID NO: 154433 - DNA, 120 bp, Artificial Sequence
  ENSG00000106049_5 (sequence is synthesized)
ggaacctcacgtttatggtgggaggagttgaagatgaatttgctgctgcccaagagttgctggggtgcatgggctccaacgtggtgtactgtggagctgttgggactgggcaggcggcaa

SEQ ID NO: 154434 - DNA, 120 bp, Artificial Sequence
  ENSG00000106049_6 (sequence is synthesized)
agatctgcaacaacatgctgttagctattagtatgattggaactgctgaagctatgaatcttggaatcaggttagggcttgacccaaaactactggctaaaatcctaaatatgagctcag

SEQ ID NO: 154435 - DNA, 120 bp, Artificial Sequence
  ENSG00000106049_7 (sequence is synthesized)
gtggatttggaacaacactcatggctaaggatctgggattggcacaagactctgctaccagcacaaagagcccaatccttcttggcagtctggcccatcagatctacaggatgatgtgtg

SEQ ID NO: 154436 - DNA, 120 bp, Artificial Sequence
  ENSG00000106049_8 (sequence is synthesized)
caaagggctactcaaagaaagacttctcatccgtgttccagttcctacgagaggaggagaccttctgagtgtgccctttggccacggacactgttgggaaccaaactctgtcttggagcc

SEQ ID NO: 154437 - DNA, 120 bp, Artificial Sequence
  ENSG00000106049_9 (sequence is synthesized)
tccttttagctcactccacaagtaaatggatttaatcaaaggtcacctatctgcttttgattgtctaggtcacagtaatccctaggatttttcaccgcttattctttttgtctttttaac

SEQ ID NO: 154438 - DNA, 120 bp, Artificial Sequence
  ENSG00000106049_10 (sequence is synthesized)
aaacatattatccgaattttttttctgcaagccactgatagtctctgctaactagcttaattgacctttttacaaagtttgatccccaagcatcctcaactaaatcattgaatacttcaa

SEQ ID NO: 154439 - DNA, 120 bp, Artificial Sequence
  ENSG00000106049_11 (sequence is synthesized)
tcaggatattatctgctttactttacaaataaaaccaaatcttttgtcaacaggatgaaacccatcttaaaggaaagaaaaggaattggtgtgaagagagaagttagagaagggaaatgc

SEQ ID NO: 154440 - DNA, 120 bp, Artificial Sequence
  ENSG00000106049_12 (sequence is synthesized)
agtgaattactatctgtgtccatcaggaagtttgtcctgttaaccaaatggttactgcactaccagggttactggtttattttccagggagctgataaagcaggagaactgttgctgcat

SEQ ID NO: 154441 - DNA, 120 bp, Artificial Sequence
  ENSG00000106049_13 (sequence is synthesized)
gttttctatttggactccgtcacaatatggtaggatatccctcaccaactcccgacactcagcagacttgtttttatatttttttctttcttgttcattcttactacgtattttttgact

SEQ ID NO: 154442 - DNA, 120 bp, Artificial Sequence
  ENSG00000106049_14 (sequence is synthesized)
tacgtattttttgacttaagaatgacatctttagatgcatttcagagccaatgatgatatttgctttagataattattatattattataaatatagccatattattttgaattcaaataa

SEQ ID NO: 154443 - DNA, 120 bp, Artificial Sequence
  ENSG00000106049_15 (sequence is synthesized)
tttctttagatttgttttagattttgagaatgaaaaatgaatatacattcaaataagtgacagcttcttagaagtatacccaatggagttgtaaacctaattcagtgttaattttatata

SEQ ID NO: 154444 - DNA, 120 bp, Artificial Sequence
  ENSG00000106049_16 (sequence is synthesized)
tatgtaatcattcatccaacatccagatttgcagtaaaggagagttctcgttagacattcaggggtatctattctttggcaggtgacttggaacattttgcacatttggtcagagggcct

SEQ ID NO: 154445 - DNA, 120 bp, Artificial Sequence
  ENSG00000106052_0 (sequence is synthesized)
gaagaggttcggcggctgatggcggatcaggatcggaagcctgcgtaactttctcccttgatccgggagtctttccactggattcacaatgacatcctttcaagaagtcccattgcagac

SEQ ID NO: 154446 - DNA, 120 bp, Artificial Sequence
  ENSG00000106052_1 (sequence is synthesized)
ttccaactttgcccatgtcatctttcaaaatgtggccaagagttaccttcctaatgcacacctggaatgtcattacaccttaactccatatattcatccacatccaaaagattgggttgg

SEQ ID NO: 154447 - DNA, 120 bp, Artificial Sequence
  ENSG00000106052_2 (sequence is synthesized)
tatattcaaggttggatggagtactgctcgtgattattacacgtttttatggtcccctatgcctgaacattatgtggaaggatcaacagtcaattgtgtactagcattccaaggatatta

SEQ ID NO: 154448 - DNA, 120 bp, Artificial Sequence
  ENSG00000106052_3 (sequence is synthesized)
ccttccaaatgatgatggagaattttatcagttctgttacgttacccataagggtgaaattcgtggagcaagtacacctttccagtttcgagcttcttctccagttgaagagctgcttac

SEQ ID NO: 154449 - DNA, 120 bp, Artificial Sequence
  ENSG00000106052_4 (sequence is synthesized)
tatggaagatgaaggaaattctgacatgttagtggtgaccacaaaagcaggccttcttgagttgaaaattgagaaaaccatgaaagaaaaagaagaactgttaaagttaattgccgttct

SEQ ID NO: 154450 - DNA, 120 bp, Artificial Sequence
  ENSG00000106052_5 (sequence is synthesized)
ggaaaaagaaacagcacaacttcgagaacaagttgggagaatggaaagagaacttaaccatgagaaagaaagatgtgaccaactgcaagcagaacaaaagggtcttactgaagtaacaca

SEQ ID NO: 154451 - DNA, 120 bp, Artificial Sequence
  ENSG00000106052_6 (sequence is synthesized)
aagcttaaaaatggaaaatgaagagtttaagaagaggttcagtgatgctacatccaaagcccatcagcttgaggaagatattgtgtcagtaacacataaagcaattgaaaaagaaaccga

SEQ ID NO: 154452 - DNA, 120 bp, Artificial Sequence
  ENSG00000106052_7 (sequence is synthesized)
attagacagtttaaaggacaaactcaagaaggcacaacatgaaagagaacaacttgaatgtcagttgaagacagagaaggatgaaaaggaactttataaggtacatttgaagaatacaga

SEQ ID NO: 154453 - DNA, 120 bp, Artificial Sequence
  ENSG00000106052_8 (sequence is synthesized)
aatagaaaataccaagcttatgtcagaggtccagactttaaaaaatttagatgggaacaaagaaagcgtgattactcatttcaaagaagagattggcaggctgcagttatgtttggctga

SEQ ID NO: 154454 - DNA, 120 bp, Artificial Sequence
  ENSG00000106052_9 (sequence is synthesized)
aaaggaaaatctgcaaagaactttcctgcttacaacctcaagtaaagaagatacttgttttttaaaggagcaacttcgtaaagcagaggaacaggttcaggcaactcggcaagaagttgt

SEQ ID NO: 154455 - DNA, 120 bp, Artificial Sequence
  ENSG00000106052_10 (sequence is synthesized)
ctttctggctaaagaactcagtgatgctgtcaacgtacgagacagaacgatggcagacctgcatactgcacgcttggaaaacgagaaagtgaaaaagcagttagctgatgcagtggcaga

SEQ ID NO: 154456 - DNA, 120 bp, Artificial Sequence
  ENSG00000106052_11 (sequence is synthesized)
acttaaactaaatgctatgaaaaaagatcaggacaagactgatacactggaacacgaactaagaagagaagttgaagatctgaaactccgtcttcagatggctgcagaccattataaaga

SEQ ID NO: 154457 - DNA, 120 bp, Artificial Sequence
  ENSG00000106052_12 (sequence is synthesized)
atgccaaaggctccaaaaacaaataaacaaactttcagatcaatcagctaataataataatgtcttcacaaagaaaacggggaatcagcagaaagtgaatgatgcttcagtaaacacaga

SEQ ID NO: 154458 - DNA, 120 bp, Artificial Sequence
  ENSG00000106052_13 (sequence is synthesized)
cccagccacttctgcctctactgtagatgtaaagccatcaccttctgcagcagaggcagattttgacatagtaacaaaggggcaagtctgtgaaatgaccaaagaaattgctgacaaaac

SEQ ID NO: 154459 - DNA, 120 bp, Artificial Sequence
  ENSG00000106052_14 (sequence is synthesized)
agaaaagtataataaatgtaaacaactcttgcaggatgagaaagcaaaatgcaataaatatgctgatgaacttgcaaaaatggagctgaaatggaaagaacaagtgaaaattgctgaaaa

SEQ ID NO: 154460 - DNA, 120 bp, Artificial Sequence
  ENSG00000106052_15 (sequence is synthesized)
tgtaaaacttgaactagctgaagtacaggacaattataaagaacttaaaaggagtctagaaaatccagcagaaaggaaaatggaaggtcagaattcccagagtcctcaatgtttcaaaac

SEQ ID NO: 154461 - DNA, 120 bp, Artificial Sequence
  ENSG00000106052_16 (sequence is synthesized)
atgctcagagcaaaatggttatgttctcacattgtcaaatgcacaaccagttctgcaatatggtaatccttatgcatctcaggaaacaagagatggagcagatggtgctttttacccaga

SEQ ID NO: 154462 - DNA, 120 bp, Artificial Sequence
  ENSG00000106052_17 (sequence is synthesized)
tgaaatacaaaggccacctgtcagagtcccctcttggggactggaagacaatgttgtctgcagccagcctgctcgaaactttagtcggcctgatggcttagaggactctgaggatagcaa

SEQ ID NO: 154463 - DNA, 120 bp, Artificial Sequence
  ENSG00000106052_18 (sequence is synthesized)
agaagatgagaatgtgcctactgctcctgatcctccaagtcaacatttacgtgggcatgggacaggcttttgctttgattccagctttgatgttcacaagaagtgtcccctctgtgagtt

SEQ ID NO: 154464 - DNA, 120 bp, Artificial Sequence
  ENSG00000106052_19 (sequence is synthesized)
aatgtttcctcctaactatgatcagagcaaatttgaagaacatgttgaaagtcactggaaggtgtgcccgatgtgcagcgagcagttccctcctgactatgaccagcaggtgtttgaaag

SEQ ID NO: 154465 - DNA, 120 bp, Artificial Sequence
  ENSG00000106052_20 (sequence is synthesized)
gcatgtgcagacccattttgatcagaatgttctaaattttgactagttactttttattatgagttaatatagtttagcagtaaaaaaaaaaaaaaaaaccacacctaaaatagaccactg

SEQ ID NO: 154466 - DNA, 120 bp, Artificial Sequence
  ENSG00000106052_21 (sequence is synthesized)
aggagaccatagagcggatgctttcatgcaccctttactgcactttctgaccaggagctactttgagtttggtgttactaggatcagggtcagtctttggcttatcaataaattttaatc

SEQ ID NO: 154467 - DNA, 120 bp, Artificial Sequence
  ENSG00000106052_22 (sequence is synthesized)
tctgttaatcttacctgctttaaaaaaaagttcttgtgtgttcgtatctttatttattccctagtttgcagaactgtctgaataaaggatacaaggattatttcaatgttactgcactga

SEQ ID NO: 154468 - DNA, 120 bp, Artificial Sequence
  ENSG00000106052_23 (sequence is synthesized)
aaaacgtgtatgtattagtgtgctagattatttagcagaatattcacaagtttctgttgaccttgttgattgagcatgactactaaatattatgtaataaaaagcatttgtcataacagt

SEQ ID NO: 154469 - DNA, 120 bp, Artificial Sequence
  ENSG00000106052_24 (sequence is synthesized)
acggcaacagaagactatgatgaattcgaatgggacacatttgcttctgtggagttacgattcaaactgaatgtccaatataggaaggcaacatatacaacaagcaaaagtgattttaga

SEQ ID NO: 154470 - DNA, 120 bp, Artificial Sequence
  ENSG00000106052_25 (sequence is synthesized)
atagaaagttctataatttagcccatgaaatgataggtttttaattttcagaaatggagctgcatgtagaatgagatcacatgcttttatatgtgaaatattggttttagcaattaacag

SEQ ID NO: 154471 - DNA, 120 bp, Artificial Sequence
  ENSG00000106052_26 (sequence is synthesized)
aaggcatactttgctaattttatggcaaaattttagaataacctgaatgattatttttaaactatcttgaagttgtatgtatatatctaatgggaaaatggaacaagagatgtcagtata

SEQ ID NO: 154472 - DNA, 120 bp, Artificial Sequence
  ENSG00000106052_27 (sequence is synthesized)
attgttttcctattaaatgatctcataacaggggtgtttgtggcataaaaatcatagaatatatatcagtatcttttttacattttcctgatgagaatataaatttgaaatattctcagt

SEQ ID NO: 154473 - DNA, 120 bp, Artificial Sequence
  ENSG00000106052_28 (sequence is synthesized)
aagtgattaaaagtacaatacataaacccaaatcaaagtaatgtgtttcttcagttatgtctgtgctgtatagaactgtcactaacattaaagaaagaggacacatttttcaagatctgt

SEQ ID NO: 154474 - DNA, 120 bp, Artificial Sequence
  ENSG00000106052_29 (sequence is synthesized)
taaaagtataatggatacataatgtaaccaaaaaaaccctctaagttataagacatatgtggtgacaattgtttatttctggggataaaacgtgttggccaggagagatagttcctcttt

SEQ ID NO: 154475 - DNA, 120 bp, Artificial Sequence
  ENSG00000106052_30 (sequence is synthesized)
tattccaaaattagtctccattttaatcaagcatgcctgctgggcagctacaactccagactttcaaactggtctggttggatggcttataaaatctgtgacatttcttggcacttgttt

SEQ ID NO: 154476 - DNA, 120 bp, Artificial Sequence
  ENSG00000106052_31 (sequence is synthesized)
taaatctgttccatggtgtgaatcctatagtagttctagaggtcttctatttgaggtactgagtatataaactgttgaatatctgaaagattgttctgatgtatcatctataatttcatt

SEQ ID NO: 154477 - DNA, 120 bp, Artificial Sequence
  ENSG00000106052_32 (sequence is synthesized)
taaagttttgtaatggattctccatgtaataagcagagaccttcattttcttcataataggagaaatttattgcatttccattcttttataaaataatatgactagcttattacctattc

SEQ ID NO: 154478 - DNA, 120 bp, Artificial Sequence
  ENSG00000106052_33 (sequence is synthesized)
agaacatgttgaaagtcactggaaggtgtgcccgatgtgcagcgagcagttccctcctgactatgaccagcaggtgtttgaaagggttgctgaatgcttcccctgaaaaaaggtggctgt

SEQ ID NO: 154479 - DNA, 120 bp, Artificial Sequence
  ENSG00000106052_34 (sequence is synthesized)
tttcaaaatcagcaactgctggtgaggatttcttggcacagttatgaccagcatgttattgctgcatcttcctgataatctcagccgacaccgggggatggaaattgattgtgtggtgcc

SEQ ID NO: 154480 - DNA, 120 bp, Artificial Sequence
  ENSG00000106052_35 (sequence is synthesized)
ggtttgcggacacgaatctgtgttctgtgaccattcttagcgtgatactttatgccattcacattctgtggagaagacaaaaatatttattacatggattcacaggatacctgtcaaact

SEQ ID NO: 154481 - DNA, 120 bp, Artificial Sequence
  ENSG00000106052_36 (sequence is synthesized)
tcggaaacctcaatttgggtctggattgcagttcctggatggcagctgtttagagtgtagtcttttgcaaggactccagttgggacccttcaaggacattctggtgtgtcggtcatgggc

SEQ ID NO: 154482 - DNA, 120 bp, Artificial Sequence
  ENSG00000106052_37 (sequence is synthesized)
gtaccaaagttgaattagttagtgtctttacttagcaaaagccctaagaatgtaactgtctggtgtaggccacatgatattttatgtagacatttaaaagttattggttgttgtcttaac

SEQ ID NO: 154483 - DNA, 120 bp, Artificial Sequence
  ENSG00000106052_38 (sequence is synthesized)
ggagctgatggcactctctgtggtccaggactcatcgctgtccgactcctcatagtccacctcctcctcgtcatactcgctgcctgcaggacaagagaagtgcaaggactgtcaggagcg

SEQ ID NO: 154484 - DNA, 120 bp, Artificial Sequence
  ENSG00000106052_39 (sequence is synthesized)
ctcatctccccacaggttcacccggccacttccaggacaggagatgtggccgtggcagagcagcgctgacggcccagggagagggcactcccggcaccaggggactgcaaacacggctat

SEQ ID NO: 154485 - DNA, 120 bp, Artificial Sequence
  ENSG00000106052_40 (sequence is synthesized)
tcccttacaaccctggaagcaggagccctgcgttcccacctaagagaccagggcaagggcttcccaacaattcacagctaggagttggcggagcaagaacattaactcggttctatggca

SEQ ID NO: 154486 - DNA, 120 bp, Artificial Sequence
  ENSG00000106052_41 (sequence is synthesized)
acccagcctgtggctgcaaaggcacagggaagacttgctctggggccaaaaccaaaaataagcaacgatgacaggctcctcacactccccatgctagtgcctgacactcccaaatgagca

SEQ ID NO: 154487 - DNA, 120 bp, Artificial Sequence
  ENSG00000106052_42 (sequence is synthesized)
gaacactgtccccttagttttatgctttactggcctagtaaatgcagaagtctccaaggtcgggggttacgttttggacttttaaggcatttctacttcagtggaatgaatttcaggtct

SEQ ID NO: 154488 - DNA, 120 bp, Artificial Sequence
  ENSG00000106052_43 (sequence is synthesized)
ttttctttatagatttgagctgggaaatttggaactaaaagagggttaccctcacgctagggagcaagaggcatagaaggccaggaggtctaaggataaatcgccagcggcagaatgtgg

SEQ ID NO: 154489 - DNA, 120 bp, Artificial Sequence
  ENSG00000106052_44 (sequence is synthesized)
ggtagctcctggaagacgaagcgatcccctacacacgcagtactaggcaccgcatctgcccttcagctcatgcgacacttcctgctagggctgacccatcacagttacgcagctcagaca

SEQ ID NO: 154490 - DNA, 120 bp, Artificial Sequence
  ENSG00000106052_45 (sequence is synthesized)
ggaagcagggattctcttttattcctaagggctaagagctctgctgagaatcgaattgaaatacactctactgacttctttgcaagacggcagggatggagaaccacttcaacaggcagc

SEQ ID NO: 154491 - DNA, 120 bp, Artificial Sequence
  ENSG00000106052_46 (sequence is synthesized)
ctcttttgctcttttttaatgaggcccaaagccatttatttggagcttttgcacaatacaaccctgaaggacataattctaccgatcataaacagtgtaaaataatatgttgacaagtcc

SEQ ID NO: 154492 - DNA, 120 bp, Artificial Sequence
  ENSG00000106052_47 (sequence is synthesized)
taatgcatttacaagccccgtggaataaataggaattatagcacaacattaataagaattatatggtagcaattacagttgtgaaattcatcccccaggtgtgaggctacattgcaccag

SEQ ID NO: 154493 - DNA, 120 bp, Artificial Sequence
  ENSG00000106052_48 (sequence is synthesized)
gggcctgcctgggtgcttcaggggcttactctgctacatcaattatttcaacaccaaatattggcacttttattgggtttcattttaataggcattaataagattgtttgaagagccagt

SEQ ID NO: 154494 - DNA, 120 bp, Artificial Sequence
  ENSG00000106052_49 (sequence is synthesized)
tgcgccaggaacagggacgccggcatctgaggctcaaagttgaaaggagccaggaaggaaggaagggacctgaagtttactcagtgcctatgatgtttcaggcacactctgtgcattatc

SEQ ID NO: 154495 - DNA, 120 bp, Artificial Sequence
  ENSG00000106052_50 (sequence is synthesized)
tcatttaatcctccagtaaccctaggaggtggggattactgtcaccgttatacacacgagcaactgagccctcgtgaggttaaaacgcgcatgtgttctgaactcaccattaagggacgg

SEQ ID NO: 154496 - DNA, 120 bp, Artificial Sequence
  ENSG00000106052_51 (sequence is synthesized)
tgtgctttttccctcattgcttcccagcccccagtgccaggctcttctgaggggttcccttttaatctcctttgagttgctggctcttcaccatttaatactgagatggaattcgaagca

SEQ ID NO: 154497 - DNA, 120 bp, Artificial Sequence
  ENSG00000106052_52 (sequence is synthesized)
tgaagctttggagctaaatgtgggtttcaataaattctgctgtacttggccatagctccctaaataaagagagccggtttggaaacgcttgtaccaagtgacacagtggtaccacttggc

SEQ ID NO: 154498 - DNA, 120 bp, Artificial Sequence
  ENSG00000106052_53 (sequence is synthesized)
cacgttgcttggggtctgtcctggagcaaatcttgaaatctgtttttaagtagggcattgtttaagacattttactcttaaacaaatgccacatgctggcgtcctttaacttgcttgtta

SEQ ID NO: 154499 - DNA, 120 bp, Artificial Sequence
  ENSG00000106052_54 (sequence is synthesized)
gaaaactataaatgctatttcgcaaagctcctccagcgggacttcagaaagttagaaagactaatttatccatctaattgggctaatttgttaacctgaataccaagagccatgaaacat

SEQ ID NO: 154500 - DNA, 120 bp, Artificial Sequence
  ENSG00000106052_55 (sequence is synthesized)
ttagaatggggggagggtggggcacctcagaccaactgggggattaatgaagcccaacagaagagaaaacttcaaaactccactggatcaaaagcgatcagcccgaggcgttgaagcagc

SEQ ID NO: 154501 - DNA, 120 bp, Artificial Sequence
  ENSG00000106052_56 (sequence is synthesized)
ctacactgtctgcgtctcagggggaaggcacgtggtatccagccccaggcagggcaggaaggggacacacagcttaccctgcaagttggaacacttctgagagggaaaggtagtgtaggc

SEQ ID NO: 154502 - DNA, 120 bp, Artificial Sequence
  ENSG00000106052_57 (sequence is synthesized)
cgacaggtggtaagttggaactatcccaggcaaggtgggacacacaccactcggcagcagcttaccaccaagtccttgggtgaaactagtcatctccctcggttgcgacaagatggactt

SEQ ID NO: 154503 - DNA, 120 bp, Artificial Sequence
  ENSG00000106052_58 (sequence is synthesized)
ttgtttatatacttaattttgtcctctgacagagaacatcaacacagacctgggttcatgcctttgctttcgttaggtgaaggacaagccacttggcttttattttctctttcatgaaac

SEQ ID NO: 154504 - DNA, 120 bp, Artificial Sequence
  ENSG00000106052_59 (sequence is synthesized)
aggcacaagtctcttccttgcaggttgaatttaaagatcagaatgagtgtgtatagaatacctgggataggaggacctccatagagtatgcactgaaaacatggaaggcagtgtaagcaa

SEQ ID NO: 154505 - DNA, 120 bp, Artificial Sequence
  ENSG00000106052_60 (sequence is synthesized)
tgccatctttgtaatcatattacatattccatataaaataagatgatctttagaaaggcctgttgtgaaaccaaacaaaataattccaaaagggttgggaatccctactagaaaaaacac

SEQ ID NO: 154506 - DNA, 120 bp, Artificial Sequence
  ENSG00000106052_61 (sequence is synthesized)
aagagagactccaggaccagacaggccccatctgctttaagctcagagaaggagcaaagcacactccagcccccacctccaagaggctacagaggccaggagggagcgcagctggggctc

SEQ ID NO: 154507 - DNA, 120 bp, Artificial Sequence
  ENSG00000106052_62 (sequence is synthesized)
agagcactgtgagcccaggcaagtgacgccacctctctgagcttcaaattgctcatctgtaaaatgggcgaacgcctgtgtgcactaaggctgttgtgaagaataactgagttcctgttt

SEQ ID NO: 154508 - DNA, 120 bp, Artificial Sequence
  ENSG00000106052_63 (sequence is synthesized)
ttaggactctggacaaaatgcctggcccatggtaggccttagagtagcacatggtaagaaaataaacaaaatgctatgtgagctgtttatctcatttactgttgccttgctctctcttga

SEQ ID NO: 154509 - DNA, 120 bp, Artificial Sequence
  ENSG00000106052_64 (sequence is synthesized)
gaacagtcccctttttaaaccagaggaacatgctggggttctactacagcttttcttactgtaccccaaatgctccccttttattaaccaggcgtccacagcaccaggcggcagccagag

SEQ ID NO: 154510 - DNA, 120 bp, Artificial Sequence
  ENSG00000106052_65 (sequence is synthesized)
ggcctgcggtgggcagcgtaggggctgcgggactcgagtcacaggcgctcagatgctggcacccattcgcgtccctgacagggcgtggggtgtcctgcagaaaacttttgaggccaaaac

SEQ ID NO: 154511 - DNA, 120 bp, Artificial Sequence
  ENSG00000106052_66 (sequence is synthesized)
acaaccgctgttagtctcctttcaaacattttggaactctagaaagaaataccctaaaactaagtcaccaaagcccctgggccagcctctgtcctctgctttatccatttcctcatgttt

SEQ ID NO: 154512 - DNA, 120 bp, Artificial Sequence
  ENSG00000106052_67 (sequence is synthesized)
tcccacaagaggaaaataaatcccaagctcgttcattcatcttcaattgctgcttcagctgctatctctcaacactcactgcagaatgaacaaatccccagcagtctccacacctttgct

SEQ ID NO: 154513 - DNA, 120 bp, Artificial Sequence
  ENSG00000106052_68 (sequence is synthesized)
agggaactccttccccattcctggaaagcaggaggtagcaaagctgcttctcctagcaacaccctcccaagcttttactcctgcacttcaattaataaaaatcacgagcactgccccgac

SEQ ID NO: 154514 - DNA, 120 bp, Artificial Sequence
  ENSG00000106052_69 (sequence is synthesized)
aatagaatcagagggcattagaactgaaaagctcctaggagctttcagtgaacaaaacttcatagccaaaaaagcacacgactgggccaggagttcagagacagtcttggtgctcagggg

SEQ ID NO: 154515 - DNA, 120 bp, Artificial Sequence
  ENSG00000106052_70 (sequence is synthesized)
tttgcagccctagccgtgtggtcactcccttgcttctctggctatttccttatctataaaatgagtgggctagtttaggccgactgagacgcagacagggatacggtactgtccatggac

SEQ ID NO: 154516 - DNA, 120 bp, Artificial Sequence
  ENSG00000106066_0 (sequence is synthesized)
gtgactgggtggggctgcctcacttctgcctgatttgggaagcgctgcaaggacaaccggctggggtccttgcgcgccgcggctcagggaggagcaccgactgcgccgcaccctgagaga

SEQ ID NO: 154517 - DNA, 120 bp, Artificial Sequence
  ENSG00000106066_1 (sequence is synthesized)
tggttggtgccatgtggaaggtgattgtttcgctggtcctgttgatgcctggcccctgtgatgggctgtttcgctccctatacagaagtgtttccatgccacctaagggagactcaggac

SEQ ID NO: 154518 - DNA, 120 bp, Artificial Sequence
  ENSG00000106066_2 (sequence is synthesized)
agccattatttctcaccccttacattgaagctgggaagatccaaaaaggaagagaattgagtttggtcggccctttcccaggactgaacatgaagagttatgccggcttcctcaccgtga

SEQ ID NO: 154519 - DNA, 120 bp, Artificial Sequence
  ENSG00000106066_3 (sequence is synthesized)
ataagacttacaacagcaacctcttcttctggttcttcccagctcagatacagccagaagatgccccagtagttctctggctacagggtgggccgggaggttcatccatgtttggactct

SEQ ID NO: 154520 - DNA, 120 bp, Artificial Sequence
  ENSG00000106066_4 (sequence is synthesized)
ttgtggaacatgggccttatgttgtcacaagtaacatgaccttgcgtgacagagacttcccctggaccacaacgctctccatgctttacattgacaatccagtgggcacaggcttcagtt

SEQ ID NO: 154521 - DNA, 120 bp, Artificial Sequence
  ENSG00000106066_5 (sequence is synthesized)
ttactgatgatacccacggatatgcagtcaatgaggacgatgtagcacgggatttatacagtgcactaattcagtttttccagatatttcctgaatataaaaataatgacttttatgtca

SEQ ID NO: 154522 - DNA, 120 bp, Artificial Sequence
  ENSG00000106066_6 (sequence is synthesized)
ctggggagtcttatgcagggaaatatgtgccagccattgcacacctcatccattccctcaaccctgtgagagaggtgaagatcaacctgaacggaattgctattggagatggatattctg

SEQ ID NO: 154523 - DNA, 120 bp, Artificial Sequence
  ENSG00000106066_7 (sequence is synthesized)
atcccgaatcaattatagggggctatgcagaattcctgtaccaaattggcttgttggatgagaagcaaaaaaagtacttccagaagcagtgccatgaatgcatagaacacatcaggaagc

SEQ ID NO: 154524 - DNA, 120 bp, Artificial Sequence
  ENSG00000106066_8 (sequence is synthesized)
gacttaacaagtgatccttcttacttccagaatgttacaggatgtagtaattactataactttttgcggtgcacggaacctgaggatcagctttactatgtgaaatttttgtcactccca

SEQ ID NO: 154525 - DNA, 120 bp, Artificial Sequence
  ENSG00000106066_9 (sequence is synthesized)
gaggtgagacaagccatccacgtggggaatcagacttttaatgatggaactatagttgaaaagtacttgcgagaagatacagtacagtcagttaagccatggttaactgaaatcatgaat

SEQ ID NO: 154526 - DNA, 120 bp, Artificial Sequence
  ENSG00000106066_10 (sequence is synthesized)
aattataaggttctgatctacaatggccaactggacatcatcgtggcagctgccctgacagagcgctccttgatgggcatggactggaaaggatcccaggaatacaagaaggcagaaaaa

SEQ ID NO: 154527 - DNA, 120 bp, Artificial Sequence
  ENSG00000106066_11 (sequence is synthesized)
aaagtttggaagatctttaaatctgacagtgaagtggctggttacatccggcaagcgggtgacttccatcaggtaattattcgaggtggaggacatattttaccctatgaccagcctctg

SEQ ID NO: 154528 - DNA, 120 bp, Artificial Sequence
  ENSG00000106066_12 (sequence is synthesized)
agagcttttgacatgattaatcgattcatttatggaaaaggatgggatccttatgttggataaactaccttcccaaaagagaacatcagaggttttcattgctgaaaagaaaatcgtaaa

SEQ ID NO: 154529 - DNA, 120 bp, Artificial Sequence
  ENSG00000106066_13 (sequence is synthesized)
aacagaaaatgtcataggaataaaaaaattatcttttcatatctgcaagatttttttcatcaataaaaattatccttgaaacaagtgagcttttgtttttggggggagatgtttactaca

SEQ ID NO: 154530 - DNA, 120 bp, Artificial Sequence
  ENSG00000106066_14 (sequence is synthesized)
aaattaacatgagtacatgagtaagaattacattatttaacttaaaggatgaaaggtatggatgatgtgacactgagacaagatgtataaatgaaattttagggtcttgaataggaagtt

SEQ ID NO: 154531 - DNA, 120 bp, Artificial Sequence
  ENSG00000106066_15 (sequence is synthesized)
ttaatttcttctaagagtaagtgaaaagtgcagttgtaacaaacaaagctgtaacatctttttctgccaataacagaagtttggcatgccgtgaaggtgtttggaaatattattggataa

SEQ ID NO: 154532 - DNA, 120 bp, Artificial Sequence
  ENSG00000106066_16 (sequence is synthesized)
gaatagctcaattatcccaaataaatggatgaagctataatagttttggggaaaagattctcaaatgtataaagtcttagaacaaaagaattctttgaaataaaaatattatatataaaa

SEQ ID NO: 154533 - DNA, 120 bp, Artificial Sequence
  ENSG00000106066_17 (sequence is synthesized)
agcgctgcaaggacaaccggctggggtccttgcgcgccgcggctcagggaggagcaccgactgcgccgcgtaagtgccgcctgccctgcgtgggtcgtgccagctcagcgggacaggtcc

SEQ ID NO: 154534 - DNA, 120 bp, Artificial Sequence
  ENSG00000106066_18 (sequence is synthesized)
gctcctttcgcttttcgctcgctgcactccaagccccggaacacccgcgtccgcacactaagggcaccaccgctctcccacctctgcgctgtcagatgtcaggcgcggaggtgctctggg

SEQ ID NO: 154535 - DNA, 120 bp, Artificial Sequence
  ENSG00000106066_19 (sequence is synthesized)
caccgaggtgctggcgaaccaaacaagtatcaccccggacgcctgcccccattccgagagagcgggcgggatggccacaggctgcaatacagtgacacgatcacagctcactgctacagc

SEQ ID NO: 154536 - DNA, 120 bp, Artificial Sequence
  ENSG00000106066_20 (sequence is synthesized)
gcctcccaagcagctgggactacaggtgattttgatatgctgctaaggtttgataagagaaatgagattcagagaacagattatattgttgaagagcttgactggaaatgatccaaacgg

SEQ ID NO: 154537 - DNA, 120 bp, Artificial Sequence
  ENSG00000106066_21 (sequence is synthesized)
attgttgaagagcttgactggaaatgatccaaacggaaacattggctcttcctggggttccagcctgctgtcttgacaggaactataccatcagctctcctgggtctcttacatgccaag

SEQ ID NO: 154538 - DNA, 120 bp, Artificial Sequence
  ENSG00000106066_22 (sequence is synthesized)
tcatcctgcagatctgggactcactccgtaatcagcttgattgctgtaagttgaacacgtcagtggcatgggcaccagctgcacaaccctaggagccaccaaacacagtatattctatat

SEQ ID NO: 154539 - DNA, 120 bp, Artificial Sequence
  ENSG00000106066_23 (sequence is synthesized)
gtcagatgtcaggcgcggaggtgctctgggcaccgaggtgctggcgaaccaaacaagtatcaccccggacgcctgcccccattccgagagagcgggcgggatggccacagatccaaacgg

SEQ ID NO: 154540 - DNA, 120 bp, Artificial Sequence
  ENSG00000106066_24 (sequence is synthesized)
aaaagacttgactgcatgataagaagacaccagcatatgaggcacagcctcattcaaagaaccaaagatgatcagtactttgctcatagtggagagtggttactgaggtctggggaggtt

SEQ ID NO: 154541 - DNA, 120 bp, Artificial Sequence
  ENSG00000106066_25 (sequence is synthesized)
aaacaaagaaaatcaagtctgcgaggagcgagggtttgctcccctctgctccggatttgggtgtccagggtagcgggcgcggcacggcaaacaggtgattttgatatgctgctaaggttt

SEQ ID NO: 154542 - DNA, 120 bp, Artificial Sequence
  ENSG00000106066_26 (sequence is synthesized)
atctaatcactccatttcatccagactgagatagatggctcacatttttgttgttattgttttctgtaatccttgggtaaattttttttcccccactaggaagagaattgagtttggtcg

SEQ ID NO: 154543 - DNA, 120 bp, Artificial Sequence
  ENSG00000106066_27 (sequence is synthesized)
aaagaaaatcaagtctgcgaggagcgagggtttgctcccctctgctccggatttgggtgtccagggtagcgggcgcggcacggcaaacaggtcggggcgctctgcttcaccccaaccttc

SEQ ID NO: 154544 - DNA, 120 bp, Artificial Sequence
  ENSG00000106066_28 (sequence is synthesized)
gactcactctagttgaaagccctgggggaaggaacaaactctgcagcctgactgctgtgtttaatcccagctctcctctactagctggaagagaattgagtttggtcggccctttcccag

SEQ ID NO: 154545 - DNA, 120 bp, Artificial Sequence
  ENSG00000106069_0 (sequence is synthesized)
ttcttcctttgtgtgtgcgcgagcggagttggggcggagggagaagggggaggtcgctctgtctgtccgtctcccgccgcctctgcccggtctactcgaagtgcggcgggagaggcggga

SEQ ID NO: 154546 - DNA, 120 bp, Artificial Sequence
  ENSG00000106069_1 (sequence is synthesized)
gcccaggagagggtgcgggagctggcggggcggctcggagctgccaggacgccctggtcccagccgcgcacaggggagcgtggacggcagaggggctcggcgggagccgagatccgcccg

SEQ ID NO: 154547 - DNA, 120 bp, Artificial Sequence
  ENSG00000106069_2 (sequence is synthesized)
tcccggctgcccctcggcctccctctgctcccacctaccccctgacacccatagaaaagcgtgcaaaggcgcggagcgggacggaaaccacaaataaatagcggcggcggcagcgcgtca

SEQ ID NO: 154548 - DNA, 120 bp, Artificial Sequence
  ENSG00000106069_3 (sequence is synthesized)
tctggtggagcaggaagtgcaggcagagtccggaggctggtgctttctgcgcgtccccaggactttgccatgggctgggggccgcggaggctgcgagcggccgggcgagggcagcggcgg

SEQ ID NO: 154549 - DNA, 120 bp, Artificial Sequence
  ENSG00000106069_4 (sequence is synthesized)
cggcgtccgcaccggggctgagcgagcagcgacgcgaggggcgcgcggagatggcagcgtccagcaactccagcctgtccggctcgtcggtgtcctccgatgctgaagaataccagcctc

SEQ ID NO: 154550 - DNA, 120 bp, Artificial Sequence
  ENSG00000106069_5 (sequence is synthesized)
ctatatggaaatcatacttatatcagttacagcaagaggcacctcgtcccaagagaatcatttgtcctcgggaggtggaaaacagaccaaaatattatggaagagagtttcatgggatca

SEQ ID NO: 154551 - DNA, 120 bp, Artificial Sequence
  ENSG00000106069_6 (sequence is synthesized)
tctctcgggagcaggcggatgagcttcttggaggcgtggagggtgcctacatccttagagaaagccagcggcaaccaggatgctacacgctggctctcaggtttggaaaccagaccttaa

SEQ ID NO: 154552 - DNA, 120 bp, Artificial Sequence
  ENSG00000106069_7 (sequence is synthesized)
actacaggctcttccacgacgggaaacactttgtgggtgagaagaggtttgagtcgattcatgatctggtgacagatggcttgataacactgtacatagaaacaaaagctgccgagtaca

SEQ ID NO: 154553 - DNA, 120 bp, Artificial Sequence
  ENSG00000106069_8 (sequence is synthesized)
tttcaaaaatgacaactaaccccatctatgaacacattggatatgccaccctactcagagaaaaagtatccagaaggctgagcaggtctaaaaatgaaccaagaaaaacaaacgtcacac

SEQ ID NO: 154554 - DNA, 120 bp, Artificial Sequence
  ENSG00000106069_9 (sequence is synthesized)
atgaagaacacacagcggtggaaaagatctcctccctggttcgaagggctgccctcacacacaacgacaaccacttcaattatgagaagacacacaactttaaggtccacacgttccgag

SEQ ID NO: 154555 - DNA, 120 bp, Artificial Sequence
  ENSG00000106069_10 (sequence is synthesized)
gcccacactggtgtgaatattgtgccaatttcatgtgggggctcatcgcccaaggggtccggtgctcagactgtggattgaacgtacacaaacagtgttccaagcacgttcccaatgact

SEQ ID NO: 154556 - DNA, 120 bp, Artificial Sequence
  ENSG00000106069_11 (sequence is synthesized)
gccaacctgatctcaagaggatcaagaaagtgtactgttgtgacctcacaacacttgtgaaggctcacaacactcagagacccatggtggtagacatatgcattcgggaaattgaagcaa

SEQ ID NO: 154557 - DNA, 120 bp, Artificial Sequence
  ENSG00000106069_12 (sequence is synthesized)
gaggattaaaatcggaaggcctttacagagtctctgggttcactgaacacattgaagatgtcaaaatggcatttgacagagatggtgaaaaggccgatatatctgccaatgtctatccag

SEQ ID NO: 154558 - DNA, 120 bp, Artificial Sequence
  ENSG00000106069_13 (sequence is synthesized)
acataaacatcatcactggagcccttaaactgtatttcagagacttacccatccctgtcatcacatatgatacctattccaaatttatagatgcagcaaaaatctccaatgcagatgaga

SEQ ID NO: 154559 - DNA, 120 bp, Artificial Sequence
  ENSG00000106069_14 (sequence is synthesized)
gaaaccctccggtacctaatgatccacctcaaaaaggttactatgaatgaaaaagacaatttcatgaatgcagaaaatctggggatcgtgtttgggcccactctgatgaggccccctgag

SEQ ID NO: 154560 - DNA, 120 bp, Artificial Sequence
  ENSG00000106069_15 (sequence is synthesized)
gacagcaccctgaccaccctgcatgatatgcggtaccaaaagctgattgtgcagattttaatagaaaacgaagacgttttattctaatccatcagggaaatgagctgaatggccccagca

SEQ ID NO: 154561 - DNA, 120 bp, Artificial Sequence
  ENSG00000106069_16 (sequence is synthesized)
ccatccaagttgacacagctaaaggaataaaaacatttcttaccacttgatttgttttccaagcaagtgctagaatttcctggactgcagaggatcgctgagtggggtactgtgtctcat

SEQ ID NO: 154562 - DNA, 120 bp, Artificial Sequence
  ENSG00000106069_17 (sequence is synthesized)
agacatgcgccacctccacgtgagaacaagggtgaaggtgagggaagcccctcaccttgggtcttttgctgtgcctcctatgtatgtctggtttgctggaagagtgattaatacatcttt

SEQ ID NO: 154563 - DNA, 120 bp, Artificial Sequence
  ENSG00000106069_18 (sequence is synthesized)
aatttattaaaaaacaatgtagacctttaaacttcagtcttattggtaataaaagggaacttaattcatacaggtacttgatacagttatacattttccacttacaaaaagaagacaatt

SEQ ID NO: 154564 - DNA, 120 bp, Artificial Sequence
  ENSG00000106069_19 (sequence is synthesized)
ctgttaaatgaaacgtgtatcgtaaaatgtatttttattttacccacgagaatgttgttatttttagcaaatagaactcaatgcagtgcattggttattaccctgtgtaccttgtccctc

SEQ ID NO: 154565 - DNA, 120 bp, Artificial Sequence
  ENSG00000106069_20 (sequence is synthesized)
attttgctgtgacaccctgaaaaagctgaccacaaatgcagtattatcttgacatacctctgtcctcctcagtgctttttaatgaaatttcacctgccccttgtgttcctgctttggata

SEQ ID NO: 154566 - DNA, 120 bp, Artificial Sequence
  ENSG00000106069_21 (sequence is synthesized)
gtttttgctcttaagcattggcattcttctattgtatggtatgtatttatagcaattgtaggatggtctgaaatgtccacacactttctatgcatacaaattttgtgaattcccaaagta

SEQ ID NO: 154567 - DNA, 120 bp, Artificial Sequence
  ENSG00000106069_22 (sequence is synthesized)
tgctttggaattggtcatagtcttttcgtatcatgagtgtgtatcccagaagatacagaatgcggtcattttacctgaaattatttgagaacactggatgtatctggtctgtgtaaaaag

SEQ ID NO: 154568 - DNA, 120 bp, Artificial Sequence
  ENSG00000106069_23 (sequence is synthesized)
ttagcacttaccctcttttcttcctggccaagccctctgaattcatctgttaatatcaaattgtatttttgccacatttctgtattggtgaaaagcgaatctgcagaataactgtcaacg

SEQ ID NO: 154569 - DNA, 120 bp, Artificial Sequence
  ENSG00000106069_24 (sequence is synthesized)
tttttcattcttgttttacaaacctattttttaaagtgagaataaggttggtttttaccaaatatttgttcctccttgacaaaagtagctctgtgtggataatatgattttattactaca

SEQ ID NO: 154570 - DNA, 120 bp, Artificial Sequence
  ENSG00000106069_25 (sequence is synthesized)
gttccagtcacttggttatatttatcttagcatgagcctttcacaccaagatttctatattttgtaacataggtgaaatatttaaaacatcaaaaactgtaaatctagatttttaaaaaa

SEQ ID NO: 154571 - DNA, 120 bp, Artificial Sequence
  ENSG00000106069_26 (sequence is synthesized)
tccaactgcaatgtcttttcctttgattgagatgatttgtgtaaactcaccagtcttgctttggagtgagcagaagagaatgactattttacgtggagcatcattgtgtgactgttgacc

SEQ ID NO: 154572 - DNA, 120 bp, Artificial Sequence
  ENSG00000106069_27 (sequence is synthesized)
tggacagtcccaagggctatgcagatggactccattggcacagggaggtttgacctcttccctgctattatccctcctcccaactgtacagatttgtttgttgtagtttatgtacttctt

SEQ ID NO: 154573 - DNA, 120 bp, Artificial Sequence
  ENSG00000106069_28 (sequence is synthesized)
gatactgtcaaaaaattatctggaaatggttttattttgtgaagtgaacaatactttgtaatttatgatagtgtaaatggaaggcaaagcatcacatgtattaaattcttctgtctatta

SEQ ID NO: 154574 - DNA, 120 bp, Artificial Sequence
  ENSG00000106069_29 (sequence is synthesized)
acagtgctgaggtagctttagcccgcatagtactcctggccacaccatgttcttccaaagagctcagctctctctgcctcagttccctcatctataaaatgggagtgttgggaggtttaa

SEQ ID NO: 154575 - DNA, 120 bp, Artificial Sequence
  ENSG00000106069_30 (sequence is synthesized)
ccagacccacagggcaaaaagtgcgtcgtcgtgtcccaacctcctggtcccagaaacctggccgcatcaagtcagcgcttcccatgctggaagaagcaagcagccccagggtggaatctt

SEQ ID NO: 154576 - DNA, 120 bp, Artificial Sequence
  ENSG00000106069_31 (sequence is synthesized)
ttggaaagcgagtggtgtttgattcccactgtttaaaaaggcaacacacgttcgctgatggtctacattccagctgcactagcattcccctgagtgaaatatggcatacattaaccagaa

SEQ ID NO: 154577 - DNA, 120 bp, Artificial Sequence
  ENSG00000106069_32 (sequence is synthesized)
gagaaaattacatttattaaaataattaaaacagagtcaaaagaagtaaacgttcaaatgagttttgtaagtttgtagcatttcgacttaagaagttattaaagcttaaaactgcactga

SEQ ID NO: 154578 - DNA, 120 bp, Artificial Sequence
  ENSG00000106069_33 (sequence is synthesized)
atgttctctgaagaactgtggctggaaaatgagaaaaagtgtgctgtggttcggaagtctaagcagggcaggaaacgccaagaactgctggccgtagccttcggggtgaaggtgggtgtc

SEQ ID NO: 154579 - DNA, 120 bp, Artificial Sequence
  ENSG00000106069_34 (sequence is synthesized)
gcgaggggcgcgcggagatggcagcgtccagcaactccagcctgtccggctcgtcggtgtcctccgtctattctgaacccagaagcccgagagagcttccaaaatatgctgaagaatacc

SEQ ID NO: 154580 - DNA, 120 bp, Artificial Sequence
  ENSG00000106069_35 (sequence is synthesized)
cacacacaacgacaaccacttcaattatgagaggacagcaccctgaccaccctgcatgatatgcggtaccaaaagctgattgtgcagattttaatagaaaacgaagacgttttattctaa

SEQ ID NO: 154581 - DNA, 120 bp, Artificial Sequence
  ENSG00000106069_36 (sequence is synthesized)
caattgggggacacaaactaagtgaggttaagtaacccatccagggtcacattgcttgtaagtgacctgagtgtatattattagccaccaccaggtgctgggcatcgagccagacagtac

SEQ ID NO: 154582 - DNA, 120 bp, Artificial Sequence
  ENSG00000106069_37 (sequence is synthesized)
gggagcaagaactaaaaaaggcaaggaggttgcaatggcaagtagataacacaaaataaaggagggtcatcattatcagcaacagcagcgtcaactgccagacaggtgggagaggccacg

SEQ ID NO: 154583 - DNA, 120 bp, Artificial Sequence
  ENSG00000106069_38 (sequence is synthesized)
gtgtgtttgagtgtgaaatgtgctaataaggaggagagacctctcctttgcaatgtgctgcggcaggagaaagcaggctgccggcccctgcctccctgaatcctcagtggctgactggat

SEQ ID NO: 154584 - DNA, 120 bp, Artificial Sequence
  ENSG00000106069_39 (sequence is synthesized)
accgcttctgggggttgctgtgcacatgaatgtttgctattgttccaggcgcacgtcggccttaagaaatagcacaaaacaggcccatccttattcagaagccgggccccctccatcact

SEQ ID NO: 154585 - DNA, 120 bp, Artificial Sequence
  ENSG00000106069_40 (sequence is synthesized)
caaactgggcctttcaggtcacatgccggaggctgctgcagacaggacccagctgcctcaaatctgccgcctaacataagctgcggttcgaaaatcctgacagcacagggcttcctgggc

SEQ ID NO: 154586 - DNA, 120 bp, Artificial Sequence
  ENSG00000106069_41 (sequence is synthesized)
atagatgagattgagcatttggctgtgtgtggacacgcttcatcgtgccaactcaactagccctgggatgccggaggaagaaaatcacaaaaggaaacttaggatgcccaggttccagca

SEQ ID NO: 154587 - DNA, 120 bp, Artificial Sequence
  ENSG00000106069_42 (sequence is synthesized)
caaaatgcacttcccactgccgaggtgaaactatctgaggcattgaatgaggaacaatacaatttttgagaaagctaaggaggtgcctaccaacccgcaccaacgcatttgtttttgaga

SEQ ID NO: 154588 - DNA, 120 bp, Artificial Sequence
  ENSG00000106069_43 (sequence is synthesized)
aaatggagaaaaagacatttcaggaagagagaagagcttaggtaaaggcctggagatggtcttggggaagaaaatatatctgtcacggattacaataacctcttaactggctgtttccac

SEQ ID NO: 154589 - DNA, 120 bp, Artificial Sequence
  ENSG00000106069_44 (sequence is synthesized)
tcttgcctctcttcagtctattctgaacccagaagcccgagagagcttccaaaatagacgacggctcgatcttggcttgggatcctgtctaggaagatgtcctctctgcacagggagtca

SEQ ID NO: 154590 - DNA, 120 bp, Artificial Sequence
  ENSG00000106069_45 (sequence is synthesized)
gatctgccagcttgtgcctgactagtcctgtcaacattgtgaacagtggagatggtttgcctcagttgcactgtgcactgtaaaagcagtaccaatggctgtgcagacattcctaaagag

SEQ ID NO: 154591 - DNA, 120 bp, Artificial Sequence
  ENSG00000106069_46 (sequence is synthesized)
aatcttagttttcttcctccactttaatagtggtcacccagtgggttgagcaaacaaacatttattgagcacctggtgtgtacaagcattcggctctgctttggtgctgaggagagtaaa

SEQ ID NO: 154592 - DNA, 120 bp, Artificial Sequence
  ENSG00000106069_47 (sequence is synthesized)
aaaccgaggggacacacggacagctccagtggggtagctttgcagtgggactcacacctcttcattctaccagaagccagaagatactcactggggacagtcgtgatgggagtttttcca

SEQ ID NO: 154593 - DNA, 120 bp, Artificial Sequence
  ENSG00000106069_48 (sequence is synthesized)
tgagcagcaagagctaatgggccgtttgcctacaagagaagatgctgaagaataccagcctcctatatggaaatcatacttatatcagttacagcaagaggcacctcgtcccaagagaat

SEQ ID NO: 154594 - DNA, 120 bp, Artificial Sequence
  ENSG00000106069_49 (sequence is synthesized)
tatgtgttggaatattggcaatgctgtctgcccctcccactctcctgctgcatgtccctccccccacacccacccccacactcactgccaacccacccgccaacccatccgcaaggctgc

SEQ ID NO: 154595 - DNA, 120 bp, Artificial Sequence
  ENSG00000106069_50 (sequence is synthesized)
ccccagggctctttgcccaggccatctgtcccatcctctccaacctggctcaggctgcacaggaggctcctccgcaaagttcctaggtccagtgacctcactatcaaagctccaacacct

SEQ ID NO: 154596 - DNA, 120 bp, Artificial Sequence
  ENSG00000106069_51 (sequence is synthesized)
ctgctccaggccccaataaactggcctcccggttccaatccacacctgctatgcagggccagttagaccccctgagactgggctctgcctcagtccctcccaccagaaccggggattcac

SEQ ID NO: 154597 - DNA, 120 bp, Artificial Sequence
  ENSG00000106069_52 (sequence is synthesized)
agaacattcatcctcactcagaagagcattgctccaagacctccagacatcagctgttgagatttaaaatcaaaatttgggaagccagaaagcctttttcttccaggccatcactgccgt

SEQ ID NO: 154598 - DNA, 120 bp, Artificial Sequence
  ENSG00000106069_53 (sequence is synthesized)
acacctttaagaagcgattttgaaacacaaagccacaggctgcttctgacctcactttccttggacagaagcttcagcttggaaggtctactttttaaggatagagggaattaggaaata

SEQ ID NO: 154599 - DNA, 120 bp, Artificial Sequence
  ENSG00000106069_54 (sequence is synthesized)
aatattgtgataggcacttttaaaaatgttatccttctgcatttgtactctaacttaatctttgcattcctgaggaaaatacaaaacaaaagaaaatttgtctagcttacttccctttcc

SEQ ID NO: 154600 - DNA, 120 bp, Artificial Sequence
  ENSG00000106069_55 (sequence is synthesized)
tcctcttcaagaaagtaaaggtgtttttctctgtccagaaaatttattctctgatttattatccaaagttctccaaggttggataatcctagaaaggggtgttactcctttcccagaagc

SEQ ID NO: 154601 - DNA, 120 bp, Artificial Sequence
  ENSG00000106069_56 (sequence is synthesized)
ttgaagtcccttgggactgcctcatttccccaacccagcttgccccactttccatgaaatactggttgatcaaatctccagtcctgtgggaggagcagctgtatttacttaaaggcaaca

SEQ ID NO: 154602 - DNA, 120 bp, Artificial Sequence
  ENSG00000106069_57 (sequence is synthesized)
gggaacgtgggctggttcctgacccaactcctacctctccctattcctctgtggagtcactgtccactctctgggcctcagacaactgcctccacatcagagtgatcatgggccagcaca

SEQ ID NO: 154603 - DNA, 120 bp, Artificial Sequence
  ENSG00000106069_58 (sequence is synthesized)
caaccctcccggatatgccacattttccacatgcatgtgtatgggttttaaaatggtagagaagataaatttatctttaaaaaagaaaaataggtacattttctaaaatacccataagct

SEQ ID NO: 154604 - DNA, 120 bp, Artificial Sequence
  ENSG00000106069_59 (sequence is synthesized)
aaatgagcctctaaaattaacaccaccctgcacctgaagcaagcaggttgctaatcaataaatgtccacttgcaattaggataacacatagttctctgagctgagagctaaattggtaat

SEQ ID NO: 154605 - DNA, 120 bp, Artificial Sequence
  ENSG00000106069_60 (sequence is synthesized)
tgctcttctgttatttcccatggttaaaaaaaagggggggggggggcggtggttgagtaacctggctttttgtttcaactttcattttcaacttgaaagcaaagacaatagcagaaagcc

SEQ ID NO: 154606 - DNA, 120 bp, Artificial Sequence
  ENSG00000106069_61 (sequence is synthesized)
aggtggactgggcatccttccttttgtttgcctgcttgaatacttgtgtttggagcatgtgaggggtggttccaagtcacttaagatgggcagtagtcaccccccttcttcactcagttg

SEQ ID NO: 154607 - DNA, 120 bp, Artificial Sequence
  ENSG00000106069_62 (sequence is synthesized)
tggggctgtcgattctgggtgcccccaccatccttttaaggctagttctttgtggtccttattctgtatgtggtctgttcagagcattgatggtcttgtaccttcaggtttcatgggatc

SEQ ID NO: 154608 - DNA, 120 bp, Artificial Sequence
  ENSG00000106069_63 (sequence is synthesized)
ggtgcgatttgctgaaatgttggaggagacccacccccacccgaagaactctagaatgttagggccaaagggaccttagaaatcttctagctcaggccgggcgtggtggctcatgcctgt

SEQ ID NO: 154609 - DNA, 120 bp, Artificial Sequence
  ENSG00000106069_64 (sequence is synthesized)
tcctagagcggttaatgcatgaggaaaagtggacggcattcctccccagccataactgctggagtttcactgtgccaggaaccactccaggcactttcagtgtatcatccctatgaaagg

SEQ ID NO: 154610 - DNA, 120 bp, Artificial Sequence
  ENSG00000106069_65 (sequence is synthesized)
tcgtcccaagagaatcatttgtcctcgggaggaggaaatgagacaggaagcacaagaggggcaaaggccagattccaacccagatagttcatatcaatggctgggcttctaatccagtga

SEQ ID NO: 154611 - DNA, 120 bp, Artificial Sequence
  ENSG00000106069_66 (sequence is synthesized)
agcatcagctgggaacagaaatttaacagcagcatgagttttcccttgatttgattcagttctgttgggtacttcaagctctttgggcttaaaaggtggaaaacagaccaaaatattatg

SEQ ID NO: 154612 - DNA, 120 bp, Artificial Sequence
  ENSG00000106070_0 (sequence is synthesized)
aaatgtaatttgaagaaggcagaaggaacccatggctttagccggctgcccagattcctttttgcaccatccgtactaccaggacaaggtggagcagacacctcgcagtcaacaagaccc

SEQ ID NO: 154613 - DNA, 120 bp, Artificial Sequence
  ENSG00000106070_1 (sequence is synthesized)
ggcaggaccaggactccccgcacagtctgaccgacttgcgaatcaccaggaggatgatgtggacctggaagccctggtgaacgatatgaatgcatccctggagagcctgtactcggcctg

SEQ ID NO: 154614 - DNA, 120 bp, Artificial Sequence
  ENSG00000106070_2 (sequence is synthesized)
cagcatgcagtcagacacggtgcccctcctgcagaatggccagcatgcccgcagccagcctcgggcttcaggccctcctcggtccatccagccacaggtgtccccgaggcagagggtgca

SEQ ID NO: 154615 - DNA, 120 bp, Artificial Sequence
  ENSG00000106070_3 (sequence is synthesized)
gcgctcccagcctgtgcacatcctcgctgtcaggcgccttcaggaggaagaccagcagtttagaacctcatctctgccggccatccccaatccttttcctgaactctgtggccctgggag

SEQ ID NO: 154616 - DNA, 120 bp, Artificial Sequence
  ENSG00000106070_4 (sequence is synthesized)
cccccctgtgctcacgccgggttctttacctccgagccaggccgccgcaaagcaggatgttaaagtctttagtgaagatgggacaagcaaagtggtggagattctagcagacatgacagc

SEQ ID NO: 154617 - DNA, 120 bp, Artificial Sequence
  ENSG00000106070_5 (sequence is synthesized)
cagagacctgtgccaattgctggtttacaaaagtcactgtgtggatgacaacagctggacactagtggagcaccacccgcacctaggattagagaggtgcttggaagaccatgagctggt

SEQ ID NO: 154618 - DNA, 120 bp, Artificial Sequence
  ENSG00000106070_6 (sequence is synthesized)
ggtccaggtggagagtaccatggccagtgagagtaaatttctattcaggaagaattacgcaaaatacgagttctttaaaaatcccatgaatttcttcccagaacagatggttacttggtg

SEQ ID NO: 154619 - DNA, 120 bp, Artificial Sequence
  ENSG00000106070_7 (sequence is synthesized)
ccagcagtcaaatggcagtcaaacccagcttttgcagaattttctgaactccagtagttgtcctgaaattcaagggtttttgcatgtgaaagagctgggaaagaaatcatggaaaaagct

SEQ ID NO: 154620 - DNA, 120 bp, Artificial Sequence
  ENSG00000106070_8 (sequence is synthesized)
gtatgtgtgtttgcggagatctggcctttattgctccaccaagggaacttcaaaggaacccagacacctgcagctgctggccgacctggaggacagcaacatcttctccctgatcgctgg

SEQ ID NO: 154621 - DNA, 120 bp, Artificial Sequence
  ENSG00000106070_9 (sequence is synthesized)
caggaagcagtacaacgcccctacagaccacgggctctgcataaagccaaacaaagtcaggaatgaaactaaagagctgaggttgctctgtgcagaggacgagcaaaccaggacgtgctg

SEQ ID NO: 154622 - DNA, 120 bp, Artificial Sequence
  ENSG00000106070_10 (sequence is synthesized)
gatgacagcgttcagactcctcaagtatggaatgctcctttaccagaattaccgaatccctcagcagaggaaggccttgctgtccccgttctcgacgccagtgcgcagtgtctccgagaa

SEQ ID NO: 154623 - DNA, 120 bp, Artificial Sequence
  ENSG00000106070_11 (sequence is synthesized)
ctccctcgtggcaatggatttttctgggcaaacaggacgcgtgatagagaatccggcagaggcccagagcgcagccctggaggagggccacgcctggaggaagcgaagcacacggatgaa

SEQ ID NO: 154624 - DNA, 120 bp, Artificial Sequence
  ENSG00000106070_12 (sequence is synthesized)
catcctaggtagccaaagtcccctccacccttctaccctaagtacagtgattcacaggacacagcactggtttcacgggaggatctccagggaggaatcccacaggatcattaaacagca

SEQ ID NO: 154625 - DNA, 120 bp, Artificial Sequence
  ENSG00000106070_13 (sequence is synthesized)
agggctcgtggatgggctttttctcctccgtgacagccagagtaatccaaaggcatttgtactcacactgtgtcatcaccagaaaattaaaaatttccagatcttaccttgcgaggacga

SEQ ID NO: 154626 - DNA, 120 bp, Artificial Sequence
  ENSG00000106070_14 (sequence is synthesized)
cgggcagacgttcttcagcctagatgacgggaacaccaaattctctgacctgatccagctggttgacttttaccagctgaacaaaggagtcctgccttgcaaactcaagcaccactgcat

SEQ ID NO: 154627 - DNA, 120 bp, Artificial Sequence
  ENSG00000106070_15 (sequence is synthesized)
ccgagtggccttatgaccgcagatgtcctctcggctgaagactggaggaagtgaacactggagtgaagaagcggtctgtgcgttggtgaagaacacacatcgattctgcacctggggacc

SEQ ID NO: 154628 - DNA, 120 bp, Artificial Sequence
  ENSG00000106070_16 (sequence is synthesized)
cagagcgagatgggtttgttcggtgccagccgaccaagattgactagtttgttggacttaaacgacgatttgctgctgtgaacccagcagggtcgcctccctctgcatcggccaaattgg

SEQ ID NO: 154629 - DNA, 120 bp, Artificial Sequence
  ENSG00000106070_17 (sequence is synthesized)
ggagggcatggaagatccagcggaaagttgaaaataaactggaatgatcatcttggcttgggccgcttaggaacaagaaccggagagaagtgattggaaatgaactcttgccctggaata

SEQ ID NO: 154630 - DNA, 120 bp, Artificial Sequence
  ENSG00000106070_18 (sequence is synthesized)
atcttgacaattaaaactgatatgtttactttttttgtattgatcacttttttgcactccttctttgttttcaatattgtattcagcctattgtaggagggggatgtggcgtttcaactc

SEQ ID NO: 154631 - DNA, 120 bp, Artificial Sequence
  ENSG00000106070_19 (sequence is synthesized)
gggcagatttcaaactgaatatgggtccccaaatgttcccagagggtcctccacaccctctgccgactaccacggtgtggattcagctcccaaatgacaaacccagcccttcccagtata

SEQ ID NO: 154632 - DNA, 120 bp, Artificial Sequence
  ENSG00000106070_20 (sequence is synthesized)
cttgaaaagctttcttgttaaaataaaaggtgtcactgtggtaggcatttggcatattttgtggactcagtcaagcaaccacagtctgttaatcatttctctatgctcagatgtcagatc

SEQ ID NO: 154633 - DNA, 120 bp, Artificial Sequence
  ENSG00000106070_21 (sequence is synthesized)
ctcttgttattagtgtgtcttgttctgcacagtgcaggagactttattcctttggaaaattcactgttccacaaacagcaggctgaatggcctcgcctctagattgacgtgggccagcct

SEQ ID NO: 154634 - DNA, 120 bp, Artificial Sequence
  ENSG00000106070_22 (sequence is synthesized)
ccttgagacacacctggcacccgtcatcggccagcggtggatgctgcataatccacctgggtacttcagccttgcgtttccacagccttcagcctgttctagaacgatcactgccttacc

SEQ ID NO: 154635 - DNA, 120 bp, Artificial Sequence
  ENSG00000106070_23 (sequence is synthesized)
cctgctgctgcagtggtgtgagtcgtttcacggctgatgtccctcgggggattaaaggatctaaagagaaaatggcacctggttgtcttcgtgctgtgtctcatgggtttccatagtgat

SEQ ID NO: 154636 - DNA, 120 bp, Artificial Sequence
  ENSG00000106070_24 (sequence is synthesized)
aaagacaaggaaacgctgcaggggccacaggcacaggctgatatttaaagatctttgcttgcagccctccgtcctgctgaaaacccccataagccagtgaacacagagcagctagaggct

SEQ ID NO: 154637 - DNA, 120 bp, Artificial Sequence
  ENSG00000106070_25 (sequence is synthesized)
cctcctctgctggcttagggtcagaagtacctcacagtggttgtggacatggaagagttttgtcaacacaacactttgtccccgctccgggagatgagtcagatggtggcttgagttgtc

SEQ ID NO: 154638 - DNA, 120 bp, Artificial Sequence
  ENSG00000106070_26 (sequence is synthesized)
acttggtcccctccgcccctcgggtggccccctttgccacgtccccttagcttagtgatcaggtgtgagagtggccatttccttacctttgatccctgtaaagcagaaaggactcctttg

SEQ ID NO: 154639 - DNA, 120 bp, Artificial Sequence
  ENSG00000106070_27 (sequence is synthesized)
acaggcgacaaactactgtggtgagcagaatgatttcctttttcaagacaacacctgcctggcttctattaatgtgtgctggccatgatattgccccaaatccgccccactgaagtgttc

SEQ ID NO: 154640 - DNA, 120 bp, Artificial Sequence
  ENSG00000106070_28 (sequence is synthesized)
cctaaggaacagcatttctctgctcctcagtcaacccccgtagcctagagcagtgtcacaagcttcagtaaggccagtcagctggaagtcagtctaccgtatagtaacactgtatgtcag

SEQ ID NO: 154641 - DNA, 120 bp, Artificial Sequence
  ENSG00000106070_29 (sequence is synthesized)
tctacagaccacactctagttgttttccatgaaaggtatacaaatgaagaattttctagcaaaacatgtttttaaccatcagtgctcaattgcattttcttcctttcgcagccagtcagt

SEQ ID NO: 154642 - DNA, 120 bp, Artificial Sequence
  ENSG00000106070_30 (sequence is synthesized)
ctttcaaactattgacagtaagataattctcacgttcacacctggtggcaggcttcactgtagggacggacattgcagttacaccacgattccttcctcttcactggctcgaggtaaacc

SEQ ID NO: 154643 - DNA, 120 bp, Artificial Sequence
  ENSG00000106070_31 (sequence is synthesized)
cttttcaaggaaaaacaactctaggatttcttttttctgtgtacgtagaccagtcccatcagtgtataatctctctctcacacgcctctctccaatagacagcttgtatttgcagtattt

SEQ ID NO: 154644 - DNA, 120 bp, Artificial Sequence
  ENSG00000106070_32 (sequence is synthesized)
catatttataaatatgcgtttatttaaaaggagaacaaaagcttgactctgattcacagttttgtatgtagctggtttgacgtagtcttttgtattttccctgccgaagtgaattgttgg

SEQ ID NO: 154645 - DNA, 120 bp, Artificial Sequence
  ENSG00000106070_33 (sequence is synthesized)
agaatgtaaaccgcctccacgtggcggcagacttcctaaggccccagctcgctggcctcgcgctgggcggctgggaattccacctgagaacaagtcccgcaaaccggggacggaaggaca

SEQ ID NO: 154646 - DNA, 120 bp, Artificial Sequence
  ENSG00000106070_34 (sequence is synthesized)
tttgacttttatttttgtatttaattgacatgaatgtaaaggggacagctcagggttgttttggagcctgttgactttgtatctctgcctgtgattttcttttctaaatgaaactccatg

SEQ ID NO: 154647 - DNA, 120 bp, Artificial Sequence
  ENSG00000106070_35 (sequence is synthesized)
tagcaaccaggacgaagttgagaaggaaaacgccaaatgctttggttattagagtttaataggtaagctctgttacactaggtgttagagttccagaatgttcttttgtttgctaaacct

SEQ ID NO: 154648 - DNA, 120 bp, Artificial Sequence
  ENSG00000106070_36 (sequence is synthesized)
tgaagaaacatgtgcctcagcctagatgttttgtcttctcttttctgcacttaatacctgacagtatgaccgatctctgcgcctttctgggggcgggcaagctggcggtagatttgtgat

SEQ ID NO: 154649 - DNA, 120 bp, Artificial Sequence
  ENSG00000106070_37 (sequence is synthesized)
gtcacagtgcaaactgcagtgactgtaaattggcctggcgtgtataaacgttttcagggaatgcagaaggtattaatgaagagacaaaacctttattccatgtgctttgcttcattctgt

SEQ ID NO: 154650 - DNA, 120 bp, Artificial Sequence
  ENSG00000106070_38 (sequence is synthesized)
acatagctctttggctcgtgaacctaattgtaaactttcaggtatttttgtacaaataagggactgatgttctgtttcttgtaattagaaataaacattaatacagtgttcttcattttc

SEQ ID NO: 154651 - DNA, 120 bp, Artificial Sequence
  ENSG00000106070_39 (sequence is synthesized)
gggattcctgttgtgctccaggaccgggcgctgctccgtcgtcctcccgctcctcaggagcgcccagtccctcggaggctgagtattgcagccgggcggcagccggctccgcggaggggc

SEQ ID NO: 154652 - DNA, 120 bp, Artificial Sequence
  ENSG00000106070_40 (sequence is synthesized)
gggcacctgcgtggtgatggcgctgggagcccccgggcacgctcgggcggtggcgcggcatcccaccctcgcccggatggcgtccccagaggcggcgttggcccgcttttcgtgctagcg

SEQ ID NO: 154653 - DNA, 120 bp, Artificial Sequence
  ENSG00000106070_41 (sequence is synthesized)
cggcgttggcccgcttttcgtgctagcgcgttcgcctggcgcgcggtggccccgaggccccgggtcggttttctgcgccgcaggcccctggccggggcggagccgtggaggaccagcccg

SEQ ID NO: 154654 - DNA, 120 bp, Artificial Sequence
  ENSG00000106070_42 (sequence is synthesized)
cgccgggcactgcgggggccgggccccgaagccctacccgggccggcggcgcacacgcagcgaccccgtgcggccagtgctgccgcccgctctccagacttgggaggctgcattctgata

SEQ ID NO: 154655 - DNA, 120 bp, Artificial Sequence
  ENSG00000106070_43 (sequence is synthesized)
aggctgcattctgataattctcaggaggaagaatgtataggagagaccagggtttttaaggtgtgacctctgaaccacctacatcagagctgactgcctctcgctttggcgctgaccaca

SEQ ID NO: 154656 - DNA, 120 bp, Artificial Sequence
  ENSG00000106070_44 (sequence is synthesized)
atgctgagcaggaagcagcagctgcaggcccagtgactggtagctcagtgaccagcagcccagtgaccggcagccaggtcctcacctgggtcctctcagtgaagccagggtggccgcccc

SEQ ID NO: 154657 - DNA, 120 bp, Artificial Sequence
  ENSG00000106070_45 (sequence is synthesized)
ggggaggtcgggaggaggcagagagggaagcgagctgcggccgggcgggctcggcgctcggagacccggtggagcccaaagtttccgcgcagcccctgggtggcggcagcgccggcggcg

SEQ ID NO: 154658 - DNA, 120 bp, Artificial Sequence
  ENSG00000106070_46 (sequence is synthesized)
cggggacccgcgcccgccgccggccacgccgagtgtcgcccgcagccacgcggaggcggcggggagccgcgcgcggcagctttggcgctgaccacaatgctgagcaggaagcagcagctg

SEQ ID NO: 154659 - DNA, 120 bp, Artificial Sequence
  ENSG00000106070_47 (sequence is synthesized)
cgcaactttgcctcccagggaacaaacatcctccttctaagtggtagatgtgggtgagctgaccctgctggagtctgtcccctgggctaccctctgcttccccccattgtgagtggtccg

SEQ ID NO: 154660 - DNA, 120 bp, Artificial Sequence
  ENSG00000106070_48 (sequence is synthesized)
accgactctgtgaattgggtaccttcatgatacccattttataaatgagaaaactgaggtttttactatatgctggtcatcatgctgaggactttacttggattttctctcctgccaatg

SEQ ID NO: 154661 - DNA, 120 bp, Artificial Sequence
  ENSG00000106070_49 (sequence is synthesized)
ctacgcggtggggaccttcatgttctcccctttgcagatgagattatcaaagcagaaaaagaccatctctcctactgagtaacagaggaaaccagggcttgcagatattgaggatgatgt

SEQ ID NO: 154662 - DNA, 120 bp, Artificial Sequence
  ENSG00000106070_50 (sequence is synthesized)
ggtggggaccttcatgttctcccctttgcagatgagattatcaaagcagaaaaagaccatctctcctactgagtaacagaggaaaccagggcttgcagatattgatattctggaggaagg

SEQ ID NO: 154663 - DNA, 120 bp, Artificial Sequence
  ENSG00000106070_51 (sequence is synthesized)
gagccaactcctgacaggtgctgcagcgcagtaaatgtaatttgaagaaggcagaaggaacccatggctttagccggctgcccagattcctttttgcaccatccgtactaccaggttctg

SEQ ID NO: 154664 - DNA, 120 bp, Artificial Sequence
  ENSG00000106070_52 (sequence is synthesized)
aaaatattgtgcacagggcaggctgaggacacagccacgtgatacccactgtagagagagggagagagagacctcctatgcaagctgccggccctctgttccgtagtaagatattctgga

SEQ ID NO: 154665 - DNA, 120 bp, Artificial Sequence
  ENSG00000106070_53 (sequence is synthesized)
gagccggcccagcctcgtacggaggaccttttttttggttctgttggtgacccgttagccgccgctggggcctaacaccaagttgagggctcgcggattagccgcccgccagccgtggaa

SEQ ID NO: 154666 - DNA, 120 bp, Artificial Sequence
  ENSG00000106070_54 (sequence is synthesized)
atgtgataagagcggtaccgtttgcagaaggaaatttctgatgcaactcttcgcctttgctgattgcctctccaaacgcctgcctgacgactgccttggagcatgtgcgttatggaaatt

SEQ ID NO: 154667 - DNA, 120 bp, Artificial Sequence
  ENSG00000106070_55 (sequence is synthesized)
gcattgtaaaaaacctaaagagatcgcatctttcaccatttataaccttggctcttaagccggaggggtggttggggggagggtttagagtaaccagaaattaaaagtttccttggaaaa

SEQ ID NO: 154668 - DNA, 120 bp, Artificial Sequence
  ENSG00000106070_56 (sequence is synthesized)
ggcagccgggcgccccgcggggctctccgcgctgcgttcccgacccctggggggaggtgtggagtccaagcggtgcattcttgaaccatcttgtcagacgccggcggctcgcgggctgtg

SEQ ID NO: 154669 - DNA, 80 bp, Artificial Sequence
  ENSG00000106070_57 (sequence is synthesized)
gtcaaggccgcgctcctgggggccgccgcctgggagggtgggcgcccaggcgtccctgcagccccgggtgctccgactgc

SEQ ID NO: 154670 - DNA, 120 bp, Artificial Sequence
  ENSG00000106070_58 (sequence is synthesized)
gattatgacgtgctggcggccagggcctcgggtgctgcctggagtctcctgcgtgtctctgctcctttgatgtcagcatcggggtgtctgggagccagcttctgagtgttgtcaaggtag

SEQ ID NO: 154671 - DNA, 120 bp, Artificial Sequence
  ENSG00000106070_59 (sequence is synthesized)
tcctggtggcttgagactggtgatgtgccgttgccaacaatggctgtgtaattctgagcagttgttcagcactcaagtgggatgagaatggcaaggagtgctctgggtggcttttgacaa

SEQ ID NO: 154672 - DNA, 120 bp, Artificial Sequence
  ENSG00000106070_60 (sequence is synthesized)
agcagttggcccttctaggccccttccatgttcccagcacccagcctttccccgctgtcccctgtcccctgggctttcatggaagggacaggagaggaacagagttctctgccctccgtg

SEQ ID NO: 154673 - DNA, 120 bp, Artificial Sequence
  ENSG00000106070_61 (sequence is synthesized)
gctcctatgcagaactgttctgctgatgaactggcagtggctgtctgtggagtgcacagagcccaggcctgagtggggccagcaggtgctcacatcaaggtctgctactaacagcctgga

SEQ ID NO: 154674 - DNA, 120 bp, Artificial Sequence
  ENSG00000106070_62 (sequence is synthesized)
tgcatgttgtagtaaaaaaatgggctcatgtttctggagtatttttcgttgtgtgtagtgcaatacaggaactttaaagaacaccatgggacccatgtgaaatgccactagtgaagctgg

SEQ ID NO: 154675 - DNA, 120 bp, Artificial Sequence
  ENSG00000106070_63 (sequence is synthesized)
aagtgcgcccaagaacagagaaaagtcacgacatgacaagaaaaacttaaattgcttgatacatactagagattgaatggttgccctccacaccacacagataattcattgtgtcaacat

SEQ ID NO: 154676 - DNA, 120 bp, Artificial Sequence
  ENSG00000106070_64 (sequence is synthesized)
gtagacttacagaatcgaatgcagtacagtcccataattgtattgtctcttatgattttcttaataacatttttttctctagcttccttataaaaatatggtgtagaatacatatacgaa

SEQ ID NO: 154677 - DNA, 120 bp, Artificial Sequence
  ENSG00000106070_65 (sequence is synthesized)
atatatgttaattaactgtttatgttatcattaaggcttctggtcaacagtaggccactagtaggtaagttttgggggagtcaaaagctatactcggattttttatttcaaggggcgtca

SEQ ID NO: 154678 - DNA, 120 bp, Artificial Sequence
  ENSG00000106070_66 (sequence is synthesized)
gggtgctgcctggagtctcctgcgtgtctctgctcctttgatgtcagcatcggggagaaaggtggtaaagaacacttgtttcagtttgaggtgctcggcagccacgcgctgaaggacggt

SEQ ID NO: 154679 - DNA, 120 bp, Artificial Sequence
  ENSG00000106070_67 (sequence is synthesized)
ttttaattgtagggtggggactgagaatggtgcatactaactgctgaggaacatggtgaatggagttatggtaattgcacgattggcatgaaggggtgagagaagttccagattggtcga

SEQ ID NO: 154680 - DNA, 120 bp, Artificial Sequence
  ENSG00000106070_68 (sequence is synthesized)
gaatgtataggagagaccagggtttttaaggtgtgacctctgaaccacctacatcagagctgactgcctctcgtgtctgggagccagcttctgagtgttgtcaaggtgtttgaggagcca

SEQ ID NO: 154681 - DNA, 120 bp, Artificial Sequence
  ENSG00000106070_69 (sequence is synthesized)
gtctgtctccgtcatctgttcctgccttacttagatggaaaataatgaaatctgtgtaggaagggagggtgagtagagggatggcctgtgttgactgaacaataaaatagtgatgttaat

SEQ ID NO: 154682 - DNA, 120 bp, Artificial Sequence
  ENSG00000106070_70 (sequence is synthesized)
ctccgtcatctgttcctgccttacttagatggaaaataatgaaatctgtgtaggaagggaggaaattctctgaagaggacactttacctggctggacaggaagcacggcagcatctactc

SEQ ID NO: 154683 - DNA, 120 bp, Artificial Sequence
  ENSG00000106070_71 (sequence is synthesized)
aagagaagtggggggaggtgccacacacttaaacaaccaggtctcttgagaactccatcacaacagcaccacgaggatggtgctaaaccattcatgaaggatccaccaccacagtccagt

SEQ ID NO: 154684 - DNA, 120 bp, Artificial Sequence
  ENSG00000106070_72 (sequence is synthesized)
caccttccaccaggctccacctccaacactgggggttacaatttgaaatgagatttggtagggacacagaaccaaaccatatcagacagttcttaaaaatctttttcaatttaacattta

SEQ ID NO: 154685 - DNA, 120 bp, Artificial Sequence
  ENSG00000106070_73 (sequence is synthesized)
tgtcagcatcgggggtgggagcagggcccacgcattccccctttggcctgggtgggaacaggggaggtggtgggcagggccagaagggcttactgggattttctttctctctgtcactcc

SEQ ID NO: 154686 - DNA, 120 bp, Artificial Sequence
  ENSG00000106070_74 (sequence is synthesized)
agagaaaggtggtaaagaacacttgtttcagtttgaggtgctcggcagccacgcgctgaaggacggtttttaattgtagggtggggtgtgagtgcagtgtggttcagtcccctccccatc

SEQ ID NO: 154687 - DNA, 120 bp, Artificial Sequence
  ENSG00000106070_75 (sequence is synthesized)
gctacagagccaactcctgacagcgtcattgtgaaaattggaagacacttatataaactttggcattgtgtttagcacacaaaagaccctgttaaatgtgagccactgtttggatgagct

SEQ ID NO: 154688 - DNA, 120 bp, Artificial Sequence
  ENSG00000106070_76 (sequence is synthesized)
ggaaaccagggcttgcagatattggacaaggtggagcagacacctcgcagtcaacaagacccggcaggaccaggactccccgcacagtctgaccgacttgcgaatcaccaggaggatgat

SEQ ID NO: 154689 - DNA, 120 bp, Artificial Sequence
  ENSG00000106070_77 (sequence is synthesized)
aagctggggtcccatggagctgccctgctccatgcttgcatgccatttctctcagcgttggagcagagccctcaacagtgagcgtggtgctgcagcgcagtaaatgtaatttgaagaagg

SEQ ID NO: 154690 - DNA, 120 bp, Artificial Sequence
  ENSG00000106070_78 (sequence is synthesized)
gccggctgcccagattcctttttgcaccatccgtactaccagaaaaatgcaaaataggaaataaaatgtgcttggctacaaacttccgtacacaatgttgaactgagcattagaaatgaa

SEQ ID NO: 154691 - DNA, 120 bp, Artificial Sequence
  ENSG00000106070_79 (sequence is synthesized)
acaacttgcatgtgaattttatcgtcattgtgaaaattggaagacacttatataaactttggcattgtgtttagcacacaaaagaccctgttaaatgtgagccactgtttggatgagctg

SEQ ID NO: 154692 - DNA, 120 bp, Artificial Sequence
  ENSG00000106070_80 (sequence is synthesized)
tatgcaggcacaaaataatccttttcatcctatagtttccctgccctaaccctgtagtcaggcatatccccaaggagcccagcttttttccaatggagaatgacaattcagaattaccgt

SEQ ID NO: 154693 - DNA, 120 bp, Artificial Sequence
  ENSG00000106070_81 (sequence is synthesized)
aattcagaattaccgtcttggtgcttgcctggtgtgctgttgcccctagaggccacttaaatgccaaagcactgcactgaagcattgtggctccaagcctgtgtgtgtgtgtgtgtgtgt

SEQ ID NO: 154694 - DNA, 120 bp, Artificial Sequence
  ENSG00000106077_0 (sequence is synthesized)
tgaagacggaaatgggcggggctgcgagctagggcgggagaaggagcgcggggaggacgtaccttgtgagatgcgagccggccaacagcttgcaagcatgctccgctggacccgagcctg

SEQ ID NO: 154695 - DNA, 120 bp, Artificial Sequence
  ENSG00000106077_1 (sequence is synthesized)
gaggctcccgcgtgagggactcggcccccacggccctagcttcgcgagggtgcctgtcgcacccagcagcagcagcggcggccgagggggcgccgagccgaggccgcttccgctttccta

SEQ ID NO: 154696 - DNA, 120 bp, Artificial Sequence
  ENSG00000106077_2 (sequence is synthesized)
caggcttctggacggggaggcagccctcccggccgtcgtctttttgcacgggctcttcggcagcaaaactaacttcaactccatcgccaagatcttggcccagcagacaggccgtagggt

SEQ ID NO: 154697 - DNA, 120 bp, Artificial Sequence
  ENSG00000106077_3 (sequence is synthesized)
gctgacggtggatgctcgtaaccacggtgacagcccccacagcccagacatgagctacgagatcatgagccaggacctgcaggaccttctgccccagctgggcctggtgccctgcgtcgt

SEQ ID NO: 154698 - DNA, 120 bp, Artificial Sequence
  ENSG00000106077_4 (sequence is synthesized)
cgttggccacagcatgggaggaaagacagccatgctgctggcactacagaggccagagctggtggaacgtctcattgctgtagatatcagcccagtggaaagcacaggtgtctcccactt

SEQ ID NO: 154699 - DNA, 120 bp, Artificial Sequence
  ENSG00000106077_5 (sequence is synthesized)
tgcaacctatgtggcagccatgagggccatcaacatcgcagatgagctgccccgctcccgtgcccgaaaactggcggatgaacagctcagttctgtcatccaggacatggccgtgcggca

SEQ ID NO: 154700 - DNA, 120 bp, Artificial Sequence
  ENSG00000106077_6 (sequence is synthesized)
tggagggtgaacttggatgccctgacccagcacctagacaagatcttggctttcccacagaggcaggagtcctacctcgggccaacactctttctccttggtggaaactcccagttcgtg

SEQ ID NO: 154701 - DNA, 120 bp, Artificial Sequence
  ENSG00000106077_7 (sequence is synthesized)
catcccagccaccaccctgagattatgcggctcttccctcgggcccagatgcagacggtgccgaacgctggccactggatccacgctgaccgcccacaggacttcatagctgccatccga

SEQ ID NO: 154702 - DNA, 71 bp, Artificial Sequence
  ENSG00000106077_8 (sequence is synthesized)
ccacgctgaccgcccacaggacttcatagctgccatccgaggcttcctggtctaagagttgctggcaagaa

SEQ ID NO: 154703 - DNA, 66 bp, Artificial Sequence
  ENSG00000106077_9 (sequence is synthesized)
aggaggcacaaaaccccaggcttcaagtctctgcagcctgctccacatttgggcacagaaggactc

SEQ ID NO: 154704 - DNA, 120 bp, Artificial Sequence
  ENSG00000106077_10 (sequence is synthesized)
gtctctgcagcctgctccacatttgggcacagaaggactcagacaggcactgtgtgggcacgaggttttacaggggtggtcagacctcaggctttaatgaataaagacactactcccaaa

SEQ ID NO: 154705 - DNA, 120 bp, Artificial Sequence
  ENSG00000106077_11 (sequence is synthesized)
accgggagctcaccacctcttatggcagcccattcttctgtgctcctactgttggaaattcctggagtctccttcctggcattctccgagattgccacccagccaggccagcccttcaga

SEQ ID NO: 154706 - DNA, 120 bp, Artificial Sequence
  ENSG00000106077_12 (sequence is synthesized)
ggctctccacacctttgacctgctgtccctacaagcctttggctgtctacccccagaatggggatatcaacgcagccccgtctcaccccactccccaggtgctgacggtggatgctcgta

SEQ ID NO: 154707 - DNA, 120 bp, Artificial Sequence
  ENSG00000106077_13 (sequence is synthesized)
gcaacctgggactcacatgatcgttggatgaccaagttcaggctccaggagccatgcctgagactccctatgtctgcctaagactggtcccagttcggttctctcccacagccagagctg

SEQ ID NO: 154708 - DNA, 120 bp, Artificial Sequence
  ENSG00000106077_14 (sequence is synthesized)
gaaagacagccatgctgctggcactacagagggtgatacacccaaggtgccccggatggtattgtagaccaggacctgtcaagggaagagtggcacccccagaccgcacaaggaacctcc

SEQ ID NO: 154709 - DNA, 120 bp, Artificial Sequence
  ENSG00000106078_0 (sequence is synthesized)
agagacgattccagccccttccgtccgccgcgctccgccgctgtcctccgccggcccgcgtgggaggacgatgggtcagcgcggaaaaagtgaatgagggcggcagcggtggcggcggta

SEQ ID NO: 154710 - DNA, 120 bp, Artificial Sequence
  ENSG00000106078_1 (sequence is synthesized)
gcccggagcaccgcccgcgtcccggcccccggcaccatggacgcgccgcgcgcctcggcggccaagcccccgaccgggaggaagatgaaggctcgtgctcccccacctcctggaaaggct

SEQ ID NO: 154711 - DNA, 120 bp, Artificial Sequence
  ENSG00000106078_2 (sequence is synthesized)
ccccacctcctggaaaggctgccactctgcatgtgcacagtgaccagaagcccccccacgatggggccctcgggtcgcagcagaacttggttcgcatgaaggaggcgctgagggccagca

SEQ ID NO: 154712 - DNA, 120 bp, Artificial Sequence
  ENSG00000106078_3 (sequence is synthesized)
ccatggacgtcaccgtggtcctgcctagtgggctggagaagaggagcgtgctcaatgggagccatgcgatgatggacctactggttgaactttgccttcagaaccacctgaatccatccc

SEQ ID NO: 154713 - DNA, 120 bp, Artificial Sequence
  ENSG00000106078_4 (sequence is synthesized)
accatgcccttgaaattcggtcttcagaaacccaacaacctttgagttttaagccaaatactttgattgggaccctgaatgtgcatactgtgtttctgaaagaaaaagttcctgaagaga

SEQ ID NO: 154714 - DNA, 120 bp, Artificial Sequence
  ENSG00000106078_5 (sequence is synthesized)
aggttaagcctggtccccctaaggtgcctgagaaatctgtgcgtttggtcgtgaattacctgcggacacaaaaagctgttgtgcgtgtgagccctgaggttcctctccagaatattctcc

SEQ ID NO: 154715 - DNA, 120 bp, Artificial Sequence
  ENSG00000106078_6 (sequence is synthesized)
cagtcatttgtgcaaagtgtgaggtcagcccagagcacgtggttctcctcagggacaacattgccggagaggagctggagctgtccaagtccctgaacgagctcgggataaaggagctct

SEQ ID NO: 154716 - DNA, 120 bp, Artificial Sequence
  ENSG00000106078_7 (sequence is synthesized)
acgcgtgggacaacagaagagaaacctttaggaaatcatcacttggcaatgatgagacagataaagagaagaaaaaatttctgggatttttcaaagttaataaaagaagcaatagtaagg

SEQ ID NO: 154717 - DNA, 120 bp, Artificial Sequence
  ENSG00000106078_8 (sequence is synthesized)
gctgtttaacgacccccaactccccatccatgcactcacgttctcttacgctgggtccatccctctcgctgggcagcatctcaggggtgtccgtgaagtcggagatgaagaagcgccgag

SEQ ID NO: 154718 - DNA, 120 bp, Artificial Sequence
  ENSG00000106078_9 (sequence is synthesized)
cccctcctcctccaggttcagggccacctgtgcaagacaaggcatcggaaaaggtatctcttgggtcacagattgatttacagaagaagaagcggcgagcgccagctccccctccaccac

SEQ ID NO: 154719 - DNA, 120 bp, Artificial Sequence
  ENSG00000106078_10 (sequence is synthesized)
agccaccaccaccgagtcccctgatccccaaccgcactgaggataaggaggagaacaggaagagcacgatggtaagcctgcccctggggtctggcagccactgcagcccggatggagccc

SEQ ID NO: 154720 - DNA, 120 bp, Artificial Sequence
  ENSG00000106078_11 (sequence is synthesized)
cgcaggtgctgtcagaggcggaggagaccgtgtcagttggcagctgttttgcgtcggaggacacgaccgaggactcaggagtgatgagttccccctcagacatcgtctctctggactcgc

SEQ ID NO: 154721 - DNA, 120 bp, Artificial Sequence
  ENSG00000106078_12 (sequence is synthesized)
agcaggacagcatgaaatacaaagacaagtgggccacagaccaggaagactgcagtgaccaggacctcgctggaaccccagacctgggtccccagaagagccccttgtgggagaagaatg

SEQ ID NO: 154722 - DNA, 120 bp, Artificial Sequence
  ENSG00000106078_13 (sequence is synthesized)
gctctgagaactcacatctgagaactgaaaaagctgtcacagcctcaaatgatgaagaagacctattaattgctggagagttccgtaaaacccttgcagaacttgatgaagacctggaag

SEQ ID NO: 154723 - DNA, 120 bp, Artificial Sequence
  ENSG00000106078_14 (sequence is synthesized)
aaatggaagacagctatgaaacagacaccagctccctcaccagctccatccatggtgcatccaaccactgcccacaggatgccatgatccctcacggcgacacagatgcaatcccagtaa

SEQ ID NO: 154724 - DNA, 120 bp, Artificial Sequence
  ENSG00000106078_15 (sequence is synthesized)
cattcataggggaagtttcagatgatcctgtggattcggggttgttttccaatagaaacaacaatgctgggtctttcgactcggagggtgttgccagcaggagagactccctggcgccac

SEQ ID NO: 154725 - DNA, 120 bp, Artificial Sequence
  ENSG00000106078_16 (sequence is synthesized)
ttcaagctgagcacagccagccccatgaaaaggcaagggaggaagtacctgccctgcaccccgcttcccatgacgtcggaaaaggaatccgtgtggccttatctaacatctctaaagatg

SEQ ID NO: 154726 - DNA, 120 bp, Artificial Sequence
  ENSG00000106078_17 (sequence is synthesized)
ggaatctaatggaaacggcgcccagggtgacttcttttgcttcgaatcttcacacagacaacctaaatgcaaaagtgaaagacaaagtgtatggctgtgctgacggggagaggactcaag

SEQ ID NO: 154727 - DNA, 120 bp, Artificial Sequence
  ENSG00000106078_18 (sequence is synthesized)
ccacagagagagtgaattcccaaccggtgaatgaaaaggacagcaacgataaaaacgctgccttggcaccaacatcatggcaccaacgaggccaaaacccagggaaaagctacagactta

SEQ ID NO: 154728 - DNA, 120 bp, Artificial Sequence
  ENSG00000106078_19 (sequence is synthesized)
agcacggcctcacaacgtataaaatcattcctccaaagtcagagatgcgatgttacgacagagatgtgtccctctccaccggagccattaagattgacgagctggggaacttggtgagtc

SEQ ID NO: 154729 - DNA, 120 bp, Artificial Sequence
  ENSG00000106078_20 (sequence is synthesized)
ctcacgccaccggcatcaggatcatttccctgtcttcgtctgtgcctgaagcagaatctcagcccattgggaaagtcagagagttctggaggtgcaactctgtggaaaaacacctgggcc

SEQ ID NO: 154730 - DNA, 120 bp, Artificial Sequence
  ENSG00000106078_21 (sequence is synthesized)
gaccctcagagagctctgccaggggacccccctccacccctgtgcccacgcagacgcagaatccagagagcagactccaagcagaccccaagccaatatcgccccagcagaagtctgccc

SEQ ID NO: 154731 - DNA, 120 bp, Artificial Sequence
  ENSG00000106078_22 (sequence is synthesized)
taggggaggggagaaaccagccccccaccatgggcatgggtcacgtgagggtgccagcagctcacaccacagaagtcacatttctcaagcctcagagaagaacgtccagccagtatgtgg

SEQ ID NO: 154732 - DNA, 120 bp, Artificial Sequence
  ENSG00000106078_23 (sequence is synthesized)
cctctgccattgccaagcgcataggagccccaaaagtccatgctgatgtggtgaggccacacggttatgccgagaagggttatgcaggcaaggcgccagtgctggctgcaccacctgtca

SEQ ID NO: 154733 - DNA, 120 bp, Artificial Sequence
  ENSG00000106078_24 (sequence is synthesized)
ctgtgaaagatgacaggacatccagcccacactcagagacacaaggatggaaggatggtgcccagtggccctgtgtcactcctcccaacaaccacggggaagatttggcagtgggagccc

SEQ ID NO: 154734 - DNA, 120 bp, Artificial Sequence
  ENSG00000106078_25 (sequence is synthesized)
ctcctaggggggaggtcattggcccacacaggaagttgtctactcaggacagacctgctgctatccacagaagctcctgtttctcactggttcagtcttcccagagggatcgtgtttctg

SEQ ID NO: 154735 - DNA, 120 bp, Artificial Sequence
  ENSG00000106078_26 (sequence is synthesized)
tgggacagagctgtggtttcagtggaaagcaaagcacaagtagccaggaggccagctcagcatctgagcccagacgcgcacctgatggtacagacccaccccctccacacacatctgaca

SEQ ID NO: 154736 - DNA, 120 bp, Artificial Sequence
  ENSG00000106078_27 (sequence is synthesized)
ctcaggcctgcagcagggagctggtcaatggctctgtgcgcgccccaggccacggcgagccttcccaccctccaggagggtctggcacagaaagccacattctcctagaaagagaggaaa

SEQ ID NO: 154737 - DNA, 120 bp, Artificial Sequence
  ENSG00000106078_28 (sequence is synthesized)
agcccagtgtgttctctacagatggaaatgaaacagacagtatttggccacccagcatttttgggccgaagaaaaaattcaaacctgttgtccagagaccagtcccaaaagacacatccc

SEQ ID NO: 154738 - DNA, 120 bp, Artificial Sequence
  ENSG00000106078_29 (sequence is synthesized)
tgcactctgccctgatggaagccatccactctgcgggagggaaggacagactacgcaagacggcagaacacaccggggagggcaggccagcgaaactgtcctacacggaggcagagggcg

SEQ ID NO: 154739 - DNA, 120 bp, Artificial Sequence
  ENSG00000106078_30 (sequence is synthesized)
aacgatctgcactgctggcagctatccgcgggcacagcggcacctgcagcctgaggaaggtggcatcctctgcttctgaggagctccagagcttccgagatgccgcactctctgctcagg

SEQ ID NO: 154740 - DNA, 120 bp, Artificial Sequence
  ENSG00000106078_31 (sequence is synthesized)
gctcggaaagtcctctgctagaagaccttggtcttctgtccccaccagccattcccccaccaccccctccaccctcccaggctctctctgcaccaaggacggcctccaggttcagcacgg

SEQ ID NO: 154741 - DNA, 120 bp, Artificial Sequence
  ENSG00000106078_32 (sequence is synthesized)
gcaccctcagcaacaccgcagacgcaaggcaagccttgatggacgccatccgctccggcacaggggctgcgagactgagaaaggtgcccttgctcgtgtgaatgaacagaggccagagaa

SEQ ID NO: 154742 - DNA, 120 bp, Artificial Sequence
  ENSG00000106078_33 (sequence is synthesized)
ttgcagaaacccacctgtaatatgcccacaggcgtcactcaaggagtctgcatagccaggaacatcaagttttggtgttactttcttgtctacaggccaaatgcgcacagttgattttcg

SEQ ID NO: 154743 - DNA, 120 bp, Artificial Sequence
  ENSG00000106078_34 (sequence is synthesized)
gtgtgttcctgtataacggcttgaaaggaaaggagaagatgctgtgtcgctgcgcagctcgtgtgccaaggaaatgtgttttgcctctgaatatcttaagttgctaataaacgattcttg

SEQ ID NO: 154744 - DNA, 120 bp, Artificial Sequence
  ENSG00000106078_35 (sequence is synthesized)
ttggcaggttaatgggactataaatgctggagcccagcactcacacttaattatatttatgggcaaagtaaaaagaatcatgccttagactgattttggacctttgagacttttaccaca

SEQ ID NO: 154745 - DNA, 120 bp, Artificial Sequence
  ENSG00000106078_36 (sequence is synthesized)
tacagatggatgaaactacttactgatttaagatcttttgaattttagaaaaaacatatgaatcagatggaacaatctgaatgtgatatgctccatgatgctgtgtgttttggtagtaag

SEQ ID NO: 154746 - DNA, 120 bp, Artificial Sequence
  ENSG00000106078_37 (sequence is synthesized)
aaaaaaaaattgggaggcttttcaaaggtggctttgttaggtagtaaaactgctggattcttcttcctcaaatatttggggctaacacttcacagagggtcacagtccatgatctgacca

SEQ ID NO: 154747 - DNA, 120 bp, Artificial Sequence
  ENSG00000106078_38 (sequence is synthesized)
actaagcttttaaaaatcaactattaccacccagaaaacagtcctacgtgatcatgtggccagggcatgcccgagtcctgcaagggtggcgggtggctgaggtcacaccaccactggagt

SEQ ID NO: 154748 - DNA, 120 bp, Artificial Sequence
  ENSG00000106078_39 (sequence is synthesized)
ggatgggcagtgccccacatggacagccattccccaggctatgaagtgacataggcctcccccacggtgcctgtgtacggagcctgatgacttcactgggagccttctggaatcctgcag

SEQ ID NO: 154749 - DNA, 120 bp, Artificial Sequence
  ENSG00000106078_40 (sequence is synthesized)
agggtcaaggagcagggatgttggatgcccacctgtcaagagttcagatcaaagttgcgctgagagcatcacaattttggttcagccttgacgcgtttgtccaacagctcattggctccc

SEQ ID NO: 154750 - DNA, 120 bp, Artificial Sequence
  ENSG00000106078_41 (sequence is synthesized)
tttgtatgatatcgtggtcttctcacatggtgcccagtcaccaatatttataatgaggtctaactacagcagtagtttttcatatatatctctaaaacattttgttatattgaaaaaagt

SEQ ID NO: 154751 - DNA, 120 bp, Artificial Sequence
  ENSG00000106078_42 (sequence is synthesized)
aatagaaatcaagatgtgttgatgaaataaaatgtgtatctgagtgagaaaacaagtatggtgaggtcactttaatgtttcacagcgatctcagatctaggcctcaggtagaatggaagc

SEQ ID NO: 154752 - DNA, 120 bp, Artificial Sequence
  ENSG00000106078_43 (sequence is synthesized)
tgttctgcattcactgattaacgttgctaaactcttggtgaggcacgagctaccagccaattgctcttcatcacagctatctgtcttttagtgccacaaataaaagaaaatcaaatctta

SEQ ID NO: 154753 - DNA, 120 bp, Artificial Sequence
  ENSG00000106078_44 (sequence is synthesized)
caccccagttagtgcttcccccacccccgccctaccctcctcccgacacagacgtggtggagcctctcagctttcccggggaaggcgctggttccgaggcctcagacccgatacccaaac

SEQ ID NO: 154754 - DNA, 120 bp, Artificial Sequence
  ENSG00000106078_45 (sequence is synthesized)
taagaactttgtgactgcggaatcattgagaaacattttctacattccagaccgcttctagaactctgaaactttgtgactgcatttacaaaggagtgtttaaaacacatgtgagacctt

SEQ ID NO: 154755 - DNA, 120 bp, Artificial Sequence
  ENSG00000106078_46 (sequence is synthesized)
ggagagctgcaccgtccagtatgtgtgtggctgccgagcgcttgccaagtgtctggtccaaattgacatgtgctgttaagtgtaaaatatacatcaaatctggtacagaaagaaataatt

SEQ ID NO: 154756 - DNA, 120 bp, Artificial Sequence
  ENSG00000106078_47 (sequence is synthesized)
attattggcagaaatcactaaattgttttattaaaattctacctatttctttatacattttcaatgttattataaaaatattttaaattatacatgtggctcatgttatattgggcacca

SEQ ID NO: 154757 - DNA, 120 bp, Artificial Sequence
  ENSG00000106078_48 (sequence is synthesized)
gggcaccattgttctaggactctgaagctttgctaatacaggaacatttacaaatggaagggggaggttaagcacatacgactatcatcaactgcatattttcccaggcttcttgccttt

SEQ ID NO: 154758 - DNA, 120 bp, Artificial Sequence
  ENSG00000106078_49 (sequence is synthesized)
agttaatcaagtaatcactttgaaatcacaggagttggtttggttgtcattagcaaattggattgctacctaaaagcaacatctctctcctctcagactttttttttttttcattaattc

SEQ ID NO: 154759 - DNA, 120 bp, Artificial Sequence
  ENSG00000106078_50 (sequence is synthesized)
tgccactgtactagcctcatcaaaaagaaaaagtgacctcatgtgctatgaacccatcttgtacatttcggattggtcagattcagcccattctccctcatagcaaatgaaaacaacaaa

SEQ ID NO: 154760 - DNA, 120 bp, Artificial Sequence
  ENSG00000106078_51 (sequence is synthesized)
tcaaaaagcgcttttggctcctggcactaactgaatttgactgtccctagttctcgtttttgctggaggctggggtatgaatgcagaggctcagcaagccctgcacacacccggctgggt

SEQ ID NO: 154761 - DNA, 120 bp, Artificial Sequence
  ENSG00000106078_52 (sequence is synthesized)
ggatcggtcagcctgccaccctccgaccatcccaagaggctgggcccaaggacgcaggtccacttcctgggcagactctggtttgaaacttgccggtgctgagctgtgtccctcatattg

SEQ ID NO: 154762 - DNA, 120 bp, Artificial Sequence
  ENSG00000106078_53 (sequence is synthesized)
catgccccagtagcctaaacattcacattccctgcagagtccccaactccgtgtgagaaaataactgcaatacttattcaacacatgcagcctgatatcaaaatgtcttccctgtgtttg

SEQ ID NO: 154763 - DNA, 120 bp, Artificial Sequence
  ENSG00000106078_54 (sequence is synthesized)
tttgcatttatttccttgatcttaagccagaacaaactgtcaataaggaacgtttctaaagattgaggtatgtgttggtgggggggaaggaagcccgggagaaaaacatctgggcaggtt

SEQ ID NO: 154764 - DNA, 120 bp, Artificial Sequence
  ENSG00000106078_55 (sequence is synthesized)
tactttaagctaacagaggctgatgtttcttgctgactgctaactcttcagggacacatacctagggctcccctgctaagcccacagggaactggcctccaagcccagtgactaagggca

SEQ ID NO: 154765 - DNA, 120 bp, Artificial Sequence
  ENSG00000106078_56 (sequence is synthesized)
taaatctggtggttttgcaaagagagaggaatgtttataatccattagtaaccctttggagagaagtagatgggagttagtaaggaaggaaaatactgctgtctctccctcctgctttct

SEQ ID NO: 154766 - DNA, 120 bp, Artificial Sequence
  ENSG00000106078_57 (sequence is synthesized)
tacactggaaagtaaaatcactacattgccattggctctggcttttgctagataatccattcatacatgctcagaacacagccgccctgttttgcatcaaaagaagagcaggctgctcct

SEQ ID NO: 154767 - DNA, 120 bp, Artificial Sequence
  ENSG00000106078_58 (sequence is synthesized)
ctttcctctctcagagatgccaggagcttggcagcctcaggaggaacaccaaacaaggtcctgggctgcgtggtggccagaccttccctcactccacggtgcacacaggctgggagctcc

SEQ ID NO: 154768 - DNA, 120 bp, Artificial Sequence
  ENSG00000106078_59 (sequence is synthesized)
tagctcatgtccactctttctttcagggcaagcagggccccaaggagccagccccacactgaagtgtgggggagcaaagctggagcagaggtgggatgcagaggtaccagcattgcctgg

SEQ ID NO: 154769 - DNA, 120 bp, Artificial Sequence
  ENSG00000106078_60 (sequence is synthesized)
aaccaagcagcagcgtccggggcaacctctatagagtgccaagtgaggccagtggtgggagggagctggacaggaaaaaacacagggatgaaggactagggctgagcacagggtccccag

SEQ ID NO: 154770 - DNA, 120 bp, Artificial Sequence
  ENSG00000106078_61 (sequence is synthesized)
actccagaaaggcagctgtaactggtggataggggagaaaccagctcagaagcagccccaagcgcctggagctgggctcctgctgtttctagagggcagggagcccggagcctgggagga

SEQ ID NO: 154771 - DNA, 120 bp, Artificial Sequence
  ENSG00000106078_62 (sequence is synthesized)
ggaaggtgttgaagggctgagactgttcagaccttgtacagcctctctgttacagtttcaggctgacagccacgcactaagattgctaggcactcagtaacaaaataaagtgcttactgt

SEQ ID NO: 154772 - DNA, 120 bp, Artificial Sequence
  ENSG00000106078_63 (sequence is synthesized)
gtgcagtgtaagaagaatgcagactcctttgcaggaaagaattcttgttcactaaaggacaaaattatccttttaaattttgctggctaaaaatttgctctgtcactcaagctgctttga

SEQ ID NO: 154773 - DNA, 120 bp, Artificial Sequence
  ENSG00000106078_64 (sequence is synthesized)
actcaaccaagcacagttctaaagaaaaagggtaaaatattcatcctaattcatccttttccttaagtcatgctggttggtttcttgttagatttctgtctccgccttgtccaaaggtat

SEQ ID NO: 154774 - DNA, 120 bp, Artificial Sequence
  ENSG00000106078_65 (sequence is synthesized)
ttgctatttttaaatcatcacagtgtttctatatatgtgtgtgctgatttcttcacataacatgctaacataagcatggatgtgtgtttctacatagacttaatgatcatcatatttact

SEQ ID NO: 154775 - DNA, 120 bp, Artificial Sequence
  ENSG00000106078_66 (sequence is synthesized)
gattttaatgccctttgaaatatatatgtaataatttaggtaactgcctagtgctggacatttctagaattcttacatgaactttgttgtatttatatttttccttctatagggtttcct

SEQ ID NO: 154776 - DNA, 120 bp, Artificial Sequence
  ENSG00000106078_67 (sequence is synthesized)
taaagcagattattaaaaaagagattaatgggccaaagttcttacaaagataacgtgatttttgtttgtgtgttttttgatatgtatttccacattgctttccaattaaaacctgtagca

SEQ ID NO: 154777 - DNA, 120 bp, Artificial Sequence
  ENSG00000106078_68 (sequence is synthesized)
acaagtgtgggtctgtcagattcatcacatcttcatcagcttggggtgggtttttgttttgttttgttttgttttgctattttgcaaaatggtagaatcagtggagtttttatcttatta

SEQ ID NO: 154778 - DNA, 120 bp, Artificial Sequence
  ENSG00000106078_69 (sequence is synthesized)
ttttttttaattcttattgatatcattatgttccatgtctcatagtgacgtgatcaagcatactttaaaataaaggcaaatactttgaagtaaaagtatgtctgtaattttgtttggctg

SEQ ID NO: 154779 - DNA, 120 bp, Artificial Sequence
  ENSG00000106078_70 (sequence is synthesized)
ggctttaagcatcctaaactaagagcaagcatttaaaaagttttccatctttccaagtatttaaatctcttttccatttcagattgctcttttatatggcaatttccatttttctctgcc

SEQ ID NO: 154780 - DNA, 120 bp, Artificial Sequence
  ENSG00000106078_71 (sequence is synthesized)
atatattttattaaaaatttaaatgtatttaaaccatctcattccatgaaagagaaaagcagaactttagtaaagtgcattcaaataattaaagtccatggcaaaagcaatagggaagac

SEQ ID NO: 154781 - DNA, 120 bp, Artificial Sequence
  ENSG00000106078_72 (sequence is synthesized)
agtcatgcacctcttgtggtccttattaatgggtccacatgcacacacatctccaaccagccccctttgtgtagcttgtcagaggacattagctgagactaatctggaagccacttcctg

SEQ ID NO: 154782 - DNA, 120 bp, Artificial Sequence
  ENSG00000106078_73 (sequence is synthesized)
gctcccaaatggacatagtcaccaaatcagaaagactcatttatcagaataaaaactttgctacgtgaggattgtgcaaagcttatttcatgcatcattatctgggcctgattagcagtg

SEQ ID NO: 154783 - DNA, 120 bp, Artificial Sequence
  ENSG00000106078_74 (sequence is synthesized)
atggaaattggtcctcaatttttaacaatcagcggaaaacaaaccttcagctttcactgaagatagacaattgccatagacatgtctctgtgttttctgcacaataggaaaatagaggca

SEQ ID NO: 154784 - DNA, 120 bp, Artificial Sequence
  ENSG00000106078_75 (sequence is synthesized)
agagcccttgcaaagacagtttttaaattgttttggcagcagttgtctcacagatgccattgtccctgtgacgcaaatgaagccagatcccgctctctgagcagacgggttgacatcttc

SEQ ID NO: 154785 - DNA, 120 bp, Artificial Sequence
  ENSG00000106078_76 (sequence is synthesized)
ctggatgccccgtgccacaggggccacattattatgtgttgtggccccagatgcagctggtccttcttgggctttgggggcaggcaggcctggttccagatgccagtgtgacctgggcag

SEQ ID NO: 154786 - DNA, 120 bp, Artificial Sequence
  ENSG00000106078_77 (sequence is synthesized)
acatagtttcatcactgtacaacagtgacaacaacactacctgcctgaaaaactgtgagggttataataagataatttatgcaaaagagctctgtgcgggggctggcacaaaggcatgca

SEQ ID NO: 154787 - DNA, 120 bp, Artificial Sequence
  ENSG00000106078_78 (sequence is synthesized)
gacaggcctcacactgctaggagcttcctcctgttaagtctgagaggaggcccttgggaagggtcttgcggagtcaagggtggagcagttactcctgctactgttgctgtgaggtttttt

SEQ ID NO: 154788 - DNA, 120 bp, Artificial Sequence
  ENSG00000106078_79 (sequence is synthesized)
ggccatccttattgtccttatgtcccagttcaagattctagggagtacagctcttcaagtggcattatcaggcccccaagccctgcccctgcaagtggcattatcaggctccctgtcacc

SEQ ID NO: 154789 - DNA, 120 bp, Artificial Sequence
  ENSG00000106078_80 (sequence is synthesized)
caccaagggtaggaattaagccaaagtaaacatagagtctgtaaaagtcatttatagtagaggagtgaaatttctcgttttctgagtctggcagggtgggctactgctagggtggacaca

SEQ ID NO: 154790 - DNA, 120 bp, Artificial Sequence
  ENSG00000106078_81 (sequence is synthesized)
gatggaggctgagcttatgaagttggtgggacttctgggaacactcccccatgcagccctgcacaaccctccccacggacctcctaacagcaggcagatcctgcaccagaggtatgtagc

SEQ ID NO: 154791 - DNA, 120 bp, Artificial Sequence
  ENSG00000106078_82 (sequence is synthesized)
ctttatcactgggaccttgaacgacgctgcactcaaatccgcaagtgccaaggaacagccgggctgtgcagtgttgaggtgaggtggaccagcctccagccacgtgcacatgcttggcct

SEQ ID NO: 154792 - DNA, 120 bp, Artificial Sequence
  ENSG00000106078_83 (sequence is synthesized)
ccagatggcttcactccttcttgccaggtgccaggtgcaggggactgctgtagcgcaaggcacagatgcaagcaaatcctggatcacgtgaaccgtcttttgtgcggtggaattaaaact

SEQ ID NO: 154793 - DNA, 120 bp, Artificial Sequence
  ENSG00000106078_84 (sequence is synthesized)
ttgacttcagtctgcagagtgaatgaaagctgtgtgtggtttggttactgtaacactttggggccccacacacacaccatatatcacatgtccaccacatacaagacatatactccacac

SEQ ID NO: 154794 - DNA, 120 bp, Artificial Sequence
  ENSG00000106078_85 (sequence is synthesized)
atgcacacacgctacacgcatcccacacatacctgtgcacacacatgggggacacacacacccatgaacaatctgcgtctccgtagttctgaggacaacagcagtacagtgagtatgtga

SEQ ID NO: 154795 - DNA, 120 bp, Artificial Sequence
  ENSG00000106078_86 (sequence is synthesized)
ctgcttgaatttgagtatgagctgttctatcctcagatattcctggaaaggagtacattaaatcaatagtaagagaaatgagtgctcctttctctttggtcttccctagaactgaaaaag

SEQ ID NO: 154796 - DNA, 120 bp, Artificial Sequence
  ENSG00000106078_87 (sequence is synthesized)
taaggaggagaacaggaagagcacgatggtttatggagcagctgaagctgtgataagacttctgagcttgcttctgaataccacagccccgggcacagcaaagccaagaaccctgtggat

SEQ ID NO: 154797 - DNA, 120 bp, Artificial Sequence
  ENSG00000106078_88 (sequence is synthesized)
gagtgagggccgcagttctctacacaatcctgaaatcaagtgttcctgtttctcttcctcctccccatttccccagtcactgctcagccttctcttgggtctttcaagcatttgtgaatg

SEQ ID NO: 154798 - DNA, 120 bp, Artificial Sequence
  ENSG00000106078_89 (sequence is synthesized)
catgtgcacacttagacacacacacgcacacacacacaacccatcttgtgtcttacctacctctgaaatattggcatttgggagacaatccctaatcagctaacacttgtttttttctat

SEQ ID NO: 154799 - DNA, 120 bp, Artificial Sequence
  ENSG00000106078_90 (sequence is synthesized)
cctctgtgtgcttgttagaatactgtgaaggtgttttctatggaccgacttctaaatgttcctcctgaaatcagtgttattcacacagttctaatgtaatgaattctgtctgtctgaaag

SEQ ID NO: 154800 - DNA, 120 bp, Artificial Sequence
  ENSG00000106078_91 (sequence is synthesized)
cttgccatattgtccctggtttctcccagctaatagagaggaaaatgagcctgaatatgaacccgtcaccacagaccgcactgcatcctttccaggcagcagggccctggagactgtgct

SEQ ID NO: 154801 - DNA, 120 bp, Artificial Sequence
  ENSG00000106078_92 (sequence is synthesized)
caggcctggcagcctctgtgtttcacttaggcttgttttgctcaacccaggcaagacttttaaaattgtttgaataagctgcagcatcagtatgcttttttaaattgtgatttaaaaaaa

SEQ ID NO: 154802 - DNA, 120 bp, Artificial Sequence
  ENSG00000106078_93 (sequence is synthesized)
aatataaaatgtcccattccttccattttcaaatgcatacttcagtagatttaagtatattcacaatgctgtgaaaccgatctccaggacctcatcgtcctgcaaatctgatactctact

SEQ ID NO: 154803 - DNA, 120 bp, Artificial Sequence
  ENSG00000106078_94 (sequence is synthesized)
cactgaacagcaactcccctttgcctgcttgtctttttgcgcctggcttatttcacttagcacaatttcctcgaagtttatccatattgtagcatataacagaattcccttcccttttaa

SEQ ID NO: 154804 - DNA, 120 bp, Artificial Sequence
  ENSG00000106078_95 (sequence is synthesized)
agctaaatatctttcaagtatatgtatagaccacattttctttatccatccattgtcagtggacatttaagttgttcccgcttcatggttattgtgaatgatgctgcacaggtatgcaaa

SEQ ID NO: 154805 - DNA, 120 bp, Artificial Sequence
  ENSG00000106078_96 (sequence is synthesized)
cctttcccagtgtctcttctgccctggctctgattttcctgttgttcttcctcctttcaggataaaagggctcattgtatacccagaatttacttcctttggggtttacatataaatgca

SEQ ID NO: 154806 - DNA, 120 bp, Artificial Sequence
  ENSG00000106078_97 (sequence is synthesized)
ttaataacagagatttgtttgattgaggtttatatttttttgaaggaggtaaattatatgcaaattttaggttgataatattcacctgtctgaaattcactgatacttggaaatgttcct

SEQ ID NO: 154807 - DNA, 120 bp, Artificial Sequence
  ENSG00000106078_98 (sequence is synthesized)
gtgaagaactctgctttattttaattcattattaattcatgtttttcttattggatattcagttccagaatttattgccaatttttcttaaaactagattgtatccataaattgaccagt

SEQ ID NO: 154808 - DNA, 120 bp, Artificial Sequence
  ENSG00000106078_99 (sequence is synthesized)
atagtcaatttggatagaactgaaactttctgtctacctggtaaaactaagtgcctaaaaacatgaactataaatgtagttactaggaactcacaacttatatatactatccattcaatg

SEQ ID NO: 154809 - DNA, 120 bp, Artificial Sequence
  ENSG00000106078_100 (sequence is synthesized)
atacataggacccaatgtctttgtgtttttgaggttttcctgttactgtgtactttgccattttacatagttcactaaaaagaaagaagtgggagaagaagggtgttctattcattattc

SEQ ID NO: 154810 - DNA, 120 bp, Artificial Sequence
  ENSG00000106078_101 (sequence is synthesized)
tacttgatgctaggtattacaccagttttgtgggctataagagtgaataacaagcacgtgacctctggccttggattttactacctgtggctccccaggcacatgaaaagaagtaaagat

SEQ ID NO: 154811 - DNA, 120 bp, Artificial Sequence
  ENSG00000106078_102 (sequence is synthesized)
ggttccatttgataagtactagtcacaagggttgtacatgtgataaagatgccagaggttgtgaccaccatgtctgtgcagaggtgctgctggctcctctttgagtgtgagatccctctg

SEQ ID NO: 154812 - DNA, 120 bp, Artificial Sequence
  ENSG00000106078_103 (sequence is synthesized)
cagtcacacaacctcacccagttacgaagagctagtcacctcaactgcattgtcccaagacaggcagagtaggtaaaaatagtcatatgttaaaattcaaggtttagataaaaagacaac

SEQ ID NO: 154813 - DNA, 120 bp, Artificial Sequence
  ENSG00000106078_104 (sequence is synthesized)
tagttcttgcttgctttgattaacttttattatgcagatgcatttgaactggagaagcttgtcatgtttctctctaaaagatgtttttaaatgttattgctcaaaatggaaaaaaaaaaa

SEQ ID NO: 154814 - DNA, 120 bp, Artificial Sequence
  ENSG00000106078_105 (sequence is synthesized)
aagaatcagtaagtattcctgacatgtaggattgttgcctggctgatcacaatgaaaatgttagctatgactaatgaaggaattatcacaacttacattggtattaataataaacaaata

SEQ ID NO: 154815 - DNA, 120 bp, Artificial Sequence
  ENSG00000106078_106 (sequence is synthesized)
taagccaaagctatatataaccaatttagtgctatgtattggtgaaaaaaacagaaagttacagaaattactcacaatgaaacatagaacaagttagaaagggccttttttttttttgaa

SEQ ID NO: 154816 - DNA, 120 bp, Artificial Sequence
  ENSG00000106078_107 (sequence is synthesized)
ataaaggacttttgtctgataagtagcagtcatttgacctcaaatcattaaatggggaaagtctaaacaagaaaaggtaatgtttacctgaatgttggggaaagcattaggatttatggc

SEQ ID NO: 154817 - DNA, 120 bp, Artificial Sequence
  ENSG00000106078_108 (sequence is synthesized)
ccagacttaaagattgtagaagattgtatataattacagcaataagcatttgtgtaagaagtagctattatgctgaagaaagatgggcacacaaaatctctaggcaaatccttggaacag

SEQ ID NO: 154818 - DNA, 120 bp, Artificial Sequence
  ENSG00000106078_109 (sequence is synthesized)
gggaaagtgatactgctcatagaattattggttcgagaggcagcaaatatgatgcaataagtatatcaaactcaattaaaaatagaggacagaggtatgtggtgggggaaaacaaatgca

SEQ ID NO: 154819 - DNA, 120 bp, Artificial Sequence
  ENSG00000106078_110 (sequence is synthesized)
atagggctaagtcagcttacagggggtgaatataatttgaacatggcacccccaatttacttgatcataaagttagccaaagacatgagtggtcgatctttgacaatactctagtgatct

SEQ ID NO: 154820 - DNA, 120 bp, Artificial Sequence
  ENSG00000106078_111 (sequence is synthesized)
ccatgagagatggcctgatagatgttggatagaatgaagggccatttgatgaacaagttttgtagatttacatgtgacttggcactgtgctgacattagagccttctaagaatcagataa

SEQ ID NO: 154821 - DNA, 120 bp, Artificial Sequence
  ENSG00000106078_112 (sequence is synthesized)
attaattaggtgaaacattttttcccaaagcacttgcatttcagaaagtttctcatttctgactcagcttagaacccatcccttgttacaggtcatttctcctccttataagccatgtct

SEQ ID NO: 154822 - DNA, 120 bp, Artificial Sequence
  ENSG00000106078_113 (sequence is synthesized)
gtttcttttttccatcatgtcatacaccctatccacaaaagatggtagctcacgttttctaactagagacgtgcaggcaagttgagagcatgaagaatcccttgggaataccaattctgt

SEQ ID NO: 154823 - DNA, 120 bp, Artificial Sequence
  ENSG00000106078_114 (sequence is synthesized)
agcaaatgctaaggtaaaagaaaaactatgcattatttttcaactatagttggcttaaattcttagtttcaccctggagaccatgttgccagtggacaattgagcatgctgtgatttata

SEQ ID NO: 154824 - DNA, 120 bp, Artificial Sequence
  ENSG00000106078_115 (sequence is synthesized)
aaatgcaagctagtttatatgataatgtttgccatctcactttaccagtactgttgaccttttcatatgattctaaaatcacttacttgtaaataaatactcctagttctgtagatgaaa

SEQ ID NO: 154825 - DNA, 120 bp, Artificial Sequence
  ENSG00000106080_0 (sequence is synthesized)
aggttcgtgacccttgagaaaagagttggtggtaaatgtgccacgtcttctaagaagggggagtcctgaacttgtctgaagcccttgtccgtaagccttgaactacgttcttaaatctat

SEQ ID NO: 154826 - DNA, 120 bp, Artificial Sequence
  ENSG00000106080_1 (sequence is synthesized)
gaagtcgagggacctttcgctgcttttgtagggacttctttccttgcttcagcaacatgaggcttttcttgtggaacgcggtcttgactctgttcgtcacttctttgattggggctttga

SEQ ID NO: 154827 - DNA, 120 bp, Artificial Sequence
  ENSG00000106080_2 (sequence is synthesized)
tccctgaaccagaagtgaaaattgaagttctccagaagccattcatctgccatcgcaagaccaaaggaggggatttgatgttggtccactatgaaggctacttagaaaaggacggctcct

SEQ ID NO: 154828 - DNA, 120 bp, Artificial Sequence
  ENSG00000106080_3 (sequence is synthesized)
tatttcactccactcacaaacataacaatggtcagcccatttggtttaccctgggcatcctggaggctctcaaaggttgggaccagggcttgaaaggaatgtgtgtaggagagaagagaa

SEQ ID NO: 154829 - DNA, 120 bp, Artificial Sequence
  ENSG00000106080_4 (sequence is synthesized)
agctcatcattcctcctgctctgggctatggaaaagaaggaaaaggtaaaattcccccagaaagtacactgatatttaatattgatctcctggagattcgaaatggaccaagatcccatg

SEQ ID NO: 154830 - DNA, 120 bp, Artificial Sequence
  ENSG00000106080_5 (sequence is synthesized)
aatcattccaagaaatggatcttaatgatgactggaaactctctaaagatgaggttaaagcatatttaaagaaggagtttgaaaaacatggtgcggtggtgaatgaaagtcatcatgatg

SEQ ID NO: 154831 - DNA, 120 bp, Artificial Sequence
  ENSG00000106080_6 (sequence is synthesized)
ctttggtggaggatatttttgataaagaagatgaagacaaagatgggtttatatctgccagagaatttacatataaacacgatgagttatagagatacatctacccttttaatatagcac

SEQ ID NO: 154832 - DNA, 120 bp, Artificial Sequence
  ENSG00000106080_7 (sequence is synthesized)
tcatctttcaagagagggcagtcatctttaaagaacattttatttttatacaatgttctttcttgctttgttttttatttttatatattttttctgactcctatttaaagaaccccttag

SEQ ID NO: 154833 - DNA, 120 bp, Artificial Sequence
  ENSG00000106080_8 (sequence is synthesized)
gtttctaagtacccatttctttctgataagttattgggaagaaaaagctaattggtctttgaatagaagacttctggacaatttttcactttcacagatatgaagctttgttttactttc

SEQ ID NO: 154834 - DNA, 120 bp, Artificial Sequence
  ENSG00000106080_9 (sequence is synthesized)
tcacttataaatttaaaatgttgcaactgggaatataccacgacatgagaccaggttatagcacaaattagcaccctatatttctgcttccctctattttctccaagttagaggtcaaca

SEQ ID NO: 154835 - DNA, 120 bp, Artificial Sequence
  ENSG00000106080_10 (sequence is synthesized)
tttgaaaagccttttgcaatagcccaaggcttgctattttcatgttataatgaaatagtttatgtgtaactggctctgagtctctgcttgaggaccagaggaaaatggttgttggacctg

SEQ ID NO: 154836 - DNA, 120 bp, Artificial Sequence
  ENSG00000106080_11 (sequence is synthesized)
tgaggaccagaggaaaatggttgttggacctgacttgttaatggctactgctttactaaggagatgtgcaatgctgaagttagaaacaaggttaatagccaggcatggtggctcatgcct

SEQ ID NO: 154837 - DNA, 72 bp, Artificial Sequence
  ENSG00000106080_12 (sequence is synthesized)
acacatgcgtgcctgtaatcccagctacccaggaaggctgaggcggcagaatcacttgaacccggaggcgga

SEQ ID NO: 154838 - DNA, 120 bp, Artificial Sequence
  ENSG00000106080_13 (sequence is synthesized)
cacttgaacccggaggcggaggttgcggtaagccgagatcacctccagcctggacactctgtctcgaaaaaaagaaaagaaacacggttaataacatataaatatgtatgcattgagaca

SEQ ID NO: 154839 - DNA, 120 bp, Artificial Sequence
  ENSG00000106080_14 (sequence is synthesized)
aatatgtatgcattgagacatgctacctaggacttaagctgatgaagcttggctcctagtgattggtggcctattatgataaataggacaaatcatttatgtgtgagtttctttgtaata

SEQ ID NO: 154840 - DNA, 120 bp, Artificial Sequence
  ENSG00000106080_15 (sequence is synthesized)
aaatgtatcaatatgttatagatgaggtagaaagttatatttatattcaatatttacttcttaaggctagcggaatatccttcctggttctttaatgggtagtctatagtatattatact

SEQ ID NO: 154841 - DNA, 120 bp, Artificial Sequence
  ENSG00000106080_16 (sequence is synthesized)
tatagtatattatactacaataacattgtatcataagataaagtagtaaaccagtctacattttcccatttctgtctcatcaaaaactgaagttagctgggtgtggtggctcatgcctgt

SEQ ID NO: 154842 - DNA, 120 bp, Artificial Sequence
  ENSG00000106080_17 (sequence is synthesized)
aaaaaaaaaaaagaagcagacctacagcagctactattgaataaatacctatcctggattttaaaaaagaaaaaaatatatataattttattttaaattggcttttatctttaattcttt

SEQ ID NO: 154843 - DNA, 120 bp, Artificial Sequence
  ENSG00000106080_18 (sequence is synthesized)
tttatagtgtacaaaatgatattaagtgcattattatcttcgcttttcatggctctgagtcataaaacaagctggtggatctcactgtacctaatttatagacgaggaaattgtcattca

SEQ ID NO: 154844 - DNA, 120 bp, Artificial Sequence
  ENSG00000106080_19 (sequence is synthesized)
aaaagattgactgttatgcccagggtcagcactaacctgcagaaccagtattcagtccccaagttcagtgtcttctactgccctctactaatgaaaagtgaaaatttccctggggtctaa

SEQ ID NO: 154845 - DNA, 120 bp, Artificial Sequence
  ENSG00000106080_20 (sequence is synthesized)
ttctctcttcagtttgctgtgccgttgtttatctttgagtcttcattctctgaagatggctttctgcctgtttctggtacattagaattctcactatgatatagaaatggcttcagtttc

SEQ ID NO: 154846 - DNA, 120 bp, Artificial Sequence
  ENSG00000106080_21 (sequence is synthesized)
atagcataatcttgcagttagctctgaattgcctcaaaaaccctgaacaacgcgaggttccagatgtgttttacttctttcattcatatttacccccatttgttgtttaaaaagaattat

SEQ ID NO: 154847 - DNA, 120 bp, Artificial Sequence
  ENSG00000106080_22 (sequence is synthesized)
gaacaattattacatcatatgtagaccactttcactgattatatgttgacattttcctcagtaaaacataaagttcttaacaagactatactgtaacacctttctccaacaaaatcagct

SEQ ID NO: 154848 - DNA, 120 bp, Artificial Sequence
  ENSG00000106080_23 (sequence is synthesized)
gtatgttgaaaactattaagtcattgctaatgttttaagccataatacagacagccttatactctatgatgggagaagggaaagtagtttgtccgatggtgctactctgtataaacatta

SEQ ID NO: 154849 - DNA, 120 bp, Artificial Sequence
  ENSG00000106080_24 (sequence is synthesized)
ctgatgctatctatagtagggcaagaaaagtaaaaagagttttgattattcaggcagcatttttaaaaacctgtgaatttgtatcagttctcatctaaacatttggacacaagtataaaa

SEQ ID NO: 154850 - DNA, 120 bp, Artificial Sequence
  ENSG00000106080_25 (sequence is synthesized)
tgaaaacatatgcacaagttatggtttttaagttatctgctcttttttttggtttcactgtacctttgtactcttctattagtgggaataatcagacatgaactgtgacttcacatgtac

SEQ ID NO: 154851 - DNA, 120 bp, Artificial Sequence
  ENSG00000106080_26 (sequence is synthesized)
catgaactgtgacttcacatgtacagtcatacctcacttaatgatggagatgcactctgagaaatgtctaattaggttatttcatcgttgtgggaacatcatagagtgtacttacacaaa

SEQ ID NO: 154852 - DNA, 120 bp, Artificial Sequence
  ENSG00000106080_27 (sequence is synthesized)
atgtaggacatgtatatagcctattgctcctaggctacagcatgttgctgttctgaatcatgtaggcaattgtaacacaatggcaagtgtctgtttattcaaacatctaaacacagaaaa

SEQ ID NO: 154853 - DNA, 120 bp, Artificial Sequence
  ENSG00000106080_28 (sequence is synthesized)
tggcaagtgtctgtttattcaaacatctaaacacagaaaagatactacaacaataacaatatggtataaaagattttgtaaaaaatctggtcaggtgcagtggttcacgcctgtaatcct

SEQ ID NO: 154854 - DNA, 73 bp, Artificial Sequence
  ENSG00000106080_29 (sequence is synthesized)
cccagaaggtacaaaagctgaggttggaggatcacctgagcctggcaaggtcaaggctgcagtgagccatgat

SEQ ID NO: 154855 - DNA, 120 bp, Artificial Sequence
  ENSG00000106080_30 (sequence is synthesized)
tatatatatatggtgtgtgtatatatatatatatggtatacctgtatagggcacttactaacggagcttacagaactggaagttgctctggatgagtcagtggtgagtgaatgtaaaggc

SEQ ID NO: 154856 - DNA, 120 bp, Artificial Sequence
  ENSG00000106080_31 (sequence is synthesized)
tgtacactactgtagactttataaacaccgtacacttaggtgacactaaaatttataaaaaatgtttttcttctggttgggcatggtgccttatgcctataatcccagcattatgggagg

SEQ ID NO: 154857 - DNA, 120 bp, Artificial Sequence
  ENSG00000106080_32 (sequence is synthesized)
ccaaggtgggtggatcactcgaggtcatgagtttgggaccagccgggccaacatggctaaaccccatctctactaaaaatacgataattagccaggtgtggtggcacatgcgtgtagtcc

SEQ ID NO: 154858 - DNA, 75 bp, Artificial Sequence
  ENSG00000106080_33 (sequence is synthesized)
accactgcactctagtctgggtgacagaggagcaagactctgtctcaaaaaaaaaaattctataatttttataga

SEQ ID NO: 154859 - DNA, 120 bp, Artificial Sequence
  ENSG00000106080_34 (sequence is synthesized)
gcaagactctgtctcaaaaaaaaaaattctataatttttatagaaataataaaaaactaaccttagcttactgtaaattttctagtttagaaacttatttaaaaacaatttttggactct

SEQ ID NO: 154860 - DNA, 120 bp, Artificial Sequence
  ENSG00000106080_35 (sequence is synthesized)
gtaataacgtagcttaaaacacacattgcatagctgtacaaaaatattttccttatatccttattatataagcttttatctatttaaattttgaatttttaaactttttggtcaaaaacc

SEQ ID NO: 154861 - DNA, 120 bp, Artificial Sequence
  ENSG00000106080_36 (sequence is synthesized)
aagacaaacacactagcctaggcctatgcagggtcaggatcaagacatccctagcaggtgacaggaatttttcaactccattataatctgtggggccaccatcatatatatattgtacat

SEQ ID NO: 154862 - DNA, 120 bp, Artificial Sequence
  ENSG00000106080_37 (sequence is synthesized)
tgaccgaaacatggttacatgactatataatttgcgtcaatactgctcagtgtgccatatttaaatttacatgactatattgtgatattcttttcaaaataaagtttatttgggagataa

SEQ ID NO: 154863 - DNA, 120 bp, Artificial Sequence
  ENSG00000106080_38 (sequence is synthesized)
ctagagttgttctctggattaggagacagaagttagagtcactataacttttttttttcccctggaagttaatagggggtatgtattcctttagcaactgtattatgtcttgagtatcaa

SEQ ID NO: 154864 - DNA, 120 bp, Artificial Sequence
  ENSG00000106080_39 (sequence is synthesized)
ttgaaatggccagtttaaggccgtaatgtctaaatgggcaactatgctaacaataaaaaaagaacattgaggtctattaatactgttcacaaatatggtgggttgttttaattgtgataa

SEQ ID NO: 154865 - DNA, 120 bp, Artificial Sequence
  ENSG00000106086_0 (sequence is synthesized)
gctgctggtgctcctcgcctcttggggcctggggcagtgagggggccggcgggcgtgggccgagtggccgcgggcgccatggagggggtgctgtacaagtggaccaactatctgagcggt

SEQ ID NO: 154866 - DNA, 120 bp, Artificial Sequence
  ENSG00000106086_1 (sequence is synthesized)
tggcagcctcgatggttccttctctgtgggggaatattgtcctattatgattctcctgaagatgcctggaaaggttgcaaagggagcatacaaatggcagtctgtgaaattcaagttcat

SEQ ID NO: 154867 - DNA, 120 bp, Artificial Sequence
  ENSG00000106086_2 (sequence is synthesized)
tctgtagataatacacgcatggacctgataatccctggggaacagtatttctacctgaaggccagaagtgtggctgaaagacagcggtggctggtggccctgggatcagccaaggcttgc

SEQ ID NO: 154868 - DNA, 120 bp, Artificial Sequence
  ENSG00000106086_3 (sequence is synthesized)
ctgactgacagtaggacccagaaggagaaagagtttgctgaaaacactgaaaacttgaaaaccaaaatgtcagaactaagactctactgtgacctccttgttcagcaagtagataaaaca

SEQ ID NO: 154869 - DNA, 120 bp, Artificial Sequence
  ENSG00000106086_4 (sequence is synthesized)
aaagaagtgaccacaactggtgtgtccaattctgaggagggaattgatgtgggaactttgctgaaatcaacctgtaatacttttctgaagaccttggaagaatgcatgcagatcgcaaat

SEQ ID NO: 154870 - DNA, 120 bp, Artificial Sequence
  ENSG00000106086_5 (sequence is synthesized)
gcagccttcacctctgagctgctctaccgcactccaccaggatcacctcagctggccatgctcaagtccagcaagatgaaacatcctattataccaattcataattcattggaaaggcaa

SEQ ID NO: 154871 - DNA, 120 bp, Artificial Sequence
  ENSG00000106086_6 (sequence is synthesized)
atggagttgagcacttgtgaaaatggatctttaaatatggaaataaatggtgaggaagaaatcctaatgaaaaataagaattccttatatttgaaatctgcagagatagactgcagcata

SEQ ID NO: 154872 - DNA, 120 bp, Artificial Sequence
  ENSG00000106086_7 (sequence is synthesized)
tcaagtgaggaaaatacagatgataatataacagtccaaggtgaaataaggaaggaagatggaatggaaaacctgaaaaatcatgacaataacttgactcagtctggatcagactcaagt

SEQ ID NO: 154873 - DNA, 120 bp, Artificial Sequence
  ENSG00000106086_8 (sequence is synthesized)
tgctctccggaatgcctctgggaggaaggcaaagaagttatcccaactttctttagtaccatgaacacaagctttagtgacattgaacttctggaagacagtggcattcccacagaagca

SEQ ID NO: 154874 - DNA, 120 bp, Artificial Sequence
  ENSG00000106086_9 (sequence is synthesized)
ttcttggcatcatgttatgctgtggttccagtattagacaaacttggccctacagtgtttgctcctgttaagatggatcttgttggaaatattaagaaagtaaatcagaagtatataacc

SEQ ID NO: 154875 - DNA, 120 bp, Artificial Sequence
  ENSG00000106086_10 (sequence is synthesized)
aacaaagaagagtttaccactctccagaagatagtgctgcacgaagtggaggcggatgtagcccaggttaggaactcagcgactgaagccctcttgtggctgaagagaggtctcaaattt

SEQ ID NO: 154876 - DNA, 120 bp, Artificial Sequence
  ENSG00000106086_11 (sequence is synthesized)
ttgaagggatttttgacagaagtgaaaaatggggagaaggatatccagacagccctaaataatgcatatggtaaaacattgcggcaacaccatggctgggtagttcgaggggtttttgcg

SEQ ID NO: 154877 - DNA, 120 bp, Artificial Sequence
  ENSG00000106086_12 (sequence is synthesized)
ttagctttaagggcagctccatcctatgaagattttgtggccgcgttaaccgtaaaggaaggtgaccaccagaaagaagctttcagtattgggatgcagagggacctcagcctttacctc

SEQ ID NO: 154878 - DNA, 120 bp, Artificial Sequence
  ENSG00000106086_13 (sequence is synthesized)
cctgccatggagaagcagctggccatactggacactttatatgaggtccacgggctggaatctgatgaggtggtatgatggctgctgggcagcacctcctaacttcagggaataagtgct

SEQ ID NO: 154879 - DNA, 120 bp, Artificial Sequence
  ENSG00000106086_14 (sequence is synthesized)
aaagtgttttgttgccctacttaatttccagcaacagcctcaaccctctccaaccccttcacctggggggatggacaggaggtggcaaaacccagtgcttttataatttttaaaatgcat

SEQ ID NO: 154880 - DNA, 120 bp, Artificial Sequence
  ENSG00000106086_15 (sequence is synthesized)
atgtgttttgtttaaagatcaaggtgctatatatttcagttcagcaggcctactggaaaccaaatgataagctgctgtagacttgaacagcaagttataagagcagatttaacaaacaaa

SEQ ID NO: 154881 - DNA, 120 bp, Artificial Sequence
  ENSG00000106086_16 (sequence is synthesized)
tttgctgttattgtgtattgtattgtttttatattttagtctaatgggccacccaaacccaagctgaaaatcagcaaattccatattaagtaccataattcatagccagtgtttcagcca

SEQ ID NO: 154882 - DNA, 120 bp, Artificial Sequence
  ENSG00000106086_17 (sequence is synthesized)
acttagactagacatttggaggtagtataagctgctttgttgaagctgtgtagagtttgctgttcctagatgttcttcagtggaccctcttcactgcaactctgtcagtgataagggcct

SEQ ID NO: 154883 - DNA, 120 bp, Artificial Sequence
  ENSG00000106086_18 (sequence is synthesized)
gtgtagtaaagatgttcagggcattcacatgaccatgcaattgtgggaggcgaagaagacgtggacaggagtcccatccttgctgacaggcatgaaaccgttgctctgagaagattaatg

SEQ ID NO: 154884 - DNA, 120 bp, Artificial Sequence
  ENSG00000106086_19 (sequence is synthesized)
gtgtgccctagccccaagttggaggggagaatatgagagaggtgggacaggtcatttgagatgacacctcccaactgcctaccatttaccagcatgttccccatgcattatctcaattgg

SEQ ID NO: 154885 - DNA, 120 bp, Artificial Sequence
  ENSG00000106086_20 (sequence is synthesized)
acatcacaagtaatgatacccagagggattattactccacttcaaaagcaaggtttagaagttgagggatctgttcacagtcacatagtttttaagcagaggagccagataatttccaag

SEQ ID NO: 154886 - DNA, 120 bp, Artificial Sequence
  ENSG00000106086_21 (sequence is synthesized)
tgtgacctggactgcctctgcatcaaagtcatatggagtgcttgttcaaacagcagattcccaggccttattttggcctaaagaaccagagtctaggtggtgggacataggaatctgcat

SEQ ID NO: 154887 - DNA, 120 bp, Artificial Sequence
  ENSG00000106086_22 (sequence is synthesized)
ttcagtaaactttacacgtgattcttctgcacacagtattgaagagcaactagattaaattctagtttacaaaattaccagttttcttcaagaactaaatgatatgtccttttttttttt

SEQ ID NO: 154888 - DNA, 120 bp, Artificial Sequence
  ENSG00000106086_23 (sequence is synthesized)
ttcaaagaggataaggctgctatttaaataaaatagctaaatggagagtgagaagtggagcaggttcattcagcagcattcttaattgagccagcattgacacccagccagcaggccttt

SEQ ID NO: 154889 - DNA, 120 bp, Artificial Sequence
  ENSG00000106086_24 (sequence is synthesized)
gcattgcattcggggaccatgactctgaatctgcttaccaatcaatctcggtttaatcaccaaaagtgcagagcaggcaaaatgcagctgtttatcaatctcaaaagctttgggacagtg

SEQ ID NO: 154890 - DNA, 120 bp, Artificial Sequence
  ENSG00000106086_25 (sequence is synthesized)
tcatagttgaaagatgagacttaagaaaacagtttcttaaacttcttaaaacttaagaaacattgtttcataaaacaatattgagtgggcattcttctgcacagtgtgatgctccaaccc

SEQ ID NO: 154891 - DNA, 120 bp, Artificial Sequence
  ENSG00000106086_26 (sequence is synthesized)
tggccctagtctcagtagaccatgctgcctcgagtgtgcatcggagagaagccatgggtaccttccccattagaggctacttccttctagtaacaggaagggaagttccagcatgaggta

SEQ ID NO: 154892 - DNA, 120 bp, Artificial Sequence
  ENSG00000106086_27 (sequence is synthesized)
gttatccagggtagaaggtcctttgaggggcttggttgaattgagagcatcatctctagatgatgctgttcctgctgcagatctctaggatggagagaattctctctttagtcagagaag

SEQ ID NO: 154893 - DNA, 120 bp, Artificial Sequence
  ENSG00000106086_28 (sequence is synthesized)
tttatgtagggaggggtattggttttgcctttgtgtgtctttaaacaaatgaacatttatttagctcagattaattaggtattttgcccacataaagacttctggaaaatacttaaactt

SEQ ID NO: 154894 - DNA, 120 bp, Artificial Sequence
  ENSG00000106086_29 (sequence is synthesized)
gaaaaatcaacatcacatgttttaaagctagggagaaagaaggggggtattaaaatgatgttgattattttgtattttgccaaggtgtgtgtgtgttatttccctcccactctcatgagc

SEQ ID NO: 154895 - DNA, 120 bp, Artificial Sequence
  ENSG00000106086_30 (sequence is synthesized)
agtgagtatagatctccttctctgattagtatgaatatgatggcaggactcggggatagtccctgcccttgacatagccccctaaaacggaaaaagaaaaagccagtttttgcttgtact

SEQ ID NO: 154896 - DNA, 120 bp, Artificial Sequence
  ENSG00000106086_31 (sequence is synthesized)
gatcattctaaacagctgctggtgctccctgtcacctcaggtgaactctgtggtctcttggagaggtagcactctgaaaatacctcaggtttgccaccgcaactctgaatacacacaaaa

SEQ ID NO: 154897 - DNA, 120 bp, Artificial Sequence
  ENSG00000106086_32 (sequence is synthesized)
ggaaagctgctcagcatggccattttgcatttgtataggtagtgactagatgtacacaacttaatttgctgggaatgaggggcttaatattatctgagatcattgagaacccagatcaga

SEQ ID NO: 154898 - DNA, 120 bp, Artificial Sequence
  ENSG00000106086_33 (sequence is synthesized)
cagaatagcttgaataagttacattttccaattaccctttttccacatctgtagaaagagggtaatattttttaataggtattttccccactggagcatattacgtttgcctaagatgta

SEQ ID NO: 154899 - DNA, 120 bp, Artificial Sequence
  ENSG00000106086_34 (sequence is synthesized)
taaaagtttgtttaagatgtgtaaaagtttgcttaaggaactgaggatccttaaataaaaatattagaaattagaaattgaacctaatactaaacagtaaattcagcttaacctgaacct

SEQ ID NO: 154900 - DNA, 120 bp, Artificial Sequence
  ENSG00000106086_35 (sequence is synthesized)
tggcatagtcagagcttcctcctacatctaaagtatttgctctctgttttagttaaagtcataatttgcgctgatgtgtaatcactttccaagaagagggcaatgagaaaagatatttaa

SEQ ID NO: 154901 - DNA, 120 bp, Artificial Sequence
  ENSG00000106086_36 (sequence is synthesized)
agctttctctccatagccctccaagacttctgggacaactaaatttactttcaccattactgtgagaggaggtgagaaaactctagtattttgttggcagagtaatcactttgttctcat

SEQ ID NO: 154902 - DNA, 120 bp, Artificial Sequence
  ENSG00000106086_37 (sequence is synthesized)
cgctcaaagcatttttaggattatttttctagcgtaacctttagagagaactggaagaaaaaggaaattggtctactaggtattgtagacacaaataagtaacattaggctaacccctta

SEQ ID NO: 154903 - DNA, 120 bp, Artificial Sequence
  ENSG00000106086_38 (sequence is synthesized)
tgagacatttccacacaatttcatcgtgcctgtacttttctctatggtaaaagccagtgtttacactttgtagggatcagggtgtatttgttgaattaaacaaaatattttcaatgatgg

SEQ ID NO: 154904 - DNA, 120 bp, Artificial Sequence
  ENSG00000106086_39 (sequence is synthesized)
caagtctcttgacttttgaaagcaagtcagattccttatagctaatgctggtgaaaaatgttaaattggagagatcccttttgggagtgaaaccaaattgtaactatgaggagaagatgg

SEQ ID NO: 154905 - DNA, 120 bp, Artificial Sequence
  ENSG00000106086_40 (sequence is synthesized)
tcttctcattggctcttgatgtagctctgaagggagttccagaagaggagctctcacagaatgttgagcctgtgggcccaagacattgacttcgaagggtagttctcattaggatgtata

SEQ ID NO: 154906 - DNA, 120 bp, Artificial Sequence
  ENSG00000106086_41 (sequence is synthesized)
agtagtggcttgaggcaccttcttatcattttttgcatgttattctgattattaaacttcccccaatgtcatattccatgatgagggatttctgaactccatagtccagcgttgttgctt

SEQ ID NO: 154907 - DNA, 120 bp, Artificial Sequence
  ENSG00000106086_42 (sequence is synthesized)
ttctctcttctttgctactgaaaattgccagcagtaccgccatcagcacaccaaatctacccccacttatgtttgttctgccccatttcccaggagcagcttctagcacatatgtagagt

SEQ ID NO: 154908 - DNA, 120 bp, Artificial Sequence
  ENSG00000106086_43 (sequence is synthesized)
atctggcaccaccttagcccagggctgcgtgcctgatcagtggggattctgttcccccaccccccagactgcaagagcttcttaagaaggagcccatattcccatttgtagctggaaagc

SEQ ID NO: 154909 - DNA, 120 bp, Artificial Sequence
  ENSG00000106086_44 (sequence is synthesized)
gggtgaatgacatgacatggggcacctaggaaagatgattattagaggagtgcagcggaaaaaaatttgcactcttctccttttggttattactttccaaatatattaacaaaaagttga

SEQ ID NO: 154910 - DNA, 120 bp, Artificial Sequence
  ENSG00000106086_45 (sequence is synthesized)
tgcttttaactttatattttcagaaaagtgtttttaattaaaaatatgtgatagggaccaaataagtaaagtacatttttctccactaaatttgaagtgagggaaagaggagccaaagta

SEQ ID NO: 154911 - DNA, 120 bp, Artificial Sequence
  ENSG00000106086_46 (sequence is synthesized)
agagatttttttttaaggaaacttaatctgattgtgaaaatcatacatatggagaaacatcagatcaggcaatagagtcagagggtcatgagcaatagacgatgatgcgaggcatttggg

SEQ ID NO: 154912 - DNA, 120 bp, Artificial Sequence
  ENSG00000106086_47 (sequence is synthesized)
gagcttcctggaggaaaattaagtttttttcctagcaaactaccatgtcctacaagaacttggttatataatggtgcgtctctgaatcactgattaaaaccagttgcttctgattttagt

SEQ ID NO: 154913 - DNA, 120 bp, Artificial Sequence
  ENSG00000106086_48 (sequence is synthesized)
cacaggttttacaagtattcagctctccctcatgtttcatttctttttttaagataatctatcaaccttttttaaattttaaaatttttagatgtagagtttataagtaaaatatatttt

SEQ ID NO: 154914 - DNA, 120 bp, Artificial Sequence
  ENSG00000106086_49 (sequence is synthesized)
tagccattgttctgttagctgagctgatgtgtttggtcttagagggcctgacttcagatactctttgtgatcttgtaagggctctacacaaacttcattatgtatggtaaatttgtattc

SEQ ID NO: 154915 - DNA, 120 bp, Artificial Sequence
  ENSG00000106086_50 (sequence is synthesized)
ttatggattgtatatagaatgctttcgttagaagtacattctacttctgtatgtccctttgtaatccgcagttgcttactcaggggtttcatagtcatttcataaaaaataattcactag

SEQ ID NO: 154916 - DNA, 120 bp, Artificial Sequence
  ENSG00000106086_51 (sequence is synthesized)
ctgtctaatggtattttaagactgtttatctgtatcacaacgtcattaggagttctttcaacaattccataaatatactgtttactagaccttccctgtaaatgttcccaattcccatcc

SEQ ID NO: 154917 - DNA, 120 bp, Artificial Sequence
  ENSG00000106086_52 (sequence is synthesized)
tgtctcagacagtcaatagtcctgtgtacagtgactatttgcatgatttctcattgcactgctgcattcaggcactccagggcatgattaaacagtcattaacagtgcctctctggtaca

SEQ ID NO: 154918 - DNA, 120 bp, Artificial Sequence
  ENSG00000106086_53 (sequence is synthesized)
gttgatgcatgcattgatctttcttctctgctgtttttatatagcctttaattaaaaggaaaaaaataccactactctgcaatgcaaaagtcttcaaaattctttgtttcctgtattaat

SEQ ID NO: 154919 - DNA, 120 bp, Artificial Sequence
  ENSG00000106086_54 (sequence is synthesized)
cacttctgttccagagtgaacaaatgttttcagctaagctatgtgagaatgtaagaataatatcctgcttgttctaaatagttcatatatttaaagtgtggtcagtatttcctccctgta

SEQ ID NO: 154920 - DNA, 120 bp, Artificial Sequence
  ENSG00000106086_55 (sequence is synthesized)
ccttacaaacagaaaccaccctgggatggttgataccccttacaaagtcgatcttacccacacagactcctgtgtatgcgtgtctgtttataggtgtatatggagtcagtgttgatagga

SEQ ID NO: 154921 - DNA, 120 bp, Artificial Sequence
  ENSG00000106086_56 (sequence is synthesized)
aggatgctctagaagtacttctgttgtttcctagaaggctatgagccagttccatggcatgtttaatgtataattcccatgtatcatgagaatttcactagaatgtcattaaacagccca

SEQ ID NO: 154922 - DNA, 120 bp, Artificial Sequence
  ENSG00000106086_57 (sequence is synthesized)
actacctcatgtgaaattggctgtggacaatctgtgtcagatgagaaatgtgttcagataaatttaatctggttaatagacttaacaaattaatgtctacataaagaagaaacatgatag

SEQ ID NO: 154923 - DNA, 120 bp, Artificial Sequence
  ENSG00000106086_58 (sequence is synthesized)
accagatgccaaaggctaaaatgtacatagatttccttggattaatttttaagtcactgtttaattccatgcctagtattcttatgaatgtttgtggtttcatagatttatgcactttga

SEQ ID NO: 154924 - DNA, 120 bp, Artificial Sequence
  ENSG00000106086_59 (sequence is synthesized)
atatctgtcacgtgcagtgttaatgttacctgttcttgtctctcagcattttgaatgagcatcataatcagagtagaaggcaagttaaactataaaagtgtcaagtggcttgttaacttc

SEQ ID NO: 154925 - DNA, 120 bp, Artificial Sequence
  ENSG00000106086_60 (sequence is synthesized)
ttaatttaatggacctttacttagaatataatatgttggagcctcttgggaccaaccgatgagcgacagtttcatgtttagatttgtattgtttctctgtccaagtccttattctctatc

SEQ ID NO: 154926 - DNA, 120 bp, Artificial Sequence
  ENSG00000106086_61 (sequence is synthesized)
ttgtggggaggggtgacaggggagggttttactttttttgcaaaaatgtttgaaaatatctgtcagattttatattcgttagttataataaacttatttttaaagtattaagttcttaaa

SEQ ID NO: 154927 - DNA, 120 bp, Artificial Sequence
  ENSG00000106086_62 (sequence is synthesized)
ggtgcgccgtggcgccgcctgcgaccggcagctcgttcgccgcactttggaggcttcggctgcccctccgacccacgtagggcccggacccgggcctccttgtgaacagcgtgccggctt

SEQ ID NO: 154928 - DNA, 120 bp, Artificial Sequence
  ENSG00000106086_63 (sequence is synthesized)
aacagcgtgccggcttcgccccacgggttcaccggctggctgggcttcaagcgccgaggccgccgcagtgaccccgcccccgggccgaggatgtgaggcgggccgggcgtccccacaccg

SEQ ID NO: 154929 - DNA, 69 bp, Artificial Sequence
  ENSG00000106086_64 (sequence is synthesized)
gataggagggctgctgttgtgaactccagccagccgaaggctgcttgtgcctctccactcccgagttca

SEQ ID NO: 154930 - DNA, 120 bp, Artificial Sequence
  ENSG00000106086_65 (sequence is synthesized)
caagaagcatggcaccaacatctgcacctggtgcaggcctcaggctgcttccactcaaggtggaagacagaaggggagcctgtgtggagagatcacatggcaagagaggaaggaaggtgt

SEQ ID NO: 154931 - DNA, 120 bp, Artificial Sequence
  ENSG00000106086_66 (sequence is synthesized)
aggaatgtgggtgtagacggaactccagaaaccatcatggaccatgaggcaactctgaggatggaagccacacactaaggacggtaaagcagaaagaagagctgaaaccctgatgataaa

SEQ ID NO: 154932 - DNA, 120 bp, Artificial Sequence
  ENSG00000106086_67 (sequence is synthesized)
gaagcagccaattccgtcctgcactgcccacctccagatctcattcatgtgaaacaaagagaaactttatcttgttcaagtcactttagtcaagatttttattatcagatgaatgcaatt

SEQ ID NO: 154933 - DNA, 120 bp, Artificial Sequence
  ENSG00000106086_68 (sequence is synthesized)
tctaattgatacaccttaaaattttcaacatgtacacctgatttaacaaaatctagaattaagtcaatacttctacatgcattatagaccaaaggtcactgctataagaactttgggtat

SEQ ID NO: 154934 - DNA, 120 bp, Artificial Sequence
  ENSG00000106086_69 (sequence is synthesized)
atagtcaaattcctcacatttttagaaacttgtttattcattgcatccctcccccatctcactctctcacacactcacatatttattttctcagatccttataagttcataagacatatg

SEQ ID NO: 154935 - DNA, 120 bp, Artificial Sequence
  ENSG00000106086_70 (sequence is synthesized)
tccttattccatttttacagatgagaaaactggggtttgcaggggttaagtaacttatccaagatcacacaattaattagtggcgaagtcataatttgaagtctttctaatgcccaaatg

SEQ ID NO: 154936 - DNA, 120 bp, Artificial Sequence
  ENSG00000106086_71 (sequence is synthesized)
tttccattgtgtcacatatcggagctgtgctctttccatcagccagtttcccattatcatagctgatgacatgcacacccaccatctggggcaggctttagtacagcactctgtgccatc

SEQ ID NO: 154937 - DNA, 120 bp, Artificial Sequence
  ENSG00000106086_72 (sequence is synthesized)
atccagatcaccaaatcttagtaaatggacgtgtcataagagataaggctgccatagaatcacagcagcttctggcttagtaaattacctggatacacaccttttcctagaggaaatccc

SEQ ID NO: 154938 - DNA, 120 bp, Artificial Sequence
  ENSG00000106086_73 (sequence is synthesized)
acatcttcgtaggagatctggtgtaatgctcttgggacctctctctagaggatgagctagtatcactgggtcctagtaagtttcagcaaatataatagagacagaactgtcatcattatc

SEQ ID NO: 154939 - DNA, 120 bp, Artificial Sequence
  ENSG00000106086_74 (sequence is synthesized)
agaaaagaaacagagaaaaatgttaaaacaatggttttgtgaccttaaagtctgtgttagtcccttagcaccaccgctgagattttgctgaaagggacgttttgtgtgttgggcttcact

SEQ ID NO: 154940 - DNA, 120 bp, Artificial Sequence
  ENSG00000106086_75 (sequence is synthesized)
gaaggaagcccctgaaagtgttcagaaatagggaaaatgagaaactgttccagctgaaaatacgggcaagggggaatcattgaagaagacagaatattgaagtgttcaaatgaataaaga

SEQ ID NO: 154941 - DNA, 120 bp, Artificial Sequence
  ENSG00000106086_76 (sequence is synthesized)
gtttataatgaaacatcctattataccaattcataattcattggaaaggtacagtagcttttttcttcttgctaaaaattaaaaaaaaataaggatattgttattccttgtttaaaaaaa

SEQ ID NO: 154942 - DNA, 120 bp, Artificial Sequence
  ENSG00000106086_77 (sequence is synthesized)
gatactttgatcttgtaatggtttttctcaggatttgaaataatatggaagtaaacaatatctgactttcctcttttgagtgagcctgaatcaacccagagcagaccttttacttagcac

SEQ ID NO: 154943 - DNA, 120 bp, Artificial Sequence
  ENSG00000106086_78 (sequence is synthesized)
taatagggaagatgttggcattttccctaagatggatctcacccatcacatctagtaacttttaatctctctagggtgtacttaaggtagaaacttctcttgtagaggaaacttctctct

SEQ ID NO: 154944 - DNA, 120 bp, Artificial Sequence
  ENSG00000106086_79 (sequence is synthesized)
gctttaaagaagaaatggtaatcatggttacgaattacacagcctcatcgtagtttacattttctagttttacattttttgcctaagttcaaaagtaatgcatgttcattgaagtcattt

SEQ ID NO: 154945 - DNA, 120 bp, Artificial Sequence
  ENSG00000106086_80 (sequence is synthesized)
agccctaagaaatccaacagaaaacacttgacaccaaaacataccctgatgaagatcctgaacttcaagaatgaagaaagaattcctcaccattcaggcagaaaaagcaagtcaccaagg

SEQ ID NO: 154946 - DNA, 120 bp, Artificial Sequence
  ENSG00000106086_81 (sequence is synthesized)
gacctcaaacttcctttccacaagattctgtgacgggaaacaatgggggagtatttccgaagttctgagtaggaaaaaagaatgactcaaatgtattattgccaaccaagtcgtcaaatc

SEQ ID NO: 154947 - DNA, 120 bp, Artificial Sequence
  ENSG00000106086_82 (sequence is synthesized)
taatgtcaagttctcttaagcaggtaagaactcagaacataatacctgagtgccttcttaaggaaaccatttgataggaaagatgaaccaaataactcaatgatggatgagctggtagaa

SEQ ID NO: 154948 - DNA, 120 bp, Artificial Sequence
  ENSG00000106086_83 (sequence is synthesized)
aaaaagctggtggtgaaccaaggtcaaactggaaattatagtcacagtatagatatagattataaatattacaaaccctaagatagctaataaattgggaatgggagaagggaggatata

SEQ ID NO: 154949 - DNA, 120 bp, Artificial Sequence
  ENSG00000106086_84 (sequence is synthesized)
agagcactaatgccctcttattttcatagcagagacttgatactgtctcaacttttttcaaaaacacaatttcttaaattttttggtaatcttttaaataaacagatttctaaaaagaaa

SEQ ID NO: 154950 - DNA, 120 bp, Artificial Sequence
  ENSG00000106086_85 (sequence is synthesized)
gatggtggcccaggagggctgtcactcagaatcaggcgggtgcagagtggcctgcaggacatgatgacccagcatgagacaggatgcatcacatctgggtgacgcctctctccaggggat

SEQ ID NO: 154951 - DNA, 120 bp, Artificial Sequence
  ENSG00000106086_86 (sequence is synthesized)
cagcctggactaaatgcctctcctgggccaggatgcccagcaagccccgagatgcctcctggagagaaggaagtatgtgagagtatcctgagttaagtgagatctaaaatgcctgagaaa

SEQ ID NO: 154952 - DNA, 120 bp, Artificial Sequence
  ENSG00000106086_87 (sequence is synthesized)
accctgaaatgactgagtctatctggaacttatttgattgtttttctgccatcagatagaatgaggtctcaaaagagaaattaaattatattacaagaaaataaagctcaattgcttgcc

SEQ ID NO: 154953 - DNA, 120 bp, Artificial Sequence
  ENSG00000106089_0 (sequence is synthesized)
acacggctgcagccggcgccgctgccactcccgggagcatgaaggaccgaacccaggagctccgcacggccaaggacagcgatgatgatgatgatgtcgctgtcaccgtggaccgagacc

SEQ ID NO: 154954 - DNA, 120 bp, Artificial Sequence
  ENSG00000106089_1 (sequence is synthesized)
gcttcatggatgagttctttgagcaggtggaggagattcgaggcttcattgacaagatcgcagagaacgtggaggaggtgaagcggaagcacagtgccatcctggcatcccccaaccccg

SEQ ID NO: 154955 - DNA, 120 bp, Artificial Sequence
  ENSG00000106089_2 (sequence is synthesized)
atgagaagacgaaggaggagctggaagaactcatgtccgacataaagaagacagcaaacaaagttcgttccaagttaaagagcatcgagcagtccatcgagcaagaggaaggcctgaacc

SEQ ID NO: 154956 - DNA, 120 bp, Artificial Sequence
  ENSG00000106089_3 (sequence is synthesized)
gctcctccgctgacctgaggatccggaagacacagcactccacgctgtccagaaagtttgtggaggtcatgtcggagtacaacgccacgcagtccgactaccgcgagcgctgcaaaggcc

SEQ ID NO: 154957 - DNA, 120 bp, Artificial Sequence
  ENSG00000106089_4 (sequence is synthesized)
gcatccagaggcagctggagatcaccggcaggaccacgaccagtgaggagctggaggacatgctggagagtgggaaccccgccatctttgcctctgggatcatcatggactccagcatct

SEQ ID NO: 154958 - DNA, 120 bp, Artificial Sequence
  ENSG00000106089_5 (sequence is synthesized)
cgaagcaggctctgagcgagattgagacgcggcacagtgagatcatcaagctggagaacagcatccgtgagctacacgacatgttcatggacatggccatgctcgtggagagccagggag

SEQ ID NO: 154959 - DNA, 120 bp, Artificial Sequence
  ENSG00000106089_6 (sequence is synthesized)
agatgattgacaggatcgagtacaatgtggaacacgcggtagactatgtggagagggccgtgtctgacaccaagaaggccgtcaagtaccagagcaaggcgcgccggaagaaaatcatga

SEQ ID NO: 154960 - DNA, 120 bp, Artificial Sequence
  ENSG00000106089_7 (sequence is synthesized)
tcatcatctgctgtgtgatcctgggcatcgtcatcgcctccactgttgggggcatcttcgcctagaagccacccaaactgccactccactccaggtgggccactccaaggaggccctggc

SEQ ID NO: 154961 - DNA, 120 bp, Artificial Sequence
  ENSG00000106089_8 (sequence is synthesized)
cggcccccatgctcccttctctgccatgggccctccgtccccgccccgtgtcgtgtgcatgatctctgtgagtgtgcgtctgtacgggaagaggcagagggaggcagccagcggggcgtg

SEQ ID NO: 154962 - DNA, 120 bp, Artificial Sequence
  ENSG00000106089_9 (sequence is synthesized)
atgcagtgtgcacagcgaggagcagacccaggcagggccgccagggtgacacaggccacccttccttgccttcagtaactcggtgggcccaggttctgctcttccctggggaccctaacc

SEQ ID NO: 154963 - DNA, 120 bp, Artificial Sequence
  ENSG00000106089_10 (sequence is synthesized)
tcgcctccagctgacctgccctgtcctctccagctgtccccacaagcagagccctgaggggtggggaccagctggccacatggtgctgcttttcaggttaggggagaggtggccctgagg

SEQ ID NO: 154964 - DNA, 120 bp, Artificial Sequence
  ENSG00000106089_11 (sequence is synthesized)
gacagcccagctctgagtctcagtcgctgatcactgccagggaggctcaggctgccatggctccaggctccctcccctgcctaggggcaaagtccatcgggtcctgggcctcagcttccc

SEQ ID NO: 154965 - DNA, 120 bp, Artificial Sequence
  ENSG00000106089_12 (sequence is synthesized)
ttcccacattcctccggccccaggagcaaccccttgggctaggtctgaccccaggtgtccctctggaaggggctggctggtgccctatttccagccaccccagcagctagggaggcaaag

SEQ ID NO: 154966 - DNA, 120 bp, Artificial Sequence
  ENSG00000106089_13 (sequence is synthesized)
caggctgcagtcagtccctcaagccagcgttgcatgtttgggatggtggctcctgttgtcttgcgctctgggaagtcagatgtcatttcaggcctgcagtctcatcctgcccttgccatc

SEQ ID NO: 154967 - DNA, 120 bp, Artificial Sequence
  ENSG00000106089_14 (sequence is synthesized)
ctcccatcgatgtgccacgtgggtgtcacgtgtcccagatgcagtattcggcagccagccggggagggctacctcctcctcctcaccaccttggggcttctcatgggaaatgtgcccccg

SEQ ID NO: 154968 - DNA, 120 bp, Artificial Sequence
  ENSG00000106089_15 (sequence is synthesized)
ccccaggaccctctcccttgtggacaggcagggagatgcatgcgagtgcatgcagcaggggatggggccgtgtccgtgtgccccaccctccctcggctttactcctgcccagtgactgtg

SEQ ID NO: 154969 - DNA, 120 bp, Artificial Sequence
  ENSG00000106089_16 (sequence is synthesized)
accactgtccgtgttgccttcttgaacagcgattccccccaaccccttcaccaaaggtcttggtacaaccagctgcccattttgtgaaatttttatgtagaataaacatttgtatctgta

SEQ ID NO: 154970 - DNA, 120 bp, Artificial Sequence
  ENSG00000106089_17 (sequence is synthesized)
gacacgctgccctgccggggagggaccaagttctcagcctcagggtgctttcctgaagtcctgccccgagccccaacccaaccctgaggagggggccctctggagctcgggtgcccccgg

SEQ ID NO: 154971 - DNA, 120 bp, Artificial Sequence
  ENSG00000106089_18 (sequence is synthesized)
accagggccccagctacctgccacggccagggccaactgtgcccacctctttggacctgagggcccacatcagcgcccacccaggccatccaccccttgccctcttccgcccgccagaga

SEQ ID NO: 154972 - DNA, 120 bp, Artificial Sequence
  ENSG00000106089_19 (sequence is synthesized)
ggaccgaacccaggagctccgcacggtcatgtgggacagacacatgggacctgttgcaggaggctgaagacgtagcaaggagggagagttggagcagcacaatcctggaaggcttcctgg

SEQ ID NO: 154973 - DNA, 120 bp, Artificial Sequence
  ENSG00000106089_20 (sequence is synthesized)
ctttctgcccgacacgctgccctgccggggagggaccaagttctcaggtaaccaatcacccgctgttgaaactgccgccagggccctgccgacccgaaggtccctgtcctctgcatggct

SEQ ID NO: 154974 - DNA, 120 bp, Artificial Sequence
  ENSG00000106089_21 (sequence is synthesized)
ctgcttgagcttcaaggaccccaggccctgcatggccccaccctctataccccgccgtctctcattcccctactactgtttcctcatggggccactgtgggccacgcatttccccagaga

SEQ ID NO: 154975 - DNA, 120 bp, Artificial Sequence
  ENSG00000106089_22 (sequence is synthesized)
gatgctgggtgtgcgggtaggggacggggttgaaggggcctggttatgacttagcagccacctgtgcccccaggcatcgagcagtccatcgagcaagaggaaggcctgaaccgctcctcc

SEQ ID NO: 154976 - DNA, 120 bp, Artificial Sequence
  ENSG00000106089_23 (sequence is synthesized)
gctgacctgaggatccggaagacacaggtgcggccacggagtctaggatgggcgggcacctgagtctctgggtcggtccccgcagggcctgacccctgcacctccatctcgggcccccag

SEQ ID NO: 154977 - DNA, 120 bp, Artificial Sequence
  ENSG00000106089_24 (sequence is synthesized)
agttaggggcccgaggcgggtggcccgaggcagctgctgagtttggggctggaggggcgggggcctgaggcggctgctgtgttaagggccgggggggcggggcctgaggctgccgctgag

SEQ ID NO: 154978 - DNA, 120 bp, Artificial Sequence
  ENSG00000106089_25 (sequence is synthesized)
ctcggggctggggggagcccgggcctgggacggagggggcggggcccaatgctgctgctgaactccccgaagagggctgggctcagtgtgaccccactcgcttgcagccggcaggaccac

SEQ ID NO: 154979 - DNA, 120 bp, Artificial Sequence
  ENSG00000106089_26 (sequence is synthesized)
tcaggagctatggccagggcaggaccagactccagcatacccactcctgctcccaccttcctctgcctggcactgccacatctctgacagtgttctctgcatggtccccaaccctcagct

SEQ ID NO: 154980 - DNA, 120 bp, Artificial Sequence
  ENSG00000106089_27 (sequence is synthesized)
gagactgcatggccagctccacccccaggattgctgctctgcggggaaatgtgggagctgccttggggagcctgcctggccctctacaccccacccagggtacctggcccaggtgagaag

SEQ ID NO: 154981 - DNA, 120 bp, Artificial Sequence
  ENSG00000106089_28 (sequence is synthesized)
agcaaaggaggaagggaggctcctccgaagacagcacaagagggggtgaagctgcagctggtgcagccctggcccagaattgggggaggggggcgggcaggcagagccttagccagggga

SEQ ID NO: 154982 - DNA, 120 bp, Artificial Sequence
  ENSG00000106089_29 (sequence is synthesized)
acaggggagaacagggatcttcccagagcctcccactgggccccctgggctggaggctgagcctgcacatcagtccccgcggagcctaggaggcctacccccaccctttctacctcccca

SEQ ID NO: 154983 - DNA, 120 bp, Artificial Sequence
  ENSG00000106100_0 (sequence is synthesized)
gaggcagccgccccggtcctgcccctccctcgcgctactgcgggagcagcgtcctcccgggccacggcgcttcccggccccggcgtccccggaccatggcgctctccgggctcttctcta

SEQ ID NO: 154984 - DNA, 120 bp, Artificial Sequence
  ENSG00000106100_1 (sequence is synthesized)
gctctccgggctcttctctagctctcagcggctgcgaagtctgtaaacctggtggccaagtgattgtaagtcaggagactttccttcggtttctgcctttgatggcaagaggtggagatt

SEQ ID NO: 154985 - DNA, 120 bp, Artificial Sequence
  ENSG00000106100_2 (sequence is synthesized)
gtggcggcgattacagaaaacatctgggaagacaagttgctgtttttatgggaatcgcaggcttggaagagacagaagcaattccagaaataaattggaaattgaagatttaaacaatgt

SEQ ID NO: 154986 - DNA, 120 bp, Artificial Sequence
  ENSG00000106100_3 (sequence is synthesized)
tgttttaaaatattctaacttcaaagaatgatgccagaaacttaaaaaggggctgcgcagagtagcaggggccctggagggcgcggcctgaatcctgattgcccttctgctgagaggaca

SEQ ID NO: 154987 - DNA, 120 bp, Artificial Sequence
  ENSG00000106100_4 (sequence is synthesized)
cacgcagctgaagatgaatttgggaaaagtagccgcttgctactttaactatggaagagcagggccacagtgagatggaaataatcccatcagagtctcacccccacattcaattactga

SEQ ID NO: 154988 - DNA, 120 bp, Artificial Sequence
  ENSG00000106100_5 (sequence is synthesized)
aaagcaatcgggaacttctggtcactcacatccgcaatactcagtgtctggtggacaacttgctgaagaatgactacttctcggccgaagatgcggagattgtgtgtgcctgccccaccc

SEQ ID NO: 154989 - DNA, 120 bp, Artificial Sequence
  ENSG00000106100_6 (sequence is synthesized)
agcctgacaaggtccgcaaaattctggacctggtacagagcaagggcgaggaggtgtccgagttcttcctctacttgctccagcaactcgcagatgcctacgtggacctcaggccttggc

SEQ ID NO: 154990 - DNA, 120 bp, Artificial Sequence
  ENSG00000106100_7 (sequence is synthesized)
tgctggagatcggcttctccccttccctgctcactcagagcaaagtcgtggtcaacactgacccagtgagcaggtatacccagcagctgcgacaccatctgggccgtgactccaagttcg

SEQ ID NO: 154991 - DNA, 120 bp, Artificial Sequence
  ENSG00000106100_8 (sequence is synthesized)
tgctgtgctatgcccagaaggaggagctgctgctggaggagatctacatggacaccatcatggagctggttggcttcagcaatgagagcctgggcagcctgaacagcctggcctgcctcc

SEQ ID NO: 154992 - DNA, 120 bp, Artificial Sequence
  ENSG00000106100_9 (sequence is synthesized)
tggaccacaccaccggcatcctcaatgagcagggtgagaccatcttcatcctgggtgatgctggggtgggcaagtccatgctgctacagcggctgcagagcctctgggccacgggccggc

SEQ ID NO: 154993 - DNA, 120 bp, Artificial Sequence
  ENSG00000106100_10 (sequence is synthesized)
tagacgcaggggtcaaattcttcttccactttcgctgccgcatgttcagctgcttcaaggaaagtgacaggctgtgtctgcaggacctgctcttcaagcactactgctacccagagcggg

SEQ ID NO: 154994 - DNA, 120 bp, Artificial Sequence
  ENSG00000106100_11 (sequence is synthesized)
accccgaggaggtgtttgccttcctgctgcgcttcccccacgtggccctcttcaccttcgatggcctggacgagctgcactcggacttggacctgagccgcgtgcctgacagctcctgcc

SEQ ID NO: 154995 - DNA, 120 bp, Artificial Sequence
  ENSG00000106100_12 (sequence is synthesized)
cctgggagcctgcccaccccctggtcttgctggccaacctgctcagtgggaagctgctcaagggggctagcaagctgctcacagcccgcacaggcatcgaggtcccgcgccagttcctgc

SEQ ID NO: 154996 - DNA, 120 bp, Artificial Sequence
  ENSG00000106100_13 (sequence is synthesized)
ggaagaaggtgcttctccggggcttctcccccagccacctgcgcgcctatgccaggaggatgttccccgagcgggccctgcaggaccgcctgctgagccagctggaggccaaccccaacc

SEQ ID NO: 154997 - DNA, 120 bp, Artificial Sequence
  ENSG00000106100_14 (sequence is synthesized)
tctgcagcctgtgctctgtgcccctcttctgctggatcatcttccggtgcttccagcacttccgtgctgcctttgaaggctcaccacagctgcccgactgcacgatgaccctgacagatg

SEQ ID NO: 154998 - DNA, 120 bp, Artificial Sequence
  ENSG00000106100_15 (sequence is synthesized)
tcttcctcctggtcactgaggtccatctgaacaggatgcagcccagcagcctggtgcagcggaacacacgcagcccagtggagaccctccacgccggccgggacactctgtgctcgctgg

SEQ ID NO: 154999 - DNA, 120 bp, Artificial Sequence
  ENSG00000106100_16 (sequence is synthesized)
ggcaggtggcccaccggggcatggagaagagcctctttgtcttcacccaggaggaggtgcaggcctccgggctgcaggagagagacatgcagctgggcttcctgcgggctttgccggagc

SEQ ID NO: 155000 - DNA, 120 bp, Artificial Sequence
  ENSG00000106100_17 (sequence is synthesized)
tgggccccgggggtgaccagcagtcctatgagtttttccacctcaccctccaggccttctttacagccttcttcctcgtgctggacgacagggtgggcactcaggagctgctcaggttct

SEQ ID NO: 155001 - DNA, 120 bp, Artificial Sequence
  ENSG00000106100_18 (sequence is synthesized)
tccagtgcctgcagggcagtggtccggcgcgggaagacctcttcaagaacaaggatcacttccagttcaccaacctcttcctgtgcgggctgttgtccaaagccaaacagaaactcctgc

SEQ ID NO: 155002 - DNA, 120 bp, Artificial Sequence
  ENSG00000106100_19 (sequence is synthesized)
ggcatctggtgcccgcggcagccctgaggagaaagcgcaaggccctgtgggcacacctgttttccagcctgcggggctacctgaagagcctgccccgcgttcaggtcgaaagcttcaacc

SEQ ID NO: 155003 - DNA, 120 bp, Artificial Sequence
  ENSG00000106100_20 (sequence is synthesized)
aggtgcaggccatgcccacgttcatctggatgctgcgctgcatctacgagacacagagccagaaggtggggcagctggcggccaggggcatctgcgccaactacctcaagctgacctact

SEQ ID NO: 155004 - DNA, 120 bp, Artificial Sequence
  ENSG00000106100_21 (sequence is synthesized)
gcaacgcctgctcggccgactgcagcgccctctccttcgtcctgcatcacttccccaagcggctggccctagacctagacaacaacaatctcaacgactacggcgtgcgggagctgcagc

SEQ ID NO: 155005 - DNA, 120 bp, Artificial Sequence
  ENSG00000106100_22 (sequence is synthesized)
cctgcttcagccgcctcactgttctcagactcagcgtaaaccagatcactgacggtggggtaaaggtgctaagcgaagagctgaccaaatacaaaattgtgacctatttgggtttataca

SEQ ID NO: 155006 - DNA, 120 bp, Artificial Sequence
  ENSG00000106100_23 (sequence is synthesized)
acaaccagatcaccgatgtcggagccaggtacgtcaccaaaatcctggatgaatgcaaaggcctcacgcatcttaaactgggaaaaaacaaaataacaagtgaaggagggaagtatctcg

SEQ ID NO: 155007 - DNA, 120 bp, Artificial Sequence
  ENSG00000106100_24 (sequence is synthesized)
ccctggctgtgaagaacagcaaatcaatctctgaggttgggatgtggggcaatcaagttggggatgaaggagcaaaagccttcgcagaggctctgcggaaccaccccagcttgaccaccc

SEQ ID NO: 155008 - DNA, 120 bp, Artificial Sequence
  ENSG00000106100_25 (sequence is synthesized)
tgagtcttgcgtccaacggcatctccacagaaggaggaaagagccttgcgagggccctgcagcagaacacgtctctagaaatactgtggctgacccaaaatgaactcaacgatgaagtgg

SEQ ID NO: 155009 - DNA, 120 bp, Artificial Sequence
  ENSG00000106100_26 (sequence is synthesized)
cagagagtttggcagaaatgttgaaagtcaaccagacgttaaagcatttatggcttatccagaatcagatcacagctaaggggactgcccagctggcagatgcgttacagagcaacactg

SEQ ID NO: 155010 - DNA, 120 bp, Artificial Sequence
  ENSG00000106100_27 (sequence is synthesized)
gcataacagagatttgcctaaatggaaacctgataaaaccagaggaggccaaagtctatgaagatgagaagcggattatctgtttctgagaggatgctttcctgttcatggggtttttgc

SEQ ID NO: 155011 - DNA, 120 bp, Artificial Sequence
  ENSG00000106100_28 (sequence is synthesized)
cctggagcctcagcagcaaatgccactctgggcagtcttttgtgtcagtgtcttaaaggggcctgcgcaggcgggactatcaggagtccactgcctccatgatgcaagccagcttcctgt

SEQ ID NO: 155012 - DNA, 120 bp, Artificial Sequence
  ENSG00000106100_29 (sequence is synthesized)
gcagaaggtctggtcggcaaactccctaagtacccgctacaattctgcagaaaaagaatgtgtcttgcgagctgttgtagttacagtaaatacactgtgaagagactttattgcctatta

SEQ ID NO: 155013 - DNA, 120 bp, Artificial Sequence
  ENSG00000106100_30 (sequence is synthesized)
taattatttttatctgaagctagaggaataaagctgtgagcaaacagaggaggccagcctcacctcattccaacacctgccatagggaccaacgggagcgagttggtcaccgctcttttc

SEQ ID NO: 155014 - DNA, 120 bp, Artificial Sequence
  ENSG00000106100_31 (sequence is synthesized)
attgaagagttgaggatgtggcacaaagttggtgccaagcttcttgaataaaacgtgtttgatggattagtattatacctgaaatattttcttccttctcagcactttcccatgtattga

SEQ ID NO: 155015 - DNA, 120 bp, Artificial Sequence
  ENSG00000106100_32 (sequence is synthesized)
tactggtcccacttcacagctggagacaccggagtatgtgcagtgtgggatttgactcctccaaggttttgtggaaagttaatgtcaaggaaaggatgcaccacgggcttttaattttaa

SEQ ID NO: 155016 - DNA, 120 bp, Artificial Sequence
  ENSG00000106100_33 (sequence is synthesized)
tcctggagtctcactgtctgctggcaaagatagagaatgccctcagctcttagctggtctaagaatgacgatgccttcaaaatgctgcttccactcagggcttctcctctgctaggctac

SEQ ID NO: 155017 - DNA, 120 bp, Artificial Sequence
  ENSG00000106100_34 (sequence is synthesized)
cctcctctagaaggctgagtaccatgggctacagtgtctggccttgggaagaagtgattctgtccctccaaagaaatagggcatggcttgcccctgtggccctggcatccaaatggctgc

SEQ ID NO: 155018 - DNA, 120 bp, Artificial Sequence
  ENSG00000106100_35 (sequence is synthesized)
ttttgtctcccttacctcgtgaagaggggaagtctcttcctgcctcccaagcagctgaagggtgactaaacgggcgccaagactcaggggatcggctgggaactgggccagcagagcatg

SEQ ID NO: 155019 - DNA, 120 bp, Artificial Sequence
  ENSG00000106100_36 (sequence is synthesized)
ttggacaccccccaccatggtgggcttgtggtggctgctccatgagggtgggggtgatactactagatcacttgtcctcttgccagctcatttgttaataaaatactgaaaacactctta

SEQ ID NO: 155020 - DNA, 120 bp, Artificial Sequence
  ENSG00000106100_37 (sequence is synthesized)
ctattttgggtccataatccctcatccagagcctttggggcaagacccgaatggggattctgagtgcatgctatggcatgacgtggccgcaggggtctaaggcagtgccccattttcaaa

SEQ ID NO: 155021 - DNA, 120 bp, Artificial Sequence
  ENSG00000106100_38 (sequence is synthesized)
cactttcatatttctcccgcagaatgtatgaaacagtcaaaccaagtgtggtaagaaagactataagtagctccacatcagttgccaaaagaattgtgagaaactttgggcattcagagc

SEQ ID NO: 155022 - DNA, 120 bp, Artificial Sequence
  ENSG00000106100_39 (sequence is synthesized)
ctttgaggttttggagtctgagagaagggattgcgggccagccccacacaactggtggctctgcaagctggagcagttgttcagtttcttggggcctcagtggccttcgatgttaatgag

SEQ ID NO: 155023 - DNA, 120 bp, Artificial Sequence
  ENSG00000106100_40 (sequence is synthesized)
gacatggacgcaaacgaccccgggccacactcggctccagggctctgtgtggctgtggaaccctggaagcctgagcttagctgcctttcaacttccatctgctgtactattgaattggca

SEQ ID NO: 155024 - DNA, 120 bp, Artificial Sequence
  ENSG00000106100_41 (sequence is synthesized)
ttgagcggtgagatggctgaaaggtagacatcgagaagttttaatattcagaatcttttcttctcaagacgctgaatgtaatcttagttgtaaatacccatcacctgccagtcaccgagc

SEQ ID NO: 155025 - DNA, 120 bp, Artificial Sequence
  ENSG00000106100_42 (sequence is synthesized)
actcatgcaccagggctttgcgttatgtcctaagatcctcataaccaccctgcaaggggactatcatcattacctctgtattacagatggagaaactgaggcacagagaggtaacgtgac

SEQ ID NO: 155026 - DNA, 120 bp, Artificial Sequence
  ENSG00000106100_43 (sequence is synthesized)
ttgtctcaggccataaagctggggaaagtagtggagctggttttgaacctgagctgtgagacctcagagccctaaactctggtgcctgtgtgttcccctttcaacccagactttggaaat

SEQ ID NO: 155027 - DNA, 120 bp, Artificial Sequence
  ENSG00000106100_44 (sequence is synthesized)
cagtagacaccatatgcttcaaaaaacaggggctattaaaatgacatcaggagccagaaagtctcatggctgtgctttctcttgaagtttatacaacaaccagatcaccgatgtcggagc

SEQ ID NO: 155028 - DNA, 120 bp, Artificial Sequence
  ENSG00000106100_45 (sequence is synthesized)
caggtacgtcaccaaaatcctggatgaatgcaaaggcctcacgcatcttaagtaagtggggtaggcaccaggttccttagtatattctcttgatcacccccttctgttgttcaaagatta

SEQ ID NO: 155029 - DNA, 120 bp, Artificial Sequence
  ENSG00000106100_46 (sequence is synthesized)
aatgtcacagtaaagagctttcatcctaaagccttccacttgtcccagggccatgttggtcaagtaaagatacctctgtgtgatctgtgaggcttggattctggaagggcctcccgttat

SEQ ID NO: 155030 - DNA, 120 bp, Artificial Sequence
  ENSG00000106100_47 (sequence is synthesized)
tggtagggggaaaggttggcattttgatttcattaactactaggccgaagaaaggactaactctcaccctttctggtggtctttttgccccaagggagtttcctgtcgggttgcaaggaa

SEQ ID NO: 155031 - DNA, 120 bp, Artificial Sequence
  ENSG00000106100_48 (sequence is synthesized)
gagcttgggcccttgccctgctgtaggtgtgccctgcgcagggggtgacagtgcgccaggcttggagcctctggtcctgccctgacagtggccacataccttgacccttggcagtcaaag

SEQ ID NO: 155032 - DNA, 120 bp, Artificial Sequence
  ENSG00000106100_49 (sequence is synthesized)
gtggaccatctcctggagaggaaccctgactgactgtcctcagggcttcagttccctccctgacaggaggcccaggccatggctcttgtggatcccagaagaaagtgtacggttcccaag

SEQ ID NO: 155033 - DNA, 120 bp, Artificial Sequence
  ENSG00000106100_50 (sequence is synthesized)
atggggctggaaggggctctgtgctggggaggagggtgacccacattggagcccctgcatagctggaggctgactgtgtgtgactctctctgcagactgggaaaaaacaaaataacaagt

SEQ ID NO: 155034 - DNA, 120 bp, Artificial Sequence
  ENSG00000106100_51 (sequence is synthesized)
ggtagctgggctaagaaataggagcccaggtacaggatttgcattaaaaatgagtcccattgaccttctgtggggctgacaggctgggcttggagcctggctgttttctgggttctcagc

SEQ ID NO: 155035 - DNA, 120 bp, Artificial Sequence
  ENSG00000106100_52 (sequence is synthesized)
aagtgatcatctgcatagctggagagccttgggctgagctcccgctcctgtgaactctaaaacaatgtctgccaagtaggctctcttgagtaaatacttccttttttttccttaggctga

SEQ ID NO: 155036 - DNA, 120 bp, Artificial Sequence
  ENSG00000106100_53 (sequence is synthesized)
gtaaacctggtggccaacatctcagttataagaaatgcacatctccgctcaaggtcccctgggacagtgcaaggaaagaaagaagcctgcggtgaaagtgacactgagtgattgtaagtc

SEQ ID NO: 155037 - DNA, 120 bp, Artificial Sequence
  ENSG00000106100_54 (sequence is synthesized)
cggctgcgaagtctgtaaacctggtggccaaaagccaagtcatccagaagccagcttctgcagctccaaagagggccttagcagttacaaagaaacacaagataacggtgattgtaagtc

SEQ ID NO: 155038 - DNA, 120 bp, Artificial Sequence
  ENSG00000106100_55 (sequence is synthesized)
caaggacagtcagttgcatgtcacacaaggggcctcctttgatttatccaaaaggtctgacctggtttctggaaaaactctttagcgcatcaaatactcgttgagggcaagtgttgtttc

SEQ ID NO: 155039 - DNA, 120 bp, Artificial Sequence
  ENSG00000106105_0 (sequence is synthesized)
gcttccgtcgccaccctctctggacagcccagggccgcaggctcatgccctctccgcgtccagtgctgcttagaggtgctcgcgccgctctgctgctgctgctgccgccccggctcttag

SEQ ID NO: 155040 - DNA, 120 bp, Artificial Sequence
  ENSG00000106105_1 (sequence is synthesized)
cccgaccctcgctcctgctccgccggtccctcagcgcggcctcctgccccccgatctccttgcccgccgccgcctcccggagcagcatggacggcgcgggggctgaggaggtgctggcac

SEQ ID NO: 155041 - DNA, 120 bp, Artificial Sequence
  ENSG00000106105_2 (sequence is synthesized)
ctctgaggctagcagtgcgccagcagggagatcttgtgcgaaaactcaaagaagataaagcaccccaagtagacgtagacaaagcagtggctgagctcaaagcccgcaagagggttctgg

SEQ ID NO: 155042 - DNA, 120 bp, Artificial Sequence
  ENSG00000106105_3 (sequence is synthesized)
aagcaaaggagctggcgttacagcccaaagatgatattgtagaccgagcaaaaatggaagataccctgaagaggaggtttttctatgatcaagcttttgctatttatggaggtgttagtg

SEQ ID NO: 155043 - DNA, 120 bp, Artificial Sequence
  ENSG00000106105_4 (sequence is synthesized)
gtctgtatgactttgggccagttggctgtgctttgaagaacaatattattcagacctggaggcagcactttatccaagaggaacagatcctggagatcgattgcaccatgctcacccctg

SEQ ID NO: 155044 - DNA, 120 bp, Artificial Sequence
  ENSG00000106105_5 (sequence is synthesized)
agccagttttaaagacctctggccatgtagacaaatttgctgacttcatggtgaaagacgtaaaaaatggagaatgttttcgtgctgaccatctattaaaagctcatttacagaaattga

SEQ ID NO: 155045 - DNA, 120 bp, Artificial Sequence
  ENSG00000106105_6 (sequence is synthesized)
tgtctgataagaagtgttctgtcgaaaagaaatcagaaatggaaagtgttttggcccagcttgataactatggacagcaagaacttgcggatctttttgtgaactataatgtaaaatctc

SEQ ID NO: 155046 - DNA, 120 bp, Artificial Sequence
  ENSG00000106105_7 (sequence is synthesized)
ccattactggaaatgatctatcccctccagtgtcttttaacttaatgttcaagactttcattgggcctggaggaaacatgcctgggtacttgagaccagaaactgcacaggggattttct

SEQ ID NO: 155047 - DNA, 120 bp, Artificial Sequence
  ENSG00000106105_8 (sequence is synthesized)
tgaatttcaaacgacttttggagttcaaccaaggaaagttgccttttgctgctgcccagattggaaattcttttagaaatgagatctcccctcgatctggactgatcagagtcagagaat

SEQ ID NO: 155048 - DNA, 120 bp, Artificial Sequence
  ENSG00000106105_9 (sequence is synthesized)
tcacaatggcagaaattgagcactttgtagatcccagtgagaaagaccaccccaagttccagaatgtggcagaccttcacctttatttgtattcagcaaaagcccaggtcagcggacagt

SEQ ID NO: 155049 - DNA, 120 bp, Artificial Sequence
  ENSG00000106105_10 (sequence is synthesized)
gggtgtgattaataacacagtattaggctatttcattggccgcatctacctctacctcacgaaggttggaatatctccagataaactccgcttccggcagcacatggagaatgagatggc

SEQ ID NO: 155050 - DNA, 120 bp, Artificial Sequence
  ENSG00000106105_11 (sequence is synthesized)
ccattatgcctgtgactgttgggatgcagaatccaaaacatcctacggttggattgagattgttggatgtgctgatcgttcctgttatgacctctcctgtcatgcacgagccaccaaagt

SEQ ID NO: 155051 - DNA, 120 bp, Artificial Sequence
  ENSG00000106105_12 (sequence is synthesized)
cccacttgtagctgagaaacctctgaaagaacccaaaacagtcaatgttgttcagtttgaacccagtaagggagcaattggtaaggcatataagaaggatgcaaaactggtgatggagta

SEQ ID NO: 155052 - DNA, 120 bp, Artificial Sequence
  ENSG00000106105_13 (sequence is synthesized)
tcttgccatttgtgatgagtgctacattacagaaatggagatgctgctgaatgagaaaggggaattcacaattgaaactgaagggaaaacatttcagttaacaaaagacatgatcaatgt

SEQ ID NO: 155053 - DNA, 120 bp, Artificial Sequence
  ENSG00000106105_14 (sequence is synthesized)
gaagagattccagaaaacactatatgtggaagaagttgttccgaatgtaattgaaccttccttcggcctgggtaggatcatgtatacggtatttgaacatacattccatgtacgagaagg

SEQ ID NO: 155054 - DNA, 120 bp, Artificial Sequence
  ENSG00000106105_15 (sequence is synthesized)
agatgaacagagaacattcttcagtttccctgctgtagttgctccattcaaatgttccgtcctcccactgagccaaaaccaggagttcatgccatttgtcaaggaattatcggaagccct

SEQ ID NO: 155055 - DNA, 120 bp, Artificial Sequence
  ENSG00000106105_16 (sequence is synthesized)
gaccaggcatggagtatctcacaaagtagacgattcctctgggtcaatcggaaggcgctatgccaggactgatgagattggcgtggcttttggtgtcaccattgactttgacacagtgaa

SEQ ID NO: 155056 - DNA, 120 bp, Artificial Sequence
  ENSG00000106105_17 (sequence is synthesized)
caagaccccccacactgcaactctgagggaccgtgactcaatgcggcagataagagcagagatctctgagctgcccagcatagtccaagacctagccaatggcaacatcacatgggctga

SEQ ID NO: 155057 - DNA, 120 bp, Artificial Sequence
  ENSG00000106105_18 (sequence is synthesized)
tgtggaggccaggtatcctctgtttgaagggcaagagactggtaaaaaagagacaatcgaggaatgaggacaattttgacaacttttgaccacttgcgctaataaaaaaaaaaaaaaact

SEQ ID NO: 155058 - DNA, 120 bp, Artificial Sequence
  ENSG00000106105_19 (sequence is synthesized)
actcttatgtccactttacaaaagaaaacagcattgtgattactcccagggaccgtattttatcttcagtggctgcctgattttacccccacaattaaagttgaaggaatcctgaacaaa

SEQ ID NO: 155059 - DNA, 120 bp, Artificial Sequence
  ENSG00000106105_20 (sequence is synthesized)
ataagtccaagtctttaccttgttctatggataaatggagatgttttagacactgtagtaacgcttgtttaaacctattattttacctatccctttgttcctttcctattctctgtactt

SEQ ID NO: 155060 - DNA, 120 bp, Artificial Sequence
  ENSG00000106105_21 (sequence is synthesized)
tttggatgagagttgtctgaatgattttgtggacaggtgtttcatcttgccttaaaatcagcataaacaggatctggagtactgatagagagctggcatggttttaagttgatgattgat

SEQ ID NO: 155061 - DNA, 120 bp, Artificial Sequence
  ENSG00000106105_22 (sequence is synthesized)
cgtatgaaggatgctgaagtttatttgtggctgaattgaaattcctggaaacggagtagtaatgggtgtttgagaagctactgccagtggaaagatggaagaagttgttccgaatgtaat

SEQ ID NO: 155062 - DNA, 120 bp, Artificial Sequence
  ENSG00000106105_23 (sequence is synthesized)
tagtaacgggcttgtgaagcaagcagagcaggtggtagagacctgctttttaggtggagaaactaaggttcagaaagagttcatgacttggcctaaattcggagctgaaaccaggtgttt

SEQ ID NO: 155063 - DNA, 120 bp, Artificial Sequence
  ENSG00000106105_24 (sequence is synthesized)
ctgatgctggttctgcttctcttttgccatactgcttttcatgtcatgttttctggcattttggtaatgacgttatgcttgaacacttgctgaatattaacctcttttggtttgggatat

SEQ ID NO: 155064 - DNA, 120 bp, Artificial Sequence
  ENSG00000106105_25 (sequence is synthesized)
aaaaatagaggtggtggagtcaggactcaccttctggccttggctcttggtcccatatttgttccccctatagctgtatcagatggaggtatgagtgaagatttggattcccgcaaggga

SEQ ID NO: 155065 - DNA, 120 bp, Artificial Sequence
  ENSG00000106105_26 (sequence is synthesized)
tttattaaactttagggatatttctttctcttgcaactcaacttgttgctttcttgtcttggtcccatttataagtctcctgagcttgtaagacagtagttagataacactgggcttaac

SEQ ID NO: 155066 - DNA, 120 bp, Artificial Sequence
  ENSG00000106105_27 (sequence is synthesized)
ctgaatgagaaagggtaagatatcagatgtttactcttccatgggctccagtcagttgtgtcatctgccaggttctgaaaggatgagattaatttcttaagattttttgcaggtaagtac

SEQ ID NO: 155067 - DNA, 120 bp, Artificial Sequence
  ENSG00000106105_28 (sequence is synthesized)
tgtatcttggctgcatttaaaagactgtctttgccgagattttggcattatagcctgaaaaaagatttgaaatagaatatactttttttttttcctagtaactgtcttaaacaaagagac

SEQ ID NO: 155068 - DNA, 120 bp, Artificial Sequence
  ENSG00000106113_0 (sequence is synthesized)
acttgacagctctgggcgaccggaggtggcgcccaaaggctgcccgggagatcggggctgggctggcgggggccaggaccccgcgccctctcggccgctcactctcgcgtccactccctc

SEQ ID NO: 155069 - DNA, 120 bp, Artificial Sequence
  ENSG00000106113_1 (sequence is synthesized)
gcagtcacgccgggcgcgcactcccactccctctccgcacgcggctgcgggacgcgatggacgcggcactgctccacagcctgctggaggccaactgcagcctggcgctggctgaagagc

SEQ ID NO: 155070 - DNA, 120 bp, Artificial Sequence
  ENSG00000106113_2 (sequence is synthesized)
tgctcttggacggctgggggccacccctggaccccgagggtccctactcctactgcaacacgaccttggaccagatcggaacgtgctggccccgcagcgctgccggagccctcgtggaga

SEQ ID NO: 155071 - DNA, 120 bp, Artificial Sequence
  ENSG00000106113_3 (sequence is synthesized)
ggccgtgccccgagtacttcaacggcgtcaagtacaacacgacccggaatgcctatcgagaatgcttggagaatgggacgtgggcctcaaagatcaactactcacagtgtgagcccattt

SEQ ID NO: 155072 - DNA, 120 bp, Artificial Sequence
  ENSG00000106113_4 (sequence is synthesized)
tggatgacaagcagaggaagtatgacctgcactaccgcatcgcccttgtcgtcaactacctgggccactgcgtatctgtggcagccctggtggccgccttcctgcttttcctggccctgc

SEQ ID NO: 155073 - DNA, 120 bp, Artificial Sequence
  ENSG00000106113_5 (sequence is synthesized)
ggagcattcgctgtctgcggaatgtgattcactggaacctcatcaccacctttatcctgcgaaatgtcatgtggttcctgctgcagctcgttgaccatgaagtgcacgagagcaatgagg

SEQ ID NO: 155074 - DNA, 120 bp, Artificial Sequence
  ENSG00000106113_6 (sequence is synthesized)
tctggtgccgctgcatcaccaccatcttcaactacttcgtggtgaccaacttcttctggatgtttgtggaaggctgctacctgcacacggccattgtcatgacctactccactgagcgcc

SEQ ID NO: 155075 - DNA, 120 bp, Artificial Sequence
  ENSG00000106113_7 (sequence is synthesized)
tgcgcaagtgcctcttcctcttcatcggatggtgcatccccttccccatcatcgtcgcctgggccatcggcaagctctactatgagaatgaacagtgctggtttggcaaggagcctggcg

SEQ ID NO: 155076 - DNA, 120 bp, Artificial Sequence
  ENSG00000106113_8 (sequence is synthesized)
acctggtggactacatctaccaaggccccatcattctcgtgctcctgatcaatttcgtatttctgttcaacatcgtcaggatcctaatgacaaagttacgcgcgtccaccacatccgaga

SEQ ID NO: 155077 - DNA, 120 bp, Artificial Sequence
  ENSG00000106113_9 (sequence is synthesized)
caatccagtacaggaaggcagtgaaggccaccctggtgctcctgcccctcctgggcatcacctacatgctcttcttcgtcaatcccggggaggacgacctgtcacagatcatgttcatct

SEQ ID NO: 155078 - DNA, 120 bp, Artificial Sequence
  ENSG00000106113_10 (sequence is synthesized)
atttcaactccttcctgcagtcgttccagggtttcttcgtgtctgtcttctactgcttcttcaatggagaggtgcgctcagccgtgaggaagaggtggcaccgctggcaggaccatcact

SEQ ID NO: 155079 - DNA, 120 bp, Artificial Sequence
  ENSG00000106113_11 (sequence is synthesized)
cccttcgagtccccatggcccgggccatgtccatccctacatcacccacacggatcagcttccacagcatcaagcagacggccgctgtgtgacccctcggtcgcccacctgcacagctcc

SEQ ID NO: 155080 - DNA, 120 bp, Artificial Sequence
  ENSG00000106113_12 (sequence is synthesized)
tcgtggggcaggagatgggaggggagagaccagctctccagcctggcaggaaagagggggtgcggcagccaagggggactgcaagggacagggatgagtgggggccaccaggctcagcgc

SEQ ID NO: 155081 - DNA, 120 bp, Artificial Sequence
  ENSG00000106113_13 (sequence is synthesized)
aagaggaagcagagggaattcacaggaccccctgagaagagccagtcagatgtctgcaggcatttgcccatcccagcctctctggccagggccttactgggcccagagcagagaaggacc

SEQ ID NO: 155082 - DNA, 120 bp, Artificial Sequence
  ENSG00000106113_14 (sequence is synthesized)
tgtccaacacacacagctatttatagtagcagacacagggctcccctgccctactcatggagccagcagccaggcaatggtgtggccctgcactggcccttggcctccacactcagtggt

SEQ ID NO: 155083 - DNA, 120 bp, Artificial Sequence
  ENSG00000106113_15 (sequence is synthesized)
gcccctgcagttgggtggggtacgccagcaaaggatcagtttggctgccttatcccaggggctgtcacctagagaggctcacttgtaccccacccttgttcctgtgtcccctccccagcc

SEQ ID NO: 155084 - DNA, 120 bp, Artificial Sequence
  ENSG00000106113_16 (sequence is synthesized)
atcctcccgccttgggggctccatgaaggatgcaggcttccaggcctggcttcctctcttgggagaccccttctctgcctagtccacagattaggcaatcaaggaagacgccatcaggga

SEQ ID NO: 155085 - DNA, 120 bp, Artificial Sequence
  ENSG00000106113_17 (sequence is synthesized)
agccacatccttagtcaaccagttgcatcgtgcggggcaaaatgaggagcagaggcatggaggagggaggcgtgggatgggaatagcagaaaccaaccatgtcttcagtgattgaaactc

SEQ ID NO: 155086 - DNA, 120 bp, Artificial Sequence
  ENSG00000106113_18 (sequence is synthesized)
ataccccattgccctttgccctccagtctccccttcagaaacatctctgctctctgtgaaataaaccatgcctcttggaagtggcctcccctcaggtcaagtcacccaggcacccgaaga

SEQ ID NO: 155087 - DNA, 120 bp, Artificial Sequence
  ENSG00000106113_19 (sequence is synthesized)
gtggtgtgggccaaggatcgtggctgggtctgagggggccacatccatcttccttagtgggctcgggccctggcctcgggccagttctctctctctctgacctctggtaggtttggagtc

SEQ ID NO: 155088 - DNA, 120 bp, Artificial Sequence
  ENSG00000106113_20 (sequence is synthesized)
tttatggtcaaagcacctgcaggcgggtctgtcccttatcactccaaccaggctaatacctggccccagcccccaaccaagggcagcttgattcagcctggaggaggtgtgcagctcatc

SEQ ID NO: 155089 - DNA, 120 bp, Artificial Sequence
  ENSG00000106113_21 (sequence is synthesized)
cagcaagccagggcctgtcccaaaggccaaggctctggaatctggtgggcagggtagacatggcccctcagttgaccaccagggcagcttccaggcttggcttccgtccctgtgtccctg

SEQ ID NO: 155090 - DNA, 120 bp, Artificial Sequence
  ENSG00000106113_22 (sequence is synthesized)
cagcggagccgcaggagtcagggagagagaagcatcaggccatttcttccaaaagaaaccaatgctctaggtaccccctacaaaaataagttttgaaaaatcatgtatcccgtcttgcac

SEQ ID NO: 155091 - DNA, 120 bp, Artificial Sequence
  ENSG00000106113_23 (sequence is synthesized)
atttttaagttgacatgtagtattttttacttaagttttaaatccttcaaaggtgtgatttctgccattttgtaaatatttacatttttaaataaaactgctgcaacaatttaaaataca

SEQ ID NO: 155092 - DNA, 120 bp, Artificial Sequence
  ENSG00000106113_24 (sequence is synthesized)
ggggctggccagggtgtgaccaccgtgctgggcagcaggctccagtccctaacccccagccactactggcatgaggggtccctcagggcccccaggcctcctctacgtcccacacctcct

SEQ ID NO: 155093 - DNA, 120 bp, Artificial Sequence
  ENSG00000106113_25 (sequence is synthesized)
cctctgcctgctctgcctcctcccaccgccgctccaatacgcagccgggcagagccagatgcccaaagaccagcccctgtgggcacttctggagcagtactgccacaccatcatgaccct

SEQ ID NO: 155094 - DNA, 120 bp, Artificial Sequence
  ENSG00000106113_26 (sequence is synthesized)
ctctcagtcacgccgggcgcgcactcccactccctctccgcacgcggctgcgggacgcgatggacgcggcactgctccacagcctgctggaggccaactgcagcctggcgctggctgaag

SEQ ID NO: 155095 - DNA, 120 bp, Artificial Sequence
  ENSG00000106113_27 (sequence is synthesized)
caccaacctctcaggctggtcttgaattcctgtgctcaagcaatctgcctaccttggcttccccaagtgctgagattatgggtgtgagccactgcacctggccaagaatccgaatggatt

SEQ ID NO: 155096 - DNA, 120 bp, Artificial Sequence
  ENSG00000106113_28 (sequence is synthesized)
caaagataccttgaaataattcctcaatgcaacacacacacatatgccagggttggtcaaatgggaagagagccttggcctgaagacagggacctgggctttcctcagctcttctgccaa

SEQ ID NO: 155097 - DNA, 120 bp, Artificial Sequence
  ENSG00000106113_29 (sequence is synthesized)
actgcttcttcaatggagagagctgggtgagcaaggaagcccaggccgcagggcctcatggaagagagaagccagagcagaggtggtgacagaaggaagcttccagaaagagatgtgtgc

SEQ ID NO: 155098 - DNA, 120 bp, Artificial Sequence
  ENSG00000106113_30 (sequence is synthesized)
actccccattcccagctcccacgatggaagtcagctgggctggcattcaggagtccaagaaggggatgacccctcagctttccaactccagggaaactggcagaaggtggtaaacattct

SEQ ID NO: 155099 - DNA, 120 bp, Artificial Sequence
  ENSG00000106123_0 (sequence is synthesized)
ggtggctgttggaggaagggaggagagtaaatgaagagaaagaactggaataaccccttgcagaaaaaaaaaaaaagggaagcaagcttagctgtacaccctgagtcttgcaaaagctgc

SEQ ID NO: 155100 - DNA, 120 bp, Artificial Sequence
  ENSG00000106123_1 (sequence is synthesized)
agccccacccaggagcagggtggtggctggggcgatggtggacgccctgaagatgtcccatggctactgaaggggctgcccagttagggaacagagtggcgggcatggtgtgtagcctat

SEQ ID NO: 155101 - DNA, 120 bp, Artificial Sequence
  ENSG00000106123_2 (sequence is synthesized)
gggtgctgctcctggtgtcttcagttctggctctggaagaggtattgctggacaccaccggagagacatctgagattggctggctcacctacccaccaggggggtgggacgaggtgagtg

SEQ ID NO: 155102 - DNA, 120 bp, Artificial Sequence
  ENSG00000106123_3 (sequence is synthesized)
ttctggacgaccagcgacgcctgactcggacctttgaggcatgtcatgtggcaggggcccctccaggcaccgggcaggacaattggttgcagacacactttgtggagcggcgcggggccc

SEQ ID NO: 155103 - DNA, 120 bp, Artificial Sequence
  ENSG00000106123_4 (sequence is synthesized)
agagggcgcacattcgactccacttctctgtgcgggcatgctccagcctgggtgtgagcggcggcacctgccgggagaccttcaccctttactaccgtcaggctgaggagcccgacagcc

SEQ ID NO: 155104 - DNA, 120 bp, Artificial Sequence
  ENSG00000106123_5 (sequence is synthesized)
ggctgaggagcccgacagccctgacagcgtttcctcctggcacctcaaacgctggaccaaggtggacacaattgcagcagacgagagctttccctcctcctcctcctcctcctcctcctc

SEQ ID NO: 155105 - DNA, 120 bp, Artificial Sequence
  ENSG00000106123_6 (sequence is synthesized)
ctgtgggaccccacggggctgggcagcgggctggactgcaactgaacgtcaaagagcggagctttgggcctctcacccaacgcggcttctacgtggccttccaggacacgggggcctgcc

SEQ ID NO: 155106 - DNA, 120 bp, Artificial Sequence
  ENSG00000106123_7 (sequence is synthesized)
tggccctggtcgctgtcaggctcttctcctacacctgccctgccgtgctccgatcctttgcttcctttccagagacgcaggccagtggggctgggggggcctccctggtggcagctgtgg

SEQ ID NO: 155107 - DNA, 120 bp, Artificial Sequence
  ENSG00000106123_8 (sequence is synthesized)
gcacctgtgtggctcatgcagagccagaggaggatggagtagggggccaggcaggaggcagcccccccaggctgcactgcaacggggagggcaagtggatggtagctgtcgggggctgcc

SEQ ID NO: 155108 - DNA, 120 bp, Artificial Sequence
  ENSG00000106123_9 (sequence is synthesized)
gctgccagcctggataccaaccagcacgaggagacaaggcctgccaagcctgcccacgggggctctataaggcttctgctgggaatgctccctgctcaccatgccctgcccgcagtcacg

SEQ ID NO: 155109 - DNA, 120 bp, Artificial Sequence
  ENSG00000106123_10 (sequence is synthesized)
ctcccaacccagcagcccccgtttgcccctgcctggagggcttctaccgggccagttccgacccaccagaggccccctgcactggtcctccatcggctccccaggagctttggtttgagg

SEQ ID NO: 155110 - DNA, 120 bp, Artificial Sequence
  ENSG00000106123_11 (sequence is synthesized)
tgcaaggctcagcactcatgctacactggcgcctgcctcgggagctggggggtcgaggggacctgctcttcaatgtcgtgtgcaaggagtgtgaaggccgccaggaacctgccagcggtg

SEQ ID NO: 155111 - DNA, 120 bp, Artificial Sequence
  ENSG00000106123_12 (sequence is synthesized)
gtgggggcacttgtcaccgctgcagggatgaggtccacttcgaccctcgccagagaggcctgactgagagccgagtgttagtggggggactccgggcacacgtaccctacatcttagagg

SEQ ID NO: 155112 - DNA, 120 bp, Artificial Sequence
  ENSG00000106123_13 (sequence is synthesized)
tgcaggctgttaatggggtgtctgagctcagccctgaccctcctcaggctgcagccatcaatgtcagcaccagccatgaagtgccctctgctgtccctgtggtgcaccaggtgagccggg

SEQ ID NO: 155113 - DNA, 120 bp, Artificial Sequence
  ENSG00000106123_14 (sequence is synthesized)
ctatgaccaggcagaagacgaatcccactccttcaccctgaccagcgagaccaacactgccaccgtgacacagctgagccctggccacatctatggtttccaggtgcgggcccggactgc

SEQ ID NO: 155114 - DNA, 120 bp, Artificial Sequence
  ENSG00000106123_15 (sequence is synthesized)
tgccggccacggcccctacgggggcaaagtctatttccagacacttcctcaaggggagctgtcttcccagcttccagaaagactctccttggtgatcggctccatcctgggggctttggc

SEQ ID NO: 155115 - DNA, 120 bp, Artificial Sequence
  ENSG00000106123_16 (sequence is synthesized)
cttcctcctgctggcagccatcaccgtgctggcggtcgtcttccagcggaagcggcgtgggactggctacacagagcagctgcagcaatacagcagcccaggactcggggtgaagtatta

SEQ ID NO: 155116 - DNA, 120 bp, Artificial Sequence
  ENSG00000106123_17 (sequence is synthesized)
catcgacccctccacctacgaggacccctgtcaggccatccgagaacttgcccgggaagtcgatcctgcttatatcaagattgaggaggtcattgggacaggctcttttggagaagtgcg

SEQ ID NO: 155117 - DNA, 120 bp, Artificial Sequence
  ENSG00000106123_18 (sequence is synthesized)
ccagggccgcctgcagccacggggacggagggagcagactgtggccatccaggccctgtgggccgggggcgccgaaagcctgcagatgaccttcctgggccgggccgcagtgctgggtca

SEQ ID NO: 155118 - DNA, 120 bp, Artificial Sequence
  ENSG00000106123_19 (sequence is synthesized)
gttccagcaccccaacatcctgcggctggagggcgtggtcaccaagagccgacccctcatggtgctgacggagttcatggagcttggccccctggacagcttcctcaggcagcgggaggg

SEQ ID NO: 155119 - DNA, 120 bp, Artificial Sequence
  ENSG00000106123_20 (sequence is synthesized)
ccagttcagcagcctgcagctggtggccatgcagcggggagtggctgctgccatgcagtacctgtccagctttgccttcgtccatcgctcgctgtctgcccacagcgtgctggtgaatag

SEQ ID NO: 155120 - DNA, 120 bp, Artificial Sequence
  ENSG00000106123_21 (sequence is synthesized)
ccacttggtgtgcaaggtggcccgtcttggccacagtcctcagggcccaagttgtttgcttcgctgggcagccccagaggtcattgcacatggaaagcatacaacatccagtgatgtctg

SEQ ID NO: 155121 - DNA, 120 bp, Artificial Sequence
  ENSG00000106123_22 (sequence is synthesized)
gagctttgggatactcatgtgggaagtgatgagttatggagaacggccttactgggacatgagtgagcaggaggtactaaatgcaatagagcaggagttccggctgcccccgcctccagg

SEQ ID NO: 155122 - DNA, 120 bp, Artificial Sequence
  ENSG00000106123_23 (sequence is synthesized)
ctgtcctcctggattacatctacttatgttggacacttggcagaaggaccgtgcccggcggcctcattttgaccagctggtggctgcatttgacaagatgatccgcaagccagataccct

SEQ ID NO: 155123 - DNA, 120 bp, Artificial Sequence
  ENSG00000106123_24 (sequence is synthesized)
gcaggctggcggggacccaggggaaaggccttcccaggcccttctgacccctgtggccctggactttccttgtctggactcaccccaggcctggctttcagccattggactggagtgcta

SEQ ID NO: 155124 - DNA, 120 bp, Artificial Sequence
  ENSG00000106123_25 (sequence is synthesized)
ccaggacaacttctccaagtttggcctctgtaccttcagtgatgtggctcagctcagcctagaagacctgcctgccctgggcatcaccctggctggccaccagaagaagctgctgcacca

SEQ ID NO: 155125 - DNA, 120 bp, Artificial Sequence
  ENSG00000106123_26 (sequence is synthesized)
catccagctccttcagcaacacctgaggcagcagggctcagtggaggtctgagaatgacgatacccgtgactcagccctggacactggtccgagaagggacatgtgggacgtgagccggg

SEQ ID NO: 155126 - DNA, 120 bp, Artificial Sequence
  ENSG00000106123_27 (sequence is synthesized)
ctccaacagcctctgtgagagatgccccacaccaaacccaaccctcccgatggctgcattccctggtcctccgcctctccaccagccccctcctcattaaagggaaagaagggaatttgc

SEQ ID NO: 155127 - DNA, 120 bp, Artificial Sequence
  ENSG00000106123_28 (sequence is synthesized)
gcgggccgggctgcgttcgctccagccgcggctctacagcagcgggcggcgggacccgggacccagcttggcgacggcgatctcgacgcgggcccccaggatctcccggcgccccacctc

SEQ ID NO: 155128 - DNA, 120 bp, Artificial Sequence
  ENSG00000106123_29 (sequence is synthesized)
cccacctctggagcagcccctgccgccagcgtcaggtccaccccggaatcccagggactctcggcgccgaacggacccgggccgggtgcaacggggtccccggactggagaagacgcggg

SEQ ID NO: 155129 - DNA, 120 bp, Artificial Sequence
  ENSG00000106123_30 (sequence is synthesized)
tggcaccgtgcgagctccaggagccccgggtccactgcgaggcctcggggggcgcagacctgcagagactgcggccaacgggaagaaataaagggattatagtccacccaattcacagac

SEQ ID NO: 155130 - DNA, 120 bp, Artificial Sequence
  ENSG00000106123_31 (sequence is synthesized)
ttctgagactcagacacgaggagagatagagaaccgccaatctctaaatcaacaagcaaaggaggtgccaagcctgtttgtcttcattgtgacactggagtctagatgctgggaagtcca

SEQ ID NO: 155131 - DNA, 120 bp, Artificial Sequence
  ENSG00000106123_32 (sequence is synthesized)
aggagggctgtggggatgtgtgtgtgtgttgtgtgtccctgggtgtggatgtgggagggctgtgggcgtgtgtgtgtgttgtgtgtccctgtgtgtggatgtggagggctgtggggatgt

SEQ ID NO: 155132 - DNA, 120 bp, Artificial Sequence
  ENSG00000106123_33 (sequence is synthesized)
gtgtgtgtgttgtgtgtccctgtgtgtggatgtgggagggctgtgggcgtgtgtgtgtgttgtgtgtccctgtgcatggatgtgggaggtttggggcatgcgcgtgcatgttgtgtgtgc

SEQ ID NO: 155133 - DNA, 120 bp, Artificial Sequence
  ENSG00000106123_34 (sequence is synthesized)
ctgtggtgtgtgtgggtgcctgggcacatgaacaagcacctgtgagagacctggcccacctgtgaccctgtcggctggtcccccaggggagctgtcttcccagcttccagaaagactctc

SEQ ID NO: 155134 - DNA, 120 bp, Artificial Sequence
  ENSG00000106123_35 (sequence is synthesized)
cttggtgatcggctccatcctgggggctttggccttcctcctgctggcagccatcaccgtgctggcggtcgtcttccagcggtgagtccccacccctgcccaactctgcccagcaccatt

SEQ ID NO: 155135 - DNA, 120 bp, Artificial Sequence
  ENSG00000106123_36 (sequence is synthesized)
aactccacagccaaacctcaagtcctgccaagtctggagccccctgcagaaacctcacactggtgctcctcccgtcagccagcccctgccctgggccccacgtggagatgggcaggaggg

SEQ ID NO: 155136 - DNA, 120 bp, Artificial Sequence
  ENSG00000106123_37 (sequence is synthesized)
ccaggctgtcgtcccccctccacagaccgactaaagagcagtctggagggtgacaagggggcagcaagggggtggaaatgggagcgtcatccccagtcaccgttttgttcctcaggaagc

SEQ ID NO: 155137 - DNA, 120 bp, Artificial Sequence
  ENSG00000106123_38 (sequence is synthesized)
ggcgtgggactggctacacagagcagctgcagcaatacagcagcccaggtggggatgaggagaggaaatgggtggggctggggaacacatgggtggggcacatggcaggcaaggctggat

SEQ ID NO: 155138 - DNA, 120 bp, Artificial Sequence
  ENSG00000106123_39 (sequence is synthesized)
ccccccaagattgggggagctccttggcacaaccttctggaggtaagtgggcatgtctggggtgcgcgggcagccctgcctttcacaacacgctcataacatactccacacccctccagg

SEQ ID NO: 155139 - DNA, 120 bp, Artificial Sequence
  ENSG00000106123_40 (sequence is synthesized)
gacccagaaacaccctctgccccacttctaggaaggagagctgtgagaaatgaacacagagacagggtcacacagggagtaggcacgaacactccaagatggtcaaatgtgcaccggctc

SEQ ID NO: 155140 - DNA, 120 bp, Artificial Sequence
  ENSG00000106123_41 (sequence is synthesized)
aggagaggcagtatgcaacctggcttctgtcccatggtgggtgctggggcgattggagagctgtaggaggagacacagacacggggtcagcttttggagcttgggctgtatatgaagaaa

SEQ ID NO: 155141 - DNA, 120 bp, Artificial Sequence
  ENSG00000106123_42 (sequence is synthesized)
tcctttgagcccccttccctactcctgatctccagcctggtccacccctgccgccctcccctcaaggctgatcctgctcccagggactcctatccccataataattttccttttgcactc

SEQ ID NO: 155142 - DNA, 120 bp, Artificial Sequence
  ENSG00000106125_0 (sequence is synthesized)
atactgcgccggacagacccagttgcctggtgctgcggcccggcgtgggcctcgtgggcagagccagagccagagccatggacagcctcttcgtggaggaggtggccgcctccttggtca

SEQ ID NO: 155143 - DNA, 120 bp, Artificial Sequence
  ENSG00000106125_1 (sequence is synthesized)
gggagttcctcagcagaaagggcttaaagaagacatgtgtgaccatggaccaggaacgcccacgctctgacctcagcataaacaacagaaatgatcttcgaaaggttttgcatcttgaat

SEQ ID NO: 155144 - DNA, 120 bp, Artificial Sequence
  ENSG00000106125_2 (sequence is synthesized)
ttctctataaggagaacaaggcaaaggaaaatcctctaaaaacaagccttgaactcatcaccagatactttctggatcactttggaaatacggctaacaatttcactcaagataccccaa

SEQ ID NO: 155145 - DNA, 120 bp, Artificial Sequence
  ENSG00000106125_3 (sequence is synthesized)
tccctgcactctcagttccaaagaaaaataacaaagtgccatcaagatgctcagagactacactggtaaatatatatgacctttcagatgaagatgcaggatggagaacatcattgtcag

SEQ ID NO: 155146 - DNA, 120 bp, Artificial Sequence
  ENSG00000106125_4 (sequence is synthesized)
aaacaagcaaagccagacatgacaatcttgatggagatgtacttggtaattttgtatcatctaaaaggcccccgcacaaaagtaagcccatgcagacggtcccgggtgaaactcctgtgt

SEQ ID NO: 155147 - DNA, 120 bp, Artificial Sequence
  ENSG00000106125_5 (sequence is synthesized)
tgacttctgcatgggagaagatagacaagcttcactcggagccttccttggatgtgaagaggatgggagagaattccaggccaaagtctggtctgattgtgcgaggcatgatgtctgggc

SEQ ID NO: 155148 - DNA, 120 bp, Artificial Sequence
  ENSG00000106125_6 (sequence is synthesized)
ccatcgccagctccccacaggattcttttcacagacactatctgagacggtcctcaccgtcaagcagctccacccaaccccaagaagagagccggaaggtccctgagctctttgtctgca

SEQ ID NO: 155149 - DNA, 120 bp, Artificial Sequence
  ENSG00000106125_7 (sequence is synthesized)
cccaacaggacattctggcttcgagcaacagctccccctccaggacctccctgggtcagcttagtgaactgaccgtagaaaggcagaaaaccactgccagcagccctccccatctgccca

SEQ ID NO: 155150 - DNA, 120 bp, Artificial Sequence
  ENSG00000106125_8 (sequence is synthesized)
gcaaacggctgcccccatgggacagggccaggccgagggatccctccgaggacaccccagcagtggacggcagcacagacacggacaggatgcccttgaagctctacttgcctggtggta

SEQ ID NO: 155151 - DNA, 120 bp, Artificial Sequence
  ENSG00000106125_9 (sequence is synthesized)
attccaggatgacccaggagaggctggaaagagcgttcaaacggcagggcagccagcccgcacctgtcaggaaaaatcagttgctgccgtctgacaaggtggatggtgagctgggtgccc

SEQ ID NO: 155152 - DNA, 120 bp, Artificial Sequence
  ENSG00000106125_10 (sequence is synthesized)
tgcggctcgaggatgtggaggatgagttgataagggaagaggtcatcctgtcgccagtcccatcagtgctcaagttgcagacagcatcaaaaccaattgacctctcagtagcaaaggaaa

SEQ ID NO: 155153 - DNA, 120 bp, Artificial Sequence
  ENSG00000106125_11 (sequence is synthesized)
acggcatagtgcagaacaagggtggtccttgcggagtcctggcagctgtccaaggctgtgtcctacagaaactcctgtttgaaggagatagcaaagccgactgtgctcagggactgcagc

SEQ ID NO: 155154 - DNA, 120 bp, Artificial Sequence
  ENSG00000106125_12 (sequence is synthesized)
cttcagatgcccaccggacccgctgcctcgtcctggccctcgcagacattgtgtggcgggcagggggccgagagagagccgttgttgcactggcttcgagaacacagcagttcagtccaa

SEQ ID NO: 155155 - DNA, 120 bp, Artificial Sequence
  ENSG00000106125_13 (sequence is synthesized)
cagggaaatacaaagcagatggagtcttagaaacacttacgcttcacagtttgacctgctatgaggacctggtgacttttcttcaacaaagcattcatcagtttgaagtgggcccctatg

SEQ ID NO: 155156 - DNA, 120 bp, Artificial Sequence
  ENSG00000106125_14 (sequence is synthesized)
gctgcatcctgctcaccctttctgccatcctgtccaggtctacagagctcatccgccaggactttgatgtccccaccagccacctgattggagcacatggctactgtacacaggaacttg

SEQ ID NO: 155157 - DNA, 120 bp, Artificial Sequence
  ENSG00000106125_15 (sequence is synthesized)
tcaatctgctcctgactgggaaagctgtgtccaacgttttcaacgatgtggttgagctggattctggggatgggaacatcacacttctcagaggcattgctgcacgcagtgatattggct

SEQ ID NO: 155158 - DNA, 120 bp, Artificial Sequence
  ENSG00000106125_16 (sequence is synthesized)
tcttatctctctttgagcattacaacatgtgccaggttggctgcttcctgaagaccccgaggttccccatctgggtggtttgcagtgagagccacttcagcatcctctttagcctgcagc

SEQ ID NO: 155159 - DNA, 120 bp, Artificial Sequence
  ENSG00000106125_17 (sequence is synthesized)
cggggctcctgcgtgactggaggactgagaggctctttgacttgtactactacgatggcctggccaaccagcaggagcagatccggctgaccattgacaccacccaaaccatctctgagg

SEQ ID NO: 155160 - DNA, 120 bp, Artificial Sequence
  ENSG00000106125_18 (sequence is synthesized)
acacagacaacgaccttgtcccacccctcgagctctgcatcagaaccaagtggaagggggcatcagtgaactggaacggctcagaccccatcctgtgaccgttggatgtgggtaaaccct

SEQ ID NO: 155161 - DNA, 120 bp, Artificial Sequence
  ENSG00000106125_19 (sequence is synthesized)
gtggtccaccactcatcacctcatcaccgaggatgacagctgaaccccaagcctctggggcaggtctcatgtaccccaacctgggtcagcatgactgcagaagcatccagagcctccctg

SEQ ID NO: 155162 - DNA, 120 bp, Artificial Sequence
  ENSG00000106125_20 (sequence is synthesized)
ccccttccatgaagggcccacccaagactgtgctggggacccagtgtgttgctgggtcccctcccagctgagctgtgactgctgagtactggaaggaggttgccagggtctctgctacct

SEQ ID NO: 155163 - DNA, 120 bp, Artificial Sequence
  ENSG00000106125_21 (sequence is synthesized)
ttgtctgcatccctcccttgctccctgctgggtggtccctcacccaggcctccaatgtggttggccctggggactcattacttctggtagctggctttctataaaaatgggtcaaaccca

SEQ ID NO: 155164 - DNA, 120 bp, Artificial Sequence
  ENSG00000106125_22 (sequence is synthesized)
tccaatatgcaaagcaaagaagggaaaatgccctatttgaagtggggaaaaggaggtcttgctttatcgtctagcctctcagcgtccagctttaaaccactgatcaattcccttctctca

SEQ ID NO: 155165 - DNA, 120 bp, Artificial Sequence
  ENSG00000106125_23 (sequence is synthesized)
ggagggggagctgtgagccagagagagttggctatccaaggtctcacagtcggttaccaggtagggatgaggctagaaccaggtgttttgattcccaattctattgtaggagtgatgatc

SEQ ID NO: 155166 - DNA, 120 bp, Artificial Sequence
  ENSG00000106125_24 (sequence is synthesized)
aagcatattttaactgtaatccttttttcaaatgagacttcagcagattggattcgtatggtggtaggaccaaggctattttttaagacacccagaagatccactgaaccacttgaaaac

SEQ ID NO: 155167 - DNA, 120 bp, Artificial Sequence
  ENSG00000106125_25 (sequence is synthesized)
tacgcaagtacatgtcataggccagggaggaacctatgccaggcatctctcaataaagtaaaggatggaatttcaggcaaacatataaactaaaaacaactggcacctacaggagcactc

SEQ ID NO: 155168 - DNA, 120 bp, Artificial Sequence
  ENSG00000106125_26 (sequence is synthesized)
aggttgccagaaattctcttgctcccctttgaggagaagtaggcaatggcagccccgtgaagtctatcagaggctcagtgaagacatcaaatagaaggcctttgtcctctgggtcctggg

SEQ ID NO: 155169 - DNA, 120 bp, Artificial Sequence
  ENSG00000106125_27 (sequence is synthesized)
gtgacatgcaggcacctctgtctcctgtcctgtagcaagtactttctaagtcctgtggaaagactggtgacccaggcagcagatgctctgcaatcctccgtctgctgtattctaaggcag

SEQ ID NO: 155170 - DNA, 120 bp, Artificial Sequence
  ENSG00000106125_28 (sequence is synthesized)
gagagtggactgtacactttaggagaattttgcgcagagagtgagacaactacccagaaaattcagttaaccattctggttacattgggcttttaacgtaaatgtaccttacctaatttc

SEQ ID NO: 155171 - DNA, 120 bp, Artificial Sequence
  ENSG00000106125_29 (sequence is synthesized)
ccaaaagtgtctttgacattcaagctatttttattccctcattgtaatatagtctccctaaagtagttgttatcttaagatacttaagatattttcatgagatactgataagtgccctga

SEQ ID NO: 155172 - DNA, 120 bp, Artificial Sequence
  ENSG00000106125_30 (sequence is synthesized)
tttatacagcagttattagctgttatacaatgaatcggagtgtatattttacaggaaaattactcattaatatctactacataataattttgacattcattcagcacaaagctcgcctga

SEQ ID NO: 155173 - DNA, 120 bp, Artificial Sequence
  ENSG00000106125_31 (sequence is synthesized)
ttccaggaaagccctgcaatttaatgttaatatttctagtaacttgttctaacctcttaggtataggatagataaaaatgcctatgtaaattgagattttgaaaaacaatatctagattc

SEQ ID NO: 155174 - DNA, 120 bp, Artificial Sequence
  ENSG00000106125_32 (sequence is synthesized)
atataaaggctgtgtctgttgtgagccaagtgatgtgaaaaagcataagggatagtcaggcaattcaggggcttaagtctctcttactgagagaaaaagcaagaaggctacaataaatat

SEQ ID NO: 155175 - DNA, 120 bp, Artificial Sequence
  ENSG00000106125_33 (sequence is synthesized)
aggatctttcccctaactctctttattgtaagcttcatttaatcttagacaaaatagtttttgtttttaatctcttactgaaaagaatagtaaaactgtcccgggttttgtctgatgaat

SEQ ID NO: 155176 - DNA, 120 bp, Artificial Sequence
  ENSG00000106125_34 (sequence is synthesized)
ctgttgagtttggttgtagtccatgggctgtgggtcttagtcctggagtcctgctgcatggatgagaggagtaggaagggggaggacttggcatgccctgagggcctgctctgccagact

SEQ ID NO: 155177 - DNA, 120 bp, Artificial Sequence
  ENSG00000106125_35 (sequence is synthesized)
ccttgtcaggtgcctggctagtctgcaaaatcacagagtgccccatgtccagccacggctcggcaagactgggtgtcactgggcgagtgggttggggactgacacatggctgggtccctg

SEQ ID NO: 155178 - DNA, 120 bp, Artificial Sequence
  ENSG00000106125_36 (sequence is synthesized)
gtaaggtgagagaatctgtatttttaaaaaacatccaaagggaatatttgatataggcaaggatggaaaatactggtatcgtttaattccaaaacctactactgaagactttcatttgcc

SEQ ID NO: 155179 - DNA, 120 bp, Artificial Sequence
  ENSG00000106125_37 (sequence is synthesized)
ttttgtttttaaggttggggtgtaaagtgagtcagtcctgactgcctctctgtgctcttcacattgacctgcttcagttgtctctatcatcgctggtgtcagtgttagatgcagagctta

SEQ ID NO: 155180 - DNA, 120 bp, Artificial Sequence
  ENSG00000106125_38 (sequence is synthesized)
caagctaaaaaaatattcaggctgcaaatacttatgaatctgtagggttagtgttccctacagactccgttttttaaatgaagggatatatattttataaagttattccttggagcaaaa

SEQ ID NO: 155181 - DNA, 120 bp, Artificial Sequence
  ENSG00000106125_39 (sequence is synthesized)
aatgaagaggaaatttgcttaggcatgcctctattcctatcacattttattctagttgtttattgaatcacctgcctcatgcgttggatgctagttcttttagggtagagattttgtttt

SEQ ID NO: 155182 - DNA, 120 bp, Artificial Sequence
  ENSG00000106125_40 (sequence is synthesized)
tgtctctgtgtccgtacccaacatagtacctgacatatataatatgtggccagtaaatgttggctgaaagcttgtatgaatgagtgagaagttgataaacttagtcaaagaagtggaata

SEQ ID NO: 155183 - DNA, 120 bp, Artificial Sequence
  ENSG00000106125_41 (sequence is synthesized)
tgggcttaaggcacgcctgggtttatttggggtaccccacagggcagtccgagaagagggtctgtgtgtggggtgggaagaacagtgcctctgttttctccctggctctactgtcaatga

SEQ ID NO: 155184 - DNA, 120 bp, Artificial Sequence
  ENSG00000106125_42 (sequence is synthesized)
cacgtggggccttgagcaggcctcctttcctgcccttagcttacccattttgtttgtgaggtggatgccatggttttctgttcctctgctgggtaagaatacctactcagctttgtcttt

SEQ ID NO: 155185 - DNA, 120 bp, Artificial Sequence
  ENSG00000106125_43 (sequence is synthesized)
gaatacctactcagctttgtctttgcagttcaggagtggagaacctatccaggttcagagagcatctttaggctgagtgtggtggcttacacctgtaatcccaatgctttgggaggccaa

SEQ ID NO: 155186 - DNA, 89 bp, Artificial Sequence
  ENSG00000106125_44 (sequence is synthesized)
gaaacttgtcccaccgccccatctctacaaaaaatcaaaaagttaggcaggtggggtgatgtgcatctgtagtcctagctactcaggag

SEQ ID NO: 155187 - DNA, 120 bp, Artificial Sequence
  ENSG00000106125_45 (sequence is synthesized)
ctcaggaggctgagtggggaggattgcttgaacctgggaggttgaggctacagtgagctgtgatcatgtgactgtactctggcctgggcaagactgagaccctgtctcaaaaagaaaaaa

SEQ ID NO: 155188 - DNA, 120 bp, Artificial Sequence
  ENSG00000106125_46 (sequence is synthesized)
ccatatccaccttgttaacaagtacagccttagccaggagcatcctcttggcacagaaatttcaccaatacaatctttttaaaaagactaattgaccaagtgaattcctggatgacaata

SEQ ID NO: 155189 - DNA, 120 bp, Artificial Sequence
  ENSG00000106125_47 (sequence is synthesized)
aagagtatattttgaggaaaagaaaaggtaattttatcagaagcttgagctgcaatagttaccatagtagagcaccatatttggctctgagcttcctggcagccaaggcaaaaatgtaaa

SEQ ID NO: 155190 - DNA, 120 bp, Artificial Sequence
  ENSG00000106125_48 (sequence is synthesized)
catggtaagttttataattttcattgtctgttccaggagaaacaagttgggattttttttttctaattttaagtccaaaatgtgattacacataaggaacactgactattataacaggcg

SEQ ID NO: 155191 - DNA, 120 bp, Artificial Sequence
  ENSG00000106125_49 (sequence is synthesized)
gtgtcttcagtcacagttcatggtttccaaagtggaatgagtgaggccttcacactgacttgaaggtggggatggtgtttctccggggagcagaagtgacatggccgatcccagtaggct

SEQ ID NO: 155192 - DNA, 120 bp, Artificial Sequence
  ENSG00000106125_50 (sequence is synthesized)
gtggcccactgggcttactggacagatgggcagggcagagccagctttgttttaacagctaacacaggtgccaggccctgtttgaaatgctttataaggattaactcacgtaattttcac

SEQ ID NO: 155193 - DNA, 120 bp, Artificial Sequence
  ENSG00000106125_51 (sequence is synthesized)
aacttgataagggtaggtgctgtgattattaccctctttttacagatgagaagactgaggatagaggagtccaggagtgtttccatggtcacatagcaaggagtggcagagcgaggattt

SEQ ID NO: 155194 - DNA, 120 bp, Artificial Sequence
  ENSG00000106125_52 (sequence is synthesized)
aaattaggcggtcaggccccgggacaccagctccaaaccagagttgggaggaggactcactttggatgcaaaatctaagggggtgccaaaaatctcagaaattagcaaaacctatctttt

SEQ ID NO: 155195 - DNA, 120 bp, Artificial Sequence
  ENSG00000106125_53 (sequence is synthesized)
ttaaaaatcagagtttatcagaaaaatccacaatgaacaaaataccaaaatgttgatgttttaaaaatatatatatatatatataaatttaagacatgcatctacatggctgcctccttc

SEQ ID NO: 155196 - DNA, 120 bp, Artificial Sequence
  ENSG00000106125_54 (sequence is synthesized)
gcctcaccagatcctgactctgctccaaacctgctctctgctgctcttagcacagcacagttcttctgagtaagggatctggaattagagatccctggagtcccagtgtgctgctgacaa

SEQ ID NO: 155197 - DNA, 120 bp, Artificial Sequence
  ENSG00000106125_55 (sequence is synthesized)
gctgtgtggccttgaactggtcactcagtttctgagcctcagttccacatatgctagagggcagtaatcatagtactgtcccccaggactgttagagtgttcggggtgataatgcccatt

SEQ ID NO: 155198 - DNA, 120 bp, Artificial Sequence
  ENSG00000106125_56 (sequence is synthesized)
gcccctgcatcaccctcgctctgctgtcattgtcattcaggttgttgcaatgtcccatcctttaggaggtcagccttcgggccacccagcaaccccagggctgggctggaggcagttggc

SEQ ID NO: 155199 - DNA, 120 bp, Artificial Sequence
  ENSG00000106125_57 (sequence is synthesized)
tcagggcaggctgctccctggggtgtggctcccacagaggtgtggggctgggaagagggaggtgcaaatgggatggagctcatttttctctccccctcccagtttgaagtgggcccctat

SEQ ID NO: 155200 - DNA, 120 bp, Artificial Sequence
  ENSG00000106128_0 (sequence is synthesized)
acctgagaaggggaagcagagggtgcggtggaaacggctgtgtcaggggacagcaggggaaggaagatagccaaggcttactgaggctggtggagggagccactgctgggctcaccatgg

SEQ ID NO: 155201 - DNA, 120 bp, Artificial Sequence
  ENSG00000106128_1 (sequence is synthesized)
accgccggatgtggggggcccacgtcttctgcgtgttgagcccgttaccgaccgtattgggccacatgcacccagaatgtgacttcatcacccagctgagagaggatgagagtgcctgtc

SEQ ID NO: 155202 - DNA, 120 bp, Artificial Sequence
  ENSG00000106128_2 (sequence is synthesized)
tacaagcagcagaggagatgcccaacaccaccctgggctgccctgcgacctgggatgggctgctgtgctggccaacggcaggctctggcgagtgggtcaccctcccctgcccggatttct

SEQ ID NO: 155203 - DNA, 120 bp, Artificial Sequence
  ENSG00000106128_3 (sequence is synthesized)
tctctcacttcagctcagagtcaggggctgtgaaacgggattgtactatcactggctggtctgagccctttccaccttaccctgtggcctgccctgtgcctctggagctgctggctgagg

SEQ ID NO: 155204 - DNA, 120 bp, Artificial Sequence
  ENSG00000106128_4 (sequence is synthesized)
aggaatcttacttctccacagtgaagattatctacaccgtgggccatagcatctctattgtagccctcttcgtggccatcaccatcctggttgctctcaggaggctccactgcccccgga

SEQ ID NO: 155205 - DNA, 120 bp, Artificial Sequence
  ENSG00000106128_5 (sequence is synthesized)
actacgtccacacccagctgttcaccacttttatcctcaaggcgggagctgtgttcctgaaggatgctgcccttttccacagcgacgacactgaccactgcagcttctccactgttctat

SEQ ID NO: 155206 - DNA, 120 bp, Artificial Sequence
  ENSG00000106128_6 (sequence is synthesized)
gagagccttctggtggctggttctcgctggctgggggctgcccgtgctcttcactggcacgtgggtgagctgcaaactggccttcgaggacatcgcgtgctgggacctggacgacacctc

SEQ ID NO: 155207 - DNA, 120 bp, Artificial Sequence
  ENSG00000106128_7 (sequence is synthesized)
cccctactggtggatcatcaaagggcccattgtcctctcggtcggggtgaactttgggctttttctcaatattatccgcatcctggtgaggaaactggagccagctcagggcagcctcca

SEQ ID NO: 155208 - DNA, 120 bp, Artificial Sequence
  ENSG00000106128_8 (sequence is synthesized)
tacccagtctcagtattggcgtctctccaagtcgacacttttcctgatcccactctttggaattcactacatcatcttcaacttcctgccagacaatgctggcctgggcatccgcctccc

SEQ ID NO: 155209 - DNA, 120 bp, Artificial Sequence
  ENSG00000106128_9 (sequence is synthesized)
cctggagctgggactgggttccttccagggcttcattgttgccatcctctactgcttcctcaaccaagaggtgaggactgagatctcacggaagtggcatggccatgaccctgagcttct

SEQ ID NO: 155210 - DNA, 120 bp, Artificial Sequence
  ENSG00000106128_10 (sequence is synthesized)
gccagcctggaggacccgtgctaagtggaccacgccttcccgctcggcggcaaaggtgctgacatctatgtgctaggctgcctcatcacgccactggagtccacacttgaatttgggcag

SEQ ID NO: 155211 - DNA, 120 bp, Artificial Sequence
  ENSG00000106128_11 (sequence is synthesized)
ctaccacgggtctgccatgctctggaggagcaagggggccacatccccaccccagctgttacccagcccggggcaggtgcagcccttcctccctgtctctgcatctgactctcttttgag

SEQ ID NO: 155212 - DNA, 120 bp, Artificial Sequence
  ENSG00000106128_12 (sequence is synthesized)
gtccctgtatgtctacctctgacttctgtggtccctctgtgtctgctctcatccattcctcttactggggcctggggctctagcccaaggctcagaggagccaataaacctgtaaatgaa

SEQ ID NO: 155213 - DNA, 120 bp, Artificial Sequence
  ENSG00000106128_13 (sequence is synthesized)
tggtactcgcggacacctctgcctccagatggggagtgttggggtggaatggcaaaggcttcacctgcttgattgtcaagcctctctttcctccaaaggcccagaagctgagactttctt

SEQ ID NO: 155214 - DNA, 120 bp, Artificial Sequence
  ENSG00000106128_14 (sequence is synthesized)
cccgtgcaagatccggagcacaggggcttccctgggtcccaggctttctgcaggactcacccccaactaccccggtgtcctccttccagccagcctccccgcgggtcctgagaggagagt

SEQ ID NO: 155215 - DNA, 120 bp, Artificial Sequence
  ENSG00000106128_15 (sequence is synthesized)
tcctaaagagaaggaagaaactcggacttccctcctgttatgttcgggctcctctgtgagaaagaggaggagagaggaaaatgaagggcccattctctgtccccagagagcccccaggaa

SEQ ID NO: 155216 - DNA, 120 bp, Artificial Sequence
  ENSG00000106128_16 (sequence is synthesized)
tgttgggaagatctgcaaggatgagcctgaacctagagcgtgacctgtagctggaccctgtgggaactcacacgtgcctccaggaaggacagtgagcggagcatacacaccaattctacc

SEQ ID NO: 155217 - DNA, 120 bp, Artificial Sequence
  ENSG00000106128_17 (sequence is synthesized)
taggccttcgaatataccacccgccctctggggtctctggcttgcagagggcagattgacttctcagcctccataattgcatgagtcaataccatacaataaagctctttctacactgtg

SEQ ID NO: 155218 - DNA, 120 bp, Artificial Sequence
  ENSG00000106128_18 (sequence is synthesized)
gactgctgcctgcgcctgaaggaaggacagcgtggggcgcaggagagggactacaccccagccaaaggagtcgcttccaggtcccccagcaagggagatttgggccaaatatccagaaac

SEQ ID NO: 155219 - DNA, 120 bp, Artificial Sequence
  ENSG00000106128_19 (sequence is synthesized)
gaccgggagctgcttgtcgccgtcgggaagaggcggcagttgcgcgtcatcaccaccagggggcaccagtacaggtattgggccacatgcacccagaatgtgacttcatcacccagctga

SEQ ID NO: 155220 - DNA, 120 bp, Artificial Sequence
  ENSG00000106128_20 (sequence is synthesized)
tcacttccctggcctaggtgctgggacagtgagggcctcttttctccctactgcccttaggatgctggcagcccagctcaccactcctcacccctcaggggaataatcctctttgtgaag

SEQ ID NO: 155221 - DNA, 120 bp, Artificial Sequence
  ENSG00000106128_21 (sequence is synthesized)
agatggcacctttgaagccagagaaggaaggccccatagtgtgtccctgggcaggctagacctgggccccaggcctctggagccaccctctctgttgctcagaggagctgtccatgcaaa

SEQ ID NO: 155222 - DNA, 120 bp, Artificial Sequence
  ENSG00000106128_22 (sequence is synthesized)
tctcagtattggtactgtgtgtttgtgtctggggatactgggaaagggtaactggagggggattcaatgtgtctgtctcatccaataagcactcatgacctcagccccatactctttctt

SEQ ID NO: 155223 - DNA, 120 bp, Artificial Sequence
  ENSG00000106144_0 (sequence is synthesized)
gcagtgtgcgtccgcgtctgaggggagggatgtgggggaagcgacggcccccggtttgtttgggctgtgggcggtgcgcagcggagagcccgggaaaagcgggaaatggcggcgccgagc

SEQ ID NO: 155224 - DNA, 120 bp, Artificial Sequence
  ENSG00000106144_1 (sequence is synthesized)
gcggggtcttggtccaccttccagcacaaggagctgatggccgctgacaggggacgcaggatattgggagtgtgtggcatgcatcctcatcatcaggaaactctaaaaaagaaccgagtg

SEQ ID NO: 155225 - DNA, 120 bp, Artificial Sequence
  ENSG00000106144_2 (sequence is synthesized)
gtgctagccaaacagctgttgttgagcgaattgttagaacatcttctggagaaggacatcatcaccttggaaatgagggagctcatccaggccaaagtgggcagtttcagccagaatgtg

SEQ ID NO: 155226 - DNA, 120 bp, Artificial Sequence
  ENSG00000106144_3 (sequence is synthesized)
gaactcctcaacttgctgcctaagaggggtccccaagcttttgatgccttctgtgaagcactgagggagaccaagcaaggccacctggaggatatgttgctcaccaccctttctgggctt

SEQ ID NO: 155227 - DNA, 120 bp, Artificial Sequence
  ENSG00000106144_4 (sequence is synthesized)
cagcatgtactcccaccgttgagctgtgactacgacttgagtctcccttttccggtgtgtgagtcctgtcccctttacaagaagctccgcctgtcgacagatactgtggaacactcccta

SEQ ID NO: 155228 - DNA, 120 bp, Artificial Sequence
  ENSG00000106144_5 (sequence is synthesized)
gacaataaagatggtcctgtctgccttcaggtgaagccttgcactcctgaattttatcaaacacacttccagctggcatataggttgcagtctcggcctcgtggcctagcactggtgttg

SEQ ID NO: 155229 - DNA, 120 bp, Artificial Sequence
  ENSG00000106144_6 (sequence is synthesized)
agcaatgtgcacttcactggagagaaagaactggaatttcgctctggaggggatgtggaccacagtactctagtcaccctcttcaagcttttgggctatgacgtccatgttctatgtgac

SEQ ID NO: 155230 - DNA, 120 bp, Artificial Sequence
  ENSG00000106144_7 (sequence is synthesized)
cagactgcacaggaaatgcaagagaaactgcagaattttgcacagttacctgcacaccgagtcacggactcctgcatcgtggcactcctctcgcatggtgtggagggcgccatctatggt

SEQ ID NO: 155231 - DNA, 120 bp, Artificial Sequence
  ENSG00000106144_8 (sequence is synthesized)
gtggatgggaaactgctccagctccaagaggtttttcagctctttgacaacgccaactgcccaagcctacagaacaaaccaaaaatgttcttcatccaggcctgccgtggagatgagact

SEQ ID NO: 155232 - DNA, 120 bp, Artificial Sequence
  ENSG00000106144_9 (sequence is synthesized)
gatcgtggggttgaccaacaagatggaaagaaccacgcaggatcccctgggtgcgaggagagtgatgccggtaaagaaaagttgccgaagatgagactgcccacgcgctcagacatgata

SEQ ID NO: 155233 - DNA, 120 bp, Artificial Sequence
  ENSG00000106144_10 (sequence is synthesized)
tgcggctatgcctgcctcaaagggactgccgccatgcggaacaccaaacgaggttcctggtacatcgaggctcttgctcaagtgttttctgagcgggcttgtgatatgcacgtggccgac

SEQ ID NO: 155234 - DNA, 120 bp, Artificial Sequence
  ENSG00000106144_11 (sequence is synthesized)
atgctggttaaggtgaacgcacttatcaaggatcgggaaggttatgctcctggcacagaattccaccggtgcaaggagatgtctgaatactgcagcactctgtgccgccacctctacctg

SEQ ID NO: 155235 - DNA, 120 bp, Artificial Sequence
  ENSG00000106144_12 (sequence is synthesized)
ttcccaggacaccctcccacatgatgtcacctccccatcatccacgccaagtggaagccactggaccacaggaggtgtgatagagcctttgatcttcaggatgcacggtttctgttctgc

SEQ ID NO: 155236 - DNA, 120 bp, Artificial Sequence
  ENSG00000106144_13 (sequence is synthesized)
cccctcagggatgtgggaatctcccagacttgtttcctgtgcccatcatctctgcctttgagtgtgggactccaggccagctccttttctgtgaagccctttgcctgtagagccagcctt

SEQ ID NO: 155237 - DNA, 120 bp, Artificial Sequence
  ENSG00000106144_14 (sequence is synthesized)
ggttggacctattgccaggaatgtttcagctgcagttgaagagcctgacaagtgaagttgtaaacacagtgtggttatggggagagggcatataaattccccatatttgtgttcagttcc

SEQ ID NO: 155238 - DNA, 120 bp, Artificial Sequence
  ENSG00000106144_15 (sequence is synthesized)
agcttttgtagatggcactttagtgattgcttttattacattagttaagatgtctgagagaccatctcctatcttttatttcattcatatcctccgccctttttgtcctagagtgagagt

SEQ ID NO: 155239 - DNA, 120 bp, Artificial Sequence
  ENSG00000106144_16 (sequence is synthesized)
ttggaaggtgtccaaatttaatgtagacattatcttttggctctgaagaagcaaacatgactagagacgcaccttgctgcagtgtccagaagcggcctgtgcgttcccttcagtactgca

SEQ ID NO: 155240 - DNA, 120 bp, Artificial Sequence
  ENSG00000106144_17 (sequence is synthesized)
agtggaaggacactcttggctcgtttgggctcaaggcaccgcagcctgtcagccaacattgccttgcatttgtaccttattgatctttgcccatggaagtctcaaagatctttcgttggt

SEQ ID NO: 155241 - DNA, 120 bp, Artificial Sequence
  ENSG00000106144_18 (sequence is synthesized)
tgtttctctgagctttgttactgaaatgagcctcgtggggagcatcagagaaggccaggaagaatggtgtgtttccctagactctgtaaccacctctctgtctttttccttcctgagaaa

SEQ ID NO: 155242 - DNA, 120 bp, Artificial Sequence
  ENSG00000106144_19 (sequence is synthesized)
cgtccatctctctcccttactattcccactttcattcaatcaacctgcacttcatatctagatttctagaaaagcttcctagcttatctccctgcttcatatctctcccttctttacctt

SEQ ID NO: 155243 - DNA, 120 bp, Artificial Sequence
  ENSG00000106144_20 (sequence is synthesized)
catttcatcctgttggctgctgccaccaaatctgtctagaatcctgctttacaggatcatgtaaatgctcaaagatgtaatgtagttctttgttcctgctttctctttcagtattaaact

SEQ ID NO: 155244 - DNA, 120 bp, Artificial Sequence
  ENSG00000106144_21 (sequence is synthesized)
ctcctttgatattatgtggcttttatttcagtgccatacatgttattgttttcaacctagaaacctttatccctgcttatctgaaacttcccaacttccctgttctttaagacttttttt

SEQ ID NO: 155245 - DNA, 120 bp, Artificial Sequence
  ENSG00000106144_22 (sequence is synthesized)
ttacaggcgtgagccactgcgcccgggcaagacctttttttaaaaaaaaaaaaaaaaaaacttccattctttcttcctccagtctgttctcacataacagagtagttttggtttttaatt

SEQ ID NO: 155246 - DNA, 120 bp, Artificial Sequence
  ENSG00000106144_23 (sequence is synthesized)
ctcacataacagagtagttttggtttttaattttttttggttgtttgctgttttttgttttttaaggtgagttctcactatgtttctcagactggtctcgaactcctggcctcaagccat

SEQ ID NO: 155247 - DNA, 120 bp, Artificial Sequence
  ENSG00000106144_24 (sequence is synthesized)
ggcatgagccaccacacctggccaggatttggttgtttaaatataaatctgatcacccccctgcttagaacccttctgctttctattacccctcatttaaaatgtaaactcttcaccttg

SEQ ID NO: 155248 - DNA, 120 bp, Artificial Sequence
  ENSG00000106144_25 (sequence is synthesized)
attacccctcatttaaaatgtaaactcttcaccttggtttatgagaactggttcttgccttccccttgaacctcattaaatggtgatttcttgctaagctccagcccgagtggtctcctc

SEQ ID NO: 155249 - DNA, 120 bp, Artificial Sequence
  ENSG00000106144_26 (sequence is synthesized)
tcagcttctaattttgtgctctttcctgcccttttcctgggccttctcagctctccacccccaccactcttgactcaggtggtgtccttcttcctcaagtcttgacaattcccgggccct

SEQ ID NO: 155250 - DNA, 120 bp, Artificial Sequence
  ENSG00000106144_27 (sequence is synthesized)
tcagtccctgagcagtctacttctgtgtctgtcaccacatcttgtcttttcccctcattgcatttattgcagtttatatatatgctacttttacttgttcatttctgtctcccctaccag

SEQ ID NO: 155251 - DNA, 120 bp, Artificial Sequence
  ENSG00000106144_28 (sequence is synthesized)
gctgtaaatgagggcagaaaccttgtttgttttattcaccatcatgtaccaagtgcttggcacatagtgggccttcattaaatgtttgttgaataaaagagggaagaaggcaagccaacc

SEQ ID NO: 155252 - DNA, 120 bp, Artificial Sequence
  ENSG00000106144_29 (sequence is synthesized)
ttagctacaatcctaccttttgataaaatgttccttttgacaatatacacggattattatttgtactttgtttttccatgtgttttgcttttatccactggcatttttagctccttgaag

SEQ ID NO: 155253 - DNA, 120 bp, Artificial Sequence
  ENSG00000106144_30 (sequence is synthesized)
acatatcatgtgtgagataacttccttcacatctcccatggtccctagcaaaatgctaggcctgtagtagtcaaggtgctcaataaatatttgtttgggtggtttgtgagccttgctgcc

SEQ ID NO: 155254 - DNA, 120 bp, Artificial Sequence
  ENSG00000106144_31 (sequence is synthesized)
aagtcctgcctttgggtcgacatagtatggaagtatttgagagagagaacctttccactcccactgccaggattttgtattgccatcgggtgccaaataaatgctcatatttattactga

SEQ ID NO: 155255 - DNA, 120 bp, Artificial Sequence
  ENSG00000106144_32 (sequence is synthesized)
attggatcccttgggcacctccttctgttcactgctgccaccgcctctcttgctctgtaagtgtctcccaatgcatggggtgtgctgggacttgggcagcccatggctctcaggctggtc

SEQ ID NO: 155256 - DNA, 120 bp, Artificial Sequence
  ENSG00000106144_33 (sequence is synthesized)
agctctccgtgcaccaccatatcctgttttcaggtctcttatcccgtgtctttgccttcctttctgagaactcttactcttttctgtgcttcattaactctggtgccctttttttggtta

SEQ ID NO: 155257 - DNA, 120 bp, Artificial Sequence
  ENSG00000106144_34 (sequence is synthesized)
ctcattccagttacggatttttgatctgtctttttcctgtccttcttattttatctcctttctttcactctttgttcttttcacttgttccatatacttccctgtttacctacacttcca

SEQ ID NO: 155258 - DNA, 120 bp, Artificial Sequence
  ENSG00000106144_35 (sequence is synthesized)
tgcttgcctcctttcttctttcttcttaccattcttgggtcatgcaggatagcagaacagaatccgtgttggcctttgactcttccttttccgtgagctgctgctgcccctctttctctc

SEQ ID NO: 155259 - DNA, 120 bp, Artificial Sequence
  ENSG00000106144_36 (sequence is synthesized)
atgcagtctgttttactcctttaagagccaggactgcaggacgaggattaaaagacacataggtgtgcttctcatcctggaggaaaataatagtaattaagagccctaactttggagtca

SEQ ID NO: 155260 - DNA, 120 bp, Artificial Sequence
  ENSG00000106144_37 (sequence is synthesized)
aattctgacttcaccatttactagtaacgtgaagttaaagaagttaaatggcatccctccatctcagtttcctcaatataaaatgaaaatagtccttgtacctacttcataaggtgcttg

SEQ ID NO: 155261 - DNA, 120 bp, Artificial Sequence
  ENSG00000106144_38 (sequence is synthesized)
tgatggttaaatgagattatgcatttaagggcttacatagctcagtacctggctcacagcacatccacaaaatatgccagctgtaactcttaaaacacgatcagtgccgtaaagggctta

SEQ ID NO: 155262 - DNA, 120 bp, Artificial Sequence
  ENSG00000106144_39 (sequence is synthesized)
tagtttgctttaaaggtcactttgtccaaacattcaaataattacttttttaatctctcatgtggccaaatgtaaatagctaatattattgtcatcctgatctagtattaccgcagaata

SEQ ID NO: 155263 - DNA, 120 bp, Artificial Sequence
  ENSG00000106144_40 (sequence is synthesized)
tagtctgctgaggccctgcaacatgactcagactacggcagttactaccgcaaaagcagaaggaaatgtggcctctctaaggagcagaccagttactcaggaaaataaagtaaatataca

SEQ ID NO: 155264 - DNA, 120 bp, Artificial Sequence
  ENSG00000106144_41 (sequence is synthesized)
tgaagtagcttaagactagttcacaggcctcatgtaagcaaaggtgaaattagcaaggtacaaactgtacttaggaaggagtatgcagtaagagtagatcattttaagtgagggtagttt

SEQ ID NO: 155265 - DNA, 120 bp, Artificial Sequence
  ENSG00000106144_42 (sequence is synthesized)
aaagagattttttagataagataaggcttaatttgtacctggagtaatttgatttacatagttatagagtagtatctagagtctgtcgtaggaaagaaacaatacaatatgataagtaca

SEQ ID NO: 155266 - DNA, 120 bp, Artificial Sequence
  ENSG00000106144_43 (sequence is synthesized)
ctgagaggcagagggcatgttgtgtctcccctcctcccaaacagatgctcggatctgattttaaaatagcatctgtgtgagtatgtgagatgtggctggtcacaatgaagtgggttcacc

SEQ ID NO: 155267 - DNA, 120 bp, Artificial Sequence
  ENSG00000106144_44 (sequence is synthesized)
tccttacaaacctttagtcataactgaggttttggacatcagcaggtaaaagtaaggaacagttgggagcttaagtaagaaataatgtgatgaattgtttttccagcaaggttgccatgg

SEQ ID NO: 155268 - DNA, 120 bp, Artificial Sequence
  ENSG00000106144_45 (sequence is synthesized)
agggggctgcactaaggaaagaggttatgggtcagcaactttacttttcattccctgctctatccccaggcccagggcactgcctgatgcatggtagcacttataaatgttcaatgaatg

SEQ ID NO: 155269 - DNA, 120 bp, Artificial Sequence
  ENSG00000106144_46 (sequence is synthesized)
gatgaaaattaatctgcctgaaaaactgtaggtattatgtaaaaaacaaatatgaggatattgtgacaaaagaaccagtgacatttattgattgatggatctgtgatataaaggtgagag

SEQ ID NO: 155270 - DNA, 120 bp, Artificial Sequence
  ENSG00000106144_47 (sequence is synthesized)
aggaattctcctttctctttagcttggcctgtttcctttaggcgtctttactaacaaaacgacgttaaattgtgattttctcatcctatatccagggatttaatacactattggatctgg

SEQ ID NO: 155271 - DNA, 120 bp, Artificial Sequence
  ENSG00000106144_48 (sequence is synthesized)
ataaggagtaattgctcttttctggagtaatctggatcttttgctctgtctctctaacttttctgaaattaaatccttcaaggaatgaccagtagccaattgttccattgaaaatttgag

SEQ ID NO: 155272 - DNA, 120 bp, Artificial Sequence
  ENSG00000106144_49 (sequence is synthesized)
ttcacctgtcttcctgctgtatttggttaatataattaatgtctagaaaaagctccacccccctgccccagtcagcttctaaactggagtgtaagctccatgacggcaggaattttctct

SEQ ID NO: 155273 - DNA, 120 bp, Artificial Sequence
  ENSG00000106144_50 (sequence is synthesized)
tcactctatccctaggccttaaagtaagacagtgcccaacacatggcagttgcttgacacatttttattaaacctgtgctttggtccttttcccccaattcttgaagcttcccttctttc

SEQ ID NO: 155274 - DNA, 120 bp, Artificial Sequence
  ENSG00000106144_51 (sequence is synthesized)
ctaggctccctcgacattgcatggatcaggaagtactgtaaaagagcatactcttacttttgatgtgttgacctgagagtcctccccatctgtcttgcctactgacagcacccctgccca

SEQ ID NO: 155275 - DNA, 120 bp, Artificial Sequence
  ENSG00000106144_52 (sequence is synthesized)
taaaacaacatcatcaaaaataagagtctgtcttgggatacataaggcttgtatcaagagcaaggatctgctcagggtatgttgagaaattactgctaaaattgaataaggatgatcttt

SEQ ID NO: 155276 - DNA, 120 bp, Artificial Sequence
  ENSG00000106144_53 (sequence is synthesized)
aggatgatctttttaaattttctgggagaaaacagtcaagttctccccactttaagtttttcctcttaaaattttcataaggccaggtgcagtgactcatgcctataatcccaacacttt

SEQ ID NO: 155277 - DNA, 120 bp, Artificial Sequence
  ENSG00000106144_54 (sequence is synthesized)
cagaaggatcacttgaagccaggagttcaagacaagcctggtcaacgtagcaagaccccatctctattaaaaaaagaaaaaaaaagatttaaaaagttattttaaaaaataaattaaaaa

SEQ ID NO: 155278 - DNA, 120 bp, Artificial Sequence
  ENSG00000106144_55 (sequence is synthesized)
ttttttttcttaaatcttggatgcttgctataatttatcttatgaaattaataaacatagtgcttcgaagatatcaaaaccaccttggaaacaactgatcatacttagttttattatttt

SEQ ID NO: 155279 - DNA, 120 bp, Artificial Sequence
  ENSG00000106144_56 (sequence is synthesized)
tacatagttcgaggttgtgatttttatatagcatacatatggtaaccgtatttgttatttattaccttgttttttcttgtttatgtaattaaatatatcaatattttattatgtattgca

SEQ ID NO: 155280 - DNA, 120 bp, Artificial Sequence
  ENSG00000106144_57 (sequence is synthesized)
tgcaataaaaagcactgtgactcccaggcatattgttaattgaacaagtgagttgtggacttagatgattttcagttccatttacaaggagtatttgatttggcattttccctgtcttac

SEQ ID NO: 155281 - DNA, 120 bp, Artificial Sequence
  ENSG00000106144_58 (sequence is synthesized)
acagaatgggaactgctccaaccgcatagatgtgcatgtgcttgagcgtggtgcccggtgtgtatgaggcatcccctgagtaacagatgcatgctgagagagtaataatttttttttttt

SEQ ID NO: 155282 - DNA, 120 bp, Artificial Sequence
  ENSG00000106144_59 (sequence is synthesized)
ttttttagtttatcagccataggttggaggcaacagctggaaatggctcttccccttcaaggttgtagggaacgtgggcttgcctgtgacaggcccaagagagataggaagaagtaacat

SEQ ID NO: 155283 - DNA, 120 bp, Artificial Sequence
  ENSG00000106144_60 (sequence is synthesized)
cttttgtctgtccgccgagcaccccacttcaccccattggaccgcgcggccgccgctagagctctgcgcctgcgcacgcaccgggccggggactgggtggcctggtgtgtgggcgcggca

SEQ ID NO: 155284 - DNA, 120 bp, Artificial Sequence
  ENSG00000106144_61 (sequence is synthesized)
gaaattagacacccttcctgggaacctgaacttagtttgcatgtacatttcctttctgccttattagtcagaaagttgttactggttaaatgccttctgtgagcatttgtctatttttac

SEQ ID NO: 155285 - DNA, 120 bp, Artificial Sequence
  ENSG00000106144_62 (sequence is synthesized)
agaggaagagaacgatttaaggagcgaatactactggtaaactaatggaagaaatctgctgcaccactggatattgggagtgtgtggcatgcatcctcatcatcaggaaactctaaaaaa

SEQ ID NO: 155286 - DNA, 120 bp, Artificial Sequence
  ENSG00000106153_0 (sequence is synthesized)
agaagtcgcttagctcttcggtggttgtcccacgtccggaggcctagccgtcgcttacctaggatgccgcgtggaagccgaagccgcacctcccgcatggcccctccggccagccgggcc

SEQ ID NO: 155287 - DNA, 120 bp, Artificial Sequence
  ENSG00000106153_1 (sequence is synthesized)
cctcagatgagagctgcacccaggccagcaccagtcgctcagccaccagcagcggcacccccatctgcagttggctcttctgctgctgcgccccggcagccaggtctgatggcccagatg

SEQ ID NO: 155288 - DNA, 120 bp, Artificial Sequence
  ENSG00000106153_2 (sequence is synthesized)
gcaaccactgcagctggcgtggctgtgggctctgctgtggggcacacattgggtcacgccattactgggggcttcagtggaggaagtaatgctgagcctgcgaggcctgacatcacttac

SEQ ID NO: 155289 - DNA, 120 bp, Artificial Sequence
  ENSG00000106153_3 (sequence is synthesized)
ccagaaccagggtgacatcaagctctgtgagggtttcaatgaggtgctgaaacagtgccgacttgcaaacggattggcctaatgaagaagttcaacctggagagatggaaaatcagctct

SEQ ID NO: 155290 - DNA, 120 bp, Artificial Sequence
  ENSG00000106153_4 (sequence is synthesized)
cataactaagttaatttagtataaaaatagaattgatagtgagggtataaagtgtaaccatcagttaaacctctcctgtcattcctggcttccttgcttcagaattgaaatggaagtggg

SEQ ID NO: 155291 - DNA, 120 bp, Artificial Sequence
  ENSG00000106153_5 (sequence is synthesized)
ggtgtccctactctgtagaatctgggactgggcaaatgtttgtgtggcctccttaaactagctgttatgttatgattttattctttgtgagttaattagaataaagtcattttcttccaa

SEQ ID NO: 155292 - DNA, 120 bp, Artificial Sequence
  ENSG00000106153_6 (sequence is synthesized)
ttgcaaacggtaggtaatttgtccaatttacatctgcttaattcacagtggaattcctggatcctgtagaacttagggtaatctgtgtttaataaattagagaagactttgttgaaattt

SEQ ID NO: 155293 - DNA, 120 bp, Artificial Sequence
  ENSG00000106153_7 (sequence is synthesized)
atttctctagaattaactcctaacaactgggccggaggtttctagtcatttttatgagtaattttctgaattttcttcctttagaaggtataggccaggcacagtggctcacgcttgtaa

SEQ ID NO: 155294 - DNA, 120 bp, Artificial Sequence
  ENSG00000106178_0 (sequence is synthesized)
actctgcaaggacccgagctatttatccctaggtcctttcctcctgcacgtcagctttgagccccgagctggtgcttctgctctctgagacatggcaggcctgatgaccatagtaaccag

SEQ ID NO: 155295 - DNA, 120 bp, Artificial Sequence
  ENSG00000106178_1 (sequence is synthesized)
ccttctgttccttggtgtctgtgcccaccacatcatccctacgggctctgtggtcatcccctctccctgctgcatgttctttgtttccaagagaattcctgagaaccgagtggtcagcta

SEQ ID NO: 155296 - DNA, 120 bp, Artificial Sequence
  ENSG00000106178_2 (sequence is synthesized)
gtacatgaagaacctggacgccaagcagaagaaggcttcccctagggccagggcagtggctgtcaagggccctgtccagagatatcctggcaaccaaaccacctgctaatccccgcccag

SEQ ID NO: 155297 - DNA, 120 bp, Artificial Sequence
  ENSG00000106178_3 (sequence is synthesized)
ccctccagccctgagtttgggcctgagctgcttggcgggctactcggggcctggagaagccacagtgatggggggaagagctaattttcctgtttcttagcaacactctccagggatgtg

SEQ ID NO: 155298 - DNA, 120 bp, Artificial Sequence
  ENSG00000106211_0 (sequence is synthesized)
gcacttttctgagcagacgtccagagcagagtcagccagcatgaccgagcgccgcgtccccttctcgctcctgcggggccccagctgggaccccttccgcgactggtacccgcatagccg

SEQ ID NO: 155299 - DNA, 120 bp, Artificial Sequence
  ENSG00000106211_1 (sequence is synthesized)
cctcttcgaccaggccttcgggctgccccggctgccggaggagtggtcgcagtggttaggcggcagcagctggccaggctacgtgcgccccctgccccccgccgccatcgagagccccgc

SEQ ID NO: 155300 - DNA, 120 bp, Artificial Sequence
  ENSG00000106211_2 (sequence is synthesized)
agtggccgcgcccgcctacagccgcgcgctcagccggcaactcagcagcggggtctcggagatccggcacactgcggaccgctggcgcgtgtccctggatgtcaaccacttcgccccgga

SEQ ID NO: 155301 - DNA, 120 bp, Artificial Sequence
  ENSG00000106211_3 (sequence is synthesized)
gcggcaggacgagcatggctacatctcccggtgcttcacgcggaaatacacgctgccccccggtgtggaccccacccaagtttcctcctccctgtcccctgagggcacactgaccgtgga

SEQ ID NO: 155302 - DNA, 120 bp, Artificial Sequence
  ENSG00000106211_4 (sequence is synthesized)
ggcccccatgcccaagctagccacgcagtccaacgagatcaccatcccagtcaccttcgagtcgcgggcccagcttgggggcccagaagctgcaaaatccgatgagactgccgccaagta

SEQ ID NO: 155303 - DNA, 120 bp, Artificial Sequence
  ENSG00000106211_5 (sequence is synthesized)
aagccttagcccggatgcccacccctgctgccgccactggctgtgcctcccccgccacctgtgtgttcttttgatacatttatcttctgtttttctcaaataaagttcaaagcaaccacc

SEQ ID NO: 155304 - DNA, 120 bp, Artificial Sequence
  ENSG00000106211_6 (sequence is synthesized)
gaccaaggatggcgtggtggagatcaccggtgagcccccctgctcctgcaggggagaggaggaggctagcagggcgggcagggccgggggcgtgcggttgaaacgggggtcccgggggcc

SEQ ID NO: 155305 - DNA, 120 bp, Artificial Sequence
  ENSG00000106211_7 (sequence is synthesized)
tggggagttaaacgttggcccagcaccgggaaaaacaggactcctgattcccttgctcaggaattgggagtgcgggtcgcttctaagggcgctttctgctctgtaatcccagcgctttgg

SEQ ID NO: 155306 - DNA, 120 bp, Artificial Sequence
  ENSG00000106211_8 (sequence is synthesized)
gagttcaagactagcctgggcaacatagcgagacgcgcccccccgccccgaccccgcgccattacaaaaaaaaagcaaacaaaaatttttttaaagatcatcgatgaagagagaaaatgc

SEQ ID NO: 155307 - DNA, 120 bp, Artificial Sequence
  ENSG00000106211_9 (sequence is synthesized)
atgaagagagaaaatgcgcttttctacagagtccccttcccacccacagccccatccccagataagcggggagttccctggcgcggtgccagtttctagccgctgagtgggcgtgtgcgc

SEQ ID NO: 155308 - DNA, 120 bp, Artificial Sequence
  ENSG00000106211_10 (sequence is synthesized)
ggctccaagtgcgcctgcgtactgctcactccccagctccgcgccctgctccgttcctcccaaaactctgaatcgaagaactttccggaagtttctgagagcccagaccggcgggcacgc

SEQ ID NO: 155309 - DNA, 120 bp, Artificial Sequence
  ENSG00000106211_11 (sequence is synthesized)
ccccatccccaaccccctctgttaatccctaccagcctgcagtcctggctgcttccaagcaggaggtggggcctctggcctagcggggccgaaaggcagtcccctcccccgcagtctgat

SEQ ID NO: 155310 - DNA, 120 bp, Artificial Sequence
  ENSG00000106236_0 (sequence is synthesized)
agagtgccgagcagcgcggtgggtgcggctgtgagacggcaggagacttctgccccgcggtgcacgcgaccctcgagacgacagcgcggctactgccagcagcgaaggcgcctcccgcgg

SEQ ID NO: 155311 - DNA, 80 bp, Artificial Sequence
  ENSG00000106236_1 (sequence is synthesized)
gagcgcggcagcggcggcgggatgctggcgctgctggccgccagcgtggcgctcgccgtggccgctggggcccaggacag

SEQ ID NO: 155312 - DNA, 120 bp, Artificial Sequence
  ENSG00000106236_2 (sequence is synthesized)
gcgcccggtagccgcttcgtgtgcacggcactgcccccagaggcggtgcacgccggctgcccgctgcccgcgatgcccatgcagggcggcgcgcagagtcccgaggaggagctgagggcc

SEQ ID NO: 155313 - DNA, 120 bp, Artificial Sequence
  ENSG00000106236_3 (sequence is synthesized)
gcggtgctgcagctgcgcgagaccgtcgtgcagcagaaggagacgctgggcgcgcagcgcgaggccatccgcgagctcacgggcaagctagcgcgctgcgaggggctggcgggcggcaag

SEQ ID NO: 155314 - DNA, 120 bp, Artificial Sequence
  ENSG00000106236_4 (sequence is synthesized)
gcgcgcggcgcgggggccacgggcaaggacactatgggcgacctgccgcgggaccccggccacgtcgtggagcagctcagccgctcgctgcagaccctcaaggaccgcctggagagcctc

SEQ ID NO: 155315 - DNA, 120 bp, Artificial Sequence
  ENSG00000106236_5 (sequence is synthesized)
gagcaccagctcagagcaaacgtgtccaatgctgggctgcccggcgacttccgcgaggtgctccagcagcggctgggggagctggagaggcagcttctgcgcaaggtggcagagctggag

SEQ ID NO: 155316 - DNA, 120 bp, Artificial Sequence
  ENSG00000106236_6 (sequence is synthesized)
gacgagaagtccctgctgcacaatgagacctcggctcaccggcagaagaccgagagcaccctgaacgcgctgctgcagagggtcaccgagctggagcgaggcaatagcgcctttaagtca

SEQ ID NO: 155317 - DNA, 120 bp, Artificial Sequence
  ENSG00000106236_7 (sequence is synthesized)
ccagatgcgttcaaggtgtccctcccactccgcacaaactacctatacggcaagatcaagaagacgctgcctgagctgtacgccttcaccatctgcctgtggctgcggtccagcgcctca

SEQ ID NO: 155318 - DNA, 120 bp, Artificial Sequence
  ENSG00000106236_8 (sequence is synthesized)
ccaggcattggcacccccttctcctatgcggtgccagggcaggccaacgagatcgtgctgatcgagtggggcaacaaccccatcgagctgctcatcaacgacaaggttgcgcagctgccc

SEQ ID NO: 155319 - DNA, 120 bp, Artificial Sequence
  ENSG00000106236_9 (sequence is synthesized)
ctgtttgtcagtgacggcaagtggcaccacatctgtgtcacctggacgacacgggatggcatgtgggaggcattccaggacggagagaagctgggcactggggagaacctggccccctgg

SEQ ID NO: 155320 - DNA, 120 bp, Artificial Sequence
  ENSG00000106236_10 (sequence is synthesized)
caccccatcaagcccgggggcgtgctgatccttggacaagagcaggacaccgtggggggtaggtttgatgccactcaggcatttgtcggggagctcagccagttcaacatatgggaccgc

SEQ ID NO: 155321 - DNA, 120 bp, Artificial Sequence
  ENSG00000106236_11 (sequence is synthesized)
tggacaataacgtcgatgtgttcggaggggcctccaagtggcccgtggagacgtgtgaggagcgtctccttgacttgtagccgccttctcctctgtccaggaggccgggatcaggctgtt

SEQ ID NO: 155322 - DNA, 120 bp, Artificial Sequence
  ENSG00000106236_12 (sequence is synthesized)
gccatggaagttcagggccatagactgccccacttaaactcttgtcagtctgggctcagggttcccagagctcattccccaggaatctctaagaccagggctggggcagtgtctgtcact

SEQ ID NO: 155323 - DNA, 120 bp, Artificial Sequence
  ENSG00000106236_13 (sequence is synthesized)
ggcttgtttgttccctaccaatattctgttgctgtttgaagtagtgccagggtcccctgggaagatgcccccaagacacctgccccaagtgggtggatatctgccttcctgctgcaagtg

SEQ ID NO: 155324 - DNA, 120 bp, Artificial Sequence
  ENSG00000106236_14 (sequence is synthesized)
gaggcaggtccagcagcccctcttcagagcccctgtaaatgctatcgcagcctgagtcctgccgccttccagttccttggtgtcccgtgcaccccttctgtctgtcccctttcatggctg

SEQ ID NO: 155325 - DNA, 120 bp, Artificial Sequence
  ENSG00000106236_15 (sequence is synthesized)
tgcagccgtcccgctggagtggccatgtcccttgtgcattgagtgcatccccgctggtgactaagctcgcagcaagcggctaccccccgatctgcaaaagggcctctccctttgtgttct

SEQ ID NO: 155326 - DNA, 120 bp, Artificial Sequence
  ENSG00000106236_16 (sequence is synthesized)
atacattgtgaatcttcccgtctgaagaacgcccagcctgcccagacaaagccccgccttccccaaagcagaggggctgtctgtgtctccagaaaggggacatcgggggggaggggggct

SEQ ID NO: 155327 - DNA, 120 bp, Artificial Sequence
  ENSG00000106236_17 (sequence is synthesized)
cagaaaggagaagggctgtgatctccggtcccttcccccatcatccttccttagactgatgctttgactgaatcatcactagctatggcattaaaaggcctctcttctcatctggtgcca

SEQ ID NO: 155328 - DNA, 120 bp, Artificial Sequence
  ENSG00000106236_18 (sequence is synthesized)
aaggttccgttgcagctttttacaaccatccggtgtggtttggaggatttgttttttttttttcccaacagaaaagaacagccattagaagaaggctcccattttctgatgttccgcccc

SEQ ID NO: 155329 - DNA, 120 bp, Artificial Sequence
  ENSG00000106236_19 (sequence is synthesized)
actgtgaagagtgtgctcgttttaaattcatgttgattcttgtaagcactggactgtcttcatcaagtatttccctacagaactcctcaagaaaacagagatcatttggctagagattgt

SEQ ID NO: 155330 - DNA, 120 bp, Artificial Sequence
  ENSG00000106236_20 (sequence is synthesized)
ctgagtgactccaagctactcactgtattggacgggagtagtaatttattttaaagataaagtgactaagtggggaaatttataaagctaaatattatatattttatttttcatacatgt

SEQ ID NO: 155331 - DNA, 120 bp, Artificial Sequence
  ENSG00000106236_21 (sequence is synthesized)
ttgaagtgcaaatctgtggatattccatttgtaggaccaagtcgacatgcccatcctgacattgtatgctacgagaactcttctgatgatggaatttcgattaaagtgcactgaaagatg

SEQ ID NO: 155332 - DNA, 120 bp, Artificial Sequence
  ENSG00000106236_22 (sequence is synthesized)
cacttgtggtcagacatgcgattctggttgatggacagcagggattgtgacaccacatgggcctggttcccgagtgtgtgagcaaataataaaggcgactgaacaaggtcatctcaggaa

SEQ ID NO: 155333 - DNA, 120 bp, Artificial Sequence
  ENSG00000106236_23 (sequence is synthesized)
gctgccagccccactggcattatccagggaaaagtgaaagtgtccaggaccagcttcgataagcaaccacacgggcgtttcagtcctttgttaactagtcctggcagcggattctgtgta

SEQ ID NO: 155334 - DNA, 120 bp, Artificial Sequence
  ENSG00000106244_0 (sequence is synthesized)
ggtgtcagttcgaggcgccgccgccgccgccgcagccgccggagccgcaatgcctaaaggaggaagaaagggaggccacaaaggccgggcgaggcagtatacaagccctgaggagatcga

SEQ ID NO: 155335 - DNA, 120 bp, Artificial Sequence
  ENSG00000106244_1 (sequence is synthesized)
cgcgcagctgcaggctgagaagcagaaggccagggaagaagaggagcaaaaagaaggtggagatggggctgcaggtgaccccaaaaaggagaagaaatctctagactcagatgagagtga

SEQ ID NO: 155336 - DNA, 120 bp, Artificial Sequence
  ENSG00000106244_2 (sequence is synthesized)
ggatgaagaagatgactaccagcaaaagcgcaaaggcgttgaagggctcatcgacatcgagaaccccaaccgggtggcacagacaaccaaaaaggtcacacaactggatctggacgggcc

SEQ ID NO: 155337 - DNA, 120 bp, Artificial Sequence
  ENSG00000106244_3 (sequence is synthesized)
aaaggagctttcgaggagagaacgagaagagattgagaagcagaaggcaaaagagcgttacatgaaaatgcacttggccgggaagacagagcaagccaaggctgacctggcccggctggc

SEQ ID NO: 155338 - DNA, 120 bp, Artificial Sequence
  ENSG00000106244_4 (sequence is synthesized)
catcatccggaaacagcgggaggaggctgcccggaagaaggaagaggaaaggaaagcaaaagacgatgccacattgtcaggaaaacgaatgcagtcactctccctgaataagtaactgcg

SEQ ID NO: 155339 - DNA, 120 bp, Artificial Sequence
  ENSG00000106244_5 (sequence is synthesized)
acccgtgggaggagatgccggggacctgggccgcgctgccaggacctctgctgtgtctcgcccaccctgtgccctggcgccgctgcaacagcccctcatggccaggagccccccatggcc

SEQ ID NO: 155340 - DNA, 120 bp, Artificial Sequence
  ENSG00000106244_6 (sequence is synthesized)
tggggcctcctcttcatcttggcacagaaattgtttgggggatggggggggggactgggggaggggtagctgctatctttgagacagaaagatgcaggacagcatttcatatgtaaccat

SEQ ID NO: 155341 - DNA, 120 bp, Artificial Sequence
  ENSG00000106244_7 (sequence is synthesized)
ttgaatgtttttgctgtttttagaattcagagcccttgctggggggtgcctgggagatggggtaagaagagctttcatttgtctggtagatagatagcatgtaagggggtggttgtccca

SEQ ID NO: 155342 - DNA, 120 bp, Artificial Sequence
  ENSG00000106244_8 (sequence is synthesized)
ggaggcagctgctgacaggtttgctacacacagccccggactgtgttgcctgggtgctcattcagagaggggctatcatctgggagcctgtgcccctgggtcctcgagggtcatggcttg

SEQ ID NO: 155343 - DNA, 120 bp, Artificial Sequence
  ENSG00000106244_9 (sequence is synthesized)
tccctggtcagtcctgtctgactgacctcagggcctcacctctctgcccttccctgcccggttcctactcacctggctagggccagtgcccattttcagccctacccattgatcatttca

SEQ ID NO: 155344 - DNA, 120 bp, Artificial Sequence
  ENSG00000106244_10 (sequence is synthesized)
tatcgtaatctttgttttggcaatccatcctttggcttccgtgctcgagccgtttttacccagctgggtacggtgccacgttcaggcacgtgcacccggcaaggttcagggcacatacct

SEQ ID NO: 155345 - DNA, 120 bp, Artificial Sequence
  ENSG00000106244_11 (sequence is synthesized)
acctggggcatgacatctgtcaggtggcaccgagcaggatgcggggatggaccctagataccacagcctgccccctcccctcctttagccaagtcaggatcttaggcctcagcaggcagg

SEQ ID NO: 155346 - DNA, 120 bp, Artificial Sequence
  ENSG00000106244_12 (sequence is synthesized)
gacccttccaggccacagtaggctgaagcagcaccaggatcctggcctggcctggcctgtaggtgtcccctggtggttataattctgtaactctaggggagaaggggaatagcactagca

SEQ ID NO: 155347 - DNA, 120 bp, Artificial Sequence
  ENSG00000106244_13 (sequence is synthesized)
ttggatgtcgccaaggcccacattttcctgagagaagccacaaaagatgtgcaaatgcccttcagcacaggacctggtgacatgacataaactccaagacagaacctcagtttacagcac

SEQ ID NO: 155348 - DNA, 120 bp, Artificial Sequence
  ENSG00000106244_14 (sequence is synthesized)
acataaactccaagacagaacctcagtttacagcacacgaaaaaaatatcttgccaacattgtaatgacaaaataaattcccgtgaagttccacaaccaggccgggcatggtggctcatg

SEQ ID NO: 155349 - DNA, 120 bp, Artificial Sequence
  ENSG00000106244_15 (sequence is synthesized)
tgaggcaggagaatcgcttgatcccaggaaggcagaggtggcagtgagctgagaacgcacaactgcactccagcctgggtgacgagcaaaactccatctcaaaacaaaagttccacaacc

SEQ ID NO: 155350 - DNA, 120 bp, Artificial Sequence
  ENSG00000106244_16 (sequence is synthesized)
aaccagcctggagtgtgtagcccctttgtccaggaatttgactagtcaatcagtgacacctggtactggcagttttgggagtggcagcccaggatggacagcagtggggagggaaccatt

SEQ ID NO: 155351 - DNA, 120 bp, Artificial Sequence
  ENSG00000106244_17 (sequence is synthesized)
tggcataaggccgttgggcttcaggatcaattttgttggcaagcagtaaaaataagctatctacctatggccgtgcaaacaccaatctctccctggagtcccagctacttgggaggctga

SEQ ID NO: 155352 - DNA, 120 bp, Artificial Sequence
  ENSG00000106244_18 (sequence is synthesized)
ggcagaaggattgctcccacgagttctagtgcagcctggaaaacttagcaagaccccaaggaaataacaaaaaacctctccttccacataggcaagcatgtccataattacttttttttt

SEQ ID NO: 155353 - DNA, 120 bp, Artificial Sequence
  ENSG00000106244_19 (sequence is synthesized)
tttttttttttttacacagttgcattttattacctccacattttgaagcagttcatgaccagcatagtgctttgggggcattttttttttttttcaataaatgaaagcatttaagaaaaa

SEQ ID NO: 155354 - DNA, 120 bp, Artificial Sequence
  ENSG00000106244_20 (sequence is synthesized)
ggccacaaaggccgggcgaggcagtatacaagccctgaggagatcgacgcgcagctgcaggctgagaagcagaaggccagggtgagaagaagaggagcaaaaagaaggtggagatggggc

SEQ ID NO: 155355 - DNA, 120 bp, Artificial Sequence
  ENSG00000106244_21 (sequence is synthesized)
gactcagatgagagtgaggatgaagaagatgactaccaggtactgagttcttttgagggcctagagcctggactcattcattcaacaaacaaacgttgagtgaccgtttagtactagtcc

SEQ ID NO: 155356 - DNA, 120 bp, Artificial Sequence
  ENSG00000106244_22 (sequence is synthesized)
ccgggaagacagagcaagccaaggctgacctggcccggctggccatcatccggaaacagcgggaggaggctgcccggaagaaggaagaggaaaggaaaggttctggaagcgctcgcgggc

SEQ ID NO: 155357 - DNA, 120 bp, Artificial Sequence
  ENSG00000106244_23 (sequence is synthesized)
ccgcggcggcgtcataggttccggctccctcgtggcatctgggacagcatgctggggacagcttccatcagagcacctcacaacacccacactggacataaaatgtgagcaagaagtaaa

SEQ ID NO: 155358 - DNA, 120 bp, Artificial Sequence
  ENSG00000106245_0 (sequence is synthesized)
gtcgagaagcagctacccaagctccaggagcttccggtatgtgttttccctctgttctcgattaccttggcaacggctgaggcgggagaccggtggtctgcaccgtcctggagggagata

SEQ ID NO: 155359 - DNA, 120 bp, Artificial Sequence
  ENSG00000106245_1 (sequence is synthesized)
tgagtggctggactctcagccagccactgggatgtgttcgggctttggaccttgaggccggagagagctcccgagaggaggcggcgccacgttcgttcttctgaggggacggtagatttg

SEQ ID NO: 155360 - DNA, 120 bp, Artificial Sequence
  ENSG00000106245_2 (sequence is synthesized)
ggggttttcctctaggattctcgcgccgtttcctctgaagaaacaggaccagagagggaaggtgacctgaaagtcacagaataattttttagagctgaacaagaatccaagcctgcaact

SEQ ID NO: 155361 - DNA, 120 bp, Artificial Sequence
  ENSG00000106245_3 (sequence is synthesized)
gcagagacgagagatctttctgctgtctatactcttggaaagcacatcctaagatctttgcagattatcctgtggaaggaaaatgcctaaagtcaaaagaagccggaaagcacccccaga

SEQ ID NO: 155362 - DNA, 120 bp, Artificial Sequence
  ENSG00000106245_4 (sequence is synthesized)
aatctctgtggcccatcttcaggatccaccaccagaaaacccgctacatcttcgacctcttttacaagcggaaagccatcagcagagaactctatgaatattgtattaaagaaggctatg

SEQ ID NO: 155363 - DNA, 120 bp, Artificial Sequence
  ENSG00000106245_5 (sequence is synthesized)
cagacaaaaacctgattgcaaaatggaaaaagcaaggatatgagaacttgtgctgcctgcggtgcattcagacacgggacaccaacttcgggacgaactgcatctgccgcgtgcccaaaa

SEQ ID NO: 155364 - DNA, 120 bp, Artificial Sequence
  ENSG00000106245_6 (sequence is synthesized)
gcaagctggaagtgggccgcatcatcgagtgcacacactgtggctgtcgtggctgctctggctgaggctggcgcgctccaccctggactctggacttcgcaggttcctgcctgtcacgcc

SEQ ID NO: 155365 - DNA, 120 bp, Artificial Sequence
  ENSG00000106245_7 (sequence is synthesized)
acccccttcctgggagcagcgagcagtgccccaggcccgagttggagcacggtctctatggggaaggcttcgctgtctatcagctgtgatttgtaaaaataaaatctttaaatctctcga

SEQ ID NO: 155366 - DNA, 120 bp, Artificial Sequence
  ENSG00000106245_8 (sequence is synthesized)
gccgccgccgccgcttcagtggccgcagtggccgcaaggacccggacctcagggaggcctccgcacgaagtcggaccgtcctgcgcgccgcctaagtccaggcttgcccgtctgctgcca

SEQ ID NO: 155367 - DNA, 120 bp, Artificial Sequence
  ENSG00000106245_9 (sequence is synthesized)
ggcaacaacgcccctagtctctccgttcgggaagacgcgtggccctgcctgccacccaccggaagtgagggcaaatggcaacagcggctctggaattctatacaggcattgctgaggaca

SEQ ID NO: 155368 - DNA, 120 bp, Artificial Sequence
  ENSG00000106245_10 (sequence is synthesized)
cctaagatgacgcaatctccgcgcgggtagggcggggctccgcaaggacctcatgccttagagatcgcctgaagagcggaagccttctgtcgagaagcagctacccaagctccaggagct

SEQ ID NO: 155369 - DNA, 61 bp, Artificial Sequence
  ENSG00000106245_11 (sequence is synthesized)
actgcaacctctgcctcccgtgttcaagtgattttcctgcctctcagcctctcgagtaatt

SEQ ID NO: 155370 - DNA, 63 bp, Artificial Sequence
  ENSG00000106245_12 (sequence is synthesized)
ctgaaacagaaccgcatgagggaaagaggaaagtggaatctctgtggcccatcttcaggatcc

SEQ ID NO: 155371 - DNA, 120 bp, Artificial Sequence
  ENSG00000106245_13 (sequence is synthesized)
gaggcagcgtgtggctgtgtgtttgttaggtctggggtcaatctcaactccacttttgggcaaattactgaacccctttcctcacttaggaaatggtggtggggagccctaatcccaagg

SEQ ID NO: 155372 - DNA, 120 bp, Artificial Sequence
  ENSG00000106245_14 (sequence is synthesized)
tggtggcagggtgacatcagggaaggacaaccagtgagttcctgtccctttcagtcctcacagtgatactttaacattaccatcactatctttcccgcccccccaagacggagtcttgct

SEQ ID NO: 155373 - DNA, 120 bp, Artificial Sequence
  ENSG00000106246_0 (sequence is synthesized)
cttgcgcctgtccaggcactgccaatcgagactccgccgttccgctagtcccagctagccgccagccgaacaccggcctcgccagaaacctgaaaccagccgcgtgagtcggcgacgcgg

SEQ ID NO: 155374 - DNA, 120 bp, Artificial Sequence
  ENSG00000106246_1 (sequence is synthesized)
attgcgcctgcgcgcttggggagagggggacccgaggaagagactggttcgccgcggggaccgggcagggctccccgtcggagtgcactgcgccggacacttcaagccctggagggacag

SEQ ID NO: 155375 - DNA, 120 bp, Artificial Sequence
  ENSG00000106246_2 (sequence is synthesized)
gaaagccagaaatggacttcgtgagactcgctcgactgttcgccagggcccgccccatgggactgttcatcctgcaacacctggacccctgtagagccaggtgggcaggaggcagggagg

SEQ ID NO: 155376 - DNA, 120 bp, Artificial Sequence
  ENSG00000106246_3 (sequence is synthesized)
ggctgatgcggccaatgtgggcgcccttcagcagctcctcctctcagctgcccctcggccaggagcgtcaggaaaacacgggcagcctgggctctgacccgagccactccaactccacgg

SEQ ID NO: 155377 - DNA, 120 bp, Artificial Sequence
  ENSG00000106246_4 (sequence is synthesized)
ccacgcaggaagaagacgaggaggaggaggagagttttgggaccctctctgacaaatactcctcccggagactattccgcaaatccgcagcccagttccataacctgcggtttggggaac

SEQ ID NO: 155378 - DNA, 120 bp, Artificial Sequence
  ENSG00000106246_5 (sequence is synthesized)
ggagagatgagcaaatggaaccggagcccaaattatggcgaggccggagaaacaccccgtactggtacttcttgcagtgcaaacacctgatcaaggaagggaagctggttgaagccctgg

SEQ ID NO: 155379 - DNA, 120 bp, Artificial Sequence
  ENSG00000106246_6 (sequence is synthesized)
acctgtttgagaggcagatgctgaaggaggagcgattgcagcccatggagagcaactacacggtgctgattgggggctgcgggcgggttggctacctgaagaaggccttcaacctctaca

SEQ ID NO: 155380 - DNA, 120 bp, Artificial Sequence
  ENSG00000106246_7 (sequence is synthesized)
accagatgaaaaagcgggacctggagccctcggacgccacctacacggccctgttcaacgtctgtgccgagtccccctggaaggactcagctctacagagcgccctgaagctccggcagc

SEQ ID NO: 155381 - DNA, 120 bp, Artificial Sequence
  ENSG00000106246_8 (sequence is synthesized)
agctgcaggccaaaaacttcgagctcaacttgaaaacataccacgcgctgctgaagatggctgccaagtgcgcagaccttaggatgtgcctcgatgtgttcaaggaaatcatccacaaag

SEQ ID NO: 155382 - DNA, 120 bp, Artificial Sequence
  ENSG00000106246_9 (sequence is synthesized)
ggcacgtggtcacagaggagaccttcagtttcctgctcatgggctgcatccaagacaagaagacaggcttccggtacgccctccaggtgtggcggctgatgctgagtctagggctacagc

SEQ ID NO: 155383 - DNA, 120 bp, Artificial Sequence
  ENSG00000106246_10 (sequence is synthesized)
cgagccgggacagctacaacctgctgttggtggcagctcgggactgtggcctaggggacccccaggtggcctcagagctgcttctgaagcccagggaggaggcgactgtgcttcagcccc

SEQ ID NO: 155384 - DNA, 120 bp, Artificial Sequence
  ENSG00000106246_11 (sequence is synthesized)
cagtgagcaggcagcggccaaggaggacagcccaggccaaggcaggcaacctcatgtcagccatgctgcatgtggaggccctggagaggcagctgtttctggaaccttctcaggcacttg

SEQ ID NO: 155385 - DNA, 120 bp, Artificial Sequence
  ENSG00000106246_12 (sequence is synthesized)
ggcctccagagcctccggaagccagagtgcccggcaaggcccaaccagaggtggatactaaggcagagcccagccacacagcagccctcaccgcagtggccctgaagccacctcccgtgg

SEQ ID NO: 155386 - DNA, 120 bp, Artificial Sequence
  ENSG00000106246_13 (sequence is synthesized)
agctggaagtcaacctcctgacccccggggccgttccccctacagtggtctcctttggaacggtgaccaccccagctgaccggctggccttgatagggggcctggagggcttcctgagca

SEQ ID NO: 155387 - DNA, 120 bp, Artificial Sequence
  ENSG00000106246_14 (sequence is synthesized)
agatggcagagcacaggcagcagcccgacatcaggaccctcacgctactggccgaggtggtggagtccgggagtcctgcagagtccttgctgctggccctcctggatgagcaccaggtag

SEQ ID NO: 155388 - DNA, 120 bp, Artificial Sequence
  ENSG00000106246_15 (sequence is synthesized)
aggccgacctgacattctttaacacgctggtgagaaagaagagcaagctgggagacctggagggggccaaggcgctgttgccggtcctggcaaagaggggcctcgtccccaacctgcaga

SEQ ID NO: 155389 - DNA, 120 bp, Artificial Sequence
  ENSG00000106246_16 (sequence is synthesized)
cattctgcaacctggccatcgggtgccacaggccgaaggacggtctacagcttctcacagacatgaagaagtcccaggtgacccccaacactcacatctacagtgccctcatcaacgcgg

SEQ ID NO: 155390 - DNA, 120 bp, Artificial Sequence
  ENSG00000106246_17 (sequence is synthesized)
ccatcaggaagctgaactacacctatctcatcagcatcttgaaggacatgaagcagaacagggtcccggtgaacgaagtggtcatccgccagctggagtttgcagcccagtaccctccca

SEQ ID NO: 155391 - DNA, 120 bp, Artificial Sequence
  ENSG00000106246_18 (sequence is synthesized)
cctttgaccggtaccaagggaagaacacctacctggagaagattgacggcttccgagcctattacaagcagtggctgacagtgatgcccgcagaggaaaccccgcacccctggcagaagt

SEQ ID NO: 155392 - DNA, 120 bp, Artificial Sequence
  ENSG00000106246_19 (sequence is synthesized)
tccggaccaagccccagggggaccaggacaccggcaaggaggctgatgacggatgtgcccttgggggcaggtgatgggagcacagctggaacaatgtgctcggcccccagtgctctgtgg

SEQ ID NO: 155393 - DNA, 120 bp, Artificial Sequence
  ENSG00000106246_20 (sequence is synthesized)
gagccccaggacaagtgagctggtgtcacctcctgcctgggggaagagccaggccctgaggaacagccgcagcgtgtcacaggtgttggtgaggacacacactaggcccaaggtgcctgt

SEQ ID NO: 155394 - DNA, 120 bp, Artificial Sequence
  ENSG00000106246_21 (sequence is synthesized)
gctcccagcaggtccaagtgcagctccagccacctttgcgtgtcaccttcacgggacttccagctccagctacctttgtgtgtcacctcacacaccacaagggggctggggcatctggtc

SEQ ID NO: 155395 - DNA, 120 bp, Artificial Sequence
  ENSG00000106246_22 (sequence is synthesized)
cctggggcctgggccgccccgccgggttccataggccgatgctctgaaagaagagacgtggggctcgagagatttaaagattttatttttacaaatcacagctgatagacagcgaagcct

SEQ ID NO: 155396 - DNA, 120 bp, Artificial Sequence
  ENSG00000106246_23 (sequence is synthesized)
gtggcgtgacaggcaggaacctgcgaagtccagagtccagggtggagcgcgccagcctcagccagagcagccacgacagccacagtgtgtgcactcgatgatgcggccctgcaacggagg

SEQ ID NO: 155397 - DNA, 120 bp, Artificial Sequence
  ENSG00000106246_24 (sequence is synthesized)
aggacagtgagacgatgccactgcgccacgctcgcccctgcacactcacatatgtggcaaccctcccacgaaggacctgccaccatgccatatagggacacacctcagaaacccttcctt

SEQ ID NO: 155398 - DNA, 120 bp, Artificial Sequence
  ENSG00000106246_25 (sequence is synthesized)
gacagctctggacagggaaaatttggctccctcatgaaggtagaaccagctgctgttgacaccgaggttacatctgtatgtctatttataatatgttctgcaaatccaacacacgtttgc

SEQ ID NO: 155399 - DNA, 120 bp, Artificial Sequence
  ENSG00000106246_26 (sequence is synthesized)
caatcaagaaaaagaaatcggtgtgaatgagtctcgttattctgctaagtgagcatgacagaccctgcgatgagcagacgtggctctgctactgtttggggacttcaggggggcctctgg

SEQ ID NO: 155400 - DNA, 120 bp, Artificial Sequence
  ENSG00000106246_27 (sequence is synthesized)
gctggtacactctggtgggggaagagggcaggagactatgcacttgagtcacacccttctggcccagagccccccagaaagaagggtcttgtcccccaggcctggtgcggcccaacactt

SEQ ID NO: 155401 - DNA, 120 bp, Artificial Sequence
  ENSG00000106246_28 (sequence is synthesized)
ggccagccagaaagccctagaacagtggcttgtgtttattttactttttcaagttctttttttggaagaacaagaccatagtttaagtaaacaggatcctctggtgaaacccaggtaagt

SEQ ID NO: 155402 - DNA, 120 bp, Artificial Sequence
  ENSG00000106246_29 (sequence is synthesized)
ctacagcgggctgttttggccacagggctgaagcagcaccccagcccaccagcccctgacctggactccttgtggaatctgggcactcagaggaagggggcttctgccactctgccacct

SEQ ID NO: 155403 - DNA, 120 bp, Artificial Sequence
  ENSG00000106246_30 (sequence is synthesized)
gtccctgcctccatcagaaaaccaacaccccagtcttccgtcggggaggcggcccttgctcgcccccactgctcagtacccaagtcctcagcatccagccacagctctccattgtcagtc

SEQ ID NO: 155404 - DNA, 120 bp, Artificial Sequence
  ENSG00000106246_31 (sequence is synthesized)
tcactgcagcataaaggggactcatgtgaagaggcccctgtgtggagctggggaaaagaaggccaggctggcagatgggcggtggggccaacaactgtgctgaggggctgcactgagcgg

SEQ ID NO: 155405 - DNA, 120 bp, Artificial Sequence
  ENSG00000106246_32 (sequence is synthesized)
ccactgctgtgactctgcctcgggccacagctgcctttcagaggggcttggaaccggatggagctcagctcctgtccctcagcaccactcctgaggcgcctggcctaggagtggtacttg

SEQ ID NO: 155406 - DNA, 71 bp, Artificial Sequence
  ENSG00000106246_33 (sequence is synthesized)
agcaccactcctgaggcgcctggcctaggagtggtacttggaacagaaagttctgaaagaagaaacacagt

SEQ ID NO: 155407 - DNA, 87 bp, Artificial Sequence
  ENSG00000106246_34 (sequence is synthesized)
gggggggcgggaaagatagtgatggtaatgttaaagtatcactgtgaggactgaaagggacaggaactcactggttgtccttccctg

SEQ ID NO: 155408 - DNA, 120 bp, Artificial Sequence
  ENSG00000106246_35 (sequence is synthesized)
ggactgaaagggacaggaactcactggttgtccttccctgatgtcaccctgccaccaccttgggattagggctccccaccaccatttcctaagtgaggaaaggggttcagtaatttgccc

SEQ ID NO: 155409 - DNA, 120 bp, Artificial Sequence
  ENSG00000106246_36 (sequence is synthesized)
aaaagtggagttgagattgaccccagacctaacaaacacacagccacacgctgcctcacatggattcctgaatacagggacccactcccacgagggagagccagcaggacatccagggac

SEQ ID NO: 155410 - DNA, 120 bp, Artificial Sequence
  ENSG00000106246_37 (sequence is synthesized)
aaaacgacattccagcccaaccaaataacataagatcccttgcagtcgactaaggcagaattttgagctgaaaacaacaccaagcttgagtgtcagacattaccacttccagcttgcttt

SEQ ID NO: 155411 - DNA, 120 bp, Artificial Sequence
  ENSG00000106246_38 (sequence is synthesized)
tgggcacgcggcagatgcagttcgtcccgaagttggtgtcccgtgtctgaatgcaccgcaggcagcacaagttctcatatccttgctttttccattttgcaatcaggtttttgtctgcat

SEQ ID NO: 155412 - DNA, 120 bp, Artificial Sequence
  ENSG00000106246_39 (sequence is synthesized)
agccttctttaatacaatattcatagagttctgtcaaaaagatggggaaagagcatcaggccatggtctaaaaaccttccccacccttgatcaaaaaaagcattcaggccgggtgcagtg

SEQ ID NO: 155413 - DNA, 70 bp, Artificial Sequence
  ENSG00000106246_40 (sequence is synthesized)
cctgaggtcgtgccactggactccagcctgggtgacagcgaaactccatctcaaaaaaaaaaaggcattc

SEQ ID NO: 155414 - DNA, 120 bp, Artificial Sequence
  ENSG00000106246_41 (sequence is synthesized)
ggtgacagcgaaactccatctcaaaaaaaaaaaggcattcagtattgcaacgggacagtccttggaggaggaacaaaaaaaaaaagtacttaggccaggcaaggtgcctcacacctgtaa

SEQ ID NO: 155415 - DNA, 120 bp, Artificial Sequence
  ENSG00000106246_42 (sequence is synthesized)
tgcctcacacctgtaatcccagcacttttggaagccaacgccagaggatcatttgagttaagaaaccagcctgggccaagggcccatctccacaaaaaatttaaaaattagctgggtgtg

SEQ ID NO: 155416 - DNA, 85 bp, Artificial Sequence
  ENSG00000106246_43 (sequence is synthesized)
tgggtgtggtggtgcacacctgtagtcacagctactcaggaggttgaggtgagaggatcccattgcaccactgcactccagcctg

SEQ ID NO: 155417 - DNA, 120 bp, Artificial Sequence
  ENSG00000106246_44 (sequence is synthesized)
gactggttcgccgcggggaccgggcagggctccccgtcggagtgcactgcgccggacacttcaagtgagttcctgtgtgatcctcgcaggagccccgggacccgggccaagacacgccag

SEQ ID NO: 155418 - DNA, 120 bp, Artificial Sequence
  ENSG00000106258_0 (sequence is synthesized)
gctgtgcagggcagggaagctccaggcaaacagcccagcaaacagcagcactcagctaaaaggaagactcacagaacacagttgaagaaggaaagtggcgatggacctcatcccaaattt

SEQ ID NO: 155419 - DNA, 120 bp, Artificial Sequence
  ENSG00000106258_1 (sequence is synthesized)
ggcggtggaaacctggcttctcctggctgtcagcctggtgctcctctatctatatgggacccgtacacatggactttttaagagactgggaattccagggcccacacctctgcctttgtt

SEQ ID NO: 155420 - DNA, 120 bp, Artificial Sequence
  ENSG00000106258_2 (sequence is synthesized)
gggaaatgttttgtcctatcgtcagggtctctggaaatttgacacagagtgctataaaaagtatggaaaaatgtggggaacgtatgaaggtcaactccctgtgctggccatcacagatcc

SEQ ID NO: 155421 - DNA, 120 bp, Artificial Sequence
  ENSG00000106258_3 (sequence is synthesized)
cgacgtgatcagaacagtgctagtgaaagaatgttattctgtcttcacaaatcgaaggtctttaggcccagtgggatttatgaaaagtgccatctctttagctgaggatgaagaatggaa

SEQ ID NO: 155422 - DNA, 120 bp, Artificial Sequence
  ENSG00000106258_4 (sequence is synthesized)
gagaatacggtcattgctgtctccaaccttcaccagcggaaaactcaaggagatgttccccatcattgcccagtatggagatgtattggtgagaaacttgaggcgggaagcagagaaagg

SEQ ID NO: 155423 - DNA, 120 bp, Artificial Sequence
  ENSG00000106258_5 (sequence is synthesized)
caagcctgtcaccttgaaagacatctttggggcctacagcatggatgtgattactggcacatcatttggagtgaacatcgactctctcaacaatccacaagacccctttgtggagagcac

SEQ ID NO: 155424 - DNA, 120 bp, Artificial Sequence
  ENSG00000106258_6 (sequence is synthesized)
taagaagttcctaaaatttggtttcttagatccattatttctctcaataatactctttccattccttaccccagtttttgaagcattaaatgtctctctgtttccaaaagataccataaa

SEQ ID NO: 155425 - DNA, 120 bp, Artificial Sequence
  ENSG00000106258_7 (sequence is synthesized)
ctcaacgacaaacaaaagcaccgactagatttccttcagctgatgattgactcccagaattcgaaagaaactgagtcccacaaagctctgtctgatctggagctcgcagcccagtcaata

SEQ ID NO: 155426 - DNA, 120 bp, Artificial Sequence
  ENSG00000106258_8 (sequence is synthesized)
atcttcatttttgctggctatgaaaccaccagcagtgttctttccttcactttatatgaactggccactcaccctgatgtccagcagaaactgcaaaaggagattgatgcagttttgccc

SEQ ID NO: 155427 - DNA, 120 bp, Artificial Sequence
  ENSG00000106258_9 (sequence is synthesized)
aataaggcaccacctacctatgatgccgtggtacagatggagtaccttgacatggtggtgaatgaaacactcagattattcccagttgctattagacttgagaggacttgcaagaaagat

SEQ ID NO: 155428 - DNA, 120 bp, Artificial Sequence
  ENSG00000106258_10 (sequence is synthesized)
gttgaaatcaatggggtattcattcccaaagggtcaatggtggtgattccaacttatgctcttcaccatgacccaaagtactggacagagcctgaggagttccgccctgaaaggttcagt

SEQ ID NO: 155429 - DNA, 120 bp, Artificial Sequence
  ENSG00000106258_11 (sequence is synthesized)
aagaagaaggacagcatagatccttacatatacacaccctttggaactggacccagaaactgcattggcatgaggtttgctctcatgaacatgaaacttgctctaatcagagtccttcag

SEQ ID NO: 155430 - DNA, 120 bp, Artificial Sequence
  ENSG00000106258_12 (sequence is synthesized)
aacttctccttcaaaccttgtaaagaaacacagatccccttgaaattagacacgcaaggacttcttcaaccagaaaaacccattgttctaaaggtggattcaagagatggaaccctaagt

SEQ ID NO: 155431 - DNA, 120 bp, Artificial Sequence
  ENSG00000106258_13 (sequence is synthesized)
ggagaatgagttattctaaggatttctactttggtcttcaagaaagctgtgccccagaacaccagagatttcaacttagtcaataaaaccttgaaataaagatgggcttaatctaatgta

SEQ ID NO: 155432 - DNA, 120 bp, Artificial Sequence
  ENSG00000106258_14 (sequence is synthesized)
aagaattcctgcctgaacctctcaggagcatttgaggacatttatcaagtattcactccaggattgggactatgaagacttcagctgctttcagctaatcattgagacttttcaggggtc

SEQ ID NO: 155433 - DNA, 120 bp, Artificial Sequence
  ENSG00000106258_15 (sequence is synthesized)
tcagaatagtcaggaaaggacctgatgagtgaatgcaattactgatgttggagttgctgttattatttatcgtgtacatattacctccctctcttgaccattccagttcctgagtaactc

SEQ ID NO: 155434 - DNA, 120 bp, Artificial Sequence
  ENSG00000106258_16 (sequence is synthesized)
catcatatgaagccttgggtggctcctgtgtgagactcttgctgtgtgtcacaccctaatgaactagaacctaaggttgctgtgtgtcgtacaactagggctccgttgtccccacacaga

SEQ ID NO: 155435 - DNA, 120 bp, Artificial Sequence
  ENSG00000106258_17 (sequence is synthesized)
atgacgatgtttaggttttgataaatttagattttatacacatgatagagcatgtatctgtatttttaaaaataaagacagagaacttatgtttagaacaagagaagccatttggtagaa

SEQ ID NO: 155436 - DNA, 120 bp, Artificial Sequence
  ENSG00000106258_18 (sequence is synthesized)
gtatgtcatgatataaacagtattgagataaaattttaccacttctcttccctttaataaattgtcaaaggataaagtttcctgtttgaaaatatattttactggtattgtgctttcctc

SEQ ID NO: 155437 - DNA, 120 bp, Artificial Sequence
  ENSG00000106258_19 (sequence is synthesized)
atatcacagattggtaaagaatcattttaagtccaagactcttattttacatattctgcaattaaaggtcctatgaggctacctgccgactgctgacatgtagtgtgtggtaaatgtgag

SEQ ID NO: 155438 - DNA, 120 bp, Artificial Sequence
  ENSG00000106258_20 (sequence is synthesized)
tgtttcacagcctggagtgaacaggggtcttctctgagaattgaggttgcaaggctggctaactcagctttgccttcacgagccctagaggccagccgaaggatgtctgcaggtcaggga

SEQ ID NO: 155439 - DNA, 120 bp, Artificial Sequence
  ENSG00000106258_21 (sequence is synthesized)
gacaggaccaggtaacccagctgtcactgaagattatatagagtttgagaatgttggaatatttgaaaatgctcccccaaaaaagctgctgatgagttctggaaatgtcaggagattaat

SEQ ID NO: 155440 - DNA, 120 bp, Artificial Sequence
  ENSG00000106258_22 (sequence is synthesized)
ctatacggacactgctgaagaaaaaggtagaagaataaaagatccagtacttcttcctgggtaagcagttatgaccagagatggaaccggcaactctttggccagaaagctgtatccaaa

SEQ ID NO: 155441 - DNA, 120 bp, Artificial Sequence
  ENSG00000106258_23 (sequence is synthesized)
agacagagaagatgagaaacagggagggcaaaggcgaaaaagcaattggacatgatagctagatttgtttcaggaaaacatcctgctttccaaggatttagatgaatgtttttgttcact

SEQ ID NO: 155442 - DNA, 120 bp, Artificial Sequence
  ENSG00000106258_24 (sequence is synthesized)
ggtgactcaggtaacacgtcttcaagaagccatagggaggttgagggagggaagtcaagaagggaggttgaggactgcacttttgatttacttctgacttcacgagtcactttctgccaa

SEQ ID NO: 155443 - DNA, 120 bp, Artificial Sequence
  ENSG00000106258_25 (sequence is synthesized)
cgacgtgatcagaacagtgctagtgaaagaatgttattctgtcttcacaaatcgaaggatttgtgcaacgaccagcaccatcaagatgcagacccattccgtcaccatgtggctccctcc

SEQ ID NO: 155444 - DNA, 120 bp, Artificial Sequence
  ENSG00000106258_26 (sequence is synthesized)
tgctgtcctacagtcacaacatggagtttgtctttttctctgacaggttctatatcagagcaaacttttatttatttgaggaggccaatgtattaatatttccttttatggattgttctt

SEQ ID NO: 155445 - DNA, 120 bp, Artificial Sequence
  ENSG00000106258_27 (sequence is synthesized)
ttggtgttaagtctgaaaatcctttgcttagccctccttcctacattgctttttctaagagttatatagtttaacactttacaaaatgtaactctattacccattttgtgttaatatttg

SEQ ID NO: 155446 - DNA, 120 bp, Artificial Sequence
  ENSG00000106258_28 (sequence is synthesized)
cataagttatgagatttagatcaaggttcattttctgtggactatggctgtccaaatgttccaacaccattttggaaaggtaggcatattgtcaaaactcagctgagtatattttgtgaa

SEQ ID NO: 155447 - DNA, 120 bp, Artificial Sequence
  ENSG00000106258_29 (sequence is synthesized)
tctatttcttattgtttactcctccactaataccacactgtggtgactctagtagctgtacagtaactcttaacatcatatagggcaattctttccactttattgatttatattttcaga

SEQ ID NO: 155448 - DNA, 120 bp, Artificial Sequence
  ENSG00000106258_30 (sequence is synthesized)
atggctttagcttttcttgtcccttgcctttccataaaaattcagaataagcttgtaagtgtctacaaacaaacctgccataattttgataagaattaaagcagaggtgtccaatctttt

SEQ ID NO: 155449 - DNA, 120 bp, Artificial Sequence
  ENSG00000106258_31 (sequence is synthesized)
attatatatctaccaccacagataagcaaaaatgtccttgcataataatcctaattatgcactgccccattcagagggtctttcaaaatcattgaacaggttccaagtttgcaatcactg

SEQ ID NO: 155450 - DNA, 120 bp, Artificial Sequence
  ENSG00000106258_32 (sequence is synthesized)
atacagaaaatgtacatatctagctaaacttcactacttttttgatattttttattataaaagaaaagagaacaacataaaactagtggggtacttgacattgtttttgagaaactaatc

SEQ ID NO: 155451 - DNA, 120 bp, Artificial Sequence
  ENSG00000106258_33 (sequence is synthesized)
catcagtatctggcttgatggaagtagttgcaattctcagtgagttctcaaggtgctcatcagatattttggttctaattttactcttcgtgttcttcatccttgaaaatagtagctcac

SEQ ID NO: 155452 - DNA, 120 bp, Artificial Sequence
  ENSG00000106258_34 (sequence is synthesized)
aaatgtaagtgctgccaaaaagcaatgacatgaacaaggtgtgattgtgaagcaagggatatttgtcattgggaagacaggtcttacaaaagtccagtaaagaggcaaaatcaaattttt

SEQ ID NO: 155453 - DNA, 120 bp, Artificial Sequence
  ENSG00000106258_35 (sequence is synthesized)
ctataagttgaacatcagattgcagctctaggcattccatttcaaaattgccaggtaacatatatatgtcgactgaaaatggagttgcaaatataccaaaatattgatgattttttcaga

SEQ ID NO: 155454 - DNA, 120 bp, Artificial Sequence
  ENSG00000106258_36 (sequence is synthesized)
aatcttgaaatacctgttttcaaattcctgtatcaaattgaaaagcaaggctgcgtatttttggctgttcacaggaccatgtttagccaacatgtcgaaatgcataaaattgtttgcctt

SEQ ID NO: 155455 - DNA, 120 bp, Artificial Sequence
  ENSG00000106258_37 (sequence is synthesized)
aatttgagcttgccataatttcagtttcatatggaatgctgttatggtttgaaacattgtattgttaagttggttttcaacttgaagacacaggtttaactcacttaaatgggccgtcaa

SEQ ID NO: 155456 - DNA, 120 bp, Artificial Sequence
  ENSG00000106258_38 (sequence is synthesized)
acccactaaaaatgctaaatctgtaagccagttttcattgtcaagttctggcaccaattttgtttgataccataaacagcttgatttcacatcacaaagcataaaatctttacattttgc

SEQ ID NO: 155457 - DNA, 120 bp, Artificial Sequence
  ENSG00000106258_39 (sequence is synthesized)
tgacttgctagagtcagcatccatacttttaaggaattcctgaaactagcgatgattcaattcctgggcccttgtgaaatttacagccttgatgacaatttgcatgacgttatctacttt

SEQ ID NO: 155458 - DNA, 120 bp, Artificial Sequence
  ENSG00000106258_40 (sequence is synthesized)
taaagcttgtgcacatggattttcttgatgtattatgcaataatacttcatcaaatgtgagttttgtgtggcaactgcatcatctattaattgtacaagtccctctcttttacctaccat

SEQ ID NO: 155459 - DNA, 120 bp, Artificial Sequence
  ENSG00000106258_41 (sequence is synthesized)
cgccagggcagcatctgtagctatatcacatatgtttacaaaggacaaagaaaattgctttaacatatttttcactgcttcatataaatctcttgatttagttgtgtcttttaatagcat

SEQ ID NO: 155460 - DNA, 120 bp, Artificial Sequence
  ENSG00000106258_42 (sequence is synthesized)
ggtgacatttcgatttcttcagtgacattatattcatcatcaatacctctaataaaaatagcaagttgtgccgtatctgtagtgtcagtgccttcatccatcaccaaagcataaaatttt

SEQ ID NO: 155461 - DNA, 120 bp, Artificial Sequence
  ENSG00000106258_43 (sequence is synthesized)
aaattagcagttttactctccaaacgtctttcaatagatttcccaatttctccaattctcctggctatagtctggtgagacaaactgattttagaaatatcagtttctcaaggcaaataa

SEQ ID NO: 155462 - DNA, 120 bp, Artificial Sequence
  ENSG00000106258_44 (sequence is synthesized)
tatctaccacatcttccagacattgcttaataaactcaccatcagtaaatggttttgatttttttgctattaaatttgctaccacataactaggttttaccttacgattgagtccgagtt

SEQ ID NO: 155463 - DNA, 120 bp, Artificial Sequence
  ENSG00000106258_45 (sequence is synthesized)
gtaactttttaaaaaatcttttttgttgaaaagacagactttttttcagttctgctattttgtccttacaacacatacacaccaaatttgtcagcacgtttttgcatataatgcctcttc

SEQ ID NO: 155464 - DNA, 120 bp, Artificial Sequence
  ENSG00000106258_46 (sequence is synthesized)
aaattgtagtctttgaaaactggcacaaattccgtggaaattaagcagagtgcttcgctatttgcctcaacaagaaaaagtcatttgtccacttttcattgaacaatcttccttcatcca

SEQ ID NO: 155465 - DNA, 120 bp, Artificial Sequence
  ENSG00000106258_47 (sequence is synthesized)
taatttttgttttttagggttttctttttaagacattgtggaagccattctggaattaaaagcattataatagataagcaactatatttacttttattatggaaattaacagataggaaa

SEQ ID NO: 155466 - DNA, 120 bp, Artificial Sequence
  ENSG00000106258_48 (sequence is synthesized)
atagaacagaaagcaaggtttaataatcaaataagaatacttacatgtcttctaaataatattaaacacctatcatctacaaaggtaggttgaaatattattgataattgctgggtttta

SEQ ID NO: 155467 - DNA, 120 bp, Artificial Sequence
  ENSG00000106258_49 (sequence is synthesized)
cttgccaaattgccacaaacacacctaatacctgacagtgtcaattcaactgtccgtgattagaagataacacactggaagtcgcacaccaccataaaactgaagccacacatgcgtaca

SEQ ID NO: 155468 - DNA, 120 bp, Artificial Sequence
  ENSG00000106258_50 (sequence is synthesized)
aatggcgacagtgtctggtgtacagcagcgctctgccttgtccagaatacacacttgaattctttgtcacaattcacttcacgtggcactgcaatagcgtcctctcgctctttgttagtt

SEQ ID NO: 155469 - DNA, 120 bp, Artificial Sequence
  ENSG00000106258_51 (sequence is synthesized)
aattttaatggcttttaatttcttcttgctgaactgtttgcaattataatgcaaattatggatactagtccattatttgtggatgtgacatactctgattacccctttccattccattgt

SEQ ID NO: 155470 - DNA, 120 bp, Artificial Sequence
  ENSG00000106258_52 (sequence is synthesized)
tgtctacgaagttcacacttgagaatcacatagtcaaattacaaaattacaaaaaaaattgcaaaaaaactcaaaatgttttaagaaagtttccacatttgtattgggatacattcaaag

SEQ ID NO: 155471 - DNA, 120 bp, Artificial Sequence
  ENSG00000106258_53 (sequence is synthesized)
ccatcctggactgcatgaggcctgcaggccacaagttggacaagcttgaattaaaccaatagaacaatttgggtataatctatatctttactatgttcagcctttcatcccgtgaatata

SEQ ID NO: 155472 - DNA, 120 bp, Artificial Sequence
  ENSG00000106258_54 (sequence is synthesized)
gtatgcctctccatttctttagcttttattactttcctcaacattttatagttttcagcatagaggtcctgtacatcttttgttagatttacaccagaaatatttcatttttgttggagt

SEQ ID NO: 155473 - DNA, 120 bp, Artificial Sequence
  ENSG00000106258_55 (sequence is synthesized)
aactgtaaatgatactgtttttcttgtattttcagatattgattattgttacatagaaatgtgaataattttgtttgttgatcttgtatcctatagccttgcagaacttacctattcgtt

SEQ ID NO: 155474 - DNA, 120 bp, Artificial Sequence
  ENSG00000106258_56 (sequence is synthesized)
ctagaaatttttttgtatattccttgacattttatacattgacaattatgtcacctgaaaatagagacaattctattatttcctttccaatctgtatgccttttatttctttttcttgtc

SEQ ID NO: 155475 - DNA, 120 bp, Artificial Sequence
  ENSG00000106258_57 (sequence is synthesized)
tagtgtattaagacatcaggtatgctctttagtaagaatgttgagagtgggcattttttagttcttcttgatcttggaaaaaccattcagtccttcatcattaaatgtgatttaactgaa

SEQ ID NO: 155476 - DNA, 120 bp, Artificial Sequence
  ENSG00000106258_58 (sequence is synthesized)
agctcaccctgacccaggctggttcaagcatattctgcctctcttaatctacatgacaatcgtgtggttgtacaatcatttgcttgtaagtctttttatcacaaaaaagtgataattatc

SEQ ID NO: 155477 - DNA, 120 bp, Artificial Sequence
  ENSG00000106258_59 (sequence is synthesized)
aaactttacaaaccacagactagaaaaaacgaaactacatccatccacagtcccagcacaagacaaagataatcaattatgtccctgtgggcatttttctacgcctatatagatttttaa

SEQ ID NO: 155478 - DNA, 120 bp, Artificial Sequence
  ENSG00000106258_60 (sequence is synthesized)
aggtgaagccttagcaaaaatgcctcctcaccactccccaggagaatttttataaaaagcataatcactgattccttcactgacataatgtaggaagcctctgaggagaaaaacaaaggg

SEQ ID NO: 155479 - DNA, 120 bp, Artificial Sequence
  ENSG00000106258_61 (sequence is synthesized)
agaaacatagagaacggttgctactggcagaagcataagatctttgtacaatattgctggccctggttcacctgtttactgttatcacaataatgctaagtaaaaaaaaaaaaaaaaaaa

SEQ ID NO: 155480 - DNA, 89 bp, Artificial Sequence
  ENSG00000106258_62 (sequence is synthesized)
ctgcatttccaactgaggtaccgggtgcatctcaatggggattgttggagcagcctgagccaaagcagggcgaggcatcacctcacctg

SEQ ID NO: 155481 - DNA, 67 bp, Artificial Sequence
  ENSG00000106258_63 (sequence is synthesized)
ggacagtgggtgcagtgcacccagcctgagccaaagcagggcgggtgacggacagcacctggaaaat

SEQ ID NO: 155482 - DNA, 82 bp, Artificial Sequence
  ENSG00000106258_64 (sequence is synthesized)
ctgggggaggggcgcccgccattgctaaggcttgagtaggtaaacaaagctgccaggaagctcaaactgggtgaagcccacc

SEQ ID NO: 155483 - DNA, 61 bp, Artificial Sequence
  ENSG00000106258_65 (sequence is synthesized)
gtcaccaataccgctgttctgcagcctccactcctgatacccaggcaaacagggtctggag

SEQ ID NO: 155484 - DNA, 68 bp, Artificial Sequence
  ENSG00000106258_66 (sequence is synthesized)
caaaggtagataaaaacacaaagatgggggaaaaacagcagaaaaactgaaaaatctaaaaatcagag

SEQ ID NO: 155485 - DNA, 74 bp, Artificial Sequence
  ENSG00000106258_67 (sequence is synthesized)
atcatcaaagatcaaaggtagataaaaacacaaagatgggggaaaaacagcagaaaaactgaaaagcaccagca

SEQ ID NO: 155486 - DNA, 120 bp, Artificial Sequence
  ENSG00000106258_68 (sequence is synthesized)
gtctctgcccaggtcttcatgggatgaagctcttgtcaacctaaatacaaacagagagaggttctctgaaagaagaggataattacttgggagtagaatattgcaatgggaatctgcttg

SEQ ID NO: 155487 - DNA, 120 bp, Artificial Sequence
  ENSG00000106258_69 (sequence is synthesized)
ccgttataaactatgtgcaaattcagggaggtaaacaagacaaagatgctccatagaaaatatgagaagaatctcataactgttttgagataattattgttagctacaaagatcaataac

SEQ ID NO: 155488 - DNA, 120 bp, Artificial Sequence
  ENSG00000106258_70 (sequence is synthesized)
cttcaccagcggaaaactcaaggagaaaagacatcacaaaattcattacaaaatgtcacttactgctccatgctggagaaagccatatccttctgggacttgagtctgcacatttaacta

SEQ ID NO: 155489 - DNA, 120 bp, Artificial Sequence
  ENSG00000106261_0 (sequence is synthesized)
gtgactcattgtgtctgtgtcgaggcgtcgggagggcctaagtccgtgtgcggtgcccttcggccggcctgagccccagagtcagctcccctttctcgcccagcgcccccaggccgctcc

SEQ ID NO: 155490 - DNA, 120 bp, Artificial Sequence
  ENSG00000106261_1 (sequence is synthesized)
cggggctcacggaatagtaaagaaacacatcataaaacctcccaggacataaaggtgagcacagaccctgtttggatcaagtcagttcctggagcctgaatgatgactgctgaatcacgg

SEQ ID NO: 155491 - DNA, 120 bp, Artificial Sequence
  ENSG00000106261_2 (sequence is synthesized)
gaagccacgggtctgtccccacaggctgcacaggagaaggatggtatcgtaatagtgaaggtggaagaggaagatgaggaagaccacatgtgggggcaggattccaccctacaggacacg

SEQ ID NO: 155492 - DNA, 120 bp, Artificial Sequence
  ENSG00000106261_3 (sequence is synthesized)
cctcctccagacccagagatattccgccaacgcttcaggcgcttctgttaccagaacacttttgggccccgagaggctctcagtcggctgaaggaactttgtcatcagtggctgcggcca

SEQ ID NO: 155493 - DNA, 120 bp, Artificial Sequence
  ENSG00000106261_4 (sequence is synthesized)
gaaataaacaccaaggaacagatcctggagcttctggtgctagagcagtttctttccatcctgcccaaggagctccaggtctggctgcaggaataccgccccgatagtggagaggaggcc

SEQ ID NO: 155494 - DNA, 120 bp, Artificial Sequence
  ENSG00000106261_5 (sequence is synthesized)
gtgacccttctagaagacttggagcttgatttatcaggacaacaggtcccaggtcaagttcatggacctgagatgctcgcaagggggatggtgcctctggatccagttcaggagtcctcg

SEQ ID NO: 155495 - DNA, 120 bp, Artificial Sequence
  ENSG00000106261_6 (sequence is synthesized)
agctttgaccttcatcacgaggccacccagtcccacttcaaacattcgtctcggaaaccccgcctcttacagtcacgagctcttcctgctgcccacattcctgcaccccctcatgagggt

SEQ ID NO: 155496 - DNA, 120 bp, Artificial Sequence
  ENSG00000106261_7 (sequence is synthesized)
agtcccagagaccaggcgatggcatctgcactattcacagcggattcccaggcaatggtgaagatcgaggacatggctgtgtccctcattctggaggaatggggatgtcagaatctggct

SEQ ID NO: 155497 - DNA, 120 bp, Artificial Sequence
  ENSG00000106261_8 (sequence is synthesized)
cggaggaatctcagtagggacaacaggcaggagaattatgggagcgcatttccccagggtggtgaaaacaggaatgagaacgaggagtcaacctcaaaggctgaaacctcggaagattca

SEQ ID NO: 155498 - DNA, 120 bp, Artificial Sequence
  ENSG00000106261_9 (sequence is synthesized)
gcatcacgcggggagacaacaggaagatcccagaaagagtttggagagaaacgtgaccaggagggcaaaacaggagaaagacagcagaaaaaccctgaggagaaaaccaggaaagagaaa

SEQ ID NO: 155499 - DNA, 120 bp, Artificial Sequence
  ENSG00000106261_10 (sequence is synthesized)
agagattcagggccagctataggaaaggacaaaaaaaccatcacaggagagagaggtccaagggagaaggggaaaggattgggaagaagcttcagtctgagctccaacttcaccacccct

SEQ ID NO: 155500 - DNA, 120 bp, Artificial Sequence
  ENSG00000106261_11 (sequence is synthesized)
gaagaagttcccacgggaacaaagtctcacagatgtgatgaatgtggtaaatgcttcacgagaagttcaagccttatccgccataaaataatccacactggagaaaagccctatgaatgt

SEQ ID NO: 155501 - DNA, 120 bp, Artificial Sequence
  ENSG00000106261_12 (sequence is synthesized)
agtgagtgtgggaaagccttcagtcttaactccaaccttgtcctgcatcagaggatccacacaggagagaaacctcatgaatgtaacgagtgtggcaaggccttcagccacagttccaat

SEQ ID NO: 155502 - DNA, 120 bp, Artificial Sequence
  ENSG00000106261_13 (sequence is synthesized)
ctcatcctccatcagcgcatccactctggagagaaaccttatgaatgtaatgagtgcgggaaggccttcagccagagctcggacctcaccaagcatcagagaattcacacgggggagaaa

SEQ ID NO: 155503 - DNA, 120 bp, Artificial Sequence
  ENSG00000106261_14 (sequence is synthesized)
ccctatgaatgtagtgaatgtggaaaagctttcaaccgaaactcatacctgattttgcatcggagaattcacactcgagaaaagccctacaagtgcactaagtgtggcaaggccttcacc

SEQ ID NO: 155504 - DNA, 120 bp, Artificial Sequence
  ENSG00000106261_15 (sequence is synthesized)
cgcagctccaccctcactctgcatcacagaatccatgccagagagagagcctctgagtacagcccagcctcccttgatgcatttggcgcgttcctgaaaagttgtgtgtaaaggaagaat

SEQ ID NO: 155505 - DNA, 120 bp, Artificial Sequence
  ENSG00000106261_16 (sequence is synthesized)
ttgccatcaagccatttcccccttttgtttctaaaattatttcagagatgtgtgctcctggagggaaaaagaaatacagcctcaacagattaaaaaacaaaagtcacacttaaggatcct

SEQ ID NO: 155506 - DNA, 120 bp, Artificial Sequence
  ENSG00000106261_17 (sequence is synthesized)
tctagtcacatcagcagtgttctgcctttatgtagtagttgggcatataatccttccacacagcccctgcagggaaaggctaatcttacggataatccacgtgagatttccacacaagag

SEQ ID NO: 155507 - DNA, 120 bp, Artificial Sequence
  ENSG00000106261_18 (sequence is synthesized)
aaaagcacacgcatagtgaaatgtcagtcttttcagtaatgaggatacctttaaggcactcttggactctcggcaaccacaacataatagttgaaagatcaagattggctccacgaaagt

SEQ ID NO: 155508 - DNA, 120 bp, Artificial Sequence
  ENSG00000106261_19 (sequence is synthesized)
gatacggaggttaggatgctacttgctgcaaacaagccctactttggccaacatcctgcttatttctcaaaaaagagggacagtgaaaacaaaaacgacattgggacatgctgctcaagg

SEQ ID NO: 155509 - DNA, 120 bp, Artificial Sequence
  ENSG00000106261_20 (sequence is synthesized)
tagttatatatacgataagttgtatatatgatcactggtagcctaccaaagctgtagaaatctaggactgtgctaatcagtatcaaaccaaagatttctatctcttcccgaaagagaggg

SEQ ID NO: 155510 - DNA, 120 bp, Artificial Sequence
  ENSG00000106261_21 (sequence is synthesized)
tatgtgcaccagtctacagttccaaaggactgcaacaaatgtagatggttctgtcctcatccctgagatcagttctactgaaatggcaacaacaactccaaatacatctctcccttcttg

SEQ ID NO: 155511 - DNA, 120 bp, Artificial Sequence
  ENSG00000106261_22 (sequence is synthesized)
aaatccctaaagcactatcgcactcctaaatgcatttctccacaagttagcacttgattgtatactgtcttttaatccttcattgtttcatgtatgaagtttttaatcaccccctaaccc

SEQ ID NO: 155512 - DNA, 120 bp, Artificial Sequence
  ENSG00000106261_23 (sequence is synthesized)
ccaaaaaagattcggttgtcaagggatatatttctatccctgccagcacagtgctggacatagtgagtactgaacacctaagaggcactcattcagactgacttctacaggacttctacg

SEQ ID NO: 155513 - DNA, 120 bp, Artificial Sequence
  ENSG00000106261_24 (sequence is synthesized)
tgtgtgataaaagcctgtgaatcgtgagtccctgaaatatggtagcctggcccagcttctaaagaggaccttcgtagccacaaggcatgctaaacctctagggtctgatgctgtttttgt

SEQ ID NO: 155514 - DNA, 120 bp, Artificial Sequence
  ENSG00000106261_25 (sequence is synthesized)
tccaaatataaacgaaaggcactagtcagccgcctgcatagactttctaaacagtgagtaaataccatggaatgtcagaaatgactttatcatcgtcatcttgaagaaaaatatgaacac

SEQ ID NO: 155515 - DNA, 120 bp, Artificial Sequence
  ENSG00000106261_26 (sequence is synthesized)
tgatgaaggtcattttttttttttgacatctttctgtggcaaagctcttagaattctttgcagttagctgctgaacagtatgatgatttggggattttctgaatcatttgtacttagata

SEQ ID NO: 155516 - DNA, 120 bp, Artificial Sequence
  ENSG00000106261_27 (sequence is synthesized)
ctggagttcagaagatgtgatttttgttgcttttcagaaaaaggaacgtggtagggagtgttttttcccacgcttttccagtaactttgcaaaagcattaattgttcactggcaattact

SEQ ID NO: 155517 - DNA, 120 bp, Artificial Sequence
  ENSG00000106261_28 (sequence is synthesized)
aaatgtattttgttgctctgagaaactcagcagtgtactgagatgtggctggctgtgccatcgtcatagtgcacagtgacttttctgtttcttatcactaaagactgaggtgaggttatg

SEQ ID NO: 155518 - DNA, 120 bp, Artificial Sequence
  ENSG00000106261_29 (sequence is synthesized)
aaactttcattggtcccatcgttgtgcgcagggtgcaactggctacctagaagctgatggcaggagactgtttcacacacaggagattgtgagctgtgtaagtagtcatcgccactcaag

SEQ ID NO: 155519 - DNA, 120 bp, Artificial Sequence
  ENSG00000106261_30 (sequence is synthesized)
taggacaagggtcctacccaaggctaggaccgccctgcggaaacagaaacatagactgagaacaaacctcaagactatcagtgtgacctccccataacaagagaaccccatatatagttt

SEQ ID NO: 155520 - DNA, 120 bp, Artificial Sequence
  ENSG00000106261_31 (sequence is synthesized)
gagactttcccttgagaaacttatactaaaactattactcatcagtcattcactgatcagcagctaaagtccatgagaccaaatggttttatatggaaccaacgaagtgggagctaaaac

SEQ ID NO: 155521 - DNA, 120 bp, Artificial Sequence
  ENSG00000106261_32 (sequence is synthesized)
tgcacagtggtcattctttggcctctccttggctttatgacttaaaccaactacaacttccctatagcttctaagcagtttcatcagcattacttgggaaaacgtgttgcaagtcaacca

SEQ ID NO: 155522 - DNA, 120 bp, Artificial Sequence
  ENSG00000106261_33 (sequence is synthesized)
gtcactaggatatttctacccatgcaacggaagaaaaacccattactccagaagagtatatctaagtaactaaaatggaggcagaaaatgttttaaggattttcttcaaagaataagcca

SEQ ID NO: 155523 - DNA, 120 bp, Artificial Sequence
  ENSG00000106261_34 (sequence is synthesized)
ttaaggattttcttcaaagaataagccacagcaatggttttgtagaaaactcctgtgcttttgagcaaggacttttgccctctagaaagcaactgaggccaggtgcggtggctcacgcct

SEQ ID NO: 155524 - DNA, 120 bp, Artificial Sequence
  ENSG00000106261_35 (sequence is synthesized)
aaagaaagaaagaaactgaaaagtgaggtgtggaactccaggcaacgacccaagcacttattttttaagagggaaaggactttggtcatgtttacattggcctttggtttttttttttct

SEQ ID NO: 155525 - DNA, 120 bp, Artificial Sequence
  ENSG00000106261_36 (sequence is synthesized)
ttcagccacaactatatgctgatataactcagccatcacttttgagttttgtttttaaatgaaggttaaatgtgacctgtgccctcacatttaattccgtttcatggagacatcttcctg

SEQ ID NO: 155526 - DNA, 120 bp, Artificial Sequence
  ENSG00000106261_37 (sequence is synthesized)
cacatgctgtccttgaagcagctatttgaagatgtgttttctgaggaaaacaggctacaactgtttattaaaaccacttgcagtgcattcgtttatcagatgctcagtgcaaagtgtaat

SEQ ID NO: 155527 - DNA, 120 bp, Artificial Sequence
  ENSG00000106261_38 (sequence is synthesized)
tgggtcatggtcaaaaacgcttgcaacatctaattggcgttcaagatagtcattcaaaagttcttggcccgctgaagtctgttaacagttgaaacattctacagttaaccattagcatgc

SEQ ID NO: 155528 - DNA, 120 bp, Artificial Sequence
  ENSG00000106261_39 (sequence is synthesized)
tagttgtcctaatggaaatttttgaagagtttttcaatatataccctacccttgccaggaagagaagtaaaatcctcaggttgtggggtatttgtttctactccagcctggcaggcaagg

SEQ ID NO: 155529 - DNA, 120 bp, Artificial Sequence
  ENSG00000106261_40 (sequence is synthesized)
ctaaaacctgagattatcgatctatgagacatcttgatatgtaaagcacttaatattaaaggcataaaagtgaaactgctaaatatgtatagagaggttgacgtgtgatacgtgggacag

SEQ ID NO: 155530 - DNA, 120 bp, Artificial Sequence
  ENSG00000106261_41 (sequence is synthesized)
ttcacatagacatcagagaatttattccagaaaggagcctcctgaatgtgatgaatacggcaaagcctttaatcacatctcagcccttagcatcggaaagcttatactgtaaataaactt

SEQ ID NO: 155531 - DNA, 120 bp, Artificial Sequence
  ENSG00000106261_42 (sequence is synthesized)
gatgaatattatatgtgaggaaaactttcatgtatagcactcattgcttcagacagaaaatgaattccgtcggtatgttccaatcgtgatgaatttgagaaacattgcaagagggagctc

SEQ ID NO: 155532 - DNA, 120 bp, Artificial Sequence
  ENSG00000106261_43 (sequence is synthesized)
agatcatgccactggcactccagccttgagtgacagagcgaggctctgtatcaaaaaaaaaagttgcgggggggtgctcaatcttaactgcagaggatctacagatgaaaaaaaatgtgg

SEQ ID NO: 155533 - DNA, 120 bp, Artificial Sequence
  ENSG00000106261_44 (sequence is synthesized)
ggaaatgctttaaaaaaatagcaaaatgtgcaacttcttacaaaaattgttaacgttaggtacttctatatattttatatgaccataatgtccgtgtgtgttttgtaccttcagtccctt

SEQ ID NO: 155534 - DNA, 120 bp, Artificial Sequence
  ENSG00000106261_45 (sequence is synthesized)
gttattgttccgtatattacctgtaagcagatactgtattttattttagcctatttgacagaacacatcactcagaaaaagtgaagtttcagagcaaacagtgaagaaatcagtgtgatt

SEQ ID NO: 155535 - DNA, 120 bp, Artificial Sequence
  ENSG00000106261_46 (sequence is synthesized)
gtagacaaaaagtcggttcacagaacggagcagcggggagaggaagggaaaagcttcatagtttggtgcttatcacatcaagagattggtaaatttctgaggaaagacaggctaatgggg

SEQ ID NO: 155536 - DNA, 120 bp, Artificial Sequence
  ENSG00000106261_47 (sequence is synthesized)
cactgaaatggaacaactcctttaaacgtgcagccttttgaatttttcctcaaaaccaagaagttgacctctgagctgtcaggtgaccactgtgtgcaaaggggatggattctcttgtca

SEQ ID NO: 155537 - DNA, 120 bp, Artificial Sequence
  ENSG00000106261_48 (sequence is synthesized)
gtagacggtcttctccatgaagcgagagtaggaagtgtactggaatggccaagtgggactgcttcagctgaccaggttcttttaaaccgtagtcatgctttcccactaactcttaaatcc

SEQ ID NO: 155538 - DNA, 62 bp, Artificial Sequence
  ENSG00000106261_49 (sequence is synthesized)
tttaaaccgtagtcatgctttcccactaactcttaaatccttatgcttagaaaattgaggat

SEQ ID NO: 155539 - DNA, 85 bp, Artificial Sequence
  ENSG00000106261_50 (sequence is synthesized)
ggcgtgagactccatgtcaaaaaaaaaaaaaaggttggggggaggataggactggccaggcacggtggctcactcctgtaatctc

SEQ ID NO: 155540 - DNA, 120 bp, Artificial Sequence
  ENSG00000106261_51 (sequence is synthesized)
aaaaaaaaaagaaagaaagaaagaaaattggggataggagaacagcaaggtgggcatttcccggaattgtgtgcagatgcatccagtcgtggcattgcaagaagtctgtctgatgaagct

SEQ ID NO: 155541 - DNA, 120 bp, Artificial Sequence
  ENSG00000106261_52 (sequence is synthesized)
cattgcaagaagtctgtctgatgaagctcgggaagcattttgcaatattccctttggctgtgttcctgtgttccctgctcccacttttcttcccctggtttgtgattattaggagagagg

SEQ ID NO: 155542 - DNA, 120 bp, Artificial Sequence
  ENSG00000106261_53 (sequence is synthesized)
ttttgcaaagactcgttgctgtgaaagaatctttttttaatttttatcctagagtcagtcacttttattccaggtagtcatgctgatctgcttatccaaagccagctaaccaggttcatc

SEQ ID NO: 155543 - DNA, 120 bp, Artificial Sequence
  ENSG00000106261_54 (sequence is synthesized)
ctaccatcctcatggaagactgtgtgtatgaattggagtaacagaactgaaatacacttaaacagtgacagcagtacttcccagggtgggggccatatttctctgtgtcctactctgagc

SEQ ID NO: 155544 - DNA, 120 bp, Artificial Sequence
  ENSG00000106261_55 (sequence is synthesized)
aacttctcagagatacgagggggctagggttttcccatctgggaaatggggtgaaagtctgcagattgttaaatgaaatatagaatcagagaaaaagaaaagtcagtgatataaatagat

SEQ ID NO: 155545 - DNA, 120 bp, Artificial Sequence
  ENSG00000106261_56 (sequence is synthesized)
catttcatagaaattagggtagatttttatttcaactactactggagaatttaataaaaggcattatttgaaaagtttttctaacatagatttagggtttttttttttagagtggacaca

SEQ ID NO: 155546 - DNA, 120 bp, Artificial Sequence
  ENSG00000106261_57 (sequence is synthesized)
ctacatttaaaagcaattattttgctattcagattttttattatctgaaaatgaaattatctgttttacttttcaaagctttgtgaaacaaacttgaagttatagggaggtaagccatct

SEQ ID NO: 155547 - DNA, 120 bp, Artificial Sequence
  ENSG00000106261_58 (sequence is synthesized)
ccaactctgcaggtcaaacgaaagtttgggaaatacttttgacatcccacaatacagaatgtcttaacatgagaattgaatttcatgatgtgtggttccatttaatagcggacaccaccc

SEQ ID NO: 155548 - DNA, 120 bp, Artificial Sequence
  ENSG00000106261_59 (sequence is synthesized)
caatctcatgttttcctgttaccctaaaacagtggaaggaaactgggtgtttggtagacttctaaatcatggtctctgacaatttgaatctgagattctcacctccatttactaaagaat

SEQ ID NO: 155549 - DNA, 120 bp, Artificial Sequence
  ENSG00000106261_60 (sequence is synthesized)
cgtgacttaattcaaattgcacagtaatcagtaaagtgaatacgtttttaaaatggaattttctcccttcagcaagcactcattaaggagtgaggctgagtattttaagatagagtgaga

SEQ ID NO: 155550 - DNA, 120 bp, Artificial Sequence
  ENSG00000106261_61 (sequence is synthesized)
tctgtgagtgattgaaaggtgatatttaaaaacttggatttcattccagtgtcaggtttgggttttaagttcctttggtccagggaagggtccaagcagccacagttgccctaaatctcc

SEQ ID NO: 155551 - DNA, 120 bp, Artificial Sequence
  ENSG00000106261_62 (sequence is synthesized)
atcattaagtcttccagcaaggttaagtgcagtatggaaggagaagggggaagaggacggtaacggccccacactccaggctgagaaagagtaattaggaggcctgaggaggggccgagg

SEQ ID NO: 155552 - DNA, 120 bp, Artificial Sequence
  ENSG00000106261_63 (sequence is synthesized)
aaaggctgttggggtgtgctggggttggtacccgagcgccttcccctcacctcaaccagagaagagcatccggttgctttttaaagcttttagcctgccctagcaaggacaaagcatgtt

SEQ ID NO: 155553 - DNA, 120 bp, Artificial Sequence
  ENSG00000106261_64 (sequence is synthesized)
agattagagatgcttctgctgatcgcaggggttcttatttgaaaacatctatgatgggggtggggtgggaggagacaggttgtggttatgcaggaaaatcttgtcctaaaaatatatgag

SEQ ID NO: 155554 - DNA, 120 bp, Artificial Sequence
  ENSG00000106261_65 (sequence is synthesized)
tttgggggtaaggggtgggatagccaagcaaaatcagtaattattttaaaatgaacatatgtatttttattaacttttagttaaatacagattttacaacgaggtcagcataagcctaaa

SEQ ID NO: 155555 - DNA, 120 bp, Artificial Sequence
  ENSG00000106261_66 (sequence is synthesized)
tctatatagagggctaactcaggcattgtcttgtttatttgtagactggattaaaaacaacctgtcctgttttgtcagttcccagcttcttcgtttagaataaattagaccaaaagaaga

SEQ ID NO: 155556 - DNA, 120 bp, Artificial Sequence
  ENSG00000106261_67 (sequence is synthesized)
aacgtgcttgtctctgtatacccgcagaatgaagttactgttgttaaaactggattttttcattttactaggttccgaagagtccagatgcttggtagatgttcaatacgtgattttttt

SEQ ID NO: 155557 - DNA, 120 bp, Artificial Sequence
  ENSG00000106261_68 (sequence is synthesized)
tttaattgaatgtgttcatttaaaatcctccttaacatttctagaaagacttctttcaataaataatggaatcttagaggaaaagtggttttttaaaagctagggaactcctccactaaa

SEQ ID NO: 155558 - DNA, 120 bp, Artificial Sequence
  ENSG00000106261_69 (sequence is synthesized)
agtaaccattggaaacctcgaatgagggctaaagttttaatcataagagaaaaggcagcataatgaaatgtgtacacatacatagtcagtggtccattttaggaagccagtggcgtctga

SEQ ID NO: 155559 - DNA, 120 bp, Artificial Sequence
  ENSG00000106261_70 (sequence is synthesized)
taaagaaatgttaagagtagtgaggttgaggaaggaaattgtggggatttgaaatattctctttatgttgtttctcttctgagtcatggtaaaacaataaattatcatctctaggtggca

SEQ ID NO: 155560 - DNA, 120 bp, Artificial Sequence
  ENSG00000106261_71 (sequence is synthesized)
atttaggggaagggaaatgattcaggacgagagtctttgtgctgctgagtgcctgtgatgaagaagcatgttagtcctgggcaacgtagcgagaccccatctctacaaaaaatagaaaaa

SEQ ID NO: 155561 - DNA, 120 bp, Artificial Sequence
  ENSG00000106261_72 (sequence is synthesized)
ccaggaggttgaggctgcagtgagctgtaatcatgccactactccaacctgggcaacacagcaaggaccctgtctcaaaagctacttacagaaaagaattaggctcggcacggtagctca

SEQ ID NO: 155562 - DNA, 61 bp, Artificial Sequence
  ENSG00000106261_73 (sequence is synthesized)
caacctgggcaacacagcaaggaccctgtctcaaaagctacttacagaaaagaattaggct

SEQ ID NO: 155563 - DNA, 77 bp, Artificial Sequence
  ENSG00000106261_74 (sequence is synthesized)
ggtggaggttgcagtaagccgagatcgtaccactgtgctctagccttggtgacagagcgagatttaaaaaaaaatga

SEQ ID NO: 155564 - DNA, 120 bp, Artificial Sequence
  ENSG00000106263_0 (sequence is synthesized)
atggctgggctgtagccgtcgcggcgcgcggtgcggcctgggagagtcggaagcgcggcggccgcggagccctgcgagtaggcagcgttgggcccatgcaggacgcggagaacgtggcgg

SEQ ID NO: 155565 - DNA, 80 bp, Artificial Sequence
  ENSG00000106263_1 (sequence is synthesized)
tgcaggacgcggagaacgtggcggtgcccgaggcggccgaggagcgcgccgagcccggccagcagcagccggccgccgag

SEQ ID NO: 155566 - DNA, 120 bp, Artificial Sequence
  ENSG00000106263_2 (sequence is synthesized)
accgaggcctccagtgaggaggtggggatcgcggaggccgggccggagtccgaggtgaggaccgagccggcggccgaggcagaggcggcctccggcccgtccgagtcgccctcgccgccg

SEQ ID NO: 155567 - DNA, 120 bp, Artificial Sequence
  ENSG00000106263_3 (sequence is synthesized)
ccgaggagctgcccgggtcgcatgctgagccccctgtcccggcacagggcgaggccccaggagagcaggctcgggacgagcgctccgacagccgggcccaggcggtgtccgaggacgcgg

SEQ ID NO: 155568 - DNA, 120 bp, Artificial Sequence
  ENSG00000106263_4 (sequence is synthesized)
gaggaaacgagggcagagcggccgaggccgaaccccgggcgctggagaacggcgacgcggacgagccctccttcagcgaccccgaggacttcgtggacgacgtgagcgaggaagaattac

SEQ ID NO: 155569 - DNA, 120 bp, Artificial Sequence
  ENSG00000106263_5 (sequence is synthesized)
tgggagatgtactcaaagatcggccccaggaagcagatggaatcgattcggtgattgtagtggacaatgtccctcaggtgggacccgaccgacttgagaaactcaaaaatgtcatccaca

SEQ ID NO: 155570 - DNA, 120 bp, Artificial Sequence
  ENSG00000106263_6 (sequence is synthesized)
agatcttttccaagtttgggaaaatcacaaatgatttttatcctgaagaggatgggaagacaaaagggtatattttcctggagtacgcgtcccctgcccacgctgtggatgctgtgaaga

SEQ ID NO: 155571 - DNA, 120 bp, Artificial Sequence
  ENSG00000106263_7 (sequence is synthesized)
acgccgacggctacaagcttgacaagcagcacacattccgggtcaacctctttacggattttgacaagtatatgacgatcagtgacgagtgggatattccagagaaacagcctttcaaag

SEQ ID NO: 155572 - DNA, 120 bp, Artificial Sequence
  ENSG00000106263_8 (sequence is synthesized)
acctggggaacttacgttactggcttgaagaggcagaatgcagagatcagtacagtgtgatttttgagagtggagaccgcacttccatattctggaatgacgtaaaagaccctgtctcaa

SEQ ID NO: 155573 - DNA, 120 bp, Artificial Sequence
  ENSG00000106263_9 (sequence is synthesized)
ttgaagaaagagcgagatggacagagacgtatgtgcgttggtctcctaagggcacctacctggctacctttcatcaaagaggcattgctctatgggggggagagaaattcaagcaaattc

SEQ ID NO: 155574 - DNA, 120 bp, Artificial Sequence
  ENSG00000106263_10 (sequence is synthesized)
agagattcagccaccaaggggttcagcttattgacttctcaccttgtgaaaggtacctggtgacctttagccccctgatggacacgcaggatgaccctcaggccataatcatctgggaca

SEQ ID NO: 155575 - DNA, 120 bp, Artificial Sequence
  ENSG00000106263_11 (sequence is synthesized)
tccttacggggcacaagaagaggggttttcactgtgagagctcagcccattggcctatttttaagtggagccatgatggcaaattctttgccagaatgaccctggatacgcttagcatct

SEQ ID NO: 155576 - DNA, 120 bp, Artificial Sequence
  ENSG00000106263_12 (sequence is synthesized)
tctgggtgcctgaagacaaagatattccagccagggtaaccctgatgcagctccctaccaggcaagagatccgagtgaggaacctgttcaatgtggtggactgcaagctccattggcaga

SEQ ID NO: 155577 - DNA, 120 bp, Artificial Sequence
  ENSG00000106263_13 (sequence is synthesized)
agaacggagactacttgtgtgtgaaagtagataggactccgaaaggcacccagggtgttgtcacaaattttgaaattttccgaatgagggagaaacaggtacctgtggatgtggtcgaga

SEQ ID NO: 155578 - DNA, 120 bp, Artificial Sequence
  ENSG00000106263_14 (sequence is synthesized)
tgaaagaaaccatcatagcctttgcctgggaaccaaatggaagtaagtttgctgtgctgcacggagaggctccgcggatatctgtgtctttctaccacgtcaaaaacaacgggaagattg

SEQ ID NO: 155579 - DNA, 120 bp, Artificial Sequence
  ENSG00000106263_15 (sequence is synthesized)
aactcatcaagatgttcgacaagcagcaggcgaacaccatcttctggagcccccaaggacagttcgtggtgttggcgggcctgaggagtatgaacggtgccttagcgtttgtggacactt

SEQ ID NO: 155580 - DNA, 120 bp, Artificial Sequence
  ENSG00000106263_16 (sequence is synthesized)
cggactgcacggtcatgaacatcgcagagcactacatggcttccgacgtcgaatgggatcctactgggcgctacgtcgtcacctctgtgtcctggtggagccataaggtggacaacgcgt

SEQ ID NO: 155581 - DNA, 120 bp, Artificial Sequence
  ENSG00000106263_17 (sequence is synthesized)
actggctgtggactttccagggacgcctcctgcagaagaacaacaaggaccgcttctgccagctgctgtggcggccccggcctcccacactcctgagccaggaacagatcaagcaaatta

SEQ ID NO: 155582 - DNA, 120 bp, Artificial Sequence
  ENSG00000106263_18 (sequence is synthesized)
aaaaggatctgaagaaatactctaagatctttgaacagaaggatcgtttgagtcagtccaaagcctcaaaggaattggtggagagaaggcgcaccatgatggaagatttccggaagtacc

SEQ ID NO: 155583 - DNA, 120 bp, Artificial Sequence
  ENSG00000106263_19 (sequence is synthesized)
ggaaaatggcccaggagctctatatggagcagaaaaacgagcgcctggagttgcgaggaggggtggacactgacgagctggacagcaacgtggacgactgggaagaggagaccattgagt

SEQ ID NO: 155584 - DNA, 120 bp, Artificial Sequence
  ENSG00000106263_20 (sequence is synthesized)
tcttcgtcactgaagaaatcattcccctcgggaatcaggagtgacctggagcactgtggggacggactccgcctgctgttcccgcgctgagctacaggactcccgagtgtgagccgcggt

SEQ ID NO: 155585 - DNA, 120 bp, Artificial Sequence
  ENSG00000106263_21 (sequence is synthesized)
tcctctgttgcagcgcagccgtgtgtgctgtggagccgaggccgtcctgcaggaagccgcgtgactcccgcctcctccctgtgctctctggctctggactgtgactgcgcctggattctg

SEQ ID NO: 155586 - DNA, 120 bp, Artificial Sequence
  ENSG00000106263_22 (sequence is synthesized)
ccattgcgacacatttttgtgcctttcagcccctggtgtctgcagtgggggatttaaggcacccgcttccacttctttcttgtttggagttttctgttggaaccgccggcgttggctccg

SEQ ID NO: 155587 - DNA, 120 bp, Artificial Sequence
  ENSG00000106263_23 (sequence is synthesized)
aagacttagcgacgccactggcggcaccttctcctgcgcccagtgatgtttccacggtgcctgtacacagccgagcagcatttccgttgaaggacttgcatccccattgcgggcagtgct

SEQ ID NO: 155588 - DNA, 120 bp, Artificial Sequence
  ENSG00000106263_24 (sequence is synthesized)
ggacgtgtcccggagacccaccgggagggcgccgccatgccttgtacccccaccgtgcaggttgtggccggttttctccgcaggttgaacatggaaataaaagcaaacttgtatgaaaaa

SEQ ID NO: 155589 - DNA, 120 bp, Artificial Sequence
  ENSG00000106263_25 (sequence is synthesized)
gtgacccgcgctgtcccgcgctgaaggcggcggcctcggatggactgaaccactgtgaaagcccgaatggggggaaacaggcagtgacggccgctagggaaggactggggggcgaggccc

SEQ ID NO: 155590 - DNA, 120 bp, Artificial Sequence
  ENSG00000106263_26 (sequence is synthesized)
tggcacttttgtttttcttaggtggagccatgatggcaaattctttgccagaatgaccctggatacgcttagcatctatgaaactcctgtaagtggcctcagtgatggcaaacgccccgt

SEQ ID NO: 155591 - DNA, 120 bp, Artificial Sequence
  ENSG00000106263_27 (sequence is synthesized)
ccggtccttgcttgtaaccggggtgtggtgcctttccttatttgtgctagaagaggaggaggaggtttcacagatgcataggaaaggcctgtctcctgtgcctttttaactgcccctgct

SEQ ID NO: 155592 - DNA, 120 bp, Artificial Sequence
  ENSG00000106263_28 (sequence is synthesized)
cgggaatcaggagtgacctggagcactgtggtgagcgtctgcagggggcgcgatgggggtcctgttggctgctcatgctgcttcagttatccccgtcactgaggaagcacctcctttaag

SEQ ID NO: 155593 - DNA, 120 bp, Artificial Sequence
  ENSG00000106263_29 (sequence is synthesized)
gcaggggtgaagggtgaagccctagtgtcatgtgcccagggttagctgagcctcgtgtgaaatgtagagtcggtgccgacgtggcctcgactgcgccctctgaccacattgcagatggcg

SEQ ID NO: 155594 - DNA, 120 bp, Artificial Sequence
  ENSG00000106263_30 (sequence is synthesized)
cctttcaggcagtgctgggtgagggaggagctgtggccaggtgttgggaagtgccaggaagaggagggtggccatgcctggccatttcctgatacctgtgctagtgacggccgcggtgtg

SEQ ID NO: 155595 - DNA, 120 bp, Artificial Sequence
  ENSG00000106263_31 (sequence is synthesized)
aggactgtgagccctcaccatgaatagtcatctccaggtcacagaacgtgtttagagcctgggcaacatagtgagaccctctctgtacaaaaaacaaataaaaaaaattagccaggtgtg

SEQ ID NO: 155596 - DNA, 90 bp, Artificial Sequence
  ENSG00000106263_32 (sequence is synthesized)
aaattagccaggtgtggtggtgcgcaccgatagtcccagctgtttgagacgctgaagcgggaggatcacttgagcccaggacctgcactc

SEQ ID NO: 155597 - DNA, 120 bp, Artificial Sequence
  ENSG00000106263_33 (sequence is synthesized)
ggacatactcctgccagtccccagtctgggtcaggtgcctttgaccagggtgcgcagagctgttgcacacagctgtactctgcccccgtgcacccggttccaggggtgccacactgcacc

SEQ ID NO: 155598 - DNA, 120 bp, Artificial Sequence
  ENSG00000106263_34 (sequence is synthesized)
cacctggggctcgctcctcacagtggtgcgtgggccctcgcctgtctcacggcacctgctgcctgtgccctcagctcctcacttcatcctggggtctctgctcagcacagagcccggtgc

SEQ ID NO: 155599 - DNA, 120 bp, Artificial Sequence
  ENSG00000106263_35 (sequence is synthesized)
ccgcggggattgaatgagccattgcttgttgcttcataggcgtggggtgtgtgtgtgtggtagccaggaggtggcgatgggctgtgttcctcacacaggactctggctgccagctgccct

SEQ ID NO: 155600 - DNA, 120 bp, Artificial Sequence
  ENSG00000106263_36 (sequence is synthesized)
cctgcagagccatgggtttggctctgtaccaggaaggggttggaatctcctggccgcacctttcgcagcatgattctgtgaggagtttagttttcactttgctagagcttggcagggtgc

SEQ ID NO: 155601 - DNA, 120 bp, Artificial Sequence
  ENSG00000106263_37 (sequence is synthesized)
gtggtgccctcagttggcagtggattacaagattggctgtttcattaattctggttgatagaaacatatgggcaattgcagactgtccagagacttgtgtaagtcttctaggtcataaaa

SEQ ID NO: 155602 - DNA, 120 bp, Artificial Sequence
  ENSG00000106263_38 (sequence is synthesized)
cataggcaagcagaggcaccttgtaccttccaaacatgctgcgtgacacgcctctcctgaggtttggcatggacgctggggccaccgcatgggctccatcccatgcccgtggctgttggg

SEQ ID NO: 155603 - DNA, 120 bp, Artificial Sequence
  ENSG00000106263_39 (sequence is synthesized)
gttttcgcttgtgcaagtctgagacccctgcccctgccagggtgcactgccctcccacatctcctcccctcctccccacgtcagcctgccccatgcctcttttttggatgtaccacaggc

SEQ ID NO: 155604 - DNA, 120 bp, Artificial Sequence
  ENSG00000106263_40 (sequence is synthesized)
tgaggggagagaggccacaggttgtcagctctgtttgagatgcagggagcatatgctctgagggggacttgagccagccccagctggccttcacttctcactgttccagcggctctgccc

SEQ ID NO: 155605 - DNA, 120 bp, Artificial Sequence
  ENSG00000106263_41 (sequence is synthesized)
gagatccattccggaagtaagagttagtacctgcaaagatgatgactgtagtcagtttcaacaagcatacagcttatccaaagacgccttgtcgctaggagagtggctttggtcttttgg

SEQ ID NO: 155606 - DNA, 120 bp, Artificial Sequence
  ENSG00000106263_42 (sequence is synthesized)
ggtcacacgtctctgacatctctctgttggggtccctgcagcagtgaacatttgctgtaaagggaattctttgtccagttacctcaggaaataagatagtattgttttgaaatacccctg

SEQ ID NO: 155607 - DNA, 120 bp, Artificial Sequence
  ENSG00000106263_43 (sequence is synthesized)
tcgcatcttcttttttttcccatttaaagtatggatcatgacttagggggtacttggcgatggactttgtaaaattgttttccgaggtggtccagcattaccagctctgccctcatgggc

SEQ ID NO: 155608 - DNA, 120 bp, Artificial Sequence
  ENSG00000106263_44 (sequence is synthesized)
agcatgagcacggccaagtcctccagccttggctgccccggcactgtggaagccctcgcagctcgtgacaggcgcgctctttcctttcagagatgttcgacaagcagcaggcgaacacca

SEQ ID NO: 155609 - DNA, 120 bp, Artificial Sequence
  ENSG00000106263_45 (sequence is synthesized)
tcttctggagcccccaaggacagttcgtggtgttggcgggcctgaggaggtaggtgtctgcgctctgagcctgtccgccctgtgagtagcgctctgctgtggcagagacccctcaggcgc

SEQ ID NO: 155610 - DNA, 120 bp, Artificial Sequence
  ENSG00000106263_46 (sequence is synthesized)
ctgcacccggcttcttggtagagagagtattgtgcgctgaaagggttgccccagtgtcagtggataggacttcattgaacctctgcagacccacggtactccaggactcaggccaagccc

SEQ ID NO: 155611 - DNA, 120 bp, Artificial Sequence
  ENSG00000106263_47 (sequence is synthesized)
gcacagagtgaaataagcgctcccagatgctttcgtgaagtgaccaggcagacctgtctgcgggttgtggttctctgtggttaaacaagtgccttccagccatccagtaacctccccccg

SEQ ID NO: 155612 - DNA, 120 bp, Artificial Sequence
  ENSG00000106263_48 (sequence is synthesized)
ggaagggtattcgttacacagctgtgaggctgccttacctttgtggttggtgtcacggtgtcggtctcagctgtgttccagcagtgtgtcgaaatcatggagaagcttccagctttctgc

SEQ ID NO: 155613 - DNA, 120 bp, Artificial Sequence
  ENSG00000106263_49 (sequence is synthesized)
tctgagttaaaagaatacccttttgttgctgctctcccttgcttcattgtccacacttgctactgtatttttggaggcttacttagcctcagataacatttccagtaaaaataatatgat

SEQ ID NO: 155614 - DNA, 120 bp, Artificial Sequence
  ENSG00000106263_50 (sequence is synthesized)
ggcagtcatatgtaatactcactgcacactctgcatctgtgatttggtaagtctcacagcggccaccagaggctgttgctgtgcttgtttccatgttaacgccgaggctggctccctggg

SEQ ID NO: 155615 - DNA, 120 bp, Artificial Sequence
  ENSG00000106263_51 (sequence is synthesized)
caaaggcggggctgcggggagctgctgtgtatgtgctcagagttgcctctgctccgaagacactggttctgttcccccccaggagggatgcactggggaactggggttggcacggggact

SEQ ID NO: 155616 - DNA, 120 bp, Artificial Sequence
  ENSG00000106263_52 (sequence is synthesized)
tggagttggtgacctcactgctgccttgtgggtggggggcagcgttgggggaaaagtgagaatgaatggactagccattcctgcttgagtgcctctgtatgctgtccttctggcaccgtc

SEQ ID NO: 155617 - DNA, 120 bp, Artificial Sequence
  ENSG00000106263_53 (sequence is synthesized)
cgcctgggtgtgggctcttcgcgatggggaggcacttgtcttaccagttctgtgctttccccaacctcatgcataggaattggtggagagaaggcgcaccatgatggaagatttccggaa

SEQ ID NO: 155618 - DNA, 120 bp, Artificial Sequence
  ENSG00000106263_54 (sequence is synthesized)
gtgttctgtgaatgaccctgggtgtcaaggaggaaggagcaggcgcgagcgctcctgggaagccgtgttgtgtgaatgaccctgggtgtcgaggaaggagaaggcgcgagcactgctggg

SEQ ID NO: 155619 - DNA, 120 bp, Artificial Sequence
  ENSG00000106263_55 (sequence is synthesized)
atgccgtgttctgtgaatgaccctgggtgtcatggaggaaggagcaggcgcgagctctcctgggatgctgtgttctgtgaatgaccctgggtgtcatggaggaaggagcaggcacgagcg

SEQ ID NO: 155620 - DNA, 120 bp, Artificial Sequence
  ENSG00000106263_56 (sequence is synthesized)
ctcctgggatgctgtgttctgtgaatgaccctgggtgtcatggaggaaggagcaggcgcgagctctcctgggaatccgtgttctgtgaatgaccctgggtgtcaaggaggaaggagcagg

SEQ ID NO: 155621 - DNA, 120 bp, Artificial Sequence
  ENSG00000106263_57 (sequence is synthesized)
cgcgagcgctcctgggaagccgtgttgtgtgaatgaccctgggtgtcgaggaaggagaaggcgcgagcactgctgggatgctgtgttgtgtgaatgaccctcggtgtcatggaggaagga

SEQ ID NO: 155622 - DNA, 120 bp, Artificial Sequence
  ENSG00000106263_58 (sequence is synthesized)
acaggcgagcgttcctgggatgctgtgttgtgtgaatgacccttggtgtcatggaggaaggaacaggcgagcgctcctgggatgctgtgttgtgtgaatgaccctgggtgtcatggagga

SEQ ID NO: 155623 - DNA, 120 bp, Artificial Sequence
  ENSG00000106263_59 (sequence is synthesized)
aggagcaggcgcgagcgctcctgggaagctgtgttgtgtgaatgaccctgggtgtcatggaggaaggagcaggcgcgagtgctgctgggaagctgtgttgtgtgaatgaccctgggtgtc

SEQ ID NO: 155624 - DNA, 120 bp, Artificial Sequence
  ENSG00000106263_60 (sequence is synthesized)
atggagaaaggagcatgcgagcgctcctgggaagctgtgttctgtgaatggctttgggtgtcatgtcatgttggcaactctgaagattgcatttgtgcttgttgctttgaatgttaaatc

SEQ ID NO: 155625 - DNA, 120 bp, Artificial Sequence
  ENSG00000106263_61 (sequence is synthesized)
caagagccttccaagtcgggggctggggagcagagtgcgggagctcctgagtcctgggggcctccgcgcctcacagcatgggcacatgtgggacagaaggcctaatggggtgcctgaggg

SEQ ID NO: 155626 - DNA, 120 bp, Artificial Sequence
  ENSG00000106263_62 (sequence is synthesized)
tggcctggttgctgtccccccagggtgggaccatgagcgagtaggggtggcacacgggctcagctctctgtggccggggtggctcctcttgcgggactcaacgtcagccccaaggcgatg

SEQ ID NO: 155627 - DNA, 120 bp, Artificial Sequence
  ENSG00000106263_63 (sequence is synthesized)
ctatgggtcttttggacaagaagagtttgaagatctctgggataaagtgagtattcttatcagtttggtgtcttagtgtgttcaggctgcttaacacaataccaaaaaaaaaaaaaaaaa

SEQ ID NO: 155628 - DNA, 120 bp, Artificial Sequence
  ENSG00000106263_64 (sequence is synthesized)
gatggaggcactgatacttgaactagtccatgccaatagagcctgtgaaaccaaacgcgggtaattttgtttaatgagatacagaatttgtaggaatatcaacttcccaaatgttactgc

SEQ ID NO: 155629 - DNA, 120 bp, Artificial Sequence
  ENSG00000106263_65 (sequence is synthesized)
aagtgtctagagttagaaatcttcgcattcgaatcaggatatgttgatcacagcctgtgtccaggtatgttcagatgtcactgcggtggggcctgccttgacacttgaaatcactttagg

SEQ ID NO: 155630 - DNA, 120 bp, Artificial Sequence
  ENSG00000106263_66 (sequence is synthesized)
acacctgtaatcccagcacttcaggaggcagaggtagaaaaatcacttgaacccaggagtttgagactagcctgagcaacatagcgaaaccctagccccattaaaaaaaaaaaaaaaaaa

SEQ ID NO: 155631 - DNA, 120 bp, Artificial Sequence
  ENSG00000106263_67 (sequence is synthesized)
aaaaaaaaaaaaaaaaaagactttttaagctgttgaccactctccttgagttatgaacacttagcttccaaaatgccggcctgcaacaaggagtttatgctgagtgccagtgaaggcgcc

SEQ ID NO: 155632 - DNA, 120 bp, Artificial Sequence
  ENSG00000106263_68 (sequence is synthesized)
ctccttcatgagagaggcctgccatgaggagagcggaactaggcggcgtgtagtgatgcagttagcttacatccagcacagggctccgcacagctcacacccggcccagggctcagcagt

SEQ ID NO: 155633 - DNA, 120 bp, Artificial Sequence
  ENSG00000106263_69 (sequence is synthesized)
gagtagtgctatgcagttagcttacgtttggcacagggttcagtccagtttaaatccagcacggggttcagcggcgcagtagtgaggcagttagcttacatccagcatggggttcttatt

SEQ ID NO: 155634 - DNA, 120 bp, Artificial Sequence
  ENSG00000106263_70 (sequence is synthesized)
gccagccagaatgtgcaggcctgtgctgtgatgagcgctgctccagctgctccgtgccccgcactccgggtcggttgcataatggaggtgtcttgcattgactgcccacctaccctgctg

SEQ ID NO: 155635 - DNA, 120 bp, Artificial Sequence
  ENSG00000106266_0 (sequence is synthesized)
acgtgggagcgcgggctcacatgactggccgcgcgatggacccgctgcccgcggctgcagtcggggcggcagctgaggcggaggctgacgaggaggcggatcccccggcgtcagatctgc

SEQ ID NO: 155636 - DNA, 120 bp, Artificial Sequence
  ENSG00000106266_1 (sequence is synthesized)
cgacaccccaggccatcgagccccaggccatcgtgcagcaggtcccagcccccagtcgaatgcagatgccgcaggggaacccgctgctgctgtcccacaccctgcaggagctgctggcca

SEQ ID NO: 155637 - DNA, 120 bp, Artificial Sequence
  ENSG00000106266_2 (sequence is synthesized)
gggacaccgtgcaggtggagctcattccggagaagaagggcctcttcctgaagcatgtggagtatgaggtttccagccagcgcttcaagtcctcggtatacagacggtacaatgacttcg

SEQ ID NO: 155638 - DNA, 120 bp, Artificial Sequence
  ENSG00000106266_3 (sequence is synthesized)
tggtcttccaggagatgctcctgcacaagttcccctaccgtatggtgcctgccctgccacccaagagaatgctgggagctgacagggagttcatcgaggccaggaggagagccctgaagc

SEQ ID NO: 155639 - DNA, 120 bp, Artificial Sequence
  ENSG00000106266_4 (sequence is synthesized)
gcttcgtcaacctggtggcgcgacaccccctgttctccgaggatgtggtcctcaagctcttcctgtccttcagcggctcggatgtgcagaacaagttaaaggagtcagcacagtgcgtcg

SEQ ID NO: 155640 - DNA, 120 bp, Artificial Sequence
  ENSG00000106266_5 (sequence is synthesized)
gggacgaattcctgaactgtaagctggctaccagggccaaggacttcctcccagctgacatccaggctcagtttgccatcagccgggagctgatccggaacatctacaatagctttcaca

SEQ ID NO: 155641 - DNA, 120 bp, Artificial Sequence
  ENSG00000106266_6 (sequence is synthesized)
agcttcgcgacagggccgagcggatcgcatcgcgggccatcgacaatgcggcagatcttctcatattcgggaaggagctaagtgcaatagggtctgacacgaccccgctgccctcctggg

SEQ ID NO: 155642 - DNA, 120 bp, Artificial Sequence
  ENSG00000106266_7 (sequence is synthesized)
ccgctctgaatagcagcacgtgggggtccctgaagcaggctctgaaaggcctgtctgtggaattcgcgctgctcgccgacaaggctgcacaacagggtaagcaggaagagaacgacgtgg

SEQ ID NO: 155643 - DNA, 120 bp, Artificial Sequence
  ENSG00000106266_8 (sequence is synthesized)
tggagaagctgaacctcttcttggatctgctgcagtcctataaggacctgtgcgagcggcatgagaagggcgtgttgcacaagcaccagcgggccctgcacaagtacagcctgatgaaga

SEQ ID NO: 155644 - DNA, 120 bp, Artificial Sequence
  ENSG00000106266_9 (sequence is synthesized)
ggcagatgatgagcgccaccgcgcagaaccgcgagccggagtccgtggagcagctggagtcccgcattgtggagcaggagaacgcgattcagacgatggagctgcggaactacttctccc

SEQ ID NO: 155645 - DNA, 120 bp, Artificial Sequence
  ENSG00000106266_10 (sequence is synthesized)
tgtactgcctgcaccaggagacgcagctcatccacgtctacctgcccctcacctcccacatcctccgcgccttcgtcaactctcagatccaagggcacaaggagatgagcaaggtgtgga

SEQ ID NO: 155646 - DNA, 120 bp, Artificial Sequence
  ENSG00000106266_11 (sequence is synthesized)
acgacctgaggcccaagctcagctgcctctttgcgggaccacacagcaccctgaccccaccgtgctccccgccggaggacggcctgtgtcctcactagcgcctgaggctgaggtggtgct

SEQ ID NO: 155647 - DNA, 120 bp, Artificial Sequence
  ENSG00000106266_12 (sequence is synthesized)
ccctgcggccgcactaaaacctctttccaaacggtgtgtcccggtgtaattccctttggacggcagctcccctccccgccacgccccgtgctgcagctggagcagaggagctcacgcctg

SEQ ID NO: 155648 - DNA, 120 bp, Artificial Sequence
  ENSG00000106266_13 (sequence is synthesized)
cgggtcgggaggcgcatccgtggaccatgggggcagctgggccacactgtccttcgccctgtggcctgctagcctggtcgagagaggtggtggggttctctggaatggtttcctcctgac

SEQ ID NO: 155649 - DNA, 120 bp, Artificial Sequence
  ENSG00000106266_14 (sequence is synthesized)
acccagagctgtgcggggaggcagggatctctcatctcacagagattgtgcctgggggagcgtggaggcagggcctccaggtgctggaacagtcgggaggggcagcatcatggtgctcgg

SEQ ID NO: 155650 - DNA, 120 bp, Artificial Sequence
  ENSG00000106266_15 (sequence is synthesized)
tcagccgaggagagagggcagggctgccctgcagcccaggcatgggactgaccacggacagcgaggggacagccagtggtgctgaggctgggagggagggccattgggcgtggggcacgc

SEQ ID NO: 155651 - DNA, 120 bp, Artificial Sequence
  ENSG00000106266_16 (sequence is synthesized)
acggtgaattttctagggaaattgctgcagtcaacacctggagccctggtctgggagtggcctgtggggtccagtggcctcatgccctgtgcccatatgatgaccccatgtgtgcctgtg

SEQ ID NO: 155652 - DNA, 120 bp, Artificial Sequence
  ENSG00000106266_17 (sequence is synthesized)
tccacaccatgaccctgtgtgtgcccaggcctggaagacaaaggcgtgacggagagctggggctctgagagtgggcgctacagcagctgtgttctcgtcccctggactcccttgatttct

SEQ ID NO: 155653 - DNA, 120 bp, Artificial Sequence
  ENSG00000106266_18 (sequence is synthesized)
ggtggccagtgttggggtctgcaccgtgtggcactgaggctggatgggctggcagaggacaggtgggggcgtgggggggcgtgttccattccagctgaggctttagaggagggacagccc

SEQ ID NO: 155654 - DNA, 120 bp, Artificial Sequence
  ENSG00000106266_19 (sequence is synthesized)
gaggcacctagagccctcctcccagcctcccgtcacgcacttgccggcccagccacctgctcacagagggaaccagtggtctttcaggccccttccctgctctggatgaagaaggccatt

SEQ ID NO: 155655 - DNA, 120 bp, Artificial Sequence
  ENSG00000106266_20 (sequence is synthesized)
ctcctgagctctgtggggctggactgtccgcctcaggcctgggtctgcttctgcccgaaccccttttgtggaaggtacatgggagcccagtggacccctgcacttctccggagcctgacg

SEQ ID NO: 155656 - DNA, 120 bp, Artificial Sequence
  ENSG00000106266_21 (sequence is synthesized)
cccctccctggccggggaggggtgctggaagaggcccgccgggctccagggtttccgaggtccctccgctccgcagatgctcactggcctctggggcgttcactcctctcacggagggtg

SEQ ID NO: 155657 - DNA, 120 bp, Artificial Sequence
  ENSG00000106266_22 (sequence is synthesized)
cttcccttccgcctgtacctacgggcagctcacggccgtgggatggagaggggactcctgtgtgtgccccgcaggcaggtgatccatcgtccactgcgagccggccagagggaacggccg

SEQ ID NO: 155658 - DNA, 120 bp, Artificial Sequence
  ENSG00000106266_23 (sequence is synthesized)
tgccttctggccccgtgggctgtgctgactcggtggctgtggggctcgggcccagcctgccctgccctgtgggttctgctgctgccttcctgctgtgaggtgggctgcttccttctggcc

SEQ ID NO: 155659 - DNA, 120 bp, Artificial Sequence
  ENSG00000106266_24 (sequence is synthesized)
agatgagcagagggcagcgttccctttggagcccgatgggtgggctgtcccgtgagtccctagtccacccgagtcttgggctgcgctgccttctgacgcccctctgcagagacaggttct

SEQ ID NO: 155660 - DNA, 120 bp, Artificial Sequence
  ENSG00000106266_25 (sequence is synthesized)
cagttgccatgaatggcaccatgacacccgagccatgaagcgtgaccccgtgtgggcagaaggctgcaaggcctctccgtccaccccgcaccttcctggggcctgtccagctgcaggacc

SEQ ID NO: 155661 - DNA, 120 bp, Artificial Sequence
  ENSG00000106266_26 (sequence is synthesized)
atagaggctgtggggagtcgtggagggcatcaggtgctggggcctctgtgtctccagagtaggcaaggcacgcgctcctgacagcccccaaggattgagcaagacttcagaatgagcttt

SEQ ID NO: 155662 - DNA, 120 bp, Artificial Sequence
  ENSG00000106266_27 (sequence is synthesized)
tctgaaggagctttcctggcagggactccggggtcagtgagtgtatgagaggccacatacctggcggcatctccctgtgttggaaacttcaagagcagggtctcagggtcctcatgtcca

SEQ ID NO: 155663 - DNA, 120 bp, Artificial Sequence
  ENSG00000106266_28 (sequence is synthesized)
gaggctgaggatggaggtggaaggctggagggcaggggtgaggagggagcaggagggcaggagttgggggagcaggagggcaggggtcaggagaacaggagaacaggggtaagggagggc

SEQ ID NO: 155664 - DNA, 120 bp, Artificial Sequence
  ENSG00000106266_29 (sequence is synthesized)
aggggtgagggggagcagaagagggatgagggggagcaggagggcaggcgttgggacaggagggcaggggtgagagagcaagggggcaggggtgagagagcaggagagcaggggtgagga

SEQ ID NO: 155665 - DNA, 120 bp, Artificial Sequence
  ENSG00000106266_30 (sequence is synthesized)
gagcaggagagtaggggtgatggggaataggagggcaggggtgaggagggagcaggagaacgggtaagggagggcaggggtgagggggagcaggagggcaggggtgaggagagagcaaga

SEQ ID NO: 155666 - DNA, 120 bp, Artificial Sequence
  ENSG00000106266_31 (sequence is synthesized)
gggcaggggtgaggagagcaagagggcaggggtgggaaggcaggagggaggtgggggggcaggaaggcaggggtgggagggtcaggagggcagggtgaagggggggctggagggcagcgg

SEQ ID NO: 155667 - DNA, 120 bp, Artificial Sequence
  ENSG00000106266_32 (sequence is synthesized)
tgacgagggcagcctgtctcccacgtgtggtggctgcttcctgtgtgccctggggttggctctgtggaggggtgggcactggctttggaacacctccctccccttcctcctctgccaccc

SEQ ID NO: 155668 - DNA, 120 bp, Artificial Sequence
  ENSG00000106266_33 (sequence is synthesized)
agtgccttctaaagggcagcagaaagaggcctgctaggcaggggtggcggaggccaccttccttctcacaaatacttcttggccctggccctgtgctgcccgggcaggtccccaggctca

SEQ ID NO: 155669 - DNA, 120 bp, Artificial Sequence
  ENSG00000106266_34 (sequence is synthesized)
ggggctgagaggctgcttactgctgcaggtggaggccccatgccggagggagagcggggttccccccatgcctctccagccctcctgctgcccacggcccaagcccaagcttgtgccggt

SEQ ID NO: 155670 - DNA, 120 bp, Artificial Sequence
  ENSG00000106266_35 (sequence is synthesized)
cattacggccttgcctagctggcagggacagctgcgtgtgatgctggtggagatgccagatgccgcctgccctgtgaggacggctggcggggccgtgggaggggggttgtgggctggcgg

SEQ ID NO: 155671 - DNA, 120 bp, Artificial Sequence
  ENSG00000106266_36 (sequence is synthesized)
ggctgtgggaagggggctgccgatcatggtgaaaggggacattttcattgggtcctcgtggtccgtgtcctgggtactcggggtcaccgtgcagacagctgccctttgtctgccggacac

SEQ ID NO: 155672 - DNA, 120 bp, Artificial Sequence
  ENSG00000106266_37 (sequence is synthesized)
agtgcaggcaggggagacaggtttagggctctgacatggggcacagggactccgagccaagggatgtcagggcagctctgtgcatctgaggcctttgcccttgctttgcgggtcagttca

SEQ ID NO: 155673 - DNA, 120 bp, Artificial Sequence
  ENSG00000106266_38 (sequence is synthesized)
tgtccaaagcactttaggaggctgcagggatcaatacccaatatacccaacaactggaattgtttacacatgacctacattttggacggtttatcaataaacatgtgtgaacaactgtta

SEQ ID NO: 155674 - DNA, 120 bp, Artificial Sequence
  ENSG00000106266_39 (sequence is synthesized)
gtgtcattgaggcaggtccagggcctttgctgaccctcggggctccttcacccctgccccgagccttcccctcttgcctgggcgacttccatgcaccctgggctcccatcaacccttacc

SEQ ID NO: 155675 - DNA, 120 bp, Artificial Sequence
  ENSG00000106266_40 (sequence is synthesized)
aaaaggacagactacttcaaaatagaaaaggaattcggggcgagccagagagggcccacacgactagaaggacgactgcctggcgcgatacaaaaatggtctccttgtgttgcccgggct

SEQ ID NO: 155676 - DNA, 120 bp, Artificial Sequence
  ENSG00000106266_41 (sequence is synthesized)
cctcaagtgatctgcctgcctcggcctctgaaagtgtggggattacaggcatgacccgtcacaccgggctggaatgcacggatcttatatgctacaaattaaagaatcttcacagctacg

SEQ ID NO: 155677 - DNA, 120 bp, Artificial Sequence
  ENSG00000106266_42 (sequence is synthesized)
aagacggggccttccgtctggcgggggtgcttccctcggccggctccgcagggccctggcgcaggcatccagacagcgggcgaatgcctcccccggccccgcaggacctgtgcgagcggc

SEQ ID NO: 155678 - DNA, 120 bp, Artificial Sequence
  ENSG00000106266_43 (sequence is synthesized)
agggagcgagcccatctcctggaccctgtggtcctggctcagggatggaccccactgtagaccggggcaggtgcagggctgcgggggaaactccagccttttggcatctgggacagagct

SEQ ID NO: 155679 - DNA, 120 bp, Artificial Sequence
  ENSG00000106266_44 (sequence is synthesized)
gttagcaagaaagtgatgtgttccgggtaggggaattctgttttggtattattttgtctttcctgagaaaagcatcacaaaaagagatgtttgcccatcctgtttgctggggtagtggga

SEQ ID NO: 155680 - DNA, 120 bp, Artificial Sequence
  ENSG00000106268_0 (sequence is synthesized)
agggctttctgtatccctaggtttcttgccttgatgtactggagcaatcagatcacacggcggcttggagaaacccagggaccatgggcgcctccaggctctataccctggtgctggtcc

SEQ ID NO: 155681 - DNA, 120 bp, Artificial Sequence
  ENSG00000106268_1 (sequence is synthesized)
tgcagcctcagcgagttctcctgggcatgaaaaagcgaggcttcggggccggccggtggaatggctttgggggcaaagtgcaagaaggagagaccatcgaggatggggctaggagggagc

SEQ ID NO: 155682 - DNA, 120 bp, Artificial Sequence
  ENSG00000106268_2 (sequence is synthesized)
ttctgcacagacagcatccaggggacccccgtggagagcgacgaaatgcgcccatgctggttccagctggatcagatccccttcaaggacatgtggcccgacgacagctactggtttcca

SEQ ID NO: 155683 - DNA, 120 bp, Artificial Sequence
  ENSG00000106268_3 (sequence is synthesized)
ctcctgcttcagaagaagaaattccacgggtacttcaagttccagggtcaggacaccatcctggactacacactccgcgaggtggacacggtctagcgggagcccagggcagcccctggg

SEQ ID NO: 155684 - DNA, 120 bp, Artificial Sequence
  ENSG00000106268_4 (sequence is synthesized)
caggagacgtggctgctgaacagccgcaaaccatcttcacctgggggcattgagtggcgcagagccgggtttcatctggaattaactggatggaagggaaaataaagctatctagcggtg

SEQ ID NO: 155685 - DNA, 120 bp, Artificial Sequence
  ENSG00000106268_5 (sequence is synthesized)
cagagcacgtccccttcctcctggcccctggcacgtgcttcctccacgcacgtcatggctgactctgccctctcaccttcctttcagaacccagggaccatgggcgcctccaggctctat

SEQ ID NO: 155686 - DNA, 120 bp, Artificial Sequence
  ENSG00000106268_6 (sequence is synthesized)
agcctgtggtttcatcctgtgttctcagagaagaggcaccaggctggaaagacatttctttgggcagacaggcccagagtatagggcccaggttcccagagcaagcgtcccagggccccg

SEQ ID NO: 155687 - DNA, 120 bp, Artificial Sequence
  ENSG00000106268_7 (sequence is synthesized)
gcggtcgtaactaccgctgcatgggctctgatgctcagccgcggaaaagcaagtaaccgggaatgaaggaagtggggtcagtcccaaccctgccacgtgcgggtctcgagacggtggaca

SEQ ID NO: 155688 - DNA, 120 bp, Artificial Sequence
  ENSG00000106268_8 (sequence is synthesized)
agtggctggactccactgggcctgggctgtcactggtacacagagggcactgggctagaactgcgttcctcccaccagaggctccacaccatctccgggcccctccccagagcctctcaa

SEQ ID NO: 155689 - DNA, 120 bp, Artificial Sequence
  ENSG00000106268_9 (sequence is synthesized)
gattccaggagtcgtggtgaccagggaggggagccgggccagcgggcggcaggagactaggggagctgagccatgggcttgggggagagcggggccgggagctcgaaggagaccagaaga

SEQ ID NO: 155690 - DNA, 120 bp, Artificial Sequence
  ENSG00000106268_10 (sequence is synthesized)
gcagggtcgggggctcgagggagacgaggagagcggggccgggggtttgggagagagacaaggagagcggggcggaggcttgggggagaccaggagtaaatcacaaaaatttactttgga

SEQ ID NO: 155691 - DNA, 120 bp, Artificial Sequence
  ENSG00000106268_11 (sequence is synthesized)
aaccgtggcttctggcagaaacagatcagtgtcgggacaaagtacacgggcctggtgtgaaactaagccacaaacccatttaccctgtctgacctgcctccgccaccaggacccagtctc

SEQ ID NO: 155692 - DNA, 120 bp, Artificial Sequence
  ENSG00000106268_12 (sequence is synthesized)
cacggcagtgtctaggggtgaatgtttgcagctcctgaagccccagcaggcatgtgttagagggtgctctttcagtttagccttgtaggtggcttgtgttagtcagctgttagactccct

SEQ ID NO: 155693 - DNA, 120 bp, Artificial Sequence
  ENSG00000106268_13 (sequence is synthesized)
agggctttctgtatccctaggtttcttgccttgatgtactggagcaatcagatcacacggcggcttggagagtgagtgcaaggttttatgagtggaattagccctcagcagatgggggag

SEQ ID NO: 155694 - DNA, 120 bp, Artificial Sequence
  ENSG00000106268_14 (sequence is synthesized)
tcctgcagcctcagcgagttctcctgggcatgaaaaagcgaggcttcggggccggccggtggaatggctttgggggcaaagtgcaagaaggagagaccatcgaggatggggctaggagtc

SEQ ID NO: 155695 - DNA, 74 bp, Artificial Sequence
  ENSG00000106268_15 (sequence is synthesized)
ggatggggctaggagtccctgcagtttaagctgaggaggcatcgcttaaatcagaccatttagaccagcagaag

SEQ ID NO: 155696 - DNA, 120 bp, Artificial Sequence
  ENSG00000106278_0 (sequence is synthesized)
agaccgcggccgccgcagccggcgaaagaggcaaagtcccgcacgccggaggacatgcgcctcggctagcggccccgggccccaccaccgtgcggctttctccagattattcctctctcg

SEQ ID NO: 155697 - DNA, 82 bp, Artificial Sequence
  ENSG00000106278_1 (sequence is synthesized)
tacgcacgcacgatctcacttcgatctatacactggaggattaaaacaaacaaacaaaaaaaacatttccttcgctccccct

SEQ ID NO: 155698 - DNA, 120 bp, Artificial Sequence
  ENSG00000106278_2 (sequence is synthesized)
aaaacaaacaaacaaaaaaaacatttccttcgctccccctccctctccactctgagaagcagaggagccgcacggcgaggggccgcagaccgtctggaaatgcgaatcctaaagcgtttc

SEQ ID NO: 155699 - DNA, 120 bp, Artificial Sequence
  ENSG00000106278_3 (sequence is synthesized)
ctcgcttgcattcagctcctctgtgtttgccgcctggattgggctaatggatactacagacaacagagaaaacttgttgaagagattggctggtcctatacaggagcactgaatcaaaaa

SEQ ID NO: 155700 - DNA, 120 bp, Artificial Sequence
  ENSG00000106278_4 (sequence is synthesized)
aattggggaaagaaatatccaacatgtaatagcccaaaacaatctcctatcaatattgatgaagatcttacacaagtaaatgtgaatcttaagaaacttaaatttcagggttgggataaa

SEQ ID NO: 155701 - DNA, 120 bp, Artificial Sequence
  ENSG00000106278_5 (sequence is synthesized)
acatcattggaaaacacattcattcataacactgggaaaacagtggaaattaatctcactaatgactaccgtgtcagcggaggagtttcagaaatggtgtttaaagcaagcaagataact

SEQ ID NO: 155702 - DNA, 120 bp, Artificial Sequence
  ENSG00000106278_6 (sequence is synthesized)
tttcactggggaaaatgcaatatgtcatctgatggatcagagcatagtttagaaggacaaaaatttccacttgagatgcaaatctactgctttgatgcggaccgattttcaagttttgag

SEQ ID NO: 155703 - DNA, 120 bp, Artificial Sequence
  ENSG00000106278_7 (sequence is synthesized)
gaagcagtcaaaggaaaagggaagttaagagctttatccattttgtttgaggttgggacagaagaaaatttggatttcaaagcgattattgatggagtcgaaagtgttagtcgttttggg

SEQ ID NO: 155704 - DNA, 120 bp, Artificial Sequence
  ENSG00000106278_8 (sequence is synthesized)
aagcaggctgctttagatccattcatactgttgaaccttctgccaaactcaactgacaagtattacatttacaatggctcattgacatctcctccctgcacagacacagttgactggatt

SEQ ID NO: 155705 - DNA, 120 bp, Artificial Sequence
  ENSG00000106278_9 (sequence is synthesized)
gtttttaaagatacagttagcatctctgaaagccagttggctgttttttgtgaagttcttacaatgcaacaatctggttatgtcatgctgatggactacttacaaaacaattttcgagag

SEQ ID NO: 155706 - DNA, 120 bp, Artificial Sequence
  ENSG00000106278_10 (sequence is synthesized)
caacagtacaagttctctagacaggtgttttcctcatacactggaaaggaagagattcatgaagcagtttgtagttcagaaccagaaaatgttcaggctgacccagagaattataccagc

SEQ ID NO: 155707 - DNA, 120 bp, Artificial Sequence
  ENSG00000106278_11 (sequence is synthesized)
cttcttgttacatgggaaagacctcgagtcgtttatgataccatgattgagaagtttgcagttttgtaccagcagttggatggagaggaccaaaccaagcatgaatttttgacagatggc

SEQ ID NO: 155708 - DNA, 120 bp, Artificial Sequence
  ENSG00000106278_12 (sequence is synthesized)
tatcaagacttgggtgctattctcaataatttgctacccaatatgagttatgttcttcagatagtagccatatgcactaatggcttatatggaaaatacagcgaccaactgattgtcgac

SEQ ID NO: 155709 - DNA, 120 bp, Artificial Sequence
  ENSG00000106278_13 (sequence is synthesized)
atgcctactgataatcctgaacttgatcttttccctgaattaattggaactgaagaaataatcaaggaggaggaagagggaaaagacattgaagaaggcgctattgtgaatcctggtaga

SEQ ID NO: 155710 - DNA, 120 bp, Artificial Sequence
  ENSG00000106278_14 (sequence is synthesized)
gacagtgctacaaaccaaatcaggaaaaaggaaccccagatttctaccacaacacactacaatcgcatagggacgaaatacaatgaagccaagactaaccgatccccaacaagaggaagt

SEQ ID NO: 155711 - DNA, 120 bp, Artificial Sequence
  ENSG00000106278_15 (sequence is synthesized)
gaattctctggaaagggtgatgttcccaatacatctttaaattccacttcccaaccagtcactaaattagccacagaaaaagatatttccttgacttctcagactgtgactgaactgcca

SEQ ID NO: 155712 - DNA, 120 bp, Artificial Sequence
  ENSG00000106278_16 (sequence is synthesized)
cctcacactgtggaaggtacttcagcctctttaaatgatggctctaaaactgttcttagatctccacatatgaacttgtcggggactgcagaatccttaaatacagtttctataacagaa

SEQ ID NO: 155713 - DNA, 120 bp, Artificial Sequence
  ENSG00000106278_17 (sequence is synthesized)
tatgaggaggagagtttattgaccagtttcaagcttgatactggagctgaagattcttcaggctccagtcccgcaacttctgctatcccattcatctctgagaacatatcccaagggtat

SEQ ID NO: 155714 - DNA, 120 bp, Artificial Sequence
  ENSG00000106278_18 (sequence is synthesized)
atattttcctccgaaaacccagagacaataacatatgatgtccttataccagaatctgctagaaatgcttccgaagattcaacttcatcaggttcagaagaatcactaaaggatccttct

SEQ ID NO: 155715 - DNA, 120 bp, Artificial Sequence
  ENSG00000106278_19 (sequence is synthesized)
atggagggaaatgtgtggtttcctagctctacagacataacagcacagcccgatgttggatcaggcagagagagctttctccagactaattacactgagatacgtgttgatgaatctgag

SEQ ID NO: 155716 - DNA, 120 bp, Artificial Sequence
  ENSG00000106278_20 (sequence is synthesized)
aagacaaccaagtccttttctgcaggcccagtgatgtcacagggtccctcagttacagatctggaaatgccacattattctacctttgcctacttcccaactgaggtaacacctcatgct

SEQ ID NO: 155717 - DNA, 120 bp, Artificial Sequence
  ENSG00000106278_21 (sequence is synthesized)
tttaccccatcctccagacaacaggatttggtctccacggtcaacgtggtatactcgcagacaacccaaccggtatacaatggtgagacacctcttcaaccttcctacagtagtgaagtc

SEQ ID NO: 155718 - DNA, 120 bp, Artificial Sequence
  ENSG00000106278_22 (sequence is synthesized)
tttcctctagtcacccctttgttgcttgacaatcagatcctcaacactacccctgctgcttcaagtagtgattcggccttgcatgctacgcctgtatttcccagtgtcgatgtgtcattt

SEQ ID NO: 155719 - DNA, 120 bp, Artificial Sequence
  ENSG00000106278_23 (sequence is synthesized)
gaatccatcctgtcttcctatgatggtgcacctttgcttccattttcctctgcttccttcagtagtgaattgtttcgccatctgcatacagtttctcaaatccttccacaagttacttca

SEQ ID NO: 155720 - DNA, 120 bp, Artificial Sequence
  ENSG00000106278_24 (sequence is synthesized)
gctaccgagagtgataaggtgcccttgcatgcttctctgccagtggctgggggtgatttgctattagagcccagccttgctcagtattctgatgtgctgtccactactcatgctgcttca

SEQ ID NO: 155721 - DNA, 120 bp, Artificial Sequence
  ENSG00000106278_25 (sequence is synthesized)
gagacgctggaatttggtagtgaatctggtgttctttataaaacgcttatgttttctcaagttgaaccacccagcagtgatgccatgatgcatgcacgttcttcagggcctgaaccttct

SEQ ID NO: 155722 - DNA, 120 bp, Artificial Sequence
  ENSG00000106278_26 (sequence is synthesized)
tatgccttgtctgataatgagggctcccaacacatcttcactgtttcttacagttctgcaatacctgtgcatgattctgtgggtgtaacttatcagggttccttatttagcggccctagc

SEQ ID NO: 155723 - DNA, 120 bp, Artificial Sequence
  ENSG00000106278_27 (sequence is synthesized)
catataccaatacctaagtcttcgttaataaccccaactgcatcattactgcagcctactcatgccctctctggtgatggggaatggtctggagcctcttctgatagtgaatttctttta

SEQ ID NO: 155724 - DNA, 120 bp, Artificial Sequence
  ENSG00000106278_28 (sequence is synthesized)
cctgacacagatgggctgacagcccttaacatttcttcacctgtttctgtagctgaatttacatatacaacatctgtgtttggtgatgataataaggcgctttctaaaagtgaaataata

SEQ ID NO: 155725 - DNA, 120 bp, Artificial Sequence
  ENSG00000106278_29 (sequence is synthesized)
tatggaaatgagactgaactgcaaattccttctttcaatgagatggtttacccttctgaaagcacagtcatgcccaacatgtatgataatgtaaataagttgaatgcgtctttacaagaa

SEQ ID NO: 155726 - DNA, 120 bp, Artificial Sequence
  ENSG00000106278_30 (sequence is synthesized)
acctctgtttccatttctagcaccaagggcatgtttccagggtcccttgctcataccaccactaaggtttttgatcatgagattagtcaagttccagaaaataacttttcagttcaacct

SEQ ID NO: 155727 - DNA, 120 bp, Artificial Sequence
  ENSG00000106278_31 (sequence is synthesized)
acacatactgtctctcaagcatctggtgacacttcgcttaaacctgtgcttagtgcaaactcagagccagcatcctctgaccctgcttctagtgaaatgttatctccttcaactcagctc

SEQ ID NO: 155728 - DNA, 120 bp, Artificial Sequence
  ENSG00000106278_32 (sequence is synthesized)
ttattttatgagacctcagcttcttttagtactgaagtattgctacaaccttcctttcaggcttctgatgttgacaccttgcttaaaactgttcttccagctgtgcccagtgatccaata

SEQ ID NO: 155729 - DNA, 120 bp, Artificial Sequence
  ENSG00000106278_33 (sequence is synthesized)
tctgcttcaagtgaaaacatgctgcactctacatctgtaccagtttttgatgtgtcgcctacttctcatatgcactctgcttcacttcaaggtttgaccatttcctatgcaagtgagaaa

SEQ ID NO: 155730 - DNA, 120 bp, Artificial Sequence
  ENSG00000106278_34 (sequence is synthesized)
tatgaaccagttttgttaaaaagtgaaagttcccaccaagtggtaccttctttgtacagtaatgatgagttgttccaaacggccaatttggagattaaccaggcccatcccccaaaagga

SEQ ID NO: 155731 - DNA, 120 bp, Artificial Sequence
  ENSG00000106278_35 (sequence is synthesized)
aggcatgtatttgctacacctgttttatcaattgatgaaccattaaatacactaataaataagcttatacattccgatgaaattttaacctccaccaaaagttctgttactggtaaggta

SEQ ID NO: 155732 - DNA, 120 bp, Artificial Sequence
  ENSG00000106278_36 (sequence is synthesized)
tttgctggtattccaacagttgcttctgatacatttgtatctactgatcattctgttcctataggaaatgggcatgttgccattacagctgtttctccccacagagatggttctgtaacc

SEQ ID NO: 155733 - DNA, 120 bp, Artificial Sequence
  ENSG00000106278_37 (sequence is synthesized)
tcaacaaagttgctgtttccttctaaggcaacttctgagctgagtcatagtgccaaatctgatgccggtttagtgggtggtggtgaagatggtgacactgatgatgatggtgatgatgat

SEQ ID NO: 155734 - DNA, 120 bp, Artificial Sequence
  ENSG00000106278_38 (sequence is synthesized)
gatgatgacagaggtagtgatggcttatccattcataagtgtatgtcatgctcatcctatagagaatcacaggaaaaggtaatgaatgattcagacacccacgaaaacagtcttatggat

SEQ ID NO: 155735 - DNA, 120 bp, Artificial Sequence
  ENSG00000106278_39 (sequence is synthesized)
cagaataatccaatctcatactcactatctgagaattctgaagaagataatagagtcacaagtgtatcctcagacagtcaaactggtatggacagaagtcctggtaaatcaccatcagca

SEQ ID NO: 155736 - DNA, 120 bp, Artificial Sequence
  ENSG00000106278_40 (sequence is synthesized)
aatgggctatcccaaaagcacaatgatggaaaagaggaaaatgacattcagactggtagtgctctgcttcctctcagccctgaatctaaagcatgggcagttctgacaagtgatgaagaa

SEQ ID NO: 155737 - DNA, 120 bp, Artificial Sequence
  ENSG00000106278_41 (sequence is synthesized)
agtggatcagggcaaggtacctcagatagccttaatgagaatgagacttccacagatttcagttttgcagacactaatgaaaaagatgctgatgggatcctggcagcaggtgactcagaa

SEQ ID NO: 155738 - DNA, 120 bp, Artificial Sequence
  ENSG00000106278_42 (sequence is synthesized)
ataactcctggattcccacagtccccaacatcatctgttactagcgagaactcagaagtgttccacgtttcagaggcagaggccagtaatagtagccatgagtctcgtattggtctagct

SEQ ID NO: 155739 - DNA, 120 bp, Artificial Sequence
  ENSG00000106278_43 (sequence is synthesized)
gaggggttggaatccgagaagaaggcagttataccccttgtgatcgtgtcagccctgacttttatctgtctagtggttcttgtgggtattctcatctactggaggaaatgcttccagact

SEQ ID NO: 155740 - DNA, 120 bp, Artificial Sequence
  ENSG00000106278_44 (sequence is synthesized)
gcacacttttacttagaggacagtacatcccctagagttatatccacacctccaacacctatctttccaatttcagatgatgtcggagcaattccaataaagcactttccaaagcatgtt

SEQ ID NO: 155741 - DNA, 120 bp, Artificial Sequence
  ENSG00000106278_45 (sequence is synthesized)
gcagatttacatgcaagtagtgggtttactgaagaatttgagacactgaaagagttttaccaggaagtgcagagctgtactgttgacttaggtattacagcagacagctccaaccaccca

SEQ ID NO: 155742 - DNA, 120 bp, Artificial Sequence
  ENSG00000106278_46 (sequence is synthesized)
gacaacaagcacaagaatcgatacataaatatcgttgcctatgatcatagcagggttaagctagcacagcttgctgaaaaggatggcaaactgactgattatatcaatgccaattatgtt

SEQ ID NO: 155743 - DNA, 120 bp, Artificial Sequence
  ENSG00000106278_47 (sequence is synthesized)
gatggctacaacagaccaaaagcttatattgctgcccaaggcccactgaaatccacagctgaagatttctggagaatgatatgggaacataatgtggaagttattgtcatgataacaaac

SEQ ID NO: 155744 - DNA, 120 bp, Artificial Sequence
  ENSG00000106278_48 (sequence is synthesized)
ctcgtggagaaaggaaggagaaaatgtgatcagtactggcctgccgatgggagtgaggagtacgggaactttctggtcactcagaagagtgtgcaagtgcttgcctattatactgtgagg

SEQ ID NO: 155745 - DNA, 120 bp, Artificial Sequence
  ENSG00000106278_49 (sequence is synthesized)
aattttactctaagaaacacaaaaataaaaaagggctcccagaaaggaagacccagtggacgtgtggtcacacagtatcactacacgcagtggcctgacatgggagtaccagagtactcc

SEQ ID NO: 155746 - DNA, 120 bp, Artificial Sequence
  ENSG00000106278_50 (sequence is synthesized)
ctgccagtgctgacctttgtgagaaaggcagcctatgccaagcgccatgcagtggggcctgttgtcgtccactgcagtgctggagttggaagaacaggcacatatattgtgctagacagt

SEQ ID NO: 155747 - DNA, 120 bp, Artificial Sequence
  ENSG00000106278_51 (sequence is synthesized)
atgttgcagcagattcaacacgaaggaactgtcaacatatttggcttcttaaaacacatccgttcacaaagaaattatttggtacaaactgaggagcaatatgtcttcattcatgataca

SEQ ID NO: 155748 - DNA, 120 bp, Artificial Sequence
  ENSG00000106278_52 (sequence is synthesized)
ctggttgaggccatacttagtaaagaaactgaggtgctggacagtcatattcatgcctatgttaatgcactcctcattcctggaccagcaggcaaaacaaagctagagaaacaattccag

SEQ ID NO: 155749 - DNA, 120 bp, Artificial Sequence
  ENSG00000106278_53 (sequence is synthesized)
ctcctgagccagtcaaatatacagcagagtgactattctgcagccctaaagcaatgcaacagggaaaagaatcgaacttcttctatcatccctgtggaaagatcaagggttggcatttca

SEQ ID NO: 155750 - DNA, 120 bp, Artificial Sequence
  ENSG00000106278_54 (sequence is synthesized)
tccctgagtggagaaggcacagactacatcaatgcctcctatatcatgggctattaccagagcaatgaattcatcattacccagcaccctctccttcataccatcaaggatttctggagg

SEQ ID NO: 155751 - DNA, 120 bp, Artificial Sequence
  ENSG00000106278_55 (sequence is synthesized)
atgatatgggaccataatgcccaactggtggttatgattcctgatggccaaaacatggcagaagatgaatttgtttactggccaaataaagatgagcctataaattgtgagagctttaag

SEQ ID NO: 155752 - DNA, 120 bp, Artificial Sequence
  ENSG00000106278_56 (sequence is synthesized)
gtcactcttatggctgaagaacacaaatgtctatctaatgaggaaaaacttataattcaggactttatcttagaagctacacaggatgattatgtacttgaagtgaggcactttcagtgt

SEQ ID NO: 155753 - DNA, 120 bp, Artificial Sequence
  ENSG00000106278_57 (sequence is synthesized)
cctaaatggccaaatccagatagccccattagtaaaacttttgaacttataagtgttataaaagaagaagctgccaatagggatgggcctatgattgttcatgatgagcatggaggagtg

SEQ ID NO: 155754 - DNA, 120 bp, Artificial Sequence
  ENSG00000106278_58 (sequence is synthesized)
acggcaggaactttctgtgctctgacaacccttatgcaccaactagaaaaagaaaattccgtggatgtttaccaggtagccaagatgatcaatctgatgaggccaggagtctttgctgac

SEQ ID NO: 155755 - DNA, 120 bp, Artificial Sequence
  ENSG00000106278_59 (sequence is synthesized)
attgagcagtatcagtttctctacaaagtgatcctcagccttgtgagcacaaggcaggaagagaatccatccacctctctggacagtaatggtgcagcattgcctgatggaaatatagct

SEQ ID NO: 155756 - DNA, 120 bp, Artificial Sequence
  ENSG00000106278_60 (sequence is synthesized)
gagagcttagagtctttagtttaacacagaaaggggtgggggaactcacatctgagcattgttttcctcttcctaaaattaggcaggaaaatcagtctagttctgttatctgttgatttc

SEQ ID NO: 155757 - DNA, 120 bp, Artificial Sequence
  ENSG00000106278_61 (sequence is synthesized)
ccatcacctgacagtaactttcatgacataggattctgccgccaaatttatatcattaacaatgtgtgcctttttgcaagacttgtaatttacttattatgtttgaactaaaatgattga

SEQ ID NO: 155758 - DNA, 120 bp, Artificial Sequence
  ENSG00000106278_62 (sequence is synthesized)
attttacagtatttctaagaatggaattgtggtatttttttctgtattgattttaacagaaaatttcaatttatagaggttaggaattccaaactacagaaaatgtttgtttttagtgtc

SEQ ID NO: 155759 - DNA, 120 bp, Artificial Sequence
  ENSG00000106278_63 (sequence is synthesized)
aaatttttagctgtatttgtagcaattatcaggtttgctagaaatataacttttaatacagtagcctgtaaataaaacactcttccatatgatattcaacattttacaactgcagtattc

SEQ ID NO: 155760 - DNA, 120 bp, Artificial Sequence
  ENSG00000106278_64 (sequence is synthesized)
acctaaagtagaaataatctgttacttattgtaaatactgccctagtgtctccatggaccaaatttatatttataattgtagatttttatattttactactgagtcaagttttctagttc

SEQ ID NO: 155761 - DNA, 120 bp, Artificial Sequence
  ENSG00000106278_65 (sequence is synthesized)
tgtgtaattgtttagtttaatgacgtagttcattagctggtcttactctaccagttttctgacattgtattgtgttacctaagtcattaactttgtttcagcatgtaattttaacttttg

SEQ ID NO: 155762 - DNA, 120 bp, Artificial Sequence
  ENSG00000106278_66 (sequence is synthesized)
tggaaaatagaaataccttcattttgaaagaagtttttatgagaataacaccttaccaaacattgttcaaatggtttttatccaaggaattgcaaaaataaatataaatattgccattaa

SEQ ID NO: 155763 - DNA, 120 bp, Artificial Sequence
  ENSG00000106278_67 (sequence is synthesized)
gctggtcctatacagaaagaaaagcattcagaagaatataaaatgaaaactacactgccactcctttcttccttgtgatggccatggaaatgctagcgtttaaccagagacttggactct

SEQ ID NO: 155764 - DNA, 120 bp, Artificial Sequence
  ENSG00000106278_68 (sequence is synthesized)
ctcgcttgcattcagctcctctgtgtttgccgcctggatacaatgcagaaattgcactcttcagtttgccagaacttagccgcaagtccacaaagaagactggaaaatttagcatttatt

SEQ ID NO: 155765 - DNA, 120 bp, Artificial Sequence
  ENSG00000106278_69 (sequence is synthesized)
atctccttttaaaagtgttatgttttcttttacataattttaaagttccaaattattagacattttgatttgcatgcaactgtttgaaacattctgttgtgttagtatttgacaaatgta

SEQ ID NO: 155766 - DNA, 120 bp, Artificial Sequence
  ENSG00000106278_70 (sequence is synthesized)
tttattgcatgatcatagttttccattgtaaacctaatatgaacgcttttttttctcatttgtcgtgtgctgtggaatttgatttctttacttttttggcattcattccctcattagaca

SEQ ID NO: 155767 - DNA, 120 bp, Artificial Sequence
  ENSG00000106278_71 (sequence is synthesized)
aaaatttcatttgatagattattttgtttgttttgtcttcgttattatattttaaggcacgttgtttgaaagaatgtgtgttaaaatgatttacatataattttttacaggaagtgcaga

SEQ ID NO: 155768 - DNA, 120 bp, Artificial Sequence
  ENSG00000106278_72 (sequence is synthesized)
aatatgaacgcttttttttctcatttgtcgtgtgctgtggaatttgatttctttacttttttggcattcattccctcattagacactgaaagagttttaccaggaagtgcagagctgtac

SEQ ID NO: 155769 - DNA, 120 bp, Artificial Sequence
  ENSG00000106278_73 (sequence is synthesized)
ggtatatacctgcttttgttttaattctggagatttctatcaaaattttcaagcagctcagaaattgtcttattttccatagcaactagtagtataaattgtgttcttttatttccagga

SEQ ID NO: 155770 - DNA, 120 bp, Artificial Sequence
  ENSG00000106278_74 (sequence is synthesized)
ttactatataatttagacaattggttttctattttaaaagccaagttgtactggtggaaacataaaaaacattgttcattttcttccataaagtacaaatctttaatattcttttttaaa

SEQ ID NO: 155771 - DNA, 120 bp, Artificial Sequence
  ENSG00000106278_75 (sequence is synthesized)
atctgaattaataacaatgattctttttaattttctaaattctataaattatactaaactactaaatttcatgatttccagccaaattacataaaaattcttaactgtgatttgtacacc

SEQ ID NO: 155772 - DNA, 120 bp, Artificial Sequence
  ENSG00000106278_76 (sequence is synthesized)
agtgttaatgcaaaagcatttagataacacttacattataccaggtaaaaatgtatcttcttttcaagaaaatatgcatttctaaaaaaaatttgaacttcaaaatcagtaagttttttc

SEQ ID NO: 155773 - DNA, 120 bp, Artificial Sequence
  ENSG00000106278_77 (sequence is synthesized)
ctgaggtaacacctcatgcttttaccccatcctccagacaacaggatttggtctccacggtcaacgtggtatactcgcagacaacccaaccggtatacaatggtttgaccatttcctatg

SEQ ID NO: 155774 - DNA, 80 bp, Artificial Sequence
  ENSG00000106278_78 (sequence is synthesized)
catgtctttatatgatactctcaggttttttttattattgccaactcctttcatagtatacaaataataaaccataagca

SEQ ID NO: 155775 - DNA, 120 bp, Artificial Sequence
  ENSG00000106278_79 (sequence is synthesized)
ctcctttcatagtatacaaataataaaccataagcaaatactaaacttctgtaaagtattccactattgatatcatgaacacttggcaatatttcagattaaatcatagttctttgtgca

SEQ ID NO: 155776 - DNA, 120 bp, Artificial Sequence
  ENSG00000106278_80 (sequence is synthesized)
aaaagcgaagagagacaattcattaaaagtttcagtgttttcactgcaaagttgtcaaggctatatgctttgtgagttctaaatgtgagtggtgcatctcaatggagtctttgttccttt

SEQ ID NO: 155777 - DNA, 120 bp, Artificial Sequence
  ENSG00000106278_81 (sequence is synthesized)
agccacagtggaagaatatgtagggcattgaggtttcctatattaacaaagtatcactttgaacccagctacaacttcaaattctgtctgtgcttttagcatgcctgatatctacttgct

SEQ ID NO: 155778 - DNA, 120 bp, Artificial Sequence
  ENSG00000106290_0 (sequence is synthesized)
gatggcgccgagcgccgggtgagcagcgtctcggctgccgctagagttttcctgctccccgcgctcgggtggcgggggcgggtctgagtggtaccccggaggagaccctttgaaggtccc

SEQ ID NO: 155779 - DNA, 120 bp, Artificial Sequence
  ENSG00000106290_1 (sequence is synthesized)
ttgtggggactggaaagaggacggttggttgtgtgtctgtgctcgtggggaccccgtgtgtgtgcctgcattggagagatgttgcaggagatggggtgggctctctgaacctcctttcgc

SEQ ID NO: 155780 - DNA, 120 bp, Artificial Sequence
  ENSG00000106290_2 (sequence is synthesized)
gctgcccggggatcttcgacctgcttctctgctgggatctcgcttaagttaacccttccctgggacgccttcctgccgcctccactgatctgaggagatcctgtgactgtagcgtgtttt

SEQ ID NO: 155781 - DNA, 120 bp, Artificial Sequence
  ENSG00000106290_3 (sequence is synthesized)
atgagcctttactggcagagggtaccgccgggtattgaaggattcgtaggagttcgccagggaagtgggacacgaccccctcttgtaaacccggcgccaggcacagaggtctccgtctct

SEQ ID NO: 155782 - DNA, 120 bp, Artificial Sequence
  ENSG00000106290_4 (sequence is synthesized)
ccaccgggggcttcatccttccagggaggagaagagggactccagaatggctgaggagaagaagctgaagcttagcaacactgtgctgccctcggagtccatgaaggtggtggctgaatc

SEQ ID NO: 155783 - DNA, 120 bp, Artificial Sequence
  ENSG00000106290_5 (sequence is synthesized)
catgggcatcgcccagattcaggaggagacctgccagctgctaacggatgaggtcagctaccgcatcaaagagatcgcacaggatgccttgaagttcatgcacatggggaagcggcagaa

SEQ ID NO: 155784 - DNA, 120 bp, Artificial Sequence
  ENSG00000106290_6 (sequence is synthesized)
gctcaccaccagtgacattgactacgccttgaagctaaagaatgtcgagccactctatggcttccacgcccaggagttcattcctttccgcttcgcctctggtgggggccgggagcttta

SEQ ID NO: 155785 - DNA, 120 bp, Artificial Sequence
  ENSG00000106290_7 (sequence is synthesized)
cttctatgaggagaaggaggttgatctgagcgacatcatcaatacccctctgccccgggtgcccctggacgtctgcctcaaagctcattggctgagcatcgagggctgccagccagctat

SEQ ID NO: 155786 - DNA, 120 bp, Artificial Sequence
  ENSG00000106290_8 (sequence is synthesized)
ccccgagaacccgcccccagctcccaaagagcaacagaaggctgaagccacagaacccctgaagtcagccaagccaggccaggaggaagacggacccctgaagggcaaaggtcaaggggc

SEQ ID NO: 155787 - DNA, 120 bp, Artificial Sequence
  ENSG00000106290_9 (sequence is synthesized)
caccacagccgacggcaaagggaaagagaagaaggcgccgcccttgctggagggggcccccttgcgactgaagccccggagcatccacgagttgtctgtggagcagcagctctactacaa

SEQ ID NO: 155788 - DNA, 120 bp, Artificial Sequence
  ENSG00000106290_10 (sequence is synthesized)
ggagatcaccgaggcctgcgtgggctcctgcgaggccaagagggcggaagccctgcaaagcattgccacggaccctggactgtatcagatgctgccacggttcagtacctttatctcgga

SEQ ID NO: 155789 - DNA, 120 bp, Artificial Sequence
  ENSG00000106290_11 (sequence is synthesized)
gctctatctagaaaaatacgtccatgagctgattccagctgtgatgacctgcatcgtgagcagacagttgtgcctgcgaccagatgtggacaatcactgggcactccgagactttgctgc

SEQ ID NO: 155790 - DNA, 120 bp, Artificial Sequence
  ENSG00000106290_12 (sequence is synthesized)
ccgcctggtggcccagatctgcaagcattttagcacaaccactaacaacatccagtcccggatcaccaagaccttcaccaagagctgggtggacgagaagacgccctggacgactcgtta

SEQ ID NO: 155791 - DNA, 120 bp, Artificial Sequence
  ENSG00000106290_13 (sequence is synthesized)
tggctccatcgcaggcttggctgagctgggacacgatgttatcaagactctgattctgccccggctgcagcaggaaggggagcggatccgcagtgtgctggacggccctgtgctgagcaa

SEQ ID NO: 155792 - DNA, 120 bp, Artificial Sequence
  ENSG00000106290_14 (sequence is synthesized)
cattgaccggattggagcagaccatgtgcagagcctcctgctgaaacactgtgctcctgttctggcaaagctgcgcccaccgcctgacaatcaggacgcctatcgggcagaattcgggtc

SEQ ID NO: 155793 - DNA, 120 bp, Artificial Sequence
  ENSG00000106290_15 (sequence is synthesized)
ccttgggcccctcctctgctcccaggtggtcaaggctcgggcccaggctgctctgcaggctcagcaggtcaacaggaccactctgaccatcacgcagccccggcccacgctgaccctctc

SEQ ID NO: 155794 - DNA, 120 bp, Artificial Sequence
  ENSG00000106290_16 (sequence is synthesized)
gcaggccccacagcctggccctcgcacccctggcttgctgaaggttcctggctccatcgcacttcctgtccagacactggtgtctgcacgagcggctgccccaccacagccttcccctcc

SEQ ID NO: 155795 - DNA, 120 bp, Artificial Sequence
  ENSG00000106290_17 (sequence is synthesized)
tccaaccaagtttattgtaatgtcatcgtcctccagcgccccatccacccagcaggtcctgtccctcagcacctcggcccccggctcaggttccaccaccacttcgcccgtcaccaccac

SEQ ID NO: 155796 - DNA, 120 bp, Artificial Sequence
  ENSG00000106290_18 (sequence is synthesized)
cgtccccagcgtgcagcccatcgtcaagttggtctccaccgccaccaccgcaccccccagcactgctccctctggtcctgggagtgtccagaagtacatcgtggtctcacttcccccaac

SEQ ID NO: 155797 - DNA, 120 bp, Artificial Sequence
  ENSG00000106290_19 (sequence is synthesized)
aggggagggcaaaggaggccccacctcccatccttctccagttcctcccccggcatcgtccccgtccccactcagcggcagtgccctttgtggggggaagcaggaggctggggacagtcc

SEQ ID NO: 155798 - DNA, 120 bp, Artificial Sequence
  ENSG00000106290_20 (sequence is synthesized)
ccctccagctccagggactccaaaagccaatggctcccagcccaactccggctcccctcagcctgctccgtgatgctccacctgccagcccccggattcccacacatgcagacatgtaca

SEQ ID NO: 155799 - DNA, 120 bp, Artificial Sequence
  ENSG00000106290_21 (sequence is synthesized)
cacgtgcacgtacacacatgcatgctcgctaagcggaaggaagttgtagattgcttccttcatgtcactttctttttagatattgtacagccagtttctcagaataaaagtttggtttgt

SEQ ID NO: 155800 - DNA, 86 bp, Artificial Sequence
  ENSG00000106290_22 (sequence is synthesized)
gtggtaccccggaggagaccctttgaaggtcccttgtggggactggaaagaggacgggtttccgtctgttacccaggctgttcaac

SEQ ID NO: 155801 - DNA, 120 bp, Artificial Sequence
  ENSG00000106290_23 (sequence is synthesized)
aggcctctgggaggaagaaatgggggaggggacacagtcatgaggttatagagggcactgtacccccatctgggagaccctggtgaccctccggcttttgcttgtccttttcccttctaa

SEQ ID NO: 155802 - DNA, 120 bp, Artificial Sequence
  ENSG00000106290_24 (sequence is synthesized)
aggacagatgtgtgtaggtgtgaggagcctcacaatagaagaaaagctcagtgtgagatccctggtgagttgcaaggggagcaggagtggaaacacgcttccatagcatggggcaactcc

SEQ ID NO: 155803 - DNA, 120 bp, Artificial Sequence
  ENSG00000106290_25 (sequence is synthesized)
aagatggcgccgagcgccgggtgagcagcgtctcggctgccgctagagttttcctgctccccgcgctcgggtggcgggggcgggtctgagtggtaccccggaggagaccctttgaagggt

SEQ ID NO: 155804 - DNA, 120 bp, Artificial Sequence
  ENSG00000106290_26 (sequence is synthesized)
gttctgtgtcatcgtcctcctccttcaacatcccagcccaagcctcgtgcacggccaaaaaaaggaaaagcaatattcccaaccgcacaggtcccatgacaaagcgccgtctacaaacaa

SEQ ID NO: 155805 - DNA, 120 bp, Artificial Sequence
  ENSG00000106290_27 (sequence is synthesized)
gttttgtggcgcctcttgaaggtcctggcagccgggtagtgaaggaataaattgcagtaattacaccaagagggagtgctccttatatatagatgtagaaacaaacttttaaaatataat

SEQ ID NO: 155806 - DNA, 120 bp, Artificial Sequence
  ENSG00000106290_28 (sequence is synthesized)
agagttttcctgctccccgcgctcgggtggcgggggcgggtctgagtggtaccccggaggagaccctttgaaggtcccttgtggggactggaaagaggacgaagtcttgctttgttgccc

SEQ ID NO: 155807 - DNA, 120 bp, Artificial Sequence
  ENSG00000106290_29 (sequence is synthesized)
ccgagtagctgtgattacagggtctccgtctctccaccgggggcttcatccttccagggaggagaagagggactccagaatggctgaggagaagaagctgaagcttagcaacactgtgct

SEQ ID NO: 155808 - DNA, 69 bp, Artificial Sequence
  ENSG00000106290_30 (sequence is synthesized)
tgggattacaggcgtgagccactgaacctggccccagcccagatttgtatctttctctgttacacctca

SEQ ID NO: 155809 - DNA, 120 bp, Artificial Sequence
  ENSG00000106290_31 (sequence is synthesized)
ggccccagcccagatttgtatctttctctgttacacctcagggctgactcacgtggggatggacataagacactcggagttcctcccctgtctccactgtcctccctttgttggccctct

SEQ ID NO: 155810 - DNA, 120 bp, Artificial Sequence
  ENSG00000106290_32 (sequence is synthesized)
tatgttgaccaggctgtctcaaactcctggcctcaaacaatccccccacctctgccttccaaagtgctgggattactgggggtctccgtctctccaccgggggcttcatccttccaggga

SEQ ID NO: 155811 - DNA, 120 bp, Artificial Sequence
  ENSG00000106299_0 (sequence is synthesized)
gcagtcgccggagtgcgaggacaacgaccatccggccctagcctggccgggcgggtgccgggagcttccctttctcagcgcggcgcgaaggtggctcgccgtcagcgcctgcttccctcg

SEQ ID NO: 155812 - DNA, 120 bp, Artificial Sequence
  ENSG00000106299_1 (sequence is synthesized)
acctcgtcctcctccccgctccggaggagctgcgagatgtggcgcctctgactccacttctccccgcccctgtcaccgagagggggaacgagctctcgcccactcgccggaggagacggc

SEQ ID NO: 155813 - DNA, 120 bp, Artificial Sequence
  ENSG00000106299_2 (sequence is synthesized)
cctggactcccaaccccgccggcgaaaccatgagctccgtccagcagcagccgccgccgccgcggagggtcaccaacgtggggtccctgttgctcaccccgcaggagaacgagtccctct

SEQ ID NO: 155814 - DNA, 120 bp, Artificial Sequence
  ENSG00000106299_3 (sequence is synthesized)
tcactttcctcggcaagaaatgtgtgactatgtcttcagcagtggtgcagttatatgcagcagatcggaactgtatgtggtcaaagaagtgcagtggtgttgcttgtcttgttaaggaca

SEQ ID NO: 155815 - DNA, 120 bp, Artificial Sequence
  ENSG00000106299_4 (sequence is synthesized)
atccacagagatcttattttttaagaatatttgacattaaggatgggaaactattgtgggaacaagagctatacaataactttgtatataatagtcctagaggatattttcatacctttg

SEQ ID NO: 155816 - DNA, 120 bp, Artificial Sequence
  ENSG00000106299_5 (sequence is synthesized)
ctggagatacttgtcaagttgctcttaattttgccaatgaagaagaagcaaaaaaatttcgaaaagcagttacagaccttttgggccgtcgacaaaggaaatctgagaaaagacgagatc

SEQ ID NO: 155817 - DNA, 120 bp, Artificial Sequence
  ENSG00000106299_6 (sequence is synthesized)
ccccaaatggtcctaatctacccatggctacagttgatataaaaaatccagaaatcacaacaaatagattttatggtccacaagtcaacaacatctcccataccaaagaaaagaagaagg

SEQ ID NO: 155818 - DNA, 120 bp, Artificial Sequence
  ENSG00000106299_7 (sequence is synthesized)
gaaaagctaaaaagaagagattaaccaaggcagatataggaacaccaagcaatttccagcacattggacatgttggttgggatccaaatacaggctttgatctgaataatttggatccag

SEQ ID NO: 155819 - DNA, 120 bp, Artificial Sequence
  ENSG00000106299_8 (sequence is synthesized)
aattgaagaatcttttcgatatgtgtggaatctcagaggcacaacttaaagacagagaaacatcaaaagttatatatgactttattgaaaaaacaggaggtgttgaagctgttaaaaatg

SEQ ID NO: 155820 - DNA, 120 bp, Artificial Sequence
  ENSG00000106299_9 (sequence is synthesized)
aactgcggaggcaagcaccaccacctccaccaccatcaaggggagggccacctcctcctcctccccctccacacaactcaggtcctcctcctcctcctgctaggggaagaggcgctcctc

SEQ ID NO: 155821 - DNA, 120 bp, Artificial Sequence
  ENSG00000106299_10 (sequence is synthesized)
ccccaccaccttcaagagctcccacagctgcacctccaccaccgcctccttccaggccaagtgtagcagtccctccaccaccgccaaataggatgtaccctcctccacctccagcccttc

SEQ ID NO: 155822 - DNA, 120 bp, Artificial Sequence
  ENSG00000106299_11 (sequence is synthesized)
cctcctcagcaccttcagggcctccaccaccacctccatctgtgttgggggtagggccagtggcaccacccccaccgcctccacctccacctcctcctgggccaccgcccccgcctggcc

SEQ ID NO: 155823 - DNA, 120 bp, Artificial Sequence
  ENSG00000106299_12 (sequence is synthesized)
tgccttctgatggggaccatcaggttccaactactgcaggaaacaaagcagctcttttagatcaaattagagagggtgctcagctaaaaaaagtggagcagaacagtcggccagtgtcct

SEQ ID NO: 155824 - DNA, 120 bp, Artificial Sequence
  ENSG00000106299_13 (sequence is synthesized)
gctctggacgagatgcactgttagaccagatacgacagggtatccaactaaaatctgtggctgatggccaagagtctacaccaccaacacctgcacccacttcaggaattgtgggtgcat

SEQ ID NO: 155825 - DNA, 120 bp, Artificial Sequence
  ENSG00000106299_14 (sequence is synthesized)
taatggaagtgatgcagaaaaggagcaaagccattcattcttcagatgaagatgaagatgaagatgatgaagaagattttgaggatgatgatgagtgggaagactgatctatatattata

SEQ ID NO: 155826 - DNA, 120 bp, Artificial Sequence
  ENSG00000106299_15 (sequence is synthesized)
tatatatatatatttttaaggtgaaatactaaacactactttctgtctgtggattctgtaaaattatcatgtaaatgttctaccaatttgctgtatatttttgttgccttttttgctttt

SEQ ID NO: 155827 - DNA, 120 bp, Artificial Sequence
  ENSG00000106299_16 (sequence is synthesized)
ttttaatctgtgcaatacctcatttaatctgtaaaggtttgtcgtaatcctctacaaagctactccctgttattgtgtgcaagtttacaccaggatgctcacttgatttgtgaatatttt

SEQ ID NO: 155828 - DNA, 120 bp, Artificial Sequence
  ENSG00000106299_17 (sequence is synthesized)
tcattccatcaacaagggagtttaaatactatatgtgagactgacaaaaaccttaatgtaatttacttataatgccagaaggaaaacactattttcataccctactttttctgtacctaa

SEQ ID NO: 155829 - DNA, 120 bp, Artificial Sequence
  ENSG00000106299_18 (sequence is synthesized)
aagtgatgcagaccttagtttctttagcccctttattttgaatacaatgctacatatgaatgttgaagctgatacattgcacagttctgtagacatcactacaccgatgtagtttctcaa

SEQ ID NO: 155830 - DNA, 120 bp, Artificial Sequence
  ENSG00000106299_19 (sequence is synthesized)
attttagcaatatgctctacataaaatcactacagagatactagtggggaagacgattaacacacctcttacagtaatactgcctgttattggtatagcagtggtatttgcagactggga

SEQ ID NO: 155831 - DNA, 120 bp, Artificial Sequence
  ENSG00000106299_20 (sequence is synthesized)
tcataaggagcccttaaatacttgttattgactggggttatttttatgctgtagcaaatgtgacaggctctttttagcaaaatttttgaaaatttttttggtattactctgaaacaaaat

SEQ ID NO: 155832 - DNA, 120 bp, Artificial Sequence
  ENSG00000106299_21 (sequence is synthesized)
ttaagttggagtttcagggatttagggagtagttttcattctacatgaactgaggtaatattatggtaactccaatatttggttaaaaaaactatacaaatcagaatagtactaaaatac

SEQ ID NO: 155833 - DNA, 120 bp, Artificial Sequence
  ENSG00000106299_22 (sequence is synthesized)
tgtagaattttagcatttttattttgcactttgtgtggattgaggtgttcagaaataccaaccataaaaatgtaatctagttggcaaaggtgtgcgctaaaacacggaaccgaacatgca

SEQ ID NO: 155834 - DNA, 120 bp, Artificial Sequence
  ENSG00000106299_23 (sequence is synthesized)
ttgatttggataacttttgagggtttttgtcaaatagcatgtgaagagttacatttttcttaaaagattggtggtcccaatgtcagagttcttggaacagataactgaatgatagatttt

SEQ ID NO: 155835 - DNA, 120 bp, Artificial Sequence
  ENSG00000106299_24 (sequence is synthesized)
ttttttttaaagataaaactttacaacctgcacatttgttatgcatactaaatggtgtgttaaaattagggtttctttgcctctctacactacactaatctgcctaaaggtggttgtttc

SEQ ID NO: 155836 - DNA, 120 bp, Artificial Sequence
  ENSG00000106299_25 (sequence is synthesized)
atatttataatgctaattatcatacctacctactttaaattttaggtagaaaattatctgatttaaatacaaacatatttttctcacattgagtaatatgcataatgtagttccaaatgt

SEQ ID NO: 155837 - DNA, 120 bp, Artificial Sequence
  ENSG00000106299_26 (sequence is synthesized)
atttcattactatagtcacaatatccaactaaaaattacgctatctagaattgtaccaaccaaaatctcgtattggcagatcttgacaggctggacctgcaagatgtggcttgaatttta

SEQ ID NO: 155838 - DNA, 120 bp, Artificial Sequence
  ENSG00000106299_27 (sequence is synthesized)
accatttattacataatctctagtgatcatgcatctagttatcataagaaataatttaaaaggttttgttgctgaaagcagtaagtggtgcagtaaaatacttaagttattcaaagaatg

SEQ ID NO: 155839 - DNA, 120 bp, Artificial Sequence
  ENSG00000106299_28 (sequence is synthesized)
ttatctttcttgcaagagtaatttaagcacatgggaaagattctagactttttgtttcttgcaacaacagtgccctctgctgctagaaacctttttctacttactatcatttttattgtg

SEQ ID NO: 155840 - DNA, 120 bp, Artificial Sequence
  ENSG00000106299_29 (sequence is synthesized)
gcttgagctcagtcaatctggtgcagatgaggctggacaactactaaccaataaaatcaggagtttgtacaaaagttaaatggaacattataattattttaagtaatgttaattgaaaaa

SEQ ID NO: 155841 - DNA, 120 bp, Artificial Sequence
  ENSG00000106299_30 (sequence is synthesized)
attttttctttttgacaatataaaaaacattttaaatttcctagaaatgtcttcagggtaatgccaatttaagatctctcttaacttgtggccaagaaattctagattttccagctgact

SEQ ID NO: 155842 - DNA, 120 bp, Artificial Sequence
  ENSG00000106299_31 (sequence is synthesized)
ttggtataatatatatttatcaggaacttctctcagcagagagtacccattcttcgagttcaaagcacaattttaaacatgtaaaatggatatataatttgccaaaggtaattaatttat

SEQ ID NO: 155843 - DNA, 120 bp, Artificial Sequence
  ENSG00000106299_32 (sequence is synthesized)
tctttttttcttaaagaagaaaaagacattggttgttgttacaaaaagtctaaattactgttggttgaaacacagcagctgtggagttcagtccaggcatgaagactaaatctgctttac

SEQ ID NO: 155844 - DNA, 120 bp, Artificial Sequence
  ENSG00000106299_33 (sequence is synthesized)
caagtaaggtgtaaggttgcatgtttcagtcctctaccatcctgcactgtgagcagcactatacctgtgcgttgtctgaaagccttccgtatattctccagctaaatggtcgtctggtag

SEQ ID NO: 155845 - DNA, 120 bp, Artificial Sequence
  ENSG00000106299_34 (sequence is synthesized)
cctttgcatttaacaaactagcatgaggctttttatatctaaatgctacgtgatagacaatttcagctagccacatattgtatgtatgagattcataaagactttcaatcatttcatttt

SEQ ID NO: 155846 - DNA, 120 bp, Artificial Sequence
  ENSG00000106299_35 (sequence is synthesized)
cagacaactgaaattttgtttagtatgtgaattctttttttgaaatgtatagtgaataggatgttgcactggtggcaattcatcatggagcataataaaattaatttgacccaaatagaa

SEQ ID NO: 155847 - DNA, 60 bp, Artificial Sequence
  ENSG00000106302_0 (sequence is synthesized)
ctgcctcctgggttcaagtgattctcctgacttaacctcctgagtagctgggactacaag

SEQ ID NO: 155848 - DNA, 89 bp, Artificial Sequence
  ENSG00000106302_1 (sequence is synthesized)
ttacaggggtgagccaccgtgccttgctatttatgccatctatttcactgaagattccgcctctcatttcttgagtcattttttttaaa

SEQ ID NO: 155849 - DNA, 120 bp, Artificial Sequence
  ENSG00000106302_2 (sequence is synthesized)
gaagattccgcctctcatttcttgagtcattttttttaaatttccttaaattggacttcacatttttctgatgcctccttgtttagcttaataactgaccttctgaattcttttttagga

SEQ ID NO: 155850 - DNA, 120 bp, Artificial Sequence
  ENSG00000106302_3 (sequence is synthesized)
aaatcaggaatttcttcttggtttggagccattgctggacatcctttgccattcaacctctgatttgcacaaggtgactaaaggaccagcagcaaacaaaagcaaaggtcttctagagtg

SEQ ID NO: 155851 - DNA, 120 bp, Artificial Sequence
  ENSG00000106302_4 (sequence is synthesized)
cactaaagcagaagataacgtaacatttttatcttaccatgaaagtattatctgaaggacagttaaagctttgtgttgttcaaccagtacatctcacttcatggctccttatatttttta

SEQ ID NO: 155852 - DNA, 120 bp, Artificial Sequence
  ENSG00000106302_5 (sequence is synthesized)
ttctaaagtctatctcttgtctaaaacctgctcgacttccaatttatcaaaggaaaccttttatagctgcttggaatgctccaacagatcagtgtttgataaaatataatttaagactaa

SEQ ID NO: 155853 - DNA, 120 bp, Artificial Sequence
  ENSG00000106302_6 (sequence is synthesized)
atttgaaaatgtttcctgtgattggaagcccactggccaaggccagggggcaaaatgtcactatattttatgtcaacagattgggatactatccgtggtatacatcacaaggggtcccca

SEQ ID NO: 155854 - DNA, 120 bp, Artificial Sequence
  ENSG00000106302_7 (sequence is synthesized)
ttaatggaggtctcccacagaacataagtttacaagtacatctggaaaaagctgaccaagatattaattattacatccctgctgaagatttcagtggacttgctgttatagattgggaat

SEQ ID NO: 155855 - DNA, 120 bp, Artificial Sequence
  ENSG00000106302_8 (sequence is synthesized)
attggcgaccacagtgggcccggaactggaactcaaaagatgtttacagacagaagtcaagaaagcttatttccgatatgggaaagaatgtatcagctaccgatattgaatatttagcca

SEQ ID NO: 155856 - DNA, 120 bp, Artificial Sequence
  ENSG00000106302_9 (sequence is synthesized)
tgaagaaagtgcaaaagctttcatgaaggaaaccatcaaattgggaattaagagccgacccaaaggcctttggggttattatttatatcctgattgccacaattataacgtttatgcccc

SEQ ID NO: 155857 - DNA, 120 bp, Artificial Sequence
  ENSG00000106302_10 (sequence is synthesized)
aaactactctgggtcatgcccagaagacgaagtcttgaggaacaatgagctctcttggctctggaacagcagtgctgctttatatccttctatcggtgtctggaaatcccttggagacag

SEQ ID NO: 155858 - DNA, 120 bp, Artificial Sequence
  ENSG00000106302_11 (sequence is synthesized)
tgaaaacattttgcgcttctccaaatttcgggtgcatgaatccatgaggatctccaccatgacatctcatgattatgctctgcctgtatttgtctacacaaggctagggtacagagatga

SEQ ID NO: 155859 - DNA, 120 bp, Artificial Sequence
  ENSG00000106302_12 (sequence is synthesized)
acctttatttttcctttctaagcaagatctagtcagcaccataggagaaagtgctgccttgggagctgcaggcattgttatttggggagacatgaatttaactgcatccaaggccaactg

SEQ ID NO: 155860 - DNA, 120 bp, Artificial Sequence
  ENSG00000106302_13 (sequence is synthesized)
tacaaaggtgaagcagtttgtgagttctgatttagggagctacatagccaatgtgaccagagctgctgaggtatgcagccttcacctctgcaggaacaatggcaggtgcataaggaagat

SEQ ID NO: 155861 - DNA, 120 bp, Artificial Sequence
  ENSG00000106302_14 (sequence is synthesized)
gtggaacgcgcccagttaccttcacttgaaccctgcaagttaccacatagaggcctctgaggacggggagtttactgtgaaaggaaaagcatctgatacagacctggcagtgatggcaga

SEQ ID NO: 155862 - DNA, 120 bp, Artificial Sequence
  ENSG00000106302_15 (sequence is synthesized)
tacattttcctgtcattgttatcagggatatgaaggagctgattgcagagaaataaagacggctgatggctgctctggggtttccccttctcctggttcactaatgacactttgtctact

SEQ ID NO: 155863 - DNA, 120 bp, Artificial Sequence
  ENSG00000106302_16 (sequence is synthesized)
gcttttagcaagttatcgaagcattcagttgtgagataattgagtttaaagggaattgtgtggcctctagcctagtcatttaaagaaggatgtaacttataacattttttttctcttatg

SEQ ID NO: 155864 - DNA, 120 bp, Artificial Sequence
  ENSG00000106302_17 (sequence is synthesized)
aattctattgagagatattataagtagacattatgtatgtcacttaacataaacagaaacattattttatttgcctccagtctggctaggaaaccagatctggggtaaagtcaatgtaca

SEQ ID NO: 155865 - DNA, 120 bp, Artificial Sequence
  ENSG00000106302_18 (sequence is synthesized)
tggggtaaagtcaatgtacacttcctccttattggaatatttaagttgcatttaaactaaaactagtataatttagtcttttcatgaatgtacatacataaaattatacataaaaatatt

SEQ ID NO: 155866 - DNA, 120 bp, Artificial Sequence
  ENSG00000106302_19 (sequence is synthesized)
tatccgagggcctttgggccattatgctgtgaatgtgacatctgcagccaagctctgcagtcagagtctatgtaacaatcatggaagagtattcgaaaaacacctgagtcctccttctat

SEQ ID NO: 155867 - DNA, 64 bp, Artificial Sequence
  ENSG00000106302_20 (sequence is synthesized)
atggaagagtattcgaaaaacacctgagtcctccttctatctgcatatgcctgaaagcagttgt

SEQ ID NO: 155868 - DNA, 120 bp, Artificial Sequence
  ENSG00000106304_0 (sequence is synthesized)
aggtggttagcagcacctcataaggtccttcctagcaagggatgctaatgactagccaatgctctaggaagacattgagaccagccaacttcttgccttgataactactgaagagacatt

SEQ ID NO: 155869 - DNA, 120 bp, Artificial Sequence
  ENSG00000106304_1 (sequence is synthesized)
gggtggctggattttgaaagcagacttctggttataggtgatgcaacttgaaaaacaatcctgaaacatgaaacaagaataataatatttaaatgtaacttaatcattatacctctttat

SEQ ID NO: 155870 - DNA, 120 bp, Artificial Sequence
  ENSG00000106304_2 (sequence is synthesized)
ccatcaaagtgaattcattccattccctttcatctgtgctcatactttgcatcagatattgggtaaaccaaagtgtgtaggaagaaataaatgttttcatagtcattactctttacaatg

SEQ ID NO: 155871 - DNA, 120 bp, Artificial Sequence
  ENSG00000106304_3 (sequence is synthesized)
ggagtgctaaaattcaagcacatctttttcagaagctttgttaaatcaagtggagtatcccagatagttttcaccttccttctgattccatgttgcttgactctgaatttcagagcacct

SEQ ID NO: 155872 - DNA, 120 bp, Artificial Sequence
  ENSG00000106304_4 (sequence is synthesized)
cctgttattccaaatgtgcctttcctctgggcctggaatgccccaagtgaattttgtcttggaaaatttgatgagccactagatatgagcctcttctctttcataggaagcccccgaata

SEQ ID NO: 155873 - DNA, 120 bp, Artificial Sequence
  ENSG00000106304_5 (sequence is synthesized)
aacgccaccgggcaaggtgttacaatattttatgttgatagacttggctactatccttacatagattcaatcacaggagtaactgtgaatggaggaatcccccagaagatttccttacaa

SEQ ID NO: 155874 - DNA, 120 bp, Artificial Sequence
  ENSG00000106304_6 (sequence is synthesized)
gaccatctggacaaagctaagaaagacattacattttatatgccagtagacaatttgggaatggctgttattgactgggaagaatggagacccacttgggcaagaaactggaaacctaaa

SEQ ID NO: 155875 - DNA, 120 bp, Artificial Sequence
  ENSG00000106304_7 (sequence is synthesized)
gatgtttacaagaataggtctattgaattggttcagcaacaaaatgtacaacttagtctcacagaggccactgagaaagcaaaacaagaatttgaaaaggcagggaaggatttcctggta

SEQ ID NO: 155876 - DNA, 120 bp, Artificial Sequence
  ENSG00000106304_8 (sequence is synthesized)
gagactataaaattgggaaaattacttcggccaaatcacttgtggggttattatctttttccggattgttacaaccatcactataagaaacccggttacaatggaagttgcttcaatgta

SEQ ID NO: 155877 - DNA, 120 bp, Artificial Sequence
  ENSG00000106304_9 (sequence is synthesized)
ttgaacactcagcagtctcctgtagctgctacactctatgtgcgcaatcgagttcgggaagccatcagagtttccaaaatacctgatgcaaaaagtccacttccggtttttgcatatacc

SEQ ID NO: 155878 - DNA, 120 bp, Artificial Sequence
  ENSG00000106304_10 (sequence is synthesized)
cgcatagtttttactgatcaagttttgaaattcctttctcaagatgaacttgtgtatacatttggcgaaactgttgctctgggtgcttctggaattgtaatatggggaaccctcagtata

SEQ ID NO: 155879 - DNA, 120 bp, Artificial Sequence
  ENSG00000106304_11 (sequence is synthesized)
atgcgaagtatgaaatcttgcttgctcctagacaattacatggagactatactgaatccttacataatcaacgtcacactagcagccaaaatgtgtagccaagtgctttgccaggagcaa

SEQ ID NO: 155880 - DNA, 120 bp, Artificial Sequence
  ENSG00000106304_12 (sequence is synthesized)
ggagtgtgtataaggaaaaactggaattcaagtgactatcttcacctcaacccagataattttgctattcaacttgagaaaggtggaaagttcacagtacgtggaaaaccgacacttgaa

SEQ ID NO: 155881 - DNA, 120 bp, Artificial Sequence
  ENSG00000106304_13 (sequence is synthesized)
gacctggagcaattttctgaaaaattttattgcagctgttatagcaccttgagttgtaaggagaaagctgatgtaaaagacactgatgctgttgatgtgtgtattgctgatggtgtctgt

SEQ ID NO: 155882 - DNA, 120 bp, Artificial Sequence
  ENSG00000106304_14 (sequence is synthesized)
atagatgcttttctaaaacctcccatggagacagaagaacctcaaattttctacaatgcttcaccctccacactatctgccacaatgttcatttggaggctggaagtctgggatcaaggt

SEQ ID NO: 155883 - DNA, 120 bp, Artificial Sequence
  ENSG00000106304_15 (sequence is synthesized)
attagcagaattggtttcttctgagagtcatgagggaaaaatgtgtttcaggcctcttcccttggcttacaggaaatgaaaaaaccatgactatcatcaccaacatccttgggtattaag

SEQ ID NO: 155884 - DNA, 120 bp, Artificial Sequence
  ENSG00000106304_16 (sequence is synthesized)
tgcagtcactctcctagatgctgtggggagaaggcaagttacaaagatagaccttccctcaagataatcagattttcatggtattatccttaacctttttgacatcatggaggctttggg

SEQ ID NO: 155885 - DNA, 120 bp, Artificial Sequence
  ENSG00000106304_17 (sequence is synthesized)
aatctgatgaagcctatcaattttcttccagaagatatttatataagattataagaaaaattatgtacacagcttattttattgcattggatcaaaatgccatttataaagaattatgcc

SEQ ID NO: 155886 - DNA, 120 bp, Artificial Sequence
  ENSG00000106304_18 (sequence is synthesized)
ttttccatcaattttagcatggaaaaataatttcaggcaatatgcttaaaaattgggggaagacaaaagaaatccatatcgtgtaaataaaaataaattttggttttgctcaaaaataaa

SEQ ID NO: 155887 - DNA, 120 bp, Artificial Sequence
  ENSG00000106304_19 (sequence is synthesized)
acaggttaaatactgcagagctaatagattggagtgacttctgacctagtcacatcttaaaggaaaacttttcagtttttactttaaaaggatgctaatgactagccaatgctctaggaa

SEQ ID NO: 155888 - DNA, 120 bp, Artificial Sequence
  ENSG00000106304_20 (sequence is synthesized)
tcattgttagtattttgtttcttatcatttcttctgtagcgagtttgtaattgcgcaggttagctgaaatgaacaatatgtccatcttaaagtgtgctttttcgactaattaaatctttg

SEQ ID NO: 155889 - DNA, 120 bp, Artificial Sequence
  ENSG00000106304_21 (sequence is synthesized)
atgggagaatggggaacgtggaggtaaaggagggaacctaatgtaagaatactgaatttgccaattaaggcaccagctgtgactacttcatacaggaatggggacatgcctgatgccata

SEQ ID NO: 155890 - DNA, 120 bp, Artificial Sequence
  ENSG00000106304_22 (sequence is synthesized)
gatagcagtgtaggtggttagcagcacctcataaggtccttcctagcaaggtaacagtacaagctttttctaaaaatcttgatgtatacctgatctcctggttgaaagagttggcttgat

SEQ ID NO: 155891 - DNA, 120 bp, Artificial Sequence
  ENSG00000106304_23 (sequence is synthesized)
ggattttttcctataagttctttttatgtctagatttttatgttccacttgacctgatgattgaggatggtatgaagtaagaagttttaatgagtaatccagagattttggatgctaatg

SEQ ID NO: 155892 - DNA, 120 bp, Artificial Sequence
  ENSG00000106305_0 (sequence is synthesized)
agaagggaggtggccggtctccgtcgtgacctctgacggtttctgagcgttggcctttggcacgcgctacccccttttgctttggttctgccatgccgatgtaccaggtaaagccctatc

SEQ ID NO: 155893 - DNA, 120 bp, Artificial Sequence
  ENSG00000106305_1 (sequence is synthesized)
acgggggcggcgcgcctctccgtgtggagcttcccacctgcatgtaccggctccccaacgtgcacggcaggagctacggcccagcgccgggcgctggccacgtgcaggaagagtctaacc

SEQ ID NO: 155894 - DNA, 120 bp, Artificial Sequence
  ENSG00000106305_2 (sequence is synthesized)
tgtctctgcaagctcttgagtcccgccaagatgatattttaaaacgtctgtatgagttgaaagctgcagttgatggcctctccaagatgattcaaacaccagatgcagacttggatgtaa

SEQ ID NO: 155895 - DNA, 120 bp, Artificial Sequence
  ENSG00000106305_3 (sequence is synthesized)
ccaacataatccaagcggatgagcccacgactttaaccaccaatgcgctggacttgaattcagtgcttgggaaggattacggggcgctgaaagacatcgtgatcaacgcaaacccggcct

SEQ ID NO: 155896 - DNA, 120 bp, Artificial Sequence
  ENSG00000106305_4 (sequence is synthesized)
tggagaacagaataaaaaacagccccgccaagactatcagctgggattcactttaatttggaagaatgtgccgaagacgcagatgaaattcagcatccagacgatgtgccccatcgaagg

SEQ ID NO: 155897 - DNA, 120 bp, Artificial Sequence
  ENSG00000106305_5 (sequence is synthesized)
cgaagggaacattgcacgtttcttgttctctctgtttggccagaagcataatgctgtcaacgcaacccttatagatagctgggtagatattgcgatttttcagttaaaagagggaagcag

SEQ ID NO: 155898 - DNA, 120 bp, Artificial Sequence
  ENSG00000106305_6 (sequence is synthesized)
taaagaaaaagccgctgttttccgctccatgaactctgctcttgggaagagcccttggctcgctgggaatgaactcaccgtagcagacgtggtgctgtggtctgtactccagcagatcgg

SEQ ID NO: 155899 - DNA, 120 bp, Artificial Sequence
  ENSG00000106305_7 (sequence is synthesized)
aggctgcagtgtgacagtgccagccaatgtgcagaggtggatgaggtcttgtgaaaacctggctccttttaacacggccctcaagctccttaagtgaattgccgtaactgattttaaagg

SEQ ID NO: 155900 - DNA, 120 bp, Artificial Sequence
  ENSG00000106305_8 (sequence is synthesized)
gtttagattttaagaatggtgctctttcatgcctattatcagtaaggggacttgtattagagtcagagtctttttatttaggccagttgtcaagtgtcaataaaagcatcatgtaattta

SEQ ID NO: 155901 - DNA, 120 bp, Artificial Sequence
  ENSG00000106305_9 (sequence is synthesized)
tgcagcctctccagtagctgggattacaggtgccccccaccaagcccagctaatttttgtgtttcagtagaaatggagtttcatcatgttgtcctctcgaactcctgacctcaagtgatc

SEQ ID NO: 155902 - DNA, 120 bp, Artificial Sequence
  ENSG00000106305_10 (sequence is synthesized)
ttccacccggaagtcagtggacttcacatttctctgacgtttgatcttaaataagagcagcagactaggagaggtgagaaagtgctgattaagcccgaaggtaaataggagttaagcaaa

SEQ ID NO: 155903 - DNA, 120 bp, Artificial Sequence
  ENSG00000106305_11 (sequence is synthesized)
caagagaagaaggaagagtgatgcagatggagggaacagcacatgtgaagatctgtggtcagagccagggtggtggtttaggaactcctcggacagtgtggctagagcacaggcaaagga

SEQ ID NO: 155904 - DNA, 120 bp, Artificial Sequence
  ENSG00000106305_12 (sequence is synthesized)
cgaaattgggtgaggaagagtctaacctgtctctgcaagctcttgagtcccgccaagatgatattttaaaacgtctgtatgagttgaaagctgcagttgatggcctctccaagatgattc

SEQ ID NO: 155905 - DNA, 120 bp, Artificial Sequence
  ENSG00000106305_13 (sequence is synthesized)
acgcccgcagcagggtcagaagggaggtggccggtctccgtcgtgacctctgacggtttctgagcgttggcctttggcacgcgctacccccttttgctttggttctgccatgccgatgta

SEQ ID NO: 155906 - DNA, 70 bp, Artificial Sequence
  ENSG00000106305_14 (sequence is synthesized)
ggctggtcttgaactcctgacgtcagatgatctgcctacctggaatgtcttcttttaaagggtgggaggt

SEQ ID NO: 155907 - DNA, 120 bp, Artificial Sequence
  ENSG00000106327_0 (sequence is synthesized)
atcgctgggggacagcctgcaggcttcaggaggggacacaagcatggagcggctttggggtctattccagagagcgcaacaactgtccccaagatcctctcagaccgtctaccagcgtgt

SEQ ID NO: 155908 - DNA, 120 bp, Artificial Sequence
  ENSG00000106327_1 (sequence is synthesized)
ggaaggcccccggaaagggcacctggaggaggaagaggaagacggggaggagggggcggagacattggcccacttctgccccatggagctgaggggccctgagcccctgggctctagacc

SEQ ID NO: 155909 - DNA, 120 bp, Artificial Sequence
  ENSG00000106327_2 (sequence is synthesized)
caggcagccaaacctcattccctgggcggcagcaggacggagggctgccccctacctggtcctgacggccctgctgatcttcactggggccttcctactgggctacgtcgccttccgagg

SEQ ID NO: 155910 - DNA, 120 bp, Artificial Sequence
  ENSG00000106327_3 (sequence is synthesized)
gtcctgccaggcgtgcggagactctgtgttggtggtcagtgaggatgtcaactatgagcctgacctggatttccaccagggcagactctactggagcgacctccaggccatgttcctgca

SEQ ID NO: 155911 - DNA, 120 bp, Artificial Sequence
  ENSG00000106327_4 (sequence is synthesized)
gttcctgggggaggggcgcctggaggacaccatcaggcaaaccagccttcgggaacgggtggcaggctcggccgggatggccgctctgactcaggacattcgcgcggcgctctcccgcca

SEQ ID NO: 155912 - DNA, 120 bp, Artificial Sequence
  ENSG00000106327_5 (sequence is synthesized)
gaagctggaccacgtgtggaccgacacgcactacgtggggctgcaattcccggatccggctcaccccaacaccctgcactgggtcgatgaggccgggaaggtcggagagcagctgccgct

SEQ ID NO: 155913 - DNA, 120 bp, Artificial Sequence
  ENSG00000106327_6 (sequence is synthesized)
ggaggaccctgacgtctactgcccctacagcgccatcggcaacgtcacgggagagctggtgtacgcccactacgggcggcccgaagacctgcaggacctgcgggccaggggcgtggatcc

SEQ ID NO: 155914 - DNA, 120 bp, Artificial Sequence
  ENSG00000106327_7 (sequence is synthesized)
agtgggccgcctgctgctggtgcgcgtgggggtgatcagcttcgcccagaaggtgaccaatgctcaggacttcggggctcaaggagtgctcatatacccagagccagcggacttctccca

SEQ ID NO: 155915 - DNA, 120 bp, Artificial Sequence
  ENSG00000106327_8 (sequence is synthesized)
ggacccacccaagccaagcctgtccagccagcaggcagtgtatggacatgtgcacctgggaactggagacccctacacacctggcttcccttccttcaatcaaacccagttccctccagt

SEQ ID NO: 155916 - DNA, 120 bp, Artificial Sequence
  ENSG00000106327_9 (sequence is synthesized)
tgcatcatcaggccttcccagcatcccagcccagcccatcagtgcagacattgcctcccgcctgctgaggaagctcaaaggccctgtggccccccaagaatggcaggggagcctcctagg

SEQ ID NO: 155917 - DNA, 120 bp, Artificial Sequence
  ENSG00000106327_10 (sequence is synthesized)
ctccccttatcacctgggccccgggccacgactgcggctagtggtcaacaatcacaggacctccacccccatcaacaacatcttcggctgcatcgaaggccgctcagagccagatcacta

SEQ ID NO: 155918 - DNA, 120 bp, Artificial Sequence
  ENSG00000106327_11 (sequence is synthesized)
cgttgtcatcggggcccagagggatgcatggggcccaggagcagctaaatccgctgtggggacggctatactcctggagctggtgcggaccttttcctccatggtgagcaacggcttccg

SEQ ID NO: 155919 - DNA, 120 bp, Artificial Sequence
  ENSG00000106327_12 (sequence is synthesized)
cagaagtctcctcttcatcagctgggacggtggtgactttggaagcgtgggctccacggagtggctagagggctacctcagcgtgctgcacctcaaagccgtagtgtacgtgagcctgga

SEQ ID NO: 155920 - DNA, 120 bp, Artificial Sequence
  ENSG00000106327_13 (sequence is synthesized)
caacgcagtgctgggggatgacaagtttcatgccaagaccagcccccttctgacaagtctcattgagagtgtcctgaagcaggtggattctcccaaccacagtgggcagactctctatga

SEQ ID NO: 155921 - DNA, 120 bp, Artificial Sequence
  ENSG00000106327_14 (sequence is synthesized)
acaggtggtgttcaccaatcccagctgggatgctgaggtgatccggcccctacccatggacagcagtgcctattccttcacggcctttgtgggagtccctgccgtcgagttctcctttat

SEQ ID NO: 155922 - DNA, 120 bp, Artificial Sequence
  ENSG00000106327_15 (sequence is synthesized)
ggaggacgaccaggcctacccattcctgcacacaaaggaggacacttatgagaacctgcataaggtgctgcaaggccgcctgcccgccgtggcccaggccgtggcccagctcgcagggca

SEQ ID NO: 155923 - DNA, 120 bp, Artificial Sequence
  ENSG00000106327_16 (sequence is synthesized)
gctcctcatccggctcagccacgatcgcctgctgcccctcgacttcggccgctacggggacgtcgtcctcaggcacatcgggaacctcaacgagttctctggggacctcaaggcccgcgg

SEQ ID NO: 155924 - DNA, 120 bp, Artificial Sequence
  ENSG00000106327_17 (sequence is synthesized)
gctgaccctgcagtgggtgtactcggcgcggggggactacatccgggcggcggaaaagctgcggcaggagatctacagctcggaggagagagacgagcgactgacacgcatgtacaacgt

SEQ ID NO: 155925 - DNA, 120 bp, Artificial Sequence
  ENSG00000106327_18 (sequence is synthesized)
gcgcataatgcgggtggagttctacttcctttcccagtacgtgtcgccagccgactccccgttccgccacatcttcatgggccgtggagaccacacgctgggcgccctgctggaccacct

SEQ ID NO: 155926 - DNA, 120 bp, Artificial Sequence
  ENSG00000106327_19 (sequence is synthesized)
gcggctgctgcgctccaacagctccgggacccccggggccacctcctccactggcttccaggagagccgtttccggcgtcagctagccctgctcacctggacgctgcaaggggcagccaa

SEQ ID NO: 155927 - DNA, 120 bp, Artificial Sequence
  ENSG00000106327_20 (sequence is synthesized)
tgcgcttagcggggatgtctggaacattgataacaacttctgaggccctggggatcctcacatccccgtcccccagtcaagagctcctctgctcctcgcttgaatgattcagggtcaggg

SEQ ID NO: 155928 - DNA, 120 bp, Artificial Sequence
  ENSG00000106327_21 (sequence is synthesized)
aggtggctcagagtccacctctcattgctgatcaatttctcattacccctacacatctctccacggagcccagaccccagcacagatatccacacaccccagccctgcagtgtagctgac

SEQ ID NO: 155929 - DNA, 120 bp, Artificial Sequence
  ENSG00000106327_22 (sequence is synthesized)
cctaatgtgacggtcatactgtcggttaatcagagagtagcatcccttcaatcacagccccttcccctttctggggtcctccatacctagagaccactctgggaggtttgctaggccctg

SEQ ID NO: 155930 - DNA, 120 bp, Artificial Sequence
  ENSG00000106327_23 (sequence is synthesized)
ggacctggccagctctgttagtgggagagatcgctggcaccatagccttatggccaacaggtggtctgtggtgaaaggggcgtggagtttcaatatcaataaaccacctgatatcaataa

SEQ ID NO: 155931 - DNA, 120 bp, Artificial Sequence
  ENSG00000106327_24 (sequence is synthesized)
cacgcctgagcaccccaggacctgcgctcagggaggaggcaggcgtggggctgtggagagattggcaggggagagcacagccccttgtgctctggcctggacccgggggccacgtctgga

SEQ ID NO: 155932 - DNA, 120 bp, Artificial Sequence
  ENSG00000106327_25 (sequence is synthesized)
aggctggactgaggccaggactgtgcccccacccttgggggtggtgaggagcagccttggttcaggctgcctgccaggactgataaggggccctcctagggctcccacaaacggtttatc

SEQ ID NO: 155933 - DNA, 120 bp, Artificial Sequence
  ENSG00000106327_26 (sequence is synthesized)
tgggggaggggcgcctggaggacaccatcaggtagggatggccctgccccatcctgttctcgagtgtccctcccctcatccgctcagactgggcctccctgcctcctggcccaggcctct

SEQ ID NO: 155934 - DNA, 120 bp, Artificial Sequence
  ENSG00000106327_27 (sequence is synthesized)
gcaggcattcggagctgaggttccaggggactgaggctctgagggtggcatatttgggaggtgagggagctgactgtctgagatcagaggggtgcagcatccagtatcagactggacaga

SEQ ID NO: 155935 - DNA, 120 bp, Artificial Sequence
  ENSG00000106327_28 (sequence is synthesized)
cccagaaaagccttgaatgcctcacccaggcgcctagatttggagcagggagcgctgaggggttctgagaagccgcattctagggaatcagaaaaccaagcaagcaagcctgggcaatac

SEQ ID NO: 155936 - DNA, 120 bp, Artificial Sequence
  ENSG00000106327_29 (sequence is synthesized)
gatgaaaccccgtctctaccaaagaaaacacaaaaattagctggggatgatggcgagtgcctgtagtcccagttacttgggagcttgacgggggaggattgcctgagccggggaggcgga

SEQ ID NO: 155937 - DNA, 120 bp, Artificial Sequence
  ENSG00000106327_30 (sequence is synthesized)
ggcggggggcgcgcggggagggggacgcggctcggggcgctcaccagccccgctccccagggctcaccccaacaccctgcactgggtcgatgaggccgggaaggtcggagagcagctgcc

SEQ ID NO: 155938 - DNA, 120 bp, Artificial Sequence
  ENSG00000106327_31 (sequence is synthesized)
gtgctgttcccaggtcccgaggccacaccttcttgctcagaatagggctggcatgtttttcgtttttcctggaagcccagctcgcagctttgcgtgggcacccctttccctgcaggtgca

SEQ ID NO: 155939 - DNA, 85 bp, Artificial Sequence
  ENSG00000106327_32 (sequence is synthesized)
actccagagtatctaggattacaggaagctcaaaggccctgtggccccccaagaatggcaggggagcctcctaggctccccttat

SEQ ID NO: 155940 - DNA, 120 bp, Artificial Sequence
  ENSG00000106327_33 (sequence is synthesized)
cccagaaggtaagtgtccctggacagagggagggcttgagcccgggaaccggagggtcggactgccagtgagaatcgttcagggtgctgtgagagggagacaggaaagaaccatgtggct

SEQ ID NO: 155941 - DNA, 120 bp, Artificial Sequence
  ENSG00000106327_34 (sequence is synthesized)
ggatggtaagaaaatataagctgggcacgatggttctcacctgcaatcccagcactttaggaggccaagacaggaggatcgcttgaggccaggaattcaaggcaacacggtgagaacccc

SEQ ID NO: 155942 - DNA, 120 bp, Artificial Sequence
  ENSG00000106327_35 (sequence is synthesized)
ggctccacggagtggctagaggtgatacggggtcccgggcaggtcgttaggcattggggagaggtgggggtggggggttcccactccacactggtcacccacccacagggctacctcagc

SEQ ID NO: 155943 - DNA, 120 bp, Artificial Sequence
  ENSG00000106327_36 (sequence is synthesized)
ccctgcccctggcgaccccacgtctctggcatccttccctcttccctccctctcctccgggcgcccagaaaagtccccacctctccccgcttaggcaaaccagccttcgggaacgggtgg

SEQ ID NO: 155944 - DNA, 120 bp, Artificial Sequence
  ENSG00000106327_37 (sequence is synthesized)
ctctctccccgcctacacagtcccggtcctctggatgctctcttcccagtcctggacacgcagtgctcatagatcggtcaggctggaggacccgagcgatcaaagtgatgaaatggacag

SEQ ID NO: 155945 - DNA, 120 bp, Artificial Sequence
  ENSG00000106328_0 (sequence is synthesized)
ctctctgggaacatctggtgggtactacaggccctattccaggccctatggcctgtggaacctcaccacgggggggagggctgggccagacggagacatcacctgtggtgtcagccccat

SEQ ID NO: 155946 - DNA, 120 bp, Artificial Sequence
  ENSG00000106328_1 (sequence is synthesized)
ggatgagacagagtggatacacagacatcccaaggctgaggacctaagggttgggctcatcagctgggcaggaacctacctcacctttgaggcatgcaagaatacagtcactgcaactgc

SEQ ID NO: 155947 - DNA, 120 bp, Artificial Sequence
  ENSG00000106328_2 (sequence is synthesized)
gaagagtttgggcaggagacagacctgggagatcttggtgagcaatgagcatgagacacaggccgtggtgcgactaaagagcgtgcagggcctctacctgctgtgtgagtgtgatggcac

SEQ ID NO: 155948 - DNA, 120 bp, Artificial Sequence
  ENSG00000106328_3 (sequence is synthesized)
cgtgtgttatggccgcccaaggaccagccaccatgggtgctttctactgcgtttccaccggaacagcaagtggaccctccagtgcctaatctctggtcgttatttggagtccaatggcaa

SEQ ID NO: 155949 - DNA, 120 bp, Artificial Sequence
  ENSG00000106328_4 (sequence is synthesized)
ggacgtgttttgcacttcccacgtcctctcagcttaccacatgtggaccccccgaccagccctccatgtccacgtgatcctctacagccccatccaccgctgctatgcccgggctgaccc

SEQ ID NO: 155950 - DNA, 120 bp, Artificial Sequence
  ENSG00000106328_5 (sequence is synthesized)
cactatgggccgcatctgggtggacgcagcagttccctgcctggaggagtgtggcttcctgttgcatttccgagatggatgctaccacctggagacctctacacaccacttcttgtccca

SEQ ID NO: 155951 - DNA, 120 bp, Artificial Sequence
  ENSG00000106328_6 (sequence is synthesized)
tgtagaccggctgttctcccaaccctcatcacagacagcttttcacatgcaagtgcggcctggagggcttgtggcactgtgtgatggagaaggaggcatgttatatccacagggcacgca

SEQ ID NO: 155952 - DNA, 120 bp, Artificial Sequence
  ENSG00000106328_7 (sequence is synthesized)
tctgctcttgggcatgggctgcaaccccatgaggggtgaggagtggttcatcctacagcactgcccaacctgggtcagcctcaggtcaaagactgggcggttcatctcagtcatctacga

SEQ ID NO: 155953 - DNA, 120 bp, Artificial Sequence
  ENSG00000106328_8 (sequence is synthesized)
aatggctactacctatcccagaggcgccacagggcagtaatggctgatgggcaccccctggagtctgacacgttcttccgaatgcactggaactgtggcaggatcatcctgcagtcctgc

SEQ ID NO: 155954 - DNA, 120 bp, Artificial Sequence
  ENSG00000106328_9 (sequence is synthesized)
agggggcgcttcctgggcattgcacccaacagcctgctgatggccaatgtcatccttccaggcccaaatgaggaatttgggattttatttgccaatcgctccttccttgtattgcgaggt

SEQ ID NO: 155955 - DNA, 120 bp, Artificial Sequence
  ENSG00000106328_10 (sequence is synthesized)
cgttatggctatgtgggctcctcatcgggccatgacctcatacagtgcaaccaggatcagcccgaccgcattcatctactaccctgccgaccgggtatctaccacttccaggcacagggg

SEQ ID NO: 155956 - DNA, 120 bp, Artificial Sequence
  ENSG00000106328_11 (sequence is synthesized)
ggatccttctggtcaataacatcctttggcacctttcgcccttggggcaagtttgccctcaacttctgtatcgagcttcaggggagcaacttactcactgtactggcccccaatggcttc

SEQ ID NO: 155957 - DNA, 120 bp, Artificial Sequence
  ENSG00000106328_12 (sequence is synthesized)
tacatgcgagccgaccaaagtggcaccctgttggcagacagtgaagacattaccagagagtgtatctgggaattttaggtcaatgggatgtcacctaccaaaatccaaatcctccaggaa

SEQ ID NO: 155958 - DNA, 120 bp, Artificial Sequence
  ENSG00000106328_13 (sequence is synthesized)
aaactactacactaaatggaccaggaacctcagagtcaagatccaagagaagaacatctgttacaacttttcctacccagtttagcaaaacacctgttttatgcaacaatacatcacaac

SEQ ID NO: 155959 - DNA, 120 bp, Artificial Sequence
  ENSG00000106328_14 (sequence is synthesized)
aggccacccccaagatccttgtgtgcatctgactcaatatagaataggggtctggatgagggttgaaacagacaccccaggctgctctaagttctatacaggagagaccaaatggcaagc

SEQ ID NO: 155960 - DNA, 120 bp, Artificial Sequence
  ENSG00000106328_15 (sequence is synthesized)
agttcttccactgatcttccccgtccccatccagaactgctagactttttccagtgaacccatgagcagccagcattgccctgaagggtttagaatccagttatgactttaaatatcttt

SEQ ID NO: 155961 - DNA, 120 bp, Artificial Sequence
  ENSG00000106328_16 (sequence is synthesized)
ttggtttagaaaaaaggaaagattgttaatctcgtgagcacaggataatggtaataacaccttatgcctgtataggccactttacctcctcctaccacgatttatttaacttccccaccc

SEQ ID NO: 155962 - DNA, 120 bp, Artificial Sequence
  ENSG00000106328_17 (sequence is synthesized)
ggttgatcacagctgaaccaggcagttgcatctgaactgttcatgctcccatcttcatccctggagccagggcctgcctataagagcttttgcttctgtcttgccatgctggaaggcaac

SEQ ID NO: 155963 - DNA, 120 bp, Artificial Sequence
  ENSG00000106328_18 (sequence is synthesized)
agtttgaatgtgacagtgagagccccactgtgcagcttcgttcagccaatggctactacctatcccaggtgagaccttggcttcctgagcaagagaaaccttaagctctgagctctccct

SEQ ID NO: 155964 - DNA, 120 bp, Artificial Sequence
  ENSG00000106328_19 (sequence is synthesized)
ccctagacttccttctcctttttcaaggcaaatgatgagaggatgatgtgggctgtggaggcacttgttgataaacattcattttcacccaatgggggctcctttaaaaaaaaaaaacaa

SEQ ID NO: 155965 - DNA, 120 bp, Artificial Sequence
  ENSG00000106328_20 (sequence is synthesized)
atagccacaggcctctgctcctgctcctgcctgcatgttctctctgttgttggagcctggagccttgctctctgggcacagaggggtccactctcctgcctgctgggacctatggaaggg

SEQ ID NO: 155966 - DNA, 120 bp, Artificial Sequence
  ENSG00000106328_21 (sequence is synthesized)
gcttcctggccaaggccccctcttccagaggaggagcagggatctgggtttccttttttttttctgttttgggtgtactctaggggccaggttgggagggggaaggtgagggcttcgggt

SEQ ID NO: 155967 - DNA, 120 bp, Artificial Sequence
  ENSG00000106328_22 (sequence is synthesized)
gacaacgtgggagaggatcaaagcagctaaggctgcagggcaaccccacccacacataccctcagctcagcttctccctccttattcttgggctggaaatactgtagggtttacagtggt

SEQ ID NO: 155968 - DNA, 120 bp, Artificial Sequence
  ENSG00000106330_0 (sequence is synthesized)
atcggcgtatagttacggcagaaacaaagacgtcctagccaatgacagaggccgtacggcggaagtatagaaaaggactctctggaacatggcaacattaatctgaccacaagctgactg

SEQ ID NO: 155969 - DNA, 120 bp, Artificial Sequence
  ENSG00000106330_1 (sequence is synthesized)
gcaggtgctttaaccacaagctctgactccaggccctgtcccctgagctctgccctcggatgtccgaccgcccagagcctgcatgcgccgtggggcgccccaggaccaggagctggtggg

SEQ ID NO: 155970 - DNA, 120 bp, Artificial Sequence
  ENSG00000106330_2 (sequence is synthesized)
tccggggccccctgggcgggggtcccggggcgcccctcctcccttgggacccgttgtcccggtcctggtctttcccccggatctagtattcagggcggaccagcggagcggaccccgaca

SEQ ID NO: 155971 - DNA, 120 bp, Artificial Sequence
  ENSG00000106330_3 (sequence is synthesized)
gctgctgaccctctataaccccacaggaactgcgcttcgcttccgagtcctgtgcacagcacctgccaaatacacggtgtttgacgcagagggatatgtgaagccccagtcttgcattga

SEQ ID NO: 155972 - DNA, 120 bp, Artificial Sequence
  ENSG00000106330_4 (sequence is synthesized)
agtggtgggacgcaaggacattacctccattctgagagccccagcgtacccccttgagcttcagggacagccagatccagcgcctcgcccagggcctcctgctgggacaccaccacccac

SEQ ID NO: 155973 - DNA, 120 bp, Artificial Sequence
  ENSG00000106330_5 (sequence is synthesized)
ggccagacacttccaggagcacccccgccagcaactggccaccagctccttcctcctcttcttgctgacggggattgtgtctgtggccttcctgctgctcccactcccggacgaactcgg

SEQ ID NO: 155974 - DNA, 120 bp, Artificial Sequence
  ENSG00000106330_6 (sequence is synthesized)
cagccagctgcctcaagtcctgcacgtctccctgggacaaaagttggtggccgcctacgtcttgggcctcctcaccatggtgttcctccggacctgagctccgtgctcaacccccagccc

SEQ ID NO: 155975 - DNA, 120 bp, Artificial Sequence
  ENSG00000106330_7 (sequence is synthesized)
accccaccctccctgggcagggtcttgaggcagccactgtgatgctcataccttaccttgcctcctaccctcttctctttcctgcctactccccactcctccctgacaaaaaacacccag

SEQ ID NO: 155976 - DNA, 120 bp, Artificial Sequence
  ENSG00000106330_8 (sequence is synthesized)
gtggccgtcgaggtggggctcggcgggtccgaaggaacctggggcagagctggaagaggaaaggtcttgggggccctgggcctgggtctgcgggagccccatctagcggggttccaaggc

SEQ ID NO: 155977 - DNA, 120 bp, Artificial Sequence
  ENSG00000106330_9 (sequence is synthesized)
ggcgcccgctgcagcgggcggagtctggctggagagaggaggcgggcgtccgggaacgcccggaaggggcgaggccagcggcggggcggggcttatggagatcgtgagctgggcctctga

SEQ ID NO: 155978 - DNA, 120 bp, Artificial Sequence
  ENSG00000106331_0 (sequence is synthesized)
caaagactcacccgtgagccagctctcaaagaaagcagcttgcgttgacagcctgggggcagcaaggatgcagtctcccaggagaggatgcactcggtggtgggaagccaggctggaggg

SEQ ID NO: 155979 - DNA, 120 bp, Artificial Sequence
  ENSG00000106331_1 (sequence is synthesized)
gcctgagtgaccctctccacaggcgggcagggcagtgggagaggtggtgtgtggatacctctgtctcacgcccagggatcagcagcatgaaccagcttggggggctctttgtgaatggcc

SEQ ID NO: 155980 - DNA, 120 bp, Artificial Sequence
  ENSG00000106331_2 (sequence is synthesized)
ggcccctgcctctggatacccggcagcagattgtgcggctagcagtcagtggaatgcggccctgtgacatctcacggatccttaaggtatctaatggctgtgtgagcaagatcctagggc

SEQ ID NO: 155981 - DNA, 120 bp, Artificial Sequence
  ENSG00000106331_3 (sequence is synthesized)
gttactaccgcacaggtgtcttggagccaaagggcattgggggaagcaagccacggctggctacaccccctgtggtggctcgaattgcccagctgaagggtgagtgtccagccctctttg

SEQ ID NO: 155982 - DNA, 120 bp, Artificial Sequence
  ENSG00000106331_4 (sequence is synthesized)
cctgggaaatccaacgccagctttgtgctgaagggctttgcacccaggacaagactcccagtgtctcctccatcaaccgagtcctgcgggcattacaggaggaccagggactaccgtgca

SEQ ID NO: 155983 - DNA, 120 bp, Artificial Sequence
  ENSG00000106331_5 (sequence is synthesized)
cacggctcaggtcaccagctgttttggctccagctgtcctcactccccatagtggctctgagactccccggggtacccacccagggaccggccaccggaatcggactatcttctccccaa

SEQ ID NO: 155984 - DNA, 120 bp, Artificial Sequence
  ENSG00000106331_6 (sequence is synthesized)
gccaagcagaggcactggagaaagagttccagcgtgggcagtatcctgattcagtggcccgtggaaagctggctactgccacctctctgcctgaggacacggtgagggtctggttttcca

SEQ ID NO: 155985 - DNA, 120 bp, Artificial Sequence
  ENSG00000106331_7 (sequence is synthesized)
acagaagagccaaatggcgtcggcaagagaagctcaagtgggaaatgcagctgccaggtgcttcccaggggctgactgtaccaagggttgccccaggaatcatctctgcacagcagtccc

SEQ ID NO: 155986 - DNA, 120 bp, Artificial Sequence
  ENSG00000106331_8 (sequence is synthesized)
gtctgagtgacaccccacctaaagcctgtctcaagccctgctggggccacttgcccccacagccgaattccctggactcaggactgctttgccttccttgcccttcctcccactgtcacc

SEQ ID NO: 155987 - DNA, 120 bp, Artificial Sequence
  ENSG00000106331_9 (sequence is synthesized)
tggccagtcttagtggctctcaggccctgctctggcctggctgcccactactgtatggcttggaatgaggcaggagtgggaaggagatggcatagagaagatctaataccatcctgccca

SEQ ID NO: 155988 - DNA, 120 bp, Artificial Sequence
  ENSG00000106331_10 (sequence is synthesized)
ttgtccttaccgtcctgcccatacagactgtggctccttcctccttcctgtgattgctccctcctgtgtggacgttgcctggccctgcctcgatgcctctctggcgcatcacctgattgg

SEQ ID NO: 155989 - DNA, 120 bp, Artificial Sequence
  ENSG00000106331_11 (sequence is synthesized)
aggggctggtaaagcaacacccacccacttctcacactagccttaagaggcctccactcagcagtaataaaagctgtttttattagcagtagttctgttgtccatcatgttttccctatg

SEQ ID NO: 155990 - DNA, 120 bp, Artificial Sequence
  ENSG00000106331_12 (sequence is synthesized)
agcacccctatgcccactctaatattcaacaattatagacaatttgccctatcatttatttacatctatgtatctaccatctaatctatgcatgtatgtaggcaatacatgtatctaaac

SEQ ID NO: 155991 - DNA, 120 bp, Artificial Sequence
  ENSG00000106331_13 (sequence is synthesized)
ggcaatacatgtatctaaacaatgtatttgtcaatgcatcaatttacctactctatgtatgcatctatatgtgtattatgtatgcgtgcatgcgtgcgcgcacacacacacacacacaca

SEQ ID NO: 155992 - DNA, 120 bp, Artificial Sequence
  ENSG00000106331_14 (sequence is synthesized)
gcattttattcctaaatcttccagcatgcatccccaaaaaacaagaaacttgtcttacataatcacaataatatatccacatctaagaaaatttactgtaacttcttaatctaagaaaat

SEQ ID NO: 155993 - DNA, 120 bp, Artificial Sequence
  ENSG00000106331_15 (sequence is synthesized)
tatgtatttttgtcatatgtattttgtcatatgtattttgtatttgcatatgtattttgtatttgcatatgtatttttgtcatagcagcaaacagagtgaaatgccatttttcatattct

SEQ ID NO: 155994 - DNA, 120 bp, Artificial Sequence
  ENSG00000106331_16 (sequence is synthesized)
agaaggctgccctctgctcttgagcacgggctctctatagctctggaccccctggcaggactgaagcaggagcagagtggaggctgttaccaagaccagatcatcaccacccctggagcc

SEQ ID NO: 155995 - DNA, 120 bp, Artificial Sequence
  ENSG00000106331_17 (sequence is synthesized)
tgcaggggtctcagaagctgagacctcccactgaagctcccacctcatttcctccacacagcccctgacttgtggcaatgccaatctgtgcctcagttttctctttggaaaacctctgcc

SEQ ID NO: 155996 - DNA, 120 bp, Artificial Sequence
  ENSG00000106331_18 (sequence is synthesized)
ttctttcccgactttttggaaagatgagaatttgaaggggtctgtgcctctacctacctagaaacaaagccagcccccaagctggaaaaggagctcctagaaggaacttcccttcccagc

SEQ ID NO: 155997 - DNA, 120 bp, Artificial Sequence
  ENSG00000106331_19 (sequence is synthesized)
atggcctggtccagtaagtcttggctttgtcttatagcctcctcctgtcccagggacactctccttccttctgcccatcatgcctcacctgtccctgcttctcacctgactcaggtatct

SEQ ID NO: 155998 - DNA, 120 bp, Artificial Sequence
  ENSG00000106331_20 (sequence is synthesized)
gccaggatctccggctctccagggccccacagtgttcatgtcaagaaagtactaacccaaagtctactatgtgaatggtgccctctggagttgtgcaggatactacttgggtggcaggca

SEQ ID NO: 155999 - DNA, 120 bp, Artificial Sequence
  ENSG00000106331_21 (sequence is synthesized)
cccacagtgttcatgtcaagaaagtactaacccaaagtctactatgtgaatggtgccctctggagttgtgcaggatactacttgggtggcaggcagctctggggtcccggcgttctctac

SEQ ID NO: 156000 - DNA, 120 bp, Artificial Sequence
  ENSG00000106331_22 (sequence is synthesized)
aggaggcatcactggaagctaaggttcttctcttgctttttttttttagcagtcccctggcagtgtgcccacagcagccctgcctgccctggaaccactgggtccctcctgctatcagct

SEQ ID NO: 156001 - DNA, 120 bp, Artificial Sequence
  ENSG00000106333_0 (sequence is synthesized)
gattatcctgctgctgccgccaccgctgctgctgctctgcaaaattcagctgctgcctctgtcttgaggaccccagcgcctttcccccggggccatgctgcctgcagccacagcctccct

SEQ ID NO: 156002 - DNA, 120 bp, Artificial Sequence
  ENSG00000106333_1 (sequence is synthesized)
cctggggcccctcctcactgcctgcgccctgctgccttttgcccagggccagacccccaactacaccagacccgtgttcctgtgcggaggggatgtgaagggggaatcaggttacgtggc

SEQ ID NO: 156003 - DNA, 120 bp, Artificial Sequence
  ENSG00000106333_2 (sequence is synthesized)
aagtgaggggttccccaacctctacccccctaataaggagtgcatctggaccataacggtccccgagggccagactgtgtccctctcattccgagtcttcgacctggagctgcaccccgc

SEQ ID NO: 156004 - DNA, 120 bp, Artificial Sequence
  ENSG00000106333_3 (sequence is synthesized)
ctgccgctacgatgctctggaggtcttcgctgggtctgggacttccggccagcggctcggacgcttttgtgggaccttccggcctgcgcccctagtcgcccccggcaaccaggtgaccct

SEQ ID NO: 156005 - DNA, 120 bp, Artificial Sequence
  ENSG00000106333_4 (sequence is synthesized)
gaggatgacgacggatgagggcacaggaggacgaggcttcctgctctggtacagcgggcgggccacctcgggcactgagcaccaattttgcggggggcggctggagaaggcccagggaac

SEQ ID NO: 156006 - DNA, 120 bp, Artificial Sequence
  ENSG00000106333_5 (sequence is synthesized)
cctgaccacgcccaactggcccgagtccgattaccccccgggcatcagctgttcctggcacatcatcgcgcccccggaccaggtcatcgcgctgaccttcgagaagtttgacctggagcc

SEQ ID NO: 156007 - DNA, 120 bp, Artificial Sequence
  ENSG00000106333_6 (sequence is synthesized)
ttctgcggcgacgcagtcccgggctccatctcctccgaagggaatgaactcctcgtccagttcgtctcagatctcagtgtcaccgctgatggcttctcagcctcctacaagaccctgccg

SEQ ID NO: 156008 - DNA, 120 bp, Artificial Sequence
  ENSG00000106333_7 (sequence is synthesized)
cggggcactgccaaagaagggcaagggcccggccccaaacggggaactgagcctaaagtcaagctgccccccaagtcccaacctccggagaaaacagaggaatctccttcagcccctgat

SEQ ID NO: 156009 - DNA, 120 bp, Artificial Sequence
  ENSG00000106333_8 (sequence is synthesized)
gcacccacctgcccaaagcagtgccgccggacaggcaccttgcagagcaacttctgtgccagcagccttgtggtgactgcgacagtgaagtccatggttcgggagccaggggagggcctt

SEQ ID NO: 156010 - DNA, 120 bp, Artificial Sequence
  ENSG00000106333_9 (sequence is synthesized)
gccgtgactgtcagtcttattggtgcttataaaactggaggactggacctgccttctccacccactggtgcctccctgaagttttacgtgccttgcaagcagtgcccccccatgaagaaa

SEQ ID NO: 156011 - DNA, 120 bp, Artificial Sequence
  ENSG00000106333_10 (sequence is synthesized)
ggagtcagttatctgctgatgggccaggtagaagagaacagaggccccgtccttcctccagagagctttgtggttctccaccggcccaaccaggaccagatcctcaccaacctaagcaag

SEQ ID NO: 156012 - DNA, 120 bp, Artificial Sequence
  ENSG00000106333_11 (sequence is synthesized)
aggaagtgcccctctcaacctgtgcgggctgctgcgtcccaggactgagacgcaggccagccccggcccctagccctcaggccttctttcttatccaaataaatgtttcttaatgaggaa

SEQ ID NO: 156013 - DNA, 120 bp, Artificial Sequence
  ENSG00000106333_12 (sequence is synthesized)
gcacaggctaccagcagagctgcagagaccaggccctctgctctgcactcacatggaggccccttcccattcagtccgtttctgcaagaaacgcttggggcaggggagctgccctctggc

SEQ ID NO: 156014 - DNA, 120 bp, Artificial Sequence
  ENSG00000106333_13 (sequence is synthesized)
cccgggctgccctaggggacccaggcggcgccctccagcttgcagccagcagagatttattgaagatctgctgtgtcccgagcactgcgcttgcgctggtgggcacccaaaacagcccca

SEQ ID NO: 156015 - DNA, 120 bp, Artificial Sequence
  ENSG00000106333_14 (sequence is synthesized)
acccctgcatgcacgcaaacaaaaatgtaaaaattacaactgagacaagtctcaggagagcgaggtacagggtcctggtataacacgcgggcctgtcacttgtgagtgcgccaggacttg

SEQ ID NO: 156016 - DNA, 120 bp, Artificial Sequence
  ENSG00000106333_15 (sequence is synthesized)
accttgccaaccacgacgaccgacacccctgcagggtcccatgggtgtgtgtggtcctccgtgctgtggtgtgaacgccttcaggaggggggcccagaggacgcgggaggtgggagtggg

SEQ ID NO: 156017 - DNA, 120 bp, Artificial Sequence
  ENSG00000106333_16 (sequence is synthesized)
cccgagtccgattaccccccgggcatcagctgttcctggcacatcatcgcgcccccggaccagggtcccatgggtgtgtgtggtcctccgtgctgtggtgtgaacgccttcaggaggggg

SEQ ID NO: 156018 - DNA, 120 bp, Artificial Sequence
  ENSG00000106333_17 (sequence is synthesized)
gcccagaggacgcgggaggtgggagtgggagctgctgcaggcacccagtaggagatgaggtgcaggcgcccaggggtgtcccgccgcgcagtccccgcctccgcccgccgccaggtcatc

SEQ ID NO: 156019 - DNA, 120 bp, Artificial Sequence
  ENSG00000106333_18 (sequence is synthesized)
cagacatccgagctgcctgccggggctcccagcctagagttctcctgaagctgaccgagggtctccaccgccccccacccccgctcctctctcccctccccagagcaccaattttgcggg

SEQ ID NO: 156020 - DNA, 120 bp, Artificial Sequence
  ENSG00000106333_19 (sequence is synthesized)
attcctgttggggtgggggtggggactcttggggttggagggatggtcgagttgccaggcccacttttcccttatctttgtgggagtctgggacaccccagccctgtcctggctggtgga

SEQ ID NO: 156021 - DNA, 120 bp, Artificial Sequence
  ENSG00000106333_20 (sequence is synthesized)
agctgccccaggtctctcaaggcctttccatttcatcccccagcttccctccttggagtttcatcctcatcacctcatccccatcttgccagtgctcccccgtcccacccgtccctgctc

SEQ ID NO: 156022 - DNA, 120 bp, Artificial Sequence
  ENSG00000106333_21 (sequence is synthesized)
cgcaaccttgtctgtaccaaaaatacaaaataattagctgggcatggtggcgtgcctgtagtcccagcaacttgcggggctgaggcaggaggattacttgaacccagaaggtcaaggctg

SEQ ID NO: 156023 - DNA, 120 bp, Artificial Sequence
  ENSG00000106333_22 (sequence is synthesized)
cagtaagcctagatggagccactgcactcaagcctgggagacaaagtgagaccctgtctcaaacaaacaaaaaaggtcatggggctgagaagagtgtggtgcacgcccgccctgacactt

SEQ ID NO: 156024 - DNA, 120 bp, Artificial Sequence
  ENSG00000106333_23 (sequence is synthesized)
ggtcggggaggggccagaagggggcgtccagccagttcctcctcccgcttccaccgcccgccagtgcgccctgcggccccagacttccccgagccgcgctcctcccggccgctctctgtt

SEQ ID NO: 156025 - DNA, 120 bp, Artificial Sequence
  ENSG00000106333_24 (sequence is synthesized)
tgggccccccccaggcgcgaggcggaaatgggtcaccgacccgcgggtggaatgggcggcctggggttactgggacggtgagtaactgccggcccccgtccgcaatcgggctccctccgt

SEQ ID NO: 156026 - DNA, 120 bp, Artificial Sequence
  ENSG00000106333_25 (sequence is synthesized)
cgggcgcgagggggcaccccagggctggggggactaggttcctccaaccccggggggcccctacacccagccctgggctcccgattgcggtcccatcaccccctcctggcggcagaagtc

SEQ ID NO: 156027 - DNA, 120 bp, Artificial Sequence
  ENSG00000106333_26 (sequence is synthesized)
tcccttgcaatgtttcaggcggggacctccctaaaggggtcctcgggggctgtgccccaagtcgaggacaccctctccagcctgaaaggggactctgctgcagggccggggagatgggat

SEQ ID NO: 156028 - DNA, 120 bp, Artificial Sequence
  ENSG00000106333_27 (sequence is synthesized)
ctcctaggggaagaggcgcggtgcggccgcgggtcggggaggggccagaagggggcgtccagccagttcctcctcccgcttccaccgcccgccagtgcgccctgcggccccagacttccc

SEQ ID NO: 156029 - DNA, 120 bp, Artificial Sequence
  ENSG00000106336_0 (sequence is synthesized)
taggctggggacatggtgtgggaaagccagcaggaacgggggggccaagggcctaggagacaggagggcaggagcagggagggggcaatcaggatggtcaggggaagccagagacggaag

SEQ ID NO: 156030 - DNA, 120 bp, Artificial Sequence
  ENSG00000106336_1 (sequence is synthesized)
ctgcaaaaattcaccaggctgtgtggacgggaggaggggctccgggtgaagagaagctgcccttcttgtggctcggagcttggggttgaagagaagagggggaaaggaaatccgatttcc

SEQ ID NO: 156031 - DNA, 120 bp, Artificial Sequence
  ENSG00000106336_2 (sequence is synthesized)
atccagttgttccccccagagctggtggagcatatcatctcattcctcccagtcagagaccttgttgccctcggccagacctgccgctacttccacgaagtgtgcgatggggaaggcgtg

SEQ ID NO: 156032 - DNA, 120 bp, Artificial Sequence
  ENSG00000106336_3 (sequence is synthesized)
tggagacgcatctgtcgcagactcagtccgcgcctccaagatcagggttctggagtccggccctggaagagagctgccattctgaactacacgaagggcctgtatttccaggcatttgga

SEQ ID NO: 156033 - DNA, 120 bp, Artificial Sequence
  ENSG00000106336_4 (sequence is synthesized)
ggccgccgccgatgtctcagcaagagcgtggcccccttgctagcccacggctaccgccgcttcttgcccaccaaggatcacgtcttcattcttgactacgtggggaccctcttcttcctc

SEQ ID NO: 156034 - DNA, 120 bp, Artificial Sequence
  ENSG00000106336_5 (sequence is synthesized)
aaaaatgccctggtctccaccctcggccagatgcagtggaagcgggcctgtcgctatgttgtgttgtgtcgtggagccaaggattttgcctcggacccaaggtgtgacacagtttaccgt

SEQ ID NO: 156035 - DNA, 120 bp, Artificial Sequence
  ENSG00000106336_6 (sequence is synthesized)
aaatacctctacgtcttggccactcgggagccgcaggaagtggtgggtaccaccagcagccgggcctgtgactgtgttgaggtctatctgcagtctagtgggcagcgggtcttcaagatg

SEQ ID NO: 156036 - DNA, 120 bp, Artificial Sequence
  ENSG00000106336_7 (sequence is synthesized)
acattccaccactcaatgaccttcaagcagatcgtgctggttggtcaggagacccagcgggctctactgctcctcacagaggaaggaaagatctactctttggtagtgaatgagacccag

SEQ ID NO: 156037 - DNA, 120 bp, Artificial Sequence
  ENSG00000106336_8 (sequence is synthesized)
gtcccactacctgcctcacctgcgcgtggcctgcatgacttccaaccagagcagcaccctctacgtcacagaccaggggggagtgtattttgaggtgcataccccaggggtgtatcgcga

SEQ ID NO: 156038 - DNA, 120 bp, Artificial Sequence
  ENSG00000106336_9 (sequence is synthesized)
tctctttgggacccttcaagcctttgaccccctggaccagcagatgccgcttgctctctcactgcctgccaagatcctattctgtgctcttggctacaaccaccttggcctggtggatga

SEQ ID NO: 156039 - DNA, 120 bp, Artificial Sequence
  ENSG00000106336_10 (sequence is synthesized)
atttggccgaatcttcatgcaaggaaataacagatacgggcagctaggaacaggggacaaaatggaccgaggggaacccacacaggtttgttacctgcagcggcccatcaccctgtggtg

SEQ ID NO: 156040 - DNA, 120 bp, Artificial Sequence
  ENSG00000106336_11 (sequence is synthesized)
cggcctcaaccactccctggtgctgagccagagctcagagttcagcaaggagctgctgggctgcggctgtggggctgggggccgcctcccaggctggcccaaggggagtgcctccttcgt

SEQ ID NO: 156041 - DNA, 120 bp, Artificial Sequence
  ENSG00000106336_12 (sequence is synthesized)
caagctccaagtcaaggtccctctgtgtgcctgtgccctctgtgccaccagggagtgcctatacatcctgtccagccacgacattgagcagcacgccccctatcgccacctgccagccag

SEQ ID NO: 156042 - DNA, 120 bp, Artificial Sequence
  ENSG00000106336_13 (sequence is synthesized)
cagggtggtggggactcctgagcccagcctgggggccagagcaccccaggaccccggggggatggcccaggcctgcgaggagtacctcagccagatccacagttgccaaacgttgcagga

SEQ ID NO: 156043 - DNA, 120 bp, Artificial Sequence
  ENSG00000106336_14 (sequence is synthesized)
ccgcacggagaagatgaaggagatcgtagggtggatgcccctgatggccgcacagaaggacttcttctgggaggccctggacatgctgcagagggctgaaggaggcgggggtggtgtagg

SEQ ID NO: 156044 - DNA, 120 bp, Artificial Sequence
  ENSG00000106336_15 (sequence is synthesized)
gcccccagcccctgagacctaatccccctcatgctagcctagtccctggaggagggagtccggccccaggccagggactaaggagcaatgaccattgtgcacatgcgtgtgggaaggggt

SEQ ID NO: 156045 - DNA, 120 bp, Artificial Sequence
  ENSG00000106336_16 (sequence is synthesized)
tgctagggggtggggacggctaaccagggtaagaatgttcagggggctgcccaggaggggcccccaacctgactatcatggacaagagatttgatggatagaataaaaggctgcagcgag

SEQ ID NO: 156046 - DNA, 120 bp, Artificial Sequence
  ENSG00000106336_17 (sequence is synthesized)
agagcgctcgccaacggccgacgctccaggccgtcccgcccagcgcagctgcacccaatcacaatgctcagatcgggaggtggagccaatcaggtccaaccaagaggaggggacaccggc

SEQ ID NO: 156047 - DNA, 120 bp, Artificial Sequence
  ENSG00000106336_18 (sequence is synthesized)
actccactagcaggaaaacgggccgagggaccgcaagcagggggtgcctagtcctcgtcccccaaagaccaatcgtaagccagatacaggcgagtgactgtcaagaaggccaattagagc

SEQ ID NO: 156048 - DNA, 120 bp, Artificial Sequence
  ENSG00000106336_19 (sequence is synthesized)
ctccgaagggaatctggacctgcctcttctctgagggacggctctacctaccaatagcatgggcgagaaggcggtccctttgctaaggaggaggcgggtgaagagaagctgcccttcttg

SEQ ID NO: 156049 - DNA, 120 bp, Artificial Sequence
  ENSG00000106336_20 (sequence is synthesized)
tgcactccagcctgggcaacaagagggagactccgtctcgaaaaaaaaagacatacctgagaccggtttgcctcggacccaaggtgtgacacagtttaccgtaaatacctctacgtcttg

SEQ ID NO: 156050 - DNA, 120 bp, Artificial Sequence
  ENSG00000106336_21 (sequence is synthesized)
tcctttgcaagatggcccctccccgccacctcaggattcttcctactatcaccccagggagcctagtccaagggagatcagggacccaagactaggcgacacgcagcgaagacactcaga

SEQ ID NO: 156051 - DNA, 120 bp, Artificial Sequence
  ENSG00000106336_22 (sequence is synthesized)
aagagatgggagacgggaggggaaggctcaaggcagtccgggcagcaaggcactgatgcttttcgtctgcttggagggcgaggagagatggagggcaggtgttgcagagcaggcgagatc

SEQ ID NO: 156052 - DNA, 120 bp, Artificial Sequence
  ENSG00000106336_23 (sequence is synthesized)
aggaaggaggaggaggaatctcagataagccggttggggataataggcggaagagctcagggagaaaagagtgaggggaggtgaagagaagctgcccttcttgtggctcggagcttgggg

SEQ ID NO: 156053 - DNA, 120 bp, Artificial Sequence
  ENSG00000106341_0 (sequence is synthesized)
agccactgccgcagaggagccaggcccagcctcggtgagcacacacgccctccctgtctctcgccttcgcttccctgcatctgcgctgattgtgctggagaagaaatacatccacccacc

SEQ ID NO: 156054 - DNA, 120 bp, Artificial Sequence
  ENSG00000106341_1 (sequence is synthesized)
ctcctttgatgatgtccactgagcaaatgcagccactggaactctcagaagacagactggacaagctagaccctcgttgcagccacttagatgatctttcagaccagttcattaaggact

SEQ ID NO: 156055 - DNA, 120 bp, Artificial Sequence
  ENSG00000106341_2 (sequence is synthesized)
gtgatctcaaaaagaagcctagaaagggaaaaaatgtacaggccaccctgaatgttgagtcagaccaaaaaaaaccaaggaggaaagatacaccggcgctgcacatcccacctttcatac

SEQ ID NO: 156056 - DNA, 120 bp, Artificial Sequence
  ENSG00000106341_3 (sequence is synthesized)
caggtgtgttttcagaacatttaattaaaagatacgatgttcaagagagacatccaaagggcaaaatgatccctgttcttcataacactgacctggaacagaaaaagccaaggagaaaag

SEQ ID NO: 156057 - DNA, 120 bp, Artificial Sequence
  ENSG00000106341_4 (sequence is synthesized)
acacacctgccctgcacatgtccccctttgcagcaggtgtgacattgctcagggacgagagacccaaagcaatcgtggaagatgacgaaaaggatggtgacaagatagctatttaaagat

SEQ ID NO: 156058 - DNA, 120 bp, Artificial Sequence
  ENSG00000106341_5 (sequence is synthesized)
agttcccctgagaccacttgtaaataggttagattggttccctgtggtgacctagagaaaaaatagacttgtttctgctctcatttttgtcatcgtctgacttgaagattcagacacctt

SEQ ID NO: 156059 - DNA, 120 bp, Artificial Sequence
  ENSG00000106341_6 (sequence is synthesized)
ctccccaggagatgtatgccatcaaattgccagtcacctctttgtctctctcttctttctgagtatggtttctattctgtgttttgaatttttattttctaatgcagtggaaaagaaaca

SEQ ID NO: 156060 - DNA, 120 bp, Artificial Sequence
  ENSG00000106341_7 (sequence is synthesized)
ttacatgggctccttcttggtttttgctgctgggcaggacttgacttagcattatccaagcaccagtccaagtggggttccctgttgccagttagagaggtgagaatgtttggactctaa

SEQ ID NO: 156061 - DNA, 120 bp, Artificial Sequence
  ENSG00000106341_8 (sequence is synthesized)
ctcaccgattgctttgcagacaaaggtcttttatttctcctgtcctatcttaagagtccaaatgtctctggtgatgttcctaagacccttgtcccagatactctaaatgtgaatgtatga

SEQ ID NO: 156062 - DNA, 120 bp, Artificial Sequence
  ENSG00000106341_9 (sequence is synthesized)
gctgggggagtcaacccagcccaccatgccttggctgatgataccagaggcagagagtgctggtctgtctgggaagcttagcaatgtatcttcaaatttatttttgtttttaaaaatatt

SEQ ID NO: 156063 - DNA, 120 bp, Artificial Sequence
  ENSG00000106341_10 (sequence is synthesized)
tcttaaacatgctgtcccaacatttgtgagttgtgtcacaagtgagtcattatcaatggtagataaaatatcaatgtttgtgatgaatttactgtaaaaaaattaaggtcaatgaaagcc

SEQ ID NO: 156064 - DNA, 120 bp, Artificial Sequence
  ENSG00000106341_11 (sequence is synthesized)
attctgttatttttagcattctcacttatttagactctattacactttcttggatgagaggggagagtgtggtgttagctagtgagcagaggtctgtatattgtccttgccccagcctgc

SEQ ID NO: 156065 - DNA, 120 bp, Artificial Sequence
  ENSG00000106341_12 (sequence is synthesized)
aatctgtggatgcccaggggaaggcatacaggcctcatccaccaggcaatagacaggagagaggtgagaactatttttagaaggaggaaaagtagatacgcaaattgtcacaactaagag

SEQ ID NO: 156066 - DNA, 120 bp, Artificial Sequence
  ENSG00000106341_13 (sequence is synthesized)
tgataatttggtagctctgtatgtatgctggttccaactgtttaatcccttctgtctttctgttctcacaaagatggaaaagatacaagagcttgccggaaataaagctacatctatcca

SEQ ID NO: 156067 - DNA, 120 bp, Artificial Sequence
  ENSG00000106344_0 (sequence is synthesized)
acttccggaatctctcggcgtgtgagcttggttgtcctaccaaagccagcgtttcggctcgcgtgcgccggcctagtttgctcgcgtcctcacgcgctttgggtttcccggtctcatggc

SEQ ID NO: 156068 - DNA, 120 bp, Artificial Sequence
  ENSG00000106344_1 (sequence is synthesized)
cggcctgaccttatttgtgggccgcctcccgccctcggcccgcagtgagcagctggaggaactgttcagtcaggtggggccggtgaagcagtgcttcgtggtgactgaaaaagggagtaa

SEQ ID NO: 156069 - DNA, 120 bp, Artificial Sequence
  ENSG00000106344_2 (sequence is synthesized)
ggcatgtcgaggctttggctatgtcactttttcaatgctggaagatgttcagagggccctcaaggagattaccacctttgaaggttgcaagatcaacgtgactgttgccaagaaaaaact

SEQ ID NO: 156070 - DNA, 120 bp, Artificial Sequence
  ENSG00000106344_3 (sequence is synthesized)
gaggaacaagacaaaggaaaaggggaaaaatgaaaactcagagtgcccaaagaaggagccgaaggctaaaaaagccaaagtggcagataagaaagccagattaattattcggaacctgag

SEQ ID NO: 156071 - DNA, 120 bp, Artificial Sequence
  ENSG00000106344_4 (sequence is synthesized)
ctttaagtgttcagaagatgacttgaagacagtatttgctcaatttggagctgtcctggaagtaaatatccctaggaaaccagatgggaagatgcgcggttttggttttgttcagttcaa

SEQ ID NO: 156072 - DNA, 120 bp, Artificial Sequence
  ENSG00000106344_5 (sequence is synthesized)
aaacctcctagaagcaggtaaagctctcaaaggcatgaacatgaaagagataaaaggccggacagtggctgtggattgggccgtggcaaaggataaatataaagatacacagtctgtttc

SEQ ID NO: 156073 - DNA, 120 bp, Artificial Sequence
  ENSG00000106344_6 (sequence is synthesized)
tgctataggtgaggaaaagagccatgaatctaaacatcaggaatcagttaaaaagaagggcagagaggaagaggatatggaagaggaagaaaacgatgatgatgacgatgatgatgatga

SEQ ID NO: 156074 - DNA, 120 bp, Artificial Sequence
  ENSG00000106344_7 (sequence is synthesized)
agaagatggggtttttgatgatgaagatgaagaggaagagaatatagaatcaaaggtgaccaagcctgtgcaaattcagaagagagcagtcaagagaccagcccctgcaaaaagcagtga

SEQ ID NO: 156075 - DNA, 120 bp, Artificial Sequence
  ENSG00000106344_8 (sequence is synthesized)
tcattctgaggaggacagtgacctagaggaaagcgatagtattgatgatggagaggaactggctcagagtgataccagcactgaggagcaagaggataaagctgtgcaagtctcaaacaa

SEQ ID NO: 156076 - DNA, 120 bp, Artificial Sequence
  ENSG00000106344_9 (sequence is synthesized)
aaagaagaggaaattaccctctgatgtgaatgaagggaaaactgtttttatcagaaatctgtcctttgactcagaagaagaagaacttggggagcttctccaacagtttggagaactcaa

SEQ ID NO: 156077 - DNA, 120 bp, Artificial Sequence
  ENSG00000106344_10 (sequence is synthesized)
atatgtccgcattgtcttgcatccagacacagagcattctaaaggttgtgcatttgcccagttcatgactcaagaagcagctcagaaatgccttctagctgcttctccagagaatgaggc

SEQ ID NO: 156078 - DNA, 120 bp, Artificial Sequence
  ENSG00000106344_11 (sequence is synthesized)
tggtgggcttaaactggatggccggcagctcaaggttgacttggcggtgacccgtgatgaggctgcaaagcttcagacgacgaaggtgaagaagccgactggcacccggaatctctatct

SEQ ID NO: 156079 - DNA, 120 bp, Artificial Sequence
  ENSG00000106344_12 (sequence is synthesized)
ggcccgagaaggcttgattcgtgctgggacgaaggctgcagagggtgtgagtgctgctgatatggccaaaagagaacggtttgagctgctgaagcatcagaaactcaaggaccagaatat

SEQ ID NO: 156080 - DNA, 120 bp, Artificial Sequence
  ENSG00000106344_13 (sequence is synthesized)
ctttgtctcccgaaccaggctctgcctgcacaatctcccaaaggctgtagatgacaaacagctcagaaagctgctgctgagtgctactagtggagagaaaggggtgcgcatcaaggagtg

SEQ ID NO: 156081 - DNA, 120 bp, Artificial Sequence
  ENSG00000106344_14 (sequence is synthesized)
tagagtgatgcgagacctcaaaggagttcatgggaacatgaagggtcagtccctgggctacgcctttgcggagttccaagagcacgagcatgccctgaaagccctccgcctcatcaacaa

SEQ ID NO: 156082 - DNA, 120 bp, Artificial Sequence
  ENSG00000106344_15 (sequence is synthesized)
caatccagaaatctttgggcctctgaagagaccaatagtggagttctctttagaagatcgaagaaaacttaaaatgaaggaattaaggatccagcgcagcttgcaaaaaatgagatccaa

SEQ ID NO: 156083 - DNA, 120 bp, Artificial Sequence
  ENSG00000106344_16 (sequence is synthesized)
gcctgcaactggtgagcctcagaaggggcaaccagagcctgcaaaagaccagcaacagaaggcagctcaacaccacacagaggaacaaagcaaggtgcccccagagcagaagagaaaggc

SEQ ID NO: 156084 - DNA, 120 bp, Artificial Sequence
  ENSG00000106344_17 (sequence is synthesized)
gggctctacctcatggaccgggttccagaccaaggctgaagtggagcaggtggagctgcctgatggaaagaagagaagaaaggtcctggcgctcccctcacaccgaggccccaaaatcag

SEQ ID NO: 156085 - DNA, 120 bp, Artificial Sequence
  ENSG00000106344_18 (sequence is synthesized)
gttgcgggacaaaggcaaagtgaagcccgtccatcccaaaaagccaaagccacagataaaccagtggaagcaggagaagcagcaattatcgtccgagcaggtatctaggaaaaaagctaa

SEQ ID NO: 156086 - DNA, 120 bp, Artificial Sequence
  ENSG00000106344_19 (sequence is synthesized)
gggaaataagacggaaacccgcttcaaccagctggtcgaacaatataagcagaaattattgggaccttctaaaggagcacctcttgcaaagaggagcaaatggtttgatagttgatgatg

SEQ ID NO: 156087 - DNA, 120 bp, Artificial Sequence
  ENSG00000106344_20 (sequence is synthesized)
gcagcaggctgggtaagaagctgggttgtgtactttctggtgacactcctgggctcctccccatcccccgtgtctctcactgagggaaagaaaatccccaagggcactgccactgtgctc

SEQ ID NO: 156088 - DNA, 120 bp, Artificial Sequence
  ENSG00000106344_21 (sequence is synthesized)
ggaggtgccctggactgtgtacatctgaactttggtccatcctttgatgtgtggttcgttagccacaaagagaaatatctgaaagtcaacatgatgcttcttgcatattatccagattat

SEQ ID NO: 156089 - DNA, 120 bp, Artificial Sequence
  ENSG00000106344_22 (sequence is synthesized)
tgtatgaagttgtgtctataattattaccaatttttattctttatttctcaaatggaaacacctgaaaaagcattctggagtgctgaatttttaagatgtatattttgttaagcatattc

SEQ ID NO: 156090 - DNA, 120 bp, Artificial Sequence
  ENSG00000106344_23 (sequence is synthesized)
tctaaatgagatattgtgtggctttttagtaacaacgtcatttctaatatgtgtgactcctttattatgtatgaacattctttgacattcctaattcagctctgtagtcttacacactgc

SEQ ID NO: 156091 - DNA, 120 bp, Artificial Sequence
  ENSG00000106344_24 (sequence is synthesized)
aggaactgtctaagcgagagcagagagaaatgctttctaacctaatcgctgcaggcggagacacttggaaaagaatggggggaggtggggcctgacagagagcagcacttatgtgtttgt

SEQ ID NO: 156092 - DNA, 120 bp, Artificial Sequence
  ENSG00000106344_25 (sequence is synthesized)
cagatgaggggatttccagttgaattggcctgcagtggcctaaagacactagcctggttagcgatgacctgcatttctctcatagagcacctcccttttcatcgtatccactagctctct

SEQ ID NO: 156093 - DNA, 120 bp, Artificial Sequence
  ENSG00000106344_26 (sequence is synthesized)
aagtcctccttaatgaggacacttgatcctcattaagtctgccccttaagatggcttcacacctactgaaaaactccaggggtttgacatctcactttgattgaaatcttgtcttcctat

SEQ ID NO: 156094 - DNA, 120 bp, Artificial Sequence
  ENSG00000106344_27 (sequence is synthesized)
aacatttgattccctgggctcttcagccctatcacctctgcttgtctttatccactctcttcttcattcacttttggctacacaggccttccttccatctcttgactcttgaccacctca

SEQ ID NO: 156095 - DNA, 120 bp, Artificial Sequence
  ENSG00000106344_28 (sequence is synthesized)
gagcctttgtatccgttccctttgcctggagagtttttcccttgcatcttttacttgtcactcagatctccactagttgtcgcctcctcctggagctcttcccagactatctaaagtagg

SEQ ID NO: 156096 - DNA, 120 bp, Artificial Sequence
  ENSG00000106344_29 (sequence is synthesized)
cgcctcctcctggagctcttcccagactatctaaagtagggcttttcttcccctcccctctatcttgcccccttactgaaatctgcttccctgtttcttcttcttttttttttttttttg

SEQ ID NO: 156097 - DNA, 120 bp, Artificial Sequence
  ENSG00000106344_30 (sequence is synthesized)
ctgcttccctgtttctttctagcactaatctctatctgaaatcatttgtctctttctagcactaatctctatctgaaattgtttgtctctccagttagaatgtatgctttgtgagaggga

SEQ ID NO: 156098 - DNA, 120 bp, Artificial Sequence
  ENSG00000106344_31 (sequence is synthesized)
ctttatccctcttgttcactcctgtagacacagcacctagtactgacccaggcacgtagtaagtattgaataaatatttgttgaatgaaaaaaataaggtaggaaaggaagaaacagtat

SEQ ID NO: 156099 - DNA, 120 bp, Artificial Sequence
  ENSG00000106344_32 (sequence is synthesized)
tcagtaggcaagagaaaaagttgagaacgtggcccaaaattcttgattgcttagtctagttgagtgttacaaataatgctttgacagaaccattgctgagctagagatatggttatttct

SEQ ID NO: 156100 - DNA, 120 bp, Artificial Sequence
  ENSG00000106344_33 (sequence is synthesized)
ctgaagtgctgggattacaggcatgagcctggttgagacatggttatttcatcgcaatatcttggggaacccatgaatgctctgaaatgcctttggtttagaaatggatgaaggagaggc

SEQ ID NO: 156101 - DNA, 120 bp, Artificial Sequence
  ENSG00000106344_34 (sequence is synthesized)
tgaaggagaggccatggaaatatttagaccttttggagagatcgaaaggacaggtgatttatctccaagttcacctcgagacatgacttgggctgtcaaatgttcttacggtagcctggc

SEQ ID NO: 156102 - DNA, 120 bp, Artificial Sequence
  ENSG00000106344_35 (sequence is synthesized)
aacatgtctttctcagcctggtctgtacagtgtggaggaagtaagggactttattaagagtgtcacaatagctataacctgccagtcaggtgatctgtttttccttggccatctctccgt

SEQ ID NO: 156103 - DNA, 120 bp, Artificial Sequence
  ENSG00000106344_36 (sequence is synthesized)
ctgctcaccactcttttttccctagtacacgaatatctttaacattcaaaaatatatcttaacacttaggatagatcaaaattggtgttcattcagataacattgtcagattctcttaga

SEQ ID NO: 156104 - DNA, 120 bp, Artificial Sequence
  ENSG00000106344_37 (sequence is synthesized)
tccaaatatttcttttaacaacttaacagtatgttaaaacctcattcacttgcttggagagctgttgtacagttctttaaagagttctttatatgaggttgaatcttccctttcttaata

SEQ ID NO: 156105 - DNA, 120 bp, Artificial Sequence
  ENSG00000106344_38 (sequence is synthesized)
gtcaaattctatatatggtgtcttcctttggaacaccttaccatgggctatttggtcagctccattgactccttgccttgggaattttagtgcagtgagagttgtgctcacttctccttc

SEQ ID NO: 156106 - DNA, 120 bp, Artificial Sequence
  ENSG00000106344_39 (sequence is synthesized)
acttcagggcctgatgtgtcaggaaatggagttttctgaattaacatgaaagttgagttgcagattgcttggttaaaaaacaacaggtggggcacagagtctcatacctatgattgcagc

SEQ ID NO: 156107 - DNA, 120 bp, Artificial Sequence
  ENSG00000106344_40 (sequence is synthesized)
ggattgcttgaggtcaggagtttgagaccgacctggccaacatagtgagacccccatctctattattttgaaaaacaacagcaaattttttcttaacatccaagacaaggccaccagtca

SEQ ID NO: 156108 - DNA, 120 bp, Artificial Sequence
  ENSG00000106344_41 (sequence is synthesized)
acaaggccaccagtcaaaactatcaagttttagtagtattttcctgcttgattatataatagcctggcttagagatacaacctttaaataaggaatcttaagatgatgtgcagctgttct

SEQ ID NO: 156109 - DNA, 120 bp, Artificial Sequence
  ENSG00000106344_42 (sequence is synthesized)
ttgccttatttgtttgtttgttggttagtttgtagtttctaagaatctgctctgttcagctgtacagttccttcttctggagttaacctgtggcaaggattatgtttcacctgtcacaaa

SEQ ID NO: 156110 - DNA, 120 bp, Artificial Sequence
  ENSG00000106344_43 (sequence is synthesized)
aatgagatctgtgccttcctctattataaagttagggcatgtgattcattcttcgaaatacttcaaaatgtactttggtatgtttttgtcttgaaaagaggttttctagctagaaattcg

SEQ ID NO: 156111 - DNA, 120 bp, Artificial Sequence
  ENSG00000106344_44 (sequence is synthesized)
gggcccagaaggtcaaggctccagagatccccttctcatcatccttcagttgtctgaggagacagaggatcacatgtgtcacagtgagtgctgattccccagaatctgcagtcttaagct

SEQ ID NO: 156112 - DNA, 120 bp, Artificial Sequence
  ENSG00000106344_45 (sequence is synthesized)
cccctgctgacgcacacagccagttctctgcttcatattcatgtgacccactgtgaagtgacaggcagctgccaattctgtcatataagaagcagctctgcccatgcaactttgaaagtt

SEQ ID NO: 156113 - DNA, 120 bp, Artificial Sequence
  ENSG00000106344_46 (sequence is synthesized)
cctgcacttctccatagactgctccttcatggaaataaacacatcatcacactgtgggtgcctaagctaagtttgtttgcagtttgatgatgcccagctccttttcaactcagccttaat

SEQ ID NO: 156114 - DNA, 120 bp, Artificial Sequence
  ENSG00000106344_47 (sequence is synthesized)
tggcactttaagggccaggatgaggtttctctcaggccaagtcgagatttccagatttccttttgtccaaggctgaccagtttagaagttattcacatccttgttttagttctttccttc

SEQ ID NO: 156115 - DNA, 120 bp, Artificial Sequence
  ENSG00000106344_48 (sequence is synthesized)
ttgtcctggtacctcttcctttccaggattatttgcagagtctgtgatggcttacttggtgaccagacatggggtgagctactggtatagtctgattactttggcatctattctgaactg

SEQ ID NO: 156116 - DNA, 120 bp, Artificial Sequence
  ENSG00000106344_49 (sequence is synthesized)
gtcattggctgtacatgagtttttgtgctggtaaaggaatatactgggaagattggaaggcacagactgggaactaattctgagaagagaactgctgagttactgaaagaccttttggac

SEQ ID NO: 156117 - DNA, 120 bp, Artificial Sequence
  ENSG00000106344_50 (sequence is synthesized)
cacccctaaatggagcatcttgatagatggcaaatccagtgtttcttaaacttgtccatgctgcccagagcccactgccttttatcagatgtgagacttcactgccacagtgtcatccca

SEQ ID NO: 156118 - DNA, 120 bp, Artificial Sequence
  ENSG00000106344_51 (sequence is synthesized)
cagtttccttccctggacatttgataaagggaaaatcatttcttgtcctttaaggcagggactattattttttcacttttccacataccccacaacacctaacattgatttactcgtagt

SEQ ID NO: 156119 - DNA, 120 bp, Artificial Sequence
  ENSG00000106344_52 (sequence is synthesized)
aggagtttcatactgttgaactctctaaaggccatttgttccagggcctagctgggcttgtgaaggacaacagagtcatttcctaaggaccccaaaagacagcatgaaggaaaaaataat

SEQ ID NO: 156120 - DNA, 120 bp, Artificial Sequence
  ENSG00000106344_53 (sequence is synthesized)
aataaactgctgttcacagtgccttgagtgtaccaccgtactttctgctatgccttgtccattccaatctggacagtctctgtgcccctcctttccactcaagtgttatccagcactcaa

SEQ ID NO: 156121 - DNA, 120 bp, Artificial Sequence
  ENSG00000106344_54 (sequence is synthesized)
gttctggctcaaggcccaacatctccgtggggacctcagccatcccagggcattgtgaccccttcctctaagtccccggcacactcgctgattggtaccctctcattcgacaaagcatat

SEQ ID NO: 156122 - DNA, 120 bp, Artificial Sequence
  ENSG00000106344_55 (sequence is synthesized)
gccattgtggcttacttgtcatttctttaggtcttgccttcccaagtagatcatgagccactataagaactagctcccatagtcccagcccctgggcctggtacatggcaatgcttagtg

SEQ ID NO: 156123 - DNA, 120 bp, Artificial Sequence
  ENSG00000106344_56 (sequence is synthesized)
attggtgattgaggataatggtggtaaaggatgtaccagacagtcatctcctgaagagatgccgaacaacctgtccttgttttatgtattttctctttctttcctgtccagttttattcc

SEQ ID NO: 156124 - DNA, 120 bp, Artificial Sequence
  ENSG00000106344_57 (sequence is synthesized)
tctcatagtaactgctaaaaaaatatcagttcctgtcactcttccaccccttttctccctctcccctgcattgtggtctgggccttggtccactagcaactccccttaggtgttgcttaa

SEQ ID NO: 156125 - DNA, 120 bp, Artificial Sequence
  ENSG00000106344_58 (sequence is synthesized)
tctgcctcatggccaaagccaatcccattcctgtcccccgctacccaagggactcccagtctgtatgcacaaggcgggatgtgaagtctggatgtgcaagaaacccagctgtaagaaaca

SEQ ID NO: 156126 - DNA, 120 bp, Artificial Sequence
  ENSG00000106344_59 (sequence is synthesized)
gcttccctcggcttggcatggtggctcatgcctatattcccagcactttgagaggtcaaagtgggagaatcacttgagcccaggagttcaggactagcctgggcaacatagcaagatccc

SEQ ID NO: 156127 - DNA, 120 bp, Artificial Sequence
  ENSG00000106344_60 (sequence is synthesized)
agtctcaaatgtcccttcatctccttactctcgacctgtctccctagttctctgccgccttttcctctcccctggatctgacactcaattgtctgcatgcacttttcaactgaaagagac

SEQ ID NO: 156128 - DNA, 120 bp, Artificial Sequence
  ENSG00000106344_61 (sequence is synthesized)
tccaatgccatccttctgatgaaatttttgctttggatactactgcagaaaaaatgctatcttgtattctggtccatggtggggaagaccctgtcgtagaacctggcaactcaagtggag

SEQ ID NO: 156129 - DNA, 120 bp, Artificial Sequence
  ENSG00000106344_62 (sequence is synthesized)
ccctgtcgtagaacctggcaactcaagtggagggaggggccagaacattgttcttatgctatttacagtgagacaacaggattgatgcagaactttctttttttttttttttttttgaga

SEQ ID NO: 156130 - DNA, 120 bp, Artificial Sequence
  ENSG00000106344_63 (sequence is synthesized)
ccggccgtgatgcgcaactttctaataacatacttttgaaagtgcccagacatacatccctcctctggtaccacagtggccatcagttgccagagaacatgaaattatccagccctcagc

SEQ ID NO: 156131 - DNA, 120 bp, Artificial Sequence
  ENSG00000106344_64 (sequence is synthesized)
tctgcagcaggattctgaggagtaaagcaggcctgtaaagtactctaaagtacttcagagaggtaatgccacaaagcgaagaacacctcttggaggcagagcccctcagccctatccagg

SEQ ID NO: 156132 - DNA, 120 bp, Artificial Sequence
  ENSG00000106344_65 (sequence is synthesized)
ccagcagtgtccacttgaaatctgaaagcagcctccctcaccaaaccagcaagatggaaaacctccctgggttggcaagtggccctgggaagtacatgccccatctctgtcaggatagca

SEQ ID NO: 156133 - DNA, 120 bp, Artificial Sequence
  ENSG00000106344_66 (sequence is synthesized)
gtggagaggtttcgtgccagtgccagctccacccacccagatggtactcaagactccaagcctgtcaatggggtggaaactttctggcattttctgtcagaagggtgagttagcactgaa

SEQ ID NO: 156134 - DNA, 120 bp, Artificial Sequence
  ENSG00000106344_67 (sequence is synthesized)
ccatctcatgtgtcttttcactgagtaacagcccatatccattccatgaaatgagtgactgctttgttgaatcagatagtaacaaacatttatttgtagtctggttgtgtcatatcatgg

SEQ ID NO: 156135 - DNA, 120 bp, Artificial Sequence
  ENSG00000106344_68 (sequence is synthesized)
ttgaattgcaaacaggttggatagaagagtcagcaaaaatcaacaaaagcattctgtaaaaaacttttctagaattacaataaatggcattgtatattttatttataaattatgtgctgc

SEQ ID NO: 156136 - DNA, 120 bp, Artificial Sequence
  ENSG00000106344_69 (sequence is synthesized)
acatcatttttatcaatgaaatttataataaatttctgtacatatatacatttttatcccagagagccagttgttaagcatttaccagcaataaatgctttttgtttcctgcttacacag

SEQ ID NO: 156137 - DNA, 120 bp, Artificial Sequence
  ENSG00000106344_70 (sequence is synthesized)
gttctgggagtggccagcccactctttgagatgtccccacttgcttttttagttgtccaagtagtgttctgcccagccttcccgactctctttcttatccttccctcgaaactattctgt

SEQ ID NO: 156138 - DNA, 120 bp, Artificial Sequence
  ENSG00000106344_71 (sequence is synthesized)
tccttatgcttaaatactttccagtcatgggagctttgctgtaggcccttggcctttcatgggtagcttctgatacgtgcatgggtgttaatagaggaagttgaccccgcctgggaagaa

SEQ ID NO: 156139 - DNA, 120 bp, Artificial Sequence
  ENSG00000106344_72 (sequence is synthesized)
taatgacctatggagacctggccctttctcttatggcttcttaaagtgacagctgttatgggaagttcaggcatcttgacgtggaaaatacattgttcattttcttttaattttttttcc

SEQ ID NO: 156140 - DNA, 120 bp, Artificial Sequence
  ENSG00000106344_73 (sequence is synthesized)
cctaaccactataccaacagggatggaaagatacttttagttggaaggaatttggagcccttaaacgacacctggagcagctgcctgtgggtggggctttgcacagtctcatcctggcaa

SEQ ID NO: 156141 - DNA, 120 bp, Artificial Sequence
  ENSG00000106344_74 (sequence is synthesized)
gggaggacgagccaaggaccagttttgcagaattgtcatcatgaggccctggttgtgtgctgggctggggcattgcccctttccaggaggccaggccaagcagggctgcctggcttaggc

SEQ ID NO: 156142 - DNA, 120 bp, Artificial Sequence
  ENSG00000106344_75 (sequence is synthesized)
ttttgcatcttcagcatcctttcacgtctcttatctcaggtgaccttcacagcaagcctggtgaaggttattgagaagcagatgtcaccacctagtcttagagctgatgaaagcaggatg

SEQ ID NO: 156143 - DNA, 120 bp, Artificial Sequence
  ENSG00000106344_76 (sequence is synthesized)
tggggaagtccagaccctctcctgaaaccccttggccacctgagctagtaccagagcaaggtcccacttggccgtgagtgctgtctctagggcctatttcaggaactgtctcatatataa

SEQ ID NO: 156144 - DNA, 120 bp, Artificial Sequence
  ENSG00000106344_77 (sequence is synthesized)
gaacagaacactttttgccagctataccaaatgtttttgggattaaaaaaatagtttctcttttccaaattaggtggtaagaaaaggaagggcattttcattctcacattctttgaatgt

SEQ ID NO: 156145 - DNA, 120 bp, Artificial Sequence
  ENSG00000106344_78 (sequence is synthesized)
agggcattttcattctcacattctttgaatgttgaaacgttttaaaaacttccagctgggcttggtggctcatacctgtaaccccagcactatgggaggctgagatgggaggatcccttg

SEQ ID NO: 156146 - DNA, 120 bp, Artificial Sequence
  ENSG00000106344_79 (sequence is synthesized)
accagcctgggcaacatagtaaaactgcccaaaatttgaaaattagccttgtgtggtggtgtgcactgtagtcccagctgctcgggaggctggggcaggaggattgcttgagcccaggag

SEQ ID NO: 156147 - DNA, 120 bp, Artificial Sequence
  ENSG00000106344_80 (sequence is synthesized)
gctatggttgtaccactgtactccaacctgggcaacagcgtgataccctgtctaaaaaaataataaaaataaaaaaggattaaaccctttacttgaccagcttcttttcctgctacccct

SEQ ID NO: 156148 - DNA, 120 bp, Artificial Sequence
  ENSG00000106344_81 (sequence is synthesized)
ggactaactaatcattacatatttttgtagttgttttttctttctttctctctcctgatctaccacaagccaaatgtactcatatacatactaataggtgaaaaaagagagtctgaggag

SEQ ID NO: 156149 - DNA, 120 bp, Artificial Sequence
  ENSG00000106344_82 (sequence is synthesized)
tgaatacatttattttgtgatttcctaggcagtagctaggactcccttagaggttgctaatagggaaagggtgcgctggctctactcagttttataactgcttttccccgaattctgcag

SEQ ID NO: 156150 - DNA, 120 bp, Artificial Sequence
  ENSG00000106344_83 (sequence is synthesized)
acatcttcattcccctggaggtcagataatggctatttattttccatagccatgaaaatctctggggagagctgtggcaatttgacgagagctattaaagggacattaggattgaagtag

SEQ ID NO: 156151 - DNA, 120 bp, Artificial Sequence
  ENSG00000106344_84 (sequence is synthesized)
ctgctcaggcagtcacataccctcgatcctcatctgcagggacagctgccagaacgaatgagcccagctctcctgcccgcagccagccgcgtgtgggtgcaactggcgaccagccactgg

SEQ ID NO: 156152 - DNA, 120 bp, Artificial Sequence
  ENSG00000106344_85 (sequence is synthesized)
agtgagtcccagggaaggggacaggttcttagaatcaccatttgtctctgctctctccctctctgcaataggacgggcactctaaactcacataatggttaataacaacagctaacaatt

SEQ ID NO: 156153 - DNA, 120 bp, Artificial Sequence
  ENSG00000106344_86 (sequence is synthesized)
actgagcacctactatgtgtcaggcatgtgctgaggatgatcgcatcaagtaaaatgcctgtctctggcccagaggcccagaagaagagaaagaagggaaatctgtaggaggcaaacagt

SEQ ID NO: 156154 - DNA, 120 bp, Artificial Sequence
  ENSG00000106344_87 (sequence is synthesized)
cccttacccctctgcttgcagaccttcagtgacaggacactccctgtttgctccaagcacctcttgcattttcagagcttgggacacagattcagggacttgcacttcgatagagtgcct

SEQ ID NO: 156155 - DNA, 120 bp, Artificial Sequence
  ENSG00000106344_88 (sequence is synthesized)
caggacccctcgtcggagccatggaaagtcagtttctgggcccatccttcctgtgggggtgtctttccttctcttggccaccccctaggaatccctagtagagagcaggcacttaatagc

SEQ ID NO: 156156 - DNA, 120 bp, Artificial Sequence
  ENSG00000106344_89 (sequence is synthesized)
cagtgcagtgagagtggtctgtgatgtctgggccagggcaaggcccgccaagtgggctcccaggtgcctgccacagagcctctggggtttgaggccctcagtgacccttaggcaatagct

SEQ ID NO: 156157 - DNA, 120 bp, Artificial Sequence
  ENSG00000106344_90 (sequence is synthesized)
gggtcttaatgagggatcatgtcctttcctgggtagtcgtgggtagaggggtgtgaactgatctgagctactctaggaaggctagagacaaaagcaggaaccaagagaagggctgaggct

SEQ ID NO: 156158 - DNA, 120 bp, Artificial Sequence
  ENSG00000106344_91 (sequence is synthesized)
ccttccaagagactccaagtcctgagggcaagaagcggagagccttgtgccaggccaggtgttgcccctgtcagtgctgacggacaggcaagagaggctgctgatgctgcagccctgtga

SEQ ID NO: 156159 - DNA, 120 bp, Artificial Sequence
  ENSG00000106344_92 (sequence is synthesized)
agctgagactcaccctttgcccactttcacagccatctccccaggaggctgtggtgacacaggtaaaagccaaaggacagaggatgaccctggacaaatcactcagaccctccagtcctc

SEQ ID NO: 156160 - DNA, 120 bp, Artificial Sequence
  ENSG00000106344_93 (sequence is synthesized)
tttgctcatttataaaatacaggcaaaaagccccctagtactaaatgaaatagccactgtaaaagagcacgggagatagggtctgtgatgtcttttgtccccagtgtcctgagtgaattc

SEQ ID NO: 156161 - DNA, 120 bp, Artificial Sequence
  ENSG00000106344_94 (sequence is synthesized)
acaggaaaggggagaaagactggttgcccacttccagggtgattggctaatttccacttctttcctgctagggatgggaacacacgccagaatcctgggaaggctacatgtcctcaggtg

SEQ ID NO: 156162 - DNA, 120 bp, Artificial Sequence
  ENSG00000106344_95 (sequence is synthesized)
gtgctggccccacctccagcctctgcagggataccaggatatgagccaggctctgctcccggggtgacccatcctcctcagtgccccttctttcctcacaactgcaggcagaaggagagt

SEQ ID NO: 156163 - DNA, 120 bp, Artificial Sequence
  ENSG00000106344_96 (sequence is synthesized)
gtgtcctgtctctctgaggagctggctgtgccatttaagcaggccctaggggtggagcgctgtgaagagatggcacccaggtccctgttcctccttttccagagcaaacactgctaaggg

SEQ ID NO: 156164 - DNA, 120 bp, Artificial Sequence
  ENSG00000106344_97 (sequence is synthesized)
atcatgacagtccctgcatctggcccagactgggccttgggaggcttttgacatcaatccatgcaaccgcacccaacaattggagtcagcatgggaggtgagacccacttgccaattttg

SEQ ID NO: 156165 - DNA, 120 bp, Artificial Sequence
  ENSG00000106344_98 (sequence is synthesized)
ctctcagggaacagccctctttactaaaacatagcacagtattgataacagttgtttccaggcatcgtagaaagcgtttagtgggcattaacgtctttgatcctcaccacaaggtcaggg

SEQ ID NO: 156166 - DNA, 120 bp, Artificial Sequence
  ENSG00000106344_99 (sequence is synthesized)
gttggatgatgttagcatgctcattgaaggatcagaaaagtcaggctcaagatagctcgcccttcattcagccagccggtgttaactgaatattaactgtgcacccgtctgtgccagtgt

SEQ ID NO: 156167 - DNA, 120 bp, Artificial Sequence
  ENSG00000106344_100 (sequence is synthesized)
tcccccaggagctgcagagggtcctgagcagagtgagctcaagccacttgggagctcacattccagctatcagtgctgattcatctcaaatgtttgatccacgctgggttctaacccttc

SEQ ID NO: 156168 - DNA, 120 bp, Artificial Sequence
  ENSG00000106344_101 (sequence is synthesized)
cctgctcagagccctcagagtccaggtcaggtagaacccagaacagagcctctggcaggaaggagcttgcatggtcctcaggcttcatgtccagagatcattcctccactttgagcttct

SEQ ID NO: 156169 - DNA, 120 bp, Artificial Sequence
  ENSG00000106344_102 (sequence is synthesized)
ttgtgaaaaccaatcacaaagagaggaggggtgaaatgtgccaaagcctctgccagggttgtagcaaggaaacctgggcttctagggaaagttgagaaagggcctatattagtcaggagg

SEQ ID NO: 156170 - DNA, 120 bp, Artificial Sequence
  ENSG00000106344_103 (sequence is synthesized)
gctactgtaagagagtaccacaggctgggtggcttaaacaacagaaatttatcaccttacggttctggaggctagaagtctaaaatcaaagtgttggcaaggttggttccttcatgagga

SEQ ID NO: 156171 - DNA, 120 bp, Artificial Sequence
  ENSG00000106344_104 (sequence is synthesized)
atttcttggcgttgcctggcatatagatgcatcactgcagtctctgcctcgttgtcacatggccatcttctccctgtgtctataggtctatgtccaaatttccctcttcttataaagaca

SEQ ID NO: 156172 - DNA, 120 bp, Artificial Sequence
  ENSG00000106344_105 (sequence is synthesized)
ccagtcatattggcttaggcccagcccaatgatttcatcttaatttgattacatctctgctatggtttgaatgtgtcccttccaaaattcaggttattgccaatgtgatagtattgagat

SEQ ID NO: 156173 - DNA, 120 bp, Artificial Sequence
  ENSG00000106344_106 (sequence is synthesized)
ggggtccttaaagaagtaattaggccatgagggtgcctctctctgaagggaggctcattggattgtatcagtgtaacataatttacataaccagttctttatgtgatggaaatcccattc

SEQ ID NO: 156174 - DNA, 120 bp, Artificial Sequence
  ENSG00000106344_107 (sequence is synthesized)
aacggtttccaacctttgctattacaaactgctgtgaagagaaacatatgtcattatactaatcaggtgctgttgttgtttttataatgcattatcctggagagactgcccctcccaggg

SEQ ID NO: 156175 - DNA, 120 bp, Artificial Sequence
  ENSG00000106344_108 (sequence is synthesized)
ctagctactttggggagagagtaaacaacttggtcgagcgtgcctttcgtatgcaaaccagtcaatccagagcccacacccccagtcacctcctttatcaaactctgacacagcaagcca

SEQ ID NO: 156176 - DNA, 120 bp, Artificial Sequence
  ENSG00000106344_109 (sequence is synthesized)
atattccccctgccctaaatcactccagggccaggcatgggacaactagggacaatccctatagccagggcctgccaaagttatacagattagccaatcctaagcctgcttccctgcctt

SEQ ID NO: 156177 - DNA, 120 bp, Artificial Sequence
  ENSG00000106344_110 (sequence is synthesized)
gccttgcctttctgctggaaactacattaaaggcgctggatcgtgcttttccctcaccccctctgcttcttggctgacccaagttcttcctgtgtggccctgcaaggcgtgacacacctc

SEQ ID NO: 156178 - DNA, 120 bp, Artificial Sequence
  ENSG00000106344_111 (sequence is synthesized)
tcctcctgggaactgcataacaaactcttcttgcagagatagttttctctgtgtctgtcatcttaccatacctgatgaaaacaaatatgggtacatttttttttttttttgagagagagg

SEQ ID NO: 156179 - DNA, 120 bp, Artificial Sequence
  ENSG00000106344_112 (sequence is synthesized)
caggctggagtgcagtggtgtaatcacaggtcactgcagcctcgacctcctgggctctagtgatcctcccacgtcagccttgcaaatagctgagactacaggcacacaccaccatgccta

SEQ ID NO: 156180 - DNA, 60 bp, Artificial Sequence
  ENSG00000106344_113 (sequence is synthesized)
cacaccaccatgcctagctaatttttggtgtatttgttatagagacagaagcctctcaaa

SEQ ID NO: 156181 - DNA, 120 bp, Artificial Sequence
  ENSG00000106344_114 (sequence is synthesized)
gtgctgggattataagtgtgagccacagcatccagccatgggtacattttaaagcaggcgttttgttcatgtgcagcccttgttctcagttaaggggaaaatgagtgatcctttgcttgg

SEQ ID NO: 156182 - DNA, 120 bp, Artificial Sequence
  ENSG00000106344_115 (sequence is synthesized)
ctctgaaggagcagtgttttatatgtaaagaatatattctgtatatttaaagaagagcaatggggggcatttgaaaataaatccgttcatttttttctgattgtaaaaataatatatgct

SEQ ID NO: 156183 - DNA, 67 bp, Artificial Sequence
  ENSG00000106344_116 (sequence is synthesized)
gactgagaaataaagagaaatagtacaaagagaggaattttaacagctgggctgccgggggtgacgt

SEQ ID NO: 156184 - DNA, 120 bp, Artificial Sequence
  ENSG00000106344_117 (sequence is synthesized)
gtgtcggccgactgagaaataaagagaaatagtacaaagagaggaattttaacagctgggctgccgggggtgacgtcgcatatcagtaggactgtgatgcccacctgagcctcaaaccag

SEQ ID NO: 156185 - DNA, 76 bp, Artificial Sequence
  ENSG00000106344_118 (sequence is synthesized)
caaagatcacatgcttcaaagggcaaaagcagaacaaagatcacatgcttctgaggaaacactgtgcgcgtattgt

SEQ ID NO: 156186 - DNA, 120 bp, Artificial Sequence
  ENSG00000106344_119 (sequence is synthesized)
aaaattctcctttttctgcctgcatcattgcagaattgacatgtgtaatgaaattgaataggccctctgtcagcccacctccttagttctgatctgtgccattgcagagcagtcaagaga

SEQ ID NO: 156187 - DNA, 120 bp, Artificial Sequence
  ENSG00000106346_0 (sequence is synthesized)
ggcggtgcccggatggaggcacgtcattgtcccccgccgggcggctgggctgtgtgcggcggcggcggcggcggccgagggggatggagcgagcgccgagccgggtcagagttgaacaat

SEQ ID NO: 156188 - DNA, 120 bp, Artificial Sequence
  ENSG00000106346_1 (sequence is synthesized)
gggatggagcgagcgccgagccgggtcagagttgaacaatgaccatagttgacaaagcttctgaatcttcagacccatcagcctatcagaatcagcctggcagctccgaggcagtctcac

SEQ ID NO: 156189 - DNA, 120 bp, Artificial Sequence
  ENSG00000106346_2 (sequence is synthesized)
ctggagacatggatgcaggttctgccagctggggtgctgtgtcttcattgaatgatgtgtcaaatcacacactttctttaggaccagtacctggtgctgtagtttattcgagttcatctg

SEQ ID NO: 156190 - DNA, 120 bp, Artificial Sequence
  ENSG00000106346_3 (sequence is synthesized)
tacctgataaatcaaaaccatcaccacaaaaggatcaagccctaggtgatggcatcgctcctccacagaaagttcttttcccatctgagaagatttgtcttaagtggcaacaaactcata

SEQ ID NO: 156191 - DNA, 120 bp, Artificial Sequence
  ENSG00000106346_4 (sequence is synthesized)
gagttggagctgggctccagaatttgggcaatacctgttttgccaatgcagcactgcagtgtttaacctacacaccacctcttgccaattacatgctatcacatgaacactccaaaacat

SEQ ID NO: 156192 - DNA, 120 bp, Artificial Sequence
  ENSG00000106346_5 (sequence is synthesized)
gtcatgcagaaggcttttgtatgatgtgtacaatgcaagcacatattacccaggcactcagtaatcctggggacgttattaaaccaatgtttgtcatcaatgagatgcggcgtatagcta

SEQ ID NO: 156193 - DNA, 120 bp, Artificial Sequence
  ENSG00000106346_6 (sequence is synthesized)
ggcacttccgttttggaaaccaagaagatgcccatgaattccttcaatacactgttgatgctatgcagaaagcatgcttgaatggcagcaataaattagacagacacacccaggccacca

SEQ ID NO: 156194 - DNA, 120 bp, Artificial Sequence
  ENSG00000106346_7 (sequence is synthesized)
ctcttgtttgtcagatatttggaggatacctaagatctagagtcaaatgtttaaattgcaagggcgtttcagatacttttgatccatatcttgatataacattggagataaaggctgctc

SEQ ID NO: 156195 - DNA, 120 bp, Artificial Sequence
  ENSG00000106346_8 (sequence is synthesized)
agagtgtcaacaaggcattggagcagtttgtgaagccggaacagcttgatggagaaaactcgtacaagtgcagcaagtgtaaaaagatggttccagcttcaaagaggttcactatccata

SEQ ID NO: 156196 - DNA, 120 bp, Artificial Sequence
  ENSG00000106346_9 (sequence is synthesized)
gatcctctaatgttcttacactttctctgaaacgttttgcaaattttaccggtggaaaaattgctaaggatgtgaaataccctgagtatcttgatattcggccatatatgtctcaaccca

SEQ ID NO: 156197 - DNA, 120 bp, Artificial Sequence
  ENSG00000106346_10 (sequence is synthesized)
acggagagccaattgtctacgtcttgtatgcagtgctggtccacactggttttaattgccatgctggccattacttctgctacataaaagctagcaatggcctctggtatcaaatgaatg

SEQ ID NO: 156198 - DNA, 120 bp, Artificial Sequence
  ENSG00000106346_11 (sequence is synthesized)
actccattgtatctaccagtgatattagatcggtactcagccaacaagcctatgtgctcttttatatcaggtcccatgatgtgaaaaatggaggtgaacttactcatcccacccatagcc

SEQ ID NO: 156199 - DNA, 120 bp, Artificial Sequence
  ENSG00000106346_12 (sequence is synthesized)
ccggccagtcctctccccgccccgtcatcagtcagcgggttgtcaccaacaaacaggctgcgccaggctttatcggaccacagcttccctctcacatgataaagaatccacctcacttaa

SEQ ID NO: 156200 - DNA, 120 bp, Artificial Sequence
  ENSG00000106346_13 (sequence is synthesized)
atgggactggaccattgaaagacacgccaagcagttccatgtcgagtcctaacgggaattccagtgtcaacagggctagtcctgttaatgcttcagcttctgtccaaaactggtcagtta

SEQ ID NO: 156201 - DNA, 120 bp, Artificial Sequence
  ENSG00000106346_14 (sequence is synthesized)
ataggtcctcagtgatcccagaacatcctaagaaacaaaaaattacaatcagtattcacaacaagttgcctgttcgccagtgtcagtctcaacctaaccttcatagtaattctttggaga

SEQ ID NO: 156202 - DNA, 120 bp, Artificial Sequence
  ENSG00000106346_15 (sequence is synthesized)
accctaccaagcccgttccctcttctaccattaccaattctgcagtacagtctacctcgaacgcatctacgatgtcagtttctagtaaagtaacaaaaccgatcccccgcagtgaatcct

SEQ ID NO: 156203 - DNA, 120 bp, Artificial Sequence
  ENSG00000106346_16 (sequence is synthesized)
gctcccagcccgtgatgaatggcaaatccaagctgaactccagcgtgctggtgccctatggcgccgagtcctctgaggactctgacgaggagtcaaaggggctgggcaaggagaatggga

SEQ ID NO: 156204 - DNA, 120 bp, Artificial Sequence
  ENSG00000106346_17 (sequence is synthesized)
ttggtacgattgtgagctcccactctcccggccaagatgccgaagatgaggaggccactccgcacgagcttcaagaacccatgaccctaaacggtgctaatagtgcagacagcgacagtg

SEQ ID NO: 156205 - DNA, 120 bp, Artificial Sequence
  ENSG00000106346_18 (sequence is synthesized)
acccgaaagaaaacggcctagcgcctgatggtgccagctgccaaggccagcctgccctgcactcagaaaatccctttgctaaggcaaacggtcttcctggaaagttgatgcctgctcctt

SEQ ID NO: 156206 - DNA, 120 bp, Artificial Sequence
  ENSG00000106346_19 (sequence is synthesized)
tgctgtctctcccagaagacaaaatcttagagaccttcaggcttagcaacaaactgaaaggctcgacggatgaaatgagtgcacctggagcagagaggggccctcccgaggaccgcgacg

SEQ ID NO: 156207 - DNA, 120 bp, Artificial Sequence
  ENSG00000106346_20 (sequence is synthesized)
ccgagcctcagcctggcagccccgccgccgaatccctggaggagccagatgcggccgccggcctcagcagcaccaagaaggctccgccgccccgcgatcccggcacccccgctaccaaag

SEQ ID NO: 156208 - DNA, 120 bp, Artificial Sequence
  ENSG00000106346_21 (sequence is synthesized)
cgatgcgagcccgttgtcccaggacgcaaaggggatgatcgcggagggcccgcgggactcggcgttggcggaagccccggaagggttgagtccggctccgcctgcgcggtcggaggagcc

SEQ ID NO: 156209 - DNA, 120 bp, Artificial Sequence
  ENSG00000106346_22 (sequence is synthesized)
ctgcgagcagccactccttgttcaccccagcggggaccacgcccgggacgctcaggacccatcccagagcttgggcgcacccgaggccgcagagcggccgccagctcctgtgctggacat

SEQ ID NO: 156210 - DNA, 120 bp, Artificial Sequence
  ENSG00000106346_23 (sequence is synthesized)
ggccccggccggtcacccggaaggggacgctgagcctagccccggcgagagggtcgaggacgccgcggcgccgaaagccccaggcccttccccagcgaaggagaaaatcggcagcctcag

SEQ ID NO: 156211 - DNA, 120 bp, Artificial Sequence
  ENSG00000106346_24 (sequence is synthesized)
aaaggtggaccgaggccactaccgcagccggagagagcgctcgtccagcggggagcccgccagagagagcaggagcaagactgagggccaccgtcaccggcggcgccgcacctgcccccg

SEQ ID NO: 156212 - DNA, 120 bp, Artificial Sequence
  ENSG00000106346_25 (sequence is synthesized)
ggagcgcgaccgccaggaccgccacgccccggagcaccaccccggccacggcgacaggctcagccctggcgagcgccgctctctgggcaggtgcagtcaccaccactcccgacaccggag

SEQ ID NO: 156213 - DNA, 120 bp, Artificial Sequence
  ENSG00000106346_26 (sequence is synthesized)
cggggtggagctggactgggtcagacaccactacaccgagggcgagcgtggctggggccgggagaagttctaccccgacaggccgcgctgggacaggtgccggtactaccatgacaggta

SEQ ID NO: 156214 - DNA, 120 bp, Artificial Sequence
  ENSG00000106346_27 (sequence is synthesized)
cgccctgtacgctgcccgggactggaagcccttccacggcggccgcgagcacgagcgggccgggctgcacgagcggccgcacaaggaccacaaccggggccgtaggggctgcgagccggc

SEQ ID NO: 156215 - DNA, 120 bp, Artificial Sequence
  ENSG00000106346_28 (sequence is synthesized)
ccgggagagggagcggcaccgccccagcagcccccgcgcaggcgcgccccacgccctcgccccgcaccccgaccgcttctcccacgacagaactgcacttgtagccggagacaactgtaa

SEQ ID NO: 156216 - DNA, 120 bp, Artificial Sequence
  ENSG00000106346_29 (sequence is synthesized)
cctctctgatcggtttcacgaacacgaaaatggaaagtcccggaaacggagacacgacagtgtggagaacagtgacagtcatgttgaaaagaaagcccggaggagcgaacagaaggatcc

SEQ ID NO: 156217 - DNA, 120 bp, Artificial Sequence
  ENSG00000106346_30 (sequence is synthesized)
tctagaagagcctaaagcaaagaagcacaaaaaatcaaagaagaaaaagaaatccaaagacaaacaccgagaccgcgactccaggcatcagcaggactcagacctctcagcagcgtgctc

SEQ ID NO: 156218 - DNA, 120 bp, Artificial Sequence
  ENSG00000106346_31 (sequence is synthesized)
tgacgctgacctccacagacacaaaaaaaagaagaagaaaaagaagagacattcaagaaaatcagaggactttgttaaagattcagaactgcacttacccagggtcaccagcttggagac

SEQ ID NO: 156219 - DNA, 120 bp, Artificial Sequence
  ENSG00000106346_32 (sequence is synthesized)
tgtcgcccagttccggagagcccagggtggctttcctctctctggtggcccgcctctggaaggcgtcggacctttccgtgagaaaacgaaacacttacggatggaaagcagggatgacag

SEQ ID NO: 156220 - DNA, 120 bp, Artificial Sequence
  ENSG00000106346_33 (sequence is synthesized)
gtgtcgtctctttgagtatggccagggtgattgaaaactcagcctcaaaacaaaaaattcactagttatgattcaacgcgttcaacagaagccatccccagcccagcttaaattataaag

SEQ ID NO: 156221 - DNA, 120 bp, Artificial Sequence
  ENSG00000106346_34 (sequence is synthesized)
atagacaataactctgttccaatctgcgtggtgcttctttagtaaatactgtacagattttaccatggagaactttttttttagtttttaccttttcttaattacccttattccgaatgg

SEQ ID NO: 156222 - DNA, 120 bp, Artificial Sequence
  ENSG00000106346_35 (sequence is synthesized)
acgaacactttctaccactgctgaccattgtaaaataccgtgtatataaatcccattgaaataatgccctggaatagaacatctcaaatgctgcttaattacagactcaggtcgattact

SEQ ID NO: 156223 - DNA, 120 bp, Artificial Sequence
  ENSG00000106346_36 (sequence is synthesized)
tgtatttcatgtaatgttcctccaagttagacatctggtgcaagaccaaccgggagaccatggaattgtcaaaagtacaaactgacagtgtgtatatttaatttaaagacttatttaaaa

SEQ ID NO: 156224 - DNA, 120 bp, Artificial Sequence
  ENSG00000106346_37 (sequence is synthesized)
actcacaagctctcacctagactttggagagcagtctgttttctgtaatgtctgatactagaaactaatttgcttattttagttgtattcaagatttgaagatgtattttatagacaagt

SEQ ID NO: 156225 - DNA, 120 bp, Artificial Sequence
  ENSG00000106346_38 (sequence is synthesized)
tctgtttttgaactttgtggaactgttccaatcaatcaatttcccagttatgatgagtatttacattatgaatgtataacccagacatgatttgtaaagccgacagtatgtttctattac

SEQ ID NO: 156226 - DNA, 120 bp, Artificial Sequence
  ENSG00000106346_39 (sequence is synthesized)
acaacactttttgatacagcgtctcttgtcttcactgatactggagtctccgttgtctgcttggtcccttcgagtttctagttacagacacaatcatactgtgattttatttttaatatg

SEQ ID NO: 156227 - DNA, 120 bp, Artificial Sequence
  ENSG00000106346_40 (sequence is synthesized)
gatatgctatcaaactgtgatacacttataattcactggtcctgcatcaggagatggagtggggaaaactgtatttaatacagtttgtatctgaataatctgtatggtttatacagtttg

SEQ ID NO: 156228 - DNA, 120 bp, Artificial Sequence
  ENSG00000106346_41 (sequence is synthesized)
tgttgttcagagatgtttaaagtttgatctttgtttttctaaagattaaaaaagcacttgccccactgtaaatatacagcatgtaaaatttctatagtatataaatggcagcaaatcaca

SEQ ID NO: 156229 - DNA, 76 bp, Artificial Sequence
  ENSG00000106346_42 (sequence is synthesized)
gtgctgtagtttattcgagttcatctgtacctgataaatcaaaaccatcaccacaaaaggatcaagtagagacggg

SEQ ID NO: 156230 - DNA, 120 bp, Artificial Sequence
  ENSG00000106346_43 (sequence is synthesized)
gcatgaaccaccacgccaggcccttttattccagttttttttaagaataaactttatcttgccctaggtgatggcatcgctcctccacagaaagttcttttcccatctgagaagatttgt

SEQ ID NO: 156231 - DNA, 120 bp, Artificial Sequence
  ENSG00000106346_44 (sequence is synthesized)
ggttgtagtttattcttatcagaattcattttcaccttttttgttggaagcacacagaacagtgttcactttaccttttggctttgctctgcctcttccttaggtgatgtgcattatttt

SEQ ID NO: 156232 - DNA, 120 bp, Artificial Sequence
  ENSG00000106346_45 (sequence is synthesized)
aaaatggttgaaatttacacgtgtgtcttacgtaacagtttgagttggctcaatcatagatgtcaggaaataaacattggtcttgcagctatttaatttctcattatcagcagacgtctg

SEQ ID NO: 156233 - DNA, 120 bp, Artificial Sequence
  ENSG00000106346_46 (sequence is synthesized)
cagatctcaaactagctgcttctcctttctagttgtgcctgacattttcttttctctgctgccctccagcctgtgtttatttcctgaacccccaccccaatcagttactgattcttgtag

SEQ ID NO: 156234 - DNA, 120 bp, Artificial Sequence
  ENSG00000106346_47 (sequence is synthesized)
ctagttccttaaaatctaaatgcagactcaagaggaagaacgaggggacagataatgcatcccaagccgcttggtgctgtctgagacacctggtagatctccctctgcattctccctgcc

SEQ ID NO: 156235 - DNA, 120 bp, Artificial Sequence
  ENSG00000106346_48 (sequence is synthesized)
ctggcaccgccctgtctaggacttcattgtccgggtgatgacatacttgggtcggaggaagactctctgccttttccgcctccgctccctttcctcccacacaggccgcagtgcccggag

SEQ ID NO: 156236 - DNA, 120 bp, Artificial Sequence
  ENSG00000106346_49 (sequence is synthesized)
gctgccatcttcctgcttcaggaccagactcctgccttgcttcccgagtcccttcctgacagacacagctcccacagctctgcgtctcctcccgccactcccagacctccctgtgttctg

SEQ ID NO: 156237 - DNA, 120 bp, Artificial Sequence
  ENSG00000106346_50 (sequence is synthesized)
gccaggaagggatgctcttgggctgccacacgtgccatccttttattttccatggctgtcctgtttgaattcttgatcttttgtgagctcccatgtgtttgaaatctggtcacagcatct

SEQ ID NO: 156238 - DNA, 120 bp, Artificial Sequence
  ENSG00000106346_51 (sequence is synthesized)
tatttcttaatacattttctttgcaaaggtgattaacatgtagaaagaaaacctcaggtggcatcaaagggcacagttactcagagcacccctgccctgcctggtctggcctcagtgctc

SEQ ID NO: 156239 - DNA, 120 bp, Artificial Sequence
  ENSG00000106346_52 (sequence is synthesized)
atccctgcagtgtggttccgttgcacagttaagcccttagcgtttattgaaggcctaagtgacacaggactgagggcagcactacctgtgtcaccaaagccctggaacgtacagctctag

SEQ ID NO: 156240 - DNA, 120 bp, Artificial Sequence
  ENSG00000106346_53 (sequence is synthesized)
ctgttctttgatctaaattaatggctcagattcatgtgtgtatgttctggggctattagttactaggatttaaaaaaaaaaatccttggtttctttttgaatagttctttacttaatgga

SEQ ID NO: 156241 - DNA, 120 bp, Artificial Sequence
  ENSG00000106346_54 (sequence is synthesized)
gaatttaaattggttcttttaaaactgatttttttttccctccaaagagccaagtaatgcttgtaaagaatttggaaagtacagaaaaacttaaagaaaccaaagaaaaatcacctagaa

SEQ ID NO: 156242 - DNA, 120 bp, Artificial Sequence
  ENSG00000106346_55 (sequence is synthesized)
tctcaccacctacctaggggtgtttgttatgccagaattaacgttctgtttgccctcattttctccctttctcagtccataattcattccccacagacagctttcctatcacttttgcgc

SEQ ID NO: 156243 - DNA, 120 bp, Artificial Sequence
  ENSG00000106348_0 (sequence is synthesized)
actcgaccgggctgcgctcactgcccagccggggccccgggagcctccaggctcccgcccgccctgagctgcggcctccgcatggaggggccactcactccaccaccgctgcagggaggc

SEQ ID NO: 156244 - DNA, 120 bp, Artificial Sequence
  ENSG00000106348_1 (sequence is synthesized)
ggagccgccgctgttccggagcccggagcccggcaacacccgggacacgagacggcggcgcagcggtacagcgcccgactgctgcaggccggctacgagcccgagagccctagattggac

SEQ ID NO: 156245 - DNA, 120 bp, Artificial Sequence
  ENSG00000106348_2 (sequence is synthesized)
ctcgctacacacccgacgacaccccgttcagaactatcttcagtggtcttactggcaggtgttggtgtccagatggatcgccttcgcagggctagcatggcggactacctgatcagcggc

SEQ ID NO: 156246 - DNA, 120 bp, Artificial Sequence
  ENSG00000106348_3 (sequence is synthesized)
ggcaccggctacgtgcccgaggatgggctcaccgcgcagcagctcttcgccagcgccgacggcctcacctacaacgacttcctgattctcccaggattcatagacttcatagctgatgag

SEQ ID NO: 156247 - DNA, 120 bp, Artificial Sequence
  ENSG00000106348_4 (sequence is synthesized)
gtggacctgacctcagccctgacccggaagatcacgctgaagacgccactgatctcctcccccatggacactgtgacagaggctgacatggccattgccatggctctgatgggaggtatt

SEQ ID NO: 156248 - DNA, 120 bp, Artificial Sequence
  ENSG00000106348_5 (sequence is synthesized)
ggtttcattcaccacaactgcaccccagagttccaggccaacgaggtgcggaaggtcaagaagtttgaacagggcttcatcacggaccctgtggtgctgagcccctcgcacactgtgggc

SEQ ID NO: 156249 - DNA, 120 bp, Artificial Sequence
  ENSG00000106348_6 (sequence is synthesized)
gatgtgctggaggccaagatgcggcatggcttctctggcatccccatcactgagacgggcaccatgggcagcaagctggtgggcatcgtcacctcccgagacatcgactttcttgctgag

SEQ ID NO: 156250 - DNA, 120 bp, Artificial Sequence
  ENSG00000106348_7 (sequence is synthesized)
aaggaccacaccaccctcctcagtgaggtgatgacgccaaggattgaactggtggtggctccagcaggtgtgacgttgaaagaggcaaatgagatcctgcagcgtagcaagaaagggaag

SEQ ID NO: 156251 - DNA, 120 bp, Artificial Sequence
  ENSG00000106348_8 (sequence is synthesized)
ctgcctatcgtcaatgattgcgatgagctggtggccatcatcgcccgcaccgacctgaagaagaaccgagactaccctctggcctccaaggattcccagaagcagctgctctgtggggca

SEQ ID NO: 156252 - DNA, 120 bp, Artificial Sequence
  ENSG00000106348_9 (sequence is synthesized)
gctgtgggcacccgtgaggatgacaaataccgtctggacctgctcacccaggcgggcgtcgacgtcatagtcttggactcgtcccaagggaattcggtgtatcagatcgccatggtgcat

SEQ ID NO: 156253 - DNA, 120 bp, Artificial Sequence
  ENSG00000106348_10 (sequence is synthesized)
acgggctgcgcgtgggcatgggctgcggctccatctgcatcacccaggaagtgatggcctgtggtcggccccagggcactgctgtgtacaaggtggctgagtatgcccggcgctttggtg

SEQ ID NO: 156254 - DNA, 120 bp, Artificial Sequence
  ENSG00000106348_11 (sequence is synthesized)
tgcccatcatagccgatggcggcatccagaccgtgggacacgtggtcaaggccctggcccttggagcctccacagtgatgatgggctccctgctggccgccactacggaggcccctggcg

SEQ ID NO: 156255 - DNA, 120 bp, Artificial Sequence
  ENSG00000106348_12 (sequence is synthesized)
agtacttcttctcagacggggtgcggctcaagaagtaccggggcatgggctcactggatgccatggagaagagcagcagcagccagaaacgatacttcagcgagggggataaagtgaaga

SEQ ID NO: 156256 - DNA, 120 bp, Artificial Sequence
  ENSG00000106348_13 (sequence is synthesized)
tcgcgcagggtgtctcgggctccatccaggacaaaggatccattcagaagttcgtgccctacctcatagcaggcatccaacacggctgccaggatatcggggcccgcagcctgtctgtcc

SEQ ID NO: 156257 - DNA, 120 bp, Artificial Sequence
  ENSG00000106348_14 (sequence is synthesized)
ttcggtccatgatgtactcaggagagctcaagtttgagaagcggaccatgtcggcccagattgagggtggtgtccatggcctgcactcttacgaaaagcggctgtactgaggacagcggt

SEQ ID NO: 156258 - DNA, 120 bp, Artificial Sequence
  ENSG00000106348_15 (sequence is synthesized)
ggaggccgaggtggtggaggggatgcaccccagtgtccacttttgggcacagcctccctccataactgagtggtccacagatttgcactacgggttctccagctcctttccaggcagaga

SEQ ID NO: 156259 - DNA, 120 bp, Artificial Sequence
  ENSG00000106348_16 (sequence is synthesized)
ggaggggaggtcctgaggggactgctgcccctcactcggcatcccctgcagagtcaggactgctcccggggccaggctgccctgggagcccccctccgagcccagccagccaggctctca

SEQ ID NO: 156260 - DNA, 120 bp, Artificial Sequence
  ENSG00000106348_17 (sequence is synthesized)
ggccctgcgcctgcctcaggtctttcttgctgcagcctgctccagcctggcccccaccccaggggcaggcggcccctcctggcttctcctgtagggcacctccctgcccctagcctccca

SEQ ID NO: 156261 - DNA, 120 bp, Artificial Sequence
  ENSG00000106348_18 (sequence is synthesized)
ggaaatggtgctctcctggccctgcctctggcccttcccgggccgctgcccctcagccatgtggcacttctgagctcctgacctaggccaaggggaggtctctgcccccttccccggccc

SEQ ID NO: 156262 - DNA, 120 bp, Artificial Sequence
  ENSG00000106348_19 (sequence is synthesized)
tgggctacccttgggtcctgctcctcaggccgctcccctgtccctggccatgggtaggagactgccctggtcatggccgcctgcctgtcattcctgactcaccaccgtccccaggtgaac

SEQ ID NO: 156263 - DNA, 120 bp, Artificial Sequence
  ENSG00000106348_20 (sequence is synthesized)
cattcctcccttctcctcagctgcagtcgaaggctttaactttgcacacttgggatcacagttgcgtcattgtgtattaaatacttggaataaatcaagcaggtctcaacgcctccacta

SEQ ID NO: 156264 - DNA, 120 bp, Artificial Sequence
  ENSG00000106348_21 (sequence is synthesized)
tcggaaggggccaggagacactggaaggtccggacggcagggaaggggacggggttctttccagtcccacccgtgtagggacacctctccccctcatcccccgatgtaccctcgctgaat

SEQ ID NO: 156265 - DNA, 120 bp, Artificial Sequence
  ENSG00000106348_22 (sequence is synthesized)
ctgggatgggagagacgaaccgagtctaggcatctgcgtagcagcgccggggagagcggggagcccagggcggagcccagtcgactcccggattcccctgccccgcccccggcacgaggc

SEQ ID NO: 156266 - DNA, 120 bp, Artificial Sequence
  ENSG00000106348_23 (sequence is synthesized)
agatgccacctggcagtccccacctcagaggccctcccagcctcccctgccagccctgcactgctacactccctgcgtgtccttcctctcagtggagccttggggccgagccctcatttt

SEQ ID NO: 156267 - DNA, 120 bp, Artificial Sequence
  ENSG00000106348_24 (sequence is synthesized)
gggacacgtggtcaaggccctggcccttggagcctccacaggcccctggcgagtacttcttctcagacggggtgcggctcaagaagtaccggggcatgggctcactggatgccatggaga

SEQ ID NO: 156268 - DNA, 120 bp, Artificial Sequence
  ENSG00000106348_25 (sequence is synthesized)
agagcagcagcagccagaaacgatacttcaggttccctgaccctgggccccacctgggcagatcagcccacaacccttcagggcccgctcatgccaccgacttccccagatggcagccag

SEQ ID NO: 156269 - DNA, 120 bp, Artificial Sequence
  ENSG00000106348_26 (sequence is synthesized)
tctgactcagcccagtgaggggtggcctgggggaccttcctgggcggtatcccgtttttgcccttaagaggtggggtggggtcctctgagcttcaagctgctgggctcagtcttccaccc

SEQ ID NO: 156270 - DNA, 120 bp, Artificial Sequence
  ENSG00000106348_27 (sequence is synthesized)
ctcgctacacacccgacgacaccccgttcaggtggctccaactcctggggttcaaacagtgcttgctggagtcctgtccgactgacttggcttacccctccttagctgtttcctcctaga

SEQ ID NO: 156271 - DNA, 120 bp, Artificial Sequence
  ENSG00000106348_28 (sequence is synthesized)
cgagccctcattttcccactggctcctcatcccactgagggtcctggcttctctgcagcacagctgcatcctctgttccctgtggccagcctggacatcatccctggctttcttccagcc

SEQ ID NO: 156272 - DNA, 120 bp, Artificial Sequence
  ENSG00000106351_0 (sequence is synthesized)
ggtggacggcgaagtctcctgcggatgccgcccgctcccgagcttctgtcaggggagccgggcgtgcggaggcggctgaggaggcgggaaggcggcagtggttgaaggggtgattgctga

SEQ ID NO: 156273 - DNA, 120 bp, Artificial Sequence
  ENSG00000106351_1 (sequence is synthesized)
ctagcggggagggagtgggcagcgatggtgatggcggcgaagaagggcccgggcccgggcggcggggtcagcgggggcaaggcggaggcggaggcggcctcggaggtgtggtgccgtcgg

SEQ ID NO: 156274 - DNA, 120 bp, Artificial Sequence
  ENSG00000106351_2 (sequence is synthesized)
gtgcgggagctgggtggctgcagccaggccgggaaccgccactgcttcgagtgcgcccagcgcggggtcacctacgtggatatcaccgtgggcagcttcgtgtgcaccacctgctccggc

SEQ ID NO: 156275 - DNA, 120 bp, Artificial Sequence
  ENSG00000106351_3 (sequence is synthesized)
ctcctgagagggctgaacccccctcatcgtgtcaagtcaatctccatgacaactttcactgagcctgaagtagtattcctgcaatcccgtggaaatgaggtttgccggaagatttggttg

SEQ ID NO: 156276 - DNA, 120 bp, Artificial Sequence
  ENSG00000106351_4 (sequence is synthesized)
ggtctgtttgatgctcggacatctttagtaccagattccagggatcctcagaaagtgaaggagtttctccaggaaaaatatgagaagaagagatggtatgtccccccagaccaagtcaag

SEQ ID NO: 156277 - DNA, 120 bp, Artificial Sequence
  ENSG00000106351_5 (sequence is synthesized)
gggcccacttataccaaaggcagtgcctccacccctgtgcagggctccatcccagaagggaagccccttcggacacttctgggtgatcctgcaccgtctctctcagttgctgcctccacc

SEQ ID NO: 156278 - DNA, 120 bp, Artificial Sequence
  ENSG00000106351_6 (sequence is synthesized)
tcgagccagcccgtcagtcagtctcacgctcggacatcccaggcccggagcactcagccacctccccactcctctgtcaaaaaagccagtactgacctgctggctgacatcggtggagac

SEQ ID NO: 156279 - DNA, 120 bp, Artificial Sequence
  ENSG00000106351_7 (sequence is synthesized)
ccctttgctgcaccccagatggcaccagcttttgctgcattccctgcctttgggggccagacaccttcccaaggaggctttgccaactttgatgcctttagcagtggccccagctcttct

SEQ ID NO: 156280 - DNA, 120 bp, Artificial Sequence
  ENSG00000106351_8 (sequence is synthesized)
gtgtttggaagcctccctccagctggtcaagcctcgttccaggcccagccaactcctgcagggagcagccaggggactccatttggtgccactcccctggcacccgccagtcagccaaac

SEQ ID NO: 156281 - DNA, 120 bp, Artificial Sequence
  ENSG00000106351_9 (sequence is synthesized)
agcctcgcagacgtgggcagcttcctgggacccggggtgcccgctgcaggtgttcctagcagcctcttcgggatggctggccaggtccccccgctccagtctgtcacgatgggcggcggc

SEQ ID NO: 156282 - DNA, 120 bp, Artificial Sequence
  ENSG00000106351_10 (sequence is synthesized)
ggcggcagcagcacagggctggcctttggagccttcactaaccctttcacagctcccgccgcccagtccccgctgccttccaccaacccgttccagcccaatggcttggcgccagggccc

SEQ ID NO: 156283 - DNA, 120 bp, Artificial Sequence
  ENSG00000106351_11 (sequence is synthesized)
ggctttgggatgagcagtgctgggcctggcttcccccaggcagtgccacccactggggcctttgccagctccttcccagcaccgctgttccccccgcagaccccgcttgttcagcagcag

SEQ ID NO: 156284 - DNA, 120 bp, Artificial Sequence
  ENSG00000106351_12 (sequence is synthesized)
aatggctcttccttcggggacttaggatcagccaagttggggcagaggccactgagccagccagctgggatctccaccaaccccttcatgactggaccctcatcaagcccattcgcctcc

SEQ ID NO: 156285 - DNA, 120 bp, Artificial Sequence
  ENSG00000106351_13 (sequence is synthesized)
aaacctccaaccaccaaccccttcttgtagcactgtgtttttggggggcctcttccctgccttctggggcccctctgctccctagagctctggtgaccacttgcctgtgggcatttctat

SEQ ID NO: 156286 - DNA, 120 bp, Artificial Sequence
  ENSG00000106351_14 (sequence is synthesized)
gggccttggggatggtggaggtgctaatgctttgcttggggcctacaggtgaaaggtggctgccctcagattccacaaagcctctctcccctccctcgtcccacccccacccaggcagga

SEQ ID NO: 156287 - DNA, 120 bp, Artificial Sequence
  ENSG00000106351_15 (sequence is synthesized)
agcccaggaggagtgcgggcagggcctgacctggaggagtgatggttgagggggagggatttttttcaaatgatcagtcccctgtggaacagctcttccctgggcctagctcgccagcgc

SEQ ID NO: 156288 - DNA, 120 bp, Artificial Sequence
  ENSG00000106351_16 (sequence is synthesized)
tgtgctcctcatggacgggagcgcagtggggaaggtaggggaaagatgaggcacagtgttgatggggcagtgaccagacagtcctgagacccagaaggcccaggtggcccaagtgctctt

SEQ ID NO: 156289 - DNA, 120 bp, Artificial Sequence
  ENSG00000106351_17 (sequence is synthesized)
ggtggcccagcttggccagcacacactttcctcctgcagcaccccctgctgaaggggtcccccattgttttgcttccccagcgcccaggatgagcggtttaccatcgagcttacccgggc

SEQ ID NO: 156290 - DNA, 120 bp, Artificial Sequence
  ENSG00000106351_18 (sequence is synthesized)
ccggctcctgtcaagcactttagttagctgttggtgtcatgtttggataccagtgttttatatttatacatagagaggattttctaatatagcctattatatataaatagatctatctat

SEQ ID NO: 156291 - DNA, 120 bp, Artificial Sequence
  ENSG00000106351_19 (sequence is synthesized)
atgcacatacatacatatatacacacacccagccgatctcccgctcccagactgctctcgtatgtggggaatgggatgaatccccatctgtgcctcgaccatcaaagccggagctccagg

SEQ ID NO: 156292 - DNA, 120 bp, Artificial Sequence
  ENSG00000106351_20 (sequence is synthesized)
tgtgtcctgacccccaccatccccagagcctgggttttccagggaaaggctttgtgcaattgcctggtctttttttttttttttttttctccatgtgcctccctgtccccaaatctctgc

SEQ ID NO: 156293 - DNA, 120 bp, Artificial Sequence
  ENSG00000106351_21 (sequence is synthesized)
accaaagctcattgcaggcaatgttggaaaagaactgcatttgaacgaaagagaaaacggcgcctgtggttttgcttcaggccactttgaggggttgcaggtcagtcaacatgactgatc

SEQ ID NO: 156294 - DNA, 120 bp, Artificial Sequence
  ENSG00000106351_22 (sequence is synthesized)
cttgacctggctctgctgggctggactgcctgggccagtgataatgctgccattggccagagacagggcagagcccgtccctgtctgaacaagagtcccgcattagcaatgagaagaagc

SEQ ID NO: 156295 - DNA, 120 bp, Artificial Sequence
  ENSG00000106351_23 (sequence is synthesized)
gtggcgggagaggagccaccactgccggggactggagtttgttggatgtgaggggaatgcccactggggccagggtgggcaaaggaggttggtgccaatgtggtgctggaagtagacccc

SEQ ID NO: 156296 - DNA, 120 bp, Artificial Sequence
  ENSG00000106351_24 (sequence is synthesized)
tcctgggtctggaacattctctgccccaggctctttccacctggggatgttgtgacaacatccagctgtggtgtctgggctatttgtgtggtgacaagacagacctggtcagggggtggg

SEQ ID NO: 156297 - DNA, 120 bp, Artificial Sequence
  ENSG00000106351_25 (sequence is synthesized)
tggcaaacacctcacctggctgggcagaggccaccttgctgtttggcccaaggccaggtgaggcccctccctttccaccattgccctggccccgtggccattcattcttggggtttgtct

SEQ ID NO: 156298 - DNA, 120 bp, Artificial Sequence
  ENSG00000106351_26 (sequence is synthesized)
gagtcttccacagagagcagcaaagagatatgggagttgggtgatcagtgtatttactttgcagatttttctggaaataacctctagctgctgctatttgcaaggctgggattggcctcc

SEQ ID NO: 156299 - DNA, 120 bp, Artificial Sequence
  ENSG00000106351_27 (sequence is synthesized)
ctgtcttttccaacaatcaggaccccatcctgtctgttcctgttcttctcccagcctctgccctccttctgtctcctgggtggtctcccgcttcgctcctggcctttgcatgttccatct

SEQ ID NO: 156300 - DNA, 120 bp, Artificial Sequence
  ENSG00000106351_28 (sequence is synthesized)
cttctctttctcccctcttcgccaccctagattatctctgtgtccctctacctaattctcttaccagttctttcctttctgcttagagccggagggagggaagctggaatctgttatggt

SEQ ID NO: 156301 - DNA, 120 bp, Artificial Sequence
  ENSG00000106351_29 (sequence is synthesized)
gtattagggggaggagcctttctgttatttccccccagcttccatcacccttcccttaatgccaggagcgccgaggtttggaactgaggctaaaccgaagggctttctcctgcttctgtc

SEQ ID NO: 156302 - DNA, 120 bp, Artificial Sequence
  ENSG00000106351_30 (sequence is synthesized)
accctgtgctgtctcccggcatctcctcactatctgggtccaggcccgggtcctccctgcagactccctcccctccagcccacaaggactccagcctgctggctggtgagagctggatga

SEQ ID NO: 156303 - DNA, 120 bp, Artificial Sequence
  ENSG00000106351_31 (sequence is synthesized)
gcagtaagaagttaacgccaggtcagcctcgggccccagggttccctgggcacaggctgacactaggagctgctctccttggccggggacagctccagcagctcaggctccagccctcca

SEQ ID NO: 156304 - DNA, 120 bp, Artificial Sequence
  ENSG00000106351_32 (sequence is synthesized)
gtgagccgcctctcctggagagtagcaaagaatggagaaaggcctggcttgagaggaaatggagaaaacattgcctggtagctgcagattcaaacccaccacacacaccacggggctaga

SEQ ID NO: 156305 - DNA, 120 bp, Artificial Sequence
  ENSG00000106351_33 (sequence is synthesized)
gtgactcacctgggctcacaccaacttctggccaatgcagggaccatgctctgcagacagcagtcctctagcatggccccagcattcagccagtcggtcacctgtgggccatccccatgt

SEQ ID NO: 156306 - DNA, 120 bp, Artificial Sequence
  ENSG00000106351_34 (sequence is synthesized)
gtgaggaagcaggagtcagccaccaagtgtctccacatcggagcttgcgggtcagacctgtgggccaggggatgggagcagggctgagggtaggggctgaatgtgtggctctgtccctgt

SEQ ID NO: 156307 - DNA, 120 bp, Artificial Sequence
  ENSG00000106351_35 (sequence is synthesized)
gttgccttccacagaggagcaaggcctcaggctgaggaaggaggggcacgctggaacagcctagtctcctccccgtggattcccccaaacccataacattcttccataggggctgagaac

SEQ ID NO: 156308 - DNA, 120 bp, Artificial Sequence
  ENSG00000106351_36 (sequence is synthesized)
gcagtgccccgtccctgacagggatgaaaagtgaacccctcaggtcaggagaggcagagttgaggttctgccacttcctgtccctggggagccactcaagttaccagggctaccggctga

SEQ ID NO: 156309 - DNA, 120 bp, Artificial Sequence
  ENSG00000106351_37 (sequence is synthesized)
aataaatcttttccgggtagggtcaagggcagtgtgttgccaaggcaactgatgtaggccagttgcgtgactccaggtttgtcctggtactcagtgggtccaatcacctggcattgatca

SEQ ID NO: 156310 - DNA, 120 bp, Artificial Sequence
  ENSG00000106351_38 (sequence is synthesized)
cctggcattgatcagcacccaccccacccctgaggcttgcccagcccccaggccctcagatccctgctcttcctgcctttcctgcccatgtgtcacccagcacccaaggttcagtgacac

SEQ ID NO: 156311 - DNA, 120 bp, Artificial Sequence
  ENSG00000106351_39 (sequence is synthesized)
agggtggtttggagctggtcactgtcatagcagctgtgatttcacaaggaagggtgctgcagggggacctggttgatggggagtgggaaggggaaggaataaagagatcttcctcaggta

SEQ ID NO: 156312 - DNA, 120 bp, Artificial Sequence
  ENSG00000106351_40 (sequence is synthesized)
gctcttctgtgtttggaagcctccctccagctggtcaagcctcgttccaggcccagccaactcctgcagccagtcggatgctaactgaaagttacagctttgggagcagccaggggactc

SEQ ID NO: 156313 - DNA, 120 bp, Artificial Sequence
  ENSG00000106351_41 (sequence is synthesized)
accgtgtccatttgttcatgtctataaatcaccattcatatcctcactatcctaaagaactgctcaaagcagcaaagcacaaagagaagcagctccaggagaggatgagcgtgtctgaca

SEQ ID NO: 156314 - DNA, 120 bp, Artificial Sequence
  ENSG00000106351_42 (sequence is synthesized)
cattcttgtcagggagagggggctctactgttctgctttttcatgaaaggaaaatgactaagattgcagcaggagctgtgtgggttatacactaggaaacttttcactaggaagtatgga

SEQ ID NO: 156315 - DNA, 120 bp, Artificial Sequence
  ENSG00000106351_43 (sequence is synthesized)
agacctgagtcctagaaaaattgaaaatggacgtgactttttctctaaggtgctcttgtctgcatagtacgctgtcccaaagggtcaagggtcaaggtagtctccagaagtcctcatcca

SEQ ID NO: 156316 - DNA, 120 bp, Artificial Sequence
  ENSG00000106351_44 (sequence is synthesized)
gtagtctccagaagtcctcatccatccctctaagaccaaaggcctgtaaactctatgttgctgccagccacaatggctcacgcctgcaatcctaacactttgggaggccgaggtgggagg

SEQ ID NO: 156317 - DNA, 68 bp, Artificial Sequence
  ENSG00000106351_45 (sequence is synthesized)
gctgtagtgagtgattcaaacgaacgaacaaacaaaaccaaataaactatgttatttagccattgcaa

SEQ ID NO: 156318 - DNA, 120 bp, Artificial Sequence
  ENSG00000106355_0 (sequence is synthesized)
acttccggcgtagccatggcggctaacgctactaccaacccgtcgcagctgctgcccttagagcttgtggacaaatgtataggatcaagaattcacatcgtgatgaagagtgataaggaa

SEQ ID NO: 156319 - DNA, 120 bp, Artificial Sequence
  ENSG00000106355_1 (sequence is synthesized)
attgttggtactcttctaggatttgatgactttgtcaatatggtactggaagatgtcactgagtttgaaatcacaccagaaggaagaaggattactaaattagatcagattttgctaaat

SEQ ID NO: 156320 - DNA, 120 bp, Artificial Sequence
  ENSG00000106355_2 (sequence is synthesized)
ggaaataatataacaatgctggttcctggaggagaaggacctgaagtgtgaatgagtttccttgacttacactagattttgttttggcttataatgacaagaaaatggaattttttttcc

SEQ ID NO: 156321 - DNA, 120 bp, Artificial Sequence
  ENSG00000106355_3 (sequence is synthesized)
cactttctaatgtttaaatcccataaagctaagtttcccgttaaagggaagtgctttgaagatgtgtacccatttttgtaagttaatcatgattatcctggaaaaagaagaaaagagctt

SEQ ID NO: 156322 - DNA, 120 bp, Artificial Sequence
  ENSG00000106355_4 (sequence is synthesized)
cttctttgcagatgaaaataaaggtgtttttggttaactgtcattttgtttattctactgcagtagccagtggaacaaagtttgtagttattttgccacttacttttctgtcattatatg

SEQ ID NO: 156323 - DNA, 120 bp, Artificial Sequence
  ENSG00000106355_5 (sequence is synthesized)
cttatttgttttgtcatttacgtgaccatttgattctcaaacaaaagttgttccaaacaaaatgatgaactttgatttgaacaggtgcatttaaacaaccggaaatgatcacttagaaaa

SEQ ID NO: 156324 - DNA, 120 bp, Artificial Sequence
  ENSG00000106355_6 (sequence is synthesized)
ttcaattaaaatgctgttgttttgtaatgaggatttttcttctgatttcaaattccatgaactcctattgaaaacaaacaatgtacaggtaatatatgcacattgtagaaatgcaggaat

SEQ ID NO: 156325 - DNA, 120 bp, Artificial Sequence
  ENSG00000106355_7 (sequence is synthesized)
tatctattggaattaccctaaagatagaaattttatctatttgcttataaaattgattcagaaggttattaccttaatgtagttattactgaattgccaggaaatgagtggagacagagc

SEQ ID NO: 156326 - DNA, 120 bp, Artificial Sequence
  ENSG00000106355_8 (sequence is synthesized)
tttaagataaaggatactaaaagcagctaagaactccaggactcaggtcaaatcaaggaactgataataagatcattgaactgtataaattaagtcaaagaactcctattaaaaacaaac

SEQ ID NO: 156327 - DNA, 120 bp, Artificial Sequence
  ENSG00000106355_9 (sequence is synthesized)
catgctttgctgtatgtcttcgtagactttctcagtccactctcagtacacgttttattttacttgctcatcctgattatactgtttttaccctccacttaagtcattttttgaatttaa

SEQ ID NO: 156328 - DNA, 120 bp, Artificial Sequence
  ENSG00000106355_10 (sequence is synthesized)
atggtgaatatctttctgtgtcaaatatttcaacattaatatgtacatagtattaaatggatttactataaattatttagcctattcttactggccacagtagtctaactagatctttat

SEQ ID NO: 156329 - DNA, 120 bp, Artificial Sequence
  ENSG00000106355_11 (sequence is synthesized)
acatttgtatttttctagaataaactcaaaaatgtgtaagatcaaagggtatatattgtgttgccaagaaaaagtttgtgccaatgtatatttttgccaggagtctttcatagtaccatt

SEQ ID NO: 156330 - DNA, 120 bp, Artificial Sequence
  ENSG00000106355_12 (sequence is synthesized)
ctttcatagtaccatttatatccttcccagcattagctgtgttctaccttctctcctctttgccatttttacaagaaaaccgggcatgtctaaagttttcttttcctttttttttttttt

SEQ ID NO: 156331 - DNA, 120 bp, Artificial Sequence
  ENSG00000106355_13 (sequence is synthesized)
tttttttggagagtctcactggaatgcagtggcatgatcttggctccctgcaacctccagtcaggctggtgtgccttgtcgcgatatcaacgcgacctccgcctcccaggttcaagtgat

SEQ ID NO: 156332 - DNA, 79 bp, Artificial Sequence
  ENSG00000106355_14 (sequence is synthesized)
caagtgattggccaccactcccatctaatttttatatttttagagagatggggttttaccttgttggccaggctggtct

SEQ ID NO: 156333 - DNA, 120 bp, Artificial Sequence
  ENSG00000106355_15 (sequence is synthesized)
acctgcctcagcctcccaaagtgccggtattaaaggcatgagccaccaggcctggcctaaaattttcttgattaattttgatctcatttgtattttgtaaatgacttatctgttgaggct

SEQ ID NO: 156334 - DNA, 120 bp, Artificial Sequence
  ENSG00000106355_16 (sequence is synthesized)
ggcttttgccattgagatgtttgtctttttcttactaatttgtaagaattcttgatgggtttctgttagtcatgtattttgctaataatttccctagtttgtagtttgccacttagtgct

SEQ ID NO: 156335 - DNA, 120 bp, Artificial Sequence
  ENSG00000106355_17 (sequence is synthesized)
atttttgacataaatgatgtattttaatgtagttgcatgttgacctagtccattatggtttttgtatttggtccacgtggattggaaaacctttgctttgattatacttttctttgggca

SEQ ID NO: 156336 - DNA, 120 bp, Artificial Sequence
  ENSG00000106355_18 (sequence is synthesized)
ggtgtccgcgggacctggaggtgcggcgtggcacacctgctttttcctccctggattcaatctcaaagcacttccttctcttttgccttctctttttcctcaaagttttcccacttccct

SEQ ID NO: 156337 - DNA, 120 bp, Artificial Sequence
  ENSG00000106355_19 (sequence is synthesized)
cttctcttctgttttccttgctttttcacatcttttcggttcactctccgagtgtccgattccttcacctccttgcctttgcctctgtggcccccgtccttattcttaaatatgtagtaa

SEQ ID NO: 156338 - DNA, 120 bp, Artificial Sequence
  ENSG00000106355_20 (sequence is synthesized)
cggctaacgctactaccaacccgtcgcagctgctgcccttaggtaatcgccgtcctttggggagcaggaacagggagctgacattcaggattgggggccgaggggctgttccgaggcagg

SEQ ID NO: 156339 - DNA, 120 bp, Artificial Sequence
  ENSG00000106355_21 (sequence is synthesized)
ccctggccgagtgtggggaaatgtataagaccaaatgcggttcgactctgagctccaagtcttcgcgacagcaggccgcacctgctctttaacgtggtcgggctcctccagagcttgtgg

SEQ ID NO: 156340 - DNA, 120 bp, Artificial Sequence
  ENSG00000106355_22 (sequence is synthesized)
acttccggcgtagccatggcggctaacgctactaccaacccgtcgcagctgctgcccttagttggtgaagagtgattgaactagtggtcgtggccgtgattgaaaagttttcattccttc

SEQ ID NO: 156341 - DNA, 120 bp, Artificial Sequence
  ENSG00000106355_23 (sequence is synthesized)
atgccacagactcttttggaaggctcattatgtgccagatgctgtgcttgaactgagatttgtattataagacctaaaagcttgtggacaaatgtataggatcaagaattcacatcgtga

SEQ ID NO: 156342 - DNA, 120 bp, Artificial Sequence
  ENSG00000106355_24 (sequence is synthesized)
gtaaaattatttatgagaaaacattacctcttggtggaataacgttaaagatagacgttttatctgtttgcttgtaaaattggatcagagtgttattaccttaatgtaattattagtaaa

SEQ ID NO: 156343 - DNA, 120 bp, Artificial Sequence
  ENSG00000106355_25 (sequence is synthesized)
cgcctagaatattagtggagacacagttttaaggtagaagataacaaaaagagccaggaattttagggttcaggtcaaataaaggaactgatagtaagagcatttaggctggacatggtg

SEQ ID NO: 156344 - DNA, 88 bp, Artificial Sequence
  ENSG00000106355_26 (sequence is synthesized)
ggaggattaaagggagacccctgtctctataaaaaatttaaaaattagctggttatagtagggggcagctgtagtcctagctgctctg

SEQ ID NO: 156345 - DNA, 120 bp, Artificial Sequence
  ENSG00000106355_27 (sequence is synthesized)
ctggttatagtagggggcagctgtagtcctagctgctctggagggtgaggatcccttgagcccaggagttctaggctgcagtgaactatgattgtaccactgtactcagcctgggcaaca

SEQ ID NO: 156346 - DNA, 120 bp, Artificial Sequence
  ENSG00000106355_28 (sequence is synthesized)
aagaccctgtctcttaaaaaaaaaaaaacccaaaaaacatttcatttcatatttgatttcctgggcaagctttcacttctttttatgaagctctgtctgatagacgtgggtcttagtgtc

SEQ ID NO: 156347 - DNA, 120 bp, Artificial Sequence
  ENSG00000106355_29 (sequence is synthesized)
ctttgtatctgaaaattgtggatataattgctcaacctcagtgtaatttgtatacaaggataacctttttagggagggtaagtatttccaaaatgttggctttgattttcactgtttgtc

SEQ ID NO: 156348 - DNA, 120 bp, Artificial Sequence
  ENSG00000106355_30 (sequence is synthesized)
ctgactgtattttatctattcatttagtgaaatcacaccagaaggaagaaggattactaaattagatcagattttgctaaatggaaataatataacaatggtaagacacattgaaactgt

SEQ ID NO: 156349 - DNA, 120 bp, Artificial Sequence
  ENSG00000106355_31 (sequence is synthesized)
tttattttgatgggagcccatttttggggagcagtgattacagaactaaccttaatgttgcttgcttgactaaatgatcatggcccagtggtgcataagatgggaaaggggttctctgtg

SEQ ID NO: 156350 - DNA, 120 bp, Artificial Sequence
  ENSG00000106355_32 (sequence is synthesized)
gtcagggtcctaaagctcagctattgaagaggcattgggtctaaaggttagtttgcttggaacttttaatcgctgttgagatagtaagtattaattgatgacgttgggaattgtaaatag

SEQ ID NO: 156351 - DNA, 120 bp, Artificial Sequence
  ENSG00000106355_33 (sequence is synthesized)
atactgacaatctggagaaaatgggaacgtggagtgcaggggacaggcaaaggtggcttaatgaagagcaaggggtttttagatgacatggtggtagtgttattaataaactctttttcc

SEQ ID NO: 156352 - DNA, 120 bp, Artificial Sequence
  ENSG00000106355_34 (sequence is synthesized)
cttaaatcctcactaaagaaaaattttaaaaaatgctagttgcagattttcaatccactggactttaaaaagaaacaatagattccttaatgagtagttgtaacgaaaattgtaacagtt

SEQ ID NO: 156353 - DNA, 120 bp, Artificial Sequence
  ENSG00000106355_35 (sequence is synthesized)
aattgatggcaggaaatacgaattgatttatactggtttgaagattctggcttgagaggaaatgcaactttacgggggaagaagactcaaacgttacaggaacaatttattcacaaggca

SEQ ID NO: 156354 - DNA, 120 bp, Artificial Sequence
  ENSG00000106355_36 (sequence is synthesized)
aaatatcttcaacgtctctccaaaacttcaagggcattatgggtatctgccgagatggtaaaatgtccagtgggcaggaaatatttcaccggatctcacttgccggggaaaaaagccagt

SEQ ID NO: 156355 - DNA, 120 bp, Artificial Sequence
  ENSG00000106355_37 (sequence is synthesized)
gaacgcgacccacgcagctgactagatcgtgcgctcggcctcagattggtcgagcctgtttgggctgcggaaaaagcggaagcgcgcttttcaaagtcgtcccaccatcaatgaaggcag

SEQ ID NO: 156356 - DNA, 120 bp, Artificial Sequence
  ENSG00000106355_38 (sequence is synthesized)
tcactggaaaaggtccacatttagtgaacgcgtcgtcggcctactttgttgtgagcccgcctctgcagtgttatagagcttgtggacaaatgtataggatcaagaattcacatcgtgatg

SEQ ID NO: 156357 - DNA, 120 bp, Artificial Sequence
  ENSG00000106366_0 (sequence is synthesized)
ggcccacagaggagcacagctgtgtttggctgcagggccaagagcgctgtcaagaagacccacacgcccccctccagcagctgaattcctgcagctcagcagccgccgccagagcaggac

SEQ ID NO: 156358 - DNA, 120 bp, Artificial Sequence
  ENSG00000106366_1 (sequence is synthesized)
gaaccgccaatcgcaaggcacctctgagaacttcaggatgcagatgtctccagccctcacctgcctagtcctgggcctggcccttgtctttggtgaagggtctgctgtgcaccatccccc

SEQ ID NO: 156359 - DNA, 120 bp, Artificial Sequence
  ENSG00000106366_2 (sequence is synthesized)
atcctacgtggcccacctggcctcagacttcggggtgagggtgtttcagcaggtggcgcaggcctccaaggaccgcaacgtggttttctcaccctatggggtggcctcggtgttggccat

SEQ ID NO: 156360 - DNA, 120 bp, Artificial Sequence
  ENSG00000106366_3 (sequence is synthesized)
gctccagctgacaacaggaggagaaacccagcagcagattcaagcagctatgggattcaagattgatgacaagggcatggcccccgccctccggcatctgtacaaggagctcatggggcc

SEQ ID NO: 156361 - DNA, 120 bp, Artificial Sequence
  ENSG00000106366_4 (sequence is synthesized)
atggaacaaggatgagatcagcaccacagacgcgatcttcgtccagcgggatctgaagctggtccagggcttcatgccccacttcttcaggctgttccggagcacggtcaagcaagtgga

SEQ ID NO: 156362 - DNA, 120 bp, Artificial Sequence
  ENSG00000106366_5 (sequence is synthesized)
cttttcagaggtggagagagccagattcatcatcaatgactgggtgaagacacacacaaaaggtatgatcagcaacttgcttgggaaaggagccgtggaccagctgacacggctggtgct

SEQ ID NO: 156363 - DNA, 120 bp, Artificial Sequence
  ENSG00000106366_6 (sequence is synthesized)
ggtgaatgccctctacttcaacggccagtggaagactcccttccccgactccagcacccaccgccgcctcttccacaaatcagacggcagcactgtctctgtgcccatgatggctcagac

SEQ ID NO: 156364 - DNA, 120 bp, Artificial Sequence
  ENSG00000106366_7 (sequence is synthesized)
caacaagttcaactatactgagttcaccacgcccgatggccattactacgacatcctggaactgccctaccacggggacaccctcagcatgttcattgctgccccttatgaaaaagaggt

SEQ ID NO: 156365 - DNA, 120 bp, Artificial Sequence
  ENSG00000106366_8 (sequence is synthesized)
gcctctctctgccctcaccaacattctgagtgcccagctcatcagccactggaaaggcaacatgaccaggctgccccgcctcctggttctgcccaagttctccctggagactgaagtcga

SEQ ID NO: 156366 - DNA, 120 bp, Artificial Sequence
  ENSG00000106366_9 (sequence is synthesized)
cctcaggaagcccctagagaacctgggaatgaccgacatgttcagacagtttcaggctgacttcacgagtctttcagaccaagagcctctccacgtcgcgcaggcgctgcagaaagtgaa

SEQ ID NO: 156367 - DNA, 120 bp, Artificial Sequence
  ENSG00000106366_10 (sequence is synthesized)
gatcgaggtgaacgagagtggcacggtggcctcctcatccacagctgtcatagtctcagcccgcatggcccccgaggagatcatcatggacagacccttcctctttgtggtccggcacaa

SEQ ID NO: 156368 - DNA, 120 bp, Artificial Sequence
  ENSG00000106366_11 (sequence is synthesized)
ccccacaggaacagtccttttcatgggccaagtgatggaaccctgaccctggggaaagacgccttcatctgggacaaaactggagatgcatcgggaaagaagaaactccgaagaaaagaa

SEQ ID NO: 156369 - DNA, 120 bp, Artificial Sequence
  ENSG00000106366_12 (sequence is synthesized)
ttttagtgttaatgactctttctgaaggaagagaagacatttgccttttgttaaaagatggtaaaccagatctgtctccaagaccttggcctctccttggaggacctttaggtcaaactc

SEQ ID NO: 156370 - DNA, 120 bp, Artificial Sequence
  ENSG00000106366_13 (sequence is synthesized)
gtgacgcctgcgggaccatctggggcacctgcttccacccgtctctctgcccactcgggtctgcagacctggttcccactgaggccctttgcaggatggaactacggggcttacaggagc

SEQ ID NO: 156371 - DNA, 120 bp, Artificial Sequence
  ENSG00000106366_14 (sequence is synthesized)
ttttgtgtgcctggtagaaactatttctgttccagtcacattgccatcactcttgtactgcctgccaccgcggaggaggctggtgacaggccaaaggccagtggaagaaacaccctttca

SEQ ID NO: 156372 - DNA, 120 bp, Artificial Sequence
  ENSG00000106366_15 (sequence is synthesized)
tctcagagtccactgtggcactggccacccctccccagtacaggggtgctgcaggtggcagagtgaatgtcccccatcatgtggcccaactctcctggcctggccatctccctccccaga

SEQ ID NO: 156373 - DNA, 120 bp, Artificial Sequence
  ENSG00000106366_16 (sequence is synthesized)
aacagtgtgcatgggttattttggagtgtaggtgacttgtttactcattgaagcagatttctgcttccttttatttttataggaatagaggaagaaatgtcagatgcgtgcccagctctt

SEQ ID NO: 156374 - DNA, 120 bp, Artificial Sequence
  ENSG00000106366_17 (sequence is synthesized)
caccccccaatctcttggtggggaggggtgtacctaaatatttatcatatccttgcccttgagtgcttgttagagagaaagagaactactaaggaaaataatattatttaaactcgctcc

SEQ ID NO: 156375 - DNA, 120 bp, Artificial Sequence
  ENSG00000106366_18 (sequence is synthesized)
tagtgtttctttgtggtctgtgtcaccgtatctcaggaagtccagccacttgactggcacacacccctccggacatccagcgtgacggagcccacactgccaccttgtggccgcctgaga

SEQ ID NO: 156376 - DNA, 120 bp, Artificial Sequence
  ENSG00000106366_19 (sequence is synthesized)
ccctcgcgccccccgcgcccctctttttccccttgatggaaattgaccatacaatttcatcctccttcaggggatcaaaaggacggagtggggggacagagactcagatgaggacagagt

SEQ ID NO: 156377 - DNA, 120 bp, Artificial Sequence
  ENSG00000106366_20 (sequence is synthesized)
ggtttccaatgtgttcaatagatttaggagcagaaatgcaaggggctgcatgacctaccaggacagaactttccccaattacagggtgactcacagccgcattggtgactcacttcaatg

SEQ ID NO: 156378 - DNA, 120 bp, Artificial Sequence
  ENSG00000106366_21 (sequence is synthesized)
tgtcatttccggctgctgtgtgtgagcagtggacacgtgaggggggggtgggtgagagagacaggcagctcggattcaactaccttagataatatttctgaaaacctaccagccagaggg

SEQ ID NO: 156379 - DNA, 62 bp, Artificial Sequence
  ENSG00000106366_22 (sequence is synthesized)
taccttagataatatttctgaaaacctaccagccagagggtagggcacaaagatggatgtaa

SEQ ID NO: 156380 - DNA, 120 bp, Artificial Sequence
  ENSG00000106366_23 (sequence is synthesized)
tacttaaatatatatttctaatatctttaaatatatatatatattttaaagaccaatttatgggagaattgcacacagatgtgaaatgaatgtaatctaatagaagcctaatcagcccac

SEQ ID NO: 156381 - DNA, 120 bp, Artificial Sequence
  ENSG00000106366_24 (sequence is synthesized)
taatcagcccaccatgttctccactgaaaaatcctctttctttggggtttttctttctttcttttttgattttgcactggacggtgacgtcagccatgtacaggatccacaggggtggtg

SEQ ID NO: 156382 - DNA, 120 bp, Artificial Sequence
  ENSG00000106366_25 (sequence is synthesized)
tcaaatgctattgaaattgtgttgaattgtatgctttttcacttttgataaataaacatgtaaaaatgtttcaaaaaaataataaaataaataaatacgaagaatatgtcaggacagtca

SEQ ID NO: 156383 - DNA, 120 bp, Artificial Sequence
  ENSG00000106367_0 (sequence is synthesized)
ggtggccgaagtgggacgcgccgagccggaggctgcaggatgatgcggttcatgctattattcagccggcagggaaaactgcggctgcaaaaatggtacctggccacttcggacaaggaa

SEQ ID NO: 156384 - DNA, 120 bp, Artificial Sequence
  ENSG00000106367_1 (sequence is synthesized)
cggaagaagatggtgcgcgagctcatgcaggttgtcctggctcgaaagcccaagatgtgcagcttcctggagtggagggacctcaaagttgtctataagagatatgccagcctctacttc

SEQ ID NO: 156385 - DNA, 120 bp, Artificial Sequence
  ENSG00000106367_2 (sequence is synthesized)
tgctgcgccatcgagggccaagacaatgagctcatcacactggagctgatccaccgatacgtggagctcttagacaaatactttggcagtgtgtgcgagctggacatcatcttcaacttt

SEQ ID NO: 156386 - DNA, 120 bp, Artificial Sequence
  ENSG00000106367_3 (sequence is synthesized)
gagaaggcctacttcatcctggatgagtttttgatggggggggatgtccaggacacctccaagaagagtgtgctgaaagccatcgagcaggctgacctactgcaagaggaggatgagtcg

SEQ ID NO: 156387 - DNA, 120 bp, Artificial Sequence
  ENSG00000106367_4 (sequence is synthesized)
ccacggagtgtgctggaggagatgggtttggcatagcccctgctgggccggggtgtggcgatggggtcctggcagcgtggcgggaacggctgcttctcctctgcccagggccctgttctt

SEQ ID NO: 156388 - DNA, 120 bp, Artificial Sequence
  ENSG00000106367_5 (sequence is synthesized)
ctgcctcacctttcggagtgagctgtgggctcaggcccttcaaacattccctccctccaccccctacctccactttccccttttcccactgaaggttttagaagctaggaggcaggaaaa

SEQ ID NO: 156389 - DNA, 120 bp, Artificial Sequence
  ENSG00000106367_6 (sequence is synthesized)
tgtgacccagatgggggtgctatttggcttttattccctgcctttgcagaactgatgtcaccccagatgtccttccctccctaataactgtaaatatataaatatgtcaggttaaaggga

SEQ ID NO: 156390 - DNA, 120 bp, Artificial Sequence
  ENSG00000106367_7 (sequence is synthesized)
aaaggtgttcagggcacttcttgtcctctctgtcccataacctacctccaccctccccctagccagccaggcagcttctctgcctgggaggggagcctggacccccctctttctccttgg

SEQ ID NO: 156391 - DNA, 120 bp, Artificial Sequence
  ENSG00000106367_8 (sequence is synthesized)
ctgcagtggggcctttatccagtgccagggaggaacaacatagttaatttttttctaaccttgccactttgagggaaggaagggttgggggaagggcaagctttatgggaccctggtcct

SEQ ID NO: 156392 - DNA, 120 bp, Artificial Sequence
  ENSG00000106367_9 (sequence is synthesized)
ggccctggcctttcactccagttctgggtgaggcaggagctgggaggggtggggagggggagggggaagtgtctgcctttatgtcctttcttctgaaataaaagtaaaagcatttctgga

SEQ ID NO: 156393 - DNA, 120 bp, Artificial Sequence
  ENSG00000106367_10 (sequence is synthesized)
gtgcgaagagggaggggagggggaagcgaggggcgtgggctgcacctgcgggggtcctcgggggccgccctcggggtgaaccgccctgtcttccctctggtcctcagaggcctcccttgc

SEQ ID NO: 156394 - DNA, 120 bp, Artificial Sequence
  ENSG00000106367_11 (sequence is synthesized)
ccaagatgtgcagcttcctggagtggagggacctcaaagttgtctataagaggtgtgcgagctggacatcatcttcaactttgagaaggcctacttcatcctggatgagtttttgatggg

SEQ ID NO: 156395 - DNA, 120 bp, Artificial Sequence
  ENSG00000106367_12 (sequence is synthesized)
gcctcacctttcggaatttcatttcctgtattttatctggccaccctaccttaaacggatttttatgcccaatgcgtctccaaacgggctgcccccaactccctgagctgcctttatgga

SEQ ID NO: 156396 - DNA, 120 bp, Artificial Sequence
  ENSG00000106367_13 (sequence is synthesized)
ggagtgggactggcgcctacggtggccgaagtgggacgcgccgagccggaggctgcaggatgagccaggatttgaacccagctgacagactcagaagctctgacttccccctgctggtgg

SEQ ID NO: 156397 - DNA, 120 bp, Artificial Sequence
  ENSG00000106367_14 (sequence is synthesized)
aaacacccagccttgagagcaaggggctggatgttggaagaaagtagagaagaattagctggagataagtttggggaatgtgtggttaccctcggttctgccctcccatcccccacagat

SEQ ID NO: 156398 - DNA, 120 bp, Artificial Sequence
  ENSG00000106384_0 (sequence is synthesized)
atccaaagatctccccactcacacacctacggacacacgctactctgggaggtgatttgcgacttagccaggcccccaaagctgggctcctgtagggagaaagtctgcccaggtccacat

SEQ ID NO: 156399 - DNA, 120 bp, Artificial Sequence
  ENSG00000106384_1 (sequence is synthesized)
ccaagccttcatcgtttgtcctccgggttctgggatcctgctggaagaggggagcttctgcaatgggagttgccacaaccctgcagcccccaaccacttccaaaaccttgcagaagcagc

SEQ ID NO: 156400 - DNA, 120 bp, Artificial Sequence
  ENSG00000106384_2 (sequence is synthesized)
atctagaagcagtgggcgcctaccaatatgtgctcactttcctcttcatgggccctttcttctcccttcttgtctttgtcctcctcttcacgtcactctggcccttctctgttttttact

SEQ ID NO: 156401 - DNA, 120 bp, Artificial Sequence
  ENSG00000106384_3 (sequence is synthesized)
tggtgtggctctatgtggactgggacacacccaaccaaggtggaaggcgttcggagtggataaggaaccgggcaatttggagacaactaagggattattatcctgtcaagctggtgaaaa

SEQ ID NO: 156402 - DNA, 120 bp, Artificial Sequence
  ENSG00000106384_4 (sequence is synthesized)
cagcagagctgcccccggatcggaactacgtgctgggcgcccaccctcatgggatcatgtgtacaggcttcctctgtaatttctccaccgagagcaatggcttctcccagctcttcccgg

SEQ ID NO: 156403 - DNA, 120 bp, Artificial Sequence
  ENSG00000106384_5 (sequence is synthesized)
ggctccggccctggttagccgtgctggctggcctcttctacctcccggtctatcgcgactacatcatgtcctttggactctgtccggtgagccgccagagcctggacttcatcctgtccc

SEQ ID NO: 156404 - DNA, 120 bp, Artificial Sequence
  ENSG00000106384_6 (sequence is synthesized)
agccccagctcgggcaggccgtggtcatcatggtggggggtgcgcacgaggccctgtattcagtccccggggagcactgccttacgctccagaagcgcaaaggcttcgtgcgcctggcgc

SEQ ID NO: 156405 - DNA, 120 bp, Artificial Sequence
  ENSG00000106384_7 (sequence is synthesized)
tgaggcacggggcgtccctggtgcccgtgtactcctttggggagaatgacatctttagacttaaggcttttgccacaggctcctggcagcattggtgccagctcaccttcaagaagctca

SEQ ID NO: 156406 - DNA, 120 bp, Artificial Sequence
  ENSG00000106384_8 (sequence is synthesized)
cccgtcccccagcgcctccaccccaccgaggaggaagtcaatcactatcacgccctctacatgacggccctggagcagctcttcgaggagcacaaggaaagctgtggggtccccgcttcc

SEQ ID NO: 156407 - DNA, 120 bp, Artificial Sequence
  ENSG00000106384_9 (sequence is synthesized)
acctgcctcaccttcatctaggcctggccgcggcctttcgctgagcccctgagcccaaggcactgagacctccacccactgtggactccatgcctccaataaaaggtagttctgggccca

SEQ ID NO: 156408 - DNA, 85 bp, Artificial Sequence
  ENSG00000106384_10 (sequence is synthesized)
ccaaggtgggaggatcgtcagtgagacttcatttctacaaaaattaaaaaataatgttgttaattagccgggcatggtggcatgt

SEQ ID NO: 156409 - DNA, 71 bp, Artificial Sequence
  ENSG00000106384_11 (sequence is synthesized)
gcaacataaagctgtagtaggctgggcgtggtggctcatgcccataatcccaacactttgggaagccgagg

SEQ ID NO: 156410 - DNA, 120 bp, Artificial Sequence
  ENSG00000106384_12 (sequence is synthesized)
cgagattccatctcaaaaaaaaaaaaatgttgttaaagctataatcgttctggaagtgaacatggccaggcatgacctgcccccatcctgatgtgctacaaagctgctgccttagattgg

SEQ ID NO: 156411 - DNA, 120 bp, Artificial Sequence
  ENSG00000106384_13 (sequence is synthesized)
gtatcaggaccctgaactgtcctcccagtgagagttcagtctgtggcatgaccttggacaagcctcttccttttgcctgtttacttctttgtctgtaaataaaggcatctgcttagcaaa

SEQ ID NO: 156412 - DNA, 120 bp, Artificial Sequence
  ENSG00000106384_14 (sequence is synthesized)
tggggtcgcggtctcttctcagccacctcctggggcctgctgccctttgctgtgcccatcaccactgtgggtgagtgcccacctccggggggacggccaccagcagctgcgtgggcatca

SEQ ID NO: 156413 - DNA, 120 bp, Artificial Sequence
  ENSG00000106384_15 (sequence is synthesized)
agtggataaggaaccgggcaatttggagacaactaagggattattatcctgtcaaggtgatgggtcaccctgcagaaaaactgcttcctacctctccccatctccctcccacacctagga

SEQ ID NO: 156414 - DNA, 120 bp, Artificial Sequence
  ENSG00000106384_16 (sequence is synthesized)
gcccttccttgtgctggggcctgagctccccgctgcctaagctcaggcagtgggacagggaatggatttttttttttttttagactgagtctcctgtcaccgaggctggagtgcagtggt

SEQ ID NO: 156415 - DNA, 120 bp, Artificial Sequence
  ENSG00000106392_0 (sequence is synthesized)
tacagctttgattttataacatcctgctaatttttgttcttacagaaatacactttcgggaaatggcctctaaatcctggctgaattttttaaccttcctctgtggatcagcaataggat

SEQ ID NO: 156416 - DNA, 120 bp, Artificial Sequence
  ENSG00000106392_1 (sequence is synthesized)
ttcttttatgttctcagctatttagtattttgttgggagaaaaggttgacacccagcctaatgttcttcataatgatcctcatgcaaggcattcagatgataatggacagaatcatctag

SEQ ID NO: 156417 - DNA, 120 bp, Artificial Sequence
  ENSG00000106392_2 (sequence is synthesized)
aaggacaaatgaacttcaatgcagattctagccaacataaagatgagaacacagacattgctgaaaacctctatcagaaagttagaattctttgctgggttatgaccggccctcaaaacc

SEQ ID NO: 156418 - DNA, 120 bp, Artificial Sequence
  ENSG00000106392_3 (sequence is synthesized)
tagagaaaaaggccaaacacgtcaaagctacttgggcccagcgttgtaacaaagtgttgtttatgagttcagaagaaaataaagacttccctgctgtgggactgaaaaccaaagaaggca

SEQ ID NO: 156419 - DNA, 120 bp, Artificial Sequence
  ENSG00000106392_4 (sequence is synthesized)
gagatcaactatactggaaaacaattaaagcttttcagtatgttcatgaacattatttagaagatgctgattggtttttgaaagcagatgatgacacgtatgtcatactagacaatttga

SEQ ID NO: 156420 - DNA, 120 bp, Artificial Sequence
  ENSG00000106392_5 (sequence is synthesized)
ggtggcttctttcaaaatacgaccctgaagaacccatttactttgggagaagatttaagccttatgtaaagcagggctacatgagtggaggagcaggatatgtactaagcaaagaagcct

SEQ ID NO: 156421 - DNA, 120 bp, Artificial Sequence
  ENSG00000106392_6 (sequence is synthesized)
tgaaaagatttgttgatgcatttaaaacagacaagtgtacacatagttcctccattgaagacttagcactggggagatgcatggaaattatgaatgtagaagcaggagattccagagata

SEQ ID NO: 156422 - DNA, 120 bp, Artificial Sequence
  ENSG00000106392_7 (sequence is synthesized)
ccattggaaaagaaacttttcatccctttgtgccagaacaccatttaattaaaggttatctacctagaacgttttggtactggaattacaactattatcctcctgtagagggtcctggtt

SEQ ID NO: 156423 - DNA, 120 bp, Artificial Sequence
  ENSG00000106392_8 (sequence is synthesized)
gctgctctgatcttgcagtttcttttcactatgttgattctacaaccatgtatgagttagaatacctcgtttatcatcttcgtccatatggttatttatacagatatcaacctaccttac

SEQ ID NO: 156424 - DNA, 120 bp, Artificial Sequence
  ENSG00000106392_9 (sequence is synthesized)
ctgaacgtatactaaaggaaattagtcaagcaaacaaaaatgaagatacaaaagtgaagttaggaaatccttgaaagaaaatcatgaatgaacaaaggtaatatgtctagcactgcactg

SEQ ID NO: 156425 - DNA, 120 bp, Artificial Sequence
  ENSG00000106392_10 (sequence is synthesized)
aaaaaggacttctgcatttctgacatagaacactggaatcccagtgaggaattctaagtgaacattccttatagaaacctttcacatgaatgactataaactgaagctttaaatgagctg

SEQ ID NO: 156426 - DNA, 120 bp, Artificial Sequence
  ENSG00000106392_11 (sequence is synthesized)
tgaagtgtgttaaaatgtgttttgatacagtaatatataaatatgtctatatatatgaggaacttgtgttttttaaatggtggccaggtagaggaactagaaaagagattttgttgcctg

SEQ ID NO: 156427 - DNA, 120 bp, Artificial Sequence
  ENSG00000106392_12 (sequence is synthesized)
ttttctgaccatctgtgttattgtcactgagaaactaaaatagtaaatttactaaaactacactgcaccatgttagtaataaacagatctgccttaaagaaaagaaaattttagaaagaa

SEQ ID NO: 156428 - DNA, 120 bp, Artificial Sequence
  ENSG00000106392_13 (sequence is synthesized)
atattgttgctcagtgttgttaatatagctcaagaattgagtttatatttgcagtatgctataaatgatacccccctaccacacccacacacacagtttttgtctaatgaaaatgttgct

SEQ ID NO: 156429 - DNA, 120 bp, Artificial Sequence
  ENSG00000106392_14 (sequence is synthesized)
gtgattatttataattggtagtatttcttccagaagaagctaaaataagactggcacttaccctgaagtgcattaataaaaccacactttaaaattatcatgggccttgactatattata

SEQ ID NO: 156430 - DNA, 120 bp, Artificial Sequence
  ENSG00000106392_15 (sequence is synthesized)
tacttgattctaattagtcatcttttacgcaatctctgttgtctcttttctaaatgtgtttagccactcttgaataccattctccactattaacattaatttactcaaaccgttcatagc

SEQ ID NO: 156431 - DNA, 120 bp, Artificial Sequence
  ENSG00000106392_16 (sequence is synthesized)
attctgtaaacatgtattttacatatttgttcccaaatttgcccattgttcattatgggtaactaataataaatttaatgctgtttcaggatgcttttcttataacagtgccactctcag

SEQ ID NO: 156432 - DNA, 120 bp, Artificial Sequence
  ENSG00000106392_17 (sequence is synthesized)
gaattactaagtgacattttaaattgatattttaaactctttccaactacatagttatggtttatttcattctcatcctgttgggatgagaacttgtttgtgcctttcataacttgttta

SEQ ID NO: 156433 - DNA, 120 bp, Artificial Sequence
  ENSG00000106392_18 (sequence is synthesized)
aagcagagttttaaaattagtttataggatctgaggtggctattagttacagtggcaagattatttagaaagcaagattttgatgagaattaaaaacaatagaaaatgtagagtgcttaa

SEQ ID NO: 156434 - DNA, 120 bp, Artificial Sequence
  ENSG00000106392_19 (sequence is synthesized)
acaaaaatgttatattttgaaagagtagatacttaatttataaataacagtctgaaggttggtgctattttgggataattgttttgctaatggataattctaacaatgcagaatacctag

SEQ ID NO: 156435 - DNA, 120 bp, Artificial Sequence
  ENSG00000106392_20 (sequence is synthesized)
tcaagactgtcatcaaaaacattcacaaatgtttcattctatttttagtgactctgtttaaagagtttctgaaaggaaagaaattttttatttttattatctttagcagtactgagtgtc

SEQ ID NO: 156436 - DNA, 120 bp, Artificial Sequence
  ENSG00000106392_21 (sequence is synthesized)
atagcagaatattttacagactttctatgagattatttttatggtacaaagtatttacatttccctcatgtttatcattatgccaattttacatggcagtcatgccactgactctgctat

SEQ ID NO: 156437 - DNA, 120 bp, Artificial Sequence
  ENSG00000106392_22 (sequence is synthesized)
atggcagtcatgccactgactctgctatttagctaagtaatttcttttttcggagactgtctcactctgtctcccaggctggactgcagtggtgcgattctcctgcctcagcctcccgag

SEQ ID NO: 156438 - DNA, 120 bp, Artificial Sequence
  ENSG00000106392_23 (sequence is synthesized)
gagcgtgagtcacagcacccggctaagtaatttctatttattgtgccaaaacatgtcaaaatcatgacctctttgaatggtatatttgagaggatgttcatttcattggttaaccatgga

SEQ ID NO: 156439 - DNA, 120 bp, Artificial Sequence
  ENSG00000106392_24 (sequence is synthesized)
cattcattttattctttgaacaactcttcaccatggtgtggacatgaattttcatatgtgttacttgactagaagtataaatggtttactatagatatccaaaaaccttgagatttgctc

SEQ ID NO: 156440 - DNA, 120 bp, Artificial Sequence
  ENSG00000106392_25 (sequence is synthesized)
ataggaaatgaatattgtgatgaatcctgggctctagagtcagacttgcttgggtttaaattcttgctctaacacttactgtttttgtaaccttgagcaattttaatctctctgtgtctc

SEQ ID NO: 156441 - DNA, 120 bp, Artificial Sequence
  ENSG00000106392_26 (sequence is synthesized)
aatttcctcatcttttaattagggatgataatactacctacctcacaggatttttatgaggattaaataaatgtaaggtttttagaacattgatagggagcaataaatagaagattgtat

SEQ ID NO: 156442 - DNA, 120 bp, Artificial Sequence
  ENSG00000106392_27 (sequence is synthesized)
tattattctgttaccttggagtgtaagtactgcatttaagtgaatgaaaaatttgctttgaccagatactgaaggaaataagtaatagctagtatttatccaatgccaactgtatgctag

SEQ ID NO: 156443 - DNA, 120 bp, Artificial Sequence
  ENSG00000106392_28 (sequence is synthesized)
gtactgtgcttagataatctgtgtataatagtgttaatcctcaaaatttgggtgttatacccctattatagataaggaaactgaggctcagagacaaagtaactttgtcactgtcacaaa

SEQ ID NO: 156444 - DNA, 120 bp, Artificial Sequence
  ENSG00000106392_29 (sequence is synthesized)
gctagtaagtaacagaggtaggatttatattcaaaaccctgtgtgttcattggaaccgtatcaggcttggggctattcatgtagcattatttccatttttatgtatatgatatatgacgt

SEQ ID NO: 156445 - DNA, 120 bp, Artificial Sequence
  ENSG00000106392_30 (sequence is synthesized)
ctgatgcattggccagtaatagtcaaattaacccagccaaattgtcacagtgattcttaaactgtggttctcacacttgcccaggatgttgttaaatgcagatctgaagaccccaatctc

SEQ ID NO: 156446 - DNA, 120 bp, Artificial Sequence
  ENSG00000106392_31 (sequence is synthesized)
agaaattcaaatttaagcatggggcccaagagtatgcattcttaccagataccttgggcagtgactgtcaaaagtctggtcccaacaaacagcattaacgtcacctgggaacttgttgga

SEQ ID NO: 156447 - DNA, 120 bp, Artificial Sequence
  ENSG00000106392_32 (sequence is synthesized)
aatgcagcctctctcggggcctcatctcagatcagatctactaaatcagatactctaggggcaggggcaggggcaggggctagcagttgtgtttaagcaaactctgcaggtgtctttctt

SEQ ID NO: 156448 - DNA, 120 bp, Artificial Sequence
  ENSG00000106392_33 (sequence is synthesized)
atcctagtttgagaaccaatacccaacaacctacgtgattttggtgcaagtagtgtttgaaacacactgaagattactgcccaattactaagacatttttcaaaaagcatgttttaaatc

SEQ ID NO: 156449 - DNA, 120 bp, Artificial Sequence
  ENSG00000106392_34 (sequence is synthesized)
agtgtagtccaggatcacactatattaaatataaagataacttaaaggatcattggatcattcattttggccaaatttttagcttctccaaagtgactaacatcagggcctacaataaaa

SEQ ID NO: 156450 - DNA, 120 bp, Artificial Sequence
  ENSG00000106392_35 (sequence is synthesized)
tctgtaattctccaagtttagtaattttatattgaggcaggaagggctcattaagtactaataagtacataatttattaaaaacatacataagtgtcatcaaaaaggtccacaattgtta

SEQ ID NO: 156451 - DNA, 120 bp, Artificial Sequence
  ENSG00000106392_36 (sequence is synthesized)
gtaaaaaaaattaaattgaagtagtaaatgctgttttataacatacatttttctgctaattcattctgttttgtgtgacctaataaagcaaaagaaaaataaaaaagcaattctccaagt

SEQ ID NO: 156452 - DNA, 120 bp, Artificial Sequence
  ENSG00000106392_37 (sequence is synthesized)
acttcatagagcacataaaaccagatttcatgatgatgatgtattcactatcttttagattaagatctttgttatttggtaaatgatttcagtatggttttaaaacataaggcttttgat

SEQ ID NO: 156453 - DNA, 120 bp, Artificial Sequence
  ENSG00000106392_38 (sequence is synthesized)
gtcttatgttctctaataatggtatgcttgtattttctagtgggaagttcatagataaagcagatttttgtcccagtttgctttcaaatataaatttcagagggctttttcttactgtaa

SEQ ID NO: 156454 - DNA, 120 bp, Artificial Sequence
  ENSG00000106392_39 (sequence is synthesized)
tgaggtatgaaaataaatcattgatcagctcttaatattttttgaatacagaattggatttgagcagtaaatttgctaactggttattttcacaattttcttgaatattaatttttcact

SEQ ID NO: 156455 - DNA, 120 bp, Artificial Sequence
  ENSG00000106392_40 (sequence is synthesized)
tctttgagactgtcaaactatagttactaccaggttgatgcactgtacttgaaagaatcccttgattaaattacatctagcattttatttgccatttcaattttcagttcattagactat

SEQ ID NO: 156456 - DNA, 120 bp, Artificial Sequence
  ENSG00000106392_41 (sequence is synthesized)
aattctttgacagtttctgcctggtgtttattgcccttctttgtttgctttattactaacttccattttctagttactcttaaatgctgccttcacaaggttaatttggctgttaatagt

SEQ ID NO: 156457 - DNA, 120 bp, Artificial Sequence
  ENSG00000106392_42 (sequence is synthesized)
gattagaatttttatcacttaattgataattttaagcctactaactagggttccctatgaaattgaaagtaaaagtctaagaataatgcctgctggctctcgagatacttgccctactta

SEQ ID NO: 156458 - DNA, 120 bp, Artificial Sequence
  ENSG00000106392_43 (sequence is synthesized)
aaaatctataatttaaaattaattctatgtctacaattattaaaggaagtaaagttatttgggttcttccactcacccttttctcaaaaacaacaacaaaaaacaaaactcattttattt

SEQ ID NO: 156459 - DNA, 120 bp, Artificial Sequence
  ENSG00000106392_44 (sequence is synthesized)
ttctactttatagtaggcctgacagaaacatagtgaagcaatctgggaggcaacctgtggtagattttatgctaaatgttaatgtaacctctgttgattttttaaaaatgtgtttatata

SEQ ID NO: 156460 - DNA, 120 bp, Artificial Sequence
  ENSG00000106392_45 (sequence is synthesized)
taagatttgaaataaaaactttaatacaggctagaataaggaattttacaaattctctttagagcaaccaacattaaagttttagagttgaattttgctctatttcaactcccttacctc

SEQ ID NO: 156461 - DNA, 120 bp, Artificial Sequence
  ENSG00000106392_46 (sequence is synthesized)
tctagttttcagtttatattaagttttaataactttgcggggccctgcaaattaataatctacatgaagtatattattagagggaaactaatcttactgctaagcagtgtgttgtactac

SEQ ID NO: 156462 - DNA, 120 bp, Artificial Sequence
  ENSG00000106392_47 (sequence is synthesized)
atagtgaatgttcgtgttttggaatttaaaaattatttaaggtaatggtgttacgaatggtttaaaaatgtctggtgacttgcttatttttaagtgatcaccattaagtcagaaaaatgt

SEQ ID NO: 156463 - DNA, 120 bp, Artificial Sequence
  ENSG00000106392_48 (sequence is synthesized)
atttttaaatgtttcttgaagtgccttttgaacatttttaaacagcggatttaaataatgcataaaataaattgccatgttcaaagttgtttcatctgattatttttaaccaatataaaa

SEQ ID NO: 156464 - DNA, 120 bp, Artificial Sequence
  ENSG00000106392_49 (sequence is synthesized)
ggagcgcgcgctgggcccgccttggccgccgccgctgtgctgccgctgccggggaataatctgggcggcagcgggcggcctcggctagcggccacgagccacttctgcggctgcccagag

SEQ ID NO: 156465 - DNA, 120 bp, Artificial Sequence
  ENSG00000106392_50 (sequence is synthesized)
gcccagagaagcaaaggtcaccagtcccaagtcgtccccctctccgccccccaggaggggcgagagggagccgcagctgatgtcagaaatacactttcgggaaatggcctctaaatcctg

SEQ ID NO: 156466 - DNA, 120 bp, Artificial Sequence
  ENSG00000106392_51 (sequence is synthesized)
tattaaatagtgttgataacctgcacccttgtcttaaatggatactttgtgcatataagtatagaaacaggagcatgatgcagaaagaacaagctcttcaagaataatctgcttccagga

SEQ ID NO: 156467 - DNA, 120 bp, Artificial Sequence
  ENSG00000106392_52 (sequence is synthesized)
gcggagagtttaataggccagacagaagggagaaggcagaaggaagaagctcccccgtacagagacagagggagggaggctccaaagccaagagaagggatccccaagtgcggtggacac

SEQ ID NO: 156468 - DNA, 120 bp, Artificial Sequence
  ENSG00000106392_53 (sequence is synthesized)
tttatttagggaataagatattaattttgaattcgtttttaagtagaaatagttcagaacccatgatttggggaagggcataactattcagatttgatttgtttctgaaaatgtttttct

SEQ ID NO: 156469 - DNA, 120 bp, Artificial Sequence
  ENSG00000106392_54 (sequence is synthesized)
aggttcagttttgttatatgtgtgtctttggtttttgttacttgttttggtcatagcttttgcttaagtcttgttttcctagagaaacttgaggtgtatgtaagtttcgatttatatttt

SEQ ID NO: 156470 - DNA, 120 bp, Artificial Sequence
  ENSG00000106392_55 (sequence is synthesized)
tataattagttaatagaactaatcttttttttcctcaagaggcacaaagaacaaggaagttaaaaaccaaggatgcgttctaaagacttcattttctcctagcctcctacctctaaccag

SEQ ID NO: 156471 - DNA, 120 bp, Artificial Sequence
  ENSG00000106392_56 (sequence is synthesized)
attttctcagttgagttatttatgtgtcccttaagtgttggttctctccaagtttctgtcctttagctgtttgtctgtgtgacatcattaacccgcataattttaatttccttctatttc

SEQ ID NO: 156472 - DNA, 120 bp, Artificial Sequence
  ENSG00000106392_57 (sequence is synthesized)
ttactgtctttagcccagttccagacattgtgaggtgacattaacacaatgcaaaatacggtttgacagaaaataatataagtagcttgaaaacaattggaattctgggatgcagagggt

SEQ ID NO: 156473 - DNA, 120 bp, Artificial Sequence
  ENSG00000106392_58 (sequence is synthesized)
gtcaaaatattggatttactctcagagtttctatcctgctcaatttgaattttcttcacggaagtgttttcctcaggaaagatattttattggctatttctgagttatttgagtacataa

SEQ ID NO: 156474 - DNA, 120 bp, Artificial Sequence
  ENSG00000106392_59 (sequence is synthesized)
gccacccagtaccttctgatcttcccattttctcttagtgtgtggctgagatatttttattctactcagccataaattggagtcagaagccttctcctttttactgttattttcacaata

SEQ ID NO: 156475 - DNA, 120 bp, Artificial Sequence
  ENSG00000106392_60 (sequence is synthesized)
tttacttgctgagaatcccactcaagctgctaaaactaggcatgctctgtatgagttctactgctgttgtctgtggtttgggtggggcaaaacccactggcattctgaggctcatgggga

SEQ ID NO: 156476 - DNA, 120 bp, Artificial Sequence
  ENSG00000106397_0 (sequence is synthesized)
acatgtgtcaagcggctggctcagcccagagtccctgtctcccgcccgccggcccgagccgccgcccctcccccgcctcccgtgcgcccgggacaatcctcgccttgtctgtggcgccgg

SEQ ID NO: 156477 - DNA, 120 bp, Artificial Sequence
  ENSG00000106397_1 (sequence is synthesized)
catctggagctttctgtagcctccggatacgcctttttttcagggcgtagccccagccaagctgctccccgcggcggccgcacagcagcccgagcgccccctttccagagctcccctccg

SEQ ID NO: 156478 - DNA, 120 bp, Artificial Sequence
  ENSG00000106397_2 (sequence is synthesized)
gagctgggatccaggcgcgtagcggagatcccaggatcctgggtgctgtctgggcccgctccccaccatgacctcctcggggcctggaccccggttcctgctgctgctgccgctgctgct

SEQ ID NO: 156479 - DNA, 120 bp, Artificial Sequence
  ENSG00000106397_3 (sequence is synthesized)
gccccctgcggcctcagcctccgaccggccccggggccgagacccggtcaacccagagaagctgctggtgatcactgtggccacagctgaaaccgaggggtacctgcgtttcctgcgctc

SEQ ID NO: 156480 - DNA, 120 bp, Artificial Sequence
  ENSG00000106397_4 (sequence is synthesized)
tgcggagttcttcaactacactgtgcggaccctgggcctgggagaggagtggcgagggggtgatgtggctcgaacagttggtggaggacagaaggtccggtggttaaagaaggaaatgga

SEQ ID NO: 156481 - DNA, 120 bp, Artificial Sequence
  ENSG00000106397_5 (sequence is synthesized)
gaaatacgctgaccgggaggatatgatcatcatgtttgtggatagctacgacgtgattctggccggcagccccacagagctgctgaagaagttcgtccagagtggcagccgcctgctctt

SEQ ID NO: 156482 - DNA, 120 bp, Artificial Sequence
  ENSG00000106397_6 (sequence is synthesized)
ctctgcagagagcttctgctggcccgagtgggggctggcggagcagtaccctgaggtgggcacggggaagcgcttcctcaattctggtggattcatcggttttgccaccaccatccacca

SEQ ID NO: 156483 - DNA, 120 bp, Artificial Sequence
  ENSG00000106397_7 (sequence is synthesized)
aatcgtgcgccagtggaagtacaaggatgatgacgacgaccagctgttctacacacggctctacctggacccaggactgagggagaaactcagccttaatctggatcataagtctcggat

SEQ ID NO: 156484 - DNA, 120 bp, Artificial Sequence
  ENSG00000106397_8 (sequence is synthesized)
ctttcagaacctcaacggggctttagatgaagtggttttaaagtttgatcggaaccgtgtgcgtatccggaacgtggcctacgacacgctccccattgtggtccatggaaacggtcccac

SEQ ID NO: 156485 - DNA, 120 bp, Artificial Sequence
  ENSG00000106397_9 (sequence is synthesized)
taagctgcagctcaactacctgggaaactacgtccccaatggctggactcctgagggaggctgtggcttctgcaaccaggaccggaggacactcccgggggggcagcctcccccccgggt

SEQ ID NO: 156486 - DNA, 120 bp, Artificial Sequence
  ENSG00000106397_10 (sequence is synthesized)
gtttctggccgtgtttgtggaacagcctactccgtttctgccccgcttcctgcagcggctgctactcctggactatccccccgacagggtcacccttttcctgcacaacaacgaggtctt

SEQ ID NO: 156487 - DNA, 120 bp, Artificial Sequence
  ENSG00000106397_11 (sequence is synthesized)
ctcgtggggccggaggaggctctgagcccaggcgaggccagggacatggccatggacctgtgtcggcaggaccccgagtgtgagttctacttcagcctggacgccgacgctgtcctcacc

SEQ ID NO: 156488 - DNA, 120 bp, Artificial Sequence
  ENSG00000106397_12 (sequence is synthesized)
aacctgcagaccctgcgtatcctcattgaggagaacaggaaggtgatcgcccccatgctgtcccgccacggcaagctgtggtccaacttctggggcgccctgagccccgatgagtactac

SEQ ID NO: 156489 - DNA, 120 bp, Artificial Sequence
  ENSG00000106397_13 (sequence is synthesized)
gcccgctccgaggactacgtggagctggtgcagcggaagcgagtgggtgtgtggaatgtaccatacatctcccaggcctatgtgatccggggtgataccctgcggatggagctgccccag

SEQ ID NO: 156490 - DNA, 120 bp, Artificial Sequence
  ENSG00000106397_14 (sequence is synthesized)
agggatgtgttctcgggcagtgacacagacccggacatggccttctgtaagagctttcgagacaagggcatcttcctccatctgagcaatcagcatgaatttggccggctcctggccact

SEQ ID NO: 156491 - DNA, 120 bp, Artificial Sequence
  ENSG00000106397_15 (sequence is synthesized)
tccagatacgacacggagcacctgcaccccgacctctggcagatcttcgacaaccccgtcgactggaaggagcagtacatccacgagaactacagccgggccctggaaggggaaggaatc

SEQ ID NO: 156492 - DNA, 120 bp, Artificial Sequence
  ENSG00000106397_16 (sequence is synthesized)
gtggagcagccatgcccggacgtgtactggttcccactgctgtcagaacaaatgtgtgatgagctggtggcagagatggagcactacggccagtggtcaggcggccggcatgaggattca

SEQ ID NO: 156493 - DNA, 120 bp, Artificial Sequence
  ENSG00000106397_17 (sequence is synthesized)
aggctggctggaggctacgagaatgtgcccaccgtggacatccacatgaagcaggtggggtacgaggaccagtggctgcagctgctgcggacgtatgtgggccccatgaccgagagcctg

SEQ ID NO: 156494 - DNA, 120 bp, Artificial Sequence
  ENSG00000106397_18 (sequence is synthesized)
tttcccggttaccacaccaaggcgcgggcggtgatgaactttgtggttcgctaccggccagacgagcagccgtctctgcggccacaccacgactcatccaccttcaccctcaacgttgcc

SEQ ID NO: 156495 - DNA, 120 bp, Artificial Sequence
  ENSG00000106397_19 (sequence is synthesized)
ctcaaccacaagggcctggactatgagggaggtggctgccgcttcctgcgctacgactgtgtgatctcctccccgaggaagggctgggcactcctgcaccccggccgcctcacccactac

SEQ ID NO: 156496 - DNA, 120 bp, Artificial Sequence
  ENSG00000106397_20 (sequence is synthesized)
cacgaggggctgccaacgacctggggcacacgctacatcatggtgtcctttgtcgacccctgacactcaaccactctgccaaacctgccctgccattgtgcctttttagggggcctggcc

SEQ ID NO: 156497 - DNA, 120 bp, Artificial Sequence
  ENSG00000106397_21 (sequence is synthesized)
cccgtcctgggagttgggggatgggtctctctgtctccccacttcctgagttcatgttccgcgtgcctgaactgaatatgtcaccttgctcccaagacacggccctctcaggaagctccc

SEQ ID NO: 156498 - DNA, 120 bp, Artificial Sequence
  ENSG00000106397_22 (sequence is synthesized)
ggagtccccgcctctctcctccgcccacaggggttcgtgggcacagggcttctggggactccccgcgtgataaattattaatgttccgcagtctcactctgaataaaggacagtttgtaa

SEQ ID NO: 156499 - DNA, 120 bp, Artificial Sequence
  ENSG00000106397_23 (sequence is synthesized)
gtgtaaatcttgtgggagccacgaaatgggtcattttaaagatgtggtcacggtgttcttacaagaaatcttattttcctttggtccttgtgaagatgctgtgatcacaaaggcagcccc

SEQ ID NO: 156500 - DNA, 120 bp, Artificial Sequence
  ENSG00000106397_24 (sequence is synthesized)
aaaaataaaaaaaaaaaaaaacaaggagagagagaatatgaggaggggtagggatgctgaggctcctactggcctcccgctcagctcaccctccccttcctcgcccagctgcggtgtgat

SEQ ID NO: 156501 - DNA, 120 bp, Artificial Sequence
  ENSG00000106397_25 (sequence is synthesized)
ccccttcctcgcccagctgcggtgtgatcacgcaggtagtaggcagtggagctctctgggccagcagcctggtcagaacccaaaggttcctgcccacaacgagccacactccaggatagc

SEQ ID NO: 156502 - DNA, 69 bp, Artificial Sequence
  ENSG00000106397_26 (sequence is synthesized)
caaaaacaagaaacaaaaaagaagtgccacagcttggggtaggaactgaccgcattttgggaggtgggg

SEQ ID NO: 156503 - DNA, 120 bp, Artificial Sequence
  ENSG00000106397_27 (sequence is synthesized)
gacaagggacatgcaggggccttatgttcagggactgggataccctgagggaagaaggacttcccgggatgagctgggcagaatttggggggctgtcctcccagctgaccgcggtgtcgg

SEQ ID NO: 156504 - DNA, 120 bp, Artificial Sequence
  ENSG00000106397_28 (sequence is synthesized)
gccagggacatggccatgtgagcgggtgcttgcggggaggagagggtgggatgaggctgtagggtcaggggtgctgccacctgctgcctggcccttgcctcacctgtcacccatccagcc

SEQ ID NO: 156505 - DNA, 120 bp, Artificial Sequence
  ENSG00000106397_29 (sequence is synthesized)
ttgcagcccccatgctgtcactcctgcccttgccagctcacccagacagcagagagcctggggaaggaaggatagacactgcctccctcctcttctcctgggggcatgggccagttaccc

SEQ ID NO: 156506 - DNA, 120 bp, Artificial Sequence
  ENSG00000106397_30 (sequence is synthesized)
tgccctcatggccatcgcctcttgggggcccccgcctggattcaaagttttcacactgagttccccagagatctgagggttttctgttcagacaagatgaaggcagaggccgaacagaaa

SEQ ID NO: 156507 - DNA, 120 bp, Artificial Sequence
  ENSG00000106397_31 (sequence is synthesized)
ggactcttgcccccaaagccagcattgatcagacagcctcttctcctgtatattgggtatactggtgttatgcttgaaatcacatcttaaaagaagaatggggctgggctcagtggctca

SEQ ID NO: 156508 - DNA, 120 bp, Artificial Sequence
  ENSG00000106397_32 (sequence is synthesized)
caggtagacccaagccccctactctcaggggtttggagtggtcaccagtcagaggtgccatgaggctggctgcagtggctcacacttttgatgccaccactttgggaggctgaggtagga

SEQ ID NO: 156509 - DNA, 120 bp, Artificial Sequence
  ENSG00000106397_33 (sequence is synthesized)
ggactgcttgagcctgggagtttaagatcagcctgagcaacgtagcaagagcctatctctacaaaaaacttaaaatattagctgggcacggtggtgcgtgcctgtggtcccagctactac

SEQ ID NO: 156510 - DNA, 120 bp, Artificial Sequence
  ENSG00000106397_34 (sequence is synthesized)
atgcttgcagttccagccactccggaggctgaggtgggaggatggtttgatcccaggaaatcgaggctgcagtgagctatgactatgccactgcactccagcctaggcgaaagagcgaga

SEQ ID NO: 156511 - DNA, 120 bp, Artificial Sequence
  ENSG00000106397_35 (sequence is synthesized)
cttcctccatctgagcaatcagcatgaatttggccggctcctggccacttccagatacgacacggagcacctgcaccccgacctctggcagatcttcgacaaccccgtcgtgagtgggga

SEQ ID NO: 156512 - DNA, 120 bp, Artificial Sequence
  ENSG00000106397_36 (sequence is synthesized)
ccccacgcccagagcacacaggttccccgccttgtgctaaggaagacaccaaacgtgatggctgctgccagcgcaggacactgagtgggagggggcggtcccctgggggctgggagcgag

SEQ ID NO: 156513 - DNA, 120 bp, Artificial Sequence
  ENSG00000106397_37 (sequence is synthesized)
ggcagaggccttcccagaggaggaggtgcaggatctggtaaacaaacaatggaatcaggaaaatgggagcaaagaggggttcccaggggggaggcagaccctggggtcacaactgcattc

SEQ ID NO: 156514 - DNA, 65 bp, Artificial Sequence
  ENSG00000106397_38 (sequence is synthesized)
tcccaggggggaggcagaccctggggtcacaactgcattcattcatgtattcaagaaatatttac

SEQ ID NO: 156515 - DNA, 120 bp, Artificial Sequence
  ENSG00000106397_39 (sequence is synthesized)
ctccgggcagaagaggaggtgggctggactgtcaaagaaagtggctggcttccgtgggcaatccgaggttcctagtggccctctgcagaaagctgaactcccagttcccccaggcctccg

SEQ ID NO: 156516 - DNA, 120 bp, Artificial Sequence
  ENSG00000106399_0 (sequence is synthesized)
aagctactcagataagaggctccaagaggacatttttggatgtgaaaaacaatgagaaggaggacaacacacatttacaatcgtcttaattttgtactcagaaaaaggatgtgaagacaa

SEQ ID NO: 156517 - DNA, 120 bp, Artificial Sequence
  ENSG00000106399_1 (sequence is synthesized)
tgcacagggaatacaatagtttcagatctgtgtacagtttccttttgcttcatctcctgcaacaatgtaatgaagacaccatgatatcattaacatttcacacaaaaggaaaatgaggct

SEQ ID NO: 156518 - DNA, 120 bp, Artificial Sequence
  ENSG00000106399_2 (sequence is synthesized)
gaaatggtgtgggcaaggcccaggaatctggagcatccctaaccaagcaggagagcacctgggatagagaaagtgctcaagaatgttcacttactgattactacaatcaaaaaaagatac

SEQ ID NO: 156519 - DNA, 120 bp, Artificial Sequence
  ENSG00000106399_3 (sequence is synthesized)
gacactaatttaccacattcttcttacttattttatgagatactattcttccaaggtggagaaagtggagaaagtagagtgacgcagctaagggagtaaatcgaccctcagccaacaagt

SEQ ID NO: 156520 - DNA, 120 bp, Artificial Sequence
  ENSG00000106399_4 (sequence is synthesized)
ggcaaaagcctgaagaaagtgatcaagatcactgatgaccccgctgcccatctccaagggggcgggtatcacaaccccgacgccacaccacgtatcattccgcaaaactcccgcgcctcc

SEQ ID NO: 156521 - DNA, 120 bp, Artificial Sequence
  ENSG00000106399_5 (sequence is synthesized)
cacgcagaactggcaagagggaaggcgagacagcagtgaacagctggtacgcagcacccacagcaccgcggcagcagctagtgccgactcccgcctagctcttttgactctgttcgcggg

SEQ ID NO: 156522 - DNA, 120 bp, Artificial Sequence
  ENSG00000106399_6 (sequence is synthesized)
aagaatggggaaacagtaaggttgcggcgcctcccgcgagacgaggtacctgaggctggccccgcagtcccccgccgcaccagcaccggagcttcacaccccacttccggggtcaagtca

SEQ ID NO: 156523 - DNA, 120 bp, Artificial Sequence
  ENSG00000106399_7 (sequence is synthesized)
ccgccgggaatcctgtgatcgcagaaaggtagtctcaggttccgcccctatccaagtcccgcctccactgcctctcgccctgtatctgtcaacttccgggacgccgcgcgtcactaagca

SEQ ID NO: 156524 - DNA, 120 bp, Artificial Sequence
  ENSG00000106399_8 (sequence is synthesized)
agcgctagtcttcgctgattggtgccgagaaatctgccccatagacacccgcggggcgcacagtttcagtcgtccgtgggtttcccgccagccgcagtcttggaccataatcatggtgga

SEQ ID NO: 156525 - DNA, 120 bp, Artificial Sequence
  ENSG00000106399_9 (sequence is synthesized)
catgatggacttgcccaggtcgcgcatcaacgccggcatgctagctcaattcatcgacaagcctgtctgcttcgtagggaggctggaaaagattcatcccaccggaaaaatgtttattct

SEQ ID NO: 156526 - DNA, 120 bp, Artificial Sequence
  ENSG00000106399_10 (sequence is synthesized)
ttcagatggagaaggaaaaaatggaaccatcgagttgatggaaccccttgatgaagaaatctctggaattgtggaagtggttggaagagtaaccgccaaggccaccatcttgtgtacatc

SEQ ID NO: 156527 - DNA, 120 bp, Artificial Sequence
  ENSG00000106399_11 (sequence is synthesized)
ttatgtccagtttaaagaagatagccatccttttgatcttggactttacaatgaagctgtgaaaattatccatgacttccctcagttttatcctttagggattgtgcaacatgattgatc

SEQ ID NO: 156528 - DNA, 120 bp, Artificial Sequence
  ENSG00000106399_12 (sequence is synthesized)
ttgatggattttcatacgattgtaaatgagctatattaaagtctattaaaggaagcccttcttgtttgagggagagatttctgtgctttctcatatttaatttgctgtttttaagatatt

SEQ ID NO: 156529 - DNA, 120 bp, Artificial Sequence
  ENSG00000106399_13 (sequence is synthesized)
ccaacctagagtttttgatggaactgatatattgacagttctcaccgaagtccttttataaagaattgctactccaatatatggtcagattagatgcaagaataaagcagttgtccgagt

SEQ ID NO: 156530 - DNA, 120 bp, Artificial Sequence
  ENSG00000106399_14 (sequence is synthesized)
ctaagtttctattttattaataaaaactaaaatggtacgtactatcggtcatttcattttcattcttttaatcatgtattcaagcacaaacttgaaatttcatagccataaggtcaagat

SEQ ID NO: 156531 - DNA, 120 bp, Artificial Sequence
  ENSG00000106399_15 (sequence is synthesized)
ttagacctaccaaataaaaccttgggccagctgtgttaaggatttgctcaccttttcccaaactataccttgataattatttccttgataccctacttacaaaatgaagtagatgacatt

SEQ ID NO: 156532 - DNA, 120 bp, Artificial Sequence
  ENSG00000106399_16 (sequence is synthesized)
atatattatagttaattcttcatcttgatttggtttgttgccgatgtttctaatttttgcaatggatttaaaaaggatgagctggtaaaacgtccctggctgtaaaatttaattcttgta

SEQ ID NO: 156533 - DNA, 120 bp, Artificial Sequence
  ENSG00000106399_17 (sequence is synthesized)
ttttaaccaatgattttttgggcgtcatgatttttgaacatatcccataaatgttggataacaattctcattccttatgaaagaccataaaatcacataagaaaaatttacgttgctttt

SEQ ID NO: 156534 - DNA, 120 bp, Artificial Sequence
  ENSG00000106399_18 (sequence is synthesized)
gttttgagacagggtctcactctgttaccccgggtggaatgcagtggcaccatcatggcgcactgcagccttagcctcccaagatcaagttgctcccatgtcagcctccccagtagctgg

SEQ ID NO: 156535 - DNA, 86 bp, Artificial Sequence
  ENSG00000106399_19 (sequence is synthesized)
gcagtggcaccatcatggcgcactgcagccttagcctcccaagatcaagttgctcccatgttaaccatgcctggctaatttttgtt

SEQ ID NO: 156536 - DNA, 120 bp, Artificial Sequence
  ENSG00000106399_20 (sequence is synthesized)
atggcatctccctatgttcctcaggctggtcttgaactctcggtctcaagcaatcctcctgcctcgaccagcccctcaagagttttcgattttattttattttctatttttgttcatata

SEQ ID NO: 156537 - DNA, 120 bp, Artificial Sequence
  ENSG00000106399_21 (sequence is synthesized)
ccttcagatttcttagtttactcagacgtgacggacgcagacaaaactaatctgctggtttccttctcttctgaaattacttatttttgcaaacctcgtttcctcgttgtgatcgcttct

SEQ ID NO: 156538 - DNA, 120 bp, Artificial Sequence
  ENSG00000106399_22 (sequence is synthesized)
tttttacttatttatgtttgcattttatgtttaacatacttaaaactttttttggtattttgtgaagacaaatccatatgctgtttggttaatgtatacagaacacattgtgaaatacag

SEQ ID NO: 156539 - DNA, 120 bp, Artificial Sequence
  ENSG00000106399_23 (sequence is synthesized)
attatagaagattcctctcataggatattactgcttatagaaatgctggacgttttcaatagtgattttgtctttaacttgaattgtagctttggacttgaagctactgctaaaggtagc

SEQ ID NO: 156540 - DNA, 120 bp, Artificial Sequence
  ENSG00000106399_24 (sequence is synthesized)
ttaacaagttacattttaacttttacactggtaattcttaaaattactttgttacttgaagtgatagattagtaacctgtataacagttttccaaaataattgtcaactgaaaatgtgat

SEQ ID NO: 156541 - DNA, 120 bp, Artificial Sequence
  ENSG00000106400_0 (sequence is synthesized)
agcagtttcttccgacagttgtgttgtgccaatggtggagaagaaaacttcggttcgctcccaggaccccgggcagcggcgggtgctggaccgggctgcccggcagcgtcgcatcaaccg

SEQ ID NO: 156542 - DNA, 120 bp, Artificial Sequence
  ENSG00000106400_1 (sequence is synthesized)
gcagctggaggccctggagaatgacaacttccaggatgacccccacgcgggactccctcagctcggcaagagactgcctcagtttgatgacgatgcggacactggaaagaaaaagaagaa

SEQ ID NO: 156543 - DNA, 120 bp, Artificial Sequence
  ENSG00000106400_2 (sequence is synthesized)
aacccgaggtgatcattttaaacttcgcttccgaaaaaactttcaggccctgttggaggagcagaacttgagtgtggccgagggccctaactacctgacggcctgtgcgggacccccatc

SEQ ID NO: 156544 - DNA, 120 bp, Artificial Sequence
  ENSG00000106400_3 (sequence is synthesized)
agcgccccttctgtgctgtctgtggcttcccatccccctacacctgtgtcagctgcggtgcccggtactgcactgtgcgctgtctggggacccaccaggagaccaggtgtctgaagtgga

SEQ ID NO: 156545 - DNA, 120 bp, Artificial Sequence
  ENSG00000106400_4 (sequence is synthesized)
ctgtgtgagcctgggcattcccagagaggaagggccgctgtgcactgcccggccttcagaaagacagaatttcatcacccaatgcagggggagctcttcctggaccaagggaggagccgc

SEQ ID NO: 156546 - DNA, 120 bp, Artificial Sequence
  ENSG00000106400_5 (sequence is synthesized)
tcattcacccaacaaaactgtgtcttatctgccaggaaagaccagcctcactcctgggaactgtctggcaggtaggctgggccccccagtgctgttagaataaaaagcctcgtgccggaa

SEQ ID NO: 156547 - DNA, 120 bp, Artificial Sequence
  ENSG00000106400_6 (sequence is synthesized)
gcagtttcttccgacagttgtgttgtgccaatggtggagaagaaaacttcgggctggagtgcagtggcatagtcatagctcactgcagcctcgatttcctgggatcaaaccatcctccca

SEQ ID NO: 156548 - DNA, 120 bp, Artificial Sequence
  ENSG00000106400_7 (sequence is synthesized)
cctcagcctccggagtggctggaactgcaagcatgaggccccacgcctggttaatttttaatttgttatgtggtgacgggctctcgctatgttgcccagttcgctcccaggaccccgggc

SEQ ID NO: 156549 - DNA, 120 bp, Artificial Sequence
  ENSG00000106400_8 (sequence is synthesized)
caaagtgctgagataacaggcatgagccactgcgcctggcaaggtcatgctttttgatgctgggtagttctttgactcctgacctggccacttgttagctatgtgaactttggacacatt

SEQ ID NO: 156550 - DNA, 120 bp, Artificial Sequence
  ENSG00000106400_9 (sequence is synthesized)
tcttaatctctgaatgttggtaaattggggatgatgatactgtcccatacagctgttgtaagggttaaatggttcaagtgttgcaaagagctgagcacgtgcctggctcatagtaagtgt

SEQ ID NO: 156551 - DNA, 120 bp, Artificial Sequence
  ENSG00000106400_10 (sequence is synthesized)
ccaacaagtgatagctactggggctgctgctgttattattatgcttaacaggtggttaatgaataaagagatatattatgcaaaattatcagaatctggcaaacagctgataaggcaatg

SEQ ID NO: 156552 - DNA, 64 bp, Artificial Sequence
  ENSG00000106400_11 (sequence is synthesized)
caaaattatcagaatctggcaaacagctgataaggcaatgaggaaagaggttttttgttttttg

SEQ ID NO: 156553 - DNA, 120 bp, Artificial Sequence
  ENSG00000106400_12 (sequence is synthesized)
aagtgctgggattgcaggggtgagccactatgtccagccgaggaaagaggtttaaaataacttctaggtttctggtttggatgtctgcatagacggttccatttgcgtagagagaatctg

SEQ ID NO: 156554 - DNA, 120 bp, Artificial Sequence
  ENSG00000106400_13 (sequence is synthesized)
atagacggttccatttgcgtagagagaatctgcaggagaagcagacttggatgggaatttttttttttttttgagttgcagtgtccacagggccagtgggtgatttcttttttccttctt

SEQ ID NO: 156555 - DNA, 120 bp, Artificial Sequence
  ENSG00000106400_14 (sequence is synthesized)
tttttttttttttggagacagtcttgctttgtcactcaggctggagtggtggcgcgatcacggcttgctgcacactgcagcctcaacctcccgggcccatgtagtcctcccaccgcagcc

SEQ ID NO: 156556 - DNA, 120 bp, Artificial Sequence
  ENSG00000106400_15 (sequence is synthesized)
tcccaagtaactgggactacaggcatgtgcaaccacgcctggcttattttttaattttttgtagagatggggtttggctatgctgcccaggctggtttctaactcctggcatcaagcgat

SEQ ID NO: 156557 - DNA, 120 bp, Artificial Sequence
  ENSG00000106400_16 (sequence is synthesized)
ctcccaaagtgctgagattacaggcgtgcgccaccacacccggcctcaccaggcgctggctgcatggccagttctggagcccgggagcaggttctgtgttgagggagtcactctgggagt

SEQ ID NO: 156558 - DNA, 120 bp, Artificial Sequence
  ENSG00000106400_17 (sequence is synthesized)
cactctgggagtcatttgcttgtgggtgatcatcagagccctttgtttggagtcaaaatcccaggaagagtgcatagactgagcagagaagagggccagccacctccatagaggcaggga

SEQ ID NO: 156559 - DNA, 120 bp, Artificial Sequence
  ENSG00000106400_18 (sequence is synthesized)
gagcagccgagctggagccggaggattcctggacatggagaaggcctgcagttttgtcaaggaagcaagcaaagggtctctttctactcgatgaaggtagtcggcaccgccacagggtgg

SEQ ID NO: 156560 - DNA, 120 bp, Artificial Sequence
  ENSG00000106400_19 (sequence is synthesized)
gaggaggaggaaggcacactggagccgctctggggcccagagcgtgggtgggtggtcccccaggatgaccaggcaggtgtcagattttggggttcaaggagaggatgggaggtgaaaaag

SEQ ID NO: 156561 - DNA, 120 bp, Artificial Sequence
  ENSG00000106400_20 (sequence is synthesized)
tgacacatcacgtgagttgctgtgaaggagaaggagctgtgaagccgagtagacacatgagcgtcgccagctctttgatggaaagtgccggttgaggaggaggggttgaagatgggagag

SEQ ID NO: 156562 - DNA, 120 bp, Artificial Sequence
  ENSG00000106400_21 (sequence is synthesized)
ggagggaatgggctggaggtgaaggctcggggtcagtggtgggacttggggcgctccagggcaggggtgtgcccacttggcatcacgtttgtgggtaggtggcctggaagatgagcgtat

SEQ ID NO: 156563 - DNA, 120 bp, Artificial Sequence
  ENSG00000106400_22 (sequence is synthesized)
ccaagcatgggtggcccctggttcctttgaggtaggaggtgagatgctgagtgtgagggccatgtgtattgagggcccaggacagcctggaagccccagggcgctgtgacctccccagtc

SEQ ID NO: 156564 - DNA, 120 bp, Artificial Sequence
  ENSG00000106400_23 (sequence is synthesized)
agcagtgagctgtctccaggccggggctcactggctgggactgggattgagaggaaggcggagaaaacaggcaggagaaactgaaagggtctcagctggcgggacaggaagtgtgggccc

SEQ ID NO: 156565 - DNA, 120 bp, Artificial Sequence
  ENSG00000106400_24 (sequence is synthesized)
agggcttggcccgggaggagacaaggggaccaagggcttggcaatggggatgagatcagagagctgcagcttccaccccgggtgccttcctcgccctgcccagagcggcggccacactgc

SEQ ID NO: 156566 - DNA, 120 bp, Artificial Sequence
  ENSG00000106400_25 (sequence is synthesized)
acaggcgtgagctgccgcgcccggccccagctattcctcgtaaatcccttcctcagccctcgggtcctggcgttgacccttcattcacgttttattggtgcctgctccaagccgggcgct

SEQ ID NO: 156567 - DNA, 120 bp, Artificial Sequence
  ENSG00000106400_26 (sequence is synthesized)
tattggtgcctgctccaagccgggcgctggggatgaagaggagaaagacccctcttatccaagcattggctttttctggaaggggggcagaaacgcagacctaacactgtattttactgt

SEQ ID NO: 156568 - DNA, 120 bp, Artificial Sequence
  ENSG00000106400_27 (sequence is synthesized)
gatttgtgatttgtgctatggcagagggaagcacagcgcctgggaacagggagacgtggcatctagcccaggttctgggaggcaggggactgtgaaagcttgaaggaaaaatgaaaaagc

SEQ ID NO: 156569 - DNA, 120 bp, Artificial Sequence
  ENSG00000106400_28 (sequence is synthesized)
ttgaattgagtcttgaaagtctagttagggtttctctcagtgggaacctcacgtgcaaaggcagtgaagcaagaaaaagcaagtcgcttaggaagccaagttcacagtttggatcttaca

SEQ ID NO: 156570 - DNA, 120 bp, Artificial Sequence
  ENSG00000106400_29 (sequence is synthesized)
gagtaataagaaaggatcgaaggctggggaaaggttacattttgaaaggcattatacacactgcccaggagtttgaactctgtagggaaacactggagagccagcaaagacttttttttt

SEQ ID NO: 156571 - DNA, 120 bp, Artificial Sequence
  ENSG00000106400_30 (sequence is synthesized)
tctgtcacccaggctggaatgcagtggttctatataactcactgcagcctcaacctcccatgctcaagtgattcttccacctcagccacctgagtaggtggaactacaggtgggtgcagg

SEQ ID NO: 156572 - DNA, 120 bp, Artificial Sequence
  ENSG00000106400_31 (sequence is synthesized)
tgattcttccacctcagccacctgagtaggtggaactacaggtgggtgcaggccaccatgctgggctagtttttatattttttgttgagatgggtgtctcactatgttgcccaggctggt

SEQ ID NO: 156573 - DNA, 120 bp, Artificial Sequence
  ENSG00000106400_32 (sequence is synthesized)
tggtcttgaactcctgagctcatgtgatcctcctgcctcggccttccaaaatgctaggattacaagtatgagccactgcgcttggcccttttagtttttctttctttctttttttttctt

SEQ ID NO: 156574 - DNA, 120 bp, Artificial Sequence
  ENSG00000106400_33 (sequence is synthesized)
ggccctctcagtttttcaaaggcatcgcagtctcccagccatcagttttttcatgttggcctcaaggtctgaaataccccgctgtctcccctagccaggtcattcaccagttaggcctta

SEQ ID NO: 156575 - DNA, 120 bp, Artificial Sequence
  ENSG00000106400_34 (sequence is synthesized)
acctagacttaccttcttctgggaagtcttccctgactactccaaggccaggttgggtgtttctgtcctgggctctgcagcactttatacttccgtatcctagcctactccatgctgtac

SEQ ID NO: 156576 - DNA, 120 bp, Artificial Sequence
  ENSG00000106400_35 (sequence is synthesized)
ttactgtgtttgtttcattaatcatttgtgtttgccactggactgtaagctttggcatccctaaaacctagagcactgcctggcatttggaggggagacagagtagtacagtgatcataa

SEQ ID NO: 156577 - DNA, 60 bp, Artificial Sequence
  ENSG00000106400_36 (sequence is synthesized)
tggcatttggaggggagacagagtagtacagtgatcataatcatatttttttttgtttgg

SEQ ID NO: 156578 - DNA, 120 bp, Artificial Sequence
  ENSG00000106404_0 (sequence is synthesized)
ggctccagggtaagtctgccccccccaccctcgtggggcggggagcccggggcagcccagaggctggggggagggggtggacttttggcccgtttcggttattccctccatctcgtcaac

SEQ ID NO: 156579 - DNA, 120 bp, Artificial Sequence
  ENSG00000106404_1 (sequence is synthesized)
agctgccgcgcgcaggcttagctcattcctctgacctgccaggaagcagagagacccacagagcaggagggaggcagaaagtggagacggacctgagcccgaggaagaggcaggcagagg

SEQ ID NO: 156580 - DNA, 120 bp, Artificial Sequence
  ENSG00000106404_2 (sequence is synthesized)
ctgaggctgattccaccccagcctgcctggacaaccctccttagccgcagccccttccagttccctaggggttctgcccctccccctctctggggcaccagccccccagggtcctgcatc

SEQ ID NO: 156581 - DNA, 120 bp, Artificial Sequence
  ENSG00000106404_3 (sequence is synthesized)
ccaccatgtcgatggctgtggaaacctttggcttcttcatggcaactgtggggctgctgatgctgggggtgactctgccaaacagctactggcgagtgtccactgtgcacgggaacgtca

SEQ ID NO: 156582 - DNA, 120 bp, Artificial Sequence
  ENSG00000106404_4 (sequence is synthesized)
tcaccaccaacaccatcttcgagaacctctggtttagctgtgccaccgactccctgggcgtctacaactgctgggagttcccgtccatgctggccctctctgggtatattcaggcctgcc

SEQ ID NO: 156583 - DNA, 120 bp, Artificial Sequence
  ENSG00000106404_5 (sequence is synthesized)
ggcatagcgggcctgcgctgcaccaacattgggggcctggagctctccaggaaagccaagctggcggccaccgcaggggccctccacattctggccggtatctgcgggatggtggccatc

SEQ ID NO: 156584 - DNA, 120 bp, Artificial Sequence
  ENSG00000106404_6 (sequence is synthesized)
tcctggtacgccttcaacatcacccgggacttcttcgaccccttgtaccccggaaccaagtacgagctgggccccgccctctacctggggtggagcgcctcactgatctccatcctgggt

SEQ ID NO: 156585 - DNA, 120 bp, Artificial Sequence
  ENSG00000106404_7 (sequence is synthesized)
ggcctctgcctctgctccgcctgctgctgcggctctgacgaggacccagccgccagcgcccggcggccctaccaggctccagtgtccgtgatgcccgtcgccacctcggaccaagaaggc

SEQ ID NO: 156586 - DNA, 120 bp, Artificial Sequence
  ENSG00000106404_8 (sequence is synthesized)
gacagcagctttggcaaatacggcagaaacgcctacgtgtagcagctctggcccgtgggccccgctgtcttcccactgccccaaggagaggggacctggccggggcccattcccctatag

SEQ ID NO: 156587 - DNA, 120 bp, Artificial Sequence
  ENSG00000106404_9 (sequence is synthesized)
taacctcaggggccggccacgccccgctcccgtagccccgccccggccacggccccgtgtcttgcactctcatggcccctccaggccaagaactgctcttgggaagtcgcatatctcccc

SEQ ID NO: 156588 - DNA, 120 bp, Artificial Sequence
  ENSG00000106404_10 (sequence is synthesized)
tctgaggctggatccctcatcttctgaccctgggttctgggctgtgaaggggacggtgtccccgcacgtttgtattgtgtataaatacattcattaataaatgcatattgtgaccgttca

SEQ ID NO: 156589 - DNA, 120 bp, Artificial Sequence
  ENSG00000106404_11 (sequence is synthesized)
ctgcactggctcgggatggggaccagaggctgctaatccatcatcattaacgaatagagtgggtgacagtccctgataactgggaacaggttgcagagcttagccacaggatcacgctcc

SEQ ID NO: 156590 - DNA, 120 bp, Artificial Sequence
  ENSG00000106404_12 (sequence is synthesized)
aggctgttggccagcaggaccaggctcgatgctgagtcaaagatcaacttaggaggaaatttgagttttgggtgagagcgactccctggtggcctcagccctgtgacactcacatccagg

SEQ ID NO: 156591 - DNA, 120 bp, Artificial Sequence
  ENSG00000106404_13 (sequence is synthesized)
agccctgtgacactcacatccaggacagttcccggtgccaagcgctggttatgtgtggggggcttgactccctggtcccaacgaggtctcagtgtgttgcccaggctggtcttgaactcc

SEQ ID NO: 156592 - DNA, 120 bp, Artificial Sequence
  ENSG00000106404_14 (sequence is synthesized)
cagcctcccaaagtggtaggattacaggcgagagccactgcgcccggcccctggtcccagttctcaccacagcccctgcagtaagcagtcgggtatgtcactgacagagcagaagctcag

SEQ ID NO: 156593 - DNA, 120 bp, Artificial Sequence
  ENSG00000106404_15 (sequence is synthesized)
gggactaaaactccccgcctgagttccctggtgaatggatggtggggccgagttccattccaggctggatggagcccagagctgtgggtctcctaccctcccatcccctcattccagctt

SEQ ID NO: 156594 - DNA, 120 bp, Artificial Sequence
  ENSG00000106404_16 (sequence is synthesized)
gatcttccttaagagactcatacgccccaaccccttggtctgagtatcttagattgttctcgtggttcctccgtccttcaccactgaaggctgctgttcattctctctccgtctctgtcc

SEQ ID NO: 156595 - DNA, 120 bp, Artificial Sequence
  ENSG00000106404_17 (sequence is synthesized)
cttattgctctcacgtctgtctctgtcatcttttcactccttgtccctcttactccgttctttggcccccaatgaaagctgagtcagagacagacgcttcccctcagttcccagtgcctc

SEQ ID NO: 156596 - DNA, 120 bp, Artificial Sequence
  ENSG00000106404_18 (sequence is synthesized)
tccccctcaaccgcagacttcaggctgctttgtcctcatctaatctcctctccaattcccactcctcatgctcacctcccctaccctgctgcatggacacctgctcacccctgcctcatc

SEQ ID NO: 156597 - DNA, 120 bp, Artificial Sequence
  ENSG00000106404_19 (sequence is synthesized)
tgtactccccagatctcctggctgcaaatcagcccatcggcagtgtttcttgagctcccagtaggggctggccacggccaggtgtgggagggacttcgaagataagagtgagcggctgcc

SEQ ID NO: 156598 - DNA, 120 bp, Artificial Sequence
  ENSG00000106404_20 (sequence is synthesized)
cggctgcctccgggagcttacatcctagctggggagcagagttagggtgcacgctatggcgcacacacacagtgcacgtccacagtgccataccacggggcatggtggctcatgcctgta

SEQ ID NO: 156599 - DNA, 120 bp, Artificial Sequence
  ENSG00000106404_21 (sequence is synthesized)
cctcactgtcggggggcactggtctccttgtccggctgatgtctataaagggcccctgtgaagggaggcgtcttgcaagttgcaggttgagcgtccgctgtaaggaggcggtgtgtgtgc

SEQ ID NO: 156600 - DNA, 120 bp, Artificial Sequence
  ENSG00000106410_0 (sequence is synthesized)
atggctctccttttgacactaacatcaccagacctggagggtacctgggacaccagagacaaggatggcttcaaagcccaggaggggccgcccctggctgtacctgaatttcctgtgtgt

SEQ ID NO: 156601 - DNA, 120 bp, Artificial Sequence
  ENSG00000106410_1 (sequence is synthesized)
ggactgtaccggatctacggagtctgtggctctttcagctccttcttcatcatccggtgcagcctttgtgctctggagaccctcaaatcaccccaacatgatcccttagagatacctgaa

SEQ ID NO: 156602 - DNA, 120 bp, Artificial Sequence
  ENSG00000106410_2 (sequence is synthesized)
cagtccctcaaactcatacccctggtgtctgggaaaagggaactcacaaggggccagaaagctggagagaagcccctggctgcaggacccggggaggaggaactgctccggggctcagcc

SEQ ID NO: 156603 - DNA, 120 bp, Artificial Sequence
  ENSG00000106410_3 (sequence is synthesized)
cctcatgctcaggacactcagagtgaggaactgccaccctcctgcaccatctcaggagagaagaagccgccagcagtctctggagaagccaccggggctgatgctgggagactgtgcccg

SEQ ID NO: 156604 - DNA, 120 bp, Artificial Sequence
  ENSG00000106410_4 (sequence is synthesized)
cccccccgctccagggctccccacaaagacagaactctagcccgctccaggccccagactcagggggaagattgttccctcccagtgggagaggtgaagataggaaagaggtcctattct

SEQ ID NO: 156605 - DNA, 120 bp, Artificial Sequence
  ENSG00000106410_5 (sequence is synthesized)
ccagcccccgggaagcagaaaaagcctaatgccatgggtctggccccaacatcatctccgggtgcccctaactcagcccgtgccacacacaacccagtgccctgtgggtcaggccggggg

SEQ ID NO: 156606 - DNA, 120 bp, Artificial Sequence
  ENSG00000106410_6 (sequence is synthesized)
ccctgccacctggccaatctcctcagtacattggcgcagagcaaccaaaacagagaccacaagcaggggcccccggaagtgacctgccaaattaggaaaaagacacgaaccctataccgc

SEQ ID NO: 156607 - DNA, 120 bp, Artificial Sequence
  ENSG00000106410_7 (sequence is synthesized)
tcagatcagctggaggagctagagaagatattccaagaagaccactatcctgacagtgataaacgccgagagattgcccagacggtgggggtgaccccccagcgcatcatggtgtggttc

SEQ ID NO: 156608 - DNA, 120 bp, Artificial Sequence
  ENSG00000106410_8 (sequence is synthesized)
aatcctgcagcccctggccctgccagcagtcaatgcagctctgcagctgagatcctacctgctgtgcccatggagccaaagcctgaccctttccctcaggagtcccctctggataccttt

SEQ ID NO: 156609 - DNA, 120 bp, Artificial Sequence
  ENSG00000106410_9 (sequence is synthesized)
ccagagccccccatgctgctgacttctgaccagactttggcccccacccaacccagtgagggtgctcagagggtggtgacccccccactcttcagccccccacctgtgcgaagggccgat

SEQ ID NO: 156610 - DNA, 120 bp, Artificial Sequence
  ENSG00000106410_10 (sequence is synthesized)
cttcctttcccccttggccctgtccacaccccccaactgatgccactgctgatggatgttgctggcagtgacagcagccacaaggacggcccctgtgggtcctgggggacaagcatcacc

SEQ ID NO: 156611 - DNA, 120 bp, Artificial Sequence
  ENSG00000106410_11 (sequence is synthesized)
ctgccacccccctgttcatatttggaggagctggagccccaggattaccaacagagcaaccagccaggacccttccagttctcccaggctccacagcccccgcttttccagtcccctcag

SEQ ID NO: 156612 - DNA, 120 bp, Artificial Sequence
  ENSG00000106410_12 (sequence is synthesized)
cccaagttgccctacctccccactttccccttctccatgcccagttcactgacgcttccaccgcccgaagactctctctttatgtttccctgtggccccagcgggggcacatcgcagggc

SEQ ID NO: 156613 - DNA, 120 bp, Artificial Sequence
  ENSG00000106410_13 (sequence is synthesized)
tattgcccaggtgcctcctcaggacagatcctgatgcaaccacctgctgggaatataggtacagcctcctggagtgacccctgtttgccagagctgcccttccctggtccgttctgccca

SEQ ID NO: 156614 - DNA, 120 bp, Artificial Sequence
  ENSG00000106410_14 (sequence is synthesized)
caagctctggggcatcccccaggaggggatggctactttcctgatctatttccaactccctgcccccaggctctgggcaggcagccttcgtcagctctctcatggatgcctgaaggggcc

SEQ ID NO: 156615 - DNA, 120 bp, Artificial Sequence
  ENSG00000106410_15 (sequence is synthesized)
agaccagggactgggcccttactcagcaaggcaaaagaggaaccaccagctgcttccctggatcagccctcagcactggaggaggccagaggggatgacaagaatagccatgtcccctag

SEQ ID NO: 156616 - DNA, 120 bp, Artificial Sequence
  ENSG00000106410_16 (sequence is synthesized)
cccaccattgaaacactcgaattgcagagtgagcgctcagcggtagcctgggtgtggttccagaatcgccgggccaagtggcgaaaaatggagaaactgaatgggaaagaaagcaaggac

SEQ ID NO: 156617 - DNA, 120 bp, Artificial Sequence
  ENSG00000106415_0 (sequence is synthesized)
agttgccattcggagtgaggagtgggtagaagcggcggcggcggcggcggcgtttgcggtggcgcggactccgaggagcgccagcacctcgaggccctttctctctaccctggtccccag

SEQ ID NO: 156618 - DNA, 120 bp, Artificial Sequence
  ENSG00000106415_1 (sequence is synthesized)
aagcaggggtcccggccctccttgcagctgccgggttctcccgtgcgtgcagccctgcgagggctgaggagaaggctgcgagcggccctcggggctgcgtgatccgggccgttgccctgt

SEQ ID NO: 156619 - DNA, 120 bp, Artificial Sequence
  ENSG00000106415_2 (sequence is synthesized)
cagcacgatgcctggagcggtggcggcggcggctccgggctccttgcggccccggccgtgaccgccacaccgagcccagccgggcggttgcggccgttggacgtttgttttcgcagcctt

SEQ ID NO: 156620 - DNA, 120 bp, Artificial Sequence
  ENSG00000106415_3 (sequence is synthesized)
cccctcccccctcgccgaggcggcgggggtgtgcgttggggagggggagccccgagactcctcccccacagcgatacccccgcccctcccccttacacactcgcacgcactatcgcgccg

SEQ ID NO: 156621 - DNA, 120 bp, Artificial Sequence
  ENSG00000106415_4 (sequence is synthesized)
gctcccacacgctcgcgcgcctcccgccccgcgcctccgtgtcggccggcggcgtccagggcccgcagagccaccatgtccactgcctcctcctcctcctcctccagttcctctcagacc

SEQ ID NO: 156622 - DNA, 120 bp, Artificial Sequence
  ENSG00000106415_5 (sequence is synthesized)
ctcctcctcctccagttcctctcagacccctcatcccccgtcgcagaggatgaggcgcagcgccgcggggtccccgcccgccgtcgccgccgccgggagcgggaacggtgcgggcggcgg

SEQ ID NO: 156623 - DNA, 120 bp, Artificial Sequence
  ENSG00000106415_6 (sequence is synthesized)
ggagccggccggctgctgcagcccatccgcgccacggtgccctaccagctcttgcggggcagccagcacagtcccacgcgtccgcccgtcgccgctgccgccgcctcgctgggcagcctc

SEQ ID NO: 156624 - DNA, 80 bp, Artificial Sequence
  ENSG00000106415_7 (sequence is synthesized)
cggccgcagccccggccgagcaggcgccgcgggccaagggccgcccgagacggtccccagagagccaccggaggagcagc

SEQ ID NO: 156625 - DNA, 120 bp, Artificial Sequence
  ENSG00000106415_8 (sequence is synthesized)
cggaggagcagctcacctgagagacggagccccggctcgcccgtgtgcagagcggacaaggcaaaatctcagcaagttcggacctctagtacaataaggcgaacctcctctttggataca

SEQ ID NO: 156626 - DNA, 120 bp, Artificial Sequence
  ENSG00000106415_9 (sequence is synthesized)
ataacaggaccttacctcacaggacagtggccacgggatcctcatgttcactacccttcatgcatgaaagacaaagctactcagacacctagctgttgggcagaagagggtgcagaaaag

SEQ ID NO: 156627 - DNA, 120 bp, Artificial Sequence
  ENSG00000106415_10 (sequence is synthesized)
aggtcacatcagcgttctgcgtcatgggggagtgctgatcaactaaaagagcagatcgccaaactgaggcagcaactacaacgcagtaaacagagtagtcgtcacagtaaggagaaagat

SEQ ID NO: 156628 - DNA, 120 bp, Artificial Sequence
  ENSG00000106415_11 (sequence is synthesized)
cgccagtcacctcttcatggcaaccatataacaatcagtcacactcaggctactggatcaaggtcagttcctatgccactgtcaaatatatcagtgccaaaatcatctgtttcgcgtgtg

SEQ ID NO: 156629 - DNA, 120 bp, Artificial Sequence
  ENSG00000106415_12 (sequence is synthesized)
ccctgcaatgtagaaggaataagtcctgaattagaaaaggtattcattaaagaaaataatgggaaggaagaagtatccaagccgttggacataccagatggtcgaagagctccacttcct

SEQ ID NO: 156630 - DNA, 120 bp, Artificial Sequence
  ENSG00000106415_13 (sequence is synthesized)
gctcattaccggagcagtagtactcgcagcattgacactcagactccttctgtccaggagcgcagcagtagctgcagcagtcattcaccctgtgtctcccctttttgtcccccggaatcc

SEQ ID NO: 156631 - DNA, 120 bp, Artificial Sequence
  ENSG00000106415_14 (sequence is synthesized)
caggatggtagcccttgctcaacagaagatttgctctatgatcgtgataaagacagtgggagtagctcaccgttacccaagtatgcttcatctcccaaaccaaacaacagctacatgttc

SEQ ID NO: 156632 - DNA, 120 bp, Artificial Sequence
  ENSG00000106415_15 (sequence is synthesized)
aaacgggagcccccagagggatgtgagcgagtgaaggtctttgaggaaatggcgtctcgtcagcctatctcggcccctctcttttcatgtcctgacaaaaacaaggttaatttcatccca

SEQ ID NO: 156633 - DNA, 120 bp, Artificial Sequence
  ENSG00000106415_16 (sequence is synthesized)
accggatcagctttctgtcctgtaaaacttctaggccccctcttacctgcttctgaccttatgctcaagaactcccctaactctggccagagctcagctttggcaactctgaccgttgag

SEQ ID NO: 156634 - DNA, 120 bp, Artificial Sequence
  ENSG00000106415_17 (sequence is synthesized)
cagctctcatcccgggtttcctttacgtctctttctgatgacaccagcacagcgggctccatggaggcctctgtccagcagccatcccagcagcagcagctcctgcaggaactgcagggt

SEQ ID NO: 156635 - DNA, 120 bp, Artificial Sequence
  ENSG00000106415_18 (sequence is synthesized)
gaggaccacatctctgctcagaactatgtgatcatctaaaaaagggggagctggcctccaccctatgttccatggattcggaacaagatttcagacatctgcatgagtgacaaactttct

SEQ ID NO: 156636 - DNA, 120 bp, Artificial Sequence
  ENSG00000106415_19 (sequence is synthesized)
tggcagggacggaactcctattcagcagtttttgtggaaagcagtaatgcttgcaaaacgtgtgtgtcattcagcattttaagtggagactatgcatttcatagtatatttgacagatta

SEQ ID NO: 156637 - DNA, 120 bp, Artificial Sequence
  ENSG00000106415_20 (sequence is synthesized)
gtactgtgtcctgtgttttgttccagattcttcagtataaataagctctatatcaaaaagttgcctgtctaaatagaaaatgtcttgctgtgttttgtcctatggaaaatactgtaattc

SEQ ID NO: 156638 - DNA, 120 bp, Artificial Sequence
  ENSG00000106415_21 (sequence is synthesized)
aggattatgtttacaattgatccaggtgtttgtttctaacttctgtaatacatacaatgcaaaaaaaaaaaaaaaaaaatggccacaacagttgcacagtgcccaccctatggcctagct

SEQ ID NO: 156639 - DNA, 120 bp, Artificial Sequence
  ENSG00000106415_22 (sequence is synthesized)
tcaggtacttcagttgaagtctaaactcaggtaacttggaatgtatatcatattgggatattaaatatttcacagctaaaaagctaaagagggaacatcactcttttgcctttccttatt

SEQ ID NO: 156640 - DNA, 120 bp, Artificial Sequence
  ENSG00000106415_23 (sequence is synthesized)
ttatgcatttccctttcctcattacattccacattcttagaataagaagtgcattcaatcctaggagaatgataatcctggacatgggtgaacatgaggagaaccagcaaaatctgtggt

SEQ ID NO: 156641 - DNA, 120 bp, Artificial Sequence
  ENSG00000106415_24 (sequence is synthesized)
gtttgacatcactttgtcatgtggttacaagtaaaacaactgttgcattcactgtttcaacatgtgtacatgtggcttttttaaaagttcaggtgttgctcagtaaaggactgtgacaat

SEQ ID NO: 156642 - DNA, 120 bp, Artificial Sequence
  ENSG00000106415_25 (sequence is synthesized)
gttgcaaataaagtgttcagtactggactgtacataaacattccacattgtgtgtgatgaaatttaaagacaagaatgtctagagttaatttcaaaataagtgaagtgtttgacggaatg

SEQ ID NO: 156643 - DNA, 120 bp, Artificial Sequence
  ENSG00000106415_26 (sequence is synthesized)
gttgagatttttttgtttatgttagccatcagggtcataactgttaccattttatctaaagacatatttatatttagtttctcccttggaaattctttattttgcaggtgaaaaagtgac

SEQ ID NO: 156644 - DNA, 120 bp, Artificial Sequence
  ENSG00000106415_27 (sequence is synthesized)
atactttttgttattgtcttcctcaagcagtttaggtgcatgatcttcatttacatagaatacttgggtctcagaattgatgcaacataagcaggtttttttggtgacttacaagagcaa

SEQ ID NO: 156645 - DNA, 120 bp, Artificial Sequence
  ENSG00000106415_28 (sequence is synthesized)
tagtttgaagctatctcatttaagcctctcataatgcataatcatgagtagttttgaaatttgcaacctgtgaggtagagcataaactcaagaaaatagccttgaacttgcagacttttg

SEQ ID NO: 156646 - DNA, 120 bp, Artificial Sequence
  ENSG00000106415_29 (sequence is synthesized)
acacaagttctccacaaagtgtgaagagagccccaggcattcctgattggtcaatgggagagcctaactttcattgttttcttcagtacaaagagtatccaaaagctaagtttttgtatt

SEQ ID NO: 156647 - DNA, 120 bp, Artificial Sequence
  ENSG00000106415_30 (sequence is synthesized)
ccactactttcagttcaataaaacctagagttgtttcatctgcgcctaaagtgtatggcacaattttcttaagaattaggggaaccaggtgcctacagttaaaggaacgtttcagttcct

SEQ ID NO: 156648 - DNA, 120 bp, Artificial Sequence
  ENSG00000106415_31 (sequence is synthesized)
ttcattcattcctgggtttttcttttattttctaagaaggttgaagaaggatgagtgatagagaagaaagcaacaccattgatttttttttttaagaaatgatatatatatgtatatgtt

SEQ ID NO: 156649 - DNA, 120 bp, Artificial Sequence
  ENSG00000106415_32 (sequence is synthesized)
tgtgtgtgtgtgtgtgtgtgtgtattctgtgcattattttgtcatgatctcaattctcttctttccaccaaagtttgtcgtaatattttctcctgaaggtgcattctggctcctttaaat

SEQ ID NO: 156650 - DNA, 120 bp, Artificial Sequence
  ENSG00000106415_33 (sequence is synthesized)
ctttaaattagtcagtgttatattgtaggagactgtcatggaaaaaaggactcagtttactttcgtcattttcacaggggaaccttttaaaacaatcttttcagcagcagatacctttaa

SEQ ID NO: 156651 - DNA, 120 bp, Artificial Sequence
  ENSG00000106415_34 (sequence is synthesized)
ccctaataatctcaggccttgatgaaaatactatattttgtagattatggttaaagggggaaaattactagttccgtaagataaatatgagctccatttgacttctgatgtctggtttag

SEQ ID NO: 156652 - DNA, 120 bp, Artificial Sequence
  ENSG00000106415_35 (sequence is synthesized)
cattacataatatgttgatcttacactctgcttttgtccaaataaaatgcaatagtatcaatatcaatttcagaaaaatggactgaatatgcttttttggtgatgaaatctcatgtacga

SEQ ID NO: 156653 - DNA, 120 bp, Artificial Sequence
  ENSG00000106415_36 (sequence is synthesized)
tatttatagtgatgtgcttttattttctcatgagatactaaatattaattgtgttgtacatttgttcttagcatatattaaagttttgaaccaaatgtgttaaagcttacgctttgccat

SEQ ID NO: 156654 - DNA, 120 bp, Artificial Sequence
  ENSG00000106415_37 (sequence is synthesized)
gtaaatttcccagaagttgttgagctcaaatgtatcctacatccagctgtagaaatttgtcagaaattgtttaaattttgtatataattgtactgtttaattctagccattgcgctgaac

SEQ ID NO: 156655 - DNA, 120 bp, Artificial Sequence
  ENSG00000106415_38 (sequence is synthesized)
agtatttgagttaccatataatatggctttacacaaggaaatgtgtggcttttgttttgtattttttcagtatagaagttcctgtgtcttatttaaataaagttattagtaaaactgaaa

SEQ ID NO: 156656 - DNA, 120 bp, Artificial Sequence
  ENSG00000106415_39 (sequence is synthesized)
aatcagtcacactcaggctactggatcaagccgttggacataccagatggtcgaagagctccacttcctgctcattaccggagcagtagtactcgcagcattgacactcagactccttct

SEQ ID NO: 156657 - DNA, 120 bp, Artificial Sequence
  ENSG00000106415_40 (sequence is synthesized)
tgtaatataatcaaatttccccaaatttgaaatacatccaaccaaggaagaaaggaaaaatccattgttttaaataaactttgcagtaattgttttttgtcatctggcttttagaagttt

SEQ ID NO: 156658 - DNA, 120 bp, Artificial Sequence
  ENSG00000106415_41 (sequence is synthesized)
ctctgttgtattcaaaatgcagttttctggaccaaaatgtcctttttatgttctatggtgtggcagatgactgttgcattgcagtttttatttagaagaaatgtgctacacagggtataa

SEQ ID NO: 156659 - DNA, 120 bp, Artificial Sequence
  ENSG00000106415_42 (sequence is synthesized)
gtccactgcagcagaatctctgatgccacttaattagctgtgccactgaactataggttcctcatttgtgaaaacaaaacaatggaccagtgagctctgaggtaccctcaagaccaaaat

SEQ ID NO: 156660 - DNA, 120 bp, Artificial Sequence
  ENSG00000106415_43 (sequence is synthesized)
atgtggctctatgatgatggtttcctttttttccttctttttgctactgagaacaaagtattcaaactaaggaagattatgagtagtcctacttagttggatactgagttagtagaattt

SEQ ID NO: 156661 - DNA, 120 bp, Artificial Sequence
  ENSG00000106415_44 (sequence is synthesized)
tccaaattcttctaatattagaattcttttgagttacattaataaactctattgagtactaatagaataaacctctttattagaaattttggataatttgcaaaggaaatagaaactatg

SEQ ID NO: 156662 - DNA, 120 bp, Artificial Sequence
  ENSG00000106415_45 (sequence is synthesized)
tatggttctgttcataacctctaaaaattaaactaggaaggaatgaacaaacagaaaaatctgtacctgtgaatatgaggaatatgagatttcactttttcttacaagcaagtcaaagtg

SEQ ID NO: 156663 - DNA, 120 bp, Artificial Sequence
  ENSG00000106415_46 (sequence is synthesized)
attttttttttagctttgttaattctttcagcaaatgtttactgaatatctgccatgtgccaggagtagtgccaggcacaggactcccgctgtccttgaagagttttgtgggatgtgctg

SEQ ID NO: 156664 - DNA, 120 bp, Artificial Sequence
  ENSG00000106415_47 (sequence is synthesized)
acctacaggtacatacagtgagctatggaatttttaaggcaaacaatttgatttaaaagaaatgtttagttcaataaaggtaacatacgcagaaattagcttaagacacaagcttggtct

SEQ ID NO: 156665 - DNA, 120 bp, Artificial Sequence
  ENSG00000106415_48 (sequence is synthesized)
ttagcctttgaagaataaactgggtcagtagtggtggaatatgaaatcaagggaaatactatgtgctttctatgtagatgaatatatgcaccagcatttggatgtttaatggtattcctc

SEQ ID NO: 156666 - DNA, 120 bp, Artificial Sequence
  ENSG00000106415_49 (sequence is synthesized)
atgcctcttaactgggagaccacaggtatagggcaaagatgaggagacatagcaaggtcagaggaactggaggaaaggggctgaagaagagtcaacagcatttggtggccaattagatgt

SEQ ID NO: 156667 - DNA, 120 bp, Artificial Sequence
  ENSG00000106415_50 (sequence is synthesized)
ctttgaggaaatggcacaaacacctggtgtggtttctctctcctgcttcccttcccagtgaccactctgcagcaagccccgggagctttgtatgaagaagctattccttttcaaatccct

SEQ ID NO: 156668 - DNA, 120 bp, Artificial Sequence
  ENSG00000106415_51 (sequence is synthesized)
aaccctttctcctgattgctcctccaaatctgtggccagtgcagcaagtcctgtgaagacagtaaggaggtagcaggaggaggctaaaaatggtgacatcaaggaatagaaactggtggc

SEQ ID NO: 156669 - DNA, 120 bp, Artificial Sequence
  ENSG00000106415_52 (sequence is synthesized)
ttaagagaaggcttggtagagtgaactttggctcggtgggagaatcctaacatggcatagtttcaagctttatctcccttcccagaaagaaaacggtcccaacatcctcacactgtaagg

SEQ ID NO: 156670 - DNA, 120 bp, Artificial Sequence
  ENSG00000106415_53 (sequence is synthesized)
tggtcctagtagattaccttagtatttcctgaatgtaatgacacttttaaaatttatcctaaccttacctctttcagtaaggttaggacaaattctagggtaaggttagaataaattcta

SEQ ID NO: 156671 - DNA, 120 bp, Artificial Sequence
  ENSG00000106436_0 (sequence is synthesized)
gctatccccaggccaactgcagcttcagggagctctccagaccatggcaccgagaagagctcggaaaagagcagaaggcaccgccagctccaacgtcttctccatgtttgatcagtccca

SEQ ID NO: 156672 - DNA, 120 bp, Artificial Sequence
  ENSG00000106436_1 (sequence is synthesized)
gatccaggagtttaaagaggctttcaccatcatggaccagaaccgtgatggcttcatcgacaaagaggacttgagggacacctttgccgcgctgggccgcatcaatgtcaagaacgagga

SEQ ID NO: 156673 - DNA, 120 bp, Artificial Sequence
  ENSG00000106436_2 (sequence is synthesized)
gagaagctgaagggcacggacccagaggagaccattctccacgccttcaaagtgttcgacactgaagggaaaggtttcgtcaaggccgatgtcatcaaagaaaaacttatgacccaggca

SEQ ID NO: 156674 - DNA, 120 bp, Artificial Sequence
  ENSG00000106436_3 (sequence is synthesized)
gaccgcttcagtgaggaggaggtcaagcagatgtttgcagcatttcccccagatgtgtgcggcaacctggactacagaaacctgtgctacgtcatcactcacggtgaagagaaggattag

SEQ ID NO: 156675 - DNA, 120 bp, Artificial Sequence
  ENSG00000106436_4 (sequence is synthesized)
ccatagcctgcctgtctgcatggtccgcctagaggtttgagcagctgggcatggaagaagcgagccacacccccatcgcatgccctatgaacgggataagggaactttttcacttcacca

SEQ ID NO: 156676 - DNA, 120 bp, Artificial Sequence
  ENSG00000106436_5 (sequence is synthesized)
gggataagggaactttttcacttcaccactatgcctgactaattttttaattaaaaaaaatttttttgtagaaacagagtttcaccatgttgcttaggctggtctcaaactcctggcctc

SEQ ID NO: 156677 - DNA, 120 bp, Artificial Sequence
  ENSG00000106436_6 (sequence is synthesized)
agtgctgggattacaggcaccgagaagagctcggaaaagagcagaaggcaccgccagctccaacgtcttctccatgtttgatcagtcccagatccaggagtttaaagagagtctggctct

SEQ ID NO: 156678 - DNA, 120 bp, Artificial Sequence
  ENSG00000106436_7 (sequence is synthesized)
aggggcagcaaacactgttgtggggtgtgacagggagctcttgcagccagaggctgcaggaaaaaggcttcccttgtcctacggttggggacaaagcaagaataaataatgctaatgagg

SEQ ID NO: 156679 - DNA, 120 bp, Artificial Sequence
  ENSG00000106443_0 (sequence is synthesized)
ctttccctattgtctgaggcagccgccctcgcgctgtgcaatttctggtctttcgttgcttctggtccaggctaataaagtttttctttctttaattttttttcttctagttttaacggg

SEQ ID NO: 156680 - DNA, 120 bp, Artificial Sequence
  ENSG00000106443_1 (sequence is synthesized)
agaaattaactccccggggccgccgggttgactgcgctgcctgggccggaggtcttctccggccagggagcgctgtgggaaggggctcgagcggccagggccaggcgaggccgggggggc

SEQ ID NO: 156681 - DNA, 120 bp, Artificial Sequence
  ENSG00000106443_2 (sequence is synthesized)
ggggggttaggggaccgcggggctactcttgggagcgcccctgtccggctggctgcgcgccggttttaaatagcatctttcggacttgtcttcgcggccccagtccccgacctcggcgct

SEQ ID NO: 156682 - DNA, 120 bp, Artificial Sequence
  ENSG00000106443_3 (sequence is synthesized)
gcctgggctcctgcagcctctccctaagtcttctccaaacgaccacctcacggattccttatggatcgcagctccaagaggaggcaggtgaagcctttggcagcttctctgctggaagct

SEQ ID NO: 156683 - DNA, 120 bp, Artificial Sequence
  ENSG00000106443_4 (sequence is synthesized)
cttgattatgatagttcagatgacagtgattttaaagttggagatgcctcagattctgaagggagtggtaatggaagtgaagatgcttcaaaggacagtggagaaggttcctgtagtgat

SEQ ID NO: 156684 - DNA, 120 bp, Artificial Sequence
  ENSG00000106443_5 (sequence is synthesized)
tctgaagaaaatattttagaagaagaactgaatgaagatattaaagtaaaagaagaacaacttaaaaattctgcagaggaagaagtactatcatcagaaaaacaattaattaaaatggaa

SEQ ID NO: 156685 - DNA, 120 bp, Artificial Sequence
  ENSG00000106443_6 (sequence is synthesized)
aagaaggaagaagaagaaaatggagaaagacctagaaagaaaaaggagaaagagaaggaaaaagaaaaggaaaaggagaaagagaaggaaagagagaaggaaaaagaaaaagcaacagta

SEQ ID NO: 156686 - DNA, 120 bp, Artificial Sequence
  ENSG00000106443_7 (sequence is synthesized)
tctgagaatgtggctgcttctgctgctgccaccacaccagccacaagtcctcctgctgttaacacatccccttctgttcccactacgacaaccgctacagaggaacaagtcagcgagcca

SEQ ID NO: 156687 - DNA, 120 bp, Artificial Sequence
  ENSG00000106443_8 (sequence is synthesized)
aaaaaatggaaccttcgacgaaaccgaccacttctggattttgtgtccatggaagagctgaatgacatggatgactatgacagtgaggatgacaatgattggcgacctactgtagtaaag

SEQ ID NO: 156688 - DNA, 120 bp, Artificial Sequence
  ENSG00000106443_9 (sequence is synthesized)
agaaaagggagatctgcgtctcagaaagagggaagtgatggagacaatgaggatgatgaagatgagggaagcgggagtgatgaagacgagaatgatgaaggcaatgatgaagatcatagt

SEQ ID NO: 156689 - DNA, 120 bp, Artificial Sequence
  ENSG00000106443_10 (sequence is synthesized)
agccctgccagtgaagggggttgcaagaagaagaagagtaaagttcttagcagaaacagtgctgatgatgaggaactgaccaatgatagcctgaccctatctcaaagcaagagtaatgag

SEQ ID NO: 156690 - DNA, 120 bp, Artificial Sequence
  ENSG00000106443_11 (sequence is synthesized)
gactcgctgattcttgagaagagtcaaaactggagctctcaaaaaatggaccatattctgatttgctgtgtttgtctgggagataatagtgaggacgctgatgaaataattcagtgtgac

SEQ ID NO: 156691 - DNA, 120 bp, Artificial Sequence
  ENSG00000106443_12 (sequence is synthesized)
aattgtggcattacagtccatgaaggttgttatggagttgatggagagagtgactctattatgagttcagcttctgaaaactccactgaaccttggttttgtgatgcctgtaaatgtggt

SEQ ID NO: 156692 - DNA, 120 bp, Artificial Sequence
  ENSG00000106443_13 (sequence is synthesized)
gtttctcctagctgtgaactgtgtcctaatcaggatggaattttcaaggagacagatgctggaagatgggttcatattgtttgtgccctgtatgttcctggagtagcctttggagatatt

SEQ ID NO: 156693 - DNA, 120 bp, Artificial Sequence
  ENSG00000106443_14 (sequence is synthesized)
tggtgccaaggagtgtagcttttgtgaagaccctcgctttgctagaactggggtttgcattagctgtgatgcagggatgtgcagagcctatttccatgtgacctgtgctcaaaaggaagg

SEQ ID NO: 156694 - DNA, 120 bp, Artificial Sequence
  ENSG00000106443_15 (sequence is synthesized)
tctgctttcagaggcagcggcggaagaggatatagcagatccattctttgcttattgtaagcaacatgcagataggttagacagaaagtggaagagaaaaaactacttggctctacagtc

SEQ ID NO: 156695 - DNA, 120 bp, Artificial Sequence
  ENSG00000106443_16 (sequence is synthesized)
ctattgtaaaatgtctttgcaagagagagagaagcaactatcaccagaagcacaggcaaggatcaatgcccggcttcagcagtatcgtgccaaagcagaactagctcgatctaccagacc

SEQ ID NO: 156696 - DNA, 120 bp, Artificial Sequence
  ENSG00000106443_17 (sequence is synthesized)
ccaggcctgggttccaagggaaaaattgcccagaccactcaccagcagtgcttcagctattcgtaaacttatgcggaaagcagaactcatggggatcagtacagatatctttccagtgga

SEQ ID NO: 156697 - DNA, 120 bp, Artificial Sequence
  ENSG00000106443_18 (sequence is synthesized)
caattcagatactagttctagtgtggatggaaggagaaaacataagcaaccagctctcactgcagattttgtgaattattattttgagagaaatatgcgcatgattcaaattcaggaaaa

SEQ ID NO: 156698 - DNA, 120 bp, Artificial Sequence
  ENSG00000106443_19 (sequence is synthesized)
tatggctgaacaaaagaatataaaagataaattagagaatgaacaagaaaagcttcatgtagaatataataagctatgtgaatctttagaagaactacaaaacctgaatggaaaacttcg

SEQ ID NO: 156699 - DNA, 120 bp, Artificial Sequence
  ENSG00000106443_20 (sequence is synthesized)
aagtgaaggacaaggaatatgggctttactaggcagaatcacagggcagaagttgaatataccggcaattttgcgagcacccaaggagagaaaaccaagtaaaaaagaaggaggcacaca

SEQ ID NO: 156700 - DNA, 120 bp, Artificial Sequence
  ENSG00000106443_21 (sequence is synthesized)
aaagacatctactcttcctgcagtactttatagttgtgggatttgtaagaagaaccatgatcagcatcttcttttattgtgtgatacctgtaaactacattaccatcttggatgtctgga

SEQ ID NO: 156701 - DNA, 120 bp, Artificial Sequence
  ENSG00000106443_22 (sequence is synthesized)
tcctcctcttacaaggatgccaagaaagaccaaaaacagttattggcagtgctcggaatgtgaccaggcagggagcagtgacatggaagcagatatggccatggaaaccctaccagatgg

SEQ ID NO: 156702 - DNA, 120 bp, Artificial Sequence
  ENSG00000106443_23 (sequence is synthesized)
aaccaaacgatcaaggaggcagattaaggaaccagtgaaatttgttccacaggatgtgccaccagaacccaagaagattccgataagaaacacgagaaccagaggacgaaaacgaagctt

SEQ ID NO: 156703 - DNA, 120 bp, Artificial Sequence
  ENSG00000106443_24 (sequence is synthesized)
cgttcctgaggaagaaaaacatgaggaaagagttcctagagagagaagacaaagacagtctgtgttgcaaaagaagcccaaggctgaagatttaagaactgaatgtgcaacttgcaaggg

SEQ ID NO: 156704 - DNA, 120 bp, Artificial Sequence
  ENSG00000106443_25 (sequence is synthesized)
aactggagacaatgaaaatcttgtcaggtgtgatgaatgcagactctgctaccattttggctgtttggatcctcctttgaaaaagtctcctaaacagacaggctacggatggatatgtca

SEQ ID NO: 156705 - DNA, 120 bp, Artificial Sequence
  ENSG00000106443_26 (sequence is synthesized)
ggaatgtgattcttcatcttccaaggaagatgaaaatgaagctgaaagaaaaaatatatctcaggagctcaacatggaacagaaaaatccaaagaaataaaagattttctgtagtgtttt

SEQ ID NO: 156706 - DNA, 120 bp, Artificial Sequence
  ENSG00000106443_27 (sequence is synthesized)
tgaaaagtttgcagcttatgtaatagcagataaaatttctaattgtaaaatgttaaattgtaaaatctaatttgcaaaatgttctcaataaagtcattcaaaatgaaataggagcttgta

SEQ ID NO: 156707 - DNA, 120 bp, Artificial Sequence
  ENSG00000106443_28 (sequence is synthesized)
gaggcaatcccggaaacctcttttataagtgtgattttaaaaatgtggattaaactctcgatagagtacataaagtaaaggagaacagctatattgtcctttctataagcttgtcactgc

SEQ ID NO: 156708 - DNA, 120 bp, Artificial Sequence
  ENSG00000106443_29 (sequence is synthesized)
tttgttacttggactaacaaggcagtagatttgcctgtgtggaattttttttcctatttttcttctttttgctttttttgcacttatcagaaatatttgatgtgtgcattgttgaaaaat

SEQ ID NO: 156709 - DNA, 120 bp, Artificial Sequence
  ENSG00000106443_30 (sequence is synthesized)
actggatacatgtcttgtcagaattgtcgtattaagtaatgtctttccctcttgcttctttggcaaatgttgatacacagtgtttggacttactgaagagttactgaagcctgtgggact

SEQ ID NO: 156710 - DNA, 120 bp, Artificial Sequence
  ENSG00000106443_31 (sequence is synthesized)
taataaatacaatatgctactccctgttgtgattgaacaatacaaataacaaacaagaaagacaatgcattccattagtctgctattctgtttccttcaacttcatacatagattcatat

SEQ ID NO: 156711 - DNA, 120 bp, Artificial Sequence
  ENSG00000106443_32 (sequence is synthesized)
atgaagtactgcattgtaaaacaactatagactcatattaaatgttatttctatttataatattcagcaaaagtgaaagacttgtgaagcatatgacattctatttttgacttattagtc

SEQ ID NO: 156712 - DNA, 120 bp, Artificial Sequence
  ENSG00000106443_33 (sequence is synthesized)
ctagtgtgaaagcattaatattattagcatgaaatttttacttcagattttaagctcatgaataaagatatatctgtgttgatctctagatatttttagtaatacccaaatatattcagt

SEQ ID NO: 156713 - DNA, 120 bp, Artificial Sequence
  ENSG00000106443_34 (sequence is synthesized)
ccttattgttttaatataagctttctgtgttcagtataattttatttttctcaaccttaaatatgaacttaggaaataaggagggaagtacaaagattattgactatacaacctaccagc

SEQ ID NO: 156714 - DNA, 120 bp, Artificial Sequence
  ENSG00000106443_35 (sequence is synthesized)
tgaaagaaagatcttcatcaacatctgtatctttccagaggtatacagaattaaaatttgatcttcaagctttaatgatccagttttaagtcaacggcagaagtatgttgaatatttcat

SEQ ID NO: 156715 - DNA, 120 bp, Artificial Sequence
  ENSG00000106443_36 (sequence is synthesized)
cactcaatcttgaactgatttagaagagactctttgctgaaattgaattgcacttatacatgtaaattgtcaacatgtaatttggaattttctgattaataaatgtggttttggacatct

SEQ ID NO: 156716 - DNA, 120 bp, Artificial Sequence
  ENSG00000106443_37 (sequence is synthesized)
gaagacattgatcaaagctctggtgagatgggggagtgagtgtgtgaacaaaaagagagctaatttaaaagaggcatcagactttcaaaggacagtgtcacaaaagttcttacagttctt

SEQ ID NO: 156717 - DNA, 120 bp, Artificial Sequence
  ENSG00000106443_38 (sequence is synthesized)
acagggactttgtaagggaatccattcttatttctttaaaaaattgtcttctggtaaagccctgttaaattaactgaggacacagaaattaaacatttcaaaaagaataaacatattgat

SEQ ID NO: 156718 - DNA, 120 bp, Artificial Sequence
  ENSG00000106443_39 (sequence is synthesized)
tgtgatgcctgtaaatgtggtgtttctcctagctgtgaactgtgtcctaatcaggatggaattttcaaggagacagatgctggaaggagactaccatctagggttggtgactaaaattaa

SEQ ID NO: 156719 - DNA, 120 bp, Artificial Sequence
  ENSG00000106443_40 (sequence is synthesized)
tctgcctcttcctctccaatataagagggggggtgggtacttaaatttttattttgtcacataaggatgttttagtattttattaaacatgctttatattaaaaacaagattaacagcaa

SEQ ID NO: 156720 - DNA, 120 bp, Artificial Sequence
  ENSG00000106443_41 (sequence is synthesized)
agcaacctatataaattatcaccatcatttcccatattttaacataaaaactagggtatattatgtcctaaaataaaggataggcttttaaatttaataaattttactttagtaaagtaa

SEQ ID NO: 156721 - DNA, 120 bp, Artificial Sequence
  ENSG00000106443_42 (sequence is synthesized)
catccacttcttaacctctcacacatggttatactctggatttaaatgtaaataagagtgataatctgcctgtttaacacagggaattatttttctcttgacaagagaaattgacagtgc

SEQ ID NO: 156722 - DNA, 120 bp, Artificial Sequence
  ENSG00000106443_43 (sequence is synthesized)
tctctatttagaggccatgaaagtaatttgatctaaacactgtgtactaagattattatgttttatgtcagaaaacaataaagttactaagctctgttagcatattctaaatgtttgaaa

SEQ ID NO: 156723 - DNA, 120 bp, Artificial Sequence
  ENSG00000106443_44 (sequence is synthesized)
tttagaagcaatggtgagaagacagactttttattgacaagaacttaattagcactttcttattgcttatcaaaacaaatgtgttaaatgcttctcccttacgaaataaagaaaggtgaa

SEQ ID NO: 156724 - DNA, 120 bp, Artificial Sequence
  ENSG00000106443_45 (sequence is synthesized)
cattttcactgagaacaatttgttaatgaaaatgtttgatatactgttaatttttagaaatttattagccatgctgcatatatcatagagggatgtttattttcctaatatgttgtgggt

SEQ ID NO: 156725 - DNA, 120 bp, Artificial Sequence
  ENSG00000106443_46 (sequence is synthesized)
cataatttgaaaattattatgacacagagttataaagtaaatatgcagtaattaggtagtaaattgatgtgaactaggaaaatgttaatacttcatcaagaactttgattattagcaatc

SEQ ID NO: 156726 - DNA, 120 bp, Artificial Sequence
  ENSG00000106443_47 (sequence is synthesized)
tgaactctggcgcactacccaaaaacctaaagttaaggagaaaagactatagttaacaaacaaaattgagcccatttacttaactcagtagcaattatcattttcatgtatttttactgt

SEQ ID NO: 156727 - DNA, 120 bp, Artificial Sequence
  ENSG00000106443_48 (sequence is synthesized)
cagtttacatagcctcagtaagttttagtggtctggtttctgaatccataacagattgttgttggggaatttatgcttaagcaaacacaccgaaaatatcaggaagcagtggctgatagt

SEQ ID NO: 156728 - DNA, 120 bp, Artificial Sequence
  ENSG00000106443_49 (sequence is synthesized)
tttcaggcaagtgaggaccctgaaaatctacaaaaattgaatacaagaattcaaatagaacagctgactcctggtcctcattccaaggacaaaaggctgacacactgctagacctgtagc

SEQ ID NO: 156729 - DNA, 120 bp, Artificial Sequence
  ENSG00000106443_50 (sequence is synthesized)
agcatatgttattcttactgatgacctgagatgacaaatataaattatatttaatatgtttatttgatgaaacgagcaatgtgatttttaaatttcgcatcaaagatgattaaaactcca

SEQ ID NO: 156730 - DNA, 120 bp, Artificial Sequence
  ENSG00000106443_51 (sequence is synthesized)
gtttttatgtatgaaggagtatgctctcagttatttagaaatctcagccttctcataaactcagaaatacttatactttgaaggtttctatatccataggtttaatcgaaattttggcta

SEQ ID NO: 156731 - DNA, 120 bp, Artificial Sequence
  ENSG00000106443_52 (sequence is synthesized)
atgaaaggtaaatatgttgtactgagaaagagcataaaattatgtgggcttgccagtctctttatgtcacatttgaacttagcttatattatttattattctttcttaatgccagaacaa

SEQ ID NO: 156732 - DNA, 120 bp, Artificial Sequence
  ENSG00000106443_53 (sequence is synthesized)
caggtatttgaacattttaactgcttttaaatatatttttagatgtgtgatattgtcatagtaaataaagtactgttggtcctattggtcctatttgattttatctattcctgtagctag

SEQ ID NO: 156733 - DNA, 120 bp, Artificial Sequence
  ENSG00000106443_54 (sequence is synthesized)
attcataaggagaaagttgtagaggaagaaatgcataaacttaggacattcatttgtgttttaaacttctttatatctgagtaacttaattaagttgcttaacttttctggaactcttga

SEQ ID NO: 156734 - DNA, 120 bp, Artificial Sequence
  ENSG00000106443_55 (sequence is synthesized)
ttccccaaatgagtttttggaagattggacttttgtatcataatatgaaatttctactaaaaatgtagatttacagtcccttttattatgatggtttcttaaagtcaattgtttttcttt

SEQ ID NO: 156735 - DNA, 120 bp, Artificial Sequence
  ENSG00000106443_56 (sequence is synthesized)
gtgtgttgtttatgtaagaagagcttcttcccccttttttcctaaaaggttattgaatagtagtttttaactttaatcaagtaatatatgttctataaattttccccttggtttcttaat

SEQ ID NO: 156736 - DNA, 120 bp, Artificial Sequence
  ENSG00000106443_57 (sequence is synthesized)
tgcagatttcttgacatttgaagttttaaatcagtgaaagataaacaataaagaaaatctgacagattggttgagaaagtattattgtttaattttttttaaactatgaaatgaggaatg

SEQ ID NO: 156737 - DNA, 120 bp, Artificial Sequence
  ENSG00000106443_58 (sequence is synthesized)
taatcccttctataagatgtatactctttgttatttgttgttaaattttggtcttgttattccaactgatgcaaaattctttttacaaagcactgaaataatacagatttttcttcattg

SEQ ID NO: 156738 - DNA, 120 bp, Artificial Sequence
  ENSG00000106443_59 (sequence is synthesized)
ctttaaaatgatttaatgggcaaatgattaattctttaagttcacaattgaaattgttgtggttgttttgaacacatgattatacatatacgttcattcatatgctcttaatatttctac

SEQ ID NO: 156739 - DNA, 120 bp, Artificial Sequence
  ENSG00000106443_60 (sequence is synthesized)
tgtcagtgttctaaatatttgttttgtttgttgattttattgctgttgtattttgtttttgctaaaacatttatttcaggtttagtttgcctttatcatcatcattaatttaatgatctt

SEQ ID NO: 156740 - DNA, 76 bp, Artificial Sequence
  ENSG00000106443_61 (sequence is synthesized)
gagccgctgctcaggtcgcttccgtacagagcgtgctttaattttcaataagtccctgcttttgttcaattctttg

SEQ ID NO: 156741 - DNA, 120 bp, Artificial Sequence
  ENSG00000106443_62 (sequence is synthesized)
taggaatagagtaggtaatgttatagataatcaaaagcaattgtaattgtaaagctgctgtaatctagtgatctctagttacagtgaggaacgctatgattggatgagatgtttgataaa

SEQ ID NO: 156742 - DNA, 120 bp, Artificial Sequence
  ENSG00000106443_63 (sequence is synthesized)
agtaaaatgtgtatgaaattacatataaacagattattagcttattgaaagatctcataacattggaggaaaaatattcataatctttagcaaaactagtagacttttgtttaaaagaat

SEQ ID NO: 156743 - DNA, 120 bp, Artificial Sequence
  ENSG00000106443_64 (sequence is synthesized)
aagataggactagttgtcactatattagcttaaggaaatgttggtaattattactgttgctgaactctggctgcttttaagcaaaatgacagattgccattttctaagtggaatatacta

SEQ ID NO: 156744 - DNA, 120 bp, Artificial Sequence
  ENSG00000106443_65 (sequence is synthesized)
atccattagaccatggccctcttttaatatttagtgagaaattactcgcagttgctttattttaggttttttgagaaactcttaggccttgttttggtatcactgttaatcaaaatcctt

SEQ ID NO: 156745 - DNA, 120 bp, Artificial Sequence
  ENSG00000106443_66 (sequence is synthesized)
ttcactttgattccaattataatactatattatcatcattttccatcttgcattttcagtggtggtggatattctattccacatttggtgctagtcctaagaatctttgtcacatgttat

SEQ ID NO: 156746 - DNA, 120 bp, Artificial Sequence
  ENSG00000106443_67 (sequence is synthesized)
acatatagactgcaaaattcataagatataggtcctgcaaaaagtatagttgaagtaagaaaacttgaagtaactagaatagaatactttctcctaataatctcttaaatgctctcatat

SEQ ID NO: 156747 - DNA, 120 bp, Artificial Sequence
  ENSG00000106443_68 (sequence is synthesized)
ccacagtataaaattattccgtgtccataatcggtccaactactataaggagaaaattgatgtgtgcttaagaaaatatgtactaaatgattcatatttcacagacctacataagaaaaa

SEQ ID NO: 156748 - DNA, 120 bp, Artificial Sequence
  ENSG00000106443_69 (sequence is synthesized)
aatggcacatcaggtaaatgatagttgtttatcacacagtagggaaaggaagaaacatgaaaatatcaggaaggagatgaaatgtctctgaaatacaggaagaatgacataatagcaagt

SEQ ID NO: 156749 - DNA, 120 bp, Artificial Sequence
  ENSG00000106443_70 (sequence is synthesized)
agtggttctcaaacgttgtgcattggaatcacaggaaggatttgtaaaaacacaggtgactaccctattcctctcctggatctgccctctgcccactttactccctcccccttcaccctg

SEQ ID NO: 156750 - DNA, 120 bp, Artificial Sequence
  ENSG00000106443_71 (sequence is synthesized)
gagtttctgatttagtagaaaatttgcatttctaacaagttcccagctgatgctgatgctactggcctggaacaccacattaagaaccattcataggtagtattttttttaaaacatcgt

SEQ ID NO: 156751 - DNA, 120 bp, Artificial Sequence
  ENSG00000106443_72 (sequence is synthesized)
tgtgttgtgcttaacattgattgataaaggaatgtgcttttaacatctccttaaaaggtcccttagatttcctctagataaaagaattagtaatttcatctgcaacacatacaatttttt

SEQ ID NO: 156752 - DNA, 120 bp, Artificial Sequence
  ENSG00000106443_73 (sequence is synthesized)
ttaattttataaaatttagttaaatgtttgttttacactgactatggaaacagcactattttagatacagaaagaaatcaataaacatagcctgtgttcacaattcactcatccttttgt

SEQ ID NO: 156753 - DNA, 120 bp, Artificial Sequence
  ENSG00000106443_74 (sequence is synthesized)
tataaaaagacttgaaattagggttatgttttaacatgaaaacaaaatttagccttagcttttatccatcttaactttagaaattatatttatgcattgtttatagatcattgtcattcg

SEQ ID NO: 156754 - DNA, 120 bp, Artificial Sequence
  ENSG00000106443_75 (sequence is synthesized)
ttgttgcttaagtgttcatctgattttatatttatgatgttaaaaatagactgctgaccaataaataataaaatatttacactccattctatttccctgtattcacatcctattaatgaa

SEQ ID NO: 156755 - DNA, 120 bp, Artificial Sequence
  ENSG00000106443_76 (sequence is synthesized)
ttcataaaactcaccactattttacttgattctcaatatgagaatatttcatgactatttcaccaaaatttattcaaggaattcagaaggactctccagcagagcagaatatttacatca

SEQ ID NO: 156756 - DNA, 120 bp, Artificial Sequence
  ENSG00000106443_77 (sequence is synthesized)
ttaaatttttaaaaaaatttaaaaatggcaattgaaacttgtttaagagactcaacttggagtttcctgacatacgaaggcagaatcattttttctacctgtctgaatcagcactttgta

SEQ ID NO: 156757 - DNA, 120 bp, Artificial Sequence
  ENSG00000106443_78 (sequence is synthesized)
agtttacataaaattaaggattgtgatttctaagataggcatgctttgcaaatatttctctataaaagtggaagcctctttcccatagtgctcactttaaggctttctgtaggcctgccg

SEQ ID NO: 156758 - DNA, 120 bp, Artificial Sequence
  ENSG00000106443_79 (sequence is synthesized)
ataagattcactgctgttcaggtacataagatgtaatgtaattggatgcacatgctgggctttgtaaataaaatgagattgacacccagcaattatctcatttatctgatttacattgta

SEQ ID NO: 156759 - DNA, 120 bp, Artificial Sequence
  ENSG00000106443_80 (sequence is synthesized)
aaatcaggatctacactattgattagagcataattagttaattatgaacagggaaatacaaagttacatggagcttgagctcagcaggttgtactgctgaaaaatttccaagggcatgag

SEQ ID NO: 156760 - DNA, 120 bp, Artificial Sequence
  ENSG00000106443_81 (sequence is synthesized)
cagatggaaatcagtttattaaagaacaaagcagacatgtttcaggtatggaaatgtctaattcttctctcatgctgtgaagagttgcttgaccttattgtgtatttttatatgaattgt

SEQ ID NO: 156761 - DNA, 120 bp, Artificial Sequence
  ENSG00000106443_82 (sequence is synthesized)
tttgtctcatctttcattttcttgtttcacatttaatcttgtaatctggctgccacagatatagctaactgaattgatcccactctttaagtgactattaaatacagatttggatttgga

SEQ ID NO: 156762 - DNA, 120 bp, Artificial Sequence
  ENSG00000106443_83 (sequence is synthesized)
tatttttctaattttttaaaattaatttttatgtgtaaagaatatttttgtctttcttactacccattcattcattattggctgatacagaagtctgtagtggtattaatgaaataggtt

SEQ ID NO: 156763 - DNA, 120 bp, Artificial Sequence
  ENSG00000106443_84 (sequence is synthesized)
caagccctccacgttagtcttatatttgtgaaatgattaaaaaccattttctaattattttgtatagaaactgctcatgtaggtaatttgcactaaaattgttgtaaattacaaggaata

SEQ ID NO: 156764 - DNA, 120 bp, Artificial Sequence
  ENSG00000106443_85 (sequence is synthesized)
aaatattgtacttattgatactaaatgttattccgtattggtagaatgcagaattttgtgcaagcttgtattatttgtaaagtgatttaactcattgaccacaatttgtattttctccat

SEQ ID NO: 156765 - DNA, 120 bp, Artificial Sequence
  ENSG00000106443_86 (sequence is synthesized)
ctgttaagatgtttaatcaaaataattggccactattcaatgaaagaactcatcgctacctgttaatagatttgcgtagatgtttgagctgctagtgagatttttatttaagtaatgaca

SEQ ID NO: 156766 - DNA, 120 bp, Artificial Sequence
  ENSG00000106443_87 (sequence is synthesized)
gtattcaagactaatttttttgaacattcttgtgatggaatttttacacagaaatgaaaaagttggaaaatccaacccatcagttctctggatatttagttttttttaagtggacagaca

SEQ ID NO: 156767 - DNA, 120 bp, Artificial Sequence
  ENSG00000106443_88 (sequence is synthesized)
taatagtctatattttcagagtccagtttttgttttgctttatataaacttataggggctacaagtaaaatgttccattggcataaaagataatgtgattatcacaatcaacttgatcat

SEQ ID NO: 156768 - DNA, 120 bp, Artificial Sequence
  ENSG00000106443_89 (sequence is synthesized)
aaaaatgtacatccttgttcaagtctatgttatggattttgcttctttctaaagtttagcttacaaatggctataaattatttgcataggaggtgcacttaattgtttcagttaggtttt

SEQ ID NO: 156769 - DNA, 120 bp, Artificial Sequence
  ENSG00000106443_90 (sequence is synthesized)
aaaaagtagttgtagtttactcctctaatgaaattagagatgttaaaccctttggaatactgacttttggcctcttaggcattcgatgaaataaatcagctgcttctttttacttgtttg

SEQ ID NO: 156770 - DNA, 120 bp, Artificial Sequence
  ENSG00000106443_91 (sequence is synthesized)
catattctcaatagtcaggtaaacacctgactaattgcttgttatatggatcatagcacatatgaaggtaaatcatttttttccctcttctttgtttagggtgctattcttaatcatata

SEQ ID NO: 156771 - DNA, 120 bp, Artificial Sequence
  ENSG00000106443_92 (sequence is synthesized)
ctaagtaagtattttacatacatatagactgtgtttatttggtcactacattttgttaatgggtaaaagaccatatattaagctactttgttatttacatctatatctgttattaatctg

SEQ ID NO: 156772 - DNA, 120 bp, Artificial Sequence
  ENSG00000106443_93 (sequence is synthesized)
atagctaggaagttgtatttagtaagaatctaattaggtttgcttttatcttataattgggattcctttatgctctatagtgttaatgtgtacagtgtttattagaggcttaaatgatac

SEQ ID NO: 156773 - DNA, 120 bp, Artificial Sequence
  ENSG00000106443_94 (sequence is synthesized)
ttctttaagcatccagtttttattttattaaaaaatcttagtgtttctttacaggttagttttgtattcttttttaatattttaagacattgccttcctatttaataatgtgctattcgt

SEQ ID NO: 156774 - DNA, 120 bp, Artificial Sequence
  ENSG00000106443_95 (sequence is synthesized)
ataataatctgtttttattacatagacatttgtgttatttaataaagtatattgtgttatatccctatacttttgtgggtcaatgactgcttctgaaaaagttttttaaaacattttatt

SEQ ID NO: 156775 - DNA, 120 bp, Artificial Sequence
  ENSG00000106443_96 (sequence is synthesized)
cactatttattttgataaattttgtcctatattatgtgctgcatgtgtttccaagtttatgtaagaaataaaggtagaaaccataaataggtcaataactactttaactccattgcagct

SEQ ID NO: 156776 - DNA, 120 bp, Artificial Sequence
  ENSG00000106443_97 (sequence is synthesized)
tttaggtagcagatgattatagtcccttacgagtttttttaaatggtctaaatttgcaacatagctcagggtttgttgggtgacaggatttgatgaagattacaaagtggtatttgtgtg

SEQ ID NO: 156777 - DNA, 120 bp, Artificial Sequence
  ENSG00000106443_98 (sequence is synthesized)
taaaattaataagccactattttggccatccacattgttctttgatttcttgggttcttaatggtatctcttatatttgtccacagtttattaattcttgcaagttctgctagagttcac

SEQ ID NO: 156778 - DNA, 120 bp, Artificial Sequence
  ENSG00000106443_99 (sequence is synthesized)
ttgtgtccagtaagatgtttctgtgattagcacatagagctatggattttttcaattcaatattctaagatagaaacaacagatttttttcacattgaaataattttgggacatctttac

SEQ ID NO: 156779 - DNA, 120 bp, Artificial Sequence
  ENSG00000106443_100 (sequence is synthesized)
aaagatcttatatttgtatatttgtttatcaccaaaactattgacttcaagattggattcttttctttttttccccttctgttttttggattttggcagttcctaagggtactactactt

SEQ ID NO: 156780 - DNA, 120 bp, Artificial Sequence
  ENSG00000106443_101 (sequence is synthesized)
tttgctacttagtcttgaagctgaagcttttatttacttttgagtgagctagaacctcagagaacttgcctatcacccctaattctgacaagcaaattctttttcctttggaatgcatca

SEQ ID NO: 156781 - DNA, 120 bp, Artificial Sequence
  ENSG00000106443_102 (sequence is synthesized)
caaatacatgagagttccacatgtcgactaagtaattctgaaaggtatcactaatgaaggaatcaatcagcaaggattaggtcatttttaaatggcatgtatttgttatcttctgataag

SEQ ID NO: 156782 - DNA, 120 bp, Artificial Sequence
  ENSG00000106443_103 (sequence is synthesized)
ctagcatataaaatctttctcttcctcttttcattagttcttgagctgaaagataatttaattgtacgagtagttgaaatcagcaacagattggaactgtgttagtgtagcaaacttgtt

SEQ ID NO: 156783 - DNA, 120 bp, Artificial Sequence
  ENSG00000106443_104 (sequence is synthesized)
cttggtttattagctggaatttcatagctatatcaacaagaattatttatgtacattaaggtgataaataatgaattatgatacacatgcatcatgatagttgcctcaagttatacacta

SEQ ID NO: 156784 - DNA, 120 bp, Artificial Sequence
  ENSG00000106443_105 (sequence is synthesized)
ggattttggatatgtgagaacttttccttctacttttttttggctgcttaagaattatttctttacataaacatgtatgcacatgcatatatgtaggcaaacaatgtgtgtagtatgatc

SEQ ID NO: 156785 - DNA, 120 bp, Artificial Sequence
  ENSG00000106443_106 (sequence is synthesized)
ccaggtttagcatttcagctatataagtgatgtgataagttatgaaaatttaaatgctctgagtaaatcataattatggacaattatgaagtgtggagaaaatcctttaaaataattttg

SEQ ID NO: 156786 - DNA, 120 bp, Artificial Sequence
  ENSG00000106443_107 (sequence is synthesized)
gagaattcattttttttctatcagatacatgtttatttaaaagtaaagtactataaagtatatttaatttgttactttttatttcctatggcataaatggtaacaaagtgcagtagtcca

SEQ ID NO: 156787 - DNA, 120 bp, Artificial Sequence
  ENSG00000106443_108 (sequence is synthesized)
tccaatatagtattaattagaaataactaattttgcaagtgcctaacctaagcaataacatttaacagaggaaatttatatttattattaattaaacattagatatactgtggatttttg

SEQ ID NO: 156788 - DNA, 120 bp, Artificial Sequence
  ENSG00000106443_109 (sequence is synthesized)
atggcctaggttgattttattttttgttttgtctttgtttctttgtttcgttttggtactttatttttttttaatcagacataatgctaatcagaaatcttagctgatgctgcacattgg

SEQ ID NO: 156789 - DNA, 120 bp, Artificial Sequence
  ENSG00000106459_0 (sequence is synthesized)
gaggctgcgaggagccggcgcggtcgcagtctccacggcgcaggcccacggtagcgcagccgctctgagtagaacttcatggaggaacacggagtgacccaaaccgaacatatggctacc

SEQ ID NO: 156790 - DNA, 120 bp, Artificial Sequence
  ENSG00000106459_1 (sequence is synthesized)
atagaagcacatgcagtggcccagcaagtgcagcaggtccatgtggctacttacaccgagcatagtatgctgagtgctgatgaagactcgccttcttctcccgaggacacctcttacgat

SEQ ID NO: 156791 - DNA, 120 bp, Artificial Sequence
  ENSG00000106459_2 (sequence is synthesized)
gactcagatatactcaactccacagcagctgatgaggtgacagctcatctggcagctgcaggtcctgtgggaatggccgctgctgctgctgtggcaacaggaaagaaacggaaacggcct

SEQ ID NO: 156792 - DNA, 120 bp, Artificial Sequence
  ENSG00000106459_3 (sequence is synthesized)
catgtatttgagtctaatccatctatccggaagaggcaacaaacacgtttgcttcggaaacttcgagccacgttagatgaatatactactcgtgtgggacagcaagctattgtcctctgt

SEQ ID NO: 156793 - DNA, 120 bp, Artificial Sequence
  ENSG00000106459_4 (sequence is synthesized)
atctcaccctccaaacctaaccctgtctttaaagtgtttggtgcagcacctttggagaatgtggtgcgtaagtacaagagcatgatcctggaagacctggagtctgctctggcagaacac

SEQ ID NO: 156794 - DNA, 120 bp, Artificial Sequence
  ENSG00000106459_5 (sequence is synthesized)
gcccctgcgccacaggaggttaactcagaactgccgcctctcaccatcgacggaattccagtctctgtggacaaaatgacccaggcccagcttcgggcatttatcccagagatgctcaag

SEQ ID NO: 156795 - DNA, 120 bp, Artificial Sequence
  ENSG00000106459_6 (sequence is synthesized)
tactctacaggtcggggaaaaccaggctgggggaaagaaagctgcaagcccatctggtggcctgaagatatcccctgggcaaatgtccggagtgatgtccgcacagaagagcaaaagcag

SEQ ID NO: 156796 - DNA, 120 bp, Artificial Sequence
  ENSG00000106459_7 (sequence is synthesized)
agggtttcatggacccaggcactacggaccatagttaaaaactgttataaacagcatgggcgggaagaccttttgtatgcctttgaagatcagcaaacgcaaacacaggccacagccaca

SEQ ID NO: 156797 - DNA, 120 bp, Artificial Sequence
  ENSG00000106459_8 (sequence is synthesized)
catagtatagctcatcttgtaccatcacagactgtagtccagacttttagtaaccctgatggcactgtctcacttatccaggttggtacgggggcaacagtagccacattggctgatgct

SEQ ID NO: 156798 - DNA, 120 bp, Artificial Sequence
  ENSG00000106459_9 (sequence is synthesized)
tcagaattgccaaccacggtcaccgttgcccaagtgaattattctgccgtggctgatggagaggtggaacaaaattgggccacgttacagggaggtgagatgaccatccagacgacgcaa

SEQ ID NO: 156799 - DNA, 120 bp, Artificial Sequence
  ENSG00000106459_10 (sequence is synthesized)
gcatcgttggcagaggccgcagtggcagcttctcaggagatgcagcagggagctacagtcactatggcgcttaacagcgaagctgccgcccatgctgtcgccaccctggctgaggccacc

SEQ ID NO: 156800 - DNA, 120 bp, Artificial Sequence
  ENSG00000106459_11 (sequence is synthesized)
ttacaaggtgggggacagatcgtcttgtctggggaaaccgcagcagccgtcggagcacttactggagtccaagatgctaatggcctggtccagatccctgtgagcatgtaccagactgtg

SEQ ID NO: 156801 - DNA, 120 bp, Artificial Sequence
  ENSG00000106459_12 (sequence is synthesized)
gtgaccagcctcgcccagggcaacggaccagtgcaggtggccatggcccctgtgaccaccaggatatcagacagcgcagtcaccatggacggccaagctgtggaggtggtgacattggaa

SEQ ID NO: 156802 - DNA, 120 bp, Artificial Sequence
  ENSG00000106459_13 (sequence is synthesized)
cagtgacatacagccatattatggcatcgttttctagtctacttcaaaattttttacacgtttgcagaggtgcaatcaaatggaattaagtctctcgactttggaaggaaagttttgtta

SEQ ID NO: 156803 - DNA, 120 bp, Artificial Sequence
  ENSG00000106459_14 (sequence is synthesized)
acctttttttttttaaaaggaagaaagcggattttggaattgcattttttaaagcaccactcttgattttctgggattggtgaagaaactgcattgtcaatttcactgtcccaaaaaagc

SEQ ID NO: 156804 - DNA, 120 bp, Artificial Sequence
  ENSG00000106459_15 (sequence is synthesized)
caaattgtggcaggacttctttctgcggaaatgtgtgtgtatacttatgtgtgtgtatgtgtgagtgtgaatatatgtatatgtgtacatatggacatacacatttacatatatataaag

SEQ ID NO: 156805 - DNA, 120 bp, Artificial Sequence
  ENSG00000106459_16 (sequence is synthesized)
tatatatatacatatatatatatatatatgtatgaaacccgcatggaattatctgtatgaaatcaaggtgcgctgtggaaacaataattcacccagtttagtgggtggtagggtacgtgg

SEQ ID NO: 156806 - DNA, 120 bp, Artificial Sequence
  ENSG00000106459_17 (sequence is synthesized)
ccagacacagtcacccagtttttgttcataccagggtcatgcgttgagctactgacaaactcaggcggaggtgaccatgcccttcaccaaagctgcctcccagtggccacacagaactct

SEQ ID NO: 156807 - DNA, 120 bp, Artificial Sequence
  ENSG00000106459_18 (sequence is synthesized)
ccctgctggactcacctgaggaaagaggctccagcatggggtgggtcagagatgtgcttgcaaggtccagggactgcgtggtctgccagctgagatgctcctcgggctggcccaggtgct

SEQ ID NO: 156808 - DNA, 120 bp, Artificial Sequence
  ENSG00000106459_19 (sequence is synthesized)
gaccttgccacaggcagatgaatgtcttgaaagctcccgggcctcagcctcccatctcctctccttcccaggaatccttgatctcatgactattaaaatgttgctctggttttaaggtca

SEQ ID NO: 156809 - DNA, 120 bp, Artificial Sequence
  ENSG00000106459_20 (sequence is synthesized)
cccctttcagttcctggtccagaactttacacagaaaaggtgctcaaaggatatttgtttaatgaatgtggtatgctgacatttaaacaggacaaaacttgtagaacttcatggaggaac

SEQ ID NO: 156810 - DNA, 120 bp, Artificial Sequence
  ENSG00000106459_21 (sequence is synthesized)
ggatgggaagggggcgggggcagtggaagggaaaggaaggaaagaaaaatcgtcctagaccaggatacacccgtgggagcaattttctctactgtctgtagcttcacagaggaggcgctg

SEQ ID NO: 156811 - DNA, 120 bp, Artificial Sequence
  ENSG00000106459_22 (sequence is synthesized)
gaatgaacaagaagagacatctggtctgtggccacagcaccctgaacgcccctgatcttgtgtgatcttggaagctaagcttggttgggcccggtcagtacgcggaagggaagaagggac

SEQ ID NO: 156812 - DNA, 120 bp, Artificial Sequence
  ENSG00000106459_23 (sequence is synthesized)
acctggccatagaaaacagctgagggtgtttgctgtgttcctggatcaggccctgcttcagaagggactcctggaggcccatgttccttgatgcaacctcgtggcccaggccgggagcag

SEQ ID NO: 156813 - DNA, 120 bp, Artificial Sequence
  ENSG00000106459_24 (sequence is synthesized)
cttgcctcctcagaggtgttgactatctgggtgttcttggtaaccgttaactctgtctttctcagctgcaagccctgagtctccagtagctgaattcacctgacttttcaacaggccaaa

SEQ ID NO: 156814 - DNA, 120 bp, Artificial Sequence
  ENSG00000106459_25 (sequence is synthesized)
tctctgaaccttgagtacagggacagctcctcctccctcctcccagctctccccatgtgtgtgatggtgtatttaatgtgtttttttaatgcgacattaaaagattctccacgtcttgct

SEQ ID NO: 156815 - DNA, 120 bp, Artificial Sequence
  ENSG00000106459_26 (sequence is synthesized)
caacctttgagagaagtttcagattcttgtatttgcttgttttatataaaactatctaatgttctttatatgttcttttctgtacgtaatggggggaggggagggaaatttacatataaa

SEQ ID NO: 156816 - DNA, 120 bp, Artificial Sequence
  ENSG00000106459_27 (sequence is synthesized)
tagtcctagttctacaatttgttatttttttaattattattttttatcgtcattgtgaagttgtccagggactttaaagtccatgttcctttgtggtgaaataacctccaaatagtttga

SEQ ID NO: 156817 - DNA, 120 bp, Artificial Sequence
  ENSG00000106459_28 (sequence is synthesized)
gaagttgccaagacgaagaaaaaagcaaaaccccagtagcagagcatggattctgtgttgtttcccattctgtctttgactgcctcattcaataaatagttaaaaatgtggcaacaggaa

SEQ ID NO: 156818 - DNA, 120 bp, Artificial Sequence
  ENSG00000106459_29 (sequence is synthesized)
agaagcggcagcgctcgccattgccgctggtggcaggaggctgcgaggagccggcgcggtcgcagtctccacggcgcaggcccacggtagcgcagccgctctgagaacttcatggaggaa

SEQ ID NO: 156819 - DNA, 81 bp, Artificial Sequence
  ENSG00000106459_30 (sequence is synthesized)
tggtggcaggaggctgcgaggagccggcgcggtcgcagtctccacggcgcaggcccacggtagcgcagccgctctgttcca

SEQ ID NO: 156820 - DNA, 120 bp, Artificial Sequence
  ENSG00000106459_31 (sequence is synthesized)
attgccgctggtggcaggaggctgcgaggagccggcgcggtcgcagtctccacggcgcaggcccacggtagcgcagccgctctgagttcctggtccagaactttacacagaaaaggtgct

SEQ ID NO: 156821 - DNA, 120 bp, Artificial Sequence
  ENSG00000106459_32 (sequence is synthesized)
caaaggatatttgtttaatgaatgtggtatgctgacatttaaacaggacaaaacttggtgcctttgaacccttgtgcactttttagttagatctttattaacatgctatgccactgcagg

SEQ ID NO: 156822 - DNA, 120 bp, Artificial Sequence
  ENSG00000106459_33 (sequence is synthesized)
gacaagtgccaccataggctactgttggcaaacaagagctccaccaaactttttaaagtgaagaagcaacagtctgagccatttttctcaccagtggcaggagggggagacttccaccag

SEQ ID NO: 156823 - DNA, 120 bp, Artificial Sequence
  ENSG00000106459_34 (sequence is synthesized)
caacatggaatcttcagtggatgcagctgaccaaccctcctgacttctcagtcttttcccaccactgctcaccctttatgttcagatgtattcagcactagataaccatacttattaact

SEQ ID NO: 156824 - DNA, 120 bp, Artificial Sequence
  ENSG00000106459_35 (sequence is synthesized)
cttactggagtccaagatgctaatggcctctttatggcagatcgtgcaggtcgcaagtggatcctgactgacaaagccacaggcctggtccagatccctgtgagcatgtaccagactgtg

SEQ ID NO: 156825 - DNA, 120 bp, Artificial Sequence
  ENSG00000106460_0 (sequence is synthesized)
cgcgcgctccaggccggtcgctccaccccccggctcccgggactgtggactccacgaccctgtcctcggccctgtccgcgccgaagcagcccgggactgcgcagcgccccgcgtgccgat

SEQ ID NO: 156826 - DNA, 120 bp, Artificial Sequence
  ENSG00000106460_1 (sequence is synthesized)
gcagcgccccgcgtgccgatcttttcctaattcagcagcgatttaaccaagagcctggaatattttaaggagtaataagagacatttacaaactattctctctgaagcctgctacctgga

SEQ ID NO: 156827 - DNA, 120 bp, Artificial Sequence
  ENSG00000106460_2 (sequence is synthesized)
ataatcagaaccttggcttccacatcctcctcccttgtcttaactacaaacatttctttctgctgacttcaactcctcagacatgggaaagtctctttctcatttgcctttgcattcaag

SEQ ID NO: 156828 - DNA, 120 bp, Artificial Sequence
  ENSG00000106460_3 (sequence is synthesized)
caaagaagatgcttatgatggagtcacatctgaaaacatgaggaatggactggttaatagtgaagtccataatgaagatggaagaaatggagatgtctctcagtttccatatgtggaatt

SEQ ID NO: 156829 - DNA, 120 bp, Artificial Sequence
  ENSG00000106460_4 (sequence is synthesized)
tacaggaagagatagtgtcacctgccctacttgtcagggaacaggaagaattcctagggggcaagaaaaccaactggtggcattgattccatatagtgatcagagattaaggccaagaag

SEQ ID NO: 156830 - DNA, 120 bp, Artificial Sequence
  ENSG00000106460_5 (sequence is synthesized)
aacaaagctgtatgtgatggcttctgtgtttgtctgtctactcctttctggattggctgtgtttttccttttccctcgctctatcgacgtgaaatacattggtgtaaaatcagcctatgt

SEQ ID NO: 156831 - DNA, 120 bp, Artificial Sequence
  ENSG00000106460_6 (sequence is synthesized)
cagttatgatgttcagaagcgtacaatttatttaaatatcacaaacacactaaatataacaaacaataactattactctgtcgaagttgaaaacatcactgcccaagttcaattttcaaa

SEQ ID NO: 156832 - DNA, 120 bp, Artificial Sequence
  ENSG00000106460_7 (sequence is synthesized)
aacagttattggaaaggcacgcttaaacaacataaccattattggtccacttgatatgaaacaaattgattacacagtacctaccgttatagcagaggaaatgagttatatgtatgattt

SEQ ID NO: 156833 - DNA, 120 bp, Artificial Sequence
  ENSG00000106460_8 (sequence is synthesized)
ctgtactctgatatccatcaaagtgcataacatagtactcatgatgcaagttactgtgacaacaacatactttggccactctgaacagatatcccaggagaggtatcagtatgtcgactg

SEQ ID NO: 156834 - DNA, 120 bp, Artificial Sequence
  ENSG00000106460_9 (sequence is synthesized)
tggaagaaacacaacttatcagttggggcagtctgaatatttaaatgtacttcagccacaacagtaaaaactggaagagatggatttaaagaagaaatatctattgatatttcctatact

SEQ ID NO: 156835 - DNA, 120 bp, Artificial Sequence
  ENSG00000106460_10 (sequence is synthesized)
ctcaatgaagaggtatttcctaataggagaccttaaattgaacaaacctaaagtttacacttctaagagtacagttaaaagtatgtggacctgcagttcttgtaactctccactctgtgt

SEQ ID NO: 156836 - DNA, 120 bp, Artificial Sequence
  ENSG00000106460_11 (sequence is synthesized)
taatgatatatttgtactaggatcttttacttgaatctaaatttactggttgatttccttctccagcctatcccctacagggaaaagctgatacttcccctatagtacaataaataatta

SEQ ID NO: 156837 - DNA, 120 bp, Artificial Sequence
  ENSG00000106460_12 (sequence is synthesized)
tttaaaagtcatagctccagtcactactgaaaacataattttggtgataaacataatttgagaaacttaatttctgaatgtttttatagaaaattactgaaagtctattactcatggaag

SEQ ID NO: 156838 - DNA, 120 bp, Artificial Sequence
  ENSG00000106460_13 (sequence is synthesized)
acttttaaagaataaccttttttcctgttttataaattcccattgttatatggtagtatttcagctacacaatattttagcttttagctagacatttatagcttttcatttgttgaaatg

SEQ ID NO: 156839 - DNA, 120 bp, Artificial Sequence
  ENSG00000106460_14 (sequence is synthesized)
gtaatcatctgcatgtttttgtcacttatttcaggttagtgattgcctaacacttataagccaaaataatctttgcaaaattccatacctaaaattttgaaagcccctaatgttttcaca

SEQ ID NO: 156840 - DNA, 120 bp, Artificial Sequence
  ENSG00000106460_15 (sequence is synthesized)
catctttctgtattagttatagttttgtgaaatctttgtgtgatcttcaaacattatcatttaatgtacaatactgtaaataaactgtgcatggcttttatacagctttagtaaatgtca

SEQ ID NO: 156841 - DNA, 120 bp, Artificial Sequence
  ENSG00000106460_16 (sequence is synthesized)
aataaagtggtacagactcattacaacaagtttctcataaaaatacaataaataggaaaatgaaattcagaaacccatagactgggaataggttccagttacagcttggatctggcataa

SEQ ID NO: 156842 - DNA, 120 bp, Artificial Sequence
  ENSG00000106460_17 (sequence is synthesized)
aataaatttgaaataaaatattttgatgctccatttttttatgttgcttttcatactaaagaatggtgtagacatgttttgcaactgttaggtacccagttatcaattttatcaatgttt

SEQ ID NO: 156843 - DNA, 120 bp, Artificial Sequence
  ENSG00000106460_18 (sequence is synthesized)
tagaggaggaaattatttttttggtagaaattgttcaagaaatccttaattgaatgtcattaaatgatggtggccaaaataaaacctatttagaaatttaatcactttgcacatcacttg

SEQ ID NO: 156844 - DNA, 120 bp, Artificial Sequence
  ENSG00000106460_19 (sequence is synthesized)
gaatatgatgcctctagtagttacttttttatagttttctacttttggttttatttaaaattgttttcaaatatagattattgacttattcaactttgctgttttatattttcagtatca

SEQ ID NO: 156845 - DNA, 120 bp, Artificial Sequence
  ENSG00000106460_20 (sequence is synthesized)
tcatttttttttttttttgtcttttcacttaccaagttctagggacatttaaaatatgtactaagtgtaggagtggttatgataccaaaaaatgtagctgggttgagattaatttcgttc

SEQ ID NO: 156846 - DNA, 120 bp, Artificial Sequence
  ENSG00000106460_21 (sequence is synthesized)
gttctgttttctcatgacagaaatcaggtttccctttccccacccctaagtgcctaacttaggtctgaaacagcctgtttattagtctgactctctcaaccataaaacataagctttatt

SEQ ID NO: 156847 - DNA, 120 bp, Artificial Sequence
  ENSG00000106460_22 (sequence is synthesized)
taattctgcctttaaacacactcaggtttccccttaattttcatattattttctgcaagttttcttgagtatcttcaattcgttgaatgtggtttttggtttttttttgttttaacacta

SEQ ID NO: 156848 - DNA, 120 bp, Artificial Sequence
  ENSG00000106460_23 (sequence is synthesized)
gtcttcccttaattcattgctaactcaagccatccttactattaaacccaaatcagtcctttaagttcattatggcctttctagtatttaaaaaaaaaaaaatcattttcatttttcttc

SEQ ID NO: 156849 - DNA, 120 bp, Artificial Sequence
  ENSG00000106460_24 (sequence is synthesized)
tgctacgtttcctgactactactgcatacttctctgatacaggttctgtttgtattttttatatcattctcattttctcatttgacatgatctatgtctatatatgatataggtcccctt

SEQ ID NO: 156850 - DNA, 120 bp, Artificial Sequence
  ENSG00000106460_25 (sequence is synthesized)
ttgtctcaaaatttttaattatgtgacttcaaaaatcacctgtatctgtagtagggcttccaaatctgcttctccatatgtgaccagtcacctgtctgctttcacatttagctagtgaac

SEQ ID NO: 156851 - DNA, 120 bp, Artificial Sequence
  ENSG00000106460_26 (sequence is synthesized)
tacacatttactaaaatgtgtaaattttacacatttagtgactgtgtaaaataaaaaaaaagttattttatcatatcctttctattatgttcccatcctgtcctcatgtcccatttactt

SEQ ID NO: 156852 - DNA, 120 bp, Artificial Sequence
  ENSG00000106460_27 (sequence is synthesized)
tattatcaccattcatttcttcaaaattatcttttagatacgctcatacaaaaatcaatccttgttttcttgcttgtgtcttttaaccttggaaaattacatcgtgtaaattaaacagat

SEQ ID NO: 156853 - DNA, 120 bp, Artificial Sequence
  ENSG00000106460_28 (sequence is synthesized)
ttttctgatgatctgtgcttcttatatactattagagtgcatgatagtatctcctgaaaaggatggaaagtagaagcatttgcttttagtcacttaattttgaatcttttttcttcatct

SEQ ID NO: 156854 - DNA, 120 bp, Artificial Sequence
  ENSG00000106460_29 (sequence is synthesized)
tttgaattaattttttttattatatctacttttagtggagtttgagtcagaaaaaaacaagaatttgaaacaagtaaaaagatagaagagaaataaagatggtatgtgactactttcaga

SEQ ID NO: 156855 - DNA, 120 bp, Artificial Sequence
  ENSG00000106460_30 (sequence is synthesized)
gagagttaagtaactgtcagaataagcctggaacaaaacaggctgtaaattaataaaactacaaacacacattcaggtgaagcagaagtatagccataaaacatctagaaagagtgaatg

SEQ ID NO: 156856 - DNA, 120 bp, Artificial Sequence
  ENSG00000106460_31 (sequence is synthesized)
aggcttttagcttttcttaggtcaatgtccagtgtgcttttttccatgggaataggataggtattaatacgcttttctaaactgctctcagaccttatccagaggacatggtaaagatat

SEQ ID NO: 156857 - DNA, 120 bp, Artificial Sequence
  ENSG00000106460_32 (sequence is synthesized)
gttacagaaatttttctgatacttcctggaataactttaagttacaccctagtagactggtcattctaataaaatccagtactataacaaacctctgtatgttgatagcacattggccct

SEQ ID NO: 156858 - DNA, 120 bp, Artificial Sequence
  ENSG00000106460_33 (sequence is synthesized)
ttttagagttctttcctatgtttttcttacgtgatttcccacagttccatgagtccaacaaaggagagtgataggctccttatcttttagaagaggaaggaaaggcatgaagaagttgag

SEQ ID NO: 156859 - DNA, 120 bp, Artificial Sequence
  ENSG00000106460_34 (sequence is synthesized)
ggactggctgaagatcacgtacttactaagtagtacaactggagcaagatcaagtatctctgtctcccatatctgtgttctatcatttaaaatatatattggaaatccctgctgactcag

SEQ ID NO: 156860 - DNA, 120 bp, Artificial Sequence
  ENSG00000106460_35 (sequence is synthesized)
attggtatgattaaaaatgagaggaaagttcaaatagttagtagtgacaaactaatactgctggactaagattttggtagcattgttttctaaaatattttaaatggagaatgaacactt

SEQ ID NO: 156861 - DNA, 120 bp, Artificial Sequence
  ENSG00000106460_36 (sequence is synthesized)
ataaaatgctttggaacataatctttagcttaattttctgttaaaatttagtaccccttcatcattccaataaagataagactgatccattgtctaaggaaattatttataaataataga

SEQ ID NO: 156862 - DNA, 120 bp, Artificial Sequence
  ENSG00000106460_37 (sequence is synthesized)
tatttgagatttgaaataagaatagtatgaaaatattagataccacataaattgtttgaaattactgaataaccatcttaagtatggaacatttaaatggctatattttatttgtgtaca

SEQ ID NO: 156863 - DNA, 120 bp, Artificial Sequence
  ENSG00000106460_38 (sequence is synthesized)
tgtgtacagtttttctgtgccttgttaggccagtgaagcaattattttctctaagaaaatgacaataaaatataacacacttcagattgtctgatttacagtttggaaaggacaccgcaa

SEQ ID NO: 156864 - DNA, 120 bp, Artificial Sequence
  ENSG00000106460_39 (sequence is synthesized)
tgttcaaataggtaggagaccatcaaaaacacaattaaagtaacatattaggagacttgaaacttcagcctaataaatccttcatggttcttagccttattattgtgatataattctaga

SEQ ID NO: 156865 - DNA, 120 bp, Artificial Sequence
  ENSG00000106460_40 (sequence is synthesized)
tattttcttggagggcatgtgcccaactctcccgcaccccattttgtttgtcttttaaagttcttagaataaacagttctttatataataattatattttatttaagaaaatagtttgtt

SEQ ID NO: 156866 - DNA, 120 bp, Artificial Sequence
  ENSG00000106460_41 (sequence is synthesized)
aggtactttttaaaagatgtaaatttttaaatttacaaatacatatgggtctttgataagcaataggaattgaattacaagttactagggttataagcaaaaggttgcttaccataatgt

SEQ ID NO: 156867 - DNA, 120 bp, Artificial Sequence
  ENSG00000106460_42 (sequence is synthesized)
cattaggtcacgatttttagctcacatctggaagcagcaactacttggctcaagtacatataagagtaattagttttattctctcttttttataaaatcgggtttcagatgagatgttta

SEQ ID NO: 156868 - DNA, 120 bp, Artificial Sequence
  ENSG00000106460_43 (sequence is synthesized)
tcttagactattttagggaaaaattttacatgtttgagatggtggagtaaaaagactgttaaacatttcttttaaaaaattatttttacattacaacaatatatttatgatgtgttcaga

SEQ ID NO: 156869 - DNA, 120 bp, Artificial Sequence
  ENSG00000106460_44 (sequence is synthesized)
tcaaaaatttaacttctgtgtcccagatctactttcaaagtgagattttcacttgtcagcttaaatttctgactagaactaacatttgtgtatttttgtgcttagtcggaatacaaattt

SEQ ID NO: 156870 - DNA, 120 bp, Artificial Sequence
  ENSG00000106460_45 (sequence is synthesized)
cacagtggatttttgaagtttgtccttaaattggataaaatcaagtgattaaagttactaaagagataaaaatggtaatttccatttttaaaagtaatttggttgtgtttatagttattt

SEQ ID NO: 156871 - DNA, 120 bp, Artificial Sequence
  ENSG00000106460_46 (sequence is synthesized)
gtacaagtatttatcacagactctaaattgaaaaatgtagtatgatctatatttgaccctaaaaatgttggattaatttaacaaatatggcagatttttcataactaagtcttaagtctt

SEQ ID NO: 156872 - DNA, 120 bp, Artificial Sequence
  ENSG00000106460_47 (sequence is synthesized)
ctaaaaggaagctgttacccttctgtttttaattacattaattgaaatgtgttttaagagatacaatttcagcatattttatatattaaaaaacaaaaaaggattagtattgagccagtg

SEQ ID NO: 156873 - DNA, 120 bp, Artificial Sequence
  ENSG00000106460_48 (sequence is synthesized)
gccaaaaggtaatattactaccatgtagactgttatagttcaaattgtcccacttcacccagaattttagaaactagaagtctgggaggtactatatcagctgtagttgggtaattccaa

SEQ ID NO: 156874 - DNA, 120 bp, Artificial Sequence
  ENSG00000106460_49 (sequence is synthesized)
gtgctgatagtactattcatcttttttattattgtgtcagatgaaacaaatgccaagttgcaaaatatgcagatttttattatataatggttttaggcataaattattaacaagccatgc

SEQ ID NO: 156875 - DNA, 120 bp, Artificial Sequence
  ENSG00000106460_50 (sequence is synthesized)
cttatgtgtttcatcttatatttttctttagaactaaactataacagattttggaaaatgatttgacgtgcttgctcacttgattgacttggtcagatatttgaatgatggtattaccta

SEQ ID NO: 156876 - DNA, 120 bp, Artificial Sequence
  ENSG00000106460_51 (sequence is synthesized)
gattctaatccttgattctagttatataataaataatatagaatatgaaaatatgtttgggcatttactgtttatattatgtagtagcctccatcatgacacacttactacatttatgaa

SEQ ID NO: 156877 - DNA, 120 bp, Artificial Sequence
  ENSG00000106460_52 (sequence is synthesized)
tagcaaacaaatagaaatgcccccaaaatgctatttttttaattcagttataactgttactcttgtagttgtgtatgacgcaataaaatttgtaaaaaaatttcagcatgaaaaataaaa

SEQ ID NO: 156878 - DNA, 120 bp, Artificial Sequence
  ENSG00000106460_53 (sequence is synthesized)
tttgtatcacttatgtattttggctatgcttttgaaatttccttaacataaacaaatcagtgtagatattcaaaatcttttacctttaatccttttcatccttatagtccttacctgaac

SEQ ID NO: 156879 - DNA, 120 bp, Artificial Sequence
  ENSG00000106460_54 (sequence is synthesized)
tctactttagcattatctttgatttctttttttcattcacttaacttccaatcagtactcaagctttatccattctacctctgtaatgtctctggaatttatctcatacgtgaaatttcc

SEQ ID NO: 156880 - DNA, 120 bp, Artificial Sequence
  ENSG00000106460_55 (sequence is synthesized)
cttgatattatagacataccttggatatattgcaggtttggttccacaccatatcgataaagtgatataatcaagcaagttacacacctttttttggtttcccagtgcatatgaaagtta

SEQ ID NO: 156881 - DNA, 120 bp, Artificial Sequence
  ENSG00000106460_56 (sequence is synthesized)
atatgaaagttatgtttacatcatactgtagtctattaagtgtgcaatagcattatgtcgaaaaacacaatatatatgccttaataaaaaataggctgtgtgcagtggctcacacctgta

SEQ ID NO: 156882 - DNA, 82 bp, Artificial Sequence
  ENSG00000106460_57 (sequence is synthesized)
actttcggaggccaaggtgggaggatcacctgagcccagaagttcaagaccaaattggtcaacatggcgagaccccatataa

SEQ ID NO: 156883 - DNA, 120 bp, Artificial Sequence
  ENSG00000106460_58 (sequence is synthesized)
cacacacactattgctaaaaaatgttaacgatcatctgaatgttcagaagtttatactccttttgccggcacaggatcttgtctggatgttgtttgctgatagatccatgtagtggttac

SEQ ID NO: 156884 - DNA, 120 bp, Artificial Sequence
  ENSG00000106460_59 (sequence is synthesized)
taaagttggggtggctatggcaatttcttaagacaacaatgaagtttatcacatctattgccttgtcctttcatgaaagatgtctctagcatgtgatgctgttttgatagcattttacca

SEQ ID NO: 156885 - DNA, 120 bp, Artificial Sequence
  ENSG00000106460_60 (sequence is synthesized)
atggtaggtcttttttcaaaattggagccagtcctctcaaaccctgcctctgctttatcgaccatgtttaaataattttctaaattctttattgtcatttcagcagtggtctcagcatct

SEQ ID NO: 156886 - DNA, 120 bp, Artificial Sequence
  ENSG00000106460_61 (sequence is synthesized)
tcaccaggagtagattccaactcaagaaaccactttcttagctcattcataagaaacaattcctcatctgttcaagttttggcatcaagttgtagcaattcagtcacatctacagactcc

SEQ ID NO: 156887 - DNA, 120 bp, Artificial Sequence
  ENSG00000106460_62 (sequence is synthesized)
attgctaaattttagttctcttgctatttccacatctgctgtgacttccttcactgaagtcatgaacccctcaaaattatccatgagagttgaaatcaatttctttcaaactcctgttaa

SEQ ID NO: 156888 - DNA, 120 bp, Artificial Sequence
  ENSG00000106460_63 (sequence is synthesized)
ttcaaactcctgttaatgttcatatttagacctcttcccctgaatcacaaatgttgttaatggcatctagaatggcaaatcctttctggaaggtttcaatttactttgcccagatccatc

SEQ ID NO: 156889 - DNA, 120 bp, Artificial Sequence
  ENSG00000106460_64 (sequence is synthesized)
atgacagctatggtcttacaaaatgtatttcttatatagtaagattcaaaagtcaaatttactccctgatccatggctgcagaatgcacgttgtgttaagaggcatgaaaacaacattaa

SEQ ID NO: 156890 - DNA, 120 bp, Artificial Sequence
  ENSG00000106460_65 (sequence is synthesized)
tctatttgtacatcatcagagctgttgggtgaccaggtacattgtcaatgagtagtaatactttgaaaggaatttttttttccaagcaggtctcaacaatgggcttaaaatattcagtga

SEQ ID NO: 156891 - DNA, 120 bp, Artificial Sequence
  ENSG00000106460_66 (sequence is synthesized)
accgtgttgtaaacagatgtcatattatccagactgttccatttattgaacacaggcagagtaggtaaaagttttaagggtcctaggattttcaggatggcaaatgagcattggcttcaa

SEQ ID NO: 156892 - DNA, 120 bp, Artificial Sequence
  ENSG00000106460_67 (sequence is synthesized)
cttaaagtcaccagctacattcaccactaaagagagtcagcctgtcctttaaagctttaaaggcaagcattgacttctctttagctatgaaagttttagatggcacctttttgtaaaaga

SEQ ID NO: 156893 - DNA, 120 bp, Artificial Sequence
  ENSG00000106460_68 (sequence is synthesized)
aggttgttttatctacattgaaaatatattgttcattgtaaccactttcatcaatgatcttagctagatattctgggtaacttactgcaggttctccatcagcacttactgcttcacctt

SEQ ID NO: 156894 - DNA, 120 bp, Artificial Sequence
  ENSG00000106460_69 (sequence is synthesized)
gcacttttatattatggaaacaacttatctccttaaacatcattaaccaacctcttggtagcttccaacttttcttcaatagcttcctcatctctctcagccttcatagaattgaagcgt

SEQ ID NO: 156895 - DNA, 120 bp, Artificial Sequence
  ENSG00000106460_70 (sequence is synthesized)
gttagggctttgttcaggattaggctttcacttaaggcaatgttgtggctggtttgatctattgaaaccactaaaacattcccatatcggcaataaggctgtttgattttcttatcattc

SEQ ID NO: 156896 - DNA, 83 bp, Artificial Sequence
  ENSG00000106460_71 (sequence is synthesized)
acttcacaacttgtgcaagagacctagctttcagcctatcttgactttccaagattgtccttggtgagaaatgcttgattact

SEQ ID NO: 156897 - DNA, 120 bp, Artificial Sequence
  ENSG00000106460_72 (sequence is synthesized)
actttccaagattgtccttggtgagaaatgcttgattactaggtgtaattatttctagcttttgattgaaagtgagagatatgtgactcttccttttacttgaacagttagaggctattg

SEQ ID NO: 156898 - DNA, 120 bp, Artificial Sequence
  ENSG00000106460_73 (sequence is synthesized)
taggattattaattggcctaatttcaatgttattttgtctcaaggagagagggatgtgggaacagctggttaggagagcagtccgaacacacacttttttttattactttcactgcctta

SEQ ID NO: 156899 - DNA, 120 bp, Artificial Sequence
  ENSG00000106460_74 (sequence is synthesized)
catgggtatggttcatgctgcctccaaatacttacaaaaacatcaaagatcactgattacagatcattaaaataggtttaataataatggaaacatttgaaatattgcaaaaattaccaa

SEQ ID NO: 156900 - DNA, 120 bp, Artificial Sequence
  ENSG00000106460_75 (sequence is synthesized)
aatgcgacagagacatgaaatgagaacatgctgttgaaaaaaatggcactcatagacttgttggacacaggattgaaagaaaccaattcatcaaaaccacaatatctgcaaaacgcaata

SEQ ID NO: 156901 - DNA, 120 bp, Artificial Sequence
  ENSG00000106460_76 (sequence is synthesized)
aggtgatgcacaataaaaggaagtatatctgcacttccttcttttttactgaaaaagcccaagttcttactctggtgttgagaacctttcattagctggctacaatctcagttcacaatc

SEQ ID NO: 156902 - DNA, 120 bp, Artificial Sequence
  ENSG00000106460_77 (sequence is synthesized)
atttcttattgcccttcaacaatgtcctgaccaaatcgagttctttctcattgggaacagttcattcctttatcccttcgctcattctgttccttttttcttagaaaaattatttgccca

SEQ ID NO: 156903 - DNA, 120 bp, Artificial Sequence
  ENSG00000106460_78 (sequence is synthesized)
tgttttttatcccccaattctatctttttcaatgcccacttcgtgtccaacccctctctactttccctctaaacttactcaaacacttggtgaactttttctgaatgttttttctgaatg

SEQ ID NO: 156904 - DNA, 120 bp, Artificial Sequence
  ENSG00000106460_79 (sequence is synthesized)
tttacttttaaaggagttgcccagtcacaaagtttgagccaagtttttttgttttaaacttgttttaaacttttgttttcatcaacttttttcaaacaatttttgtcagcttagaggttg

SEQ ID NO: 156905 - DNA, 120 bp, Artificial Sequence
  ENSG00000106460_80 (sequence is synthesized)
tgttttaattactatttttaaaatcttgtatgaggtagtatgatttgaaattagatggaatgtgcccaaaattatctctgtagaataatatggaaaaacgaaaatgaaaagatgtattac

SEQ ID NO: 156906 - DNA, 120 bp, Artificial Sequence
  ENSG00000106460_81 (sequence is synthesized)
ctgaatgtgctcctcctagccagtttctcaagggagaagaatcattaataagtttgtgaggctttttttttttttctggtagatttctgtttccttgatcagtggtttttcagaattttt

SEQ ID NO: 156907 - DNA, 120 bp, Artificial Sequence
  ENSG00000106460_82 (sequence is synthesized)
taaagcttgtgaaatacttatttgtaaatagcatcttatgaggaaccttgatatgtgacaaaacagatgctttgatttgagagcagaagacctgcagcccctgactgctcacctttccag

SEQ ID NO: 156908 - DNA, 120 bp, Artificial Sequence
  ENSG00000106460_83 (sequence is synthesized)
ggacccctgaacattggcctagagggtagtgtacagtcacttcttcagtgataacttactgagtgtgattcaacaaaactgctttggtttatgggtgaaacataatttataactaggcaa

SEQ ID NO: 156909 - DNA, 120 bp, Artificial Sequence
  ENSG00000106460_84 (sequence is synthesized)
atgtcagcttaaatttatattttctaaatagcactgaaaatgacaatagacaaatgtaatttctgatttttaagaaatgattttccattttaacatacattttaaatgttttgtcttcaa

SEQ ID NO: 156910 - DNA, 120 bp, Artificial Sequence
  ENSG00000106460_85 (sequence is synthesized)
agggaatccttaaaaatgatatattggaaaccactgatttcttattttcatttcatgaatttcagattcatgaatggaatatattgataatagcattttttaagttgccccaaaaagatg

SEQ ID NO: 156911 - DNA, 120 bp, Artificial Sequence
  ENSG00000106460_86 (sequence is synthesized)
tgataatagcattttttaagttgccccaaaaagatgaaatacaaataattttaatcccaaatctatttcagacacctaactttttttttattttttatactttaagttctaggatacatg

SEQ ID NO: 156912 - DNA, 88 bp, Artificial Sequence
  ENSG00000106460_87 (sequence is synthesized)
tgatgttcccctccctgtgtccatcgcaacatgtgctgtttggttttctgttcctgtgtgtgtttgctgagaatgatggtttccagct

SEQ ID NO: 156913 - DNA, 61 bp, Artificial Sequence
  ENSG00000106460_88 (sequence is synthesized)
tatgtgtctttacagtaaaatgatttataatcttttgggtatacacccagtaatgggattg

SEQ ID NO: 156914 - DNA, 87 bp, Artificial Sequence
  ENSG00000106460_89 (sequence is synthesized)
tcaccacactgtcttccacaatggttgcaatttacactcccaccaacagtgtgtaaaagcttcctatttctctaatgattgccattc

SEQ ID NO: 156915 - DNA, 120 bp, Artificial Sequence
  ENSG00000106460_90 (sequence is synthesized)
tacccttctttaacaaaatcaagtttcaagttttctgccttgttgataacttgttaacatttttttattttagaataaatctaaacagagaccacactgatatctgtaacaacctatgta

SEQ ID NO: 156916 - DNA, 120 bp, Artificial Sequence
  ENSG00000106460_91 (sequence is synthesized)
aagttaagattaaggttaaatcacatttttcacagagagtgttttactgaaatataaacttttatgcatctgatattatctaattgtgtccttactgggtaacttgtgtatttttcaagt

SEQ ID NO: 156917 - DNA, 120 bp, Artificial Sequence
  ENSG00000106460_92 (sequence is synthesized)
taaaggatttcctaaaaatgcttatttgaatatttatgtcatttgtcacacatactttcaaaacataaccttcttcaacgagtatcttcttttccttcctaaaatactgttaatagctgg

SEQ ID NO: 156918 - DNA, 120 bp, Artificial Sequence
  ENSG00000106460_93 (sequence is synthesized)
ctattttgtaagcctgtatctggtttaaaaaaaagaagtgaatattttcaatacttatgaaccatagaattctgtattcttttcataacttttaacttttccataggacctatcactatg

SEQ ID NO: 156919 - DNA, 120 bp, Artificial Sequence
  ENSG00000106460_94 (sequence is synthesized)
taaaatattatacatatctactgatttatttattgcctatgtacctatactagaacatagtaaacatgagaacagggaatcttggttattaattcctgcaggactcaactacttatcact

SEQ ID NO: 156920 - DNA, 120 bp, Artificial Sequence
  ENSG00000106460_95 (sequence is synthesized)
cactcaaacatttgttcttgaaaagaacttcgtataacatcattagatttttacagaatctttaaaaaagctttaatattttcaaggttttttatttatataaatattgttactttacca

SEQ ID NO: 156921 - DNA, 120 bp, Artificial Sequence
  ENSG00000106460_96 (sequence is synthesized)
tgatttcaatagtggcattgtcacatgattcaagaagaggaggccattacattactgttgtattaaaaagtcagttcaggcttaatatatatgactactataagtcaacctcacatttta

SEQ ID NO: 156922 - DNA, 120 bp, Artificial Sequence
  ENSG00000106460_97 (sequence is synthesized)
atgtatgaagaagattgtatgaacgatcacattaattcatttaaatagtatgtattttgatactaatttttaagaagaaatgtatcattctcatggaaataaaagataatttgaaaagca

SEQ ID NO: 156923 - DNA, 120 bp, Artificial Sequence
  ENSG00000106460_98 (sequence is synthesized)
agaagtagtgaaagactacgtgactgctaagtagtgaatctggatgtcacaagagttcaggaaaatggaaaggatacagggaactgagccccacatccaattccttactcccttgacaaa

SEQ ID NO: 156924 - DNA, 120 bp, Artificial Sequence
  ENSG00000106460_99 (sequence is synthesized)
tagtcattaacagtaataagaatattattggtttgtaaattgggtgttatctaagccaataaaacattgttgattataggtttggtgttttgaccattagctgacatttgattaaccttt

SEQ ID NO: 156925 - DNA, 120 bp, Artificial Sequence
  ENSG00000106460_100 (sequence is synthesized)
gaagaattcctaggggatggagtttccccatgtttcccaggatgatgtcgaattcttgggctcaagcgatcatccagccttggcctcccaaagtgttagaattacagctgtgagccacca

SEQ ID NO: 156926 - DNA, 120 bp, Artificial Sequence
  ENSG00000106460_101 (sequence is synthesized)
cgcctggccaacctaatatttttaattcattatctaaagaagaagaataagctggctgtgccctaatgagttaaagaaactctgtgaagagggatgggcaagaaaaccaactggtggcat

SEQ ID NO: 156927 - DNA, 120 bp, Artificial Sequence
  ENSG00000106460_102 (sequence is synthesized)
ctttttattgtcaaataatgaagtgtataaaataaagtataaagagtatacatattttttaatttccgttatcagtcaaaaagagtacattatgtagtattctggcttctggtcctctct

SEQ ID NO: 156928 - DNA, 120 bp, Artificial Sequence
  ENSG00000106460_103 (sequence is synthesized)
tcctctctgttcctctttttcaacatatataatattcatgtatatatacacataaaatttgtttttttatttatttttcagaattagggttataccatgtcactttatttttcattacta

SEQ ID NO: 156929 - DNA, 120 bp, Artificial Sequence
  ENSG00000106460_104 (sequence is synthesized)
tgttaaacttgttactatgttaaaataattataaattttcatcatcttttgaataagcgtagatacagacttttagggtaaataacaacctagttatcaaaatttcagaagatgagcaaa

SEQ ID NO: 156930 - DNA, 120 bp, Artificial Sequence
  ENSG00000106460_105 (sequence is synthesized)
atatataagtaatttatagcctgcatttaaacaaccctgcaactgcagtggcatgaatacatacatgtttttcgagtaagaagtcatgaatatatcagtcattgtttgaagtatagaaaa

SEQ ID NO: 156931 - DNA, 120 bp, Artificial Sequence
  ENSG00000106460_106 (sequence is synthesized)
agcgaccccggacgtgcagtccccaggtccccttccggagcgaggctgagcggctgcgccgcggcttgagccgggcctgacaaggaggggaggccgctggggtgctgggccagccgcaga

SEQ ID NO: 156932 - DNA, 120 bp, Artificial Sequence
  ENSG00000106462_0 (sequence is synthesized)
tccggtcgcgtccgacacccggtgggactcagaaggcagtggagccccggcggcggcggcggcggcgcgcgggggcgacgcgcgggaacaacgcgagtcggcgcgcgggacgaagaataa

SEQ ID NO: 156933 - DNA, 120 bp, Artificial Sequence
  ENSG00000106462_1 (sequence is synthesized)
tcatgggccagactgggaagaaatctgagaagggaccagtttgttggcggaagcgtgtaaaatcagagtacatgcgactgagacagctcaagaggttcagacgagctgatgaagtaaaga

SEQ ID NO: 156934 - DNA, 120 bp, Artificial Sequence
  ENSG00000106462_2 (sequence is synthesized)
gtatgtttagttccaatcgtcagaaaattttggaaagaacggaaatcttaaaccaagaatggaaacagcgaaggatacagcctgtgcacatcctgacttctgtgagctcattgcgcggga

SEQ ID NO: 156935 - DNA, 120 bp, Artificial Sequence
  ENSG00000106462_3 (sequence is synthesized)
ctagggagtgttcggtgaccagtgacttggattttccaacacaagtcatcccattaaagactctgaatgcagttgcttcagtacccataatgtattcttggtctcccctacagcagaatt

SEQ ID NO: 156936 - DNA, 120 bp, Artificial Sequence
  ENSG00000106462_4 (sequence is synthesized)
ttatggtggaagatgaaactgttttacataacattccttatatgggagatgaagttttagatcaggatggtactttcattgaagaactaataaaaaattatgatgggaaagtacacgggg

SEQ ID NO: 156937 - DNA, 120 bp, Artificial Sequence
  ENSG00000106462_5 (sequence is synthesized)
atagagaatgtgggtttataaatgatgaaatttttgtggagttggtgaatgcccttggtcaatataatgatgatgacgatgatgatgatggagacgatcctgaagaaagagaagaaaagc

SEQ ID NO: 156938 - DNA, 120 bp, Artificial Sequence
  ENSG00000106462_6 (sequence is synthesized)
agaaagatctggaggatcaccgagatgataaagaaagccgcccacctcggaaatttccttctgataaaatttttgaagccatttcctcaatgtttccagataagggcacagcagaagaac

SEQ ID NO: 156939 - DNA, 120 bp, Artificial Sequence
  ENSG00000106462_7 (sequence is synthesized)
taaaggaaaaatataaagaactcaccgaacagcagctcccaggcgcacttcctcctgaatgtacccccaacatagatggaccaaatgctaaatctgttcagagagagcaaagcttacact

SEQ ID NO: 156940 - DNA, 120 bp, Artificial Sequence
  ENSG00000106462_8 (sequence is synthesized)
cctttcatacgcttttctgtaggcgatgttttaaatatgactgcttcctacatcgtaagtgcaattattcttttcatgcaacacccaacacttataagcggaagaacacagaaacagctc

SEQ ID NO: 156941 - DNA, 120 bp, Artificial Sequence
  ENSG00000106462_9 (sequence is synthesized)
tagacaacaaaccttgtggaccacagtgttaccagcatttggagggagcaaaggagtttgctgctgctctcaccgctgagcggataaagaccccaccaaaacgtccaggaggccgcagaa

SEQ ID NO: 156942 - DNA, 120 bp, Artificial Sequence
  ENSG00000106462_10 (sequence is synthesized)
aaagaagaagaagagaagaaagatgaaacttcgagctcctctgaagcaaattctcggtgtcaaacaccaataaagatgaagccaaatattgaacctcctgagaatgtggagtggagtggt

SEQ ID NO: 156943 - DNA, 120 bp, Artificial Sequence
  ENSG00000106462_11 (sequence is synthesized)
gctgaagcctcaatgtttagagtcctcattggcacttactatgacaatttctgtgccattgctaggttaattgggaccaaaacatgtagacaggtgtatgagtttagagtcaaagaatct

SEQ ID NO: 156944 - DNA, 120 bp, Artificial Sequence
  ENSG00000106462_12 (sequence is synthesized)
agcatcatagctccagctcccgctgaggatgtggatactcctccaaggaaaaagaagaggaaacaccggttgtgggctgcacactgcagaaagatacagctgaaaaaggacggctcctct

SEQ ID NO: 156945 - DNA, 120 bp, Artificial Sequence
  ENSG00000106462_13 (sequence is synthesized)
aaccatgtttacaactatcaaccctgtgatcatccacggcagccttgtgacagttcgtgcccttgtgtgatagcacaaaatttttgtgaaaagttttgtcaatgtagttcagagtgtcaa

SEQ ID NO: 156946 - DNA, 120 bp, Artificial Sequence
  ENSG00000106462_14 (sequence is synthesized)
aaccgctttccgggatgccgctgcaaagcacagtgcaacaccaagcagtgcccgtgctacctggctgtccgagagtgtgaccctgacctctgtcttacttgtggagccgctgaccattgg

SEQ ID NO: 156947 - DNA, 120 bp, Artificial Sequence
  ENSG00000106462_15 (sequence is synthesized)
gacagtaaaaatgtgtcctgcaagaactgcagtattcagcggggctccaaaaagcatctattgctggcaccatctgacgtggcaggctgggggatttttatcaaagatcctgtgcagaaa

SEQ ID NO: 156948 - DNA, 120 bp, Artificial Sequence
  ENSG00000106462_16 (sequence is synthesized)
aatgaattcatctcagaatactgtggagagattatttctcaagatgaagctgacagaagagggaaagtgtatgataaatacatgtgcagctttctgttcaacttgaacaatgattttgtg

SEQ ID NO: 156949 - DNA, 120 bp, Artificial Sequence
  ENSG00000106462_17 (sequence is synthesized)
gtggatgcaacccgcaagggtaacaaaattcgttttgcaaatcattcggtaaatccaaactgctatgcaaaagttatgatggttaacggtgatcacaggataggtatttttgccaagaga

SEQ ID NO: 156950 - DNA, 120 bp, Artificial Sequence
  ENSG00000106462_18 (sequence is synthesized)
gccatccagactggcgaagagctgttttttgattacagatacagccaggctgatgccctgaagtatgtcggcatcgaaagagaaatggaaatcccttgacatctgctacctcctcccccc

SEQ ID NO: 156951 - DNA, 120 bp, Artificial Sequence
  ENSG00000106462_19 (sequence is synthesized)
tcctctgaaacagctgccttagcttcaggaacctcgagtactgtgggcaatttagaaaaagaacatgcagtttgaaattctgaatttgcaaagtactgtaagaataatttatagtaatga

SEQ ID NO: 156952 - DNA, 120 bp, Artificial Sequence
  ENSG00000106462_20 (sequence is synthesized)
gtttaaaaatcaactttttattgccttctcaccagctgcaaagtgttttgtaccagtgaatttttgcaataatgcagtatggtacatttttcaactttgaataaagaatacttgaacttg

SEQ ID NO: 156953 - DNA, 120 bp, Artificial Sequence
  ENSG00000106462_21 (sequence is synthesized)
ccaacacttataagcggaagaacacagaaacagctctagacaacaaaccttgtggaccacagtgttaccagcatttgccactcctacctaggaactaaatgggtatatattgcctgttgg

SEQ ID NO: 156954 - DNA, 120 bp, Artificial Sequence
  ENSG00000106462_22 (sequence is synthesized)
gacgacgttcgcggcggggaactcggagtagcttcgcctctgacgtttccccacgacgcaccccgaaatccccctgagctccggcggtcgcgggctgccctcgccgcctggtctggcttt

SEQ ID NO: 156955 - DNA, 120 bp, Artificial Sequence
  ENSG00000106462_23 (sequence is synthesized)
atgctaagtttgagggaagagtcgagctgctctgctctctattgattgtgtttctggagggcgtcctgttgaattcccacttcattgtgtacatccccttccgttccccccaaaaatctg

SEQ ID NO: 156956 - DNA, 120 bp, Artificial Sequence
  ENSG00000106462_24 (sequence is synthesized)
aggatttacagtgatagcttttgttttcattctgtagtctactttgtccccagtccattttcaccctccttttttgatgatgtgattgtgttttattctctagcatctattgctggcacc

SEQ ID NO: 156957 - DNA, 120 bp, Artificial Sequence
  ENSG00000106462_25 (sequence is synthesized)
ctgggaggcagtgagttcctgagttgcatgtggcagccttctgccggccgagtgttcagaaacgagggtagaggtcagtgaggtgaccagaaggaggatctccttagaggcatggggggc

SEQ ID NO: 156958 - DNA, 120 bp, Artificial Sequence
  ENSG00000106462_26 (sequence is synthesized)
cacgtctaataactgggttttactgttctgtgaaagttcgtgttgtgaggattaaggatgtataatgcattgaataattttcttagttggttagtttcagtataaagaccagagttatct

SEQ ID NO: 156959 - DNA, 120 bp, Artificial Sequence
  ENSG00000106462_27 (sequence is synthesized)
caagaatgtgtagctgtgttgtttctgtttcctgcctgcacccgtaccctagcttgtggtgtttgccctgcttggttgtttgaaagctgatgatgcactttattctcattctttgtgcca

SEQ ID NO: 156960 - DNA, 120 bp, Artificial Sequence
  ENSG00000106462_28 (sequence is synthesized)
ttttcttttttcgatctttctcaggtagggaataatgaaatttggatcatttggtttaatattcttgacgttctgtgagtagttttgttggaaaatgtgaactacgatgggttagtgttt

SEQ ID NO: 156961 - DNA, 120 bp, Artificial Sequence
  ENSG00000106462_29 (sequence is synthesized)
gtagacaggtaagatatccgataaaaatgttgttaaaagagcttcaaacatagagataaaactgtactcgttgtccaaacaaagaaaattcttggttattactaagctcctattcatctc

SEQ ID NO: 156962 - DNA, 120 bp, Artificial Sequence
  ENSG00000106462_30 (sequence is synthesized)
ctaaaaataatttttttttcttcccaagagggaattgaatgaaaattattctccaggtatgttacagaatttccccaatgtagacttttaaggttagatagcagtagcttttaaaagcta

SEQ ID NO: 156963 - DNA, 120 bp, Artificial Sequence
  ENSG00000106462_31 (sequence is synthesized)
gtaagaattgaaatttagcatcacagttcttgaccagaatataattacagctacccctaatgtgagggtagggacagcgatgtgtgttatatccccagcatctagcagtgtcacagaaga

SEQ ID NO: 156964 - DNA, 120 bp, Artificial Sequence
  ENSG00000106462_32 (sequence is synthesized)
cttttttcttaagcacaccctgaattgtacttcttaatattatttccaatcatttcttgaccagtgcttacatttggttttgtagaagcaaattctcggtgtcaaacaccaataaagatg

SEQ ID NO: 156965 - DNA, 120 bp, Artificial Sequence
  ENSG00000106462_33 (sequence is synthesized)
tgcgggcggcccggccggcggggctccgggagtgcgaaccgggcggcggcggcggcgccaggacctccccgccactgctgtgccggtcccggggttactttttgaaagcgggaggaatcg

SEQ ID NO: 156966 - DNA, 120 bp, Artificial Sequence
  ENSG00000106477_0 (sequence is synthesized)
agaggcaacccgtgaggctagaaccccgaacgtggtcggttggagaaaatatgtccctccggaggcacattgggaaccctgagtatctgatgaaaaggataccacagaacccaagatacc

SEQ ID NO: 156967 - DNA, 120 bp, Artificial Sequence
  ENSG00000106477_1 (sequence is synthesized)
agcatatcaaatcaagactggacactggtaacagtatgactaaatatactgagaagctcgaagagattaagaaaaattatagatacaaaaaagatgagcttttcaagagactaaaagtta

SEQ ID NO: 156968 - DNA, 120 bp, Artificial Sequence
  ENSG00000106477_2 (sequence is synthesized)
caacttttgcccagctgatcatccaagttgcttccctctctgatcaaacactggaagtgacagctgaggagattcaaaggctggaagacaatgattctgcagcttcagaccctgatgctg

SEQ ID NO: 156969 - DNA, 120 bp, Artificial Sequence
  ENSG00000106477_3 (sequence is synthesized)
aaaccactgccaggaccaatgggaaaggaaatccaggtgagcagtcgccgagccctgagcagttcataaacaacgcaggagcaggggactccagccgctcaactcttcagagtgtcatca

SEQ ID NO: 156970 - DNA, 120 bp, Artificial Sequence
  ENSG00000106477_4 (sequence is synthesized)
gtggtgttggggaactggatctagacaaagggccagtgaagaaagcagagccccataccaaagacaaaccttatcctgactgccccttcctgctgctagatgtgcgtgatagagattctt

SEQ ID NO: 156971 - DNA, 120 bp, Artificial Sequence
  ENSG00000106477_5 (sequence is synthesized)
accagcagtgccacattgttggagcttacagttacccaattgcaactctgtctagaacaatgaacccttattcaaatgatattcttgaatataaaaatgcccatggcaagatcatcattc

SEQ ID NO: 156972 - DNA, 120 bp, Artificial Sequence
  ENSG00000106477_6 (sequence is synthesized)
tgtatgacgatgatgaaaggctggccagtcaggcggccaccaccatgtgcgagcgtggatttgaaaacctcttcatgctttccggaggtctaaaagtcttagctcagaaattcccggaag

SEQ ID NO: 156973 - DNA, 120 bp, Artificial Sequence
  ENSG00000106477_7 (sequence is synthesized)
gactgattactggttccctgccagcatcttgccagcaggcccttcctcctgggtctgcccggaaacgatccagccccaaagggccacccctaccagctgagaataaatggagatttaccc

SEQ ID NO: 156974 - DNA, 120 bp, Artificial Sequence
  ENSG00000106477_8 (sequence is synthesized)
cagaagacttaaaaaagatagaatattatctggaagaggagcaagggcctgcagatcatcctagccgactgaaccaagctaactcctccggaagagagtccaaggtgcctggtgcccgaa

SEQ ID NO: 156975 - DNA, 120 bp, Artificial Sequence
  ENSG00000106477_9 (sequence is synthesized)
gcgctcagaatctgccaggtggcggccccgccagccactcaaacccccgctccctcagcagtggtcacctgcaaggcaaaccctggaagtaaagactttgtctcacttaggcaaataaat

SEQ ID NO: 156976 - DNA, 120 bp, Artificial Sequence
  ENSG00000106477_10 (sequence is synthesized)
gttcttcctcttttcagaacccctgagcatttcccaagttgggtcatttccagaaacttctgcagaggaaagaccatgacatatgtatgggataggcctcttccctgtccctgtctccag

SEQ ID NO: 156977 - DNA, 120 bp, Artificial Sequence
  ENSG00000106477_11 (sequence is synthesized)
ttcctctcccctcaggaggccacctcaggaaggattttgacaggtgaccataaaaaccagaggtgtgacaggctctagtctcctccctgttgtttacagcatatttaagtcttgtgaaac

SEQ ID NO: 156978 - DNA, 120 bp, Artificial Sequence
  ENSG00000106477_12 (sequence is synthesized)
ttttagtttttttgttttgtttttttttaataaggtccagcttgttgggtctctctgtgttgttttgtaaatacttcagtcacatctgcccgtgtgcctgtccctgccaccttttcattc

SEQ ID NO: 156979 - DNA, 120 bp, Artificial Sequence
  ENSG00000106477_13 (sequence is synthesized)
cctgtccctgccaccttttcattcactgttcttgacttcatgaaggcttctccgggcagtcttggtgtgagaagctgtttccaagggtgcagatgagccttaggttccagccgcctgcag

SEQ ID NO: 156980 - DNA, 120 bp, Artificial Sequence
  ENSG00000106477_14 (sequence is synthesized)
accccaccccagcaggctcactcagcaaggagctctctgcccagcatattgcaggccctgttttgagtatggaagccagtgcctgtgtactcactgaaattgaagatgaggaaagtagct

SEQ ID NO: 156981 - DNA, 120 bp, Artificial Sequence
  ENSG00000106477_15 (sequence is synthesized)
gtacactcactgaatgctcccccttactagatatttcctggagccagaaaggtatgcatgtgggtgtcttcacaccggggaggagggcctctcatgggaaagccctggccaccacaccgg

SEQ ID NO: 156982 - DNA, 120 bp, Artificial Sequence
  ENSG00000106477_16 (sequence is synthesized)
cctgtgccccttgaagcccaccaaagcggccctcacttgtggtcagtatatcagttatgacgcccattgcccagcttcagtccatccatgttagatggacagaaattatggccagttgaa

SEQ ID NO: 156983 - DNA, 120 bp, Artificial Sequence
  ENSG00000106477_17 (sequence is synthesized)
aataccagctttggttggacaactgtggacacacaaggtgaagaggactccgaagtcctttgtcagggctgacaacctcgtaagcccttgcttagaaatacagtattagtctaattgagt

SEQ ID NO: 156984 - DNA, 120 bp, Artificial Sequence
  ENSG00000106477_18 (sequence is synthesized)
aattagtgcaatttcctgcttacttttcattctcatgactgaactgtgattaggaagttgtgattatagattctggttttggccggaattttgaatcagcattaattgaattgctaaatg

SEQ ID NO: 156985 - DNA, 120 bp, Artificial Sequence
  ENSG00000106477_19 (sequence is synthesized)
actgacattcattccatttaattgggggaacaaaaggcctcaggtaaggatgaggaactctgaaatcagatggaaaagagcggtgttaatttttatggtctgtgatcgtagctgtgataa

SEQ ID NO: 156986 - DNA, 120 bp, Artificial Sequence
  ENSG00000106477_20 (sequence is synthesized)
gggactgaggaataaattgtgctctttgtcatggcaaccagcttctgaaaagcccactgaaaattgcctgtcctgctggtaactgctacggggtaagatttgccttaacagtactatttt

SEQ ID NO: 156987 - DNA, 120 bp, Artificial Sequence
  ENSG00000106477_21 (sequence is synthesized)
aaaaaaaaaaaaaaaaaaaatgcaccacagtatttctagcatgggggctgtgtttgtatgagaaataaacgtaataaatatctcatagagacatatggaaaaataactttcagattcagc

SEQ ID NO: 156988 - DNA, 120 bp, Artificial Sequence
  ENSG00000106477_22 (sequence is synthesized)
aactttcagattcagcccagttctgttttagagtgtgtttattcttctctacttgatttccaaagtgcaacattttccgatgctttagaaatcaaacaaaccagggacattgttcagatg

SEQ ID NO: 156989 - DNA, 120 bp, Artificial Sequence
  ENSG00000106477_23 (sequence is synthesized)
tcaagccatgcccaattttccacaagattcaagaatcttgtataaaattcagccaacgtacacatagctttaatgaggagcctgtcatgtttccccataaatttattgcctgagaactta

SEQ ID NO: 156990 - DNA, 120 bp, Artificial Sequence
  ENSG00000106477_24 (sequence is synthesized)
gttcagcctttgctaatgccaaaatgctctggctttgtattttctttacagcatagatagaaaaatgcacatttttccacactcagctttcccctagcatggacaagattttcagccatt

SEQ ID NO: 156991 - DNA, 120 bp, Artificial Sequence
  ENSG00000106477_25 (sequence is synthesized)
tttgccacatatacatttttaaggaaaaaagatttttctctgtaagaaagttctggttatgctgttttaaaggtgacttgtcaggagttgagacttccctgccggattctattttgaaag

SEQ ID NO: 156992 - DNA, 120 bp, Artificial Sequence
  ENSG00000106477_26 (sequence is synthesized)
ttggagtattagaaaccactgtatatatgtggaaagccaggtcagccagacctgttagaattggtgtgcactcacctgagagatctggcaggttggatatatttatgtgtatttctccac

SEQ ID NO: 156993 - DNA, 120 bp, Artificial Sequence
  ENSG00000106477_27 (sequence is synthesized)
agtgcttgctttgccctgttggtaaggattttaaataaccatgctcaaaagagctgttctaatctgcgttttgcatgttaagtgttaatatcaaacattctttacgtgctcgaggtattg

SEQ ID NO: 156994 - DNA, 120 bp, Artificial Sequence
  ENSG00000106477_28 (sequence is synthesized)
cttttaacattctactttgccagtttcttcattagattaattgacatgtattatttaaatgaccagtgatgctttgtgcaattatgaatgttgaagattaaagtacatagttactaattt

SEQ ID NO: 156995 - DNA, 120 bp, Artificial Sequence
  ENSG00000106477_29 (sequence is synthesized)
gtcgtttgctattaatatgctgaaaactgccaacttctctcttcttttctgtcgagatgatttgggggagccacaggagactggtgtgatttttgctgcatctcctaggaaagcattttt

SEQ ID NO: 156996 - DNA, 120 bp, Artificial Sequence
  ENSG00000106477_30 (sequence is synthesized)
taaaaaaaataaatgaatcaggaaatcagtccaattagggcagggggcctcagctctccagtcagaaagcctggatttcttttcctgctcaggctgggactgaagccaccttcaacaact

SEQ ID NO: 156997 - DNA, 120 bp, Artificial Sequence
  ENSG00000106477_31 (sequence is synthesized)
ggatcatggcttcctaccagcgtctcaggggttgactagctgcccttgtctggggcttgtgaaccctgagacagaaggtgcttcatcgatgtacaactacagcaccctgaacagcagtga

SEQ ID NO: 156998 - DNA, 120 bp, Artificial Sequence
  ENSG00000106477_32 (sequence is synthesized)
tggccaaagtttaaataataccttaaatgctttaaaggggtttgtgtttaaggaagggagaaaagaaaaaaagaaaggaagggagaaagaagcaaggaaatgggaagaagggagggcaga

SEQ ID NO: 156999 - DNA, 120 bp, Artificial Sequence
  ENSG00000106477_33 (sequence is synthesized)
gagaagaaaagaagcagaaagcgagagagaaaggagaaagctacattacttatttgaaaacaaaaggaacaccctgggctgtaataatgtcaggctcaatctcttgaaaaagtatggaat

SEQ ID NO: 157000 - DNA, 120 bp, Artificial Sequence
  ENSG00000106477_34 (sequence is synthesized)
tatcttttatctttttttttttttttaacctttagtggttagccaggaccagcacgatcatattgggcttggtataaatccgaatgaaaagagaccaaataacattcattagttgctcag

SEQ ID NO: 157001 - DNA, 120 bp, Artificial Sequence
  ENSG00000106477_35 (sequence is synthesized)
aaataacattcattagttgctcagggatttttcctgtggtgctatttaaattatacaaaaattcttaagactttaggctactcgaccaagaaaacagaacaaaacaaaaaatcgtgtttt

SEQ ID NO: 157002 - DNA, 120 bp, Artificial Sequence
  ENSG00000106477_36 (sequence is synthesized)
ctctaattcccttgtggaatgtaagtgaaatcagagtcctaggctaggaagaaatacgtaggtaatttttcttgtgttggttttggtttctgtcatgttgtttattggctatagattctg

SEQ ID NO: 157003 - DNA, 120 bp, Artificial Sequence
  ENSG00000106477_37 (sequence is synthesized)
tcttttatgttatctgacttttttagagcgaataattagtttctgtccacctggatttaaatccatgaccaccttcttgctctactctgaagataatcagtaagaacctttctttctcca

SEQ ID NO: 157004 - DNA, 120 bp, Artificial Sequence
  ENSG00000106477_38 (sequence is synthesized)
gttctaaaacgttctcagtgtctttaatgtgtgtttattttcttcccaattctttcaaagatttaactcccacgatacttttttttccccaggaaacaccgcaaatgtgtggaatataat

SEQ ID NO: 157005 - DNA, 120 bp, Artificial Sequence
  ENSG00000106477_39 (sequence is synthesized)
tcaccagtttaattatgtgagcatgttgagtacttacatgcaggtccattaatttttcactaacaattattttttcatgcaaaagcaataaataacattgtgcttccaaaatgttcagaa

SEQ ID NO: 157006 - DNA, 120 bp, Artificial Sequence
  ENSG00000106477_40 (sequence is synthesized)
tacatttgggtagtaatactttcctagatttacaataattattgaaattattattatgacatctttaaatggatacacaggtcagttacaacataaaaaatgtaatggtggaaatttgtc

SEQ ID NO: 157007 - DNA, 120 bp, Artificial Sequence
  ENSG00000106477_41 (sequence is synthesized)
agccttgaattcaggcagaacaggattcggtgcatgattttatgtgttttcgaaacggtgtctgtcacattgtgatcccctgatggctcccctctctgttgctgatcctctttgttctgt

SEQ ID NO: 157008 - DNA, 120 bp, Artificial Sequence
  ENSG00000106477_42 (sequence is synthesized)
acagaagcaaattctcacctgtgtaacatcctgaagcacctggtaaaatgtgaggcaaagagaggccacttctcaaatgctgtggacggatgggctgcatcttttaaaggatatcaatat

SEQ ID NO: 157009 - DNA, 120 bp, Artificial Sequence
  ENSG00000106477_43 (sequence is synthesized)
gtcttcctgttgcaattattttgactataagctcccagagagtgaaaatcaccaaccctgtgacagtggcccttaataagtgttcatgaataaatgaattgaacctgtcaagattgaagt

SEQ ID NO: 157010 - DNA, 120 bp, Artificial Sequence
  ENSG00000106477_44 (sequence is synthesized)
ttggatgtgatgcccactgtggtggccactcagtgctagtctgtcattctggagacccagaaagctcgttatcttctgtcccccttgtgtatcctgcctttgtgggcgaggcattcaaaa

SEQ ID NO: 157011 - DNA, 120 bp, Artificial Sequence
  ENSG00000106477_45 (sequence is synthesized)
ccctgaggtttttagatctccctctacaggaagtacccagagagctgctgggggtgttattaccctgtctctgccaggcttaaagtatcctcccaaattcagcacgcaaaggtcacacac

SEQ ID NO: 157012 - DNA, 120 bp, Artificial Sequence
  ENSG00000106477_46 (sequence is synthesized)
cacccccatcttaagagtaggttttctcttttgtttcaaatcttgaagatttccagaaaataataatactagccaatgtttgtggagagcttactttgctcctagattcttcattatatg

SEQ ID NO: 157013 - DNA, 120 bp, Artificial Sequence
  ENSG00000106477_47 (sequence is synthesized)
ttttgacccatttaatttccacaacagtctgatgaggcaggcacccccattttcagatgaggagactgaggttcgggtagaaattaagtgactcaggtttgccttcagtctctgaccaag

SEQ ID NO: 157014 - DNA, 120 bp, Artificial Sequence
  ENSG00000106477_48 (sequence is synthesized)
ggtttgaaaagccaggagccagcctgagaactgtggctccagagggtgttctttcagccactccgctctatgcttctcactctgggtgggcacaaccatgttctcctttggtgatgcctc

SEQ ID NO: 157015 - DNA, 120 bp, Artificial Sequence
  ENSG00000106477_49 (sequence is synthesized)
taacttaccgtgaaaatgtacctttcccttcgctattggcttcccttccctcctagtcagccgagattcttttgaaaactttcctccgcttgcctgcacaaaaggcgatggaaattcagg

SEQ ID NO: 157016 - DNA, 120 bp, Artificial Sequence
  ENSG00000106477_50 (sequence is synthesized)
aactgaaacatctgctctggggaatgcgtatttccacatttccaccgcctgtgtctgctgtcttatcttgaagacaggtgctccagggcttccgaggttattttgtctgttaatggacac

SEQ ID NO: 157017 - DNA, 120 bp, Artificial Sequence
  ENSG00000106477_51 (sequence is synthesized)
cttgcaaagtaccacttaaggaatgagaattacaaacttttaattatattgtagggggaaaaaagtaggctgttttcctgataggtctagccattcattcagtaaaccatattgatatga

SEQ ID NO: 157018 - DNA, 120 bp, Artificial Sequence
  ENSG00000106477_52 (sequence is synthesized)
ttctatttcttcatctgtaaaatggggattgtaatatttactttccagggtcatagggataagagagctaaaggatgtaaagtccggaactagtgctgtcttttagatcatggtaacatc

SEQ ID NO: 157019 - DNA, 120 bp, Artificial Sequence
  ENSG00000106477_53 (sequence is synthesized)
agtttgcaaaagaaacgaataccagcttgtgtggtttccatgatgggaaaccatccagtccctgctggtgtgacggtaggaatgggcttgtccatcgttcccgggaactcagacaggtgg

SEQ ID NO: 157020 - DNA, 120 bp, Artificial Sequence
  ENSG00000106477_54 (sequence is synthesized)
ttccgccgcccggaaggcgggaaggggccggcgtgaggaggggtcgggatgcaggggcggggcgggccgggcttgggggccgcggggcagcgttcaggaccccgttttgaggagcgatct

SEQ ID NO: 157021 - DNA, 120 bp, Artificial Sequence
  ENSG00000106477_55 (sequence is synthesized)
ctccccgcgtacgcacgccagtacttgtgactgcgaggagcgaagtacccaaagacacagcccttgccctcaaatggcttacagtctcggagtgacagttacaaaacagaaaagacaaag

SEQ ID NO: 157022 - DNA, 120 bp, Artificial Sequence
  ENSG00000106477_56 (sequence is synthesized)
gtgctcagaattcagtgttctggaaagagaaaaagccatgctggctgaaaggagtcaggagttatgtgaaacttcccttagcttcatcagcacatgtttttaattcctgatgttgcttca

SEQ ID NO: 157023 - DNA, 120 bp, Artificial Sequence
  ENSG00000106477_57 (sequence is synthesized)
gggctctgtcacaaagccctaatgctgaagactcgagcaaaaggatttcttgtggaattctcagaatcccatgtaacaacagatattttctggtataatttgcttaatgatgaaatagtt

SEQ ID NO: 157024 - DNA, 120 bp, Artificial Sequence
  ENSG00000106477_58 (sequence is synthesized)
aagaaagatttcatgtccttgtgttggcctcaacttgatgaccagagattagaagacatgcaggcttctttccaggttttggcctggccttgccatattaatgcagctttttctgatgat

SEQ ID NO: 157025 - DNA, 120 bp, Artificial Sequence
  ENSG00000106477_59 (sequence is synthesized)
cttgtttcttctgccacaaaaaccctcagctctttcatctctacccatctaacccctaattgcaactgtgatccacccttctgaagtaagtgattctgtgaggtaacagtatgactaaat

SEQ ID NO: 157026 - DNA, 120 bp, Artificial Sequence
  ENSG00000106477_60 (sequence is synthesized)
gtgtatcttccccacaaaaagatcgtcagcgggggcaggggagataaaaggaggaggaaagcctagacttgaaaaacaaactgatagaaaatgatcatctgtatctcctggaacttgtca

SEQ ID NO: 157027 - DNA, 120 bp, Artificial Sequence
  ENSG00000106477_61 (sequence is synthesized)
agagaacaaaaggcctcgctagccggcgtcccgcgttgcccttggcaaccattgagcggcgtcttgcccttctgcgaccctgagatgagagagtaaacggggcccccattggccggccgg

SEQ ID NO: 157028 - DNA, 120 bp, Artificial Sequence
  ENSG00000106477_62 (sequence is synthesized)
cagctccccagcactgccagactgtgccatgaatggattatgcttctgatgaaatccctggctgcgttttgttcagtcaccaccgcagggttcttgtatattctcaagcaccctctctgg

SEQ ID NO: 157029 - DNA, 120 bp, Artificial Sequence
  ENSG00000106477_63 (sequence is synthesized)
gtttctgttttgcagcactgcaggctgattaagggacactttccaaaccacagggctctccctttattagtccccacagtctttcattggctgcattgtcctcccatttctatctatatt

SEQ ID NO: 157030 - DNA, 120 bp, Artificial Sequence
  ENSG00000106477_64 (sequence is synthesized)
caatctaatttccaatttctttagctttctgaaattctgtaggctttctccactcagtcttttctagccttatttttgtctttttaaaaattcaccttccttttattatctctagacaaa

SEQ ID NO: 157031 - DNA, 120 bp, Artificial Sequence
  ENSG00000106477_65 (sequence is synthesized)
ctattcattccctcttttcttctttaggctttacttttcctgaatatttgctaatagccttgactgtaagcatcaaactcattatagactaggtactcttcatttttatttgttgtttaa

SEQ ID NO: 157032 - DNA, 120 bp, Artificial Sequence
  ENSG00000106477_66 (sequence is synthesized)
ttctgtttcttccgtcaaaggaagaaatatatgtgaaaggcttttataaaccagaaagcactatacacacatatcacttattgaggttaacaaaggaccactgtgcctcttttcatgctt

SEQ ID NO: 157033 - DNA, 120 bp, Artificial Sequence
  ENSG00000106477_67 (sequence is synthesized)
tctgctcttccaagccaagagaacttctccatagaggagggaaatattgaagaaaaataaagccatggagttgtctcttagcaactgagttcgtgccttataaatctcatctactttaga

SEQ ID NO: 157034 - DNA, 120 bp, Artificial Sequence
  ENSG00000106477_68 (sequence is synthesized)
ttactgctgcacaaaatcacttgcttttcttattggctcagtataaataatgttattaaattataggaaaacaatggaaaaaatctaatgaatgactcattcactgaatcagttgcactc

SEQ ID NO: 157035 - DNA, 120 bp, Artificial Sequence
  ENSG00000106477_69 (sequence is synthesized)
tgtgtttgcacagcactgttgctatagtcgggttgtttcttcctcttgattctaattgtaaagttttgttatatatcttttatcacaactttagttgtaagtaaacaaagtagaagctaa

SEQ ID NO: 157036 - DNA, 120 bp, Artificial Sequence
  ENSG00000106477_70 (sequence is synthesized)
atgctaccttatacatttataggttgcttaagtcgtgaagcaatatgagtcatatatgtagcacataacatatactgtatataagtcaagttgtacatagtttaaagaaaatcaggtgtg

SEQ ID NO: 157037 - DNA, 120 bp, Artificial Sequence
  ENSG00000106477_71 (sequence is synthesized)
cagaaactcagaccaaattgggaagtatttgcattataaaataactcattataaggatttttcagttagtagatctccatagtaaatttcattcagcaaatgtgtatttttcctatttat

SEQ ID NO: 157038 - DNA, 87 bp, Artificial Sequence
  ENSG00000106477_72 (sequence is synthesized)
gcgtgagccactgtgccaggtctagttatttatttatttattgtagagatgggctctcactggagcaatccttccacctcagtctcc

SEQ ID NO: 157039 - DNA, 86 bp, Artificial Sequence
  ENSG00000106477_73 (sequence is synthesized)
gcattgtagtgcagtggcgcattcttgctcactgcaacctccccttcctgggctcaggggatcctcctacctcagcctctcaagta

SEQ ID NO: 157040 - DNA, 120 bp, Artificial Sequence
  ENSG00000106477_74 (sequence is synthesized)
gcctctcaagtagctgggactacagggatgtgccaccatgcctggctagtttttgtgtatgtgtgtgttttgtagagacgaggtctcactattttgcccaggctggtccggaactcctgg

SEQ ID NO: 157041 - DNA, 120 bp, Artificial Sequence
  ENSG00000106477_75 (sequence is synthesized)
ctgggctcaagcaatcctgcctcctcagcctcccaacgtgctgggattgcaggcatgatccagtgcacctgaccatcattcagcaagtatttttgagtgtctcctatgctagacaatgga

SEQ ID NO: 157042 - DNA, 120 bp, Artificial Sequence
  ENSG00000106477_76 (sequence is synthesized)
agggataaagattattcatacgtgtgtgtgtgtgtgtgtgtgtacgtgcccataaatagtccttggctttctgtctagtaaggtaggtaagacaatacagtgataaatgccttgtgagtt

SEQ ID NO: 157043 - DNA, 120 bp, Artificial Sequence
  ENSG00000106477_77 (sequence is synthesized)
gtaagccgagtgctatagaggctcagaggagggaaaggtcacttcctgctgagtgagctcttacgagtatgtggcaaggtgatacgttagagaatgcaagactaagagtttgtcaagtta

SEQ ID NO: 157044 - DNA, 120 bp, Artificial Sequence
  ENSG00000106477_78 (sequence is synthesized)
agtaattaaggcaacattaagaggtagtgagttggtgtccagtgctagagcaaggagtttcagctttagttaggaagcaatggggagccactgacttttttttttctttttgatcaaaaa

SEQ ID NO: 157045 - DNA, 120 bp, Artificial Sequence
  ENSG00000106477_79 (sequence is synthesized)
gtcttatctgggaaaatgtatctggcagtaatgtgtaatttcaattttttttaaaaaaaattggttcttggatagtcttttaggcttcttttgtatgaaacaaagccatgtttataaata

SEQ ID NO: 157046 - DNA, 120 bp, Artificial Sequence
  ENSG00000106477_80 (sequence is synthesized)
agtgaattatgaaatggattcatttccaatctttttaaaaggtagtcagaaactatcttcagatgcaattagatacagtaagataggctgcatagttaagatgtaagcagtttacacagt

SEQ ID NO: 157047 - DNA, 120 bp, Artificial Sequence
  ENSG00000106477_81 (sequence is synthesized)
gggataaaaatgctacttttcatactttctcaaaccatttttaggggtatttttgtgtcagccatcctgctatctcatttgtccaattaaagcaaggaagaaatcctccattctcctttt

SEQ ID NO: 157048 - DNA, 120 bp, Artificial Sequence
  ENSG00000106477_82 (sequence is synthesized)
ttccccattcttggatagaatgaatgtctatagtgaaaagaactcatcagtagtcctctcagatttggtctgaatttcaccaaatatttgtataattgcaaaaaacttgtttctcagcct

SEQ ID NO: 157049 - DNA, 120 bp, Artificial Sequence
  ENSG00000106477_83 (sequence is synthesized)
tctcctttagggggaaaacaaatagagggcatgatggcctacctccctgcattgtggtgagggtcagctgatacaaaataaagtgttaagtgtaattaccctgaaatgtttgtaattaat

SEQ ID NO: 157050 - DNA, 120 bp, Artificial Sequence
  ENSG00000106477_84 (sequence is synthesized)
ctagtaagatcttttgacctttaaagataatgtttggtttgcagctttgaatatcacctcatcatatgaaaaccttcatctcttatatttagattcttaaaatactagggaggtatgtta

SEQ ID NO: 157051 - DNA, 120 bp, Artificial Sequence
  ENSG00000106477_85 (sequence is synthesized)
gtatgttacaggtgctggggaggggaggcagtggaggtgaccccagatagtggcaagaattacgcattgaagagagactttatcaaaacatagcgactttttttttttttgagacagagt

SEQ ID NO: 157052 - DNA, 120 bp, Artificial Sequence
  ENSG00000106477_86 (sequence is synthesized)
acaggcatgagccaccacgcccaggcaaaaatgtagagacttcatcaaaaagtatatctcaggtaaaattgaggagttaagcatcagaccttcagattccttcttggaaagttttcgatt

SEQ ID NO: 157053 - DNA, 120 bp, Artificial Sequence
  ENSG00000106477_87 (sequence is synthesized)
ccttctgcagcttttgcttctccactctgagagcctctgtggtttgtcttcctaccttagtttcaccgtactgctttctcttttctttccccaaatcactcctcgtctgcatcctctcta

SEQ ID NO: 157054 - DNA, 120 bp, Artificial Sequence
  ENSG00000106477_88 (sequence is synthesized)
ccaaggaagtagtggaggacagactaggtttgttggggatgttggagaggaagggaaaaaaaacctatctgggtttcccttcatttctgtccccctccccaccttcaggctgatctcaag

SEQ ID NO: 157055 - DNA, 120 bp, Artificial Sequence
  ENSG00000106477_89 (sequence is synthesized)
gatgaggagtaggccatcgttggcctaaagtagatactgcataggacttcattagcttaaaagtggttgtaggctaggacttcattagcttaaaactgtacttggcagattgtccctgga

SEQ ID NO: 157056 - DNA, 120 bp, Artificial Sequence
  ENSG00000106477_90 (sequence is synthesized)
atttgtgccactttatgtatttctaaattcaactctagggaaagtttgcagaggagtttcttctgattctttgtatgtcgttcagctatgggaagattaattggtatgtggtgtgtgtgt

SEQ ID NO: 157057 - DNA, 120 bp, Artificial Sequence
  ENSG00000106477_91 (sequence is synthesized)
gtcattcagacatttccatgccgtacagatatttatccttgcaaatatcccacttgatgggcaggtgaaaatattatctctgtcttagaagaggaaattgtggcacggggattttgtgat

SEQ ID NO: 157058 - DNA, 120 bp, Artificial Sequence
  ENSG00000106477_92 (sequence is synthesized)
ttattcggagttcaataaaggagagagaactaggattatatacaggatgaggaagtcaatattggagatctggtgccaagtctggtgtactgtttcttaggccgtactgttcctgtattt

SEQ ID NO: 157059 - DNA, 120 bp, Artificial Sequence
  ENSG00000106477_93 (sequence is synthesized)
cccccaagccttgtttcttctgccacaaaaaccctcagctctttcatctctacccatctaacccctaattgcaactgtgatccacccttctgaagtaacagtatgactaaatatactgag

SEQ ID NO: 157060 - DNA, 120 bp, Artificial Sequence
  ENSG00000106477_94 (sequence is synthesized)
agaattgagggtgtggggaaaataacaggctgaccatttgactgaaacactcaccctgtacacatttgctgtctgttcccagggactgggactttgatgtatctatttgtaattagattg

SEQ ID NO: 157061 - DNA, 120 bp, Artificial Sequence
  ENSG00000106477_95 (sequence is synthesized)
ttactctcagggaaatgctacctgatactttagttgttaattcttattttaaaaagccatctggttttctgactctaacacttacagttttaaatgttttagatgtgtttaatatactaa

SEQ ID NO: 157062 - DNA, 120 bp, Artificial Sequence
  ENSG00000106479_0 (sequence is synthesized)
agtgaccgtaaagctgttcgctcggtgcgacgcaagtctcagctcagcgcgcttatcctgggtccaccggcgctaccgccccccgacgtgagagagcgaagttcttgggccgcgctccct

SEQ ID NO: 157063 - DNA, 120 bp, Artificial Sequence
  ENSG00000106479_1 (sequence is synthesized)
tgagagagcgaagttcttgggccgcgctccctccctacctgggtgccctccccctccgggagcctgggtccccggggcggtcgcggcggctgcatcctcaggccaggccgcggggggagg

SEQ ID NO: 157064 - DNA, 120 bp, Artificial Sequence
  ENSG00000106479_2 (sequence is synthesized)
gagcccagagagtcggggaaggctcctgtgacgtttgatgacatcactgtgtacttactccaggaggaatgggtgctgctgagccagcaacagaaggagctctgtggttccaacaagctg

SEQ ID NO: 157065 - DNA, 120 bp, Artificial Sequence
  ENSG00000106479_3 (sequence is synthesized)
gtggcaccactgggaccaactgttgccaatcctgagctgttccgcaagttcggacgagggccagagccatggcttggcagcgtccagggccagaggagccttctggagcatcacccagga

SEQ ID NO: 157066 - DNA, 120 bp, Artificial Sequence
  ENSG00000106479_4 (sequence is synthesized)
aaaaaacagatgggctacatgggagaaatggaggtgcaaggtcccaccagggagagtggacagtccctcccgcctcagaagaaagcctacctttcccacctcagtacaggcagtggacac

SEQ ID NO: 157067 - DNA, 120 bp, Artificial Sequence
  ENSG00000106479_5 (sequence is synthesized)
atcgagggagactgggccggaagaaacaggaaacttctgaagccccggtccatccagaagtcgtggtttgtgcagtttccgtggctgatcatgaatgaggagcagacggctctgttctgc

SEQ ID NO: 157068 - DNA, 120 bp, Artificial Sequence
  ENSG00000106479_6 (sequence is synthesized)
tctgcttgccgagaatacccctccatcagggacaaacggtcaagactaatagaaggttatacaggaccattcaaggtggagactctcaaataccacgcgaagagcaaggcccacatgttc

SEQ ID NO: 157069 - DNA, 120 bp, Artificial Sequence
  ENSG00000106479_7 (sequence is synthesized)
tgtgtcaatgccttggcagcgagggaccccatctgggcagcccggttccggagcatcagagacccacctggagatgttctggccagcccggagccgctcttcactgcagattgccccata

SEQ ID NO: 157070 - DNA, 120 bp, Artificial Sequence
  ENSG00000106479_8 (sequence is synthesized)
ttctaccccccagggcctctgggaggatttgatagcatggctgagctcctgccaagttcaagagctgaactagaggaccctgggggggatggagcaattcctgcaatgtatctagactgc

SEQ ID NO: 157071 - DNA, 120 bp, Artificial Sequence
  ENSG00000106479_9 (sequence is synthesized)
atttcagatttgaggcaaaaagaaatcactgatggcatccacagctcctcagacattaatattttatataatgatgcagtagaatcctgcattcaggacccttctgcagaggggctgtcg

SEQ ID NO: 157072 - DNA, 120 bp, Artificial Sequence
  ENSG00000106479_10 (sequence is synthesized)
gaggaggttcctgtggtgtttgaggagctgccggtggtgttcgaggatgtggcagtgtatttcacccgggaggagtggggcatgctagacaagcggcagaaggagctgtacagagacgtg

SEQ ID NO: 157073 - DNA, 120 bp, Artificial Sequence
  ENSG00000106479_11 (sequence is synthesized)
atgcggatgaactacgagctgttggcatccttgggacctgccgctgccaagccagacttgatctccaaactggagcggagggctgcaccctggatcaaggacccaaatgggccaaagtgg

SEQ ID NO: 157074 - DNA, 120 bp, Artificial Sequence
  ENSG00000106479_12 (sequence is synthesized)
gggaaaggtcgtcctccagggaacaagaagatggtggcagtgagagaggcagacacacaggcctcggctgcagactccgcgttgcttccaggctctcccgtggaggcccgtgcctcctgc

SEQ ID NO: 157075 - DNA, 120 bp, Artificial Sequence
  ENSG00000106479_13 (sequence is synthesized)
tgcagttccagcatttgtgaggaaggagatggacctaggagaatcaagaggacatacaggccccgttccattcagaggtcatggtttgggcagttcccatggttagtaattgaccccaaa

SEQ ID NO: 157076 - DNA, 120 bp, Artificial Sequence
  ENSG00000106479_14 (sequence is synthesized)
gagaccaaactcttctgctcagcctgcatagaaagacctaatctccatgataaatcatctcggttagtcagaggttacacggggccttttaaagtggagactttaaaataccatgaagtc

SEQ ID NO: 157077 - DNA, 120 bp, Artificial Sequence
  ENSG00000106479_15 (sequence is synthesized)
agcaaagcgcacaggctctgtgtcaacacggttgaaatcaaggaagacacccctcacactgccctcgttccagagatctccagcgacctcatggccaacatggagcactttttcaatgcc

SEQ ID NO: 157078 - DNA, 120 bp, Artificial Sequence
  ENSG00000106479_16 (sequence is synthesized)
gcctactccattgcataccactcaaggcccctgaatgactttgagaagatcctgcagctcctccaaagcacggggaccgtgatattaggcaagtaccgcaatcgcacggcgtgcactcag

SEQ ID NO: 157079 - DNA, 120 bp, Artificial Sequence
  ENSG00000106479_17 (sequence is synthesized)
ttcatcaagtacatctcagagaccctgaagagggagatcctggaggacgtgcggaactcgccctgtgtgagcgtgctgctggacagctccaccgacgcctccgagcaggcctgcgtgggg

SEQ ID NO: 157080 - DNA, 120 bp, Artificial Sequence
  ENSG00000106479_18 (sequence is synthesized)
atttacatccgctacttcaagcagatggaggtgaaagagtcctacatcactctggcccctctctacagtgagacagcagatgggtacttcgagaccatcgtttctgccctggatgagctg

SEQ ID NO: 157081 - DNA, 120 bp, Artificial Sequence
  ENSG00000106479_19 (sequence is synthesized)
gacatccccttccggaagcctggctgggtggtggggctggggacggatggctcagccatgttgagctgcagaggaggccttgtggaaaagttccaggaggtcatcccgcagctgctgcct

SEQ ID NO: 157082 - DNA, 120 bp, Artificial Sequence
  ENSG00000106479_20 (sequence is synthesized)
gtccactgcgtggcccaccggctgcacctggctgtggtggacgcctgcgggagcatcgatctggtgaagaagtgtgaccggcacatccgcaccgtcttcaagttttatcagtcctcaaac

SEQ ID NO: 157083 - DNA, 120 bp, Artificial Sequence
  ENSG00000106479_21 (sequence is synthesized)
aagaggctgaacgagctgcaggaaggtgcggcgcctctggagcaggagatcatccgcctgaaggatctgaatgcggtccgctgggtggccagcaggaggcgcacgctgcacgcgctgctc

SEQ ID NO: 157084 - DNA, 120 bp, Artificial Sequence
  ENSG00000106479_22 (sequence is synthesized)
gtgagctggcccgccctggccaggcacctccagagggtggcagaggctgggggccagattgggcaccgggccaaagggatgctgaagctcatgcgcggcttccactttgtcaagttctgc

SEQ ID NO: 157085 - DNA, 120 bp, Artificial Sequence
  ENSG00000106479_23 (sequence is synthesized)
cacttcctgttggacttcctgagcatctacaggcctctgtccgaggtgtgccagaaggagatcgtgctgattacagaggtgaacgccacgctgggccgcgcctacgtggcactggagagc

SEQ ID NO: 157086 - DNA, 120 bp, Artificial Sequence
  ENSG00000106479_24 (sequence is synthesized)
ctccgtcaccaggcagggcccaaagaggaagaattcaacgccagcttcaaggatgggcggctccacggcatctgcttggacaaactggaggtagcggaacagcggttccaggcggatagg

SEQ ID NO: 157087 - DNA, 120 bp, Artificial Sequence
  ENSG00000106479_25 (sequence is synthesized)
gagaggacagtcctgacggggattgagtacctccagcagaggtttgacgcagaccgacccccacagctgaagaacatggaggtgtttgacaccatggcctggccaagtgggattgaactt

SEQ ID NO: 157088 - DNA, 120 bp, Artificial Sequence
  ENSG00000106479_26 (sequence is synthesized)
gccagttttgggaatgatgacattctcaacctggccaggtatttcgagtgctccctcccaacaggatacagtgaggaagctctgctggaggagtggctgggcctgaaaaccattgcccag

SEQ ID NO: 157089 - DNA, 120 bp, Artificial Sequence
  ENSG00000106479_27 (sequence is synthesized)
cacctcccgttctccatgctctgcaaaaacgccctggcccagcactgccgcttccccctgctaagcaagctcatggccgtggtggtctgtgtgcccatctccacctcttgctgtgagcgg

SEQ ID NO: 157090 - DNA, 120 bp, Artificial Sequence
  ENSG00000106479_28 (sequence is synthesized)
acggagtacgacccccagcccgccatccagcactggtacctgacctcctcaggccggcgtttcagccatgtctacacctgtgcccaggtgccagcccgctcccctgcaagcgccaggctc

SEQ ID NO: 157091 - DNA, 120 bp, Artificial Sequence
  ENSG00000106479_29 (sequence is synthesized)
aggaaggaggagatgggagccctctatgtggaggagcccaggacccagaagccacccatcctgccctccagggaagcagcggaggttctgaaggactgcatcatggagcctcccgagaga

SEQ ID NO: 157092 - DNA, 120 bp, Artificial Sequence
  ENSG00000106479_30 (sequence is synthesized)
ctcctgtatccccacaccagccaggaggcccccgggatgtcctgagggacagggagtccttgggactgccttggagacgcctctgtgatcactgggacaggctctgcagattctaggctg

SEQ ID NO: 157093 - DNA, 120 bp, Artificial Sequence
  ENSG00000106479_31 (sequence is synthesized)
ccctaggatcttctgctggtggcgatggtctctaagcaccaggaagtgggcagtggcatcccagagcagcaggggtatcaggaggtgcatgacctgtttcctgaggccccactcagcaca

SEQ ID NO: 157094 - DNA, 120 bp, Artificial Sequence
  ENSG00000106479_32 (sequence is synthesized)
gccatgcctcacagcacacaaatgtgccagaaggttctatatctcaagttcatttttaaggtgctgcagaaaataaccccatcatgaaaggtttcagcccctgagttttggtggcaagag

SEQ ID NO: 157095 - DNA, 120 bp, Artificial Sequence
  ENSG00000106479_33 (sequence is synthesized)
gagtgtcctggtaggggagactgttggacatccctggggaatgttccagggaggctgcccacagtctaagtgggaatgggaaagaccaccttgttagagggggaggttgcccctgctcta

SEQ ID NO: 157096 - DNA, 120 bp, Artificial Sequence
  ENSG00000106479_34 (sequence is synthesized)
gggacagctggcctggctgcaagagcccccagaggcattgttctgggacttcctaccctggctcccacagcagaagcagtgaggccgtggtctcgtgcggaactctacctcttcccaggg

SEQ ID NO: 157097 - DNA, 120 bp, Artificial Sequence
  ENSG00000106479_35 (sequence is synthesized)
cttcctttagggcgaaacaatcacaagccctttgcacagagcacccaagaaagttctcttcctgcagctccagatggtggagctgggctcttctggcagggggtctggtgcttcccggag

SEQ ID NO: 157098 - DNA, 120 bp, Artificial Sequence
  ENSG00000106479_36 (sequence is synthesized)
agccgagccgcgtttaacccgtggcatgcccggcccggtttacccaggagaggatgggacgaagttggagttgggaggcttgggatgcagccccagctctgctgcaggcagtggtctgat

SEQ ID NO: 157099 - DNA, 120 bp, Artificial Sequence
  ENSG00000106479_37 (sequence is synthesized)
taatcccttcctctttgtgcctcagtttccctctccatgaagtggcagcagagatccaagtgcctgctgactccccatctgccctaggattagtgaatgagagcctcgagctccctcaaa

SEQ ID NO: 157100 - DNA, 120 bp, Artificial Sequence
  ENSG00000106479_38 (sequence is synthesized)
gacctctggctgcagtgtggacttagctgccatctgccccatcctcgtccttagtgggacaggtaggaatttgtctccaaagtccttgttgtaggagttgctctctgaatgcaccatctg

SEQ ID NO: 157101 - DNA, 120 bp, Artificial Sequence
  ENSG00000106479_39 (sequence is synthesized)
cacgacaggctagtccactcttctctgagctgccctggggactctgcaccaggatctccagggcccactgagacatccccgaatgggcgctcagtgacaagggctttgaacaacctcctc

SEQ ID NO: 157102 - DNA, 120 bp, Artificial Sequence
  ENSG00000106479_40 (sequence is synthesized)
cagggactttgggcctgctctagcttcagaaccacagaaccaccgccctagaggcacagaggggcttctggcactgctaggttcacaccctcctcgccccgatcttccttccacctaaag

SEQ ID NO: 157103 - DNA, 120 bp, Artificial Sequence
  ENSG00000106479_41 (sequence is synthesized)
tgaagcacttttccttccaagggcagctccgtcttggcaggctcaggaggccgcttatcaggaggaggatgattttgtctaggttctgccttccttaaccatgggcaggaaatgaggcaa

SEQ ID NO: 157104 - DNA, 120 bp, Artificial Sequence
  ENSG00000106479_42 (sequence is synthesized)
gtcagcaggcagggtttctctgccctgcctgatacttgttttaaacaggcaggaagtgggcgccatccatcccagcttgcttgctgcctggctcaggcaggtcctgtgctgtgctgcagg

SEQ ID NO: 157105 - DNA, 120 bp, Artificial Sequence
  ENSG00000106479_43 (sequence is synthesized)
cccctgtgggtgggccctttctccatagtctgccgcttcccattcccagggtagatgctggcatctgagcacctgagtacccttcctattcccagggtagaagctgctgtctgagtaccc

SEQ ID NO: 157106 - DNA, 120 bp, Artificial Sequence
  ENSG00000106479_44 (sequence is synthesized)
ttcccattcccagggtagatgctggcatctgagcacctgagtacccttcctattcccagggtagaagctgctgtctgagtacccttcccattcccagggtagatgctggcgtccgagccc

SEQ ID NO: 157107 - DNA, 120 bp, Artificial Sequence
  ENSG00000106479_45 (sequence is synthesized)
ctccctggtaccgcaggtaccctggtaccccacctgccctttcatccccaccccagtacttagccttagcactgttgctttcgtgtcattttcagttctagtcaggaattcctttcttgc

SEQ ID NO: 157108 - DNA, 120 bp, Artificial Sequence
  ENSG00000106479_46 (sequence is synthesized)
tttctgcctttgacctgtggaaatgtctcccagccctgtgggtctggcggtcagagggaccccacaggcctgtggtgcgggagctctgggaggtgttactatctgcgtggctaaggcaca

SEQ ID NO: 157109 - DNA, 120 bp, Artificial Sequence
  ENSG00000106479_47 (sequence is synthesized)
cacaggcctccttctccccatcaccgtctccatgggcgttcaggaacttgcccaggtcaggcactgtggatgtgaactcgtggaaagggagggagaaaggcttttttaggtggggctata

SEQ ID NO: 157110 - DNA, 120 bp, Artificial Sequence
  ENSG00000106479_48 (sequence is synthesized)
gcctctgccctacccacagggattccacatcaaggtgctgttccagcacacatgcttcctgcggcctcttcatccttgaagaatccctcagagcaggaggccatcctgtgagcagccgtg

SEQ ID NO: 157111 - DNA, 120 bp, Artificial Sequence
  ENSG00000106479_49 (sequence is synthesized)
agtgggtctctgtgggagtagttctggagctgaggtggaagctaggggaagcaactcgccctctccacgtcagcatcagcgtgctccgaggacaccggccagtgccttccttaggtggtg

SEQ ID NO: 157112 - DNA, 120 bp, Artificial Sequence
  ENSG00000106479_50 (sequence is synthesized)
ggaaaggggggtccctgtgcagcggggccactgagaatgctgtttgtcataaaatttgcactacccgatttctcaaggggcacaggcctgctccgttcccctttgtcagccaatggccaa

SEQ ID NO: 157113 - DNA, 120 bp, Artificial Sequence
  ENSG00000106479_51 (sequence is synthesized)
gaaggaagaagatgactgccatcttattcctgaacttcctcattcaggacccccgtggaaacacagtgagcatccttatcagaggccctggcccaggctggcccctttgctttgtttgga

SEQ ID NO: 157114 - DNA, 120 bp, Artificial Sequence
  ENSG00000106479_52 (sequence is synthesized)
gaggctggctgagtttcagcccctagtgctggagacccccttgttggagaggcttcctgtttatgcctcacaagaagaaaaaccacagggctctgggaggggaagaagcatgcactcccg

SEQ ID NO: 157115 - DNA, 120 bp, Artificial Sequence
  ENSG00000106479_53 (sequence is synthesized)
ctttggctggagtcccagcgcttgtcgccaccctcctccttgcctgtagtcttgacagcatccgtatgtacgtgtcctggcatttcccctccctctccctgatgactgatacccaccggg

SEQ ID NO: 157116 - DNA, 120 bp, Artificial Sequence
  ENSG00000106479_54 (sequence is synthesized)
tctgacattccaagtaaccagtatgtaactggtagtttgatcccaatagccatagcgactccaggtgggagtgagggagcccagccccctgtcctggaagataccttagagtatgtgacc

SEQ ID NO: 157117 - DNA, 120 bp, Artificial Sequence
  ENSG00000106479_55 (sequence is synthesized)
gcgctccagacccttgcttctctctcctgcagaggatgagtttctagggtgctaagtacctatcagaacagtgtggaggggcgggtccctcatacaggtgtgtgcttagccaaatacagt

SEQ ID NO: 157118 - DNA, 120 bp, Artificial Sequence
  ENSG00000106479_56 (sequence is synthesized)
aactgtgactggcccagggatgttctctcctctattttcaaagatgaaaggaggttttaaaaaccatgtttgattcctaaccttttgctacctgaataaagcagagtctatttcaacaca

SEQ ID NO: 157119 - DNA, 120 bp, Artificial Sequence
  ENSG00000106479_57 (sequence is synthesized)
ctttactccacctgtctgctcgatcccgtatctaccttaattgcatgcaaattcacacatcaccctttctcttctccccttaaaatggtcaagagaagtggggcaatctggcaggcctgg

SEQ ID NO: 157120 - DNA, 120 bp, Artificial Sequence
  ENSG00000106479_58 (sequence is synthesized)
gctagactcctgggtctgtctcctggtgcctcagaatgccccaaggggccgggagggaaactcggaaactaggcctgtggatctgtggagcccgtaggacactggaggtaggaagcagtg

SEQ ID NO: 157121 - DNA, 120 bp, Artificial Sequence
  ENSG00000106479_59 (sequence is synthesized)
cttgtggttatcttcccattcctgccccctccctgtgtgtaggcagagaccgatcctgtcttttgcacctcataactcccctgcttggggtaactgtgctttatcaccttctcatccacc

SEQ ID NO: 157122 - DNA, 120 bp, Artificial Sequence
  ENSG00000106479_60 (sequence is synthesized)
cacctgttcatccattcgtcccccaccaaacattttggagtacctactatgtgccagatgaacacagctgatccatggtctctgctttcaagggcctagcacgtttgtgggagagacaga

SEQ ID NO: 157123 - DNA, 120 bp, Artificial Sequence
  ENSG00000106479_61 (sequence is synthesized)
cattttaataagaaactataaaataatacagtctcccataaaagagcttccagaagagtacccggggctactgaagaagagggatttgatttcctgggcattggtgggaggaatcaggaa

SEQ ID NO: 157124 - DNA, 120 bp, Artificial Sequence
  ENSG00000106479_62 (sequence is synthesized)
gcctttatagagtaggaaatgttttaattgagttcaaaaccaggtggatcagaaggaggaagggcattgagccatgatggaggggacggcctggcagagccacccctatctgtgcagccc

SEQ ID NO: 157125 - DNA, 120 bp, Artificial Sequence
  ENSG00000106479_63 (sequence is synthesized)
cacagtcagagaggctcacaatatccttgacaatgctttccagaaacatccctggtgcccaacttcctggctccttcagtctcagctctgtgactcctctcgatgggcgcaggctggagc

SEQ ID NO: 157126 - DNA, 120 bp, Artificial Sequence
  ENSG00000106479_64 (sequence is synthesized)
cacagcccctggccctcagccattctctttccaggtcatgtgtccgtgtctggctttggaatgaggaagagctggctcctgctctgggggctttcagccggagcaggcagccggaatcac

SEQ ID NO: 157127 - DNA, 120 bp, Artificial Sequence
  ENSG00000106479_65 (sequence is synthesized)
gcccccaaagtgttggattacggcgtgagccactgcacctggcttgccatatctgatgaagtctgttgcttcttcccaaaaagcagccagaaatctcaattacatcccactgttaagaaa

SEQ ID NO: 157128 - DNA, 120 bp, Artificial Sequence
  ENSG00000106483_0 (sequence is synthesized)
ggctgcgctccgagctgcggagtccgggactggagctgcccgggcgggttcgcgccccgaaggctgagagctggcgctgctcgtgccctgtgtgccagacggcggagctccgcggccgga

SEQ ID NO: 157129 - DNA, 120 bp, Artificial Sequence
  ENSG00000106483_1 (sequence is synthesized)
ccccgcggccccgctttgctgccgactggagtttgggggaagaaactctcctgcgccccagaggatttcttcctcggcgaagggacagcgaaagatgagggtggcaggaagagaagggcg

SEQ ID NO: 157130 - DNA, 120 bp, Artificial Sequence
  ENSG00000106483_2 (sequence is synthesized)
ctttctgtctgccggggtcgcagcgcgagagggcagtgccatgttcctctccatcctagtggcgctgtgcctgtggctgcacctggcgctgggcgtgcgcggcgcgccctgcgaggcggt

SEQ ID NO: 157131 - DNA, 120 bp, Artificial Sequence
  ENSG00000106483_3 (sequence is synthesized)
gcgcatccctatgtgccggcacatgccctggaacatcacgcggatgcccaaccacctgcaccacagcacgcaggagaacgccatcctggccatcgagcagtacgaggagctggtggacgt

SEQ ID NO: 157132 - DNA, 120 bp, Artificial Sequence
  ENSG00000106483_4 (sequence is synthesized)
gaactgcagcgccgtgctgcgcttcttcctctgtgccatgtacgcgcccatttgcaccctggagttcctgcacgaccctatcaagccgtgcaagtcggtgtgccaacgcgcgcgcgacga

SEQ ID NO: 157133 - DNA, 120 bp, Artificial Sequence
  ENSG00000106483_5 (sequence is synthesized)
ctgcgagcccctcatgaagatgtacaaccacagctggcccgaaagcctggcctgcgacgagctgcctgtctatgaccgtggcgtgtgcatctcgcctgaagccatcgtcacggacctccc

SEQ ID NO: 157134 - DNA, 120 bp, Artificial Sequence
  ENSG00000106483_6 (sequence is synthesized)
ggaggatgttaagtggatagacatcacaccagacatgatggtacaggaaaggcctcttgatgttgactgtaaacgcctaagccccgatcggtgcaagtgtaaaaaggtgaagccaacttt

SEQ ID NO: 157135 - DNA, 120 bp, Artificial Sequence
  ENSG00000106483_7 (sequence is synthesized)
ggcaacgtatctcagcaaaaactacagctatgttattcatgccaaaataaaagctgtgcagaggagtggctgcaatgaggtcacaacggtggtggatgtaaaagagatcttcaagtcctc

SEQ ID NO: 157136 - DNA, 120 bp, Artificial Sequence
  ENSG00000106483_8 (sequence is synthesized)
atcacccatccctcgaactcaagtcccgctcattacaaattcttcttgccagtgtccacacatcctgccccatcaagatgttctcatcatgtgttacgagtggcgctcaaggatgatgct

SEQ ID NO: 157137 - DNA, 120 bp, Artificial Sequence
  ENSG00000106483_9 (sequence is synthesized)
tcttgaaaattgcttagttgaaaaatggagagatcagcttagtaaaagatccatacagtgggaagagaggctgcaggaacagcggagaacagttcaggacaagaagaaaacagccgggcg

SEQ ID NO: 157138 - DNA, 120 bp, Artificial Sequence
  ENSG00000106483_10 (sequence is synthesized)
caccagtcgtagtaatccccccaaaccaaagggaaagcctcctgctcccaaaccagccagtcccaagaagaacattaaaactaggagtgcccagaagagaacaaacccgaaaagagtgtg

SEQ ID NO: 157139 - DNA, 120 bp, Artificial Sequence
  ENSG00000106483_11 (sequence is synthesized)
ctgcagtgctcttcatagacacatcttgcagcatttttcttaaggctatgcttcagtttttctttgtaagccatcacaagccatagtggtaggtttgccctttggtacagaaggtgagtt

SEQ ID NO: 157140 - DNA, 120 bp, Artificial Sequence
  ENSG00000106483_12 (sequence is synthesized)
aaagctggtggaaaaggcttattgcattgcattcagagtaacctgtgtgcatactctagaagagtagggaaaataatgcttgttacaattcgacctaatatgtgcattgtaaaataaatg

SEQ ID NO: 157141 - DNA, 120 bp, Artificial Sequence
  ENSG00000106483_13 (sequence is synthesized)
ccatatttcaaacaaaacacgtaatttttttacagtatgttttattaccttttgatatctgttgttgcaatgttagtgatgttttaaaatgtgatcgaaaatataatgcttctaagaagg

SEQ ID NO: 157142 - DNA, 120 bp, Artificial Sequence
  ENSG00000106483_14 (sequence is synthesized)
aacagtagtggaatgaatgtctaaaagatctttatgtgtttatggtctgcagaaggatttttgtgatgaaaggggattttttgaaaaatctagagaagtagcatatggaaaactataatg

SEQ ID NO: 157143 - DNA, 120 bp, Artificial Sequence
  ENSG00000106483_15 (sequence is synthesized)
tgtcttttttacaatgacttcagctctgtttttagctagaaactctaaaaacaaaaataataataaagaaaaataaataaaaaggagaggcagacaatgtctggattcctgttttttggt

SEQ ID NO: 157144 - DNA, 120 bp, Artificial Sequence
  ENSG00000106483_16 (sequence is synthesized)
tacctgatttcatgatcatgatgcttcttgtcaacaccctcttaagcagcaccagaaacagtgagtttgtctgtaccattaggagttaggtactaattagttggctaatgctcaagtatt

SEQ ID NO: 157145 - DNA, 120 bp, Artificial Sequence
  ENSG00000106483_17 (sequence is synthesized)
ttatacccacaagagaggtatgtcactcatcttacttcccaggacatccaccctgagaataatttgacaagcttaaaaatggccttcatgtgagtgccaaattttgttttcttcatttaa

SEQ ID NO: 157146 - DNA, 120 bp, Artificial Sequence
  ENSG00000106483_18 (sequence is synthesized)
atattttctttgcctaaatacatgtgagaggagttaaatataaatgtacagagaggaaagttgaggttccacctctgaaatgagaattacttgacagttgggatactttaatcagaaaaa

SEQ ID NO: 157147 - DNA, 120 bp, Artificial Sequence
  ENSG00000106483_19 (sequence is synthesized)
aagaacttatcttgcagcattttatcaacaaatttcataattgtggacaattggaggcatttattttaaaaaacaattttattggccttttgctaacacagtaagcatgtattctctata

SEQ ID NO: 157148 - DNA, 120 bp, Artificial Sequence
  ENSG00000106483_20 (sequence is synthesized)
aggcattcaataaatgcacaacgcccaaaggaaataaaatcctatctaatcctactctccactacacagaggtaatcactattagtattttggcatattattctccaggtgtttcttatg

SEQ ID NO: 157149 - DNA, 120 bp, Artificial Sequence
  ENSG00000106483_21 (sequence is synthesized)
cacttataaaatgatttgaacaaataaaactaggaacctgctatacatgtgtttcataacctgcctcctttgcttggccctttattgagataagttttcctgtcaagaaagcagaaacca

SEQ ID NO: 157150 - DNA, 120 bp, Artificial Sequence
  ENSG00000106483_22 (sequence is synthesized)
tctcatttctaacagctgtgttatattccatagtatgcattactcaacaaactgttgtgctattggatacttaggtggtttcttcactgacaatactgaataaacatctcaatagtcaaa

SEQ ID NO: 157151 - DNA, 120 bp, Artificial Sequence
  ENSG00000106483_23 (sequence is synthesized)
ctgattttcagatttttaaatcatttttatttgtgcacggctttactttcttttcaccattctctggatatgatagctaaaactggactctactccctggatgtgggtagactatgtaag

SEQ ID NO: 157152 - DNA, 120 bp, Artificial Sequence
  ENSG00000106483_24 (sequence is synthesized)
gtctactgtctcctcactatatttaggtacatatctgtcattatgattttccagtctgacatgtaaagagcttggaagtcatcactcatcttctcacaaaaagacaaaaactgaacaaac

SEQ ID NO: 157153 - DNA, 120 bp, Artificial Sequence
  ENSG00000106483_25 (sequence is synthesized)
tgaaaatcaacaactcttcttagaggcatcagataattgagagcagaccgctgctgcaaacactggagagagagtcagatactaagaatcatagtttacaggagctgaagctgaggagca

SEQ ID NO: 157154 - DNA, 120 bp, Artificial Sequence
  ENSG00000106483_26 (sequence is synthesized)
tgttacaaggaggaatgaaaggaaacaccaataaaatataaatggtggatgtgtggattatggggtaaaggattattgaataatttttttacaatttctgtatttttagctgtttacttt

SEQ ID NO: 157155 - DNA, 80 bp, Artificial Sequence
  ENSG00000106484_0 (sequence is synthesized)
tgccgcggcaaccagcacaccccggcacctcctctgcggcagctgcgcctcgcaagcgcagtgccgcagcgcacgccgga

SEQ ID NO: 157156 - DNA, 120 bp, Artificial Sequence
  ENSG00000106484_1 (sequence is synthesized)
gggctgtgggctgcgggctgcgcccccgctgctggccagctctgcacggctgcgggctctgcggcgcccggtgctctgcaacgctgcggcgggcggcatgggataacgcggccatggtgc

SEQ ID NO: 157157 - DNA, 120 bp, Artificial Sequence
  ENSG00000106484_2 (sequence is synthesized)
agatcgcctccgcaggatgagggagtggtgggtccaggtggggctgctggccgtgcccctgcttgctgcgtacctgcacatcccaccccctcagctctcccctgcccttcactcatggaa

SEQ ID NO: 157158 - DNA, 120 bp, Artificial Sequence
  ENSG00000106484_3 (sequence is synthesized)
gtcttcaggcaagtttttcacttacaagggactgcgtatcttctaccaagactctgtgggtgtggttggaagtccagagatagttgtgcttttacacggttttccaacatccagctacga

SEQ ID NO: 157159 - DNA, 120 bp, Artificial Sequence
  ENSG00000106484_4 (sequence is synthesized)
ctggtacaagatttgggaaggtctgaccttgaggtttcatcgggtgattgcccttgatttcttaggctttggcttcagtgacaaaccgagaccacatcactattccatatttgagcaggc

SEQ ID NO: 157160 - DNA, 120 bp, Artificial Sequence
  ENSG00000106484_5 (sequence is synthesized)
cagcatcgtggaagcgcttttgcggcatctggggctccagaaccgcaggatcaaccttctttctcatgactatggagatattgttgctcaggagcttctctacaggtacaagcagaatcg

SEQ ID NO: 157161 - DNA, 120 bp, Artificial Sequence
  ENSG00000106484_6 (sequence is synthesized)
atctggtcggcttaccataaagagtctctgtctgtcaaatggaggtatctttcctgagactcaccgtccactccttctccaaaagctactcaaagatggaggtgtgctgtcacccatcct

SEQ ID NO: 157162 - DNA, 120 bp, Artificial Sequence
  ENSG00000106484_7 (sequence is synthesized)
cacacgactgatgaacttctttgtattctctcgaggtctcaccccagtctttgggccgtatactcggccctctgagagtgagctgtgggacatgtgggcagggatccgcaacaatgacgg

SEQ ID NO: 157163 - DNA, 120 bp, Artificial Sequence
  ENSG00000106484_8 (sequence is synthesized)
gaacttagtcattgacagtctcttacagtacatcaatcagaggaagaagttcagaaggcgctgggtgggagctcttgcctctgtaactatccccattcattttatctatgggccattgga

SEQ ID NO: 157164 - DNA, 120 bp, Artificial Sequence
  ENSG00000106484_9 (sequence is synthesized)
tcctgtaaatccctatccagagtttttggagctgtacaggaaaacgctgccgcggtccacagtgtcgattctggatgaccacattagccactatccacagctagaggatcccatgggctt

SEQ ID NO: 157165 - DNA, 120 bp, Artificial Sequence
  ENSG00000106484_10 (sequence is synthesized)
cttgaatgcatatatgggcttcatcaactccttctgagctggaaagagtagcttccctgtattacctcccctactcccttatgtgttgtgtattccacttaggaagaaatgcccaaaaga

SEQ ID NO: 157166 - DNA, 120 bp, Artificial Sequence
  ENSG00000106484_11 (sequence is synthesized)
ggccatcaaacataattctctcacaaagtccactttactcaaattggtgaacagtgtataggaagaagccagcaggagctctgactaaggttgacataatagtccacctcccattacttt

SEQ ID NO: 157167 - DNA, 120 bp, Artificial Sequence
  ENSG00000106484_12 (sequence is synthesized)
gatatctgatcaaatgtatagacttggctttgttttttgtgctattaggaaattctgatgagcattactattcactgatgcagaaagacgttcttttgcataaaagacttttttttaaca

SEQ ID NO: 157168 - DNA, 120 bp, Artificial Sequence
  ENSG00000106484_13 (sequence is synthesized)
ctttggacttctctgaaatatttagaagtgctaatttctggcccacccccaacaggaattctatagtaaggaggaggagaaggggggctccttccctctcctcgaatgacgttatgggca

SEQ ID NO: 157169 - DNA, 120 bp, Artificial Sequence
  ENSG00000106484_14 (sequence is synthesized)
catgccttttaaaagttctttaagcaacacagagctgagtcctctttgtcatacctttggatttagtgtttcatcagctgtttttagttataaacattttgttaaaatagatattggttt

SEQ ID NO: 157170 - DNA, 120 bp, Artificial Sequence
  ENSG00000106484_15 (sequence is synthesized)
aaatgatacagtattttaggtatgatttaagactatgatttacctatacattatatatattttataaagatactaaaccagcatacccttactctgccagagtagtgaagctaattaaac

SEQ ID NO: 157171 - DNA, 120 bp, Artificial Sequence
  ENSG00000106484_16 (sequence is synthesized)
acatttggtttctgaataaattgaactaaatccaaactatttcctaaaatcacaggacattaaggaccaatagcatctgtgccagagatgtactgttattagctgggaagaccaattcta

SEQ ID NO: 157172 - DNA, 120 bp, Artificial Sequence
  ENSG00000106484_17 (sequence is synthesized)
acagcaaataacagtctgagactcctcatacctcagtggttagaagcatgtctctcttgagctacagtagaggggaagggattgttgtgtagtcaagtcaccatgctgaatgtacactga

SEQ ID NO: 157173 - DNA, 120 bp, Artificial Sequence
  ENSG00000106484_18 (sequence is synthesized)
ttcctttatgatgactgcttaactccccactgcctgtcccagagaggctttccaatgtagctcagtaattcctgttactttacagacaggaaagttccagaaactttaagaacaaactct

SEQ ID NO: 157174 - DNA, 120 bp, Artificial Sequence
  ENSG00000106484_19 (sequence is synthesized)
gaaagacctatgagcaaatggtgctgaatactttttttttaaagccacatttcattgtcttagtcaaagcaggattattaagtgattatttaaaattcgtttttttaaattagcaacttc

SEQ ID NO: 157175 - DNA, 120 bp, Artificial Sequence
  ENSG00000106484_20 (sequence is synthesized)
aagtataacaactttgaaactggaataagtgtttattttctattaataaaaatgaattgtgacaaaagtggactctggcttcccctcccccctcccccccacccctctgggataaaaatt

SEQ ID NO: 157176 - DNA, 120 bp, Artificial Sequence
  ENSG00000106484_21 (sequence is synthesized)
ttccagcattgccaggagctttcaggtacacattaaagaataaaatgaagttaagcagctggagtataggatagtatttgattttcaagatcacccaaagctgcactatcgtcccaaagc

SEQ ID NO: 157177 - DNA, 120 bp, Artificial Sequence
  ENSG00000106484_22 (sequence is synthesized)
aggtggcgctgacgcctggcagggagaaggcggcagcacatgctgggctcgggggcgatgggcttgtgcgcggacctggcgacgctctagccccgagccgcgtattcgtggccgggtcct

SEQ ID NO: 157178 - DNA, 120 bp, Artificial Sequence
  ENSG00000106484_23 (sequence is synthesized)
gggcgctgctgtggccaggcgtctggcatgctgaccacgtcgcgctgctgtaaaggaaacctgccccgcgcagcggcggtggctggagcgggagaaaccggactttgtgcaactttggcc

SEQ ID NO: 157179 - DNA, 120 bp, Artificial Sequence
  ENSG00000106484_24 (sequence is synthesized)
aggcgagcggaggactgtgtgcccgtgtccgagctggggctgcctctgggcgaaaactctaccgacaggcggcacgcattccgcgcccgctctgcctacttgaggagggggtgtcactcc

SEQ ID NO: 157180 - DNA, 120 bp, Artificial Sequence
  ENSG00000106484_25 (sequence is synthesized)
atttactgaagggaataaacaactccttggcactctggaagggatcactgccaagttaccctccctcaacagggattaattaccaggaataaagcattttccaagaggatcatctgtggg

SEQ ID NO: 157181 - DNA, 120 bp, Artificial Sequence
  ENSG00000106484_26 (sequence is synthesized)
acctgtggtagtttcatggcgttttctctttatggaagtctgttaagccaagatagggctgaagctcctgtgcaactgtaggtctggtgaaagggaggggcaggagcagaaagcccaaat

SEQ ID NO: 157182 - DNA, 120 bp, Artificial Sequence
  ENSG00000106484_27 (sequence is synthesized)
ggcttaccataaagagtctctgtctgtcaaatggaggtaattgccttggcggtaggtagaaagtgggtgtaatctagaagggccatctttagatacagcggcacctaaatggtaatctga

SEQ ID NO: 157183 - DNA, 120 bp, Artificial Sequence
  ENSG00000106484_28 (sequence is synthesized)
taatatttcaagtagacataattaaactatgggatctctacctcttctgtgccatcaactcctttggtggtctgacaagatttatggaccctttctcagaatgttttaaaataaagaaac

SEQ ID NO: 157184 - DNA, 120 bp, Artificial Sequence
  ENSG00000106484_29 (sequence is synthesized)
aaacagcattacaaaggatagtgactttacttacatagtcaataaaaagctgcattatagtcacatgtgctttttcaatgcattagatagcaagttctagtggaggacctagtaacagct

SEQ ID NO: 157185 - DNA, 120 bp, Artificial Sequence
  ENSG00000106484_30 (sequence is synthesized)
gcatgcgcaaccggttctccgaaacatggagtcctgtaggcaaggtcttacctgaatcaggtaagaggcgggcggggaaggagtggagcctccccgtgcaccctcgcagcccgctccagg

SEQ ID NO: 157186 - DNA, 120 bp, Artificial Sequence
  ENSG00000106484_31 (sequence is synthesized)
attccgcgcccgctctgcctacttgaggagggggtgtcactcctgcccgcaatggaatgttcagaacgcgggacctccttgggttaggatttctagaccccgggatcgtcgtgggattgt

SEQ ID NO: 157187 - DNA, 120 bp, Artificial Sequence
  ENSG00000106484_32 (sequence is synthesized)
gagcaatgtcgtgaaaagttgctgccattacaattctgggccaaatcctaaggcttgatattttaaagcaaaggtgttggccgcttgccagggaagtagaaggaattcataaatcactta

SEQ ID NO: 157188 - DNA, 120 bp, Artificial Sequence
  ENSG00000106484_33 (sequence is synthesized)
atggcctctgaggttccagccatattgaacattctgagttctcctcacacttatcttcctgcgttttggactctttcagtctcaccccagtctttgggccgtatactcggccctctgaga

SEQ ID NO: 157189 - DNA, 120 bp, Artificial Sequence
  ENSG00000106484_34 (sequence is synthesized)
gtgagctgtgggacatgtgggcagggatccgcaacaatgacgggaacttagtcattgacaggtaagaagttaccctttgctttggtttccagagacgtgtttttgtggagagtggggatt

SEQ ID NO: 157190 - DNA, 120 bp, Artificial Sequence
  ENSG00000106484_35 (sequence is synthesized)
gcttgttctgttccttgctggcttattccctatcacaggaaggctgatgatgacctatggggcaaaccaaaaagtcatggtctatatgaagaaagaaatagaaaataagagtgaaactgg

SEQ ID NO: 157191 - DNA, 120 bp, Artificial Sequence
  ENSG00000106484_36 (sequence is synthesized)
cttcactgatagacctttagttttaggatttgtactgacgtaaataatgctgggaccttttaagggccatagctcctgtaactggcagtagttaaatcctcttccttgtgaatttctatt

SEQ ID NO: 157192 - DNA, 120 bp, Artificial Sequence
  ENSG00000106511_0 (sequence is synthesized)
gaaagcagttctctgggaccaccttcttttggcttcaacctctcccactcttgacatctgagtagctcagggaagctcttccaggtccgactgttcatatgtaaaggagactggccgctg

SEQ ID NO: 157193 - DNA, 120 bp, Artificial Sequence
  ENSG00000106511_1 (sequence is synthesized)
gggctcaggaccgggattatccgagctctgcagaagtgcaccgctattgctttgggaggttaaaaaaaaaatcacacggtttccagtgaaaaagtgacagagggtggtggcctttggaac

SEQ ID NO: 157194 - DNA, 120 bp, Artificial Sequence
  ENSG00000106511_2 (sequence is synthesized)
cgccgtgaagtcttctgcctggaacccgaaacttgcatgctatggaacacccgctctttggctgcctgcgcagccctcacgccacggcgcaaggcttgcacccgttctcccaatcctctc

SEQ ID NO: 157195 - DNA, 120 bp, Artificial Sequence
  ENSG00000106511_3 (sequence is synthesized)
tcgccctccatggaagatctgaccatatgtcttaccccgagctctctacttcttcctcatcttgcataatcgcgggataccccaacgaagagggcatgtttgccagccagcatcacaggg

SEQ ID NO: 157196 - DNA, 120 bp, Artificial Sequence
  ENSG00000106511_4 (sequence is synthesized)
accaccaccaccaccaccatcaccaccatcagcagcagcagcaccaggctctgcaaaccaactggcacctcccgcagatgtcttccccaccgagtgcggctcggcacagcctctgcctcc

SEQ ID NO: 157197 - DNA, 120 bp, Artificial Sequence
  ENSG00000106511_5 (sequence is synthesized)
gcctctgcctccagcccgactctggagggcccccagagttggggagcagcccgcccgtcctgtgctccaactcttccagcttgggctccagcaccccgactggggccgcgtgcgcgccgg

SEQ ID NO: 157198 - DNA, 120 bp, Artificial Sequence
  ENSG00000106511_6 (sequence is synthesized)
gggactacggccgccaggcactgtcacctgcggaggcggagaagcgaagcggcggcaagaggaaaagcgacagctcagactcccaggaaggaaattacaagtcagaagtcaacagcaaac

SEQ ID NO: 157199 - DNA, 120 bp, Artificial Sequence
  ENSG00000106511_7 (sequence is synthesized)
ccaggaaagaaaggacagcatttaccaaagagcaaatcagagaacttgaagcagaatttgcccatcataattatctcaccagactgaggcgatacgagatagcagtgaatctggatctca

SEQ ID NO: 157200 - DNA, 120 bp, Artificial Sequence
  ENSG00000106511_8 (sequence is synthesized)
ctgaaagacaggtgaaagtctggttccaaaacaggcggatgaagtggaagagggtaaagggtggacagcaaggagctgcggctcgggaaaaggaactggtgaatgtgaaaaagggaacac

SEQ ID NO: 157201 - DNA, 120 bp, Artificial Sequence
  ENSG00000106511_9 (sequence is synthesized)
cagctcagagcatgcgcacttatgatataaacagaggaccagctccattctcaggaaagaaatgttgtgatggcaagccttacccaaatatcgtttacacagagagatgactatggcagt

SEQ ID NO: 157202 - DNA, 120 bp, Artificial Sequence
  ENSG00000106511_10 (sequence is synthesized)
gatgtttaatattattaaatccaggcatttcgaatctgtttttcatgatttatagagggtttacacaaagtgccacttattaaagagcttccacagtgaagatggagaaggtgaacttgc

SEQ ID NO: 157203 - DNA, 120 bp, Artificial Sequence
  ENSG00000106511_11 (sequence is synthesized)
tttgaatattccagatgtgtttggtcgtgcgtatggcagtgagcaggtatgtgtttgcttttgcttgcactgaaaattaaattgctatcaagagcaaactatgaacggttttttattcaa

SEQ ID NO: 157204 - DNA, 120 bp, Artificial Sequence
  ENSG00000106511_12 (sequence is synthesized)
gatgtctccagagtgaagatgccgaggatgaacttgcattgaacattccagatgtgtgagatcatgtgtattacagtgggcaggtatttgcttttgcttgcactgaaaattaaattgcta

SEQ ID NO: 157205 - DNA, 120 bp, Artificial Sequence
  ENSG00000106511_13 (sequence is synthesized)
tcaagaataaaccatgaaacattttatcctgaacagccacagtgcctgaattcactcaagtggataaaaagtgtattttaactctgtatatattacccttaagtcattttcctgtcttca

SEQ ID NO: 157206 - DNA, 120 bp, Artificial Sequence
  ENSG00000106511_14 (sequence is synthesized)
ctaatttagcaatgcattcatattagctgatgaaaataggcactcacaatgacaaccagagccagtttcttgtcttttttatacattttgtcatcccagagacaatcagtatgtgcttac

SEQ ID NO: 157207 - DNA, 120 bp, Artificial Sequence
  ENSG00000106511_15 (sequence is synthesized)
ctgtgttcaagtagagaaaaatacagtagagtctgataggacatattcttgtaccacagacaaaacaaatcttatgttgcatttactatcaactgctgctaatacgttattataaaactt

SEQ ID NO: 157208 - DNA, 120 bp, Artificial Sequence
  ENSG00000106511_16 (sequence is synthesized)
acctagctcctgaattcttcctatcttatagcttaaaacaattaggatcataggcaaatcagttaccttgcagaaagagctttgtatgacagacattgtcttattttatttctgtaaaat

SEQ ID NO: 157209 - DNA, 120 bp, Artificial Sequence
  ENSG00000106511_17 (sequence is synthesized)
attagctgtatgaatatgatttaattaacaagaaaacatttcttcctgattgacaacagtgttagacaaggtgcaaagcgaaactggttgctcaagttgatagaaaacaaaattctgaat

SEQ ID NO: 157210 - DNA, 120 bp, Artificial Sequence
  ENSG00000106511_18 (sequence is synthesized)
atcttcaaattaaattcggtaaaaacacattattttttcatatgtgatgtattcatgcagaacaactatctttgtattttgtttttaaaatgtgtttaataaatgatcctttgtaaataa

SEQ ID NO: 157211 - DNA, 120 bp, Artificial Sequence
  ENSG00000106524_0 (sequence is synthesized)
gagctcgcccgctgtccgccagcccgcgggagggaggagagaagcgaagcgtttccgcggttggctactcagtgtcttggtctcaagttgcctcattgcggctggcgttcccaatacaga

SEQ ID NO: 157212 - DNA, 120 bp, Artificial Sequence
  ENSG00000106524_1 (sequence is synthesized)
cgcatcgtttcttttttaatactccctaagaaagggaataaccttcaagctggcgggagcaatggttcacataaagaaaggcgagctgacccaggaggagaaggagctactggaagtcat

SEQ ID NO: 157213 - DNA, 120 bp, Artificial Sequence
  ENSG00000106524_2 (sequence is synthesized)
cgggaaaggtactgtccaagaagctggaacattattatccagcaagaatgttcgtgtcaactgtttggacgagaatggaatgactcctctaatgcatgcagcatataaaggaaaactcga

SEQ ID NO: 157214 - DNA, 120 bp, Artificial Sequence
  ENSG00000106524_3 (sequence is synthesized)
tatgtgcaaattactactgcgacatggagccgatgtaaattgtcatcagcatgaacatggatacacagccctcatgtttgctgcactttctggtaataaagacatcacatgggtaatgtt

SEQ ID NO: 157215 - DNA, 120 bp, Artificial Sequence
  ENSG00000106524_4 (sequence is synthesized)
agaagctggtgctgagacagatgttgtcaactctgtgggaagaacagcagctcagatggcagcctttgtgggtcaacatgattgtgtgaccataatcaacaatttctttcctcgagagag

SEQ ID NO: 157216 - DNA, 120 bp, Artificial Sequence
  ENSG00000106524_5 (sequence is synthesized)
actggattattacactaagccccagggactggataaagagccaaaactgcccccaaagttggcaggcccgctgcacaaaattatcaccacaacgaatcttcatcctgtcaagatcgtgat

SEQ ID NO: 157217 - DNA, 120 bp, Artificial Sequence
  ENSG00000106524_6 (sequence is synthesized)
gcttgtaaatgagaatcctctgctgacagaagaagcagccctgaataaatgctacagagtgatggatttgatttgtgagaaatgtatgaagcaaagagacatgaatgaagtattggctat

SEQ ID NO: 157218 - DNA, 120 bp, Artificial Sequence
  ENSG00000106524_7 (sequence is synthesized)
gaagatgcattacataagctgtatctttcagaaatgcattaacttcttaaaagatggagagaataaactggacaccttgatcaaaagcttgttaaaaggccgagcttctgatggctttcc

SEQ ID NO: 157219 - DNA, 120 bp, Artificial Sequence
  ENSG00000106524_8 (sequence is synthesized)
agtgtatcaagaaaagatcattagagaaagtatcagaaaatttccttactgtgaagctacactcctccagcagctggttcgaagcattgctcctgttgaaattggttctgatcccactgc

SEQ ID NO: 157220 - DNA, 120 bp, Artificial Sequence
  ENSG00000106524_9 (sequence is synthesized)
attctccgtccttacccaagccatcactggccaggtgggttttgtggatgtggaattttgcactacctgtggagaaaagggagcaagtaaaagatgttcagtttgcaaaatggtaatata

SEQ ID NO: 157221 - DNA, 120 bp, Artificial Sequence
  ENSG00000106524_10 (sequence is synthesized)
aggctgccaaagaaaagagacaagaggaaaaccacggcaaacttgatgtcaattctaactgtgttaatgaagagcaaccagaggctgaagtaggtatctctcaaaaggattccaatcctg

SEQ ID NO: 157222 - DNA, 120 bp, Artificial Sequence
  ENSG00000106524_11 (sequence is synthesized)
aagattccggggaaggaaagaaagaatctcttgaaagcgaagctgagttggaaggcttacaggatgctcctgcagggccacaggtgtctgaggagtaaaagccagagcaagtgccagtgt

SEQ ID NO: 157223 - DNA, 120 bp, Artificial Sequence
  ENSG00000106524_12 (sequence is synthesized)
ggatgatcctcaccctgcaagaagctggaaaactcctaggaatgcattgtcctcaccttgttatacctgcgtggcaccatggcaggattccacatttcatagaatacaggttttcaagca

SEQ ID NO: 157224 - DNA, 120 bp, Artificial Sequence
  ENSG00000106524_13 (sequence is synthesized)
aacccctgttgaccatgccctaatttcctattgatttctgttctataattgaatggatattcctatggaaaattttttgtttcaaaatacaggaaaaacattcctattacctttctgagg

SEQ ID NO: 157225 - DNA, 120 bp, Artificial Sequence
  ENSG00000106524_14 (sequence is synthesized)
ctggctttccagcaattgtttcaaaggaaaatagatccccttaaagaaaaaatacaggctttagggaacaaagggacaagcagaacaggtgtggaagagagattttcaggaagggaaaaa

SEQ ID NO: 157226 - DNA, 120 bp, Artificial Sequence
  ENSG00000106524_15 (sequence is synthesized)
tttatagctacagagggtagttagaaaaatcataacttatatgtgaataaaatacatataagcagcatttacggtagtggcattctacttattaagatgcaatgaaatgaagaaaggctt

SEQ ID NO: 157227 - DNA, 120 bp, Artificial Sequence
  ENSG00000106524_16 (sequence is synthesized)
tatgttcaaggacctttgccatagttcagctaattgtagttttatatagaaatgatcctgaacactctgaacttgacgtagtcctgcggtgatattctatctgcagtatttgtacctcca

SEQ ID NO: 157228 - DNA, 120 bp, Artificial Sequence
  ENSG00000106524_17 (sequence is synthesized)
gaatggcagatccctcagcaggaacaaaggcatattgacggttctctcagcgtatgcattaaaaaaggtacttcctgaaacttttgattcaataatgactaaacatactatgtacacaat

SEQ ID NO: 157229 - DNA, 120 bp, Artificial Sequence
  ENSG00000106524_18 (sequence is synthesized)
tactgtaaggctaattcacgtgccatactccacctgaaagcctgagttatcttgctataagcttttcatggagcacttcctttccagaaactgatttgtaactcatttagagaatgtcct

SEQ ID NO: 157230 - DNA, 120 bp, Artificial Sequence
  ENSG00000106524_19 (sequence is synthesized)
ggcgtcggtttttagcatatgtggtatttaaacagagctagaatgtgatgtctgaagataatgctgcatttctgggtttcttgtgtggattttaaaataaattgtgcctacaaatataaa

SEQ ID NO: 157231 - DNA, 120 bp, Artificial Sequence
  ENSG00000106524_20 (sequence is synthesized)
gagtcccagcggggagccccgaggacgagccagaagccatatttccccggagtccccgagtggacgtcccagaggagttccctgccgagtcccgttacctggcaggtgacatcagcgtga

SEQ ID NO: 157232 - DNA, 120 bp, Artificial Sequence
  ENSG00000106524_21 (sequence is synthesized)
gggcctaccacagtgcttggcatacagtaatatattgtgatcaaacctgccagaaaacacactggtttactcataagaaaatctgtaagaatctgaaggacatttacgaaaagcaacagt

SEQ ID NO: 157233 - DNA, 120 bp, Artificial Sequence
  ENSG00000106526_0 (sequence is synthesized)
gagagattcagctgctttcacaactctggctggattttacctatgtggagagtgtcacccatgttagggagcctctggccaggaggaagctgtggcaagatgtgctgcgtctcctgcttg

SEQ ID NO: 157234 - DNA, 120 bp, Artificial Sequence
  ENSG00000106526_1 (sequence is synthesized)
gcattgccatcttgctgccacagaacctccactcaatacaccagaaaacagagagtatcttgcagaaattatgttcgaatcatttaacgttccaggactctacattgcagttcaggcagt

SEQ ID NO: 157235 - DNA, 120 bp, Artificial Sequence
  ENSG00000106526_2 (sequence is synthesized)
gctggccttggcggcatcttggacatctcgacaagtgggtgaacgtacattaacggggatagtcattgacagcggagatggagtcacccatgttatcccagtggcagaaggttatgtaat

SEQ ID NO: 157236 - DNA, 120 bp, Artificial Sequence
  ENSG00000106526_3 (sequence is synthesized)
tggaagctgcatcaaacacatcccgattgcaggtagagatattacgtatttcattcaacagctgctaagggagagggaggtgggaatccctcctgagcagtcactggagaccgcaaaagc

SEQ ID NO: 157237 - DNA, 120 bp, Artificial Sequence
  ENSG00000106526_4 (sequence is synthesized)
cattaaggagaaatactgttacatttgccccgatatagtcaaggaatttgccaagtatgatgtggatccccagaagtggatcaaacagtacacgggtatcaatgcgatcaaccagaagaa

SEQ ID NO: 157238 - DNA, 120 bp, Artificial Sequence
  ENSG00000106526_5 (sequence is synthesized)
ttacgaaagattcctgggacctgaaatattctttcacccggagtttgccaacccagactctatggagtccatctcagatgttgttgatgaagtaatacagaactgccccatcgatgtgcg

SEQ ID NO: 157239 - DNA, 120 bp, Artificial Sequence
  ENSG00000106526_6 (sequence is synthesized)
gcgtccgctgtataagatggaacaaattccactgagctatcctcaaggtcacggattccatcctctgtcacctccatttcattgagatgatatattgagcccatgcgtagccttttattt

SEQ ID NO: 157240 - DNA, 120 bp, Artificial Sequence
  ENSG00000106526_7 (sequence is synthesized)
gagatttccaaggccagcaatgttctcttcctctcccttttctttgtataaaaattcattctcaagaaaaactctcatatcaattgtttacatgtcactatggctaagacactaaaagcc

SEQ ID NO: 157241 - DNA, 120 bp, Artificial Sequence
  ENSG00000106526_8 (sequence is synthesized)
ctctccctgcaaaactggtggcaaagctctctagagaaccacaaactgttgcatccttactacgtggggcagcagcaagcccaggtgaagatgtgcatgttcttggagaaagtattaata

SEQ ID NO: 157242 - DNA, 120 bp, Artificial Sequence
  ENSG00000106526_9 (sequence is synthesized)
acataccgacacttacatctgggtgaataatttcatcaaatctcttaactcacgcttgcacaaacttcacctggagagagagagggaaagctgtgccagaaataaatggttattgaggtc

SEQ ID NO: 157243 - DNA, 120 bp, Artificial Sequence
  ENSG00000106526_10 (sequence is synthesized)
agtccccgcttacctgaggggtggagccggcagcctgcggagccactggccaagctgggaagtccggcgcaactccgcaccgcagagccggcgcctcctcggcagacagaacctccactc

SEQ ID NO: 157244 - DNA, 120 bp, Artificial Sequence
  ENSG00000106526_11 (sequence is synthesized)
atttttttcatttgtttcaagagaacccataattgcttattgaagcatttttatgacaattattctaaaattctttgcaggtaatcccagcacctgagtcatctttatgttggagtctca

SEQ ID NO: 157245 - DNA, 120 bp, Artificial Sequence
  ENSG00000106526_12 (sequence is synthesized)
atcgactcttcattcatttgtgatttttctggttcttgctatgataagtggttttttattgtattctggacattttgataagattgtgaatcctatttactttttttttttttgagacgg

SEQ ID NO: 157246 - DNA, 120 bp, Artificial Sequence
  ENSG00000106526_13 (sequence is synthesized)
gggattacaggtgcgagccaccgcacccggcctactcttttttttttttaatagccagcttctctgttgagatgtagcaccagggctgtgtatctgttcagtctcctttgggcccagggc

SEQ ID NO: 157247 - DNA, 120 bp, Artificial Sequence
  ENSG00000106526_14 (sequence is synthesized)
cagtacgggagggaagggagagcagaacgcggaccactctaccttgagttgcctcattctgtatcatcgatgcctggtggaagtgggcttactctgcatcctgctgacaccgcagagaaa

SEQ ID NO: 157248 - DNA, 120 bp, Artificial Sequence
  ENSG00000106526_15 (sequence is synthesized)
ctggagcccatggcctgcttccctgggacaggagctagggtggaaaatcagcttccagcttggccctgctgaaaccctggcaggggcaggttccattgtagtttggctggaatcgagcag

SEQ ID NO: 157249 - DNA, 120 bp, Artificial Sequence
  ENSG00000106526_16 (sequence is synthesized)
gtattgccaacagcatcgtctattgttggagtacctttgccccagatcctgagatggggtaatttttaaagaaaagaggttcaattggctcacaagcctgaaggctgtaccagcatggtg

SEQ ID NO: 157250 - DNA, 120 bp, Artificial Sequence
  ENSG00000106526_17 (sequence is synthesized)
cccagcttctggggagggctcagggagctttgactcacagaggaaggtgaagtgggagcaggcacttcacatggcaaaagcaagaacaaaagagtgggaggcagttgccacacacttcta

SEQ ID NO: 157251 - DNA, 120 bp, Artificial Sequence
  ENSG00000106526_18 (sequence is synthesized)
catgaccagatctcttgtgaactcagagctcactcatcacccaagagatggcccacgccatccatgaggaatgcactcccatgatataaacacccccaccaggccccgcctccaagagtg

SEQ ID NO: 157252 - DNA, 120 bp, Artificial Sequence
  ENSG00000106526_19 (sequence is synthesized)
gagattacagttcaacacgagatttggtgggggcatatcaaaactacattaaccttaaattatgaagacggtaaactaaataatctgctttctttcctttcctgttttgtgtctgttttt

SEQ ID NO: 157253 - DNA, 120 bp, Artificial Sequence
  ENSG00000106526_20 (sequence is synthesized)
actgtttgtttgtttttctcaggagtggaaggagattaaccagggtggcaataaacaaaattacttgctgttttaaaacttaatgacaaccctataggttattagcaatgccaaagttgc

SEQ ID NO: 157254 - DNA, 120 bp, Artificial Sequence
  ENSG00000106526_21 (sequence is synthesized)
aatacaaaaaaaattaaccgggtgtggtggtgcatacctgtaaccccagctactcaagaagtggaggcgggagaattgcttgaacacaggaggcggaggttgcgatgagccgagatcacg

SEQ ID NO: 157255 - DNA, 120 bp, Artificial Sequence
  ENSG00000106526_22 (sequence is synthesized)
aaaacaaaacaaaaagccaaagtggaaaagcaaaaattttgtggtatttgcattcaattattatgctttaattcaaccattcacaatttctagggaacattaactttattgcaatcccag

SEQ ID NO: 157256 - DNA, 120 bp, Artificial Sequence
  ENSG00000106526_23 (sequence is synthesized)
gtaaatttaggataatttaacaataatcgttggtgttctactcatctacttgtctttaaaatccacatatattttttaaaagatgacatcctttaaaaatattatattcagtgaattttc

SEQ ID NO: 157257 - DNA, 120 bp, Artificial Sequence
  ENSG00000106526_24 (sequence is synthesized)
aatattattttaaatattatcatggacagttgttattggaaatgacagttcaccattgcaaatcaatgcagtggctacaagtcccccgtgtcacacaaaaatagacggggtagctctgac

SEQ ID NO: 157258 - DNA, 120 bp, Artificial Sequence
  ENSG00000106526_25 (sequence is synthesized)
agcatgcatccttatgccctgttctattaatgatgcactgcaccccatcagggtctgcagctgtatcattactcacagagacggttctgcctttggctttccctggtcctccatggctag

SEQ ID NO: 157259 - DNA, 120 bp, Artificial Sequence
  ENSG00000106526_26 (sequence is synthesized)
gaacatcatttaacagggttttgtagaattcactgggtggttagtcttagaaaacccaaggcagaaacacacagccaactatcccccaagtgcttgtgcttgaactttcagaacataaga

SEQ ID NO: 157260 - DNA, 120 bp, Artificial Sequence
  ENSG00000106526_27 (sequence is synthesized)
aaattgtgttaagctggatctgcaagtacaaatggagagtgaaatgggttctatagaatccaaatgacacaatctttcctcctgctaagaattactggctattgaaccaattcctgccta

SEQ ID NO: 157261 - DNA, 120 bp, Artificial Sequence
  ENSG00000106526_28 (sequence is synthesized)
ttaactgtgaggtgaagtccaagatccacagtcaagcattcaaagatccaacctgatttttctctgcataactgttttactaggagtaagactgacttgcctggtttaccaagacaggct

SEQ ID NO: 157262 - DNA, 120 bp, Artificial Sequence
  ENSG00000106526_29 (sequence is synthesized)
gtgagaattcttcccacttacctttactgagtcaatgtggacagtttgaaataacttgaaccattcttcttacatttttaaatcctacacaagcctcaaaacaaaatccaagtcactttt

SEQ ID NO: 157263 - DNA, 120 bp, Artificial Sequence
  ENSG00000106526_30 (sequence is synthesized)
cctctgtgggatcttcactgagccccccagcaggcattcctcttgctatctcctgtgcgaatagctctgaaggtctgtattgcaaatatgacagtcaacacaccggctaaggtagaacaa

SEQ ID NO: 157264 - DNA, 120 bp, Artificial Sequence
  ENSG00000106526_31 (sequence is synthesized)
aaagtggcattattaagctgaaaaaagcccggaccaaaatgaaagattcttattgtgggagcaattgctcacactcaccaatagctgcttgtttccttcttgggcacacagaaattacaa

SEQ ID NO: 157265 - DNA, 120 bp, Artificial Sequence
  ENSG00000106526_32 (sequence is synthesized)
ttcccaactttcctgcagttggatagagccatgtgagtaattccagcctggggactctgactagagatgaaaatcccctccatggtggagcaaaatcccctgagtggccctccggccttc

SEQ ID NO: 157266 - DNA, 120 bp, Artificial Sequence
  ENSG00000106526_33 (sequence is synthesized)
tgttctccagctgtgctaacctggaagccacacattgagatgacagagcagcaaagtggagacaggccatgtctctgagtcaccatgtgacccacaggagattttgagtaaattaaaata

SEQ ID NO: 157267 - DNA, 120 bp, Artificial Sequence
  ENSG00000106526_34 (sequence is synthesized)
caaatctttgtcataataaaccacagatatttcagcaatgatttgcaaccatagcgtaagataacctatcatggctaatgctcctaggttctcaacctgtatccaccagtaactaggtag

SEQ ID NO: 157268 - DNA, 120 bp, Artificial Sequence
  ENSG00000106526_35 (sequence is synthesized)
cttgggcaaattatcttctatgcaacctctggttgataatgaattccttttataagtaagagaatgagctggaacccaaatgtgtacagaggaaatctgaatgaagtgggaagggtaaga

SEQ ID NO: 157269 - DNA, 120 bp, Artificial Sequence
  ENSG00000106526_36 (sequence is synthesized)
tgcagagtgagtggagacttcactcattgttgaaagagggcagttgctactcggttattactgatgcttacatgaagaaatccagttttaatataaccacatcttgccatttctcaaggg

SEQ ID NO: 157270 - DNA, 120 bp, Artificial Sequence
  ENSG00000106526_37 (sequence is synthesized)
aagtcatgtactatctgtgtgtctgtccttcatatagctccatcaatattctcctcttaaatcttggagactgtgctggatgttttccaaatgtctctcctgatccagcctgcagtcttc

SEQ ID NO: 157271 - DNA, 120 bp, Artificial Sequence
  ENSG00000106526_38 (sequence is synthesized)
tctaccctggtttgggtatctggagccagacctgtatgtactgcatcagcaggttctcttcccttcgctttctgcatggtttccaccaccatgaggtcctggtgggagatcagaggctgg

SEQ ID NO: 157272 - DNA, 120 bp, Artificial Sequence
  ENSG00000106526_39 (sequence is synthesized)
gaagagcagaggctgggaagagcagaggcaggagaggcactgcataactcctctcaggccgtcctctctctctggctctctgtaggtttgggcaactgctccttccatccatatattcag

SEQ ID NO: 157273 - DNA, 120 bp, Artificial Sequence
  ENSG00000106526_40 (sequence is synthesized)
gctgaggtgtggaaaaggctcccaaatggcattagctccagagtgatgcaccttccatatccttttattttcattatttctcctcctttgaagaagttgagtatttttgcaagaacattg

SEQ ID NO: 157274 - DNA, 120 bp, Artificial Sequence
  ENSG00000106526_41 (sequence is synthesized)
actaacaggaactaatcaattattcttaaatttaaaaaattgaatgaatcaaatgttcaacaaaggatacacacacagactgaatgacaactaagttattttacagttccacaaacctag

SEQ ID NO: 157275 - DNA, 120 bp, Artificial Sequence
  ENSG00000106526_42 (sequence is synthesized)
tgaatgacaactaagttattttacagttccacaaacctagagagatctatcaatgaatggggtattacattctaatatttctaagactatattgaatattgaatattcaatattctaaga

SEQ ID NO: 157276 - DNA, 71 bp, Artificial Sequence
  ENSG00000106526_43 (sequence is synthesized)
tgaatactgaatgactacatcacctacaagaatacaatgagagtactaaactaacactcagtactaaacat

SEQ ID NO: 157277 - DNA, 120 bp, Artificial Sequence
  ENSG00000106526_44 (sequence is synthesized)
atacaatgagagtactaaactaacactcagtactaaacatttgtcctacactcagaggtaggcaccaggttctggtgtcaatgtatgatatgcctgtctctaaataaacattttatcaga

SEQ ID NO: 157278 - DNA, 120 bp, Artificial Sequence
  ENSG00000106526_45 (sequence is synthesized)
cagagggagagatgggtaagggctggctgttccggaagattctggcctctcccagtgtgtttcggcgcgagggcaccgctggcccagcaggtggccccccggggccggcacgggccccga

SEQ ID NO: 157279 - DNA, 120 bp, Artificial Sequence
  ENSG00000106526_46 (sequence is synthesized)
agcgaaggggccgtgaggtcaacagtcggtaatcgtttatcggtgcggccttagagaaaggacctccaagcccttgttcaatacatgttgggtggtggtcacaggtgccagtctccggac

SEQ ID NO: 157280 - DNA, 120 bp, Artificial Sequence
  ENSG00000106526_47 (sequence is synthesized)
ggatggcggcctagatttcctcccggactcggtggcacccaaggccccctgcacgccggcgctgtgcgtgccaggctgaccgcccgagtgcgacccggacctcgtccgcacgtgcagatg

SEQ ID NO: 157281 - DNA, 120 bp, Artificial Sequence
  ENSG00000106536_0 (sequence is synthesized)
gctgaaagaatgttcttataatgatccaagaggaagtggcaaatgagtgctcttcttcaggatccaatgatagctggacaagtcagtaagcccttgctgtcagtgcggagtgaaatgaat

SEQ ID NO: 157282 - DNA, 120 bp, Artificial Sequence
  ENSG00000106536_1 (sequence is synthesized)
gcggagttgagaggtgaggacaaggctgctacttcagacagcgagctgaatgagcccctgcttgcgcctgtggaatcaaatgacagcgaggacactcccagcaagctcttcggggctaga

SEQ ID NO: 157283 - DNA, 120 bp, Artificial Sequence
  ENSG00000106536_2 (sequence is synthesized)
ggaaacccagcattatcagacccaggcactcctgaccaacaccaggccagtcagacccaccccccatttccagttgggccacagccacttctgacggcacagcagttagcttctgctgtg

SEQ ID NO: 157284 - DNA, 120 bp, Artificial Sequence
  ENSG00000106536_3 (sequence is synthesized)
gccggcgtgatgccgggaggccccccagccctcaaccagccaatcctcattcccttcaacatggcgggacagctaggaggccagcaaggactggttctcacactgccaacagcgaatctc

SEQ ID NO: 157285 - DNA, 120 bp, Artificial Sequence
  ENSG00000106536_4 (sequence is synthesized)
accaacatccaagggctggtggcagcagctgcagccggaggcattatgactctgccactgcaaaatctacaagctacctcatccctgaactcccagctccagcagctccagctccagctc

SEQ ID NO: 157286 - DNA, 120 bp, Artificial Sequence
  ENSG00000106536_5 (sequence is synthesized)
agcagcagcagcagcagcagcagcagcctcccccgtcaaccaaccagcacccgcaaccagccccacaggcgccctcgcagtcccagcagcagccgctgcagcccaccccaccccagcagc

SEQ ID NO: 157287 - DNA, 120 bp, Artificial Sequence
  ENSG00000106536_6 (sequence is synthesized)
cagccaccacccgcctctcagcagccgccagctcctacatctcagctgcaacaggcgcctcagccccagcagcaccaaccccactcccactcccagaaccagaaccaaccatctccaacc

SEQ ID NO: 157288 - DNA, 120 bp, Artificial Sequence
  ENSG00000106536_7 (sequence is synthesized)
cagcagagctccagccccccgcagaaacctagtcagtctccaggacatggcctgccttcaccgctcacgccacccaatcctctacagctggttaataatccactagcaagtcaggctgca

SEQ ID NO: 157289 - DNA, 120 bp, Artificial Sequence
  ENSG00000106536_8 (sequence is synthesized)
gcggctgcagcagccatgagctccatagcaagctcacaggcctttggcaatgccctctccagtcttcagggggtcacaggtcaactagttactaatgcacaaggacagattatcgggacc

SEQ ID NO: 157290 - DNA, 120 bp, Artificial Sequence
  ENSG00000106536_9 (sequence is synthesized)
attccactgatgcctaatccagggccatcgagccaagcagcaagcggcactcagggcttgcaagtgcagccaatcaccccccagctcctcacaaacgcccagggccagatcatcgccaca

SEQ ID NO: 157291 - DNA, 120 bp, Artificial Sequence
  ENSG00000106536_10 (sequence is synthesized)
gtcattgggaaccagatcctgcccgtgatcaacacccagggcatcacgctgtcacccatcaagcccggccagcagctccaccaaccctcccagacgtcagtgggtcaagcagcctcccaa

SEQ ID NO: 157292 - DNA, 120 bp, Artificial Sequence
  ENSG00000106536_11 (sequence is synthesized)
ggcaaccttctgcacctggctcacagccaagcatccatgtctcaaagtcccgtccggcaggcttcctcttcttcctcctcatcctcctcttcttcagctttgagcgtgggccagttagtc

SEQ ID NO: 157293 - DNA, 120 bp, Artificial Sequence
  ENSG00000106536_12 (sequence is synthesized)
agcaatcctcaaacggcagcgggtgaggtggatggggttaatctggaggagatccgagaatttgccaaagcttttaaaatccggcgcctgtcccttggcctgacccagactcaggtggga

SEQ ID NO: 157294 - DNA, 120 bp, Artificial Sequence
  ENSG00000106536_13 (sequence is synthesized)
caggctctcagtgctacagagggccccgcgtacagccagtcggccatctgcaggtttgaaaagctggacatcacccctaaaagtgcccagaagatcaagccggtgcttgagcggtggatg

SEQ ID NO: 157295 - DNA, 120 bp, Artificial Sequence
  ENSG00000106536_14 (sequence is synthesized)
gctgaggctgaggcccgccatcgagcaggtatgcagaacctgaccgagtttatcgggagtgaaccatccaaaaagcgcaagcggcgcacctccttcacaccccaggcccttgagatcctc

SEQ ID NO: 157296 - DNA, 120 bp, Artificial Sequence
  ENSG00000106536_15 (sequence is synthesized)
aatgcccactttgagaagaacacacacccttctgggcaggaaatgaccgaaattgctgagaagctgaactatgaccgagaagtagttagagtttggttctgcaataagaggcaagccctg

SEQ ID NO: 157297 - DNA, 120 bp, Artificial Sequence
  ENSG00000106536_16 (sequence is synthesized)
aagaacacaattaaacgcttaaaacagcacgagccggccacggcagtccctttggagcccttaacagactctctggaagaaaactcctaaagagatgcccacccataatcagaagcaaaa

SEQ ID NO: 157298 - DNA, 120 bp, Artificial Sequence
  ENSG00000106536_17 (sequence is synthesized)
ttcacagaaactaaactccacccttgggactccacaacaacaacaacaacaaaatttaatttaatttaaaaatagccccagtcgtcatcacccttgtaagtaaatgactaagaaaactac

SEQ ID NO: 157299 - DNA, 120 bp, Artificial Sequence
  ENSG00000106536_18 (sequence is synthesized)
caagtggacagaatggtttctacatgtccgttggttttccaaaaaggaaagaagaaaatttttagaaaatttttaaacaaggaatacaccacactgaaggtgtgtgtggtaggatagttc

SEQ ID NO: 157300 - DNA, 120 bp, Artificial Sequence
  ENSG00000106536_19 (sequence is synthesized)
ccttcccccacctgtctcccccaaagccagttttttaatggacttaaagcaaaccaaataaccacgtacttttttctgtatattatgaaaatgtgaacacattttaaggaaaaagaaaaa

SEQ ID NO: 157301 - DNA, 120 bp, Artificial Sequence
  ENSG00000106536_20 (sequence is synthesized)
aaaaaactaaaccaaaaaccaacaacgaaggaacaaaaactttgatctgttcaaagcgaatacaagcctgccacctggaggaaggactgcaccccttcaggtactaagtgctgattcact

SEQ ID NO: 157302 - DNA, 120 bp, Artificial Sequence
  ENSG00000106536_21 (sequence is synthesized)
atgaaacctattaaccaaagtcagaaacatggcattgcaacgcgatcgttcgtctacgcttctccgcacgtaaagttgtgttacgaatttttacatttgtactaacagaacaataggaag

SEQ ID NO: 157303 - DNA, 120 bp, Artificial Sequence
  ENSG00000106536_22 (sequence is synthesized)
cctgatttctcccatctttcccatctactgtctccacccatggggtgggtaccattgttgaagccattctgtgaggctcactattgggtttttttgtgggggtggtagggagggtggtct

SEQ ID NO: 157304 - DNA, 120 bp, Artificial Sequence
  ENSG00000106536_23 (sequence is synthesized)
tttttctttgtctttctttttgacgggagggcatcctggatcgtgtgccaaagcatttgttgcttttttctcactatgacttgtgggtttgagaaaagaaaatggagctcgcatttctct

SEQ ID NO: 157305 - DNA, 120 bp, Artificial Sequence
  ENSG00000106536_24 (sequence is synthesized)
ctgctggaaggccacagaagtggggagaagcagtgtcttttccactcagatcctagtgaaatgcaggagagactccaaaataactagggctttgctcgatgaactgtcaacactggcata

SEQ ID NO: 157306 - DNA, 120 bp, Artificial Sequence
  ENSG00000106536_25 (sequence is synthesized)
agctgtaattgtgctcactgtccacaccagagcttgggatttttctcagtctgttggccacgtacatggagagctgaccaaaactaattttgtaatataaacataagctgcacatttggt

SEQ ID NO: 157307 - DNA, 120 bp, Artificial Sequence
  ENSG00000106536_26 (sequence is synthesized)
tcaatacttacatctatgttatgcttctgtgcaaagcaatttctctcagaagtctgatagccaaagaaatgtctcaagatttcagtcaaatacacacatgacatgcacacacccataaac

SEQ ID NO: 157308 - DNA, 120 bp, Artificial Sequence
  ENSG00000106536_27 (sequence is synthesized)
acacacacaaagaaacaggctaaaaagaaagtgatagcaactggatcattaaaggccatcgtgtatcctgttaatctcatcttttctgctacttctttcattccaatagcgatggcagac

SEQ ID NO: 157309 - DNA, 120 bp, Artificial Sequence
  ENSG00000106536_28 (sequence is synthesized)
ttttttcagggggaataattactcttcgggatatataaatggagcagaaaggtggcgggcaaatttaaacaactggaattgggggccaggttcttcaggggaaaggaagtttgaagaagc

SEQ ID NO: 157310 - DNA, 120 bp, Artificial Sequence
  ENSG00000106536_29 (sequence is synthesized)
tttcaccaaaagaaaaaaatatagaaggggcttatctaacaatcagaatagcctgcaatatgagaactagaggattatttcctttaaaaaaaataacttaaaagatctgtgggccacaat

SEQ ID NO: 157311 - DNA, 120 bp, Artificial Sequence
  ENSG00000106536_30 (sequence is synthesized)
aacctaataagcaaggacatgttgggatgtgaggacggctgtgcaggtgagcacttggcagctgccactggtgttttcacccaggtacaggcagacggtgttccattaaaggagcaggca

SEQ ID NO: 157312 - DNA, 120 bp, Artificial Sequence
  ENSG00000106536_31 (sequence is synthesized)
aaagagagctgtcaatttgcttgctgttgaaatgtacatatttatgcataatttataatcatgctaatgtattatctagaagtaagttgtgaaagaaaaaagagaaacccaatctcaagt

SEQ ID NO: 157313 - DNA, 120 bp, Artificial Sequence
  ENSG00000106536_32 (sequence is synthesized)
tgcccaactgattagaaatgccatctccttcccctaatacactccctctccctggggagtttgagtttcttctgttggctcctttgctgtttgtgtaaatgctacagtataattgtcccc

SEQ ID NO: 157314 - DNA, 120 bp, Artificial Sequence
  ENSG00000106536_33 (sequence is synthesized)
tccaatgattcatgcagcaatcaagagactaccagcaaggaaactctaaaaggaatcctggaagtggaacaagtcactcgtaaaggtgtttccattttaccagtcaatgctaactggacc

SEQ ID NO: 157315 - DNA, 120 bp, Artificial Sequence
  ENSG00000106536_34 (sequence is synthesized)
acagctaacttgatcttcaatgccaacatcacagagcccctttcgccacctcaaaaactgcacaaacatggacaacccagaaacccaaaactttattgattaaaacagattttggattct

SEQ ID NO: 157316 - DNA, 120 bp, Artificial Sequence
  ENSG00000106536_35 (sequence is synthesized)
cctaggacctgctccaaattccatcaagaaaagctccctgcgaagagaagttaacaagataacatatgatggatgctaaatatttaaatatatgccggcagcggttacataaggcctgct

SEQ ID NO: 157317 - DNA, 120 bp, Artificial Sequence
  ENSG00000106536_36 (sequence is synthesized)
cagttctgagatctataattgggagggtctaactaggacagggaaaatataaaataaaagtaatcttccagagtggaacaaaaaagaaatatattcatccgacagtcgtaacaccattca

SEQ ID NO: 157318 - DNA, 120 bp, Artificial Sequence
  ENSG00000106536_37 (sequence is synthesized)
ttcatgtgcagtgatttttttatagttttataattttgtattgttttataaattatttataaggtgttgtaatgcttcttatattaattttttacagataaattttttgctacaaggcat

SEQ ID NO: 157319 - DNA, 120 bp, Artificial Sequence
  ENSG00000106536_38 (sequence is synthesized)
aggtgcctgaaccgattcttaggaatataaattatactgtgtaactcataagtctttgggaccacacctaatgcttaattttatgatgacatttctcatgtctacttgtaaacaacttca

SEQ ID NO: 157320 - DNA, 120 bp, Artificial Sequence
  ENSG00000106536_39 (sequence is synthesized)
tatgccaatggcgtttaagtgtcttttatgtttccatgaactgaaggttaaggttgccacccacaaaaaataaaagccactttgggcatatgtgattgtatttcaagcttcagtattttt

SEQ ID NO: 157321 - DNA, 120 bp, Artificial Sequence
  ENSG00000106536_40 (sequence is synthesized)
ctcacataatttttaattattgttatctgcattttcattacttcatgaaaaaatgacagtggatattacattttacacttgtttatagattttctttctttttcaaccaagaaaatattt

SEQ ID NO: 157322 - DNA, 120 bp, Artificial Sequence
  ENSG00000106536_41 (sequence is synthesized)
tgaacaattgaaacttttaattgcatttgcaaggttttggcttctttatgttgtcatcacacagatgcacacacacatacacatacaacacaaaagagagaacaaaaaagcaaaaggagc

SEQ ID NO: 157323 - DNA, 120 bp, Artificial Sequence
  ENSG00000106536_42 (sequence is synthesized)
taggaaaaaaacaaaacaaaacaagtagaggtgtatcaaagaactcaagctataaccaaaaagaaatcgtaaaatgcctttgctcgtttctctacgctggaccaaagctcaatatttgta

SEQ ID NO: 157324 - DNA, 120 bp, Artificial Sequence
  ENSG00000106536_43 (sequence is synthesized)
ggtatatgcacattgtatagatatggctaaatgttgctgacaatctcgcaatactaaactgttcctattttaagaaaaaaaaaagaaatacaaactgttcatcaatgttttacctcagca

SEQ ID NO: 157325 - DNA, 120 bp, Artificial Sequence
  ENSG00000106536_44 (sequence is synthesized)
ctctacttgtacccagttaatgaccaagcttaaaaaaaaattgagataaaggaaattgattttcatttcaatgtttgactgtaaaatctgtttggataacattttgtaatgagctttttg

SEQ ID NO: 157326 - DNA, 120 bp, Artificial Sequence
  ENSG00000106536_45 (sequence is synthesized)
tcatgtgatttgcttgtcttcaacttgaaattatgtgaggcacatttgtttatttgttgttaagaaagtgatttttttttttttttgtcctatgtgctgtgatctagactggtcaccggg

SEQ ID NO: 157327 - DNA, 120 bp, Artificial Sequence
  ENSG00000106536_46 (sequence is synthesized)
gtcacttatgaggcaccacaaagagatctgcttctccgtgcccggagcaggcagcaggagggagggcaggaaacaggactgggttgctttggaaaaatcatcatgacaagaagttgacat

SEQ ID NO: 157328 - DNA, 120 bp, Artificial Sequence
  ENSG00000106536_47 (sequence is synthesized)
gatagacttgtgaccaagaagccaaactgaatatttaaaagctccttacttgctctgacattgaaaccaaagctgattttatctgcacaggttgcttaatatttaaaaaaaaaaaaaact

SEQ ID NO: 157329 - DNA, 120 bp, Artificial Sequence
  ENSG00000106536_48 (sequence is synthesized)
gtacttaatctagagcaatatctgtatggtcagtaaagctgcactttgtgtatttcttaacagcttcagatctgtcacttttaatttgtaccataaaaaataaataattgtttgacatga

SEQ ID NO: 157330 - DNA, 120 bp, Artificial Sequence
  ENSG00000106536_49 (sequence is synthesized)
aaaccaacaacgaaggaacaaaaactttgatctgttcaaagcgaatacaagcctgccacctggaggaaggactgcaccccttcagcctcaattatgttcaattccacaaatagttatgtg

SEQ ID NO: 157331 - DNA, 120 bp, Artificial Sequence
  ENSG00000106536_50 (sequence is synthesized)
ccgggcattgtgcttccttcatcagaacatttatcaagtttgcatgtttattagccacctctgaaatattaaaaaatgactgccattgatctctgagtggcctgtggacttggcttacgg

SEQ ID NO: 157332 - DNA, 120 bp, Artificial Sequence
  ENSG00000106536_51 (sequence is synthesized)
gaggggccaggtggctgcaggccagaaggagcagtgggaaggactgtggcccagaggagctgaatagcatcagaggagtgacctctgtacctggtcatgcagcagccacccatgcaggcc

SEQ ID NO: 157333 - DNA, 120 bp, Artificial Sequence
  ENSG00000106536_52 (sequence is synthesized)
actgggagaaacccatggtgggtgcccagtgggcctcatggacgccctgacaccagaggcggaagggggtgtattttctggattcccatctctctttgtttcaataaagacatctgcaac

SEQ ID NO: 157334 - DNA, 120 bp, Artificial Sequence
  ENSG00000106536_53 (sequence is synthesized)
agagagagaagagagagggagagggagagagaggacacgcactctaaatctgccactttttttttcctccccttcactcttttcgcccatcctaggatccaatgatagctggacaagtca

SEQ ID NO: 157335 - DNA, 120 bp, Artificial Sequence
  ENSG00000106536_54 (sequence is synthesized)
tatactggtaggaggagagtgtgtatgtgtttgcatgcaagagtaggagagaggggggaggcagatagagaagaaaatgacgtgcacctgaagtgttctcggcaggagcagttctagaat

SEQ ID NO: 157336 - DNA, 120 bp, Artificial Sequence
  ENSG00000106536_55 (sequence is synthesized)
atttcagaaataatgtttgcatcatttgtggttgagctttggcatgtgagcgagtgttcctaaagtggaaccagtgtgtaccagcccagcacaaagtcagcactcagcatttgtcaccgt

SEQ ID NO: 157337 - DNA, 120 bp, Artificial Sequence
  ENSG00000106536_56 (sequence is synthesized)
gtgaggtatggcaaggaagagcagctcctttcagactcaactgtagctctaagtgaaatcaatggccgaacaatctaacacaattggtcacatattgatagaattaaacactgctgttaa

SEQ ID NO: 157338 - DNA, 120 bp, Artificial Sequence
  ENSG00000106536_57 (sequence is synthesized)
ctgagaagccactttttcctaccacaggaagcccaagagaacactatagctagcagtctgacagccaaactgaaccctggccttttgtatcctgccaggtttgaaaagctggacatcacc

SEQ ID NO: 157339 - DNA, 120 bp, Artificial Sequence
  ENSG00000106536_58 (sequence is synthesized)
agagatccagagaaatcttgagaattgtgtgtctcttttcccttctgcctgcctcccccatctaccccaagtttcaagcgctccaaatcccagcaacaagacccagtaaacaaaatgcaa

SEQ ID NO: 157340 - DNA, 120 bp, Artificial Sequence
  ENSG00000106536_59 (sequence is synthesized)
atctatcactagcaaattcaagctgacaatactgtgaatcgaccgcattgattacattgattatatttcaaatatttacaatatggtgagacaagtctaatttcttttctaaagagttca

SEQ ID NO: 157341 - DNA, 120 bp, Artificial Sequence
  ENSG00000106536_60 (sequence is synthesized)
gcgatttttgttttctttttctttaatgctctgggtgtacgatgctctaggtatccgaattattgaacacagtttgatccaatgatagctggacaagtcagtaagcccttgctgtcagtg

SEQ ID NO: 157342 - DNA, 88 bp, Artificial Sequence
  ENSG00000106536_61 (sequence is synthesized)
ggactggagctgttcctatgcggccatcttggctcctccctagataggatccaatgatagctggacaagtcagtaagcccttgctgtc

SEQ ID NO: 157343 - DNA, 120 bp, Artificial Sequence
  ENSG00000106536_62 (sequence is synthesized)
ctctacagatcctgcacccaaggaggagtatggactaagggagaaaggtggatggaagaatttggtacttcacttcagaaatgattcagaaccaagcacacagaaagtggagaactgcct

SEQ ID NO: 157344 - DNA, 120 bp, Artificial Sequence
  ENSG00000106536_63 (sequence is synthesized)
acctagtctagctaactgtatgcatttactggagaagcaataattttacaaagaggctgggaactggtctccttattgaataaagaataagctcccagatttacattcattgattttcta

SEQ ID NO: 157345 - DNA, 80 bp, Artificial Sequence
  ENSG00000106537_0 (sequence is synthesized)
ccggctcagctgcggcggccgcaggttccaaagcgggtccgagccgccgccgcgcgcgcgccgcgcactgcagccccagg

SEQ ID NO: 157346 - DNA, 120 bp, Artificial Sequence
  ENSG00000106537_1 (sequence is synthesized)
ggccaggccccaaaggcaaggacaaagcagctgtcagggaacctccgccggagtcgaatttacgtgcagctgccggcaaccacaggttccaagatggtttgcgggggcttcgcgtgttcc

SEQ ID NO: 157347 - DNA, 120 bp, Artificial Sequence
  ENSG00000106537_2 (sequence is synthesized)
aagaactgcctgtgcgccctcaacctgctttacaccttggttagtctgctgctaattggaattgctgcgtggggcattggcttcgggctgatttccagtctccgagtggtcggcgtggtc

SEQ ID NO: 157348 - DNA, 120 bp, Artificial Sequence
  ENSG00000106537_3 (sequence is synthesized)
attgcagtgggcatcttcttgttcctgattgctttagtgggtctgattggagctgtaaaacatcatcaggtgttgctatttttttatatgattattctgttacttgtatttattgttcag

SEQ ID NO: 157349 - DNA, 120 bp, Artificial Sequence
  ENSG00000106537_4 (sequence is synthesized)
ttttctgtatcttgcgcttgtttagccctgaaccaggagcaacagggtcagcttctggaggttggttggaacaatacggcaagtgctcgaaatgacatccagagaaatctaaactgctgt

SEQ ID NO: 157350 - DNA, 120 bp, Artificial Sequence
  ENSG00000106537_5 (sequence is synthesized)
gggttccgaagtgttaacccaaatgacacctgtctggctagctgtgttaaaagtgaccactcgtgctcgccatgtgctccaatcataggagaatatgctggagaggttttgagatttgtt

SEQ ID NO: 157351 - DNA, 120 bp, Artificial Sequence
  ENSG00000106537_6 (sequence is synthesized)
ggtggcattggcctgttcttcagttttacagagatcctgggtgtttggctgacctacagatacaggaaccagaaagacccccgcgcgaatcctagtgcattcctttgatgagaaaacaag

SEQ ID NO: 157352 - DNA, 120 bp, Artificial Sequence
  ENSG00000106537_7 (sequence is synthesized)
gaaggaaacactatctggaaaagtaccttattgatagtggaattatatatttttactctatgtttctctacatgtttttttctttccgttgctgaaaaatatttgaaacttgtggtctct

SEQ ID NO: 157353 - DNA, 120 bp, Artificial Sequence
  ENSG00000106537_8 (sequence is synthesized)
gaagctcggtggcacctggaatttactgtattcattgtcgggcactgtccactgtggcctttcttagcatttttacctgcagaaaaactttgtatggtaccactgtgttggttatatggt

SEQ ID NO: 157354 - DNA, 120 bp, Artificial Sequence
  ENSG00000106537_9 (sequence is synthesized)
gaatctgaacgtacatctcactggtataattatatgtagcactgtgctgtgtagatagttcctactggaaaaagagtggaaatttattaaaatcagaaagtatgagatcctgttatgtta

SEQ ID NO: 157355 - DNA, 120 bp, Artificial Sequence
  ENSG00000106537_10 (sequence is synthesized)
agggaaatccaaattcccaattttttttggtctttttaggaaagattgttgtggtaaaaagtgttagtataaaaatgataatttacttgtagtcttttatgattacaccaatgtattcta

SEQ ID NO: 157356 - DNA, 120 bp, Artificial Sequence
  ENSG00000106537_11 (sequence is synthesized)
gaaatagttatgtcttaggaaattgtggtttaatttttgacttttacaggtaagtgcaaaggagaagtggtttcatgaaatgttctaatgtataataacatttaccttcagcctccatca

SEQ ID NO: 157357 - DNA, 120 bp, Artificial Sequence
  ENSG00000106537_12 (sequence is synthesized)
gaatggaacgagttttgagtaatcaggaagtatatctatatgatcttgatattgttttataataatttgaagtctaaaagactgcatttttaaacaagttagtattaatgcgttggccca

SEQ ID NO: 157358 - DNA, 120 bp, Artificial Sequence
  ENSG00000106537_13 (sequence is synthesized)
cgtagcaaaaagatatttgattatcttaaaaattgttaaataccgttttcatgaaatttctcagtattgtaacagcaacttgtcaaacctaagcatatttgaatatgatctcccataatt

SEQ ID NO: 157359 - DNA, 120 bp, Artificial Sequence
  ENSG00000106537_14 (sequence is synthesized)
tgaaattgaaatcgtattgtgtggctctgtatattctgttaaaaaattaaaggacagaaacctttctttgtgtatgcatgtttgaattaaaagaaagtaatggaagaattgatcgatgaa

SEQ ID NO: 157360 - DNA, 120 bp, Artificial Sequence
  ENSG00000106537_15 (sequence is synthesized)
ttagtcagctggggactaggagggcttcccagagaaaattacagtgcatttgggctttgaaggaaagataggtgatgtccatttgaagagatcaatatgttggaccgagcttggcatctg

SEQ ID NO: 157361 - DNA, 120 bp, Artificial Sequence
  ENSG00000106538_0 (sequence is synthesized)
aagatttcagctgcgggacggtcaggggagacctccaggcgcagggaaggacggccagggtgacacggaagcatgcgacggctgctgatccctctggccctgtggctgggtgcggtgggc

SEQ ID NO: 157362 - DNA, 120 bp, Artificial Sequence
  ENSG00000106538_1 (sequence is synthesized)
gtgggcgtcgccgagctcacggaagcccagcgccggggcctgcaggtggccctggaggaatttcacaagcacccgcccgtgcagtgggccttccaggagaccagtgtggagagcgccgtg

SEQ ID NO: 157363 - DNA, 120 bp, Artificial Sequence
  ENSG00000106538_2 (sequence is synthesized)
ccgagtgcaaagtcaggcccaatgggaggaaacggaaatgcctggcctgcatcaaactgggctctgaggacaaagttctgggccggttggtccactgccccatagagacccaagttctgc

SEQ ID NO: 157364 - DNA, 120 bp, Artificial Sequence
  ENSG00000106538_3 (sequence is synthesized)
gggaggctgaggagcaccaggagacccagtgcctcagggtgcagcgggctggtgaggacccccacagcttctacttccctggacagttcgccttctccaaggccctgccccgcagctaag

SEQ ID NO: 157365 - DNA, 120 bp, Artificial Sequence
  ENSG00000106538_4 (sequence is synthesized)
ccagcactgagatgcgtggtgcctccaggaccgctgcgggtggtaaccagtggaagaccccagcccccagggagaggaacccgttctatccccagccatgataataaagctgctctccca

SEQ ID NO: 157366 - DNA, 120 bp, Artificial Sequence
  ENSG00000106538_5 (sequence is synthesized)
cggacagcgaggccaagatttcagctgcgggacggtcaggggagacctccaggcgcagggaaggacgtgaggaggggaagcgggctggggcggcagccgggcggaggggcagctgcgcag

SEQ ID NO: 157367 - DNA, 120 bp, Artificial Sequence
  ENSG00000106538_6 (sequence is synthesized)
gcggaatgaggaacgcctttgctctaaggcgaccaccctggcagctcttcactgaggggcctcggtttccacatctgtcgctctccggtcccaagaccaccaggaccgacggggctctcc

SEQ ID NO: 157368 - DNA, 120 bp, Artificial Sequence
  ENSG00000106538_7 (sequence is synthesized)
gggagggtcagcccctccggtggccccagtcatgcatcaggggacggatcagaagggctaggaagaggggtcgtggggaaggccccagaaaaaagaggaaggagggaagattttgcctga

SEQ ID NO: 157369 - DNA, 120 bp, Artificial Sequence
  ENSG00000106538_8 (sequence is synthesized)
agcgggaaagccaagggctgggcggcgcgagacccccattcctagcgactggggctggctggtggcccgcggcagcccccgcgccgggaggattaggcctcccgccgctcccacccgtcc

SEQ ID NO: 157370 - DNA, 120 bp, Artificial Sequence
  ENSG00000106538_9 (sequence is synthesized)
ggaccctcccacgtgtttaggtcctcccaaaagtattcggcctccggcccctgccccttcccccggctggcctggacctcggggacgtggggggaaccccgtgggagcagggggattctg

SEQ ID NO: 157371 - DNA, 120 bp, Artificial Sequence
  ENSG00000106538_10 (sequence is synthesized)
gacggggagggagtagcggttggggagaaggctgagcggggaaaggagagaggggctccggggacggcagggaggagagtgggtcgtgccggagacccagggagagacacaatgggcaag

SEQ ID NO: 157372 - DNA, 120 bp, Artificial Sequence
  ENSG00000106538_11 (sequence is synthesized)
tgctaaaactgcaggccccagggaacagcgcgggcagggtgggagggaacggagagggccaggcggaccctaaggtcaatttggagaaagggccatttccaggctccttcacctgtgccc

SEQ ID NO: 157373 - DNA, 120 bp, Artificial Sequence
  ENSG00000106538_12 (sequence is synthesized)
agcgttctacaggcctggaccccgcccccgctccccaccctccccccagagcagggcgcgggaggaggcggctcgggctggctcggagagctgaggggcgcacacccgcttcgcagggcc

SEQ ID NO: 157374 - DNA, 120 bp, Artificial Sequence
  ENSG00000106538_13 (sequence is synthesized)
ttgggctctgagccccagccctttggagaaaaggccactgtccagcctgctggaatgtgactgcgtgagggaggtgcggatcacaccagggcttgctctgcaccctcagctggctaccgg

SEQ ID NO: 157375 - DNA, 120 bp, Artificial Sequence
  ENSG00000106541_0 (sequence is synthesized)
actcagaagcttggaccgcatcctagccgccgactcacacaaggcaggtgggtgaggaaatccagagttgccatggagaaaattccagtgtcagcattcttgctccttgtggccctctcc

SEQ ID NO: 157376 - DNA, 120 bp, Artificial Sequence
  ENSG00000106541_1 (sequence is synthesized)
tacactctggccagagataccacagtcaaacctggagccaaaaaggacacaaaggactctcgacccaaactgccccagaccctctccagaggttggggtgaccaactcatctggactcag

SEQ ID NO: 157377 - DNA, 120 bp, Artificial Sequence
  ENSG00000106541_2 (sequence is synthesized)
acatatgaagaagctctatataaatccaagacaagcaacaaacccttgatgattattcatcacttggatgagtgcccacacagtcaagctttaaagaaagtgtttgctgaaaataaagaa

SEQ ID NO: 157378 - DNA, 120 bp, Artificial Sequence
  ENSG00000106541_3 (sequence is synthesized)
atccagaaattggcagagcagtttgtcctcctcaatctggtttatgaaacaactgacaaacacctttctcctgatggccagtatgtccccaggattatgtttgttgacccatctctgaca

SEQ ID NO: 157379 - DNA, 120 bp, Artificial Sequence
  ENSG00000106541_4 (sequence is synthesized)
gttagagccgatatcactggaagatattcaaatcgtctctatgcttacgaacctgcagatacagctctgttgcttgacaacatgaagaaagctctcaagttgctgaagactgaattgtaa

SEQ ID NO: 157380 - DNA, 120 bp, Artificial Sequence
  ENSG00000106541_5 (sequence is synthesized)
agaaaaaaaatctccaagcccttctgtctgtcaggccttgagacttgaaaccagaagaagtgtgagaagactggctagtgtggaagcatagtgaacacactgattaggttatggtttaat

SEQ ID NO: 157381 - DNA, 120 bp, Artificial Sequence
  ENSG00000106541_6 (sequence is synthesized)
gttacaacaactattttttaagaaaaacaagttttagaaatttggtttcaagtgtacatgtgtgaaaacaatattgtatactaccatagtgagccatgattttctaaaaaaaaaaataaa

SEQ ID NO: 157382 - DNA, 120 bp, Artificial Sequence
  ENSG00000106541_7 (sequence is synthesized)
gttttctccaacttggtctttcacagtggttcgtttaccaaataggattaaacacacacaaaatgctcaaggaagggacaagacaaaaccaaaactagttcaaatgatgaagaccaaaga

SEQ ID NO: 157383 - DNA, 120 bp, Artificial Sequence
  ENSG00000106541_8 (sequence is synthesized)
ccaagttatcatctcaccacaccacaggttctcactagatgactgtaagtagacacgagcttaatcaacagaagtatcaagccatgtgctttagcataaaagaatatttagaaaaacatc

SEQ ID NO: 157384 - DNA, 120 bp, Artificial Sequence
  ENSG00000106541_9 (sequence is synthesized)
ccaagaaaatcacatcactacctagagtcaactctggccaggaactctaaggtacacactttcatttagtaattaaattttagtcagattttgcccaacctaatgctctcagggaaagcc

SEQ ID NO: 157385 - DNA, 120 bp, Artificial Sequence
  ENSG00000106541_10 (sequence is synthesized)
tctggcaagtagctttctccttcagaggtctaatttagtagaaaggtcatccaaagaacatctgcactcctgaacacaccctgaagaaatcctgggaattgaccttgtaatcgatttgtc

SEQ ID NO: 157386 - DNA, 120 bp, Artificial Sequence
  ENSG00000106541_11 (sequence is synthesized)
tgtcaaggtcctaaagtactggagtgaaataaattcagccaacatgtgactaattggaagaagagcaaagggtggtgacgtgttgatgaggcagatggagatcagaggttactagggttt

SEQ ID NO: 157387 - DNA, 120 bp, Artificial Sequence
  ENSG00000106541_12 (sequence is synthesized)
aggaaacgtgaaaggctgtggcatcagggtaggggagcattctgcctaacagaaattagaattgtgtgttaatgtcttcactctatacttaatctcacattcattaatatatggaattcc

SEQ ID NO: 157388 - DNA, 120 bp, Artificial Sequence
  ENSG00000106541_13 (sequence is synthesized)
tctactgcccagcccctcctgatttctttggcccctggactatggtgctgtatataatgctttgcagtatctgttgcttgtcttgattaacttttttggataaaaccttttttgaacaga

SEQ ID NO: 157389 - DNA, 120 bp, Artificial Sequence
  ENSG00000106541_14 (sequence is synthesized)
atgttgcccaagagttgaacacctctattgctgtagtgatgggactagaggctgcatggtgaggtgagagagagctaggcttagggacgcctcggactcagtttgaccctaactagcctt

SEQ ID NO: 157390 - DNA, 120 bp, Artificial Sequence
  ENSG00000106541_15 (sequence is synthesized)
gcatcttcaggcaaatcacactctttccatctcaggtttgtttgtttttaatctcaattgaagatgaattatttagattaggtatctttttctctaggaggattctatgaccacattacc

SEQ ID NO: 157391 - DNA, 120 bp, Artificial Sequence
  ENSG00000106541_16 (sequence is synthesized)
tataattatttctactttctccaggggtttttcttcttctttagtatagggtctattatcccagtctttaccattgcttttcaacagctttgggtctgaatttatacaagcttcaaatat

SEQ ID NO: 157392 - DNA, 120 bp, Artificial Sequence
  ENSG00000106541_17 (sequence is synthesized)
actgattcatttcattctaggttggggtgaccaactcatctggactcagacatatgaagaagctctatataaatccaagacaaggtaaagatcaggattactcagagctccctcaaagct

SEQ ID NO: 157393 - DNA, 120 bp, Artificial Sequence
  ENSG00000106541_18 (sequence is synthesized)
agattcacaaggccaacagacaacccaaagtcattaagccatgagagtggaatgaatctatgaaaactcaatgaagacagaacaagagaaaaatcttttcagccacgatgaattaggaga

SEQ ID NO: 157394 - DNA, 120 bp, Artificial Sequence
  ENSG00000106541_19 (sequence is synthesized)
acaagatgtcaaattacactgatgctgagtcaagcttctcaaagcaagagataatcaggctgacctattgctgaggactatgagaaaaaagttattacagaatgagtcatatggaaaaca

SEQ ID NO: 157395 - DNA, 120 bp, Artificial Sequence
  ENSG00000106541_20 (sequence is synthesized)
aaatggatgattcatttttcctatacatcttagttatactgcattaactgggattgcttccaaatatcccatctcataaattagagagaaaaaagatatttcgttgtattaataatccat

SEQ ID NO: 157396 - DNA, 120 bp, Artificial Sequence
  ENSG00000106546_0 (sequence is synthesized)
agtggctggggagtcccgtcgacgctctgttccgagagcgtgccccggaccgccagctcagaacaggggcagccgtgtagccgaacggaagctgggagcagccgggactggtggcccgcg

SEQ ID NO: 157397 - DNA, 120 bp, Artificial Sequence
  ENSG00000106546_1 (sequence is synthesized)
cccgagctccgcaggcgggaagcaccctggatttaggaagtcccgggagcagcgcggcggcacctccctcacccaaggggccgcggcgacggtcacggggcgcggcgccaccgtgagcga

SEQ ID NO: 157398 - DNA, 120 bp, Artificial Sequence
  ENSG00000106546_2 (sequence is synthesized)
cccaggccaggattctaaatagacggcccaggctcctcctccgcccgggccgcctcacctgcgggcattgccgcgccgcctccgccggtgtagacggcacctgcgccgccttgctcgcgg

SEQ ID NO: 157399 - DNA, 120 bp, Artificial Sequence
  ENSG00000106546_3 (sequence is synthesized)
gtctccgcccctcgcccaccctcactgcgccaggcccaggcagctcacctgtactggcgcgggctgcggaagcctgcgtgagccgaggcgttgaggcgcggcgcccacgccactgtcccg

SEQ ID NO: 157400 - DNA, 120 bp, Artificial Sequence
  ENSG00000106546_4 (sequence is synthesized)
ctgtcccgagaggacgcaggtggagcgggcgcggcttcgcggaacccggcgccggccgccgcagtggtcccagcctacaccgggttccggggacccggccgccagtgcccggggagtagc

SEQ ID NO: 157401 - DNA, 120 bp, Artificial Sequence
  ENSG00000106546_5 (sequence is synthesized)
tcggctgggcaccatgaacagcagcagcgccaacatcacctacgccagtcgcaagcggcggaagccggtgcagaaaacagtaaagccaatcccagctgaaggaatcaagtcaaatccttc

SEQ ID NO: 157402 - DNA, 120 bp, Artificial Sequence
  ENSG00000106546_6 (sequence is synthesized)
caagcggcatagagaccgacttaatacagagttggaccgtttggctagcctgctgcctttcccacaagatgttattaataagttggacaaactttcagttcttaggctcagcgtcagtta

SEQ ID NO: 157403 - DNA, 120 bp, Artificial Sequence
  ENSG00000106546_7 (sequence is synthesized)
cctgagagccaagagcttctttgatgttgcattaaaatcctcccctactgaaagaaacggaggccaggataactgtagagcagcaaatttcagagaaggcctgaacttacaagaaggaga

SEQ ID NO: 157404 - DNA, 120 bp, Artificial Sequence
  ENSG00000106546_8 (sequence is synthesized)
attcttattacaggctctgaatggctttgtattagttgtcactacagatgctttggtcttttatgcttcttctactatacaagattatctagggtttcagcagtctgatgtcatacatca

SEQ ID NO: 157405 - DNA, 120 bp, Artificial Sequence
  ENSG00000106546_9 (sequence is synthesized)
gagtgtatatgaacttatccataccgaagaccgagctgaatttcagcgtcagctacactgggcattaaatccttctcagtgtacagagtctggacaaggaattgaagaagccactggtct

SEQ ID NO: 157406 - DNA, 120 bp, Artificial Sequence
  ENSG00000106546_10 (sequence is synthesized)
cccccagacagtagtctgttataacccagaccagattcctccagaaaactctcctttaatggagaggtgcttcatatgtcgtctaaggtgtctgctggataattcatctggttttctggc

SEQ ID NO: 157407 - DNA, 120 bp, Artificial Sequence
  ENSG00000106546_11 (sequence is synthesized)
aatgaatttccaagggaagttaaagtatcttcatggacagaaaaagaaagggaaagatggatcaatacttccacctcagttggctttgtttgcgatagctactccacttcagccaccatc

SEQ ID NO: 157408 - DNA, 120 bp, Artificial Sequence
  ENSG00000106546_12 (sequence is synthesized)
catacttgaaatccggaccaaaaattttatctttagaaccaaacacaaactagacttcacacctattggttgtgatgccaaaggaagaattgttttaggatatactgaagcagagctgtg

SEQ ID NO: 157409 - DNA, 120 bp, Artificial Sequence
  ENSG00000106546_13 (sequence is synthesized)
cacgagaggctcaggttatcagtttattcatgcagctgatatgctttattgtgccgagtcccatatccgaatgattaagactggagaaagtggcatgatagttttccggcttcttacaaa

SEQ ID NO: 157410 - DNA, 120 bp, Artificial Sequence
  ENSG00000106546_14 (sequence is synthesized)
aaacaaccgatggacttgggtccagtctaatgcacgcctgctttataaaaatggaagaccagattatatcattgtaactcagagaccactaacagatgaggaaggaacagagcatttacg

SEQ ID NO: 157411 - DNA, 120 bp, Artificial Sequence
  ENSG00000106546_15 (sequence is synthesized)
aaaacgaaatacgaagttgccttttatgtttaccactggagaagctgtgttgtatgaggcaaccaacccttttcctgccataatggatcccttaccactaaggactaaaaatggcactag

SEQ ID NO: 157412 - DNA, 120 bp, Artificial Sequence
  ENSG00000106546_16 (sequence is synthesized)
tggaaaagactctgctaccacatccactctaagcaaggactctctcaatcctagttccctcctggctgccatgatgcaacaagatgagtctatttatctctatcctgcttcaagtacttc

SEQ ID NO: 157413 - DNA, 120 bp, Artificial Sequence
  ENSG00000106546_17 (sequence is synthesized)
aagtactgcaccttttgaaaacaactttttcaacgaatctatgaatgaatgcagaaattggcaagataatactgcaccgatgggaaatgatactatcctgaaacatgagcaaattgacca

SEQ ID NO: 157414 - DNA, 120 bp, Artificial Sequence
  ENSG00000106546_18 (sequence is synthesized)
gcctcaggatgtgaactcatttgctggaggtcacccagggctctttcaagatagtaaaaacagtgacttgtacagcataatgaaaaacctaggcattgattttgaagacatcagacacat

SEQ ID NO: 157415 - DNA, 120 bp, Artificial Sequence
  ENSG00000106546_19 (sequence is synthesized)
gcagaatgaaaaatttttcagaaatgatttttctggtgaggttgacttcagagacattgacttaacggatgaaatcctgacgtatgtccaagattctttaagtaagtctcccttcatacc

SEQ ID NO: 157416 - DNA, 120 bp, Artificial Sequence
  ENSG00000106546_20 (sequence is synthesized)
ttcagattatcaacagcaacagtccttggctctgaactcaagctgtatggtacaggaacacctacatctagaacagcaacagcaacatcaccaaaagcaagtagtagtggagccacagca

SEQ ID NO: 157417 - DNA, 120 bp, Artificial Sequence
  ENSG00000106546_21 (sequence is synthesized)
acagctgtgtcagaagatgaagcacatgcaagttaatggcatgtttgaaaattggaactctaaccaattcgtgcctttcaattgtccacagcaagacccacaacaatataatgtctttac

SEQ ID NO: 157418 - DNA, 120 bp, Artificial Sequence
  ENSG00000106546_22 (sequence is synthesized)
agacttacatgggatcagtcaagagttcccctacaaatctgaaatggattctatgccttatacacagaactttatttcctgtaatcagcctgtattaccacaacattccaaatgtacaga

SEQ ID NO: 157419 - DNA, 120 bp, Artificial Sequence
  ENSG00000106546_23 (sequence is synthesized)
gctggactaccctatggggagttttgaaccatccccataccccactacttctagtttagaagattttgtcacttgtttacaacttcctgaaaaccaaaagcatggattaaatccacagtc

SEQ ID NO: 157420 - DNA, 120 bp, Artificial Sequence
  ENSG00000106546_24 (sequence is synthesized)
agccataataactcctcagacatgttatgctggggccgtgtcgatgtatcagtgccagccagaacctcagcacacccacgtgggtcagatgcagtacaatccagtactgccaggccaaca

SEQ ID NO: 157421 - DNA, 120 bp, Artificial Sequence
  ENSG00000106546_25 (sequence is synthesized)
ggcatttttaaacaagtttcagaatggagttttaaatgaaacatatccagctgaattaaataacataaataacactcagactaccacacatcttcagccacttcatcatccgtcagaagc

SEQ ID NO: 157422 - DNA, 120 bp, Artificial Sequence
  ENSG00000106546_26 (sequence is synthesized)
accttttcctgatttgacatccagtggattcctgtaattccaagcccaattttgaccctggtttttggattaaattagtttgtgaaggattatggaaaaataaaactgtcactgttggac

SEQ ID NO: 157423 - DNA, 120 bp, Artificial Sequence
  ENSG00000106546_27 (sequence is synthesized)
gtcagcaagttcacatggaggcattgatgcatgctattcacaattattccaaaccaaattttaatttttgcttttagaaaagggagtttaaaaatggtatcaaaattacatatactacag

SEQ ID NO: 157424 - DNA, 120 bp, Artificial Sequence
  ENSG00000106546_28 (sequence is synthesized)
tcaagatagaaagggtgctgccacggagtggtgaggtaccgtctacatttcacattattctgggcaccacaaaatatacaaaactttatcagggaaactaagattcttttaaattagaaa

SEQ ID NO: 157425 - DNA, 120 bp, Artificial Sequence
  ENSG00000106546_29 (sequence is synthesized)
atattctctatttgaattatttctgtcacagtaaaaataaaatactttgagttttgagctactggattcttattagttccccaaatacaaagttagagaactaaactagtttttcctatc

SEQ ID NO: 157426 - DNA, 120 bp, Artificial Sequence
  ENSG00000106546_30 (sequence is synthesized)
atgttaacctctgcttttatctcagatgttaaaataaatggtttggtgctttttataaaaagataatctcagtgctttcctccttcactgtttcatctaagtgcctcacatttttttcta

SEQ ID NO: 157427 - DNA, 120 bp, Artificial Sequence
  ENSG00000106546_31 (sequence is synthesized)
cctataacactctaggatgtatattttatataaagtattctttttcttttttaaattaatatctttctgcacacaaatattatttgtgtttcctaaatccaaccattttcattaattcag

SEQ ID NO: 157428 - DNA, 120 bp, Artificial Sequence
  ENSG00000106546_32 (sequence is synthesized)
gcatattttaactccactgcttacctactttcttcaggtaaagggcaaataatgatcgaaaaaataattatttattacataatttagttgtttctagactataaatgttgctatgtgcct

SEQ ID NO: 157429 - DNA, 120 bp, Artificial Sequence
  ENSG00000106546_33 (sequence is synthesized)
gccttatgttgaaaaaatttaaaagtaaaatgtctttccaaattatttcttaattattataaaaatattaagacaatagcacttaaattcctcaacagtgttttcagaagaaataaatat

SEQ ID NO: 157430 - DNA, 120 bp, Artificial Sequence
  ENSG00000106546_34 (sequence is synthesized)
ctctttacctttattgatatctccatgatgatagttgaatgttgcaatgtgaaaaatctgctgttaactgcaaccttgtttattaaattgcaagaagctttatttctagctttttaatta

SEQ ID NO: 157431 - DNA, 120 bp, Artificial Sequence
  ENSG00000106546_35 (sequence is synthesized)
agcaaagcacccatttcaatgtgtataaattgtctttaaaaactgttttagacctataatccttgataatatattgtgttgactttataaatttcgcttcttagaacagtggaaactatg

SEQ ID NO: 157432 - DNA, 120 bp, Artificial Sequence
  ENSG00000106546_36 (sequence is synthesized)
tgtttttctcatatttgaggagtgttaagattgcagatagcaaggtttggtgcaaagtattgtaatgagtgaattgaatggtgcattgtatagatataatgaacaaaattatttgtaaga

SEQ ID NO: 157433 - DNA, 120 bp, Artificial Sequence
  ENSG00000106546_37 (sequence is synthesized)
tatttgcagtttttcattttaaaaagtccataccttatatatgcacttaatttgttggggctttacatactttatcaatgtgtctttctaagaaatcaagtaatgaatccaactgcttaa

SEQ ID NO: 157434 - DNA, 120 bp, Artificial Sequence
  ENSG00000106546_38 (sequence is synthesized)
agttggtattaataaaaagacaaccacatagttcgtttaccttcaaactttaggtttttttaatgatatactgatcttcattaccaataggcaaattaatcaccctaccaactttactgt

SEQ ID NO: 157435 - DNA, 77 bp, Artificial Sequence
  ENSG00000106546_39 (sequence is synthesized)
ttaccaataggcaaattaatcaccctaccaactttactgtcctaacatggtttaaaagaaaaaatgacacactctgc

SEQ ID NO: 157436 - DNA, 65 bp, Artificial Sequence
  ENSG00000106546_40 (sequence is synthesized)
acagctcttcttttctttagatatgagagctgaagagcttagacacattttgcatgtattatttg

SEQ ID NO: 157437 - DNA, 120 bp, Artificial Sequence
  ENSG00000106546_41 (sequence is synthesized)
tctttagatatgagagctgaagagcttagacacattttgcatgtattatttgaaaatctgatggaatcccaaactgagatgtattaaaatacaatttttggccgggtgcagtggctcacg

SEQ ID NO: 157438 - DNA, 87 bp, Artificial Sequence
  ENSG00000106546_42 (sequence is synthesized)
tagcctgaacctgggaatcggaggttgcacaatagaccgagactccgtctccaaaaaaaaaaaaaatacaatttttatttcttttac

SEQ ID NO: 157439 - DNA, 120 bp, Artificial Sequence
  ENSG00000106546_43 (sequence is synthesized)
tctccaaaaaaaaaaaaaatacaatttttatttcttttactttttttagtaagttaatgtatataaaaatggcttcggacaaaatatctctgagttctgtgtattttcagtcaaaacttt

SEQ ID NO: 157440 - DNA, 120 bp, Artificial Sequence
  ENSG00000106546_44 (sequence is synthesized)
aaacctgtagaatcaatttaagtgttggaaaaaatttgtctgaaacatttcataatttgtttccagcatgaggtatctaaggatttagaccagaggtctagattaatactctatttttac

SEQ ID NO: 157441 - DNA, 120 bp, Artificial Sequence
  ENSG00000106546_45 (sequence is synthesized)
atttaaaccttttattataagtcttacataaaccatttttgttactctcttccacatgttactggataaattgtttagtggaaaataggctttttaatcatgaatatgatgacaatcagt

SEQ ID NO: 157442 - DNA, 120 bp, Artificial Sequence
  ENSG00000106546_46 (sequence is synthesized)
aaattaaaagtttgaaaagcaatattgtatatttttatctatataaaataactaaaatgtatctaagaataataaaatcacgttaaaccaaatacacgtttgtctgtattgttaagtgcc

SEQ ID NO: 157443 - DNA, 120 bp, Artificial Sequence
  ENSG00000106546_47 (sequence is synthesized)
ttgttaagtgccaaacaaaggatacttagtgcactgctacattgtgggatttatttctagatgatgtgcacatctaaggatatggatgtgtctaatttagtcttttcctgtaccaggttt

SEQ ID NO: 157444 - DNA, 120 bp, Artificial Sequence
  ENSG00000106546_48 (sequence is synthesized)
ttcttacaatacctgaagacttaccagtattctagtgtattatgaagctttcaacattactatgcacaaactagtgtttttcgatgttactaaattttaggtaaatgctttcatggcttt

SEQ ID NO: 157445 - DNA, 120 bp, Artificial Sequence
  ENSG00000106546_49 (sequence is synthesized)
atggcttttttcttcaaaatgttactgcttacatatatcatgcatagatttttgcttaaagtatgatttataatatcctcattatcaaagttgtatacaataatatataataaaataaca

SEQ ID NO: 157446 - DNA, 120 bp, Artificial Sequence
  ENSG00000106546_50 (sequence is synthesized)
agatatagtgtgtagtctggtaggaagaaccatgtccccctccacccactttgttcacctcccaatccatggaaactatgaatatattactttagatggcaaaagggactttgcagaggt

SEQ ID NO: 157447 - DNA, 120 bp, Artificial Sequence
  ENSG00000106546_51 (sequence is synthesized)
gattaaattaagaaccttgaagtgagaggattagactagaatatccaggtgggaccaatctagtcaccccagtctttaaaagcagagaaactttgccagctatggccaatgagtgctatg

SEQ ID NO: 157448 - DNA, 120 bp, Artificial Sequence
  ENSG00000106546_52 (sequence is synthesized)
tcgatgggaaagtcagtaggatgcgacttgagcgtggaaaggggccacgggccgaggaatgcgggcagcctgcagaagctgaaagctggaaaatgcaaggaatggagtattgagtgcctt

SEQ ID NO: 157449 - DNA, 120 bp, Artificial Sequence
  ENSG00000106546_53 (sequence is synthesized)
ttcaggaattaattctgctgttagagaagtacctatgtcttcagagaatgtaaaggtcataagaccctcatttcagaagaggtcctgcccatacctggaagggatgctacacagtgagac

SEQ ID NO: 157450 - DNA, 120 bp, Artificial Sequence
  ENSG00000106546_54 (sequence is synthesized)
caagaagactgaacagagaggcctttctgggtttcccctctgagtctattagcatcagctgtatcccttttgttccatcacatttctacatggttgctcagtcttcaatcgtgcccattc

SEQ ID NO: 157451 - DNA, 120 bp, Artificial Sequence
  ENSG00000106546_55 (sequence is synthesized)
agtgaaatctccataagacgcccaaagaggatggggtacagagagcttggacagctgaacacaaagagacttacaggaaagtgaacaagactcatctacagtagggtgggagcaccctaa

SEQ ID NO: 157452 - DNA, 120 bp, Artificial Sequence
  ENSG00000106546_56 (sequence is synthesized)
ctccatgcgaatggaagctcctgcacttggtaccttttcaaacctcgcactatgaatttctttatctggctttttatttatatcctttaaaatatcttttataataaatggataaatgtg

SEQ ID NO: 157453 - DNA, 120 bp, Artificial Sequence
  ENSG00000106546_57 (sequence is synthesized)
tttccctgagttttgtgagctgctctagcaaattgactacgcttaaagagggggttgtgggaaccccaaccggaagctggtagatcagaagttcagaggcctggacttgcgactggtgtc

SEQ ID NO: 157454 - DNA, 120 bp, Artificial Sequence
  ENSG00000106546_58 (sequence is synthesized)
tgacgcggggcagtcttgtgggaactgacactatctcctggaagatgacataagaattgaattggattagaagacgcccagctggtgtccactacagaactgattgcttgcttgttggtt

SEQ ID NO: 157455 - DNA, 120 bp, Artificial Sequence
  ENSG00000106546_59 (sequence is synthesized)
gggagaaatctccacacattgggtaaaagaagtttgctgtgttgattgctgtggtgtaagagcagaagaaaaagttattttctacacagagaaagaaacccatacacatacagctgcatc

SEQ ID NO: 157456 - DNA, 120 bp, Artificial Sequence
  ENSG00000106546_60 (sequence is synthesized)
tgaaacctcagaaactaagctcaacccaattgattaaaaggatgttctttggataagcagatggacacaaaccatactttgagaaccatgttccacagtgccaatacaggaagtttctag

SEQ ID NO: 157457 - DNA, 120 bp, Artificial Sequence
  ENSG00000106546_61 (sequence is synthesized)
ctcttatgtgaaagcataaaaataattcaagcagactttagtctgtaaataaaaattgaaaagtttaattcatctagaaagaagagcacaggtgagagacattgagaagatagaattgac

SEQ ID NO: 157458 - DNA, 120 bp, Artificial Sequence
  ENSG00000106546_62 (sequence is synthesized)
gaacttgattgagagctacatgtgcagagctatagaaagaataataaaactctagggttttatcttgggcatatgaaagacacatgaaaagctagtgtcattggtaaaaaagaagaaaaa

SEQ ID NO: 157459 - DNA, 120 bp, Artificial Sequence
  ENSG00000106554_0 (sequence is synthesized)
aggaccggcgccttctccttgcttctgggggtcgtggccttgctcccgctgtgcgggaaaagaatccaggcccttccacgcgcgtgtgggtgcgggggccccgaagtgctcgtggttccc

SEQ ID NO: 157460 - DNA, 120 bp, Artificial Sequence
  ENSG00000106554_1 (sequence is synthesized)
cgctaggtctccgctggggcaggaaccggaatcatgggtgggaccaccagcacccgccgggtcaccttcgaggcggacgagaatgagaacatcaccgtggtgaagggcatccggctttcg

SEQ ID NO: 157461 - DNA, 120 bp, Artificial Sequence
  ENSG00000106554_2 (sequence is synthesized)
gaaaatgtgattgatcgaatgaaggaatcctctccatctggttcgaagtctcagcggtattctggtgcttatggtgcctcagtttctgatgaagaattgaaaagaagagtagctgaggag

SEQ ID NO: 157462 - DNA, 120 bp, Artificial Sequence
  ENSG00000106554_3 (sequence is synthesized)
ctggcattggagcaagccaagaaagaatccgaagatcagaaacgactaaagcaagccaaagagctggaccgagagagggctgctgccaatgagcagttaaccagagccatccttcgggag

SEQ ID NO: 157463 - DNA, 120 bp, Artificial Sequence
  ENSG00000106554_4 (sequence is synthesized)
aggatatgtagcgaggaggaacgcgctaaggcaaagcacctggctaggcagctggaagagaaagaccgagtgctaaagaagcaggatgcattctacaaagaacagctggctagactggag

SEQ ID NO: 157464 - DNA, 120 bp, Artificial Sequence
  ENSG00000106554_5 (sequence is synthesized)
gagaggagctcagagttctacagagtcaccactgaacaatatcagaaagctgctgaagaggtggaagcaaagttcaagcgatatgagtctcatccagtctgtgctgatctgcaggccaaa

SEQ ID NO: 157465 - DNA, 120 bp, Artificial Sequence
  ENSG00000106554_6 (sequence is synthesized)
ctccgctctggccacccagtatatgcactgtgtcaatcatgccaaacagagcatgcttgagaagggaggataaaaactttcagaatgagcaaaacaccatcaacgttaattccagagatg

SEQ ID NO: 157466 - DNA, 120 bp, Artificial Sequence
  ENSG00000106554_7 (sequence is synthesized)
gaacattttttttcctagtgagaaaacaacccatttgaagagaagaccactaatgagaagaccactaaagagagacatcaagaatggattcagcagaatcatttcacgttttgaacagca

SEQ ID NO: 157467 - DNA, 120 bp, Artificial Sequence
  ENSG00000106554_8 (sequence is synthesized)
gcagtttgaagggccaaagccttgatcagggatcagtcattaaaggacactcttgagtattagtaaaccctcttatgatgattaaaagagaagggcagccctctccaccttttggtactt

SEQ ID NO: 157468 - DNA, 120 bp, Artificial Sequence
  ENSG00000106554_9 (sequence is synthesized)
tctattcaacttgcactgaccataaaatgtttctcttctgaacaagccccatcatttggtgaacctccaccctaacaaagtaggatggggttgggggctaaattaattggagtggggcga

SEQ ID NO: 157469 - DNA, 120 bp, Artificial Sequence
  ENSG00000106554_10 (sequence is synthesized)
ggagagagccagaaaacatagatccgagggcagcagtgctgggtggagagagccagaaaacagatctggaggcagcagtgctggatggaattgtctaggctgtggcatgttggttttgtc

SEQ ID NO: 157470 - DNA, 120 bp, Artificial Sequence
  ENSG00000106554_11 (sequence is synthesized)
tttcttttctcctttgattatgtaagagctatttcattataacttattatggtgattatacaggcaagaagacaaaaaggagagaaaatgtacctcttctactggaataatgtttatgat

SEQ ID NO: 157471 - DNA, 120 bp, Artificial Sequence
  ENSG00000106554_12 (sequence is synthesized)
tacaagtgagataaggtatttttatcaatatgaaggcaaccttggctgataaaacctctatagtgaatactcacatctttacttcactcactatcaataataaatatattttctgacaaa

SEQ ID NO: 157472 - DNA, 120 bp, Artificial Sequence
  ENSG00000106554_13 (sequence is synthesized)
ctaaggcaaagcacctgataaaagtggagctgctctgggtgaaacctggagtgttgactgcttagcctccacttcggccttcctagaaacccagatgttactcctcggaacctttagtcc

SEQ ID NO: 157473 - DNA, 120 bp, Artificial Sequence
  ENSG00000106554_14 (sequence is synthesized)
tcattggagcacagttgggaactcactggacagggaaaatgggaccatggaatggagaactttgaactgaagagtgagggggattttcctagttcactaggcaattgggaaacactaaaa

SEQ ID NO: 157474 - DNA, 120 bp, Artificial Sequence
  ENSG00000106554_15 (sequence is synthesized)
ctttctaagaagaaggctcatttctagtctctcccattctttaccttagtcacttctctgaaagaccaacccatgaccagctgcaaacagagaacatgaaaggaagtccatgcgtaatga

SEQ ID NO: 157475 - DNA, 120 bp, Artificial Sequence
  ENSG00000106554_16 (sequence is synthesized)
tagtgaagccagaatagaggtggtagaccaagaaagaaatgtcagtggactgactggcagctgccctaagaacagtacatgtgttgagtggaacaaagggaataagagaggtggaagcaa

SEQ ID NO: 157476 - DNA, 120 bp, Artificial Sequence
  ENSG00000106554_17 (sequence is synthesized)
agtcagtcattgtgaaaggggaataatttcagaattaaagacagtaagttttgagtaactcaactgaaaattaaatttgttgtacgtctaagctgaaggattttttgaggaagctgaaaa

SEQ ID NO: 157477 - DNA, 120 bp, Artificial Sequence
  ENSG00000106554_18 (sequence is synthesized)
aatatcaggtcagtgggttgaaaagtcatttctatgtatattaaagtctccaaatttggaagctaaggatgtagtggaggaggttaatagtgctcatgtttgaggaaggtacgagagcaa

SEQ ID NO: 157478 - DNA, 120 bp, Artificial Sequence
  ENSG00000106554_19 (sequence is synthesized)
aactcttagtttccagcgggcagaagaataccttggttggcatttctctttgcctcccagcttttactcttttgaatcttatctttgaagcactctttctccacctctttttgcctgaat

SEQ ID NO: 157479 - DNA, 120 bp, Artificial Sequence
  ENSG00000106554_20 (sequence is synthesized)
ttggacatactgtcttactctcttagtttatggagaccagcaagattcaaaaactcaaaaaactcattaaatatatacacacactcagcaagacataaaaagagatttcacaaaaaaatg

SEQ ID NO: 157480 - DNA, 120 bp, Artificial Sequence
  ENSG00000106554_21 (sequence is synthesized)
tgaaagtatcaaaagatttgttactcaacataactaaaatattaagcaacatgttttgattggaatagcatatctgcagtctgttctgttttacctaataaatcttgtctattgtctgtc

SEQ ID NO: 157481 - DNA, 120 bp, Artificial Sequence
  ENSG00000106554_22 (sequence is synthesized)
gaaagaatccgaagatcagaaacgagaagaaacttcagaaacagcattaagaaagttttgtgtgcagtcttttagcagcaactttttggagtcacagaacatgtatacgttattactaaa

SEQ ID NO: 157482 - DNA, 120 bp, Artificial Sequence
  ENSG00000106554_23 (sequence is synthesized)
atcagaaagctgctgaagaggtggaagcaaagttcaagtttggtgaaatgaaatatcacaaaacaggactctttattttgttacctcttgtcccagtatggctcctagtaggagaactcg

SEQ ID NO: 157483 - DNA, 120 bp, Artificial Sequence
  ENSG00000106554_24 (sequence is synthesized)
ttacttctccctcatttcaggcaacctgagcaccagtgaaactgtgactggcatttgcagggacctaaaaggcttactcagtgccagacactgtgtggagagcttaaacgttatcttact

SEQ ID NO: 157484 - DNA, 120 bp, Artificial Sequence
  ENSG00000106554_25 (sequence is synthesized)
aatcttcacaacaatgttaaacagtaggaaatgaggaaaaatttgcatcttagagagatcaagaaacttgcccaagcttccactgcaagcgatatgagtctcatccagtctgtgctgatc

SEQ ID NO: 157485 - DNA, 120 bp, Artificial Sequence
  ENSG00000106554_26 (sequence is synthesized)
gttcccctaaggacccctacctgataacacttttaagactggatccagcctttctttgcggaatcaccatggcggctgggaccctgtacacgtatcctgaaaactggagggccttcaagg

SEQ ID NO: 157486 - DNA, 120 bp, Artificial Sequence
  ENSG00000106554_27 (sequence is synthesized)
ctctcatcgctgctcagtacagcggggctcagatccgcgtgctctccgcaccaccccacttccattttggccaaaccaaccgcacctctgaatttcttcgcaaatttcctgccggcaagg

SEQ ID NO: 157487 - DNA, 120 bp, Artificial Sequence
  ENSG00000106560_0 (sequence is synthesized)
ctttctttttctcttggagctgagctataagacaacaggactgaacagggagccaactgtttctttgaacagtaaatcaggaacaccaatggaccaaaatgaacacagtcactggggacc

SEQ ID NO: 157488 - DNA, 120 bp, Artificial Sequence
  ENSG00000106560_1 (sequence is synthesized)
acatgcaaagggccaatgtgccagcagatctgagctgagaatcatcctggtgggcaaaacaggaactggcaaaagtgctgcagggaacagcatcctcaggaagcaagcatttgaatcgaa

SEQ ID NO: 157489 - DNA, 120 bp, Artificial Sequence
  ENSG00000106560_2 (sequence is synthesized)
gctgggttcccagaccttgactaagacttgcagcaaaagtcagggaagctggggaaatagagagattgtcattattgacacaccagatatgttttcttggaaggaccactgtgaagctct

SEQ ID NO: 157490 - DNA, 120 bp, Artificial Sequence
  ENSG00000106560_3 (sequence is synthesized)
gtacaaagaggtgcagaggtgctacttgctgtctgcaccaggaccccatgtgctgctcctggtgactcagctgggccgctatacctcacaggaccagcaggctgcacagagggtgaagga

SEQ ID NO: 157491 - DNA, 120 bp, Artificial Sequence
  ENSG00000106560_4 (sequence is synthesized)
gatctttggagaggatgccatgggacacacaattgtcctctttacccacaaggaagacctcaatggtggctccctgatggattacatgcacgactcagataacaaagccctaagcaagct

SEQ ID NO: 157492 - DNA, 120 bp, Artificial Sequence
  ENSG00000106560_5 (sequence is synthesized)
ggtggcagcatgtggtgggcgaatctgtgcctttaataaccgtgctgaagggagcaatcaggatgaccaagtgaaggaactaatggactgtattgaggatctgttgatggagaaaaatgg

SEQ ID NO: 157493 - DNA, 120 bp, Artificial Sequence
  ENSG00000106560_6 (sequence is synthesized)
tcactataccaatgggttgtacagcctaatacagaggtctaaatgtggacctgtgggatcagatgaaagagtaaaggaattcaaacagagccttataaagtacatggaaactcaaagaag

SEQ ID NO: 157494 - DNA, 120 bp, Artificial Sequence
  ENSG00000106560_7 (sequence is synthesized)
ttacacagccttggctgaagcaaactgcctaaaaggagccttaatcaaaacacaactgtgtgttttattttgtattcagttgtttctcagattgataattctgtggctttgcatactgca

SEQ ID NO: 157495 - DNA, 120 bp, Artificial Sequence
  ENSG00000106560_8 (sequence is synthesized)
cagcatgtgcaatttgttttgttgcttactctttagtatgtgcaatttattctgcagtttgctgtttattatacccaaaaagttaatgatatttttgagaacagttattagactagaacg

SEQ ID NO: 157496 - DNA, 120 bp, Artificial Sequence
  ENSG00000106560_9 (sequence is synthesized)
caagactcctaggttatagttacagatcccagttattatttactcactatcatttagtgggtgaatcacagtaatttccctgtaaaatgtggtacctgaagtcatatttgagattctatg

SEQ ID NO: 157497 - DNA, 120 bp, Artificial Sequence
  ENSG00000106560_10 (sequence is synthesized)
aaatgtttaaatctgaacatcactccaattattaatgaaccaaatcatacgataagttactgtttgcattgaaatataatatcaaagccttttgaaatctgtaaacataaaattcctctc

SEQ ID NO: 157498 - DNA, 120 bp, Artificial Sequence
  ENSG00000106560_11 (sequence is synthesized)
attttcaaatatctaaagccagttttatgttcctaaaatctcattttcttctttctagtactactatttctactgaatataatgaaaatggcaataaaataatattacataaactgtaaa

SEQ ID NO: 157499 - DNA, 120 bp, Artificial Sequence
  ENSG00000106560_12 (sequence is synthesized)
tcggttttactttctttttctcttggagctgagctataagacaacaggactgaacagggagccaactgtttctttgaacagtaaatcaggaacaccaatggaccaaaatgaacacagtca

SEQ ID NO: 157500 - DNA, 81 bp, Artificial Sequence
  ENSG00000106560_13 (sequence is synthesized)
cttctgatgatgttggggcaaaataaacaagggtgaaggatcttattctaactcccacagctaccaccaccagcagctgaa

SEQ ID NO: 157501 - DNA, 120 bp, Artificial Sequence
  ENSG00000106560_14 (sequence is synthesized)
gagctataagacaacaggactgaacagggagccaactgtttctttgaacagtaaatcaggaacaccaatggaccaaaatgaacacagtcactggggcgagaggaaggttaaacgtgcaat

SEQ ID NO: 157502 - DNA, 120 bp, Artificial Sequence
  ENSG00000106560_15 (sequence is synthesized)
aaatgtgtaatgtaatgcctgcttccttttaagtacaagtgtccattgcatgtctactgtgaggccataatttcactggcctacagaaaataagattaaatgtccataaattttggccaa

SEQ ID NO: 157503 - DNA, 120 bp, Artificial Sequence
  ENSG00000106565_0 (sequence is synthesized)
gtcgctcccctgctcggggtcagctagtgtccgctctgctcggccgcgggctcccggaggactgcaggcaggatgacgcaaaacacggtgattgtgaatggagttgctatggcctctagg

SEQ ID NO: 157504 - DNA, 120 bp, Artificial Sequence
  ENSG00000106565_1 (sequence is synthesized)
ccatcccagcccacccacgtcaacgtccacatccaccaggagtcagctttgacacaactgctgaaagctggaggttctctgaagaagtttctttttcaccctggggacactgtgccttcc

SEQ ID NO: 157505 - DNA, 120 bp, Artificial Sequence
  ENSG00000106565_2 (sequence is synthesized)
acagccaggattggttatgagcagctggctctaggggtgactcagatattgctgggggttgtgagttgtgttcttggagtgtgtctcagcttggggccctggactgtgctgagtgcctca

SEQ ID NO: 157506 - DNA, 120 bp, Artificial Sequence
  ENSG00000106565_3 (sequence is synthesized)
ggctgtgccttctgggcggggtctgtggtgatcgcagcaggagctggggccattgtccatgagaagcacccgggcaaacttgctggctatatatccagcctgctcaccctggcaggcttt

SEQ ID NO: 157507 - DNA, 120 bp, Artificial Sequence
  ENSG00000106565_4 (sequence is synthesized)
tagcttcatctggcaaactgaaccctttttatacatcgacactgtgtgtgatcgctcagaccctgtcttccctaccactgggtacagatggatgcggcgaagtcaagagaaccaatggca

SEQ ID NO: 157508 - DNA, 120 bp, Artificial Sequence
  ENSG00000106565_5 (sequence is synthesized)
gaaggaggagtgtagagcttacatgcagatgctgaggaagttgttcacagcaatccgtgccctgttcctggctgtctgtgtcttgaaggtcattgtgtccttggtttccttgggagtagg

SEQ ID NO: 157509 - DNA, 120 bp, Artificial Sequence
  ENSG00000106565_6 (sequence is synthesized)
tcttcgaaacttgtgtggccagagctcccagcccctgaatgaggaaggatcagagaagaggctactgggggagaattcagtgcccccttcgccctctagggagcagacctccactgccat

SEQ ID NO: 157510 - DNA, 120 bp, Artificial Sequence
  ENSG00000106565_7 (sequence is synthesized)
tgtcctgtgagctgccaaagaccccacggggtgcccgcatgtccctgtctagggcagcccagggcccccactcctggctcctcacacttgcctcccctatggccgctctccagaccctcc

SEQ ID NO: 157511 - DNA, 120 bp, Artificial Sequence
  ENSG00000106565_8 (sequence is synthesized)
tcctttcttctccccacatccgcacctgctgttcccactctggggttctcaagtccatgaacagatattgttgcattttccacaatgctgattaaacataataaacaatccagaaaagca

SEQ ID NO: 157512 - DNA, 120 bp, Artificial Sequence
  ENSG00000106565_9 (sequence is synthesized)
aaagcactgggattacaggcgtgagctattgtgcccagctgggatcttgacaaagacactatttctctcctttcacctgtgctgtgtatttttccctcgcctagttcccagacctcactg

SEQ ID NO: 157513 - DNA, 80 bp, Artificial Sequence
  ENSG00000106565_10 (sequence is synthesized)
cgagtgggagcgcagggggcgcgcgggggctcggtcttctcccgcccggtccgctcctccgggcggaaccccctttgccg

SEQ ID NO: 157514 - DNA, 120 bp, Artificial Sequence
  ENSG00000106565_11 (sequence is synthesized)
tgggcggggccgcagcccccacccgtgcatctgccgtctccgccctcccgtcgctcccctgctcggggtcagctagtgtccgctctgctcggccgcgggctcccggaggactgcaggtga

SEQ ID NO: 157515 - DNA, 120 bp, Artificial Sequence
  ENSG00000106565_12 (sequence is synthesized)
gctgaccatgctggaactgcggcgactacagagcctgcgggaacctcccctttcgcccaagatctgctctgtccccctcatcctcctcccagggccctggcgtctgggtcaagcagcgcc

SEQ ID NO: 157516 - DNA, 120 bp, Artificial Sequence
  ENSG00000106565_13 (sequence is synthesized)
ccacacctcgacccctcaccccctcctcccgggctcttcctgcggcctcccctccacagtccgcaggctctgggacaggaccgagtccttggctgcctgtggagctcctgtgccagcagc

SEQ ID NO: 157517 - DNA, 120 bp, Artificial Sequence
  ENSG00000106565_14 (sequence is synthesized)
tgcgccccggctgcgctccggatacccccatccccgccaccgccgacctcccgctccaccgactgctgctcacgcccgacgggttcacgccgcccctgccccgtgaaggaccgcgctgcg

SEQ ID NO: 157518 - DNA, 120 bp, Artificial Sequence
  ENSG00000106565_15 (sequence is synthesized)
ctcggggtcagctagtgtccgctctgctcggccgcgggctcccggaggactgcaggaggactcacgtaggagggagggacagctgggtgcaggtgtttctccccagaaaaacggctggag

SEQ ID NO: 157519 - DNA, 120 bp, Artificial Sequence
  ENSG00000106565_16 (sequence is synthesized)
agcgggaggagaggcctggggctggcgcgtcccgtccaccttctgccgcctgcacgcctggaccctggctggagccctacggcaggatgacgcaaaacacggtgattgtgaatggagttg

SEQ ID NO: 157520 - DNA, 120 bp, Artificial Sequence
  ENSG00000106571_0 (sequence is synthesized)
gccgctcgcggtagccgtagccgcccgcggccgcgcggagcggggagccgccagcctgcgccccgtccgcgggtctatgggaagttcggggacttgacagccgctgccgccgcagggcat

SEQ ID NO: 157521 - DNA, 120 bp, Artificial Sequence
  ENSG00000106571_1 (sequence is synthesized)
gcatttttggtcgaagagagctgaagtaatgagaagacatcatggaggcccagtcccacagctccacgaccactgaaaagaaaaaagttgagaattccatagtgaagtgctccactcgaa

SEQ ID NO: 157522 - DNA, 120 bp, Artificial Sequence
  ENSG00000106571_2 (sequence is synthesized)
cagatgtgagcgagaaagccgttgcctccagcaccacttctaatgaggatgaaagtcctggacagacttatcacagagagagaagaaacgcaatcactatgcagccacagaatgtccagg

SEQ ID NO: 157523 - DNA, 120 bp, Artificial Sequence
  ENSG00000106571_3 (sequence is synthesized)
ggctcagcaaagtcagtgaggaaccttcaacatcgagtgacgagagggcctcattgatcaagaaagagatccatgggtccctgccacacgtggcggagccctctgtgccgtaccgcggga

SEQ ID NO: 157524 - DNA, 120 bp, Artificial Sequence
  ENSG00000106571_4 (sequence is synthesized)
cggtgtttgccatggaccccaggaatggttacatggagccccactaccaccctcctcatcttttccctgccttccatcctcctgtaccaattgatgccagacatcatgagggccgttacc

SEQ ID NO: 157525 - DNA, 120 bp, Artificial Sequence
  ENSG00000106571_5 (sequence is synthesized)
attacgatccatctccgattcctccattgcatatgacttccgccttatctagtagccctacgtatccggacctgcccttcattaggatctccccacaccggaaccccactgctgcttccg

SEQ ID NO: 157526 - DNA, 120 bp, Artificial Sequence
  ENSG00000106571_6 (sequence is synthesized)
agtctcccttcagccctccacatccctacattaatccctacatggactatatccgctccttgcacagcagcccatcgctctccatgatctcagcaacccgtgggctgagccctacagatg

SEQ ID NO: 157527 - DNA, 120 bp, Artificial Sequence
  ENSG00000106571_7 (sequence is synthesized)
cgccccatgcaggagtcagcccagcagaatactatcatcagatggccctgctaactggccagcgcagcccctatgcagacattattccctcagctgccaccgccggcacgggggccatcc

SEQ ID NO: 157528 - DNA, 120 bp, Artificial Sequence
  ENSG00000106571_8 (sequence is synthesized)
acatggaatatcttcatgctatggatagcaccagattctccagccccaggctgtcagccaggccgagccgaaaacgtacactgtccatatcaccactctccgatcatagctttgaccttc

SEQ ID NO: 157529 - DNA, 120 bp, Artificial Sequence
  ENSG00000106571_9 (sequence is synthesized)
agaccatgataaggacgtctcccaactccttggtcacgattctcaataattcccgtagcagctcttcagcaagtggctcctatggtcacttatctgcaagtgcaatcagccctgccttga

SEQ ID NO: 157530 - DNA, 120 bp, Artificial Sequence
  ENSG00000106571_10 (sequence is synthesized)
gcttcacctactcttccgcgcccgtctctctccacatgcatcagcagatcctaagccgacaacagagcttaggttcagcctttggacacagccctccactcatccaccctgccccaactt

SEQ ID NO: 157531 - DNA, 120 bp, Artificial Sequence
  ENSG00000106571_11 (sequence is synthesized)
ttccaacacagaggcctattccagggatccctacggttctgaaccccgtccaggtcagctccggcccttctgagtcctcacagaacaagcccacgagtgagtctgcagtgagcagcactg

SEQ ID NO: 157532 - DNA, 120 bp, Artificial Sequence
  ENSG00000106571_12 (sequence is synthesized)
gtgacccgatgcacaacaagaggtccaagatcaaacccgatgaagacctccccagcccaggggctcgggggcagcaggaacagcccgaaggaacaacccttgtcaaggaggaaggggaca

SEQ ID NO: 157533 - DNA, 120 bp, Artificial Sequence
  ENSG00000106571_13 (sequence is synthesized)
aagatgaaagcaaacaggagcctgaagtcatctatgagacaaactgccactgggaaggctgcgcgagggagttcgacacccaagagcagcttgtgcaccatataaataacgaccatattc

SEQ ID NO: 157534 - DNA, 120 bp, Artificial Sequence
  ENSG00000106571_14 (sequence is synthesized)
atggagagaagaaggagttcgtgtgcaggtggctggactgctcaagagagcagaaacccttcaaagcccagtatatgttggtagtgcatatgagaagacacacgggcgagaagcctcaca

SEQ ID NO: 157535 - DNA, 120 bp, Artificial Sequence
  ENSG00000106571_15 (sequence is synthesized)
aatgcacttttgaaggttgcacaaaggcctactcgagactagaaaacttgaaaacacacttgagatctcacactggagagaaaccatacgtctgtgagcacgaaggttgcaacaaggctt

SEQ ID NO: 157536 - DNA, 120 bp, Artificial Sequence
  ENSG00000106571_16 (sequence is synthesized)
tctcaaatgcctctgatcgcgccaaacaccaaaacagaacgcattccaatgagaaaccatatgtgtgcaaaatcccaggctgcactaagcgttacacagacccaagctccctccggaaac

SEQ ID NO: 157537 - DNA, 120 bp, Artificial Sequence
  ENSG00000106571_17 (sequence is synthesized)
atgtgaagacagtgcatggcccagaggctcatgtcaccaagaagcagcgaggggacatccatcctcggccgccacccccgagagattccggcagccattcacagtccaggtcgcctggcc

SEQ ID NO: 157538 - DNA, 120 bp, Artificial Sequence
  ENSG00000106571_18 (sequence is synthesized)
gaccgactcagggagcccttggtgagcagcaggacctcagcaacactacctcaaagcgggaagaatgcctccaggtgaaaaccgtcaaggcagagaagccaatgacatctcagccaagcc

SEQ ID NO: 157539 - DNA, 120 bp, Artificial Sequence
  ENSG00000106571_19 (sequence is synthesized)
ctggtggtcagtcttcatgcagcagccaacagtcccccatcagcaactattccaacagtgggctcgagcttcctctgaccgatggaggtagtataggagacctcagtgccatcgatgaaa

SEQ ID NO: 157540 - DNA, 120 bp, Artificial Sequence
  ENSG00000106571_20 (sequence is synthesized)
ccccaatcatggactcaaccatttccactgcaaccacagcccttgctttgcaagccaggagaaacccggcagggaccaaatggatggagcacgtaaaactagaaaggctaaaacaagtga

SEQ ID NO: 157541 - DNA, 120 bp, Artificial Sequence
  ENSG00000106571_21 (sequence is synthesized)
atggaatgtttccgcgactgaaccccattctaccccctaaagcccctgcggtctctcctctcataggaaatggcacacagtccaacaacacctgcagcttgggtgggcccatgacgcttc

SEQ ID NO: 157542 - DNA, 120 bp, Artificial Sequence
  ENSG00000106571_22 (sequence is synthesized)
tcccgggcagaagcgacctctctggggtggacgtcactatgctgaacatgctcaacagaagggacagcagcgccagcaccatcagctcggcctacctgagcagccgccgctcctcaggga

SEQ ID NO: 157543 - DNA, 120 bp, Artificial Sequence
  ENSG00000106571_23 (sequence is synthesized)
tctcgccctgcttctccagccgccgctccagcgaggcgtcacaggccgagggccggccgcagaacgtgagcgtggccgactcctacgaccccatctccaccgacgcctcgcgccgctcca

SEQ ID NO: 157544 - DNA, 120 bp, Artificial Sequence
  ENSG00000106571_24 (sequence is synthesized)
gcgaagccagccagagcgacggcctgcccagcctgctcagcctcacgcccgcccagcagtaccgcctcaaggccaagtacgcggctgccacaggagggccgccgccgacgcccctgccca

SEQ ID NO: 157545 - DNA, 120 bp, Artificial Sequence
  ENSG00000106571_25 (sequence is synthesized)
acatggagaggatgagcctgaagacgcgcctggcgctgctcggggatgccctcgagcctggcgtggccctgcctccagttcatgccccgaggaggtgcagcgacgggggagcccacggct

SEQ ID NO: 157546 - DNA, 120 bp, Artificial Sequence
  ENSG00000106571_26 (sequence is synthesized)
ggctacgggcggcgccacctgcagccgcacgatgcgccgggccacggcgtgaggagggccagcgacccggtgcggacaggctccgagggcctggccctgcctcgtgtgccgcgcttcagc

SEQ ID NO: 157547 - DNA, 120 bp, Artificial Sequence
  ENSG00000106571_27 (sequence is synthesized)
tcagcagctgcaaccccccggcgatggccacgtccgcggagaagcgcagtctcgtgcttcagaattacacgcggcccgagggcggccagtcccgaaacttccactcgtccccctgtcctc

SEQ ID NO: 157548 - DNA, 120 bp, Artificial Sequence
  ENSG00000106571_28 (sequence is synthesized)
ccagcatcaccgagaacgtcaccctggagtccctgaccatggacgctgatgccaacctgaacgatgaggatttcctgccggacgacgtggtgcagtatttaaattcccagaaccaagcag

SEQ ID NO: 157549 - DNA, 120 bp, Artificial Sequence
  ENSG00000106571_29 (sequence is synthesized)
ggtacgagcagcacttccccagcgccctcccggacgacagcaaagtgccccacgggcccggtgactttgacgcgcccgggctgccagacagccacgctggccagcagttccatgccctcg

SEQ ID NO: 157550 - DNA, 120 bp, Artificial Sequence
  ENSG00000106571_30 (sequence is synthesized)
agcagccctgccccgagggcagcaaaaccgacctgcccattcagtggaacgaagtcagctccggaagcgccgacctgtcctcctccaagctcaagtgtgggccgcggcccgctgtgccgc

SEQ ID NO: 157551 - DNA, 120 bp, Artificial Sequence
  ENSG00000106571_31 (sequence is synthesized)
agactcgcgcctttgggttctgcaacggcatggtcgtccacccgcagaaccccttgaggagcgggcctgctgggggctatcagaccctcggggagaacagcaacccctacggtggcccag

SEQ ID NO: 157552 - DNA, 120 bp, Artificial Sequence
  ENSG00000106571_32 (sequence is synthesized)
agcacttgatgctccacaacagccccggaagtggcaccagtggaaacgccttccatgaacagccctgtaaggccccgcagtatgggaactgtctcaacaggcagccagtggcccctggtg

SEQ ID NO: 157553 - DNA, 120 bp, Artificial Sequence
  ENSG00000106571_33 (sequence is synthesized)
cactcgacggtgcctgtggtgccgggattcaagcctcaaagctgaagagcacccccatgcaagggagcgggggccagctgaatttcggcctgccggtagcgccaaatgagtcagctggca

SEQ ID NO: 157554 - DNA, 120 bp, Artificial Sequence
  ENSG00000106571_34 (sequence is synthesized)
gtgaatggcatgcagaaccaggacccagtgggacaggggtacctggctcaccagctcctcggcgacagcatgcagcacccgggggcaggccgccccggtcagcagatgcttgggcagatt

SEQ ID NO: 157555 - DNA, 120 bp, Artificial Sequence
  ENSG00000106571_35 (sequence is synthesized)
agtgctacctcacacatcaacatctaccaagggccagagagctgcctgccaggggctcacggcatgggcagccagccgtcaagcttggcagttgtcaggggctaccagccatgtgccagc

SEQ ID NO: 157556 - DNA, 120 bp, Artificial Sequence
  ENSG00000106571_36 (sequence is synthesized)
tttgggggcagcaggcgccaggctatgccgagggacagccttgctctgcagtcaggacagctcagtgacacaagtcagacctgcagggtgaatggtatcaagatggagatgaaagggcag

SEQ ID NO: 157557 - DNA, 120 bp, Artificial Sequence
  ENSG00000106571_37 (sequence is synthesized)
ccccatccgctgtgctctaatctgcagaattactctggtcagttctatgaccaaaccgtgggcttcagtcagcaagacacgaaagctggttcattctctatttcagacgccagctgcctg

SEQ ID NO: 157558 - DNA, 120 bp, Artificial Sequence
  ENSG00000106571_38 (sequence is synthesized)
ctacaggggaccagcgccaaaaactctgagttactttccccaggtgctaatcaggtgacaagcacagtggacagcctcgacagccatgacctggaaggggtacagattgacttcgatgcc

SEQ ID NO: 157559 - DNA, 120 bp, Artificial Sequence
  ENSG00000106571_39 (sequence is synthesized)
atcatagacgatggggaccactccagcctgatgtcgggggccctgagcccaagtatcattcagaacctttcccatagctcctcccgcctcaccacgcctcgggcgtccctcccattccca

SEQ ID NO: 157560 - DNA, 120 bp, Artificial Sequence
  ENSG00000106571_40 (sequence is synthesized)
gcgctgtccatgagcaccaccaacatggctatcggggacatgagttctttgctgacctccctagcggaagaaagcaaattccttgcagttatgcaataggctttaggaaaaaaagactgc

SEQ ID NO: 157561 - DNA, 120 bp, Artificial Sequence
  ENSG00000106571_41 (sequence is synthesized)
aaccaacggaaatcaataggagttgaagagattaaactgactttgttttggctgtttttttagttctgtatgtattttagcaatctcatctcacctaactgagatgtgtttcaattatat

SEQ ID NO: 157562 - DNA, 120 bp, Artificial Sequence
  ENSG00000106571_42 (sequence is synthesized)
tccttttatggaaaaggactctgaaaaaccctaaagtattctagggagaaactgtcttccatttcagttttgaatcagtattgttacactcaaaccaccctctttttaaaaaaaaaaaaa

SEQ ID NO: 157563 - DNA, 120 bp, Artificial Sequence
  ENSG00000106571_43 (sequence is synthesized)
aaaactgtaagccccgccccctttttagtaaaccgatgtaaatttgtgatgtgcatattcttctttcttttagaagagcagtcaaattaaaggatttgacatgttttgctgttgctcaaa

SEQ ID NO: 157564 - DNA, 120 bp, Artificial Sequence
  ENSG00000106571_44 (sequence is synthesized)
ggaaataggagttggtgtgcttgtgaccaaggggttacacttccagcttttaaaattctcctttacatgtgctcagtgttttgttttgtgttttggtttctgttttttattttaattccc

SEQ ID NO: 157565 - DNA, 120 bp, Artificial Sequence
  ENSG00000106571_45 (sequence is synthesized)
acattgggcacaagaatcagaatatggatagctagtttaagaaacttttgtgggtgcactgtagcatagatgacagaatattgatgttccccccatctccaattcagttcagggcattcc

SEQ ID NO: 157566 - DNA, 120 bp, Artificial Sequence
  ENSG00000106571_46 (sequence is synthesized)
acagttaaacagaaatgggaacgtggggctcttataaatgaaatgggcgctcacagttttggttttcagctcttcatgtctgtaagtgtgctttgggggaggctatgtctgtatggtcga

SEQ ID NO: 157567 - DNA, 120 bp, Artificial Sequence
  ENSG00000106571_47 (sequence is synthesized)
ttctcagttatcacatttgcctctcctcccactaccttcatgaacattcagtgctgtttcgcactgcagttagagagaagggacggacagttggtgacactcagccacattgctactttt

SEQ ID NO: 157568 - DNA, 120 bp, Artificial Sequence
  ENSG00000106571_48 (sequence is synthesized)
atctgttctggtaagaagttagatagatggtagattgaagcaattgggtagaattagttgggggaatatttatgagttgctgtgtttgttgattagttccatctctttcccattttaact

SEQ ID NO: 157569 - DNA, 120 bp, Artificial Sequence
  ENSG00000106571_49 (sequence is synthesized)
gagaattgattatatatagctctaagtatataggtatttaaacaaccccacaagcggctgtatcagtaacatttattaattccactatagtgagggaggatttccattctaaatacctta

SEQ ID NO: 157570 - DNA, 120 bp, Artificial Sequence
  ENSG00000106571_50 (sequence is synthesized)
ttttgagggatttataaaacttagttgtaaaagagaaagcccacatagtgggaataaattgcttcagccatttttagtatttgagagcactagggaagatgtttagtagctgtgtggatg

SEQ ID NO: 157571 - DNA, 120 bp, Artificial Sequence
  ENSG00000106571_51 (sequence is synthesized)
ccttttttcacaccctgtctattgaatgctgcatccattcacgaagttaaatgttacatgcagttagtccttaatgtggactggatctgtacttttgttttggattaaaacatttaaaga

SEQ ID NO: 157572 - DNA, 120 bp, Artificial Sequence
  ENSG00000106571_52 (sequence is synthesized)
tttttgaagtgcagctactccccacgtgcatttgatacacataaaagtcatactgtgtgtgcacaaagagtacatggattttccagcatattgctttaaaaaattatataaactgttaaa

SEQ ID NO: 157573 - DNA, 120 bp, Artificial Sequence
  ENSG00000106571_53 (sequence is synthesized)
atattaacacctcaggctacctgctgtattctgtcccattgacccctggaattggatttactgcaagtgattgataattcaattatgtggcttttcccctttaatcttgccatttaaatt

SEQ ID NO: 157574 - DNA, 120 bp, Artificial Sequence
  ENSG00000106571_54 (sequence is synthesized)
acagtagaaagacaaaatcaagtaaaataaagtgttagataatagaaagagtgttaagaccagcccacttttctcatgtttatgttctttcatttggaccaagaatctccgcatggaggt

SEQ ID NO: 157575 - DNA, 120 bp, Artificial Sequence
  ENSG00000106571_55 (sequence is synthesized)
tgatttgccactggggactttggctaagactattaggtttgctttcaactagatgttcctgagacaagcagagggacactgcaattccccttccatgcctgctgttctcccccatgtaag

SEQ ID NO: 157576 - DNA, 120 bp, Artificial Sequence
  ENSG00000106571_56 (sequence is synthesized)
tcttctttgaaattaacggatgtgtctcctttggaacagccccataacaaaagagaactactgatctgagcataggaaagtagaggctctaccacttttcagttgaaaaagcaagacttt

SEQ ID NO: 157577 - DNA, 120 bp, Artificial Sequence
  ENSG00000106571_57 (sequence is synthesized)
ctctgtgtttctgaaacaaggcataatgttgtcacagaatcagagatccagtctcacttttccacaaatctccaaatctccagtcttatcttgtgtgctctaatggtttggttcaatccc

SEQ ID NO: 157578 - DNA, 120 bp, Artificial Sequence
  ENSG00000106571_58 (sequence is synthesized)
tttccaactcttgttttcaaagcatggggcctgagtgttctccactcctcctaagaaaggagcttgggtggaagggaccatgctgacctcctccatcagagggctcttccagtagtattc

SEQ ID NO: 157579 - DNA, 120 bp, Artificial Sequence
  ENSG00000106571_59 (sequence is synthesized)
tcggatgcaacctccatttctcagttaccattatttcctgtatcagctttgtccttcctggagggatgcacagtgatccggcccaccactgttgttgtcttgtgcttctgctctttccta

SEQ ID NO: 157580 - DNA, 120 bp, Artificial Sequence
  ENSG00000106571_60 (sequence is synthesized)
tggtttcaggttattttctgggtttcccctattcttcttttatttctttttttttttatatttgctttcctttctactgcttttagatttgcaggagatgcaagtttcagctcaatgttt

SEQ ID NO: 157581 - DNA, 120 bp, Artificial Sequence
  ENSG00000106571_61 (sequence is synthesized)
ggcttctctcaatatggaaatttcagaaggacagaggagaggagggaggaagaagaaagtatactcctccagaatttcagtgatctgttgtggcagtccagtggaaggaaggtcttttga

SEQ ID NO: 157582 - DNA, 120 bp, Artificial Sequence
  ENSG00000106571_62 (sequence is synthesized)
ggtcacttagaagcatctttttgggacatccttttgggatctctgtaggctaggcatctcatatcttgagactcacccccagcctccaagcctctctccatttctctaacctatgcattt

SEQ ID NO: 157583 - DNA, 120 bp, Artificial Sequence
  ENSG00000106571_63 (sequence is synthesized)
tagagcgagaggaccgcctcactagtgtcaccatcctgccttttctaaaacatgcaggctcacacattctactcctgcttaatgtctgtgttaaacgttttctaaccatttttgttttat

SEQ ID NO: 157584 - DNA, 120 bp, Artificial Sequence
  ENSG00000106571_64 (sequence is synthesized)
ttttctgaaaaagttaacccctcccaactcctcacacattggctcttcctcttgagccacaaagttttgattcttgcgatgtatgtgccttattttatgttaatcttgtcaatgagaggg

SEQ ID NO: 157585 - DNA, 120 bp, Artificial Sequence
  ENSG00000106571_65 (sequence is synthesized)
accagttggtgttgcccaatcagcactccaaggctgtgtgtgcaccagccagagagcgcacggtggtagcagagtcgaggctgtcttgtatcctggtttcatgtgttgttttgaactgat

SEQ ID NO: 157586 - DNA, 120 bp, Artificial Sequence
  ENSG00000106571_66 (sequence is synthesized)
aggaggatgttctcttctgacaagttacccttgtgtatcctgcagacatgtaaaataaaatacaagttcatttttttcaccttttttagatttttttaaaaaataaaatgtgtaatcctt

SEQ ID NO: 157587 - DNA, 120 bp, Artificial Sequence
  ENSG00000106571_67 (sequence is synthesized)
tttttaaaagaaacacatgtaaatacatttaagtattgtaggcatagcgttcagatgtgactggcccaggcgttcctcggacaagcctgcattccccgtgatcacgcccacctcaagccc

SEQ ID NO: 157588 - DNA, 120 bp, Artificial Sequence
  ENSG00000106571_68 (sequence is synthesized)
aggggctgcagcccagccacagatgaactctacctttgctttcagaaccacttagtccttttgtaacaaagaaaaaaaaatgtttcttacaatgtcaataaaaaattctttgtatggaaa

SEQ ID NO: 157589 - DNA, 120 bp, Artificial Sequence
  ENSG00000106571_69 (sequence is synthesized)
agagagataccgagaatgttcctagagggtctgcgcagctagagagagctcaccaagagaagttggcgcaaagtagctagccagagcctggggactgtgttaggatgaaagtcctggaca

SEQ ID NO: 157590 - DNA, 120 bp, Artificial Sequence
  ENSG00000106571_70 (sequence is synthesized)
actgaaaactctttatctggaactacaccaagctacatctgaatcccaataaatgcagagtttagtggactttttgttcctgggttttgaaaagctgctgacccttgaaacatcagtttt

SEQ ID NO: 157591 - DNA, 120 bp, Artificial Sequence
  ENSG00000106571_71 (sequence is synthesized)
cgcagctagagagagctcaccaagagaagttggcgcaaagtagctagccagagcctggggactgtgttttaccttgtagtagtcagcaaattctctgtaaagaccaaaatatacctcatt

SEQ ID NO: 157592 - DNA, 120 bp, Artificial Sequence
  ENSG00000106571_72 (sequence is synthesized)
agaattgagcaaactgcaaacctgtaactgtggtgtcgttagagctgtgcactgtggccttctgaacataatcttttctcagtcaacctcagtagatcgactataacttttttctgtttt

SEQ ID NO: 157593 - DNA, 120 bp, Artificial Sequence
  ENSG00000106571_73 (sequence is synthesized)
gtaagtgaagaaattgtaaagattttaaatgagtttgagaagtgttaacattttaaattcttagcagaaagtgttttatgtaacaaatgcaaactttaatacatgcaggaacataaaaga

SEQ ID NO: 157594 - DNA, 120 bp, Artificial Sequence
  ENSG00000106571_74 (sequence is synthesized)
cgcagctagagagagctcaccaagagaagttggcgcaaagtagctagccagagcctggggactgtgttattaaacatataatttaccccttaattataaagtttgggatgaggatctgca

SEQ ID NO: 157595 - DNA, 120 bp, Artificial Sequence
  ENSG00000106571_75 (sequence is synthesized)
tgagaaaggaaataaaaactgcttagtccatagttaggactctgaactcaacgctgccatccgtggaaactatttgggacttaacatgcacattaagaaaataaaaaataatggaaaggt

SEQ ID NO: 157596 - DNA, 120 bp, Artificial Sequence
  ENSG00000106571_76 (sequence is synthesized)
agtgtttgttctaggagacgctaaagaaagcaaatggagcaggggcggggggacggcggggggacatggaatgtagtaatctctattttggcactcaacctacacgttgacttccaaact

SEQ ID NO: 157597 - DNA, 120 bp, Artificial Sequence
  ENSG00000106571_77 (sequence is synthesized)
ttctaatttgagatgtaaatgtgataggttatttattatcagaagttcctgttttggcattttggaaatcatcttgactagtctggcaagagttcaaaatgctttgtgttgcatatggat

SEQ ID NO: 157598 - DNA, 120 bp, Artificial Sequence
  ENSG00000106571_78 (sequence is synthesized)
cgcagctagagagagctcaccaagagaagttggcgcaaagtagctagccagagcctggggactgtgttgtaagtattgtctgttctcttatactccgcatcttctaggtcttgggacaag

SEQ ID NO: 157599 - DNA, 120 bp, Artificial Sequence
  ENSG00000106571_79 (sequence is synthesized)
agaggagtagtgggtattaaaatgggttttaagggaaaatcaatgttaagtgggaaaagggggtgaacacgtgtactgtgagctcctaatcagctaattttgttaggtgacaggaggtgt

SEQ ID NO: 157600 - DNA, 120 bp, Artificial Sequence
  ENSG00000106571_80 (sequence is synthesized)
aggtgacaggaggtgtccttagttagtgatgcctggcagagttttgtttttatcttgaaggaatcacctgaaacttttctttcaagtcatggacagaaaaaaacaaaacaaaacaaaaca

SEQ ID NO: 157601 - DNA, 120 bp, Artificial Sequence
  ENSG00000106571_81 (sequence is synthesized)
gttccctcggttaccatgagaaatcggatagatgtctgtctgcaagcgcccacaagtgcgtgttcgagtcctgcttcatgcagcaacgtgattaccttctccagacttttattgcaaacg

SEQ ID NO: 157602 - DNA, 120 bp, Artificial Sequence
  ENSG00000106571_82 (sequence is synthesized)
tcctaagcactgcttgcaaggaccccacttttttttttttctgagtttctagcaccaagaatatctgacttgatgtcacttgcttttggatgagtttggaaattctgggacagtttctaa

SEQ ID NO: 157603 - DNA, 120 bp, Artificial Sequence
  ENSG00000106571_83 (sequence is synthesized)
aacgtgatgctttgggcagctctctgggggcagggatttgttaacttccacttgagcatggatatgaaaagagaaggaggtacaaagtgggattatgatgacagtatttaaagtcatttt

SEQ ID NO: 157604 - DNA, 120 bp, Artificial Sequence
  ENSG00000106571_84 (sequence is synthesized)
ttcctgaaagattttagtgaattgcatgtttcggtttgacccccgagcttgcagctgttaaacatagagaagcgggaacagttgccttgtgtttggctgttaaagtccattggcagatgc

SEQ ID NO: 157605 - DNA, 120 bp, Artificial Sequence
  ENSG00000106571_85 (sequence is synthesized)
gcttacatttttgcagcagacttctgcctgttgccatggtggacagtgtgtttctgtcaataatttggcctggcgtagcctgtctgcactgactctcaaactttattgaacaactcggct

SEQ ID NO: 157606 - DNA, 120 bp, Artificial Sequence
  ENSG00000106571_86 (sequence is synthesized)
caactgaacaagattagacagctttcgtcttttggcttgctgaagtggttgctaaatttataagagcaggcaggaatattgcttggaaagtgtccctttcactgtatacagagtgctttc

SEQ ID NO: 157607 - DNA, 120 bp, Artificial Sequence
  ENSG00000106571_87 (sequence is synthesized)
aagcctcgtagctgtttgtattgtggagtgtgtatactgtcaggttttcatatgaatgcccgtcaaaagcaacttggtacaggagttaccttgtagtagtcagcaaattctctgtaaaga

SEQ ID NO: 157608 - DNA, 120 bp, Artificial Sequence
  ENSG00000106571_88 (sequence is synthesized)
agatgtgagcgagaaagccgttgcctccagcaccacttctaatggcaaccatttggaggcccaggccagaggctggaccaggaggattggatgcatccgcgctgtccatccctgctgctg

SEQ ID NO: 157609 - DNA, 120 bp, Artificial Sequence
  ENSG00000106571_89 (sequence is synthesized)
cacaaacgactcagccacagatcctcttggatgggctaccttgaaagggggaagctccaaagaatgcgtacaaacccatacatttacctaggtgcgggatgattgcaagaccactttatt

SEQ ID NO: 157610 - DNA, 120 bp, Artificial Sequence
  ENSG00000106588_0 (sequence is synthesized)
ggctcttcgggtaaagatggcggagcgcgggtacagcttttcgctgactacattcagcccgtctggtaaacttgtccagattgaatatgctttggctgctgtagctggaggagccccgtc

SEQ ID NO: 157611 - DNA, 120 bp, Artificial Sequence
  ENSG00000106588_1 (sequence is synthesized)
cgtgggaattaaagctgcaaatggtgtggtattagcaactgagaaaaaacagaaatccattctgtatgatgagcgaagtgtacacaaagtagaaccaattaccaagcatataggtttggt

SEQ ID NO: 157612 - DNA, 120 bp, Artificial Sequence
  ENSG00000106588_2 (sequence is synthesized)
gtacagtggcatgggccccgattacagagtgcttgtgcacagagctcgaaaactagctcaacaatactatcttgtgtaccaagaacccattcctacagctcagctggtacagagagtagc

SEQ ID NO: 157613 - DNA, 120 bp, Artificial Sequence
  ENSG00000106588_3 (sequence is synthesized)
ttctgtgatgcaagaatatactcagtcaggtggtgttcgtccatttggagtttctttacttatttgtggttggaatgagggacgaccatatttatttcagtcagatccatctggagctta

SEQ ID NO: 157614 - DNA, 120 bp, Artificial Sequence
  ENSG00000106588_4 (sequence is synthesized)
ctttgcctggaaagctacagcaatgggaaagaactatgtgaatgggaagactttccttgagaaaagatataatgaagatctggaacttgaagatgccattcatacagccatcttaaccct

SEQ ID NO: 157615 - DNA, 120 bp, Artificial Sequence
  ENSG00000106588_5 (sequence is synthesized)
agcataacaatgaagtgactgaaaaatccagaatttcagataatctatctacttaaacatgtttaaagtatgttttgttttgcagactttttgcatacttatttctacatggtttaaatc

SEQ ID NO: 157616 - DNA, 120 bp, Artificial Sequence
  ENSG00000106588_6 (sequence is synthesized)
gactgtttttaaaatgacacttataaatcctaataaactgttaaacccaccttccagccttttaggagttgctaaaattttaacagttatttcctgctttttatcacagttgatttctga

SEQ ID NO: 157617 - DNA, 120 bp, Artificial Sequence
  ENSG00000106588_7 (sequence is synthesized)
agactacattgccaagcagaatgatgaaatgactttttcgttgtcaggcaattttggttaagtcaaatcttaatgccctcttcgctatcagatgttgcctgtgtttccataaagcaaaat

SEQ ID NO: 157618 - DNA, 120 bp, Artificial Sequence
  ENSG00000106588_8 (sequence is synthesized)
gctgattttggtaaaaaacatgactgcttctagagctgggaggatctgcagactttcacggattcatggaacaagaaaagaagcataggtacttttaggtgccattaggtattgatcagt

SEQ ID NO: 157619 - DNA, 120 bp, Artificial Sequence
  ENSG00000106588_9 (sequence is synthesized)
gaaatcctagggtgctctatgagattgtactaggcctatgaagagtggtaagccaaataggtctccatgggagatacattatgtaaataaataaacaatggtttgctggttcctgttggt

SEQ ID NO: 157620 - DNA, 120 bp, Artificial Sequence
  ENSG00000106588_10 (sequence is synthesized)
gtctccacaagtaggtaaacatgtttaaaggaacccgggttcttagattttgttagactttttaaactcaaggatgagcataagtgcttgaaataaaatgctaatacttaagtgtcaaaa

SEQ ID NO: 157621 - DNA, 120 bp, Artificial Sequence
  ENSG00000106588_11 (sequence is synthesized)
cggagcgcgggtacagcttttcgctgactacattcagcttcttacagatgaactaaccgcagcttgtacaaattaaacaacttgtctaaggtcatcgcccgtctggtaaacttgtccaga

SEQ ID NO: 157622 - DNA, 120 bp, Artificial Sequence
  ENSG00000106588_12 (sequence is synthesized)
ttgtaactgcattctttagcaaactcactttatggtttttggtgctctttaagtaaattaatatcatgggactaaagaaacttgctatattactctgtatatgaatctagttacagataa

SEQ ID NO: 157623 - DNA, 120 bp, Artificial Sequence
  ENSG00000106588_13 (sequence is synthesized)
accaaaaacttctctcccttctagtttcctagacttcagtatattaagtggtaattaatattcatttcctaaggagttctctttctacattctatggtttcctaaatgcttttggttttt

SEQ ID NO: 157624 - DNA, 120 bp, Artificial Sequence
  ENSG00000106588_14 (sequence is synthesized)
ttactttttacttcactttttgtgccatttcaggagggaaaaaaaagaacattgaatctggaataaaacatttggggagacaaatttttaaatgatttaatgataacagtttacgacagt

SEQ ID NO: 157625 - DNA, 120 bp, Artificial Sequence
  ENSG00000106588_15 (sequence is synthesized)
aaaaaaaattgtgaaaccaaatgcctggagttgaaggtatattaaatatttgatacatgtgcttgataaaaagtggagcactatgtaaaaatctgtcggtgcccaagtacaagctgctct

SEQ ID NO: 157626 - DNA, 120 bp, Artificial Sequence
  ENSG00000106588_16 (sequence is synthesized)
tacttatttccagctgtattctagtctcagtgttactgtagtccttcgggactctccaagcttttgaagaagaaaatgttttatttcttgatatgtaatagttgcacatatttttgcagt

SEQ ID NO: 157627 - DNA, 120 bp, Artificial Sequence
  ENSG00000106588_17 (sequence is synthesized)
acatgtgatattttgatacctgtatacagtgtcaaatcagggtaattggatatccattacctcaaacatctgtcttttctttgtgttgggaacatagcagatcttctagctgttctgaaa

SEQ ID NO: 157628 - DNA, 120 bp, Artificial Sequence
  ENSG00000106588_18 (sequence is synthesized)
tatacagtaaattgttaacgataatttcctgactgtactactggacaccagaacttattcctcctgtctgaccgtatttttagaccccttaaccaacttccttcagttcttcttcccttc

SEQ ID NO: 157629 - DNA, 120 bp, Artificial Sequence
  ENSG00000106588_19 (sequence is synthesized)
tcccttcccagcctctggtaaccactgtgctactctctccctccatgagatccacttttttagctcccacatatgagtgacaacatgcaatatttatctttctgtgcctggcttattttg

SEQ ID NO: 157630 - DNA, 120 bp, Artificial Sequence
  ENSG00000106588_20 (sequence is synthesized)
atgttgctgcaaatgacaggatttcatttttttatggctgaataataataaaaaacttcgtaactccgtttaacagatgagccttcacagtacatttttcacgtaacgttaaggttatta

SEQ ID NO: 157631 - DNA, 120 bp, Artificial Sequence
  ENSG00000106588_21 (sequence is synthesized)
catttttcacgtaacgttaaggttattaaaaatcttaggcctggatttaaatggtaaacttaatcttaggctcttaaagcactttttcatttttcttttatatattaatgagtcttccaa

SEQ ID NO: 157632 - DNA, 120 bp, Artificial Sequence
  ENSG00000106588_22 (sequence is synthesized)
agatttcacattgttattacatgatatgttatgatttgttttattttttgtttcagaggcattttatttagacaactaaaaataattagatgttcagaaccagtgtacaatgaaagaaat

SEQ ID NO: 157633 - DNA, 120 bp, Artificial Sequence
  ENSG00000106588_23 (sequence is synthesized)
taaaccagttactttatcatgtattccctctttacaaccaaagcaaaaaacaatagcaacaaagacattctgctttaagggaaaagtcagacaaataagccaatatatttttcttctcca

SEQ ID NO: 157634 - DNA, 120 bp, Artificial Sequence
  ENSG00000106588_24 (sequence is synthesized)
taatgacataaacagctgcaagaactcttaattgtaataagagaagttggatgttatcttgtacatattcattaaaaagatgacaggccattgtactacaagaggataactcaacctccc

SEQ ID NO: 157635 - DNA, 120 bp, Artificial Sequence
  ENSG00000106588_25 (sequence is synthesized)
ttcagcaatggagctaattcatattcctcattatttattgctgtttttgccttaagcagagagtaactctggaaggctgatgcttttctctgcttgctcgttctagtccagttgtatgct

SEQ ID NO: 157636 - DNA, 120 bp, Artificial Sequence
  ENSG00000106588_26 (sequence is synthesized)
gtctgtggcacatgcttgatgttcaggccttaacttgaggagttgaagaatagatggaatctgaattctctgaagcaatttcttctagctcttctcttgtctttggaaaaccaatctttg

SEQ ID NO: 157637 - DNA, 120 bp, Artificial Sequence
  ENSG00000106588_27 (sequence is synthesized)
gctttgccagctcaccagtatcttcttcaggaagcacacatttccaaaggccatatgtttttcctaccacagtttgccagtctcagtgttccatcttcagaaccactggcatagagttct

SEQ ID NO: 157638 - DNA, 120 bp, Artificial Sequence
  ENSG00000106588_28 (sequence is synthesized)
ccatcaggatcaaatctcacacagtgaataggaccagagtgtcctttgtaggattctaattcttctccactattatcatcatacttataagtttaacatcttcaccacctgcaacaagaa

SEQ ID NO: 157639 - DNA, 120 bp, Artificial Sequence
  ENSG00000106588_29 (sequence is synthesized)
attctttctcaaggtgaagagattcagagttaatgtttgcaggagcttgaaaggatttaattggttccaaacttactgtactgtcaaaagcactggatcagccataagttattaccaaaa

SEQ ID NO: 157640 - DNA, 120 bp, Artificial Sequence
  ENSG00000106588_30 (sequence is synthesized)
tctctccctcagaaatatattccatactactagccaacataataaaatttagagatttcacttctgtcatagtagcatgatcccaaagtcttaacagttttgtcatcagaagaaagaatc

SEQ ID NO: 157641 - DNA, 120 bp, Artificial Sequence
  ENSG00000106588_31 (sequence is synthesized)
tgtttatcctcactgtaccatagggcctttttaatatcagagctgtgatcactaatttcctcaggttctgcttcgggtttgttcaagtcatatatgcaaaacagtttattctgtcccctg

SEQ ID NO: 157642 - DNA, 120 bp, Artificial Sequence
  ENSG00000106588_32 (sequence is synthesized)
gttaacaaataattactatcctgcatgaaatccatagtcttgataatgtgtttatgagccagggtcatcagttcatctcctgggatagcatcccacactttgtgaaatctgcagctgctg

SEQ ID NO: 157643 - DNA, 120 bp, Artificial Sequence
  ENSG00000106588_33 (sequence is synthesized)
tggctgctttggtggcatccttattcagtgttgcattccagacagcatctttatgacccaaaattgttccaatccagtctcctgtatctccctggcatagcataggtttgccgtctttgc

SEQ ID NO: 157644 - DNA, 66 bp, Artificial Sequence
  ENSG00000106588_34 (sequence is synthesized)
cctgtatctccctggcatagcataggtttgccgtctttgcaagcactgatttagaaatactcataa

SEQ ID NO: 157645 - DNA, 89 bp, Artificial Sequence
  ENSG00000106588_35 (sequence is synthesized)
tgagggaaaaaaaagcccctaaggcatgatgccactgaaggccaagtcagccacgggccatatgtggccagaacaggtgagcagcatca

SEQ ID NO: 157646 - DNA, 120 bp, Artificial Sequence
  ENSG00000106588_36 (sequence is synthesized)
gccacgggccatatgtggccagaacaggtgagcagcatcagtctcattgctatggaggtggtgaacccagtgattgggctggtgggctgagggtcatccttgtcttttctcctctggtac

SEQ ID NO: 157647 - DNA, 120 bp, Artificial Sequence
  ENSG00000106588_37 (sequence is synthesized)
agcgcccggggttcctccaggcttcaccctaacacgggctgagcagagaaaaaggaaaaggtggcaccgagattaggaaggagctagggaggggctggggagtctgggaagggtgagcaa

SEQ ID NO: 157648 - DNA, 120 bp, Artificial Sequence
  ENSG00000106588_38 (sequence is synthesized)
cagttgacaatggagggaggaaagtaggggatggggagaaccgaagaaacgacccagccactcttcgcaccgtccacactggtatcggcaggaagtgacatgttatgttttaacttataa

SEQ ID NO: 157649 - DNA, 120 bp, Artificial Sequence
  ENSG00000106588_39 (sequence is synthesized)
gaaaaagattttagcaaagttctgatttttctgtgttttaaaaattataataatgccaccacatcctgattgttaaaatatttatacttaagaagtttcctggctgggtgtgttggctcg

SEQ ID NO: 157650 - DNA, 120 bp, Artificial Sequence
  ENSG00000106591_0 (sequence is synthesized)
cagcagggaaaatggcgctggccatgctggtcttggtggtttcgccgtggtctgcggcccggggagtgcttcgaaactactgggagcgactgctacggaagcttccgcagagccggccgg

SEQ ID NO: 157651 - DNA, 120 bp, Artificial Sequence
  ENSG00000106591_1 (sequence is synthesized)
gctttcccagtcctccgtggggaccagcattagcagtacagggcccagccatgtttacagagccagcaaatgataccagtggaagtaaagagaattccagccttttggacagtatctttt

SEQ ID NO: 157652 - DNA, 120 bp, Artificial Sequence
  ENSG00000106591_2 (sequence is synthesized)
ggatggcagctcccaaaaatagacgcaccattgaagttaaccggtgtaggagaagaaatccgcagaagcttattaaagttaagaacaacatagacgtttgtcctgaatgtggtcacctga

SEQ ID NO: 157653 - DNA, 120 bp, Artificial Sequence
  ENSG00000106591_3 (sequence is synthesized)
tgcctactgctatgaaaaggtgtgcaaggagactgcagaaatcagacgacagatagggaagcaagaagggggcccttttaaggctcccaccatagagactgtggtgctgtacacgggaga

SEQ ID NO: 157654 - DNA, 120 bp, Artificial Sequence
  ENSG00000106591_4 (sequence is synthesized)
gacaccgtctgaacaagatcagggcaagaggatcattgaacgagacagaaagcgaccatcctggttcacccagaattgacaccaaagatgttaaaagggtaacttcacagtaaatcattt

SEQ ID NO: 157655 - DNA, 120 bp, Artificial Sequence
  ENSG00000106591_5 (sequence is synthesized)
ctcctgaaatagaggaagattctttatgttgttgtgcttgtttttaaatcatcagtatagtttaacacattctttctaagcagttttgtgtgggataatttgaagaatatattatgagta

SEQ ID NO: 157656 - DNA, 120 bp, Artificial Sequence
  ENSG00000106591_6 (sequence is synthesized)
aactccgaaaattttgtttatccaaaggctcaatggattatgtttctattatatacaaggttttaagtaaacataaaatttccagaacaaaaataaaaaatttaaaattcatagcaaaaa

SEQ ID NO: 157657 - DNA, 120 bp, Artificial Sequence
  ENSG00000106591_7 (sequence is synthesized)
cagtatcttttggatggcagctcccaaaaatagacgcaccattgaagttaaccggtgtaggagaagaaatccgcagaagcttattaaagttaaggttgacatatctggctgcccaagaag

SEQ ID NO: 157658 - DNA, 120 bp, Artificial Sequence
  ENSG00000106591_8 (sequence is synthesized)
ggacccaaagtgaatcttgccttgactgctgctgctttgtcaatcaatacctggtaccagcaggactgtttttatccaattgacttttgccaaagttttcaggagcccttggcaaggccc

SEQ ID NO: 157659 - DNA, 120 bp, Artificial Sequence
  ENSG00000106591_9 (sequence is synthesized)
ttccaaacattatctctaatacatcctaccttattgcaaggtcccactcctccgagtaaacacttggtccaaatggcgggtgttataaatactcctgtatcagcgcataagtctcaacct

SEQ ID NO: 157660 - DNA, 120 bp, Artificial Sequence
  ENSG00000106591_10 (sequence is synthesized)
gtaacttttcaactaggtcccttacaggggacacatgttttacttttggtttccttagtttccatccatctaataagaaaacttcttagaactatataatacccatatttctttctccta

SEQ ID NO: 157661 - DNA, 120 bp, Artificial Sequence
  ENSG00000106591_11 (sequence is synthesized)
aagagaattccagccttttggacagtatcttttggatggcagctcccaaaaatagacgcaccattgaagttaaccggtgtaggagaagaaatccgcagaagcttattaaagttaagtctt

SEQ ID NO: 157662 - DNA, 120 bp, Artificial Sequence
  ENSG00000106591_12 (sequence is synthesized)
cctgttaaagtgaggtggaactagatggtgtatgatgacctcatgtagcctgaacatcctaagaaagttaaaataacaacatagacgtttgtcctgaatgtggtcacctgaaacagaaac

SEQ ID NO: 157663 - DNA, 120 bp, Artificial Sequence
  ENSG00000106591_13 (sequence is synthesized)
gtcctccattgaataagctcatggtagattcctatagcctaggaataaattattatcagattatatgtgtctactttcctctggcctaaatgaaatacagtattctcattatatacataa

SEQ ID NO: 157664 - DNA, 120 bp, Artificial Sequence
  ENSG00000106591_14 (sequence is synthesized)
tgagaaggctagagcctgctgtcctctagcctgagtattagaaacacagtcaaggaaggagtgagtttggagactgggcaaggaacgaggctgtgaggtgcctacatgacttctgaattg

SEQ ID NO: 157665 - DNA, 120 bp, Artificial Sequence
  ENSG00000106591_15 (sequence is synthesized)
tgagctgtgtcagtcttgagctgtgtgagttttgaactacagatgagtaaacatcctaactatggcagagcctagaattaaagctagaagcagtaggtatactgaatcttgggttttaca

SEQ ID NO: 157666 - DNA, 120 bp, Artificial Sequence
  ENSG00000106591_16 (sequence is synthesized)
agcccttacatatttgttttatttttttatcatttccaacaaaataccatgaaggaaaaccctaagataagtaatataatagctaacaacaattaagtgtctatgatgtatctcagtgcc

SEQ ID NO: 157667 - DNA, 120 bp, Artificial Sequence
  ENSG00000106591_17 (sequence is synthesized)
ttatgtttattatatctcatcatgtcttatagccctccaaagcaaataagatattcttcattattaggatgaaaaaactgaggcaaaaagaatttgcctgtggtcacacagctatgaagc

SEQ ID NO: 157668 - DNA, 120 bp, Artificial Sequence
  ENSG00000106591_18 (sequence is synthesized)
agtagattttcgagctctgatttttgacctcatgttcttttaaagattttctttgtgttctcctatcctcagacaatttcagattctcctcgctgacaacatggatgtactgtcttcatt

SEQ ID NO: 157669 - DNA, 120 bp, Artificial Sequence
  ENSG00000106591_19 (sequence is synthesized)
gatctagtaaagaaaaattacagtgtgtattacctctgatctgttcatgtatggttttaacagttaggatttcagttactgtttacttcatggcgttccacaacagcagcaccatacaga

SEQ ID NO: 157670 - DNA, 120 bp, Artificial Sequence
  ENSG00000106591_20 (sequence is synthesized)
tgaaactcgagaacagaaagctgactttcataagcatccacattctgttaagcaaaaccttagaacttaagccagaaagtattattgagtgatggttggggctgaacttaaatgtagaac

SEQ ID NO: 157671 - DNA, 120 bp, Artificial Sequence
  ENSG00000106591_21 (sequence is synthesized)
atgtgacttccctgatcgcatttattctgaaggaatagttcttatcctgtgcatttattttcttccttgaattattttctgttacatacggtatatagtgtgttatgttgggtactttga

SEQ ID NO: 157672 - DNA, 120 bp, Artificial Sequence
  ENSG00000106591_22 (sequence is synthesized)
tcacgaaaggaagaccagctgactgtgggtgtcttcataccttcagttgtgcatgcaatccagtttccagtagtggagcaaaatgagaatatggttaggcaagtaatatacaagcctctt

SEQ ID NO: 157673 - DNA, 120 bp, Artificial Sequence
  ENSG00000106591_23 (sequence is synthesized)
tcttcctttcagaaaaggaaattcttttgttatctgcctcacaaatgttagtatattaatcttatcaagtgtttaaagcttctttaatgatcctgtttagtatttttctttgtattttct

SEQ ID NO: 157674 - DNA, 120 bp, Artificial Sequence
  ENSG00000106591_24 (sequence is synthesized)
tctttaatgatcctgtttagtatttttctttgtattttctttcaaacctacatctagaataagttgataaatcttttagaggttataatgtttctattttatatttaaagttggagatat

SEQ ID NO: 157675 - DNA, 120 bp, Artificial Sequence
  ENSG00000106591_25 (sequence is synthesized)
acacacacatatatatatcattaaaataccctaagaatgtaacatagaaaataattttacattaaggaataatcagtgttcatttttaaaaagaaaaattataccatatacgaaacctgt

SEQ ID NO: 157676 - DNA, 120 bp, Artificial Sequence
  ENSG00000106591_26 (sequence is synthesized)
tgtacaggaatttgaattacactgtgataaaaagaggaagccaaggaagtcaacttgtaatgttcttatcttgttttccctaagatagattgaaagacaaagggaattcacttttccttg

SEQ ID NO: 157677 - DNA, 120 bp, Artificial Sequence
  ENSG00000106591_27 (sequence is synthesized)
gtgtcttatttaagatgctgattgtttgggtcacttcattatgttgacaaattccttatttgatatttagtatttggagttaggggaaatgagtatttcttttttcttttttacataact

SEQ ID NO: 157678 - DNA, 120 bp, Artificial Sequence
  ENSG00000106603_0 (sequence is synthesized)
aagtctctactgctccccgctggcgcgcaggaccgcgggcatttacccgtgctttcccaagcctggaagaactcgtcatgctctttgtagcgtggtgcttctgttgctcacaggacaact

SEQ ID NO: 157679 - DNA, 120 bp, Artificial Sequence
  ENSG00000106603_1 (sequence is synthesized)
tgcctttgatgattttcaagagagttgtgctatgatgtggcaaaagtatgcaggaagcaggcggtcaatgcctctgggagcaaggatccttttccacggtgtgttctatgccgggggctt

SEQ ID NO: 157680 - DNA, 120 bp, Artificial Sequence
  ENSG00000106603_2 (sequence is synthesized)
tgccattgtgtattacctcattcaaaagtttcattccagggctttatattacaagttggcagtggagcagctgcagagccatcccgaggcacaggaagctctgggccctcctctcaacat

SEQ ID NO: 157681 - DNA, 120 bp, Artificial Sequence
  ENSG00000106603_3 (sequence is synthesized)
gggccttctctacgtccactcatccagaggtggcccctttcagaggtggcaccttgacgaggtctttttagagctcaaggatggtcagcagattcctgtgttcaagctcagtggggaaaa

SEQ ID NO: 157682 - DNA, 120 bp, Artificial Sequence
  ENSG00000106603_4 (sequence is synthesized)
cggtgatgaagtgaaaaaggagtagagacgacccagaagacccagcttgcttctagtccatccttccctcatctctaccatatggccactggggtggtggcccatctcagtgacagacac

SEQ ID NO: 157683 - DNA, 120 bp, Artificial Sequence
  ENSG00000106603_5 (sequence is synthesized)
tcctgcaacccagttttccagccaccagtgggatgatggtatgtgccagcacatggtaattttggtgtaattctaacttgggcacaacaaatgctatttgtcatttttaaactgaatccg

SEQ ID NO: 157684 - DNA, 120 bp, Artificial Sequence
  ENSG00000106603_6 (sequence is synthesized)
aaagaaactcctattataaatttaagataatgtaatgtatttgaaagtgctttgtataaaaaagcacatgataaaaggaatcagaattaataaaatgtttgttgatctttgctagttctc

SEQ ID NO: 157685 - DNA, 120 bp, Artificial Sequence
  ENSG00000106603_7 (sequence is synthesized)
tttcccaagcctggaagaactcgtcatgctctttgtagcgtggtgcttctgttgctcacaggatgtttgccacacgagtcactcgagagaatctctgagtcctggcgagggctttctgag

SEQ ID NO: 157686 - DNA, 120 bp, Artificial Sequence
  ENSG00000106603_8 (sequence is synthesized)
gcttcgtgtgttagcagctgttgtcttccaactcagcggcaggtttgcctttccccacggacactctggaccttgtagctcctcaagcttccctgtctattgagcagataggaagccgtg

SEQ ID NO: 157687 - DNA, 120 bp, Artificial Sequence
  ENSG00000106603_9 (sequence is synthesized)
acccttttgcggcacacttgctaccttggtcttagctctgggctttggtgtcctctggcagtcctgctgcattgccttctctcccccatctgcccacccctgtcccagagagatttttct

SEQ ID NO: 157688 - DNA, 120 bp, Artificial Sequence
  ENSG00000106603_10 (sequence is synthesized)
gtagcccctcatctgcagagtccgacagctcagggtcgagggtctttcttagcagtaatcacccactatgctctcacccctccatttctggacatgcttcctgtggcttctctcctgcgc

SEQ ID NO: 157689 - DNA, 120 bp, Artificial Sequence
  ENSG00000106603_11 (sequence is synthesized)
tttacacttcagcagttcttgtttctgctcactctgcctttgtttgtcatttcctggatttgaagctgttctgctcttttcacctttctcttctcaaggtaaacttcctctgtgaaacct

SEQ ID NO: 157690 - DNA, 120 bp, Artificial Sequence
  ENSG00000106603_12 (sequence is synthesized)
ccgctgatgccctgcagcaaggttgaccacttcctgagtgttacttcctctcttggtgcatatgtctggttgcactaaccaggctgctgctagcccaaaggcacctttgtgcaaattaga

SEQ ID NO: 157691 - DNA, 120 bp, Artificial Sequence
  ENSG00000106603_13 (sequence is synthesized)
aaaagacaaccatccccatcccttcttcaagatactttatagtacttccaactgttggcaaactgtcttaataaagatacaaatctttgatttctctaatgtgcatggtgccctacaagg

SEQ ID NO: 157692 - DNA, 120 bp, Artificial Sequence
  ENSG00000106603_14 (sequence is synthesized)
gttgtgcagtgcatagccgtgcagttgcatgtgatagatctatgttataattatttgtttaattgtctgtattcccctcaggaccaaggaaaattccttatatcttgatactgtttttat

SEQ ID NO: 157693 - DNA, 120 bp, Artificial Sequence
  ENSG00000106603_15 (sequence is synthesized)
attcttactgtctgaccagatcagaccctcagtaaccgtttgctaaacaaaagaaggaatgaaggtacaaatatgtatccaccttgtctggaaaaatagcaggaaaggcatgcctgccaa

SEQ ID NO: 157694 - DNA, 120 bp, Artificial Sequence
  ENSG00000106603_16 (sequence is synthesized)
ggacttttacactgaacagtaagaatatattttagctcagagacactgtttgttttcacatttcaatattgctttaattagatatcttaaagctcgtgtaccacagtggttgaaagagca

SEQ ID NO: 157695 - DNA, 120 bp, Artificial Sequence
  ENSG00000106603_17 (sequence is synthesized)
gatgctggagccagactgcatgaatttgaatcccagttctaccacttattcacttattagtgcacctttgggcatgttacttaacctttctgtgcctcagtttactcatctgcaaaatga

SEQ ID NO: 157696 - DNA, 120 bp, Artificial Sequence
  ENSG00000106603_18 (sequence is synthesized)
gcgtgatgataatagttcctacttcaaagggttgtgagaattaaatgaattatataaagtgcttagaatagtacaagacacataatagtcagagacagaagtattaggtattatcaatat

SEQ ID NO: 157697 - DNA, 120 bp, Artificial Sequence
  ENSG00000106603_19 (sequence is synthesized)
ctgaagtgctgttttcactctgtcacgtacagcttttattgctagcatcttgcttctgcaggtccagcctcctgttgattggccctgtgtttgtgctgtggtcaaagcacttgctgtctg

SEQ ID NO: 157698 - DNA, 120 bp, Artificial Sequence
  ENSG00000106603_20 (sequence is synthesized)
cggttctcccttgtgcacaccggttctttggttgctgtaacaaaaactacataggacacagacaggaaacccgcaggctttgttttttcttcctaatttggcagcagaagggggaaaaac

SEQ ID NO: 157699 - DNA, 120 bp, Artificial Sequence
  ENSG00000106603_21 (sequence is synthesized)
cagggcctttcacagacaaggcttgttttagagtttaattttaacttcttgttcgtgttctaaagcttgggttggtaataaatcttggctgtatgagactagagagaactgggctttaaa

SEQ ID NO: 157700 - DNA, 120 bp, Artificial Sequence
  ENSG00000106603_22 (sequence is synthesized)
ggacctttattgtctcctgagcacccattctttgttctttcagaaacacaactggttttgagaatccatcccttcttcactcagtccacgtaaaggttaggatggtagaaagtgttatac

SEQ ID NO: 157701 - DNA, 120 bp, Artificial Sequence
  ENSG00000106603_23 (sequence is synthesized)
ctcttcctccagagttggagcctatgacactgatgacactggcatggaaagccaaagccctacaccaaccagcacacttactggttccaaattgatctacgctggtgtaatcagagtgaa

SEQ ID NO: 157702 - DNA, 120 bp, Artificial Sequence
  ENSG00000106603_24 (sequence is synthesized)
tctcagaactttggacagagctgtgagcagagactgactttcctgctgtctccaggtagctgcaaggctgaacagcagcacctactttattaccatcttactgtcattcaaagaaggcag

SEQ ID NO: 157703 - DNA, 120 bp, Artificial Sequence
  ENSG00000106603_25 (sequence is synthesized)
agctgaatgctggagaaaaactgagtactagcaacagtttttgaaccctgaatactgtcataactgaagctagaattatccctggacttgtttgccactaaaatttccttgttttgctta

SEQ ID NO: 157704 - DNA, 120 bp, Artificial Sequence
  ENSG00000106603_26 (sequence is synthesized)
ccctggtttcagctggcaccctgatcacttgaaaggaacataactgatatactgtcctttgtttttctttccttcctcttctccgcctttgatgattttaaattagaaatctacctgcct

SEQ ID NO: 157705 - DNA, 120 bp, Artificial Sequence
  ENSG00000106603_27 (sequence is synthesized)
ctaatctctttaattttctcatttatttactgctgcctattttccaaaacactgcttctcgaatattcctggctcaaaaatcatctatgtcttcatgacatatgaaacccctagaatcca

SEQ ID NO: 157706 - DNA, 120 bp, Artificial Sequence
  ENSG00000106603_28 (sequence is synthesized)
tgctttgtttagattagagaaaggaggagagggtgattttaaaggctagtccaccatttcgttggctatagcttcctctgtatcctgtaatctcagtttttccaggagcaacgagtacaa

SEQ ID NO: 157707 - DNA, 120 bp, Artificial Sequence
  ENSG00000106603_29 (sequence is synthesized)
ataaaaggaccaggactaatatgcataagaagcccagcaaagcacgatgggctttcagtccagtgcacacacaggggctccatcaagattctgagattatataaagaagggacagaggga

SEQ ID NO: 157708 - DNA, 120 bp, Artificial Sequence
  ENSG00000106603_30 (sequence is synthesized)
gatttgttcttgaagtgtgactaggtgactgcctattcacctgagttatggagccatgttccaaatcttgtgccttccttcaggtgtgtttggaaagcacaaatgtgtacctcagtagtt

SEQ ID NO: 157709 - DNA, 120 bp, Artificial Sequence
  ENSG00000106603_31 (sequence is synthesized)
tcttctcttggtggcaacttggaatgggtgggatactccccgccccaattccctcccctgcccctgccccgggaggtatctttggccatcaccgaggacacaggaaggcactctgggaga

SEQ ID NO: 157710 - DNA, 120 bp, Artificial Sequence
  ENSG00000106603_32 (sequence is synthesized)
tgcctgtctcatgatgggcttccttattaactgtgcctgtgtctccttcgcgaggctcataccttctttggttttcatgagaaaccaaaaatattgcattcactgttttttttctcaatc

SEQ ID NO: 157711 - DNA, 120 bp, Artificial Sequence
  ENSG00000106603_33 (sequence is synthesized)
ggagtgtgatcaactgcttacgggctctcaggctgactccctgagcatgggcatggcagcacctggcagcatccctgtggtacgagcccagcctgtggtgctggggatgaaggagaaact

SEQ ID NO: 157712 - DNA, 120 bp, Artificial Sequence
  ENSG00000106603_34 (sequence is synthesized)
gagaactctgtgttgtctttctcagacaagccttcatgtattgtattttctttaaagcctgttctttagggtccaggtcaaaatatgtaccaatttcctggcaataggtccctctttaaa

SEQ ID NO: 157713 - DNA, 120 bp, Artificial Sequence
  ENSG00000106603_35 (sequence is synthesized)
acagtgaattttttttggtattttattgtgaaaaatttcaaacgtacaaaaaagacaaaagaatttatactgtgagcacctatagctggtacctggattctacaattggattttgctctg

SEQ ID NO: 157714 - DNA, 120 bp, Artificial Sequence
  ENSG00000106603_36 (sequence is synthesized)
tgtttttgatattcatcgatgttgctccgtgtatcaggagtttgctcctttttaacagtggacttttgagcgatcattggaagtacccagagcattgacataggagtcctccttgccaaa

SEQ ID NO: 157715 - DNA, 120 bp, Artificial Sequence
  ENSG00000106603_37 (sequence is synthesized)
tggaaagactgccattgaccttaccagccaaccaaagaggggcaggacatttggaaaatcaagtggattctccagctgggctgttagaaaagaactcacttctgtggagaatcactggat

SEQ ID NO: 157716 - DNA, 120 bp, Artificial Sequence
  ENSG00000106603_38 (sequence is synthesized)
tttataggcttagctctagaaagcatcattttgtcatcttctgaaatgacaataattatccaattacatctctcctttctgtcattttacacccacagttgaagattcctgtctctggat

SEQ ID NO: 157717 - DNA, 120 bp, Artificial Sequence
  ENSG00000106603_39 (sequence is synthesized)
cgaaacccttcccggcgcgagtccgagcgtctgagaagcagaagccacacgtcccggcgacctaagttctggatcagccggccggaggacccgtgttagcatttacaatccgaggtgagc

SEQ ID NO: 157718 - DNA, 120 bp, Artificial Sequence
  ENSG00000106603_40 (sequence is synthesized)
tgaagcctccggttgtcccggttcgacgctctagccctgcgagcagccgacgccggaagtctctactgctccccgctggcgcgcaggaccgcgggcatttacccgtgctttcccaagcct

SEQ ID NO: 157719 - DNA, 120 bp, Artificial Sequence
  ENSG00000106603_41 (sequence is synthesized)
tttcccaagcctggaagaactcgtcatgctctttgtagcgtggtgcttctgttgctcacagaggtgcctgcttccccttctgccatgattggaagtttcctgaggcctccccagccatgt

SEQ ID NO: 157720 - DNA, 120 bp, Artificial Sequence
  ENSG00000106603_42 (sequence is synthesized)
atgatggcctccctattccctgagacacaacagtattgaaattgggccaattaataaccccacagtggcctctcactaaatgtgagaggtgaggaagctgcaggagaaaatttgaagcta

SEQ ID NO: 157721 - DNA, 120 bp, Artificial Sequence
  ENSG00000106603_43 (sequence is synthesized)
gcagtgttcatgagatgtaagtaaagaagccatctccataaaagtacaacgtgacgcagcaagtgctgatggagaagctgtagaagttacacagaagatctagcttggaccatcgatgaa

SEQ ID NO: 157722 - DNA, 120 bp, Artificial Sequence
  ENSG00000106603_44 (sequence is synthesized)
agtggctacactaaacaacagattttaaatgtagataaaacagcattttattggaaaaagatgccatctaggactttcatagttagaaaaactcaatgcctggcttcaaaggacaagctg

SEQ ID NO: 157723 - DNA, 120 bp, Artificial Sequence
  ENSG00000106603_45 (sequence is synthesized)
actcttgtcaggggctagtgcagctgtgactttcagttaaagccaatgctcattgactattctgaaaatcccagggcccttaagatatgctgtataaacgcaacaacaaagcctggatga

SEQ ID NO: 157724 - DNA, 120 bp, Artificial Sequence
  ENSG00000106603_46 (sequence is synthesized)
cgttgggtctgtttacagcctggtctactgagtaagcccactgttgagacctagtgctcagaaaaaatagatttctttcaaaatatggctgggtgcagtggctcacaccggtaatcccag

SEQ ID NO: 157725 - DNA, 120 bp, Artificial Sequence
  ENSG00000106603_47 (sequence is synthesized)
aaaatattgctactcattaacaatgcacctggttacccaagagctctgatggagatgtacaaggagatgaatactgttttcatgcctgctaacacagtatccattctgctgctgatagat

SEQ ID NO: 157726 - DNA, 120 bp, Artificial Sequence
  ENSG00000106603_48 (sequence is synthesized)
ctgctgatagatcaagaagtacttttgactttcaaaacttgttatttaagaaatacattttgtggtttctctgatggttctgggcagtcagttcaaaaccttctggaaaggattcaccat

SEQ ID NO: 157727 - DNA, 120 bp, Artificial Sequence
  ENSG00000106603_49 (sequence is synthesized)
caagagcattcaattcacgggaggaggtcaaaatatcaacattaattggaatttggaagaaatagattccaatcctcatggaggacttggagggtttcaagacttcagaggaggaaggaa

SEQ ID NO: 157728 - DNA, 120 bp, Artificial Sequence
  ENSG00000106603_50 (sequence is synthesized)
ctgtagatgggctgaaaatagcaagagaactagaagtggaggggcctagagatgtgaccgaattgctgtaacctcaggatcaaacttgtatggatgagaagttccttctcatggacgagc

SEQ ID NO: 157729 - DNA, 120 bp, Artificial Sequence
  ENSG00000106603_51 (sequence is synthesized)
aaagaaggtgatttcttgaaatggaatctactcctggtgaagatgctatgaacattgttgaaatgacaaaagatttagaatattccataaacttagctgtggccagggtttgagaggatt

SEQ ID NO: 157730 - DNA, 120 bp, Artificial Sequence
  ENSG00000106603_52 (sequence is synthesized)
gactcctaattttgaagttctactgtgggtaaatgctgtcaaacagcattgcatgccacagaggaatctctcatgaaagagttaataaatgcagcaaacttcactgttgtcttactttaa

SEQ ID NO: 157731 - DNA, 120 bp, Artificial Sequence
  ENSG00000106603_53 (sequence is synthesized)
gaaactgccacagtcactgcaggcttcagcaacttatcttttcctaccctcctctcgcatttaaaagtacttttaaattaatgtatgtacattatttttaggcataacactgctgctcat

SEQ ID NO: 157732 - DNA, 120 bp, Artificial Sequence
  ENSG00000106603_54 (sequence is synthesized)
ttaaaaaaactacagtatgaaccatgttatatgcagtggaaaggcaaaaaattcatgtgacttacttgcttgtatttggtttattgcagtggtctggaactgaaagtgatgcgtatttct

SEQ ID NO: 157733 - DNA, 120 bp, Artificial Sequence
  ENSG00000106603_55 (sequence is synthesized)
gagttatgcctgtatttaagaagctgagtgaaacccaaagaagtccatgataggacagacttctgaaaactaaagacagaaaaaagcttgaaagcatcaagaaagaagtgaaatcttagc

SEQ ID NO: 157734 - DNA, 120 bp, Artificial Sequence
  ENSG00000106603_56 (sequence is synthesized)
tagagggaaaagtaactcagatgacagtggatttctctctggaaaccatggaggccagaaggaagtgagacaagttcttttagtgccagaagaactatcaacttgtggctgggcacggtg

SEQ ID NO: 157735 - DNA, 90 bp, Artificial Sequence
  ENSG00000106603_57 (sequence is synthesized)
caaaactctgtcaactccaaattcctatttggtgaaatgatccttcaggattgatggggtaataaaaacattctcggttgatagaaaact

SEQ ID NO: 157736 - DNA, 120 bp, Artificial Sequence
  ENSG00000106603_58 (sequence is synthesized)
tttccccagcttttaatatctcctaattgatttctcaattccagtgaaatgattccatttatttttttcccaaacacatcacaaatattcctaactcttgtgagcaattttctctcattc

SEQ ID NO: 157737 - DNA, 120 bp, Artificial Sequence
  ENSG00000106603_59 (sequence is synthesized)
ttctcaacttatctaaatcctaacttttcaaaagatctagctcaagttctgtcttatcatattttgagttcctttctttggcattgtattattttgtatctttccatgtacacatgtgtg

SEQ ID NO: 157738 - DNA, 120 bp, Artificial Sequence
  ENSG00000106603_60 (sequence is synthesized)
cattatctccctgataaaactaactggctagaggataggagtaaagactcaattctaatatccttgttacctaataatacacaaacgtgaaacatgtttgaataaatcactgttaaatat

SEQ ID NO: 157739 - DNA, 120 bp, Artificial Sequence
  ENSG00000106603_61 (sequence is synthesized)
gctggcgcgcaggaccgcgggcatttacccgtgctttcccaagcctggaagaactcgtcatgctctttgtagcgtggtgcttctgttgctcacagagtctcgctctggccagagattttc

SEQ ID NO: 157740 - DNA, 120 bp, Artificial Sequence
  ENSG00000106603_62 (sequence is synthesized)
atgatgtggcaaaaggtaatggaatgttccagggccaagttccccactagaacctgccagggtattctcgagttagacaatagaagaaagtcactccctgaatagttatgggcttctcct

SEQ ID NO: 157741 - DNA, 120 bp, Artificial Sequence
  ENSG00000106603_63 (sequence is synthesized)
tctgtctttctctcgtgtctcatgctggcgttggaagctgtaacactctgggaacctctccataacccagtctggctgcctcaccctgttgagctctcttcaaattaagcaagatctgac

SEQ ID NO: 157742 - DNA, 120 bp, Artificial Sequence
  ENSG00000106603_64 (sequence is synthesized)
taatacattcttcagagatgctctgaccgttttcattatgagaactaaatgacttttcccagatcacattactgtaattaactttacactcattttgatactcttacatattataagagt

SEQ ID NO: 157743 - DNA, 120 bp, Artificial Sequence
  ENSG00000106603_65 (sequence is synthesized)
tgctggtactgcagtcatctggtagcccacttaaactagaatgtccatgacagctcattcacatggctagtgccttggatgtttgccacacgagtcactcgagagaatctctgagtcctg

SEQ ID NO: 157744 - DNA, 120 bp, Artificial Sequence
  ENSG00000106603_66 (sequence is synthesized)
gttagtgcttgtgtatgaggtgagaattgaatctcacaacacaagagctgttgaacattgtgagatgtgtggaatattgagaacagtgcctagccatagaaatcactcaataaagattag

SEQ ID NO: 157745 - DNA, 120 bp, Artificial Sequence
  ENSG00000106603_67 (sequence is synthesized)
ctgtctggaccctgcttctgtcccttcttttcctatcatagctggcaccgtgttcatgcctgtggtattccctgtatccctattcctgggaagcagcccaggagggggattcccttggcc

SEQ ID NO: 157746 - DNA, 120 bp, Artificial Sequence
  ENSG00000106603_68 (sequence is synthesized)
tctccagggtcaggtcacctttcccttcattagtgtgatgggaccttcagaagagaagcactttctgcggccaaactgaacaccctgcttgggaagcctgcctctgctccctcctttggg

SEQ ID NO: 157747 - DNA, 120 bp, Artificial Sequence
  ENSG00000106603_69 (sequence is synthesized)
cagctgattattagaacttacagcttcagggaggtgcttcccggagttcccaggtagcctgtgggctcagaaggattcctgagactgagagcagtttgagttgaaatgttggcttaaatc

SEQ ID NO: 157748 - DNA, 120 bp, Artificial Sequence
  ENSG00000106603_70 (sequence is synthesized)
ttgatgaatgaacattttcatatcctgtttctaggcctgagggttttgttgttaatgttgtggtctttctattttatgtctcaacttagtggaacaggcagtgttgagaagtcaggtatc

SEQ ID NO: 157749 - DNA, 120 bp, Artificial Sequence
  ENSG00000106603_71 (sequence is synthesized)
atggattctggcctcggctttgccatggaccagctgtgtcactttgaacaagtcatggaatcatagtaggactttagagcaaacttagagacttgagaggaaacttagagaagagctgac

SEQ ID NO: 157750 - DNA, 120 bp, Artificial Sequence
  ENSG00000106603_72 (sequence is synthesized)
caaacctcttaggtgtcaaaataaggcaatgagtgagggtagaaatgaggtgaagcagaaagggtctgcatgaggtcaaggcccaaggtcatctgcacatccctgcaaaacactgcctgc

SEQ ID NO: 157751 - DNA, 120 bp, Artificial Sequence
  ENSG00000106603_73 (sequence is synthesized)
ctgtgctttggtttttgagtctgtaaaatggacaatttagagtagatggccttaattattcgtccatccacagatttcacgtttctgtttctaccctgtacgtcagttggattatttaat

SEQ ID NO: 157752 - DNA, 120 bp, Artificial Sequence
  ENSG00000106603_74 (sequence is synthesized)
tttctaaattattgacctgagaatgatgaggaagaccactggtttttcactctaccttgaattcatgttgttaagtagcttgtggacattctctatcactttggaatattttgtttgctt

SEQ ID NO: 157753 - DNA, 120 bp, Artificial Sequence
  ENSG00000106603_75 (sequence is synthesized)
tgcttttatttatttctatttcagacaccaaccatctgcccagttgaagatttgcaaaataattgtttttattccaaacattttgaaagcttagaaaatttatatgtgtacatatacata

SEQ ID NO: 157754 - DNA, 85 bp, Artificial Sequence
  ENSG00000106603_76 (sequence is synthesized)
ttttgaaagcttagaaaatttatatgtgtacatatacatataaagttaacttaggaaagttagtttgaagctaacagcatctgat

SEQ ID NO: 157755 - DNA, 120 bp, Artificial Sequence
  ENSG00000106603_77 (sequence is synthesized)
gtggggaaagctgtggctgtgcgtccagcattgtcagactttttttgcactttcattctctgctgttgatttaatggaggagggaccatgagcaaggaactctggcaggggcagaaaata

SEQ ID NO: 157756 - DNA, 120 bp, Artificial Sequence
  ENSG00000106603_78 (sequence is synthesized)
aaagcagagaccacgatggcaaaatcccgacagatgccgcttccagccccactgcactcaaatttgaatttgtaaagacaggccacaattactgtcagcagccaggacatttaaggtcat

SEQ ID NO: 157757 - DNA, 120 bp, Artificial Sequence
  ENSG00000106603_79 (sequence is synthesized)
tttaatgctactggtggcaaagcggcagcagttttttctagactggctttttttaggctcctttatccccacccagcttggctcgtcatccactctgcaacattttcacttcttcccagg

SEQ ID NO: 157758 - DNA, 120 bp, Artificial Sequence
  ENSG00000106603_80 (sequence is synthesized)
atgtgagtgtcaccagcagacaagcagacaggctccagtgtcctctccagcctttctgcaccatcctgcagagttggtggagttgcagagtctggagggggcctgagatgagcgttccca

SEQ ID NO: 157759 - DNA, 120 bp, Artificial Sequence
  ENSG00000106603_81 (sequence is synthesized)
ggaatgattcagactgaataatttggcctcctcttccctctgccaaagggacaggggcaggacatgagagggatgggtgcacttttgggtcagggttcagctttctggtgtgacagcctt

SEQ ID NO: 157760 - DNA, 120 bp, Artificial Sequence
  ENSG00000106603_82 (sequence is synthesized)
tctcccttaggaggctgctaagtcggtgagacctgggcactgcagccgactgcctgggttgaatggttgaatctcggctccagctcttgaccagctatgtggccttatgggggagtccgt

SEQ ID NO: 157761 - DNA, 120 bp, Artificial Sequence
  ENSG00000106603_83 (sequence is synthesized)
agtgacagctccagcccattcgcaggcttacaggaccagccattgccacaaaggataagcttcctgtttaccagttggcctgagacaaagtggttgtgcttcctggccatgcggggcttg

SEQ ID NO: 157762 - DNA, 120 bp, Artificial Sequence
  ENSG00000106603_84 (sequence is synthesized)
gcacacagtctgggctgtgtctgtcaggatggtgggctgaatgctcgctctgtgctgggctggctgggggtggcagggcccccacagcatgggtcctggacatgggccactctcgagagg

SEQ ID NO: 157763 - DNA, 120 bp, Artificial Sequence
  ENSG00000106603_85 (sequence is synthesized)
gcaccctcaggagggcactcagtttggcttcagaaccaaccctggcatttggaaaggaagcaaatgagggagggcggtctggcctcctttctggcttccttaatgcttctttcctttagg

SEQ ID NO: 157764 - DNA, 120 bp, Artificial Sequence
  ENSG00000106603_86 (sequence is synthesized)
ttacccgtgctttcccaagcctggaagaactcgtcatgctctttgtagcgtggtgcttctgttgctcacaggtctgctgctaccagctagtccaagccaccaccagctctgccatggagc

SEQ ID NO: 157765 - DNA, 120 bp, Artificial Sequence
  ENSG00000106603_87 (sequence is synthesized)
cttttaattggactccctgcttccattcttgtcctttctagagaaatctttaacaaaaagcaagtcatactgtgtcatttcctgattgaaaccttcagcatcttctcttacactttgagt

SEQ ID NO: 157766 - DNA, 120 bp, Artificial Sequence
  ENSG00000106603_88 (sequence is synthesized)
tccacacctcattcacgagcctgccttctgcttcttgaagataccgagcctgtggctgcctcagggccttggcgtgtttggcgtgcccttcccctggttttcaaatgatccctccagtct

SEQ ID NO: 157767 - DNA, 120 bp, Artificial Sequence
  ENSG00000106603_89 (sequence is synthesized)
cacatgtcaccttggcagaggtgccgttcttcactgccacattaaaattgcgcttccccctttcatattctaagtggttcagatttactttcccggagtagtcacaggactgggcagtga

SEQ ID NO: 157768 - DNA, 120 bp, Artificial Sequence
  ENSG00000106605_0 (sequence is synthesized)
ggtccgcaaagccggtggcgcccggaggctgcacggagagcggtgcccgcgtcagtgaccgaaggaagagaccaagatgaatgcagagcccgagaggaagtttggcgtggtggtggttgg

SEQ ID NO: 157769 - DNA, 120 bp, Artificial Sequence
  ENSG00000106605_1 (sequence is synthesized)
tgttggccgagccggctccgtgcggatgagggacttgcggaatccacacccttcctcagcgttcctgaacctgattggcttcgtgtcgagaagggagctcgggagcattgatggagtcca

SEQ ID NO: 157770 - DNA, 120 bp, Artificial Sequence
  ENSG00000106605_2 (sequence is synthesized)
gcagatttctttggaggatgctctttccagccaagaggtggaggtcgcctatatctgcagtgagagctccagccatgaggactacatcaggcagttccttaatgctggcaagcacgtcct

SEQ ID NO: 157771 - DNA, 120 bp, Artificial Sequence
  ENSG00000106605_3 (sequence is synthesized)
tgtggaataccccatgacactgtcattggcggccgctcaggaactgtgggagctggctgagcagaaaggaaaagtcttgcacgaggagcatgttgaactcttgatggaggaattcgcttt

SEQ ID NO: 157772 - DNA, 120 bp, Artificial Sequence
  ENSG00000106605_4 (sequence is synthesized)
gacctggctggtctccctctttggggagctttctcttgtgtctgccactttggaagagcgaaaggaagatcagtatatgaaaatgacagtgtgtctggagacagagaagaaaagtccact

SEQ ID NO: 157773 - DNA, 120 bp, Artificial Sequence
  ENSG00000106605_5 (sequence is synthesized)
gtcatggattgaagaaaaaggacctggtctaaaacgaaacagatatttaagcttccatttcaagtctgggtccttggagaatgtgccaaatgtaggagtgaataagaacatatttctgaa

SEQ ID NO: 157774 - DNA, 120 bp, Artificial Sequence
  ENSG00000106605_6 (sequence is synthesized)
agatcaaaatatatttgtccagaaactcttgggccagttctctgagaaggaactggctgctgaaaagaaacgcatcctgcactgcctggggcttgcagaagaaatccagaaatattgctg

SEQ ID NO: 157775 - DNA, 120 bp, Artificial Sequence
  ENSG00000106605_7 (sequence is synthesized)
ttcaaggaagtaagaggaggaggtgatgtagcacttccaagatggcaccagcatttggttcttctcaagagttgaccattatctctattcttaaaattaaacatgttggggaaacaagaa

SEQ ID NO: 157776 - DNA, 71 bp, Artificial Sequence
  ENSG00000106605_8 (sequence is synthesized)
aaagccggtggcgcccggaggctgcacggagagcggtgcccgcgtcagagcctcgccctgtcagctgggtt

SEQ ID NO: 157777 - DNA, 120 bp, Artificial Sequence
  ENSG00000106605_9 (sequence is synthesized)
tgcacacctagacacaactgacgactgccctttttattccatttttgtcgttacaggaaaagtcttgcacgaggagcatgttgaactcttgatggaggaattcgctttcctgaaaaaaga

SEQ ID NO: 157778 - DNA, 120 bp, Artificial Sequence
  ENSG00000106605_10 (sequence is synthesized)
ctctgtgaccaatcacagaagtgtcaaaacattaagaaattcttattgctggttataaatatataaggaagtgaaaaatagtaaaattaatatttagtatgtgtaatttgaaacattaga

SEQ ID NO: 157779 - DNA, 120 bp, Artificial Sequence
  ENSG00000106605_11 (sequence is synthesized)
aacattcagaattaaagtgttttatttctctgtaaaaacccatcgagagtagttttcaacagtagtggcctccttcttctcaccagacagtttaggatgtggagccggcatccttggcaa

SEQ ID NO: 157780 - DNA, 120 bp, Artificial Sequence
  ENSG00000106605_12 (sequence is synthesized)
attatcatactcccttctcagtttggatcagcttccaacgttttctcctttgtgctttcaatgtcataaaataacggttgagttcctttaaccctcaggacctggcagctaacagggaag

SEQ ID NO: 157781 - DNA, 120 bp, Artificial Sequence
  ENSG00000106605_13 (sequence is synthesized)
ttgtgcctgtgtacgcagttcctgtagcactcggctgggcagaaatcatctttcagcactaagggaacatagttatgatctggaccttctgggagtggtcagtgcccaagaacagtgacc

SEQ ID NO: 157782 - DNA, 120 bp, Artificial Sequence
  ENSG00000106608_0 (sequence is synthesized)
ataattttcaaacatatgacaggaaagcatttttatgatactttcttgtattttacatgtgtcttatttttggaatcagaaaaacatatatggtgatattagtaattttcaaaaactgca

SEQ ID NO: 157783 - DNA, 120 bp, Artificial Sequence
  ENSG00000106608_1 (sequence is synthesized)
ctgcagagagctcccttgcccctgagtagggccgttggaagtgctgttctctgccgtcttggtccgactccgcctgatacacagacaggaaacttagcaaggcttagaagtgggctggag

SEQ ID NO: 157784 - DNA, 120 bp, Artificial Sequence
  ENSG00000106608_2 (sequence is synthesized)
ggctggagcccgagttgacagattggctggtgttataatttttaaaattactggctatagggtacagtggctcattattttttgttgagatgaggttttgccatgttgcccaggctagtc

SEQ ID NO: 157785 - DNA, 120 bp, Artificial Sequence
  ENSG00000106608_3 (sequence is synthesized)
ctgggctcaagtgatccccttgctttggcctcccagatgctggaattacaggcatgagtcactgcaccctgctctaaaatgatactattctgactgcagcatccccctccacatttcatg

SEQ ID NO: 157786 - DNA, 120 bp, Artificial Sequence
  ENSG00000106608_4 (sequence is synthesized)
ttctgatgtgagcaagagagccttctctttctgcccatgtatttattatccatgtggactcactaattgctggttttcaatggttttaaatcagttactgtgtttatgtttgtgctcaca

SEQ ID NO: 157787 - DNA, 120 bp, Artificial Sequence
  ENSG00000106608_5 (sequence is synthesized)
ttgtcctagatttgaccagtgagagttcctcaggctggctcctgtgcccatcatgttttcgagcatttccttactttctgaaataagatgctcaggctcctcctgttctttccttgcccc

SEQ ID NO: 157788 - DNA, 120 bp, Artificial Sequence
  ENSG00000106608_6 (sequence is synthesized)
agccatcattcaggatctccaaggagtccgtttcttttagcgtggaaggtattaaagggtgctaggcatgcccattgccacaacagtgtctttgcttcttggccctttccgtggacagtt

SEQ ID NO: 157789 - DNA, 120 bp, Artificial Sequence
  ENSG00000106608_7 (sequence is synthesized)
aggaaatagatgcatgtgtacactcgtatacacacagagatatgtgtgcacacctacatctacacacttaaacacatatgcacataagcatgcatatagaaatcacagttcacacgagtg

SEQ ID NO: 157790 - DNA, 120 bp, Artificial Sequence
  ENSG00000106608_8 (sequence is synthesized)
cctccagttccattgcgcctctgcaagttctgctgtaactctccattctatgtttgtatgtcctttcttcagcagttagttagcaccctggctcctggcagaatcaatacatttactcat

SEQ ID NO: 157791 - DNA, 74 bp, Artificial Sequence
  ENSG00000106608_9 (sequence is synthesized)
tagcaccctggctcctggcagaatcaatacatttactcatttgctcactctatgatacatctaaaatagtttag

SEQ ID NO: 157792 - DNA, 120 bp, Artificial Sequence
  ENSG00000106608_10 (sequence is synthesized)
ccgcccgcctcagccttccaaagtgctggaattgcaggcgtgagccaccacaccaggcctaaaatagtttattcttaattagactgcacttatcatagctatttaaaataattcaggatc

SEQ ID NO: 157793 - DNA, 120 bp, Artificial Sequence
  ENSG00000106608_11 (sequence is synthesized)
tgcacttatcatagctatttaaaataattcaggatcaccccttccagaccacagtgttaacttcagatgaacatccttctagagttctgtatatatacctatagataaacatacacaatt

SEQ ID NO: 157794 - DNA, 120 bp, Artificial Sequence
  ENSG00000106608_12 (sequence is synthesized)
ttattaaattgtaatcatactgtgcatacttttctgtagcctgactttcccccgactaattaatataacagctttccctaatatctcatccagcatctttttgtccacaaaagaaatcca

SEQ ID NO: 157795 - DNA, 120 bp, Artificial Sequence
  ENSG00000106608_13 (sequence is synthesized)
tagcgtattttttaatggctgcagaatttgaccataattccgttattgcactttgattttaaaaggcatcagtttttcgctattatatataaagctggcatcaacatctttgtaactaaa

SEQ ID NO: 157796 - DNA, 120 bp, Artificial Sequence
  ENSG00000106608_14 (sequence is synthesized)
tcttaattatttccttaggatagaagtggaattactgggcaaagggtatgtatatttttctgtctttctgaatgactgtatttgtgctctggccagcagttttggagagtgctggttttc

SEQ ID NO: 157797 - DNA, 120 bp, Artificial Sequence
  ENSG00000106608_15 (sequence is synthesized)
tagaccagtgtttctcaactgtgggtgcatatcagaatcattgagggcacttttaaaagcagtgatacccaggaccagctcccagagattctggtttcatggatctggggtgtgacccag

SEQ ID NO: 157798 - DNA, 120 bp, Artificial Sequence
  ENSG00000106608_16 (sequence is synthesized)
ggtttatagtttttaaaagctctccaagagattttatatgcggccagtttgataggtgaaagtggtattccatttttttaattataattttcttctgaaattgtttcaggcattcagatt

SEQ ID NO: 157799 - DNA, 120 bp, Artificial Sequence
  ENSG00000106608_17 (sequence is synthesized)
tgggagaagtagccccagaaataaaagcatcagagagacgaacagctgtggccattgcagatttggaatggagagaaatggaaggagatgattgcgagttccgttatggagatggtacaa

SEQ ID NO: 157800 - DNA, 120 bp, Artificial Sequence
  ENSG00000106608_18 (sequence is synthesized)
atgaggctcaggacaatgattttccaacagtggagagaagcaggcttcaagaaatgctgtcacttttgggcctagagacgtaccaggtccagaaactcagcctccaggactctctgcaga

SEQ ID NO: 157801 - DNA, 120 bp, Artificial Sequence
  ENSG00000106608_19 (sequence is synthesized)
tcagttttgacagtatgaagaactgggcccctcaggttcccaaagacttgccctggaatttcctcaggaagttgcaggccctcaatgctgatgccaggaataccactatggtgctggacg

SEQ ID NO: 157802 - DNA, 120 bp, Artificial Sequence
  ENSG00000106608_20 (sequence is synthesized)
tgctcccagacgccaggcctgtggagaaggagagccagatggaagaggagatcatctactgggacccagctgatgaccttgctgccgacatttattccttttctgagctgcccacccctg

SEQ ID NO: 157803 - DNA, 120 bp, Artificial Sequence
  ENSG00000106608_21 (sequence is synthesized)
atacgccagtgaaccccttagaccttctctgtgccctgctgctctcctcagacagtttcctgcaacaagaaatagcgttgaaaatggccctctgccagtttgcactcccactcgtgttgc

SEQ ID NO: 157804 - DNA, 120 bp, Artificial Sequence
  ENSG00000106608_22 (sequence is synthesized)
accatacatttctgctgtgggccatgcggggcattgtgaggacatggtggtcccagcccccaaggggcatggggagcttccgggaagacagcgtggtcttgtccagggcgcccgccttcg

SEQ ID NO: 157805 - DNA, 120 bp, Artificial Sequence
  ENSG00000106608_23 (sequence is synthesized)
ccttcgtgcgcatggacgtcagtagcaactccaagtcccagcttctcaacgccgtcctcagcccgggccacaggcagtgggactgcttctggcatcgggacctcaacttgggcaccaatg

SEQ ID NO: 157806 - DNA, 120 bp, Artificial Sequence
  ENSG00000106608_24 (sequence is synthesized)
cccgggagatttcggatgggttggtagaaatttcctggttttttcccagcggaagggaggacttggacattttcccagaacctgtggcctttctgaacctgagaggtgacatcgggtctc

SEQ ID NO: 157807 - DNA, 120 bp, Artificial Sequence
  ENSG00000106608_25 (sequence is synthesized)
actggctgcagtttaagctcttgacagaaatctcctccgctgtgtttatattgactgacaatatcagtaagaaggaatacaaattgctgtactccatgaaggagtcaaccacaaaatact

SEQ ID NO: 157808 - DNA, 120 bp, Artificial Sequence
  ENSG00000106608_26 (sequence is synthesized)
acttcatcctgagtccctaccgtgggaagcgcaacacaaacctgagatttctgaataagttaattcctgtgctgaaaatagaccactcacatgtcctggtaaaggtcagcagcactgaca

SEQ ID NO: 157809 - DNA, 120 bp, Artificial Sequence
  ENSG00000106608_27 (sequence is synthesized)
gcgacagcttcgtgaagaggatccgggccatcgttgggaatgtgctgcgggcaccctgcaggcgggtatctgtggaggacatggcgcacgcagcccgcaaactgggcctaaaggtcgacg

SEQ ID NO: 157810 - DNA, 120 bp, Artificial Sequence
  ENSG00000106608_28 (sequence is synthesized)
aggactgtgaggagtgtcagaaagcgaaagaccggatggagaggattaccaggaaaatcaaagactcggatgcctacagaagggacgagctgaggctgcagggggacccctggagaaagg

SEQ ID NO: 157811 - DNA, 120 bp, Artificial Sequence
  ENSG00000106608_29 (sequence is synthesized)
cagcccaagtggagaaggagttctgccagctccagtgggccgtggacccccctgagaagcacagggctgagctgaggcggcggctgctagaacttcgaatgcagcagaacggccatgatc

SEQ ID NO: 157812 - DNA, 120 bp, Artificial Sequence
  ENSG00000106608_30 (sequence is synthesized)
cctcctcgggggtgcaggagttcatctcggggatcagcagcccctccttgagtgagaagcagtacttcctgaggtggatggagtggggcctggcacgggtggcccagccgcgactgagac

SEQ ID NO: 157813 - DNA, 120 bp, Artificial Sequence
  ENSG00000106608_31 (sequence is synthesized)
agcctccggagacgcttctcaccctgagaccaaagcatgggggcaccacagacgtgggggagccgctctggcctgagcccctaggggtggaacacttcttgcgggagatgggacagtttt

SEQ ID NO: 157814 - DNA, 120 bp, Artificial Sequence
  ENSG00000106608_32 (sequence is synthesized)
atgaggctgagagctgtcttgtggaggcagggaggctgccggcaggccagaggcgttttgcccacttcccaggcttggcctcggagctgctgctgacagggctgcctctggagctaatcg

SEQ ID NO: 157815 - DNA, 120 bp, Artificial Sequence
  ENSG00000106608_33 (sequence is synthesized)
atgggagcacgctgagcatgcccgtccgctgggtcacagggctcctgaaggagctgcacgtccgactggagagacggtcaaggctggtggttctgtcaaccgtcggggtgccaggcacgg

SEQ ID NO: 157816 - DNA, 120 bp, Artificial Sequence
  ENSG00000106608_34 (sequence is synthesized)
gcaagtccacactcctcaacaccatgtttgggctgcggtttgccacagggaagagctgcggtcctcgaggggccttcatgcagctcatcacagtggctgagggcttcagccaggacctgg

SEQ ID NO: 157817 - DNA, 120 bp, Artificial Sequence
  ENSG00000106608_35 (sequence is synthesized)
gctgtgaccacatcctggtgatagactccgggggcttgataggtggggccttgacgtcagctggggacagatttgagctggaggcttccttggccactctgctcatgggactgagcaatg

SEQ ID NO: 157818 - DNA, 120 bp, Artificial Sequence
  ENSG00000106608_36 (sequence is synthesized)
tcaccgtgatcagtctagctgaaaccaaggacattccagcagctattctgcatgcatttctgaggttagaaaaaacggggcacatgcccaactaccagtttgtataccagaaccttcatg

SEQ ID NO: 157819 - DNA, 120 bp, Artificial Sequence
  ENSG00000106608_37 (sequence is synthesized)
atgtatctgttcccggccctaggcccagagacaagagacagctcctggatccacctggtgacctgagcagggctgcagcccagatggagaaacagggcgacggcttccgggcactggcag

SEQ ID NO: 157820 - DNA, 120 bp, Artificial Sequence
  ENSG00000106608_38 (sequence is synthesized)
gcctggccttctgcgaccctgagaagcagcacatctggcacatcccaggcctgtggcacggagcacctcccatggccgcagtgagcttggcctacagtgaagccatatttgaattgaaga

SEQ ID NO: 157821 - DNA, 120 bp, Artificial Sequence
  ENSG00000106608_39 (sequence is synthesized)
gatgcctactcgaaaacatcaggaacggcttgtcgaaccaaaacaaaaacatccagcagctcattgagctggtgagacggctgtgagtgtgcagagaaacccagttcaggtgtaggaggc

SEQ ID NO: 157822 - DNA, 120 bp, Artificial Sequence
  ENSG00000106608_40 (sequence is synthesized)
tgctgtgggcagccctgtctgatggggcacccgtgtggggctgtgctctggtgcctgagaatggctggtgcccaatcgacatgagaagacgaggaaaagacagggtttggagtctcctca

SEQ ID NO: 157823 - DNA, 120 bp, Artificial Sequence
  ENSG00000106608_41 (sequence is synthesized)
acagtgttaaaagaggaagtgacctcacagaccagctcagagatgttaccaagaatatcacagcccccagggtagggagacaagcagcagtttgttctgtctcagctcctgtcaaggatc

SEQ ID NO: 157824 - DNA, 120 bp, Artificial Sequence
  ENSG00000106608_42 (sequence is synthesized)
ctgcggggtgggccctctgtatagctgctctctgtcactggcccctggagtgggagcagcgtccttagtcactgcaggcccaggcgggcaggtggtcccaggacagaggtggggaagttg

SEQ ID NO: 157825 - DNA, 120 bp, Artificial Sequence
  ENSG00000106608_43 (sequence is synthesized)
tcctgaggaagcagaagtaggccttgctcccgcccaacccaagggcctccagtggaccagcattcaagatgtgagtgcccgtggtgtgcaaggcactcccatggcaccgtatttattgac

SEQ ID NO: 157826 - DNA, 120 bp, Artificial Sequence
  ENSG00000106608_44 (sequence is synthesized)
tgatctgtgaaggcttccctgacccctgcccaggaagagttcactggtcgctctgttgtgccccacagcactttgttatacctctgccacacacttcacgcagcgcgttgtaactcatgt

SEQ ID NO: 157827 - DNA, 120 bp, Artificial Sequence
  ENSG00000106608_45 (sequence is synthesized)
gtttacatgtctgtccccccagactgtgagctccttgagggcagggactgtacattctccagctctgtgtccccagggcctggcacattgtagacgcttaataaatgtctgttaaatgaa

SEQ ID NO: 157828 - DNA, 120 bp, Artificial Sequence
  ENSG00000106608_46 (sequence is synthesized)
attttacaatgggtaccgtctcagagaggccagcaactcgtccaacacagcactgcaagtaagaagtaggaaagttattgttttgcttaataataaggccttacgcttcagggctaaaga

SEQ ID NO: 157829 - DNA, 120 bp, Artificial Sequence
  ENSG00000106608_47 (sequence is synthesized)
aaagccttttcttacagaaattaaactccaattacagaaaggtgtgaagttcagtaaggccctggggcaggttatcctacagcttttggcaccgcaggcaccgcccggcgagttccggcc

SEQ ID NO: 157830 - DNA, 80 bp, Artificial Sequence
  ENSG00000106608_48 (sequence is synthesized)
ctgacctgggccgccccgcccccaccccgccccagctgtccccgggctgctccgagaggaccccgggcccaccttacccc

SEQ ID NO: 157831 - DNA, 80 bp, Artificial Sequence
  ENSG00000106608_49 (sequence is synthesized)
cttaccccacctcaccccacctccacccctggagcgcgtcccggagcgggcgggcggccggcgggccaggcccctccccg

SEQ ID NO: 157832 - DNA, 120 bp, Artificial Sequence
  ENSG00000106608_50 (sequence is synthesized)
actgtggggccgtcgtcgccgcgtgccgagcgtcctggcgcggccgaggggaagcagcggggctgcccgggttacgctggccacccgcacctggtcctgtggcttcgaccactagtcagc

SEQ ID NO: 157833 - DNA, 120 bp, Artificial Sequence
  ENSG00000106608_51 (sequence is synthesized)
aaggccccggagaggccagcgaagaggaggggctcgttggctttacggagacgcgcggagcaccctcaaggtgccacacgctcgcctgctccctgttcctacatcctgggcgtcttccca

SEQ ID NO: 157834 - DNA, 64 bp, Artificial Sequence
  ENSG00000106608_52 (sequence is synthesized)
acatcctgggcgtcttcccaggctgtcatataactcctgagaatagtggttcttaactctatgg

SEQ ID NO: 157835 - DNA, 120 bp, Artificial Sequence
  ENSG00000106608_53 (sequence is synthesized)
tcctgagtagctgggactacaggatagaagtggaattactgggcaaagggcattcagatttgggagaagtagccccagaaataaaagcatcagagagacgaacagctgtggccattgcag

SEQ ID NO: 157836 - DNA, 120 bp, Artificial Sequence
  ENSG00000106608_54 (sequence is synthesized)
gagcttccaaacaacctgccaagggccacacactgggcagaagtgttttctttgtctttttcccattgccttttactaccatgctacttaaaaaataaaaagttattccatgtctggaca

SEQ ID NO: 157837 - DNA, 120 bp, Artificial Sequence
  ENSG00000106608_55 (sequence is synthesized)
caggatttggcaacagattggactggggagagggggagtgggtaaagtgacagataaccgggattttatatttagaacaattgggagaagttgccatcttggtgagaaagaagggttcta

SEQ ID NO: 157838 - DNA, 80 bp, Artificial Sequence
  ENSG00000106608_56 (sequence is synthesized)
gcgagggcccggcgagcggctggggaaccggggtgcgggtcctcgccgcggcccggggcaacccgcggaggcctggaaat

SEQ ID NO: 157839 - DNA, 120 bp, Artificial Sequence
  ENSG00000106608_57 (sequence is synthesized)
ggcaacccgcggaggcctggaaatgcttcgctccggcgcctggtatcgatgttcctgggttttaaacttgctcgcgttgggagtggacgcttgtttgccgcgtcgttgagacgtacccag

SEQ ID NO: 157840 - DNA, 120 bp, Artificial Sequence
  ENSG00000106608_58 (sequence is synthesized)
aatgtcaggatccgggcagatgcagaccctttgctgacagccggagagccgctccgggatctccttggtcggggccattgcctaccggcctgccttggggtggctgcgcttattttgata

SEQ ID NO: 157841 - DNA, 120 bp, Artificial Sequence
  ENSG00000106608_59 (sequence is synthesized)
ttacctcttttcaacttttttgatttaaatgttattccttttaggaaatgatggcgacacatatagtttgtaatttttgagaaaaaattctcacttggcaaactaaaacctcagtaattc

SEQ ID NO: 157842 - DNA, 120 bp, Artificial Sequence
  ENSG00000106608_60 (sequence is synthesized)
attatttttttgttttttgttttgataattttactagtactgaaatttgggaatgacagtccaacactttcattttacaaagaaagaaattaggctcaaggtcatcgctttagttgttaa

SEQ ID NO: 157843 - DNA, 120 bp, Artificial Sequence
  ENSG00000106608_61 (sequence is synthesized)
aattcttctttgactgttacccatcattcagagggtcttggatctagtggctgtgatagccattcagaacagttcccaaagagctttacagaagtggaattactgggcaaagggcattca

SEQ ID NO: 157844 - DNA, 120 bp, Artificial Sequence
  ENSG00000106608_62 (sequence is synthesized)
gtgctggggttacaggcatgagcacttgaaatttttgacagaaaggttctaacttgctgatgaaactaaatgtatttggtttcttttttcttctagatttggaatggagagaaatggaag

SEQ ID NO: 157845 - DNA, 120 bp, Artificial Sequence
  ENSG00000106609_0 (sequence is synthesized)
acccggaaaccgcggttgccggagcccgaactgaggcggcggcgggagcccggttggcgtctggtcttcgcgtcggccccgcggagccagacgctgcccccggcgcggggagaagatggt

SEQ ID NO: 157846 - DNA, 120 bp, Artificial Sequence
  ENSG00000106609_1 (sequence is synthesized)
ccacgcgccgccacgagtgagcccagcgcgaccgcgggcgtccgccgagcagctggcccggctgggcccggggcgcgcagctgcccgccggggcggggtggagctgatcagaataatgtt

SEQ ID NO: 157847 - DNA, 120 bp, Artificial Sequence
  ENSG00000106609_2 (sequence is synthesized)
gagctgatcagaataatgttcagcatcaaccccctggagaacctgaaggtgtacatcagcagtcggcctcccctggtggtcttcatgatcagcgtaagcgccatggccatagctttcctg

SEQ ID NO: 157848 - DNA, 120 bp, Artificial Sequence
  ENSG00000106609_3 (sequence is synthesized)
accctgggctacttcttcaaaatcaaggagattaaatccccagaaatggcagaggattggaatacttttctgctacggttcaatgatttggacttgtgtgtatcagagaatgaaaccctc

SEQ ID NO: 157849 - DNA, 120 bp, Artificial Sequence
  ENSG00000106609_4 (sequence is synthesized)
aagcatctcacaaacgacaccacaactccggaaagtacaatgaccagcgggcaggcccgagcttccacccagtccccccaggccctggaggactcgggcccggtgaatatctcagtctca

SEQ ID NO: 157850 - DNA, 120 bp, Artificial Sequence
  ENSG00000106609_5 (sequence is synthesized)
atcaccctaaccctggacccactgaaacccttcggagggtattcccgcaacgtcacccatctgtactcaaccatcttagggcatcagattggactttcaggcagggaagcccacgaggag

SEQ ID NO: 157851 - DNA, 120 bp, Artificial Sequence
  ENSG00000106609_6 (sequence is synthesized)
ataaacatcaccttcaccctgcctacagcgtggagctcagatgactgcgccctccacggtcactgtgagcaggtggtattcacagcctgcatgaccctcacggccagccctggggtgttc

SEQ ID NO: 157852 - DNA, 120 bp, Artificial Sequence
  ENSG00000106609_7 (sequence is synthesized)
cccgtcactgtacagccaccgcactgtgttcctgacacgtacagcaacgccacgctctggtacaagatcttcacaactgccagagatgccaacacaaaatacgcccaagattacaatcct

SEQ ID NO: 157853 - DNA, 120 bp, Artificial Sequence
  ENSG00000106609_8 (sequence is synthesized)
ttctggtgttataagggggccattggaaaagtctatcatgctttaaatcccaagcttacagtgattgttccagatgatgaccgttcattaataaatttgcatctcatgcacaccagttac

SEQ ID NO: 157854 - DNA, 120 bp, Artificial Sequence
  ENSG00000106609_9 (sequence is synthesized)
ttcctctttgtgatggtgataacaatgttttgctatgctgttatcaagggcagacctagcaaattgcgtcagagcaatcctgaattttgtcccgagaaggtggctttggctgaagcctaa

SEQ ID NO: 157855 - DNA, 120 bp, Artificial Sequence
  ENSG00000106609_10 (sequence is synthesized)
ttccacagctccttgttttttgagagagactgagagaaccataatccttgcctgctgaacccagcctgggcctggatgctctgtgaatacattatcttgcgatgttgggttattccagcc

SEQ ID NO: 157856 - DNA, 120 bp, Artificial Sequence
  ENSG00000106609_11 (sequence is synthesized)
aaagacatttcaagtgcctgtaactgatttgtacatatttataaaaatctattcagaaattggtccaataatgcacgtgctttgccctgggtacagccagagcccttcaaccccaccttg

SEQ ID NO: 157857 - DNA, 120 bp, Artificial Sequence
  ENSG00000106609_12 (sequence is synthesized)
gacttgaggacctacctgatgggacgtttccacgtgtctctagagaaggattcctggatctagctggtcacgacgatgttttcaccaaggtcacaggagcattgcgtcgctgatggggtt

SEQ ID NO: 157858 - DNA, 120 bp, Artificial Sequence
  ENSG00000106609_13 (sequence is synthesized)
gaagtttggtttggttcttgtttcagcccaatatgtagagaacatttgaaacagtctgcacctttgatacggtattgcatttccaaagccaccaatccattttgtggattttatgtgttt

SEQ ID NO: 157859 - DNA, 120 bp, Artificial Sequence
  ENSG00000106609_14 (sequence is synthesized)
ccattttgtggattttatgtgtttgtggcttaataatcatagtaacaacaataatacctttttctccattttgcttgcaggaaacataccttaagttttttttgttttgtttttgttttt

SEQ ID NO: 157860 - DNA, 120 bp, Artificial Sequence
  ENSG00000106609_15 (sequence is synthesized)
gaaaaaataaaatagtcacattttaatactactctagttaggacagacttgtgcttttatcctgactaaaaagttaaatatttaagtcacatacatggtaaagatctaagtttcattttc

SEQ ID NO: 157861 - DNA, 120 bp, Artificial Sequence
  ENSG00000106609_16 (sequence is synthesized)
cacatggatgaccaggaacctggtcttgttggagctggcataggaggttctactgtcttgtcgtccactcttgtccctcccttctgttatcaaagttaaagcgcctcttcactcaaaagg

SEQ ID NO: 157862 - DNA, 120 bp, Artificial Sequence
  ENSG00000106609_17 (sequence is synthesized)
gagtgactgtttgctcttctgctttctggaatgcagatgacagtatggaaagaaagaataatgattctatctaataggaaaggatttcttctttcttttttaaagagtgggtggattttc

SEQ ID NO: 157863 - DNA, 120 bp, Artificial Sequence
  ENSG00000106609_18 (sequence is synthesized)
tcccttttgttttgcttttattttcatgctactaacatatcttcagaaggaaatggcaactagtagatcagtaaaattacgaaaacgatgcctgcaaaatttgaaggaatgcaattctga

SEQ ID NO: 157864 - DNA, 120 bp, Artificial Sequence
  ENSG00000106609_19 (sequence is synthesized)
tttgccatttatcagggaaaactgaaagcatttttcttataactttttttctttttctttttttttggaggggggaggcagggtcttgctctgtccctcaggctggagcttagctcagtg

SEQ ID NO: 157865 - DNA, 62 bp, Artificial Sequence
  ENSG00000106609_20 (sequence is synthesized)
ggcgcgcctggctaattttaaaatttttttgtagagacagagtctccctctgttgcccaggc

SEQ ID NO: 157866 - DNA, 120 bp, Artificial Sequence
  ENSG00000106609_21 (sequence is synthesized)
cctctgttgcccaggctggtctggaactcctagcttcaaatgatcctctcacctcggcctcccaaaatcctgggattccaggcgtcagccactgctctcggccctcttacaccattttgt

SEQ ID NO: 157867 - DNA, 120 bp, Artificial Sequence
  ENSG00000106609_22 (sequence is synthesized)
ttgattgtctagtccctgtttctttttctttctaatccttattcatttaagcaaaaccatacattatcttttccagtcctttcttgtattcttactgtttttttaaaataactttttgcc

SEQ ID NO: 157868 - DNA, 120 bp, Artificial Sequence
  ENSG00000106609_23 (sequence is synthesized)
ttaatagctcattgtcactaataacttctgtgttctcccaggcagtgttataacagaagggcaatgaaaacattggacatgaccatgagtgcttcctttccttaactctaggtttgtagt

SEQ ID NO: 157869 - DNA, 120 bp, Artificial Sequence
  ENSG00000106609_24 (sequence is synthesized)
ctgttttaaattaggattagttcctgcattctgaaatacattggcctagaacattttatcccaggcatttttgaatagaaaacagttgcgtgcttttattgaagattgttaaaataatca

SEQ ID NO: 157870 - DNA, 120 bp, Artificial Sequence
  ENSG00000106609_25 (sequence is synthesized)
ccatagtaacttgatatgttagtatttttctttttccttttagtatgtttcaagtgcagtaatcgtacttgtctatccagtttctatgtatgatacgagttgcttacacgatgcatggct

SEQ ID NO: 157871 - DNA, 120 bp, Artificial Sequence
  ENSG00000106609_26 (sequence is synthesized)
aacttgttaatttagttttctccttagagactttgagacccttaagagacaagattgagaaagagccatgtggcttggctctagaaacgtcattatcattaggaccatcagattttagat

SEQ ID NO: 157872 - DNA, 120 bp, Artificial Sequence
  ENSG00000106609_27 (sequence is synthesized)
taagctgctattgaattaataaaatcccaatgaagcagagttatagggatagatttatagctggcagagtggtatcaaaggagaaaaacagtgaaaaagccaatttcactggttcgttca

SEQ ID NO: 157873 - DNA, 120 bp, Artificial Sequence
  ENSG00000106609_28 (sequence is synthesized)
atccagcttgttgctaatattagttacccttgttttaatgacagagagtggctggaatctgtagctaggggaggggcaacactgttagatgtgaggaaaggaagtgccaaaaatgcctgg

SEQ ID NO: 157874 - DNA, 120 bp, Artificial Sequence
  ENSG00000106609_29 (sequence is synthesized)
acagatggcttgtcccaaggccaggacacacactttaaaatccaacattcacctaagcaagtaattcttaaagatcttacagaaacgcagagtcaatcaggtttataaaggaaggctgag

SEQ ID NO: 157875 - DNA, 120 bp, Artificial Sequence
  ENSG00000106609_30 (sequence is synthesized)
gggagagaggaggcctgggggcctggacgaagaggcctaggacctgaagagactccagcgagtctcgggaagcccaggggacctgtcaccatctgggcacttcccaggctcaatgctcag

SEQ ID NO: 157876 - DNA, 120 bp, Artificial Sequence
  ENSG00000106609_31 (sequence is synthesized)
ccagagtttgctggtggacctcaggattcgaagtgtgcaacagacggagtgcgcttgctgttcagggcggccccgtgcaggagcaccagctcaccctcaggcatctcggactggagggcc

SEQ ID NO: 157877 - DNA, 120 bp, Artificial Sequence
  ENSG00000106609_32 (sequence is synthesized)
agcagaaggtcagcaacttactcttaaaacgattgtttcggatcatattgatctctttcctttttccttttgtcctttcactgtatgacttgaatcagttttgattctatttgtaagtgt

SEQ ID NO: 157878 - DNA, 120 bp, Artificial Sequence
  ENSG00000106609_33 (sequence is synthesized)
ttcttgtcgtgaggcacctgccatgtctgttgcgttttcctcggcagcgtgtagggcttcagcttcctgggttttcacccttcctgcaggcactgtggggtcctgagggccagtgggtcc

SEQ ID NO: 157879 - DNA, 120 bp, Artificial Sequence
  ENSG00000106609_34 (sequence is synthesized)
atttcacctcttgctgcatgatggtcagtagctgatctgttatggcattcacttccagattaattttccgtgtttgaagtatgtgcatatgtgctttacagaataaaacatctgaattta

SEQ ID NO: 157880 - DNA, 120 bp, Artificial Sequence
  ENSG00000106609_35 (sequence is synthesized)
tcatgctttaaatcccaagcttacagtgattgttccagatgtaagtgagaaaaattgtgtgtgtgtgtgtgcgtgcatgcatatgcacatgtgtgcgcatgtgctgcaaccgttggtgta

SEQ ID NO: 157881 - DNA, 120 bp, Artificial Sequence
  ENSG00000106609_36 (sequence is synthesized)
ggccctgctgacttccctgggtaagcgtatcctctgccactttagatttccaggtgagttaggacactaggcggagtggtggatgcttggaaaaacatgttacccattggttaagaaaaa

SEQ ID NO: 157882 - DNA, 120 bp, Artificial Sequence
  ENSG00000106609_37 (sequence is synthesized)
agaaaggtgggagggagagactcacgtacgtccacaaagttaaatggcatagtggtgttccctgtgtcaagcttggtaaatatccggaatggggtggattctttcttcatgtttttaata

SEQ ID NO: 157883 - DNA, 120 bp, Artificial Sequence
  ENSG00000106609_38 (sequence is synthesized)
aaatgaggagtgatcgcaaggtaatctagaggcatgtagtttcagttcccttgatggggaccatcagaaataaaaccaggcttgttgtgctgttttgagtcgtttgaacgccgtacccat

SEQ ID NO: 157884 - DNA, 120 bp, Artificial Sequence
  ENSG00000106609_39 (sequence is synthesized)
atgtctgagtttagttctcaactagcaggtgacagccctcactggctgatgaatggtgagcttctctgaagcctgctttgtaaagattgtggcttccgcctgaactgcttctttcctgcc

SEQ ID NO: 157885 - DNA, 120 bp, Artificial Sequence
  ENSG00000106609_40 (sequence is synthesized)
gcactgctttgcggtggggcaggaagatggtttctgcgcagtgcttggggcagctgggtgctggagcttgcacagggtttctttgataccagtaagtgtcttcagctctaagtgttggat

SEQ ID NO: 157886 - DNA, 120 bp, Artificial Sequence
  ENSG00000106609_41 (sequence is synthesized)
aatctggcatcgcatcgatgactgttgtttactaggctcagggtttgtaaccccggccttaaagctctttgagggtctcagacatcacaggatatttgagaaatgctactttctgctaca

SEQ ID NO: 157887 - DNA, 120 bp, Artificial Sequence
  ENSG00000106615_0 (sequence is synthesized)
gggagggtcatgacgcagcgagtttcagtcgtgacttttctgggggcatcgcggcgtcccctttttttgcctttaaagtaaaacgtcgccccgacgcaccccccgcgtatttcggggggc

SEQ ID NO: 157888 - DNA, 120 bp, Artificial Sequence
  ENSG00000106615_1 (sequence is synthesized)
ccacggcgcgaagaggggcggtgctgacgccggccggtcacgtgggcgtgttgtgggggggaggggcgccgccgcgcggtcggttccgggcggttgggagcgcgcgagctagcgagcgag

SEQ ID NO: 157889 - DNA, 120 bp, Artificial Sequence
  ENSG00000106615_2 (sequence is synthesized)
ctagcgagcgagaggcagccgcgcccgccgccgcccctgctctgtatgccgctctctcccggcgcggccgccgccgatcacagcagcaggagccaccgccgccgcggttgatgtggttgg

SEQ ID NO: 157890 - DNA, 120 bp, Artificial Sequence
  ENSG00000106615_3 (sequence is synthesized)
gccggggctgaggaggccgccaagatgccgcagtccaagtcccggaagatcgcgatcctgggctaccggtctgtggggaaatcctcattgacgattcaatttgttgaaggccaatttgtg

SEQ ID NO: 157891 - DNA, 120 bp, Artificial Sequence
  ENSG00000106615_4 (sequence is synthesized)
gactcctacgatccaaccatagaaaacacttttacaaagttgatcacagtaaatggacaagaatatcatcttcaacttgtagacacagccgggcaagatgaatattctatctttcctcag

SEQ ID NO: 157892 - DNA, 120 bp, Artificial Sequence
  ENSG00000106615_5 (sequence is synthesized)
acatactccatagatattaatggctatattcttgtgtattctgttacatcaatcaaaagttttgaagtgattaaagttatccatggcaaattgttggatatggtggggaaagtacaaata

SEQ ID NO: 157893 - DNA, 120 bp, Artificial Sequence
  ENSG00000106615_6 (sequence is synthesized)
cctattatgttggttgggaataagaaagacctgcatatggaaagggtgatcagttatgaagaagggaaagctttggcagaatcttggaatgcagcttttttggaatcttctgctaaagaa

SEQ ID NO: 157894 - DNA, 120 bp, Artificial Sequence
  ENSG00000106615_7 (sequence is synthesized)
aatcagactgctgtggatgtttttcgaaggataattttggaggcagaaaaaatggacggggcagcttcacaaggcaagtcttcatgctcggtgatgtgattctgctgcaaagcctgagga

SEQ ID NO: 157895 - DNA, 120 bp, Artificial Sequence
  ENSG00000106615_8 (sequence is synthesized)
gaatatattctacctgaagaagcaaactgcccgttctccttgaagataaactatgcttcttttttcttctgttaacctgaaagatatcatttgggtcagagctcccctcccttcagatta

SEQ ID NO: 157896 - DNA, 120 bp, Artificial Sequence
  ENSG00000106615_9 (sequence is synthesized)
tgttaactctgagtctgtccaaatgagttcacttccattttcaaattttaagcaatcatattttcaatttatatattgtatttcttaatattatgaccaagaattttatcggcattaatt

SEQ ID NO: 157897 - DNA, 120 bp, Artificial Sequence
  ENSG00000106615_10 (sequence is synthesized)
tttcagtgtagtttgttgtttaaaataatgtaatcatcaaaatgatgcatattgttacactactattaactaggcttcagtatatcagtgtttatttcattgtgttaaatgtatacttgt

SEQ ID NO: 157898 - DNA, 120 bp, Artificial Sequence
  ENSG00000106615_11 (sequence is synthesized)
aaataaaatagctgcaaacctcagtcctttgtgctacttgatgtggctttcaaagaagagaagccttgtcctgagtttctcacttggcttcaggaaggccccaggttggattccagaaac

SEQ ID NO: 157899 - DNA, 120 bp, Artificial Sequence
  ENSG00000106615_12 (sequence is synthesized)
cagtgaagatgtggccacaggaggaggtgtgctgaggtggctgctgaccgtggactccctgcgcagtggcctgcagatgttggggctgggttacagctgattgaagctgagtggccctgg

SEQ ID NO: 157900 - DNA, 120 bp, Artificial Sequence
  ENSG00000106615_13 (sequence is synthesized)
ggggtctgtgaggggagttcctccccagtgatgaaattctctccttccaccctcaaatccctagaccttgactgaaatgctccgtggtcgggagcctggtcaaggaggaggagctgctga

SEQ ID NO: 157901 - DNA, 120 bp, Artificial Sequence
  ENSG00000106615_14 (sequence is synthesized)
gaggcattgttcgcccttgctcatagcttagctcgatgtccgtgtcagacaggagatgattgagaacagccttgcctgtcactgtcctagaacaccctggagtttagtgttctgtgtcag

SEQ ID NO: 157902 - DNA, 120 bp, Artificial Sequence
  ENSG00000106615_15 (sequence is synthesized)
agtcttgggagcctccttcagacccagatgacgggcctccctctgtccaaggagcagctgtaaaggagaagagggatttcatttgtttggtggctgttaccttgtctgtaagtcaaactt

SEQ ID NO: 157903 - DNA, 120 bp, Artificial Sequence
  ENSG00000106615_16 (sequence is synthesized)
ggagttgagcagtgctttttaaacgattcccttttgcagctaaaatttcacagggctatttctaatacgtaagcaaatgttaccattgactttattaataaaatatagttttgctttgca

SEQ ID NO: 157904 - DNA, 120 bp, Artificial Sequence
  ENSG00000106615_17 (sequence is synthesized)
gaagatcgcgatcctgggctaccggtctgtgggttcctcaagccaggacctacgcacctgttgtgagtggtgttatagttctgcagggcgcacaggtgcatccccatgggcacatttaat

SEQ ID NO: 157905 - DNA, 120 bp, Artificial Sequence
  ENSG00000106615_18 (sequence is synthesized)
atggaggggttcaaagtcactaattgttcaaatatcaacatggaacctgggatccagcctttattggcagcctgaatccatgctcttgtctctgttctcttgatttcctcctctgcattt

SEQ ID NO: 157906 - DNA, 120 bp, Artificial Sequence
  ENSG00000106615_19 (sequence is synthesized)
tccatcctagagtcatcggctcattgatctgattgaaagccaagagatactggcatcacccagagaatgtatgtacctaggaaagaacacaggagcaggctgaatgtactagggcactct

SEQ ID NO: 157907 - DNA, 120 bp, Artificial Sequence
  ENSG00000106615_20 (sequence is synthesized)
aggaaaagctgttcaagttgtaatgtaaacagttggttctttgctgaatgagttgggtgattaaaatttgcatttatgtggtttctcagcccagtggtaggctttccgtttgaatgcctt

SEQ ID NO: 157908 - DNA, 120 bp, Artificial Sequence
  ENSG00000106615_21 (sequence is synthesized)
aaaacaggagttctttgtgttcattttatgttatgttaaaatggtgagtctgtgacattttacatttttccagctggcaacataacatacatttaaaaacttcaacattaaaatggatgt

SEQ ID NO: 157909 - DNA, 120 bp, Artificial Sequence
  ENSG00000106615_22 (sequence is synthesized)
ctaatttatactttttgttttatagttttgaagtgattaaagttatccatggcaaattgttggatatggtggggaaagtacaaatacctattatgttggttgggaataagaaagacctgc

SEQ ID NO: 157910 - DNA, 120 bp, Artificial Sequence
  ENSG00000106615_23 (sequence is synthesized)
ggtggggaaagtacagtaagtagtaccattttatctgcttgttagagaaacttcttttaatagtatcttctgagcaatacaatctggcacttactggtttgtcttttttttcttacaaat

SEQ ID NO: 157911 - DNA, 120 bp, Artificial Sequence
  ENSG00000106615_24 (sequence is synthesized)
cgttctcatcagtcgcagggatgtgttccttgcagttggcatttgacctctgtcttgatcactcctgtgtaacatctggccttcctccatttctaataccaagttttgtgttgctttagg

SEQ ID NO: 157912 - DNA, 120 bp, Artificial Sequence
  ENSG00000106615_25 (sequence is synthesized)
aagatactacttaggtgtttataaattcagtcagtattctacttacagtggaacctaggatatttgtaggataaacagaaactattagtaaaggaaatactaccttttgtaaacatatat

SEQ ID NO: 157913 - DNA, 120 bp, Artificial Sequence
  ENSG00000106615_26 (sequence is synthesized)
accggttggaagtttgaagccttcaaacctagccggcgcccaacagcgcggtagcagcgaggtgtatttttagctcccgggcgggcagccccgcccccccctccccgcctccttgtttcc

SEQ ID NO: 157914 - DNA, 120 bp, Artificial Sequence
  ENSG00000106615_27 (sequence is synthesized)
cccaatgggagatggagtttccgacacgtcatcgcgcggctgtgcaggagctgtccaatcggcgctcggggagaatggcgtaattaaaaagcggcggaagaagggaaatcctcattgacg

SEQ ID NO: 157915 - DNA, 120 bp, Artificial Sequence
  ENSG00000106615_28 (sequence is synthesized)
ggccgccgaggagtccgggtctcgtctggggaagtgaggcggcgccggggagccgcgctagaggctgccgcgagggagtcacacctgcctccccgccttcgccgcgggcgcgcgtgaccg

SEQ ID NO: 157916 - DNA, 120 bp, Artificial Sequence
  ENSG00000106617_0 (sequence is synthesized)
attctgcggccgaggattacatttatgcacgaacgggcttactggttccagattccccacttgggcacaggcataggaggcttgttttccaaattgctggttttaattgcacctgccttt

SEQ ID NO: 157917 - DNA, 120 bp, Artificial Sequence
  ENSG00000106617_1 (sequence is synthesized)
cagattacctctgggaatctgtgggaggagccgagagggtggaaaatgtttcttagctttgcaaaaggaagaaaactttgtcacccagcgggagacctcagccacgagtaacccggggag

SEQ ID NO: 157918 - DNA, 120 bp, Artificial Sequence
  ENSG00000106617_2 (sequence is synthesized)
acaccagaaccgggacgggctttgactgatttgcctacgagggttccgtaggaaaggacgcttgaattcggcgcttcggcggcggcggcggccgcgcgagttccctgctcaccctccctc

SEQ ID NO: 157919 - DNA, 120 bp, Artificial Sequence
  ENSG00000106617_3 (sequence is synthesized)
tccgcggaagtccccacgaggtggcttcagggtgtaacagagcgcgcggctccagtccgaaggcagcggccgggggagggaaggaggggaccgaacccccgaggagtttcgcagaatcaa

SEQ ID NO: 157920 - DNA, 120 bp, Artificial Sequence
  ENSG00000106617_4 (sequence is synthesized)
cttctggttagagttatgggaagcgcggttatggacaccaagaagaaaaaagatgtttccagccccggcgggagcggcggcaagaaaaatgccagccagaagaggcgttcgctgcgcgtg

SEQ ID NO: 157921 - DNA, 120 bp, Artificial Sequence
  ENSG00000106617_5 (sequence is synthesized)
cacattccggacctgagctccttcgccatgccgctcctggacggagacctggagggttccggaaagcattcctctcgaaaggtggacagccccttcggcccgggcagcccctccaaaggg

SEQ ID NO: 157922 - DNA, 120 bp, Artificial Sequence
  ENSG00000106617_6 (sequence is synthesized)
ttcttctccagaggcccccagccccggccctccagccccatgtctgcacctgtgaggcccaagaccagccccggctctcccaaaaccgtgttcccgttctcctaccaggagtccccgcca

SEQ ID NO: 157923 - DNA, 120 bp, Artificial Sequence
  ENSG00000106617_7 (sequence is synthesized)
cgctcccctcgacgcatgagcttcagtgggatcttccgctcctcctccaaagagtcttcccccaactccaaccctgctacctcgcccgggggcatcaggtttttctcccgctccagaaaa

SEQ ID NO: 157924 - DNA, 120 bp, Artificial Sequence
  ENSG00000106617_8 (sequence is synthesized)
acctccggcctctcctcctctccgtcaacacccacccaagtgaccaagcagcacacgtttcccctggaatcctataagcacgagcctgaacggttagagaatcgcatctatgcctcgtct

SEQ ID NO: 157925 - DNA, 120 bp, Artificial Sequence
  ENSG00000106617_9 (sequence is synthesized)
tcccccccggacacagggcagaggttctgcccgtcttccttccagagcccgaccaggcctccactggcatcaccgacacactatgctccctccaaagccgcggcgctggcggcggccctg

SEQ ID NO: 157926 - DNA, 120 bp, Artificial Sequence
  ENSG00000106617_10 (sequence is synthesized)
ggacccgcggaagccggcatgctggagaagctggagttcgaggacgaagcagtagaagactcagaaagtggtgtttacatgcgattcatgaggtcacacaagtgttatgacatcgttcca

SEQ ID NO: 157927 - DNA, 120 bp, Artificial Sequence
  ENSG00000106617_11 (sequence is synthesized)
accagttcaaagcttgttgtctttgatactacattacaagttaaaaaggccttctttgctttggtagccaacggtgtccgagcagcgccactgtgggagagtaaaaaacaaagttttgta

SEQ ID NO: 157928 - DNA, 120 bp, Artificial Sequence
  ENSG00000106617_12 (sequence is synthesized)
ggaatgctaacaattacagatttcataaatatactacatagatactataaatcacctatggtacagatttatgaattagaggaacataaaattgaaacatggagggagctttatttacaa

SEQ ID NO: 157929 - DNA, 120 bp, Artificial Sequence
  ENSG00000106617_13 (sequence is synthesized)
agcctcttcgatgctgtatactccttgatcaaaaataaaatccacagattgcccgttattgaccctatcagtgggaatgcactttatatacttacccacaaaagaatcctcaagttcctc

SEQ ID NO: 157930 - DNA, 120 bp, Artificial Sequence
  ENSG00000106617_14 (sequence is synthesized)
cagctttttatgtctgatatgccaaagcctgccttcatgaagcagaacctggatgagcttggaataggaacgtaccacaacattgccttcatacatccagacactcccatcatcaaagcc

SEQ ID NO: 157931 - DNA, 120 bp, Artificial Sequence
  ENSG00000106617_15 (sequence is synthesized)
ttgaacatatttgtggaaagacgaatatcagctctgcctgttgtggatgagtcaggaaaagttgtagatatttattccaaatttgatgtaattaatcttgctgctgagaaaacatacaat

SEQ ID NO: 157932 - DNA, 120 bp, Artificial Sequence
  ENSG00000106617_16 (sequence is synthesized)
aacctagatatcacggtgacccaggcccttcagcaccgttcacagtattttgaaggtgttgtgaagtgcaataagctggaaatactggagaccatcgtggacagaatagtaagagctgag

SEQ ID NO: 157933 - DNA, 120 bp, Artificial Sequence
  ENSG00000106617_17 (sequence is synthesized)
gtccatcggctggtggtggtaaatgaagcagatagtattgtgggtattatttccctgtcggacattctgcaagccctgatcctcacaccagcaggtgccaaacaaaaggagacagaaacg

SEQ ID NO: 157934 - DNA, 120 bp, Artificial Sequence
  ENSG00000106617_18 (sequence is synthesized)
gagtgaccgccgtgaatgtagacgccctaggaggagaacttgaacaaagtctctgggtcacgttttgcctcatgaacactggctgcaagtggttaagaatgtatatcagggtttaacaat

SEQ ID NO: 157935 - DNA, 120 bp, Artificial Sequence
  ENSG00000106617_19 (sequence is synthesized)
aggtatttcttccagtgatgttgaaattaagcttaaaaaagaaagattttatgtgcttgaagattcaggcttgcattaaaagactgttttcagacctttgtctgaaggattttaaatgct

SEQ ID NO: 157936 - DNA, 120 bp, Artificial Sequence
  ENSG00000106617_20 (sequence is synthesized)
gtatgtcattaaagtgcactgtgtcctgaagttttcattatttttcatttcaaagaattcactggtatggaacaggtgatgtggcataaggtgagtgcacggtatgttcagatcacagtg

SEQ ID NO: 157937 - DNA, 120 bp, Artificial Sequence
  ENSG00000106617_21 (sequence is synthesized)
ccttatgtccgaatacagcaatatgtcaccgccgcagccggggcgcacgcgtgtgaaacaacaccgagcttgaatgtggaagtctttgaaccttttaccaaatcagtttgttttctttag

SEQ ID NO: 157938 - DNA, 120 bp, Artificial Sequence
  ENSG00000106617_22 (sequence is synthesized)
atttgtcaaaaagttgtaatttgaatataaataattactttaaaattgtaatgacacttttacacgtaagtgttttgttctgggctaccgtgtcaacgaggctgctttacaacagcttta

SEQ ID NO: 157939 - DNA, 120 bp, Artificial Sequence
  ENSG00000106617_23 (sequence is synthesized)
tttatttttactttcatgcaatttttttacacatcttttggtggagtaaacttcaccacatccatgaataaactctcagttattttgaaatggcaaatttctcattatttaagtttggat

SEQ ID NO: 157940 - DNA, 120 bp, Artificial Sequence
  ENSG00000106617_24 (sequence is synthesized)
ctggaaaggacatgacttctgaaatagccgctgctgggttttaaaagctgaggtctctcaaagtgtggaggagacgttgccgtcaggcgggagccaagtgccgggaagatgtctattttt

SEQ ID NO: 157941 - DNA, 120 bp, Artificial Sequence
  ENSG00000106617_25 (sequence is synthesized)
tttcttgtgtattgaaatgtaaaatcatgatgtttgttatgactgctgatgcgattgtttttgtaaattttattgtggcatatacagtattgtcatacagttgaagagaaacaatgtttc

SEQ ID NO: 157942 - DNA, 120 bp, Artificial Sequence
  ENSG00000106617_26 (sequence is synthesized)
tatacagtattgtcatacagttgaagagaaacaatgtttcctaatgtaagtgctctgaaaatgttgacactgtatatatatatatgaggatagtttgttttttttttgttttgggttttt

SEQ ID NO: 157943 - DNA, 120 bp, Artificial Sequence
  ENSG00000106617_27 (sequence is synthesized)
gggaatgacagtttgctgcagtcccgtcaatgggggaatctgcccgagctctgcctgcattttgagcagcaaagcagctccagccaccaagaccgttgcctgcgctgtcttaggccagcc

SEQ ID NO: 157944 - DNA, 120 bp, Artificial Sequence
  ENSG00000106617_28 (sequence is synthesized)
catgctgtctgccagccgcttgttgcgctgccttggggactgggaacacacccagccccggtccccatctgttgcagacatgcagtggcagcagctcggagcacagccgaaccctagaaa

SEQ ID NO: 157945 - DNA, 120 bp, Artificial Sequence
  ENSG00000106617_29 (sequence is synthesized)
ttgcctgtgctgaaggggctgggaaaccccttctctgatggacctttcgagtgaggcagcaggatttgtcagagctgggagtgccgcccgtccccgtcactcgcatcctgccatccagca

SEQ ID NO: 157946 - DNA, 120 bp, Artificial Sequence
  ENSG00000106617_30 (sequence is synthesized)
gcttccggcagcttcttgctacttaaggacagccgggctgacgctccagctgctgtggccggaggtgcagccccgtcaggacggctccactccctggcgcctcacagactctggggctgc

SEQ ID NO: 157947 - DNA, 120 bp, Artificial Sequence
  ENSG00000106617_31 (sequence is synthesized)
ggtgaggtcgccctgaagaccccctggtgaggacgcttgaacccgggctgtcacctgagcacaggctgccactctgagcttttggggcgccctgtgcctgtcgggctgatgctcctctgg

SEQ ID NO: 157948 - DNA, 120 bp, Artificial Sequence
  ENSG00000106617_32 (sequence is synthesized)
ctcccggccacctggggctgacaccggttctgtgggtcctgatatgttcacctgtcgccactcctgtggccacagctacccatgaagcgctttgggagcctcaggagcaacaagaaacac

SEQ ID NO: 157949 - DNA, 120 bp, Artificial Sequence
  ENSG00000106617_33 (sequence is synthesized)
gagaagatcgtagatggcctcctcagtggctgaaccgtgggctgtcaccgctgtctggtggagaggaggagggggaggctgagaaccagaagccctgactgttgagtgaatttgcagcaa

SEQ ID NO: 157950 - DNA, 120 bp, Artificial Sequence
  ENSG00000106617_34 (sequence is synthesized)
caggaggatggaatcaactataccctttataaaaggtggatttttgaaaccgtagaccttattttgttatactcaaacatgatcctagacttttctctcctgccatatccctcctccttt

SEQ ID NO: 157951 - DNA, 120 bp, Artificial Sequence
  ENSG00000106617_35 (sequence is synthesized)
aaaacagcccatgaaaagttaatttttaaagattcttttaattctgttcagctggcttctttgttcctagtagacaaaaattggagctctccaaggagaattcaggatgtagaggcgggt

SEQ ID NO: 157952 - DNA, 120 bp, Artificial Sequence
  ENSG00000106617_36 (sequence is synthesized)
ggcgtgaggactagcttagcagtggctcagacagctgccgtcaaatgctttgggtttggaaatgtataggttcttaataaatattacttaatcctgacagcaggaccaggaatttaacat

SEQ ID NO: 157953 - DNA, 120 bp, Artificial Sequence
  ENSG00000106617_37 (sequence is synthesized)
gaacaattaagaataaaggattcaattcttcgtggcttacaggtcttaatatcccaaatagacctgttcttccctggttctatacgcgttcttagtgagtgaagaggagatggaaaaaga

SEQ ID NO: 157954 - DNA, 120 bp, Artificial Sequence
  ENSG00000106617_38 (sequence is synthesized)
ttacagtatcaatgctctgcaatagtttgtgaatagttaaatagaagcatagacctacaaactggttcaaacaaaagatacagtcctttgtaattttctcatgttaattcaggcatccag

SEQ ID NO: 157955 - DNA, 120 bp, Artificial Sequence
  ENSG00000106617_39 (sequence is synthesized)
gtagactgttagaaaaaactaactttaatttgttggacatactttttcattcaaatctggacctttgaacatgacaagagtgtgttctgggtctagaacgtttgcgtttatcttccgttt

SEQ ID NO: 157956 - DNA, 120 bp, Artificial Sequence
  ENSG00000106617_40 (sequence is synthesized)
tatttgtggaaagacgaatatcagctctgcctgttgtggatgagtcaggtttgtgtgtttggcgctgacaggcagaaataattgtttatctcagggtgcaattattgtaagatgacctgg

SEQ ID NO: 157957 - DNA, 120 bp, Artificial Sequence
  ENSG00000106617_41 (sequence is synthesized)
cacaggagatacgtggggaaaatgaaaacttgggtatggtgaataaattcagcaccaaggggcacgcaggatcgtaaaaaaagtttaattggtttattttcatatgtccattaaaatatg

SEQ ID NO: 157958 - DNA, 120 bp, Artificial Sequence
  ENSG00000106617_42 (sequence is synthesized)
ttatcagtgtttaacttttagtaattatgtcattaaaactgattttaaatgaatttctttttgtcccttaagacatttttctaacatatatttttcatttttaggaaaagttgtagatat

SEQ ID NO: 157959 - DNA, 120 bp, Artificial Sequence
  ENSG00000106617_43 (sequence is synthesized)
aatttgatgtaattgtaagtattttaattttgttcaatctgtcacctagaatgcattttaaacattcatgtaatgtgtttttatgtttttatcttgtttcttaatttaataatttctaac

SEQ ID NO: 157960 - DNA, 120 bp, Artificial Sequence
  ENSG00000106617_44 (sequence is synthesized)
cttttggggtgtgaggatattatcagaattttatagaccttctatagtaattgtacttttaatctgcattggtttagcaaccaattatatattagtagcattttataatttttcatcttt

SEQ ID NO: 157961 - DNA, 120 bp, Artificial Sequence
  ENSG00000106617_45 (sequence is synthesized)
acaatacatgcatattttatgcactgccacagcatgtgtatatattttaaatgttcttgtttccacgtaggaggcctgatttattcgcctctagacgcgtgcgcagtgcacacgtggact

SEQ ID NO: 157962 - DNA, 120 bp, Artificial Sequence
  ENSG00000106617_46 (sequence is synthesized)
catggctcctttgtcgggcgcatcccattgcttagtgattgggagccactgttctaaagaagaaaaggggactgacactttatagccccaaatgtgcacgccattttttgccacaatact

SEQ ID NO: 157963 - DNA, 120 bp, Artificial Sequence
  ENSG00000106617_47 (sequence is synthesized)
gaccccacattaaacattcttctgcagctgcctcaaaccctttgcttcacactattatgttaaacataacagtcaccgagaaatatgctgatcggcattttggttgagtgggacccgcta

SEQ ID NO: 157964 - DNA, 120 bp, Artificial Sequence
  ENSG00000106617_48 (sequence is synthesized)
aaatgaatgagagccccatgaagccatttggatccatggggctcctcaagcctgttcttcctctggttgcttgatccccatgggtcccccaaagccttcccagcagaaaccttgttcccc

SEQ ID NO: 157965 - DNA, 120 bp, Artificial Sequence
  ENSG00000106617_49 (sequence is synthesized)
agggagcttgttgagaaggtccgttgctgcagcatttctagccctgtggcactcaccaccctttacagatgtcagcccaccttgccagagatttcatccatgcatggtagagagcattag

SEQ ID NO: 157966 - DNA, 120 bp, Artificial Sequence
  ENSG00000106617_50 (sequence is synthesized)
agggtaaaaattggggggcagtctttggcaggatatactgtcaaagtttaacaatgttgcttcgtaaggaaggtagaccttgtaacatggttatctttaattgtgattgatatgttgaca

SEQ ID NO: 157967 - DNA, 120 bp, Artificial Sequence
  ENSG00000106617_51 (sequence is synthesized)
aaataacagtagcaatggcatgtcgtaagccagaaagaacgtctgatgtatgcaggtactaaattcagataagcattaaagtttttagaaatcaggctctcttaagctcactaattttgg

SEQ ID NO: 157968 - DNA, 120 bp, Artificial Sequence
  ENSG00000106617_52 (sequence is synthesized)
cggcgtctaggaagggtgggaggtagaacaggaagtgcagcatttaaaccatcatttctccacccacctacagatcaaggctttgagtatattactttgaaaccattttcgttttctctt

SEQ ID NO: 157969 - DNA, 120 bp, Artificial Sequence
  ENSG00000106617_53 (sequence is synthesized)
gctgatcgctgtcctcctcctccccctcaggcggcgctggcggcggccctgggacccgcggaagccggcatgctggagaagctggagttcgaggacgaagtagaagactcagaaagtggt

SEQ ID NO: 157970 - DNA, 120 bp, Artificial Sequence
  ENSG00000106617_54 (sequence is synthesized)
gtttaaaatcttttagtatcgggaaagctatgtttagtatgaaaagtatgttttcattttgcagatccttttctctctgctccataaaatgttatataaaacattctctttatttctgtt

SEQ ID NO: 157971 - DNA, 120 bp, Artificial Sequence
  ENSG00000106617_55 (sequence is synthesized)
aattttgatagtatgctactgtactaaagctgaacaatataagtattgtcccttctgtttatagacatgtataggacaccttcagcaggcaaggccttatcctagggccaggaatgtgaa

SEQ ID NO: 157972 - DNA, 120 bp, Artificial Sequence
  ENSG00000106617_56 (sequence is synthesized)
tacatagatactataaatcacctatggtaagtggcaccagttcctatgtcagtagttggagctgtacgtatctatgtatgtgtgtaggtatatgtgtgtattttaagatttttaatgttt

SEQ ID NO: 157973 - DNA, 120 bp, Artificial Sequence
  ENSG00000106617_57 (sequence is synthesized)
tcagttttttcttttttggtatggtgtgctgatggtgattttccaaatctatataacatgcagggaacttcagtacaaaactctctttactgtaagttatatgtatgaaactcaaagaag

SEQ ID NO: 157974 - DNA, 120 bp, Artificial Sequence
  ENSG00000106617_58 (sequence is synthesized)
gaattctcaggaaaaataaaaggaaatagattctttattcagctttcggaattccttggcttagcagaattctacatatttattagctagacgttctgtaagttttgcttatctctgcgg

SEQ ID NO: 157975 - DNA, 120 bp, Artificial Sequence
  ENSG00000106617_59 (sequence is synthesized)
gcctgttgaggtggtagagcttaattcagttaccccagcaattgcagaacaagaattatatgtactttgtgattttaaagcagaaaaaaatgagtcattaaagtgaaataaattccgttt

SEQ ID NO: 157976 - DNA, 120 bp, Artificial Sequence
  ENSG00000106617_60 (sequence is synthesized)
ttgtccttcatctaactttgtgatatctgagattcaacctgcttggttttgtgtttttagtttctgtttgtttgttcatgagggtggggggaaggacaggattgcatactcttatttaac

SEQ ID NO: 157977 - DNA, 120 bp, Artificial Sequence
  ENSG00000106617_61 (sequence is synthesized)
tagtcctatttggggtacttaaaaggtgtaggttaattcaattaatactgctttatgcgtaatgctcagtattatccaataattcttacatcaaatacaaaaatgagtttcttcataaaa

SEQ ID NO: 157978 - DNA, 65 bp, Artificial Sequence
  ENSG00000106617_62 (sequence is synthesized)
aattcttacatcaaatacaaaaatgagtttcttcataaaacatgctaagtggatcacttgaggtc

SEQ ID NO: 157979 - DNA, 120 bp, Artificial Sequence
  ENSG00000106617_63 (sequence is synthesized)
tgggcgacagagggagactctgtctccgaaaaacaaacacaaccatactcttaggaagttttaccaaagattttgtaaatatcctgtatttatttcccatgaagtgtattatttcttcaa

SEQ ID NO: 157980 - DNA, 120 bp, Artificial Sequence
  ENSG00000106617_64 (sequence is synthesized)
ccatgaagtgtattatttcttcaatattaccaatgcaagtgaacacgggctttccttatagtggtcatatctctgcttttgaactagcaaaatcagcatgagtgtgatttttgaatagat

SEQ ID NO: 157981 - DNA, 120 bp, Artificial Sequence
  ENSG00000106617_65 (sequence is synthesized)
agatttctgtgaaatgcagcaaatcccatataagaaatcttagcagtagaatatgaaatcaaaattgcaaaaaagcagttatgtctaaatatgcagcccaaagtttttcttaatatctgt

SEQ ID NO: 157982 - DNA, 72 bp, Artificial Sequence
  ENSG00000106617_66 (sequence is synthesized)
atgtctaaatatgcagcccaaagtttttcttaatatctgtagaagctgagaagggtggatcacttgagccca

SEQ ID NO: 157983 - DNA, 120 bp, Artificial Sequence
  ENSG00000106617_67 (sequence is synthesized)
gcagctcatgctgatcgctgtcctcctcctccccctcaggcggcgctggcggcggccctgggacccgcggaagccggcatgctggagaagctggagttcgaggacgaagcaaggtgtcag

SEQ ID NO: 157984 - DNA, 120 bp, Artificial Sequence
  ENSG00000106617_68 (sequence is synthesized)
ggagcgctaattgtttgtgcttgtcaccatgcactcggaggcaaccccgaatcatacccacagtccagaccctttaatcatagactggtgcccttatctgcgcctgtgaagatatgaccg

SEQ ID NO: 157985 - DNA, 120 bp, Artificial Sequence
  ENSG00000106617_69 (sequence is synthesized)
ggggtaccgggcgtccgcggaggggacgcgagccaggctcccagagcgcagccctgagcccggcatccacacggacgggcggcccttttgtccttactcgccgaactcgaattacagcaa

SEQ ID NO: 157986 - DNA, 120 bp, Artificial Sequence
  ENSG00000106617_70 (sequence is synthesized)
atgaattttttggtattttttggatggctactactttatacagtaatttaaaaccagcaatgccagcaaacgtttattgagtcctttgcactatcgggcactgtgctgaggttttatctg

SEQ ID NO: 157987 - DNA, 120 bp, Artificial Sequence
  ENSG00000106617_71 (sequence is synthesized)
aattctcaacatcttggcaaccttataagaaatgtgctattactgtcttcttcctaaagacagggaagctcaaattatagagtttaagaacttaagtcagaaagctttggccaggtgcag

SEQ ID NO: 157988 - DNA, 120 bp, Artificial Sequence
  ENSG00000106617_72 (sequence is synthesized)
ggaagccaaggcaggtggatcacttgagcctgggagtttgagaccagcttgggcaacatacagtagaagactcagaaagtggtgtttacatgcgattcatgaggtcacacaagtgttatg

SEQ ID NO: 157989 - DNA, 120 bp, Artificial Sequence
  ENSG00000106617_73 (sequence is synthesized)
cttccaccttatcttcctgtccactttccccctttccctcccccataattgaccccaatgtggaattgagggtcatttcaaaatatttctgatactatttgaagaaaataaactttatct

SEQ ID NO: 157990 - DNA, 120 bp, Artificial Sequence
  ENSG00000106617_74 (sequence is synthesized)
aaacgagaggcattttcaggacttcctctttcaggcccggcttgcaagagcgctagggccaagctcctttcagccctaatcggtactggagctaatcgcattcgcggcgcccgtgcactc

SEQ ID NO: 157991 - DNA, 120 bp, Artificial Sequence
  ENSG00000106617_75 (sequence is synthesized)
tgcagggatgggccgtggggccagggacctcagtcccctctcggcctgtcctgcccttccaggaggctagcggctgctggccgcgcagcctgccaacctgagttggccatagtagagtct

SEQ ID NO: 157992 - DNA, 120 bp, Artificial Sequence
  ENSG00000106617_76 (sequence is synthesized)
cagatacccagctcctgagcggccagggccagattcagggtgtgtacgtttttggcagcggctccccaaccgagaagacactcggctgcgaagagaggacgcgaattaagagttccatgc

SEQ ID NO: 157993 - DNA, 120 bp, Artificial Sequence
  ENSG00000106617_77 (sequence is synthesized)
tggaaaaaaaaaaatggatagcgacaaagtgcatctacaatacgtgtagcccacggaacgatttttgttaagggggccgaggatgggcagttacatctaaaatttggaaagggaagagga

SEQ ID NO: 157994 - DNA, 120 bp, Artificial Sequence
  ENSG00000106617_78 (sequence is synthesized)
aagcgagaaaggatcccctagctggcgccccggggcgttctgcagcctccagcccctctccccctccccgcgccgcggagcccacacctgcgcaggtggagcctgccgagcgcggccgcc

SEQ ID NO: 157995 - DNA, 120 bp, Artificial Sequence
  ENSG00000106617_79 (sequence is synthesized)
actggcccagcggcacagactctgcggccccatgcttgctgcaggcgcaagagggtgcttggtcggggagttaattcaaacacatctggaacctgctgcctgccgggtacagtatgaggc

SEQ ID NO: 157996 - DNA, 120 bp, Artificial Sequence
  ENSG00000106617_80 (sequence is synthesized)
agtgcaggggttgtgctggccagaggacctggagcccagagctgtccactgctgcatcatcggcctctgctcctgcctccctccatcctgctgcctgtctttttaaaagctccggtccag

SEQ ID NO: 157997 - DNA, 120 bp, Artificial Sequence
  ENSG00000106617_81 (sequence is synthesized)
cagctcctcagtcctgtctcatctgtcacgacctgagcacttttcaggaggacaacggccagttcttgtgtcacctgcccttcgacatttcctcaccatcagagccagcctccgccctca

SEQ ID NO: 157998 - DNA, 120 bp, Artificial Sequence
  ENSG00000106617_82 (sequence is synthesized)
ggtgggcacccacccatccgtgggctgccctgggcttctgcatcccagcagggtcacccgatgcggccgcgacacctttccggtgaagtggacgccggtcacttggtgaagggggcgtct

SEQ ID NO: 157999 - DNA, 120 bp, Artificial Sequence
  ENSG00000106617_83 (sequence is synthesized)
gccaccataaagttctctactttaataaagggcttactttcccccttgtcaccagtcagggcttcagggggacctactttgggattgtgtaaatgtcttctttctcatcaaactttcact

SEQ ID NO: 158000 - DNA, 120 bp, Artificial Sequence
  ENSG00000106617_84 (sequence is synthesized)
tgctagttttaggattgatatgtatttcttgcctgaattgttactatagtaattaccaaaaggcgattttctaaatttatcatgaattctacattgactggttggaatgctactttaaag

SEQ ID NO: 158001 - DNA, 120 bp, Artificial Sequence
  ENSG00000106617_85 (sequence is synthesized)
aacaggtttttcttctctccctgtgtgtgtatgtatctatggactcatggatttgtatcctattcagtgccatgttatttctcattatcaaatattttaaaaaatttttattttaggttt

SEQ ID NO: 158002 - DNA, 120 bp, Artificial Sequence
  ENSG00000106617_86 (sequence is synthesized)
tgaatgtttgttacatagataaagatgtgtcatgggggtctgttgtacatattatttcatcacccacgtatttcatcatgtattaggctcagtacccaatagttatcttttccgttcctc

SEQ ID NO: 158003 - DNA, 120 bp, Artificial Sequence
  ENSG00000106617_87 (sequence is synthesized)
tccctcctcccaccctctgcctcttaagtagcccccagtgtttgtcgtttctttctttgtgttcgtaagttcttattatttagcccccactcataagtgagaacatgcagcacttggttt

SEQ ID NO: 158004 - DNA, 120 bp, Artificial Sequence
  ENSG00000106617_88 (sequence is synthesized)
tctgttcctgtgttagtttgctaaggatgatcgcctccagctccatccatgttccctcaaaagacgtgatctctttcttttttatggctgtgtaatattccgcagcacatatgtactaca

SEQ ID NO: 158005 - DNA, 120 bp, Artificial Sequence
  ENSG00000106617_89 (sequence is synthesized)
atgggcatttaggttgattccatgtcttcattatcaagtttttgatgctcaaattgtcctagacgtggccagcaggagcctctccaggcggatcactgtgtcctttgactttccccatca

SEQ ID NO: 158006 - DNA, 120 bp, Artificial Sequence
  ENSG00000106617_90 (sequence is synthesized)
tgtgtcctttgactttccccatcatatccccaccctgtccccatcatgctgtgggcacttcctggctttctggctgatcttgtacattcctcaccccagccctggaattagccattgctc

SEQ ID NO: 158007 - DNA, 120 bp, Artificial Sequence
  ENSG00000106617_91 (sequence is synthesized)
taaagagcccttgtcacttttagtggcaaatagtgtttacgtgtgcatgtcactcctggggtgtcattgcttctaggccttctcagcagatgtattagagacaacctaaacacccacata

SEQ ID NO: 158008 - DNA, 64 bp, Artificial Sequence
  ENSG00000106617_92 (sequence is synthesized)
tctcagcagatgtattagagacaacctaaacacccacatagaagagagtagttggccaggtgag

SEQ ID NO: 158009 - DNA, 120 bp, Artificial Sequence
  ENSG00000106617_93 (sequence is synthesized)
caaacaaacaaacaaacaaacaaaaatagctgggcatggagacatgtgcctgtcgtcccaggtacttgggagtctgaggcaggatgatcacttgagcccaggagttcacggctgcagtgc

SEQ ID NO: 158010 - DNA, 120 bp, Artificial Sequence
  ENSG00000106617_94 (sequence is synthesized)
tctgaggcaggatgatcacttgagcccaggagttcacggctgcagtgcgctgtgattgcactgcactccagtctgggcgacaaagcgagaacctgtctcaaaaaaataaataaataaata

SEQ ID NO: 158011 - DNA, 120 bp, Artificial Sequence
  ENSG00000106617_95 (sequence is synthesized)
gttcaatgaaataaagaagttacagctacatagcagagtaccatgtagctgtaaaaaaaatatggcatctttgggccgggcgtggtggcttactaaacctgtaatcccagcactttggga

SEQ ID NO: 158012 - DNA, 120 bp, Artificial Sequence
  ENSG00000106617_96 (sequence is synthesized)
acaggcgtgagccatcgcgcccggccatcatgaagcttttaagagaatagcaacgccgctcccttcctgcgggtgaaaggcctgttacagaaacacctcaaaacgctctgccgtcactca

SEQ ID NO: 158013 - DNA, 120 bp, Artificial Sequence
  ENSG00000106617_97 (sequence is synthesized)
tcagagatttcagagtagaaaactagagatggacgtagtctatcccacttcattatagctcatttatcctcttggatgcgattcttaatatatgaacttcacagagaaaagacactgcag

SEQ ID NO: 158014 - DNA, 120 bp, Artificial Sequence
  ENSG00000106617_98 (sequence is synthesized)
aaaataaaacccttgtaagagctgcgaccttgtttcttcgtttctgtcatcatctggacttctctcccatgtattaataagacaagtacctgatagttattagaaactgatatacaactt

SEQ ID NO: 158015 - DNA, 120 bp, Artificial Sequence
  ENSG00000106617_99 (sequence is synthesized)
ttagaaattaaaacagttatgtttaacaatgtatgatagctacgttgtgtttcgtgtttgagttgtatcttttctatattaatattttgaaaattgaaaactcagcagggcatagctagc

SEQ ID NO: 158016 - DNA, 120 bp, Artificial Sequence
  ENSG00000106617_100 (sequence is synthesized)
tcatttttcttaaaagtaagcaagcaaatcagcttgaattagagacaaatcagtatcattagagacaggagatagatagctttcccctctttccttctcatgcctgtgtccctgtttttc

SEQ ID NO: 158017 - DNA, 120 bp, Artificial Sequence
  ENSG00000106617_101 (sequence is synthesized)
accagggctgtgactttttaatacggagtaggtcttccaggtaatcagacagtaacacattgaacattagagcctaaggtcatcgtatgggtctgtctgtggctactttccctcatttat

SEQ ID NO: 158018 - DNA, 120 bp, Artificial Sequence
  ENSG00000106617_102 (sequence is synthesized)
tcatttattcatttatgggatgtgtgtgtgtgtgttgcttttttctttttctgagacaggatctcactctgtcacccaagctagagtgcactggtgcgatcttggcccactgcaacctcc

SEQ ID NO: 158019 - DNA, 120 bp, Artificial Sequence
  ENSG00000106617_103 (sequence is synthesized)
ggctcaagcaatcctcccaccaagtaactgggaccacaggtgcacaccagcacacccagccactgtctaatgtttttgtagagatgatgtctcactgctattccccaggctggagggatg

SEQ ID NO: 158020 - DNA, 120 bp, Artificial Sequence
  ENSG00000106617_104 (sequence is synthesized)
taagtctgggcccttctgtgggtggggctgccgggtggcagagggagggcagagcagttattgccccaagctgagcagtctatctgcagccgaggctgaggtcgtgtgctcccgacatct

SEQ ID NO: 158021 - DNA, 120 bp, Artificial Sequence
  ENSG00000106617_105 (sequence is synthesized)
ctcccgacatcttcaggatattgtaccataaatcacaggctgagggagaaatggtgagggcacaatagcaaatggaaatacacaaaaaatagctgggtgcggtggctcacacctgtagtc

SEQ ID NO: 158022 - DNA, 120 bp, Artificial Sequence
  ENSG00000106617_106 (sequence is synthesized)
tcccaactactcgggaggctgaggcataagaattgcttaaacctagatggcagacactgcagtgagctgagatcatgacaccgcactccagcccctatgtaacagagcagactctgtctg

SEQ ID NO: 158023 - DNA, 120 bp, Artificial Sequence
  ENSG00000106617_107 (sequence is synthesized)
gggatgcagctaagaaaggttaagtagctttgccaaggttgcgtggctgggaagcggtagagccaggatccctttcaagcgttcctcactccccatgcttttctccacgcaggggccttg

SEQ ID NO: 158024 - DNA, 120 bp, Artificial Sequence
  ENSG00000106617_108 (sequence is synthesized)
ggagggaggcgtttgcataccttgcatacacaggacacctggctgggaaacgtgcccccagtcatgtggatactaagtggtagattgcaaacccgggagtctctctgactcccaagccca

SEQ ID NO: 158025 - DNA, 120 bp, Artificial Sequence
  ENSG00000106617_109 (sequence is synthesized)
aactatttctgctagtgtgctgttgcacaagagggagtaaaagcgtgagatcattcttttgcagagctgcttcagatttttatcttctataaaaaggagaggaagttgcctctgcccagt

SEQ ID NO: 158026 - DNA, 120 bp, Artificial Sequence
  ENSG00000106617_110 (sequence is synthesized)
actgcctcatatttgggccaatatggtaattagaatcatgctaccagaatattcagctaactaaaggttttcagttaaaaatatagaacttaaagacatttcagagcctgatttttactg

SEQ ID NO: 158027 - DNA, 120 bp, Artificial Sequence
  ENSG00000106617_111 (sequence is synthesized)
aattatgagatcattttctgagaaaaaaggagcattacccttcaagacgtttgaaaattagcctaagcctatagtgtgcaacagggaattcgctatgttgagatggactagatgacctaa

SEQ ID NO: 158028 - DNA, 120 bp, Artificial Sequence
  ENSG00000106617_112 (sequence is synthesized)
tagggctttctttttttttttctctaaatttctaggagtctcatgatttgaatattgatgaactctttgacttgaacattttgtttcttctaattgttcatcttttcctgataattataa

SEQ ID NO: 158029 - DNA, 120 bp, Artificial Sequence
  ENSG00000106617_113 (sequence is synthesized)
tgcccacaatggggccaccgctcactactaagtctaagccctcagagatttgccttggtattaagaaatgcatcagaggcatgcctaacttgaaccaaagcaagcatctgttcttattta

SEQ ID NO: 158030 - DNA, 120 bp, Artificial Sequence
  ENSG00000106617_114 (sequence is synthesized)
atagcatggaagtaatttgaagaccatattctcttcattgtcacattgacattcaccctgtaaaatcatgatactcttttctgccatagaaccatttcttaaattcgcatttcatgattg

SEQ ID NO: 158031 - DNA, 120 bp, Artificial Sequence
  ENSG00000106617_115 (sequence is synthesized)
taaggtggtggtctcactgacacttgtcatggtgggttggtggagaggaccgggggtgggaatcacggcagacccagtctgtctgcaacagcggagcctttggagggtgctcaaggaaac

SEQ ID NO: 158032 - DNA, 120 bp, Artificial Sequence
  ENSG00000106617_116 (sequence is synthesized)
actggtagaaatggagggaccaactgaaggaaaattttgaattcaaaattgaagagtttggttctgtgtttcccataatatgcttgataggagaagcaacctttgtagctggctgtgaaa

SEQ ID NO: 158033 - DNA, 120 bp, Artificial Sequence
  ENSG00000106617_117 (sequence is synthesized)
tcagaatacatcttggagttctcttacacccccaggggccctttcaaatccatacgatttagaagtttcactgagtgatgggtttggtttattacggctttgtcaaaccaagctaaacaa

SEQ ID NO: 158034 - DNA, 120 bp, Artificial Sequence
  ENSG00000106617_118 (sequence is synthesized)
atttggcatgggatctgtacagtctgttgtgcagtgattgtgtaacaccagcttcttgtccagttctactgtacaagtactgatagaccaaggtttaagtatgtttacgttttgacatta

SEQ ID NO: 158035 - DNA, 120 bp, Artificial Sequence
  ENSG00000106617_119 (sequence is synthesized)
aagtatgtttacgttttgacattacatgatattttgtagtaataataatgccaaaatattcttaaacgccttctgtatagaaactttggtaaagcaaggccaggtgcggtggctcacacc

SEQ ID NO: 158036 - DNA, 120 bp, Artificial Sequence
  ENSG00000106617_120 (sequence is synthesized)
gtattttaatagatgccggtttggaattcaacctagtaaacatgtttccaagttaaagaacattcttgctggcagggtgcagtggcccatgcccgtaatctcagcactttgggaggccaa

SEQ ID NO: 158037 - DNA, 120 bp, Artificial Sequence
  ENSG00000106624_0 (sequence is synthesized)
gccagcgctttggagacggctatccgcgcgggagtgcgccacgcggggccggagcgcctattagccgccaggacctcggagcgccccgaccacccctgagcccctctggcttcggagccc

SEQ ID NO: 158038 - DNA, 120 bp, Artificial Sequence
  ENSG00000106624_1 (sequence is synthesized)
cccagcaccccttcccgggtcccctcgcccaccctaatccactctccctccctttcccggattccctcgctcaccccatcctctctcccgccccttcctggattccctcacccgtctcga

SEQ ID NO: 158039 - DNA, 120 bp, Artificial Sequence
  ENSG00000106624_2 (sequence is synthesized)
gattccctcacccgtctcgatcccctctccgccctttcccagagacccagagcccctgaccccccgcgccctccccggagccccccgcgcgtgccgcggccatggcggccgtgcgcgggg

SEQ ID NO: 158040 - DNA, 120 bp, Artificial Sequence
  ENSG00000106624_3 (sequence is synthesized)
ctggcgttgctggccctgtgccctggagggcgcccgcagacggtgctgaccgacgacgagatcgaggagttcctcgagggcttcctgtcagagctagaacctgagccccgggaggacgac

SEQ ID NO: 158041 - DNA, 120 bp, Artificial Sequence
  ENSG00000106624_4 (sequence is synthesized)
gtggaggccccgccgcctcccgagcccaccccgcgggtccgaaaagcccaggcggggggcaagccagggaagcggccagggacggccgcagaagtgcctccggaaaagaccaaagacaaa

SEQ ID NO: 158042 - DNA, 120 bp, Artificial Sequence
  ENSG00000106624_5 (sequence is synthesized)
gggaagaaaggcaagaaagacaaaggccccaaggtgcccaaggagtccttggaggggtcccccaggccgcccaagaaggggaaggagaagccacccaaggccaccaagaagcccaaggag

SEQ ID NO: 158043 - DNA, 120 bp, Artificial Sequence
  ENSG00000106624_6 (sequence is synthesized)
aagccacctaaggccaccaagaagcccaaggagaagccacccaaggccaccaagaagcccaaagagaagccacccaaggccaccaagaagcccccgtcagggaagaggccccccattctg

SEQ ID NO: 158044 - DNA, 120 bp, Artificial Sequence
  ENSG00000106624_7 (sequence is synthesized)
gctccctcagaaaccctggagtggccactgcccccaccccccagccctggccccgaggagctaccccaggagggaggggcgcccctctcaaataactggcagaatccaggagaggagacc

SEQ ID NO: 158045 - DNA, 120 bp, Artificial Sequence
  ENSG00000106624_8 (sequence is synthesized)
catgtggaggcacgggagcaccagcctgagccggaggaggagaccgagcaacccacactggactacaatgaccagatcgagagggaggactatgaggactttgagtacattcggcgccag

SEQ ID NO: 158046 - DNA, 120 bp, Artificial Sequence
  ENSG00000106624_9 (sequence is synthesized)
aagcaacccaggccacccccaagcagaaggaggaggcccgagcgggtctggccagagccccctgaggagaaggccccggccccagccccggaggagaggattgagcctcctgtgaagcct

SEQ ID NO: 158047 - DNA, 120 bp, Artificial Sequence
  ENSG00000106624_10 (sequence is synthesized)
ctgctgcccccgctgccccctgactatggtgatggttacgtgatccccaactacgatgacatggactattactttgggcctcctccgccccagaagcccgatgctgagcgccagacagac

SEQ ID NO: 158048 - DNA, 120 bp, Artificial Sequence
  ENSG00000106624_11 (sequence is synthesized)
gaagagaaggaggagctgaagaaacccaaaaaggaggacagcagccccaaggaggagaccgacaagtgggcagtggagaagggcaaggaccacaaagagccccgaaagggcgaggagttg

SEQ ID NO: 158049 - DNA, 120 bp, Artificial Sequence
  ENSG00000106624_12 (sequence is synthesized)
gaggaggagtggacgcctacggagaaagtcaagtgtccccccattgggatggagtcacaccgtattgaggacaaccagatccgagcctcctccatgctgcgccacggcctgggggcacag

SEQ ID NO: 158050 - DNA, 120 bp, Artificial Sequence
  ENSG00000106624_13 (sequence is synthesized)
cgcggccggctcaacatgcagaccggtgccactgaggacgactactatgatggtgcgtggtgtgccgaggacgatgccaggacccagtggatagaggtggacaccaggaggactacccgg

SEQ ID NO: 158051 - DNA, 120 bp, Artificial Sequence
  ENSG00000106624_14 (sequence is synthesized)
ttcacaggcgtcatcacccagggcagagactccagcatccatgacgattttgtgaccaccttcttcgtgggcttcagcaatgacagccagacatgggtgatgtacaccaacggctatgag

SEQ ID NO: 158052 - DNA, 120 bp, Artificial Sequence
  ENSG00000106624_15 (sequence is synthesized)
gaaatgacctttcatgggaacgtggacaaggacacacccgtgctgagtgagctcccagagccggtggtggctcgtttcatccgcatctacccactcacctggaatggcagcctgtgcatg

SEQ ID NO: 158053 - DNA, 120 bp, Artificial Sequence
  ENSG00000106624_16 (sequence is synthesized)
cgcctggaggtgctggggtgctctgtggcccctgtctacagctactacgcacagaatgaggtggtggccaccgatgacctggatttccggcaccacagctacaaggacatgcgccagctc

SEQ ID NO: 158054 - DNA, 120 bp, Artificial Sequence
  ENSG00000106624_17 (sequence is synthesized)
ggagtgccccaccatcacccgcacttacagcctgggcaagagctcacgaggcctcaagatctatgccatggagatctcagacaaccctggggagcatgaactgggggagcccgagttccg

SEQ ID NO: 158055 - DNA, 120 bp, Artificial Sequence
  ENSG00000106624_18 (sequence is synthesized)
ctacactgctgggatccatggcaacgaggtgctgggccgagagctgttgctgctgctcatgcagtacctgtgccgagagtaccgcgatgggaacccacgtgtgcgcagcctggtgcagga

SEQ ID NO: 158056 - DNA, 120 bp, Artificial Sequence
  ENSG00000106624_19 (sequence is synthesized)
cacacgcatccacctggtgccctcactgaaccctgatggctacgaggtggcagcgcagatgggctcagagtttgggaactgggcgctgggactgtggactgaggagggctttgacatctt

SEQ ID NO: 158057 - DNA, 120 bp, Artificial Sequence
  ENSG00000106624_20 (sequence is synthesized)
tgaagatttcccggatctcaactctgtgctctggggagctgaggagaggaaatgggtcccctaccgggtccccaacaataacttgcccatccctgaacgctacctttcgccagatgccac

SEQ ID NO: 158058 - DNA, 120 bp, Artificial Sequence
  ENSG00000106624_21 (sequence is synthesized)
ggtatccacggaggtccgggccatcattgcctggatggagaagaaccccttcgtgctgggagcaaatctgaacggcggcgagcggctagtatcctacccctacgatatggcccgcacgcc

SEQ ID NO: 158059 - DNA, 120 bp, Artificial Sequence
  ENSG00000106624_22 (sequence is synthesized)
tacccaggagcagctgctggccgcagccatggcagcagcccggggggaggatgaggacgaggtctccgaggcccaggagactccagaccacgccatcttccggtggcttgccatctcctt

SEQ ID NO: 158060 - DNA, 120 bp, Artificial Sequence
  ENSG00000106624_23 (sequence is synthesized)
cgcctccgcacacctcaccttgaccgagccctaccgcggaggctgccaagcccaggactacaccggcggcatgggcatcgtcaacggggccaagtggaacccccggaccgggactatcaa

SEQ ID NO: 158061 - DNA, 120 bp, Artificial Sequence
  ENSG00000106624_24 (sequence is synthesized)
tgacttcagttacctgcataccaactgcctggagctctccttctacctgggctgtgacaagttccctcatgagagtgagctgccccgcgagtgggagaacaacaaggaggcgctgctcac

SEQ ID NO: 158062 - DNA, 120 bp, Artificial Sequence
  ENSG00000106624_25 (sequence is synthesized)
cttcatggagcaggtgcaccgcggcattaagggggtggtgacggacgagcaaggcatccccattgccaacgccaccatctctgtgagtggcattaatcacggcgtgaagacagccagtgg

SEQ ID NO: 158063 - DNA, 120 bp, Artificial Sequence
  ENSG00000106624_26 (sequence is synthesized)
tggtgattactggcgaatcttgaacccgggtgagtaccgcgtgacagcccacgcggagggctacaccccgagcgccaagacctgcaatgttgactatgacatcggggccactcagtgcaa

SEQ ID NO: 158064 - DNA, 120 bp, Artificial Sequence
  ENSG00000106624_27 (sequence is synthesized)
cttcatcctggctcgctccaactggaagcgcatccgggagatcatggccatgaacgggaaccggcctatcccacacatagacccatcgcgccctatgaccccccaacagcgacgcctgca

SEQ ID NO: 158065 - DNA, 120 bp, Artificial Sequence
  ENSG00000106624_28 (sequence is synthesized)
gcagcgacgcctacaacaccgcctgcggcttcgggcacagatgcggctgcggcgcctcaacgccaccaccaccctaggcccccacactgtgcctcccacgctgccccctgcccctgccac

SEQ ID NO: 158066 - DNA, 120 bp, Artificial Sequence
  ENSG00000106624_29 (sequence is synthesized)
caccctgagcactaccatagagccctggggcctcataccgccaaccaccgctggctgggaggagtcggagactgagacctacacagaggtggtgacagagtttgggaccgaggtggagcc

SEQ ID NO: 158067 - DNA, 120 bp, Artificial Sequence
  ENSG00000106624_30 (sequence is synthesized)
cgagtttgggaccaaggtggagcccgagtttgagacccagttggagcctgagtttgagacccagctggaacccgagtttgaggaagaggaggaggaggagaaagaggaggagatagccac

SEQ ID NO: 158068 - DNA, 120 bp, Artificial Sequence
  ENSG00000106624_31 (sequence is synthesized)
tggccaggcattccccttcacaacagtagagacctacacagtgaactttggggacttctgagatcagcgtcctaccaagaccccagcccaactcaagctacagcagcagcacttcccaag

SEQ ID NO: 158069 - DNA, 120 bp, Artificial Sequence
  ENSG00000106624_32 (sequence is synthesized)
cctgctgaccacagtcacatcacccatcagcacatggaaggcccctggtatggacactgaaaggaagggctggtcctgcccctttgagggggtgcaaacatgactgggacctaagagcca

SEQ ID NO: 158070 - DNA, 120 bp, Artificial Sequence
  ENSG00000106624_33 (sequence is synthesized)
gaggctgtgtagaggctcctgctccacctgccagtctcgtaagagatggggttgctgcagtgttggagtaggggcagagggagggagccaaggtcactccaataaaacaagctcatggca

SEQ ID NO: 158071 - DNA, 120 bp, Artificial Sequence
  ENSG00000106624_34 (sequence is synthesized)
tgaggcccagggaggggaagcacaggctgggattggaaacagctcctggcctggctttgagtcgattccaggtgggctggtgcagggcaccagggagccaccagctgaccagagctgccc

SEQ ID NO: 158072 - DNA, 120 bp, Artificial Sequence
  ENSG00000106624_35 (sequence is synthesized)
tctgactgtgcccccgatgtgccgggagtgggctctgggctccttggttctgggtttggtggagggaaggatggagctagtgagccaccattctggggtacgcgtcctcagagtgtcccc

SEQ ID NO: 158073 - DNA, 120 bp, Artificial Sequence
  ENSG00000106624_36 (sequence is synthesized)
cggagaaagtcagtatccctgcagggccattgtgcagacggtccccatctggatgacatctgtggctgcgccctgggggagctctacctgtgatttcacgtgtgtcccctgagagctggg

SEQ ID NO: 158074 - DNA, 120 bp, Artificial Sequence
  ENSG00000106624_37 (sequence is synthesized)
ctgggtgagggtctgtgggggccagcagctggcctctgctgctgatgtgcagagctcactgcctcccgcctgttccggagcctctctggggattctggcttgtcttacagggccctagga

SEQ ID NO: 158075 - DNA, 120 bp, Artificial Sequence
  ENSG00000106624_38 (sequence is synthesized)
gccccagctgtcccccagaccctcgggtatgaggtgggtctgggtccttcctcagctgccctgggcctcgggagactgagtgctcactgaggctcccgcccttgcaggggagcccgagtt

SEQ ID NO: 158076 - DNA, 120 bp, Artificial Sequence
  ENSG00000106628_0 (sequence is synthesized)
gagtggggtccagggaaacggggtcagctgggggtggcagttccaggccgcgaggccgggctcctgggtcggtgggctggtgtcttggcggacgtcccgcagctgccgcgtggatccgag

SEQ ID NO: 158077 - DNA, 120 bp, Artificial Sequence
  ENSG00000106628_1 (sequence is synthesized)
ccggggcacccgccgtgactgggacagcccccagggcgctctcggccccatcccgagtagcgcggcctggctgctgccgccatcaagcacgttcgagccaaaagctcctaacgagtcact

SEQ ID NO: 158078 - DNA, 120 bp, Artificial Sequence
  ENSG00000106628_2 (sequence is synthesized)
cgttagacacgtgtgcggagcctgtgtcccaggccagtgctgtcccgtggagatagattgcaagccgctagggaattttttaactttctagtgccggagagctggatggaggcagatcgg

SEQ ID NO: 158079 - DNA, 120 bp, Artificial Sequence
  ENSG00000106628_3 (sequence is synthesized)
gaattccatttggggcaaactgaacttgattgagaccctggtagttgtccagatggaacaggacacctgagtctagggttcgggaagaactccagatgggacaaacactcctagctttcc

SEQ ID NO: 158080 - DNA, 120 bp, Artificial Sequence
  ENSG00000106628_4 (sequence is synthesized)
ttttctctttttggatgaccgctacaggtatcctttgggtgcagtgagacaccaggagagctgctgctttgggggatggacaggggcagcaggaatgcctttgtgttttcgcagtgaacc

SEQ ID NO: 158081 - DNA, 120 bp, Artificial Sequence
  ENSG00000106628_5 (sequence is synthesized)
tccttggcctgggcgaagctgtgtggaccaagcaagtcaggagtgtggccatgttttctgagcaggctgcccagagggcccacactctactgtccccaccatcagccaacaatgccacct

SEQ ID NO: 158082 - DNA, 120 bp, Artificial Sequence
  ENSG00000106628_6 (sequence is synthesized)
ttgcccgggtgccagtggcaacctacaccaactcctcacaacccttccggctaggagagcgcagctttagccggcagtatgcccacatttatgccacccgcctcatccaaatgagaccct

SEQ ID NO: 158083 - DNA, 120 bp, Artificial Sequence
  ENSG00000106628_7 (sequence is synthesized)
tcctggagaaccgggcccagcagcactggggcagtggagtgggagtgaagaagctgtgtgaactgcagcctgaggagaagtgctgtgtggtgggcactctgttcaaggccatgccgctgc

SEQ ID NO: 158084 - DNA, 120 bp, Artificial Sequence
  ENSG00000106628_8 (sequence is synthesized)
actaaaaggcaccattgacgtgtcaaagctggttacggggactgtcctggctgtgtttggctccgtgagagacgacgggaagtttctggtggaggactattgctttgctgaccttgctcc

SEQ ID NO: 158085 - DNA, 120 bp, Artificial Sequence
  ENSG00000106628_9 (sequence is synthesized)
ccagaagcccgcacccccacttgacacagataggtttgtgctactggtgtccggcctgggcctgggtggcggtggaggcgagagcctgctgggcacccagctgctggtggatgtggtgac

SEQ ID NO: 158086 - DNA, 120 bp, Artificial Sequence
  ENSG00000106628_10 (sequence is synthesized)
ggggcagcttggggacgaaggggagcagtgcagcgccgcccacgtctcccgggttatcctcgctggcaacctcctcagccacagcacccagagcagggattctatcaataaggccaaata

SEQ ID NO: 158087 - DNA, 120 bp, Artificial Sequence
  ENSG00000106628_11 (sequence is synthesized)
cctcaccaagaaaacccaggcagccagcgtggaggctgttaagatgctggatgagatcctcctgcagctgagcgcctcagtgcccgtggacgtgatgccaggcgagtttgatcccaccaa

SEQ ID NO: 158088 - DNA, 120 bp, Artificial Sequence
  ENSG00000106628_12 (sequence is synthesized)
ttacacgctcccccagcagcccctccacccctgcatgttcccgctggccactgcctactccacgctccagctggtcaccaacccctaccaggccaccattgatggagtcagatttttggg

SEQ ID NO: 158089 - DNA, 120 bp, Artificial Sequence
  ENSG00000106628_13 (sequence is synthesized)
gacatcaggacagaacgtgagtgacattttccgatacagcagcatggaggatcacttggagatcctggagtggaccctgcgggtccgtcacatcagccccacagcccctgacactctagg

SEQ ID NO: 158090 - DNA, 120 bp, Artificial Sequence
  ENSG00000106628_14 (sequence is synthesized)
ttgttaccccttctacaaaactgacccgttcatcttcccagagtgcccgcatgtctacttttgtggcaacacccccagctttggctccaaaatcatccgaggtcctgaggaccagacagt

SEQ ID NO: 158091 - DNA, 120 bp, Artificial Sequence
  ENSG00000106628_15 (sequence is synthesized)
gctgttggtgactgtccctgacttcagtgccacgcagaccgcctgccttgtgaacctgcgcagcctggcctgccagcccatcagcttctcgggcttcggggcagaggacgatgacctggg

SEQ ID NO: 158092 - DNA, 120 bp, Artificial Sequence
  ENSG00000106628_16 (sequence is synthesized)
aggcctggggctgggcccctgactcaaaaaagtggttttgaccagagaggcccagatggaggctgttcattccctgcagtgtcggcattgtaaataaagcctgagcacttgctgatgcga

SEQ ID NO: 158093 - DNA, 120 bp, Artificial Sequence
  ENSG00000106628_17 (sequence is synthesized)
gggatgcggcgcgccgcgcgggtgagacatcggtatccaggcacgataaatttccaagtggacacaatgtctggtgtcaactacagctgttctccttcttttcccagtatcctttgggtg

SEQ ID NO: 158094 - DNA, 120 bp, Artificial Sequence
  ENSG00000106628_18 (sequence is synthesized)
cacagttggactcaccacatctcctgtacttcgtagccctaggtggctagtggcataagacacaaaaatctcagctctcctggagcttatggtctagttggagcaggcagacaatacatt

SEQ ID NO: 158095 - DNA, 120 bp, Artificial Sequence
  ENSG00000106628_19 (sequence is synthesized)
tgttctcatgaggacacttggcatccagggcccaaccacacccagagtccctggtctcctgtggctgactcactttttactgtcaccgtgaagtccagggggtccttgtacttgatgttc

SEQ ID NO: 158096 - DNA, 120 bp, Artificial Sequence
  ENSG00000106628_20 (sequence is synthesized)
tctcctggcaaggccagggccctgtgattggcctctcatggagtgctgggcagggcctccatggcctctgtcgggcgggggggctacttcatctctgagtctgtacccctcgtgtcccag

SEQ ID NO: 158097 - DNA, 120 bp, Artificial Sequence
  ENSG00000106628_21 (sequence is synthesized)
atgacgagctggtcttggaagatgaactgcagcgtatcaaactaaaaggcaccattgacgtgtcaaagctggttacgggtagggagcccaatgagaggatgtgggtgatgcaggtgaaga

SEQ ID NO: 158098 - DNA, 120 bp, Artificial Sequence
  ENSG00000106628_22 (sequence is synthesized)
ttagggatggtgtgagtggggagcctggggggagtgggggggtgtggcctgggcacacgtgtgttcttgaggaggtaggtgaggctccaggcggtcggaggccatcagattgggtgagac

SEQ ID NO: 158099 - DNA, 120 bp, Artificial Sequence
  ENSG00000106628_23 (sequence is synthesized)
ctggctgggagatgggtctccccacctccatccaagggcagtgactccaggaagcaggcatgcatcctggagtcctaggtgagaattcaccaatgtggttgtggagaactggcttgtttt

SEQ ID NO: 158100 - DNA, 120 bp, Artificial Sequence
  ENSG00000106628_24 (sequence is synthesized)
caggcagacctggcctcccactagaacacctccctggaggtggggttgtggggaagcaggttcagagacaatggactccagaggggtgggggctgcggtgccagctcactaacaccagag

SEQ ID NO: 158101 - DNA, 120 bp, Artificial Sequence
  ENSG00000106628_25 (sequence is synthesized)
cagcaacagcagggccaaggtcttgtgacaatgtctggaggtgcccctattgtcacactgggggtctcctactggcctgcaatgggaggaggggctgcagccccacatcctgtgcagagt

SEQ ID NO: 158102 - DNA, 120 bp, Artificial Sequence
  ENSG00000106631_0 (sequence is synthesized)
gacagcagccacacctctgcagagagaatggccagcaggaaggcggggacccggggcaaggtggcagccaccaagcaggcccaacgtggttcttccaacgtcttttccatgtttgaacaa

SEQ ID NO: 158103 - DNA, 120 bp, Artificial Sequence
  ENSG00000106631_1 (sequence is synthesized)
gcccagatacaggagttcaaagaagccttcagctgtatcgaccagaatcgtgatggcatcatctgcaaggcagacctgagggagacctactcccagctggggaaggtgagtgtcccagag

SEQ ID NO: 158104 - DNA, 120 bp, Artificial Sequence
  ENSG00000106631_2 (sequence is synthesized)
gccatgctgcaagagggcaagggccccatcaacttcaccgtcttcctcacgctctttggggagaagctcaatgggacagaccccgaggaagccatcctgagtgccttccgcatgtttgac

SEQ ID NO: 158105 - DNA, 120 bp, Artificial Sequence
  ENSG00000106631_3 (sequence is synthesized)
cccagcggcaaaggggtggtgaacaaggatgagttcaagcagcttctcctgacccaggcagacaagttctctccagctgaggtggagcagatgttcgccctgacacccatggacctggcg

SEQ ID NO: 158106 - DNA, 120 bp, Artificial Sequence
  ENSG00000106631_4 (sequence is synthesized)
gggaacatcgactacaagtcactgtgctacatcatcacccatggagacgagaaagaggaatgaggggcagggccaggcccacgggggggcacctcaataaactctgttgcaaaattggaa

SEQ ID NO: 158107 - DNA, 120 bp, Artificial Sequence
  ENSG00000106631_5 (sequence is synthesized)
gccagcaggaaggcggggacccggggcaaggtggcagccaccaagcaggcccaacgtggttcttccaacgtcttttccatgtttgaacaagcccagatacaggagttcaaagaaagctgg

SEQ ID NO: 158108 - DNA, 120 bp, Artificial Sequence
  ENSG00000106631_6 (sequence is synthesized)
ggaaggcggggacccggggcaaggtggcagccaccaagcaggcccaacgtggttcttccaacgtcttttccatgtttgaacaagcccagatacaggagttcaaagaaggaaggtgagtgt

SEQ ID NO: 158109 - DNA, 120 bp, Artificial Sequence
  ENSG00000106631_7 (sequence is synthesized)
gcccagccagatgaggagcaccgtggtggaagcagagagcggggtgaggcccctagtgaggggggctgcctgtgcttcggggccttacactgctctttggggtgcagccaacccttccct

SEQ ID NO: 158110 - DNA, 120 bp, Artificial Sequence
  ENSG00000106631_8 (sequence is synthesized)
gacagcagccacacctctgcagagagaatggtgagtgcctgctggggaagaaaggctagcggtctcccaggtgctggcctttgggctgggggagcagagttttctgtgcttgtgttgggt

SEQ ID NO: 158111 - DNA, 120 bp, Artificial Sequence
  ENSG00000106631_9 (sequence is synthesized)
tgagggtggtccccagggagaggaagaggatcctggccctggctctcctgggaatgctctgggactgtgcatgatgggtggggtggggagactctgaggagttggggagaggacccctcc

SEQ ID NO: 158112 - DNA, 120 bp, Artificial Sequence
  ENSG00000106631_10 (sequence is synthesized)
gccagcaggaaggcggggacccggggcaaggtggcagccaccaagcaggcccaacgtggttcttccaacgtcttttccatgtttgaacaagcccagatacaggagttcaaagaagtctct

SEQ ID NO: 158113 - DNA, 120 bp, Artificial Sequence
  ENSG00000106631_11 (sequence is synthesized)
cttgcttccacttcaccttcccgacccacagctgcctctgcccctccagcccctgtggccaggatggagggagggcggcctgggccttctgggggacacccagggtccctgtgtgcacct

SEQ ID NO: 158114 - DNA, 120 bp, Artificial Sequence
  ENSG00000106631_12 (sequence is synthesized)
ttcaatactcatccccagcaccttctctgggccttcacccatgacccagagcccagtaccagtgaggcagttgctggaagggtggagcagatgttcgccctgacacccatggacctggcg

SEQ ID NO: 158115 - DNA, 120 bp, Artificial Sequence
  ENSG00000106633_0 (sequence is synthesized)
actccacacctggctggagcaggaaatgccgagcggcgcctgagccccagggaagcaggctaggatgtgagagacacagtcacctgcagcctaattactcaaaagctgtccccaggtcac

SEQ ID NO: 158116 - DNA, 120 bp, Artificial Sequence
  ENSG00000106633_1 (sequence is synthesized)
agaagggagaggacatttcccactgaatctgtctgaaggacactaagccccacagctcaacacaaccaggagagaaagcgctgaggacgccacccaagcgcccagcaatggccctgcctg

SEQ ID NO: 158117 - DNA, 120 bp, Artificial Sequence
  ENSG00000106633_2 (sequence is synthesized)
gagaacatccaggctcagtgaggaagggtccagaagggaatgcttgccgactcgttggagaacaatgaaaaggaggaaactgtgactgaacctcaaaccccaaaccagcccgaggagaac

SEQ ID NO: 158118 - DNA, 120 bp, Artificial Sequence
  ENSG00000106633_3 (sequence is synthesized)
cacattctcccagggacccagggcgggccgtgacccctgcggcggagaagccttggatatttccacttcagaagcctactggggaaggctgaggggtcccagctccccacgctggctgct

SEQ ID NO: 158119 - DNA, 120 bp, Artificial Sequence
  ENSG00000106633_4 (sequence is synthesized)
gtgcagatgctggacgacagagccaggatggaggccgccaagaaggagaaggtagagcagatcctggcagagttccagctgcaggaggaggacctgaagaaggtgatgagacggatgcag

SEQ ID NO: 158120 - DNA, 120 bp, Artificial Sequence
  ENSG00000106633_5 (sequence is synthesized)
aaggagatggaccgcggcctgaggctggagacccatgaagaggccagtgtgaagatgctgcccacctacgtgcgctccaccccagaaggctcagaagtcggggacttcctctccctggac

SEQ ID NO: 158121 - DNA, 120 bp, Artificial Sequence
  ENSG00000106633_6 (sequence is synthesized)
ctgggtggcactaacttcagggtgatgctggtgaaggtgggagaaggtgaggaggggcagtggagcgtgaagaccaaacaccagatgtactccatccccgaggacgccatgaccggcact

SEQ ID NO: 158122 - DNA, 120 bp, Artificial Sequence
  ENSG00000106633_7 (sequence is synthesized)
gctgagatgctcttcgactacatctctgagtgcatctccgacttcctggacaagcatcagatgaaacacaagaagctgcccctgggcttcaccttctcctttcctgtgaggcacgaagac

SEQ ID NO: 158123 - DNA, 120 bp, Artificial Sequence
  ENSG00000106633_8 (sequence is synthesized)
atcgataagggcatccttctcaactggaccaagggcttcaaggcctcaggagcagaagggaacaatgtcgtggggcttctgcgagacgctatcaaacggagaggggactttgaaatggat

SEQ ID NO: 158124 - DNA, 120 bp, Artificial Sequence
  ENSG00000106633_9 (sequence is synthesized)
gtggtggcaatggtgaatgacacggtggccacgatgatctcctgctactacgaagaccatcagtgcgaggtcggcatgatcgtgggcacgggctgcaatgcctgctacatggaggagatg

SEQ ID NO: 158125 - DNA, 120 bp, Artificial Sequence
  ENSG00000106633_10 (sequence is synthesized)
cagaatgtggagctggtggagggggacgagggccgcatgtgcgtcaataccgagtggggcgccttcggggactccggcgagctggacgagttcctgctggagtatgaccgcctggtggac

SEQ ID NO: 158126 - DNA, 120 bp, Artificial Sequence
  ENSG00000106633_11 (sequence is synthesized)
ctgctcttccacggggaggcctccgagcagctgcgcacacgcggagccttcgagacgcgcttcgtgtcgcaggtggagagcgacacgggcgaccgcaagcagatctacaacatcctgagc

SEQ ID NO: 158127 - DNA, 120 bp, Artificial Sequence
  ENSG00000106633_12 (sequence is synthesized)
acgctggggctgcgaccctcgaccaccgactgcgacatcgtgcgccgcgcctgcgagagcgtgtctacgcgcgctgcgcacatgtgctcggcggggctggcgggcgtcatcaaccgcatg

SEQ ID NO: 158128 - DNA, 120 bp, Artificial Sequence
  ENSG00000106633_13 (sequence is synthesized)
cgcgagagccgcagcgaggacgtaatgcgcatcactgtgggcgtggatggctccgtgtacaagctgcaccccagcttcaaggagcggttccatgccagcgtgcgcaggctgacgcccagc

SEQ ID NO: 158129 - DNA, 120 bp, Artificial Sequence
  ENSG00000106633_14 (sequence is synthesized)
tgcgagatcaccttcatcgagtcggaggagggcagtggccggggcgcggccctggtctcggcggtggcctgtaagaaggcctgtatgctgggccagtgagagcagtggccgcaagcgcag

SEQ ID NO: 158130 - DNA, 120 bp, Artificial Sequence
  ENSG00000106633_15 (sequence is synthesized)
ggaggatgccacagccccacagcacccaggctccatggggaagtgctccccacacgtgctcgcagcctggcggggcaggaggcctggccttgtcaggacccaggccgcctgccataccgc

SEQ ID NO: 158131 - DNA, 120 bp, Artificial Sequence
  ENSG00000106633_16 (sequence is synthesized)
tggggaacagagcgggcctcttccctcagtttttcggtgggacagccccagggccctaacgggggtgcggcaggagcaggaacagagactctggaagccccccacctttctcgctggaat

SEQ ID NO: 158132 - DNA, 120 bp, Artificial Sequence
  ENSG00000106633_17 (sequence is synthesized)
caatttcccagaagggagttgctcactcaggactttgatgcatttccacactgtcagagctgttggcctcgcctgggcccaggctctgggaaggggtgccctctggatcctgctgtggcc

SEQ ID NO: 158133 - DNA, 120 bp, Artificial Sequence
  ENSG00000106633_18 (sequence is synthesized)
tcacttccctgggaactcatcctgtgtggggaggcagctccaacagcttgaccagacctagacctgggccaaaagggcagccaggggctgctcatcacccagtcctggccattttcttgc

SEQ ID NO: 158134 - DNA, 120 bp, Artificial Sequence
  ENSG00000106633_19 (sequence is synthesized)
ctgaggctcaagaggcccagggagcaatgggagggggctccatggaggaggtgtcccaagctttgaatacccccagagaccttttctctcccataccatcactgagtggcttgtgattct

SEQ ID NO: 158135 - DNA, 120 bp, Artificial Sequence
  ENSG00000106633_20 (sequence is synthesized)
gggatggaccctcgcagcaggtgcaagagacagagcccccaagcctctgccccaaggggcccacaaaggggagaagggccagccctacatcttcagctcccatagcgctggctcaggaag

SEQ ID NO: 158136 - DNA, 120 bp, Artificial Sequence
  ENSG00000106633_21 (sequence is synthesized)
aaaccccaagcagcattcagcacaccccaagggacaaccccatcatatgacatgccaccctctccatgcccaacctaagattgtgtgggttttttaattaaaaatgttaaaagttttaaa

SEQ ID NO: 158137 - DNA, 120 bp, Artificial Sequence
  ENSG00000106633_22 (sequence is synthesized)
tctcggcggtggcctgactgtggggacaatctataaagagtctgcgtcacatgcatgaagacacttcagtatctcggcaatgccctccagacagctcctccagccatctgtgccaagggg

SEQ ID NO: 158138 - DNA, 120 bp, Artificial Sequence
  ENSG00000106633_23 (sequence is synthesized)
agtgtgaggagtgacagaccaggctgtaggaacaggaatggggtgtcatgggggatggcagagcagtggacagtacactgcctggcccgggcccctgcttgcctgcccatggaatgtgtg

SEQ ID NO: 158139 - DNA, 120 bp, Artificial Sequence
  ENSG00000106633_24 (sequence is synthesized)
cagagggagtgccaggccaggtgctgctctggagaagtgggggaatgaggctggtcctgctgcaggtcagtctcagcaccgtcctgtccagtcagagtcacttaggtttgccagtgagta

SEQ ID NO: 158140 - DNA, 120 bp, Artificial Sequence
  ENSG00000106633_25 (sequence is synthesized)
ggggcccagatacatgttggatttctaaggtccctccagatgctcctgtcagtggaacgcctatttagagttagccaagcgtaggcataatgccatctttctgcagcataaaatacagtg

SEQ ID NO: 158141 - DNA, 120 bp, Artificial Sequence
  ENSG00000106633_26 (sequence is synthesized)
aagccctgggctgccagcctcaggcagctctccatccaagcagccgttgctgccacaggcgggccttacgctccaaggctacagcatgtgctaggcctcagcaggcaggagcatctctgc

SEQ ID NO: 158142 - DNA, 120 bp, Artificial Sequence
  ENSG00000106633_27 (sequence is synthesized)
ctcccaaagcatctacctcttagcccctcggagagatggcgatggatgtcacaaggagccaggcccagacagccttgactctgccagactctcctctgaactcgggcctcacatggccaa

SEQ ID NO: 158143 - DNA, 120 bp, Artificial Sequence
  ENSG00000106633_28 (sequence is synthesized)
ctgctacttggaacaaatcgccccttggctggcagatgtgttaacatgcccagaccaagatcccaactcccacaacccaactcccaggtagagcagatcctggcagagttccagctgcag

SEQ ID NO: 158144 - DNA, 120 bp, Artificial Sequence
  ENSG00000106633_29 (sequence is synthesized)
tttatttaaattaaatacggaaggtcatagattaagcaagaaagtgccagcaacatggtgcgtgcctctgactgggcactaaccctccaagtcttagttttcccaaccataactggccaa

SEQ ID NO: 158145 - DNA, 120 bp, Artificial Sequence
  ENSG00000106633_30 (sequence is synthesized)
tttgtttccttcagatcataacccaaagttgtgattttgaaaagtcatgtcccccttcagatttcttgttttctgctacttctcatgtggaattgctttggctcttcttagttctcttga

SEQ ID NO: 158146 - DNA, 120 bp, Artificial Sequence
  ENSG00000106633_31 (sequence is synthesized)
gtctaaattattccttataagttggtgcaagcatctgattattttgttatcattactgttatgctcaagcattcacagagtggaacacattttaatatcaattgctttctatttctcctt

SEQ ID NO: 158147 - DNA, 120 bp, Artificial Sequence
  ENSG00000106633_32 (sequence is synthesized)
tatattacagttcaggacattgtattaattattaaaattctattcgtaggtaggttatatgactgaattgaaatagataaaatgaatttcttttctagataacaaaggaggtgtcataaa

SEQ ID NO: 158148 - DNA, 120 bp, Artificial Sequence
  ENSG00000106633_33 (sequence is synthesized)
ttctagataacaaaggaggtgtcataaaacacttgttatgggccagtgtgatggctcatgcctataatctcagtgctttgagaggctgaggtggaggattgcttgaggccaggaatttga

SEQ ID NO: 158149 - DNA, 120 bp, Artificial Sequence
  ENSG00000106633_34 (sequence is synthesized)
gggatgccaagagcagggatgggagcgagcctgcgtccgggcactggtccccatccgtgagtcccctcggtgctccctgcccgccgtggccatcctctcacatcactcacaaccccaagg

SEQ ID NO: 158150 - DNA, 120 bp, Artificial Sequence
  ENSG00000106633_35 (sequence is synthesized)
cgcggcatggttgacacccccacgttaggacggagaccctgggcttagttagagggggcagtactaaccagtccctggcggaaacgctttggctgggtgaggtgagcgggatcgccccca

SEQ ID NO: 158151 - DNA, 120 bp, Artificial Sequence
  ENSG00000106633_36 (sequence is synthesized)
tttctccagagaggggtcccggctcagcgagggaaagaggccgccgctggggggacggctggccggggcccctccctggagaacgagaggccgccgctggagggggatggactgtcggag

SEQ ID NO: 158152 - DNA, 120 bp, Artificial Sequence
  ENSG00000106633_37 (sequence is synthesized)
tgaacccttctttttgcttgcgttgttgaaagaaggcaagtctatggataggaatgagtgaggcacagctccctgaggatgccatatcttgcccgtttcttgtgtattaagtgacatcac

SEQ ID NO: 158153 - DNA, 120 bp, Artificial Sequence
  ENSG00000106633_38 (sequence is synthesized)
gtgttaccaaactaaaccggctgcatttgcctgcgcacaacataaaaccaaacacccaagcattggatttttgtagcaagaaagatgtattgccaagcagccttgcaaggggacagaaga

SEQ ID NO: 158154 - DNA, 120 bp, Artificial Sequence
  ENSG00000106633_39 (sequence is synthesized)
cgggctggacggtgattggctgaaacgaagaagtgtttagaaaatctcttggtcatgagctgttgcttcttcatgctgcttcaagggtcacatgcagattcaggaggtggtataaaacaa

SEQ ID NO: 158155 - DNA, 120 bp, Artificial Sequence
  ENSG00000106633_40 (sequence is synthesized)
gctgtgggaatttgggctgtgacatcaaagggccgctcctcgggctagtagagcagatcctggcagagttccagctgcaggaggaggacctgaagaaggtgatgagacggatgcagaagg

SEQ ID NO: 158156 - DNA, 80 bp, Artificial Sequence
  ENSG00000106635_0 (sequence is synthesized)
gcggcgcgtgaggcgcgcgatccccggtgtcttgggagcagtgccccggcccccgccgctcccgccgccgccatgtcggg

SEQ ID NO: 158157 - DNA, 120 bp, Artificial Sequence
  ENSG00000106635_1 (sequence is synthesized)
ccggtcggtccgggcggagacccgcagccgggccaaggacgacatcaagaaggtgatggcggccatcgagaaagtgcggaaatgggagaagaagtgggtgactgtgggtgacacgtccct

SEQ ID NO: 158158 - DNA, 120 bp, Artificial Sequence
  ENSG00000106635_2 (sequence is synthesized)
gaggatatttaagtgggttcctgtgacagacagcaaggagaaagaaaagtcaaaatcgaacagttcagcagcccgagaacctaatggctttccttctgatgcctcagccaattcctctct

SEQ ID NO: 158159 - DNA, 120 bp, Artificial Sequence
  ENSG00000106635_3 (sequence is synthesized)
ccttcttgaattccaggacgaaaacagcaaccagagttccgtgtctgacgtctatcagcttaaggtggacagcagcaccaactcaagccccagcccccagcagagtgagtccctgagccc

SEQ ID NO: 158160 - DNA, 120 bp, Artificial Sequence
  ENSG00000106635_4 (sequence is synthesized)
agcacacacctccgacttccgcacggatgactcccagcccccaacgctgggccaggagatcctggaggagccctccctgccctcctcggaagttgctgatgaacctcctaccctcaccaa

SEQ ID NO: 158161 - DNA, 120 bp, Artificial Sequence
  ENSG00000106635_5 (sequence is synthesized)
ggaagaaccagttccactagagacacaggtcgttgaggaagaggaagactcaggtgccccgcccctgaagcgcttctgtgtggaccaacccacagtgccgcagacggcgtcagaaagcta

SEQ ID NO: 158162 - DNA, 120 bp, Artificial Sequence
  ENSG00000106635_6 (sequence is synthesized)
cctgcacacatgagccttccgggctggaaggctggcgtaggacttggggctgtagcatcatcttcctgaccctggcacctgtgtctacttgctcccgagaagaggagcgctcatgtcttt

SEQ ID NO: 158163 - DNA, 120 bp, Artificial Sequence
  ENSG00000106635_7 (sequence is synthesized)
tttgcaccccaagttggctggagcatcggccaccccaagattcatctgtgacctccaggcagcagtctctgctccagaatctctggacggagctgctggcagcttctgcgagaagagaga

SEQ ID NO: 158164 - DNA, 120 bp, Artificial Sequence
  ENSG00000106635_8 (sequence is synthesized)
gatgtggaaggcaccttctagaagagagcgtgcctcaggttacttgaacttgaacggagactgtagactcccggactttcccctaggactgggggccctgtaggctgctgttggaggact

SEQ ID NO: 158165 - DNA, 120 bp, Artificial Sequence
  ENSG00000106635_9 (sequence is synthesized)
gggtagagacattggagggaagggaagggcttttctccacacaagggcagagagtccgtctagatttcttgctgtcctgccagctctgcccatgcctgaggtggtcctacctctcacggg

SEQ ID NO: 158166 - DNA, 120 bp, Artificial Sequence
  ENSG00000106635_10 (sequence is synthesized)
caccctagctgctgacagccctttgtggccgccgtccccatcccctgccctcagcacacacatctgcacacacgcagctttgttctcacctctacctgtcattccagcatccctgcctct

SEQ ID NO: 158167 - DNA, 120 bp, Artificial Sequence
  ENSG00000106635_11 (sequence is synthesized)
tgtcacaaactgccccagcaagaatttgaggttctgacaacagtacccatcccccacagtaccccttcagctcagtttctagaaagctcccttttctttgaaatctgcatgttgaattga

SEQ ID NO: 158168 - DNA, 120 bp, Artificial Sequence
  ENSG00000106635_12 (sequence is synthesized)
actttgtgattttattttttgtttcaaaaaagtttaagaaaatggaaatgggcaacagtgagtgaagacatattttagcactgaatagaatatttttaaaattaaactatttgaaatatg

SEQ ID NO: 158169 - DNA, 120 bp, Artificial Sequence
  ENSG00000106635_13 (sequence is synthesized)
gctgcctggcgtcggtgcccgcgcccggcccagcccggggcccgccctcccctcttcctgggcagtggccccgcctgcgtttccaggcttcctcttgataatagcgagtagccctggagt

SEQ ID NO: 158170 - DNA, 120 bp, Artificial Sequence
  ENSG00000106635_14 (sequence is synthesized)
cacacctccgacttccgcacggatgactcccagcccccaacgctgggccaggagatcctggaggatatctccagcccagcagagatggccctctgcagtctagccgtattttgcccttcc

SEQ ID NO: 158171 - DNA, 120 bp, Artificial Sequence
  ENSG00000106635_15 (sequence is synthesized)
accattcttggctgtgacctggtccagctgggccctgaatgaatgtttgcttctcaggccagtattctcccctcctcaccaagccacctccacacagctctaaggaagctcccccaggtc

SEQ ID NO: 158172 - DNA, 120 bp, Artificial Sequence
  ENSG00000106635_16 (sequence is synthesized)
ttctgctcttgttgtgtctcgtctttagagtaacaggctcgagagagcacctcagagccaggcagcaccaagccctttctcgatagcttaggaatgattatagtttcccctttcacagag

SEQ ID NO: 158173 - DNA, 120 bp, Artificial Sequence
  ENSG00000106635_17 (sequence is synthesized)
gtgagccaccgtgcctggcctcggcctggtaactcttaagttttgcaccttgatggtgactttaagccttcaggcagaactcccaggtgctaatccgtcagtccggcagccgaagcctga

SEQ ID NO: 158174 - DNA, 120 bp, Artificial Sequence
  ENSG00000106635_18 (sequence is synthesized)
gctcaccaccttcagacaccaccagcctccttcagatgcccaaggatgcctgacaaatgtcattttctacacatcttatgatgtgagaaggattgagaagtactgaccagagacacagct

SEQ ID NO: 158175 - DNA, 120 bp, Artificial Sequence
  ENSG00000106635_19 (sequence is synthesized)
acatccctcccttccacaagctgcaatcagtggataataaagaagagtttaataagcatatcctgaccttcctaaagtgtaatgttgcataaacataaagattctggctgcctctggtgc

SEQ ID NO: 158176 - DNA, 120 bp, Artificial Sequence
  ENSG00000106635_20 (sequence is synthesized)
ttagaatctatgtcgtgtaggccgggcacaatgattattatactcagttgtatccttggctgcctaaagtgatgccaggcccttggctctgtccagagttcctcttgaggaaaatgacca

SEQ ID NO: 158177 - DNA, 120 bp, Artificial Sequence
  ENSG00000106635_21 (sequence is synthesized)
agtgtatgtatctgcctgttgcttatgattcacagtattcctgctggaagggttcatttttctgaggcttgaggagaagttgcttgtccaggattctgttcttccttgggtccttggatt

SEQ ID NO: 158178 - DNA, 120 bp, Artificial Sequence
  ENSG00000106635_22 (sequence is synthesized)
ctcacgctgctgtcgtttttcctgttcagtcctaatccagacctctgtggtctgtcacatagcaccctcctccctctctgtgagtctcctgcttggctctgtcatattcctctttttttc

SEQ ID NO: 158179 - DNA, 120 bp, Artificial Sequence
  ENSG00000106636_0 (sequence is synthesized)
ggattgcgagccaggaggaggaagccggcggtggccccgtcagcagccggctgctgagaggccggtaggcggcggcggtcccgaggggcggcggccgcgctgctccctgagaacgggtcc

SEQ ID NO: 158180 - DNA, 120 bp, Artificial Sequence
  ENSG00000106636_1 (sequence is synthesized)
cgcagctgggcaggcgggcggcctgagggcgcggagccatgaagctgtacagcctcagcgtcctctacaaaggcgaggccaaggtggtgctgctcaaagccgcatacgatgtgtcttcct

SEQ ID NO: 158181 - DNA, 120 bp, Artificial Sequence
  ENSG00000106636_2 (sequence is synthesized)
tcagctttttccagagatccagcgttcaggaattcatgaccttcacgagtcaactgattgtggagcgctcatcgaaaggcactagagcttctgtcaaagaacaagactatctgtgccacg

SEQ ID NO: 158182 - DNA, 120 bp, Artificial Sequence
  ENSG00000106636_3 (sequence is synthesized)
tctacgtccggaatgatagtcttgcaggtgtggtcattgctgacaatgaatacccatcccgggtggcctttaccttgctggagaaggtactagatgaattctccaagcaagtcgacagga

SEQ ID NO: 158183 - DNA, 120 bp, Artificial Sequence
  ENSG00000106636_4 (sequence is synthesized)
tagactggccagtaggatcccctgctacaatccattacccagccctggatggtcacctcagtagataccagaacccacgagaagctgatcccatgactaaagtgcaggccgaactagatg

SEQ ID NO: 158184 - DNA, 120 bp, Artificial Sequence
  ENSG00000106636_5 (sequence is synthesized)
agaccaaaatcattctgcacaacaccatggagtctctgttagagcgaggtgagaagctagatgacttggtgtccaaatccgaggtgctgggaacacagtctaaagccttctataaaactg

SEQ ID NO: 158185 - DNA, 120 bp, Artificial Sequence
  ENSG00000106636_6 (sequence is synthesized)
cccggaaacaaaactcatgctgtgccatcatgtgatgcagcctgccagaggcccaatgctggaatggcaccatcattcacatcagaactgcagcccctggaaaagaagagacagccatag

SEQ ID NO: 158186 - DNA, 120 bp, Artificial Sequence
  ENSG00000106636_7 (sequence is synthesized)
acgaggagccagagtgggggcagactggccatttttattttgaagttcctgcgagaaatggatggtggaagggtggcgaatgttcaaattcatatgtgtggtagtgattcttggaaagaa

SEQ ID NO: 158187 - DNA, 120 bp, Artificial Sequence
  ENSG00000106636_8 (sequence is synthesized)
tttgaggtccccaaaggtgtatttttgggcaaatgaaaccataaactccgactggcttctgtagatgccaaagggctctttttcagctaaccctgggaaggctctgtgggagggaggtcg

SEQ ID NO: 158188 - DNA, 120 bp, Artificial Sequence
  ENSG00000106636_9 (sequence is synthesized)
gagccagctgtttctcgatctttggtatatctttggatcttatttgtacattaatgatattaacactccagtggggggtggggagtccctgatgctagggctggggtgggtggagtttga

SEQ ID NO: 158189 - DNA, 120 bp, Artificial Sequence
  ENSG00000106636_10 (sequence is synthesized)
agactcttgggaaagcctctcctggggccactgttgggggtgggagtgagcccaccacagaggccacaggcaggcccccacttcaggcccaaggcctggggcggggggaacagtcactgg

SEQ ID NO: 158190 - DNA, 120 bp, Artificial Sequence
  ENSG00000106636_11 (sequence is synthesized)
attctgagactgttgtttagcttacctttctgctaggattggcttcccgcagagggcagggcccatcctaagcagcttccaagtcccacaaaggtggcttgtgggaggatttggaaggag

SEQ ID NO: 158191 - DNA, 120 bp, Artificial Sequence
  ENSG00000106636_12 (sequence is synthesized)
ctgcattgtgggcggggagtgtgtgggttgggttcgtaccagcaagtagactaggaactgagcccaggaaagggggatgttttcctggtgtttggatggtcagctgggagtgtccatcat

SEQ ID NO: 158192 - DNA, 120 bp, Artificial Sequence
  ENSG00000106636_13 (sequence is synthesized)
caggggaagatcaaacacaggtgcactcagctgcccagggcctctgggacacttgccttgacttgcaacttgccttgaacatcacgatcaaagcagcaggtgctgtggtctctcaaaatt

SEQ ID NO: 158193 - DNA, 120 bp, Artificial Sequence
  ENSG00000106636_14 (sequence is synthesized)
gatttttatttgactctgtggctctaagactgccttgaaccgcctgaggcctatgcatctgaacaagtgggtctctcccttgagcaccaggagtgggtgccagccggccccgaggattcc

SEQ ID NO: 158194 - DNA, 120 bp, Artificial Sequence
  ENSG00000106636_15 (sequence is synthesized)
cagcaccccacctatggtcttgccagcataggcttgctagttccttcttggtcagaggtagctgcagaggggggaggccaagggtttggtctaagctgtgccctgccacctggcaggagg

SEQ ID NO: 158195 - DNA, 120 bp, Artificial Sequence
  ENSG00000106636_16 (sequence is synthesized)
cccactcactgcccaagtcatggcaacaggctggagcagcccaggagatgggcctaaaatgttctggatcccttgggtcctagtgttatgttccagtctgcccacctgtgctcaggatgc

SEQ ID NO: 158196 - DNA, 120 bp, Artificial Sequence
  ENSG00000106636_17 (sequence is synthesized)
agccctgggatccagcacccatggaagcttctgctgggatggtgtcacctatgggttttgaaccagtgtggtatggtccttgggagctctgctctgagcttgccacactgctgagagcac

SEQ ID NO: 158197 - DNA, 120 bp, Artificial Sequence
  ENSG00000106636_18 (sequence is synthesized)
ccactgtcctgaccagagtctcagtggtcctgacccccaatgtgggcaggggctgggcaggagggtggggtctgctgtgggttcagaggactccacctcctggctggtttacctgctgct

SEQ ID NO: 158198 - DNA, 120 bp, Artificial Sequence
  ENSG00000106636_19 (sequence is synthesized)
gcccattttctctgggtactgctggccagaggactttagcctacccctgaagagcctgtccatgtcattttcctactgccatagataccctaagcccagggccccttgaggcccagactc

SEQ ID NO: 158199 - DNA, 120 bp, Artificial Sequence
  ENSG00000106636_20 (sequence is synthesized)
agcctgcccactggtgccggagacggagtggagtgggcctggatccgagggatgctacctctccctttcccacttgaggaccctggggagagatgggggcggggaaaatggaggtatgaa

SEQ ID NO: 158200 - DNA, 120 bp, Artificial Sequence
  ENSG00000106636_21 (sequence is synthesized)
tttggggtaagaggaagtgagatctccgcttgcaggtcagcccctgccttgcagggcgggctggcttgactcaggccctgtgagatagagggcccagcccagccccacccacagatcccc

SEQ ID NO: 158201 - DNA, 120 bp, Artificial Sequence
  ENSG00000106636_22 (sequence is synthesized)
tgctcctgttgtgttctgttgtaaatcatttggcgagactgtattttagtaactgctgcctaacttccctgtgttctatttgagaggcgcctgtctggataaagttgtcttgaaatttca

SEQ ID NO: 158202 - DNA, 120 bp, Artificial Sequence
  ENSG00000106636_23 (sequence is synthesized)
atataaatgtgtgtgtatatatatatatgagttttcctggagtgctggttatctaagcctgtgctggggacagctttttgggaagtctgctacatcccagttagatcttctagatttcac

SEQ ID NO: 158203 - DNA, 120 bp, Artificial Sequence
  ENSG00000106636_24 (sequence is synthesized)
gggaatgtcaccaggttctgttccatccacttggacagtaactattcttggaccgagtctcgacacctagaggtgaagtttgtgtgtgttggagaggaacccaggtaaggcactttcccc

SEQ ID NO: 158204 - DNA, 120 bp, Artificial Sequence
  ENSG00000106636_25 (sequence is synthesized)
agcccaagaactgaggcgggggtgcgatttccactggccaggcatgcacagatccatcctcgttttaatataatagtaaccacggcactctccagcaagtgggattgcccaccccttccc

SEQ ID NO: 158205 - DNA, 120 bp, Artificial Sequence
  ENSG00000106636_26 (sequence is synthesized)
ccaccccgggcatcagactgtctttcctatacccttctcttggttaatggcacccattgtttctaggggaccaagctgggaaccagtggaaccctcaagtctcccttcctcatggctact

SEQ ID NO: 158206 - DNA, 120 bp, Artificial Sequence
  ENSG00000106636_27 (sequence is synthesized)
gcctgtctgaccatttactgggttcctagggtttggcttctgaagacctggattcccaccctggtgcctttgttagggtttcgggtgcctccacaccccacaggtgcctccccttgcagc

SEQ ID NO: 158207 - DNA, 120 bp, Artificial Sequence
  ENSG00000106636_28 (sequence is synthesized)
ttgaaggtgaacagattgaagcaccgtgcactgaccacagggcagcttctggaatatgggcccagggttgtcacataggcccctttgaaaagagccagaaccctgcattttgagctgaaa

SEQ ID NO: 158208 - DNA, 120 bp, Artificial Sequence
  ENSG00000106636_29 (sequence is synthesized)
ccacgagaagctgatcccatgactaaagtgcaggccgaactagatgagaccaaaatcattctggttctgttccatccacttggacagtaactattcttggaccgagtctcgacacctaga

SEQ ID NO: 158209 - DNA, 120 bp, Artificial Sequence
  ENSG00000106638_0 (sequence is synthesized)
actagctgaggtggcagtggttccaccaacatggagctctcgcagatgtcggagctcatggggctgtcggtgttgcttgggctgctggccctgatggcgacggcggcggtagcgcggggg

SEQ ID NO: 158210 - DNA, 120 bp, Artificial Sequence
  ENSG00000106638_1 (sequence is synthesized)
tggctgcgcgcgggggaggagaggagcggccggcccgcctgccaaaaagcaaatggatttccacctgacaaatcttcgggatccaagaagcagaaacaatatcagcggattcggaaggag

SEQ ID NO: 158211 - DNA, 120 bp, Artificial Sequence
  ENSG00000106638_2 (sequence is synthesized)
aagcctcaacaacacaacttcacccaccgcctcctggctgcagctctgaagagccacagcgggaacatatcttgcatggactttagcagcaatggcaaatacctggctacctgtgcagat

SEQ ID NO: 158212 - DNA, 120 bp, Artificial Sequence
  ENSG00000106638_3 (sequence is synthesized)
gatcgcaccatccgcatctggagcaccaaggacttcctgcagcgagagcaccgcagcatgagagccaacgtggagctggaccacgccaccctggtgcgcttcagccctgactgcagagcc

SEQ ID NO: 158213 - DNA, 120 bp, Artificial Sequence
  ENSG00000106638_4 (sequence is synthesized)
ttcatcgtctggctggccaacggggacaccctccgtgtcttcaagatgaccaagcgggaggatgggggctacaccttcacagccaccccagaggacttccctaaaaagcacaaggcgcct

SEQ ID NO: 158214 - DNA, 120 bp, Artificial Sequence
  ENSG00000106638_5 (sequence is synthesized)
gtcatcgacattggcattgctaacacagggaagtttatcatgactgcctccagtgacaccactgtcctcatctggagcctgaagggtcaagtgctgtctaccatcaacaccaaccagatg

SEQ ID NO: 158215 - DNA, 120 bp, Artificial Sequence
  ENSG00000106638_6 (sequence is synthesized)
aacaacacacacgctgctgtatctccctgtggcagatttgtagcctcgtgtggcttcaccccagatgtgaaggtttgggaagtctgctttggaaagaagggggagttccaggaggtggtg

SEQ ID NO: 158216 - DNA, 120 bp, Artificial Sequence
  ENSG00000106638_7 (sequence is synthesized)
cgagccttcgaactaaagggccactccgcggctgtgcactcgtttgctttctccaacgactcacggaggatggcttctgtctccaaggatggtacatggaaactgtgggacacagatgtg

SEQ ID NO: 158217 - DNA, 120 bp, Artificial Sequence
  ENSG00000106638_8 (sequence is synthesized)
gaatacaagaagaagcaggacccctacttgctgaagacaggccgctttgaagaggcggcgggtgccgcgccgtgccgcctggccctctcccccaacgcccaggtcttggccttggccagt

SEQ ID NO: 158218 - DNA, 120 bp, Artificial Sequence
  ENSG00000106638_9 (sequence is synthesized)
ggcagtagtattcatctctacaatacccggcggggcgagaaggaggagtgctttgagcgggtccatggcgagtgtatcgccaacttgtcctttgacatcactggccgctttctggcctcc

SEQ ID NO: 158219 - DNA, 120 bp, Artificial Sequence
  ENSG00000106638_10 (sequence is synthesized)
tgtggggaccgggcggtgcggctgtttcacaacactcctggccaccgagccatggtggaggagatgcagggccacctgaagcgggcctccaacgagagcacccgccagaggctgcagcag

SEQ ID NO: 158220 - DNA, 120 bp, Artificial Sequence
  ENSG00000106638_11 (sequence is synthesized)
cagctgacccaggcccaagagaccctgaagagcctgggtgccctgaagaagtgactctgggagggcccggcgcagaggattgaggaggagggatctggcctcctcatggcactgctgcca

SEQ ID NO: 158221 - DNA, 120 bp, Artificial Sequence
  ENSG00000106638_12 (sequence is synthesized)
tctttcctcccaggtggaagcctttcagaaggagtctcctggttttcttactggtggccctgcttcttcccattgaaactactcttgtctacttaggtctctctcttcttgctggctgtg

SEQ ID NO: 158222 - DNA, 120 bp, Artificial Sequence
  ENSG00000106638_13 (sequence is synthesized)
actcctccctgactagtggccaaggtgcttttcttcctcccaggcccagtgggtggaatctgtccccacctggcactgaggagaatggtagagaggagaggagagagagagagaatgtga

SEQ ID NO: 158223 - DNA, 120 bp, Artificial Sequence
  ENSG00000106638_14 (sequence is synthesized)
tttttggccttgtggcagcacatcctcacacccaaagaagtttgtaaatgttccagaacaacctagagaacacctgagtactaagcagcagttttgcaaggatgggagactgggatagct

SEQ ID NO: 158224 - DNA, 120 bp, Artificial Sequence
  ENSG00000106638_15 (sequence is synthesized)
tcccatcacagaactgtgttccatcaaaaagacactaagggatttccttctgggcctcagttctatttgtaagatggagaataatcctctctgtgaactccttgcaaagatgatatgagg

SEQ ID NO: 158225 - DNA, 120 bp, Artificial Sequence
  ENSG00000106638_16 (sequence is synthesized)
ctaagagaatatcaagtccccaggtctggaagaaaagtagaaaagagtagtactattgtccaatgtcatgaaagtggtaaaagtgggaaccagtgtgctttgaaaccaaattagaaacac

SEQ ID NO: 158226 - DNA, 120 bp, Artificial Sequence
  ENSG00000106638_17 (sequence is synthesized)
attccttgggaaggcaaagttttctgggacttgatcatacattttatatggttgggacttctctcttcgggagatgatatcttgtttaaggagacctcttttcagttcatcaagttcatc

SEQ ID NO: 158227 - DNA, 120 bp, Artificial Sequence
  ENSG00000106638_18 (sequence is synthesized)
cccaaataaatatgagctggggattaaatacgaataagacatggtttctgccatcaaagatggctggtgggagagagagatacacccttattaagtgctttgtgttagtttattcatagc

SEQ ID NO: 158228 - DNA, 120 bp, Artificial Sequence
  ENSG00000106638_19 (sequence is synthesized)
tattgttatatatgtcaaggcaagagaggaccagagcaggacagaggcaatgggtattgaagttgaaggggtacatttgataagagagtcggtattgagaagtttaaatttgtgaatttg

SEQ ID NO: 158229 - DNA, 120 bp, Artificial Sequence
  ENSG00000106638_20 (sequence is synthesized)
aaggctgcgtgggtgtggcaggtaagggaaatgaggtatctgggaaggcttgagtgtaggcaaatttattcatcccaagtcaaactcttgatctctctcacgaaaactatgaccccccct

SEQ ID NO: 158230 - DNA, 120 bp, Artificial Sequence
  ENSG00000106638_21 (sequence is synthesized)
ggttgcccctgacctctcaatgttggaacaagccacaaccgtggagttatccttgatgactccccattcattatcccttctgtcccaccaccacagctgtcatctgttcaccagaacgtt

SEQ ID NO: 158231 - DNA, 120 bp, Artificial Sequence
  ENSG00000106638_22 (sequence is synthesized)
cttttggttacactccatgtgacatcctgaggctgttgcttctctccagcttttctgttaccatcctggtcctggctactgtcacctagtgggccactataatatggcttcctaatggat

SEQ ID NO: 158232 - DNA, 120 bp, Artificial Sequence
  ENSG00000106638_23 (sequence is synthesized)
cttcctgcttcctctgttgcctcattacttttctatatagcagaatgatcttttgaaaatgtgaaccagatcacattattccctagttaaaaccccccaaggcttcccatcacacttgga

SEQ ID NO: 158233 - DNA, 120 bp, Artificial Sequence
  ENSG00000106638_24 (sequence is synthesized)
ccaaggcttcccatcacacttggaataaaatccaaaagaatttttctaaaccaaaaatagtaaaaacaattttttttttctgacaatctcttgtcacccaggctggagtacaatggcgca

SEQ ID NO: 158234 - DNA, 71 bp, Artificial Sequence
  ENSG00000106638_25 (sequence is synthesized)
ccagctaaaaacacttaatccaaaattcttaccatggcctgcaaggtcctgtgtaacctggcttcgtcccc

SEQ ID NO: 158235 - DNA, 120 bp, Artificial Sequence
  ENSG00000106638_26 (sequence is synthesized)
ccatggcctgcaaggtcctgtgtaacctggcttcgtcccccctctaaatgctatgaatgtcagatgggcaccgtaaatgtgtgaagggtcagttacctgggtgtaaggcagtagaaggtg

SEQ ID NO: 158236 - DNA, 120 bp, Artificial Sequence
  ENSG00000106638_27 (sequence is synthesized)
gggacagaagtgagctggagggcgggcttgtgtcctgcctgcaggatggggggtggctgctacttattcaggaatccagcagaaattgcttcacagaagctagaagtgagcaacttaaat

SEQ ID NO: 158237 - DNA, 120 bp, Artificial Sequence
  ENSG00000106638_28 (sequence is synthesized)
aactaaacactatctggaccaaacaaaacactaaggtcggcccgatgcagtccactactctcttattggcagcttctggctcactgttgaacccactggaatgagagcaccaccgggcag

SEQ ID NO: 158238 - DNA, 120 bp, Artificial Sequence
  ENSG00000106638_29 (sequence is synthesized)
actcctggaccatcccactgtcagctctgtggtccaggcacagtacctgggacagtgtaagcactcaatgtgaaactcaagccaggggcaagccacagacctcccagtatcttctccgcg

SEQ ID NO: 158239 - DNA, 120 bp, Artificial Sequence
  ENSG00000106638_30 (sequence is synthesized)
catcttcccactcccagtctccattgtggttttgtatgttcctaaccacagacttttggcaatgctgtgcacacaaggcctgaggagtatttccttggcaattgtcagaagaatgagact

SEQ ID NO: 158240 - DNA, 120 bp, Artificial Sequence
  ENSG00000106638_31 (sequence is synthesized)
aaaacacttcctttgcgcacctgttcttagaagcagctctggcattactcccgttgtgtatccaggacaggaagtggcagtagaatgttgagttactgaagtcagatgtcttcagttcca

SEQ ID NO: 158241 - DNA, 120 bp, Artificial Sequence
  ENSG00000106638_32 (sequence is synthesized)
gttccagctggagagcagatagtaggtccgttgacctctctgagcttgtttcctcagctgcaaaataagaatgaatcctgtgctacccaccttgccatgttgtgtttcagtgagacgaga

SEQ ID NO: 158242 - DNA, 120 bp, Artificial Sequence
  ENSG00000106638_33 (sequence is synthesized)
aaacactaccaaaaagtcattccacagacttctgaggacagaaagtgccctcactcaagcttctcttgtaaccacagagaaggtgtctggatattaacatagagcagaggccaccaaggt

SEQ ID NO: 158243 - DNA, 120 bp, Artificial Sequence
  ENSG00000106638_34 (sequence is synthesized)
ttttcttttttttaatcaaaaatcctgcatgtgaaggcagtaattgtatcttaatattataatttcaacatctgtgggtgtgaaatttttcaaaaaaaaaatttggggaaatattttaaa

SEQ ID NO: 158244 - DNA, 120 bp, Artificial Sequence
  ENSG00000106638_35 (sequence is synthesized)
tggagagaaggaagcagaggacagattgtggctgtgtttgtttgcagggcccaggagcttttttcctgttggaattggggagcatctgcagtcatttaccacatgccagctttgtgactc

SEQ ID NO: 158245 - DNA, 120 bp, Artificial Sequence
  ENSG00000106638_36 (sequence is synthesized)
aattaagtatcttttacaaaagtgactggctccactcccccgcacaggactcaacagatgttgacttctcatccccgagttctttcaggccaaaaagcaaatggatttccacctgacaaa

SEQ ID NO: 158246 - DNA, 120 bp, Artificial Sequence
  ENSG00000106638_37 (sequence is synthesized)
tcttcagcctgctccgtggccgcgatctcggaaaaagcaccaattctgtgatgtgcagcagcatttactgggcatctatgaccctgtgataggctttggggtctttttctgtaaggagtc

SEQ ID NO: 158247 - DNA, 120 bp, Artificial Sequence
  ENSG00000106638_38 (sequence is synthesized)
gtctaccatcaacaccaaccagatgaacaacacacacgctgctgtatctccctgtggcaggttggagtgcaatggcaggatcttggctcaccacaacctccgtctcccgggttcaagcga

SEQ ID NO: 158248 - DNA, 120 bp, Artificial Sequence
  ENSG00000106638_39 (sequence is synthesized)
ggccgggtcgggtgggggcggcccgcggtgtcccggctcccggcctcctcgtggtccgacctgcggtttgggcccgcggctggtggggcccggcgactccatgggcctcagtttctcctc

SEQ ID NO: 158249 - DNA, 120 bp, Artificial Sequence
  ENSG00000106638_40 (sequence is synthesized)
gacctgcggtttgggcccgcggctggtggggcccggcgactccatgggcctcagtttctcctctggtaacgtgagcttcgcttccagagacggggacccgccttgccgggccaaaaagca

SEQ ID NO: 158250 - DNA, 120 bp, Artificial Sequence
  ENSG00000106638_41 (sequence is synthesized)
attgctaacacaggtaagaggcattcagagggtggcgcctgcccaaagcatgaaggaaagatccagttctatttcctcaatgagttaatgctgcctgaaagttctgctcaacctgagagg

SEQ ID NO: 158251 - DNA, 120 bp, Artificial Sequence
  ENSG00000106638_42 (sequence is synthesized)
aacaaggggtccctggctctgaacagcctggctctgtgctcccctggagtccctgggccacaccaggtccctagggaaggtggggaagggccacagtcttcagcagagtccttatctgta

SEQ ID NO: 158252 - DNA, 120 bp, Artificial Sequence
  ENSG00000106638_43 (sequence is synthesized)
gactccatgggcctcagtttctcctctggtaacgtgagcttcgcttccagagacggggacccgccttgccgggttaggcgcacctcctggggcgggactggctccaacctgggcccctta

SEQ ID NO: 158253 - DNA, 120 bp, Artificial Sequence
  ENSG00000106638_44 (sequence is synthesized)
ctgcgcgcgggggaggagaggagcggccggcccgcctgtgggcagtaaatgcttatcagtgagtaactggagaacaacatggcccttccttataggccaaaaagcaaatggatttccacc

SEQ ID NO: 158254 - DNA, 120 bp, Artificial Sequence
  ENSG00000106638_45 (sequence is synthesized)
cggcctcctcgtggtccgacctgcggtttgggcccgcggctggtggggcccggcgactccatgggcctcagtttctcctctgggcccaggagcttttttcctgttggaattggggagcat

SEQ ID NO: 158255 - DNA, 120 bp, Artificial Sequence
  ENSG00000106638_46 (sequence is synthesized)
gagcggccggcccgcctggtcttgctctgtcactcaggatggaatgcagtagtgttgtgatcatagcttactgcagcctcgaactcctgggctcaaatgatccaaagcattgggattaca

SEQ ID NO: 158256 - DNA, 120 bp, Artificial Sequence
  ENSG00000106638_47 (sequence is synthesized)
ggcatgagccaccatacccagccagccaaagcctctgtttttgcccatatcacactcattctcctccagaagacaagggccatatctggttaatctcctgctgttccactcaatgcctgg

SEQ ID NO: 158257 - DNA, 120 bp, Artificial Sequence
  ENSG00000106648_0 (sequence is synthesized)
agcacaaccaggtatctgcttggaacccagccaccataaagcctgctagctaaaaaaaattttacatctctcagttcattcggcacagacccctgcctcattcagctgtgactctgcttg

SEQ ID NO: 158258 - DNA, 120 bp, Artificial Sequence
  ENSG00000106648_1 (sequence is synthesized)
gaaaattcatcagttacaaagcagccaatgcaattatctcaagggaaattgaaaaatggacctttgaaaatgctagatttacaatgagaaatgccataattcaaggtttattctatgggt

SEQ ID NO: 158259 - DNA, 120 bp, Artificial Sequence
  ENSG00000106648_2 (sequence is synthesized)
ccttgacatttgggatctggacagctctgttattcatatatttgcaccataatcatgtgagcagctggcagaagaaaagccaggagcctctgtcagcttggtcccctggaaaaaaagtgc

SEQ ID NO: 158260 - DNA, 120 bp, Artificial Sequence
  ENSG00000106648_3 (sequence is synthesized)
atcagcaaattatctatggctcagagcaaataccaaaacctcatgtaatagtcaaaaggactgatgaagataaagcaaagtctatgttaggtacagattttaaccatacaaacccagaac

SEQ ID NO: 158261 - DNA, 120 bp, Artificial Sequence
  ENSG00000106648_4 (sequence is synthesized)
ttcataaagaacttttaaaatatggatttaatgtgattatcagtagaagcttgggcatcgaaagagaagtgccagataccaggagtaaaatgtgtcttcaaaaacattacccagcccgcc

SEQ ID NO: 158262 - DNA, 120 bp, Artificial Sequence
  ENSG00000106648_5 (sequence is synthesized)
tcccgactgccagcattgtcatttgcttctataatgaagaatgtaatgccttgtttcagaccatgtccagtgtcacgaacctcacgccacactattttcttgaagaaattattttggtag

SEQ ID NO: 158263 - DNA, 120 bp, Artificial Sequence
  ENSG00000106648_6 (sequence is synthesized)
gattcgagcaaggctgattggagcttctcatgcttcaggggatgttctggtgttcctggacagccactgtgaggtgaacagagtatggctggagcccctgctgcatgccattgccaagga

SEQ ID NO: 158264 - DNA, 120 bp, Artificial Sequence
  ENSG00000106648_7 (sequence is synthesized)
ccccaaaatggtggtgtgccccctgatagatgtcattgatgatagaactctggagtataagccctctcctcttgtaaggggaacttttgattggaacctacaatttaaatgggataatgt

SEQ ID NO: 158265 - DNA, 120 bp, Artificial Sequence
  ENSG00000106648_8 (sequence is synthesized)
tttctcttatgagatggatggaccagaaggatctactaaaccaatccggtcacctgcaatgtctggaggaatttttgctatacgtcggcattattttaatgaaattggacagtatgacaa

SEQ ID NO: 158266 - DNA, 120 bp, Artificial Sequence
  ENSG00000106648_9 (sequence is synthesized)
ggatatggatttttggggaagagaaaatttggaactttcactaaggatctggatgtgtggaggccaactctttataatcccctgctctcgagtaggacatatcagtaagaaacaaactgg

SEQ ID NO: 158267 - DNA, 120 bp, Artificial Sequence
  ENSG00000106648_10 (sequence is synthesized)
aaaaccttctacaatcatcagtgctatgacacataactacctaagactggtgcacgtttggctggatgaatataaggagcagttttttcttcgaaagcctggtctgaaatatgtcaccta

SEQ ID NO: 158268 - DNA, 120 bp, Artificial Sequence
  ENSG00000106648_11 (sequence is synthesized)
cggaaatattcgcgagcgtgttgagttaaggaaacgactgggttgcaagtcatttcagtggtatttggataatgtcttcccagagttggaggcatctgtgaacagcctgtgaaaggaaaa

SEQ ID NO: 158269 - DNA, 120 bp, Artificial Sequence
  ENSG00000106648_12 (sequence is synthesized)
caaatcactttcattaataaagggttaaaagtctcctagtcattcaacatagtgtcacaagagtgtaagtttggaacatcgtggaattacgtgaaatgcaattaaaaaaatatgaccaga

SEQ ID NO: 158270 - DNA, 120 bp, Artificial Sequence
  ENSG00000106648_13 (sequence is synthesized)
gatgtcatcaggctttgtgagggggactgtactgccctttgagtactactgtgtggccccgcaacccagcacaaccagcattgaattctgcatcttttagtgaagaaaataactgaacat

SEQ ID NO: 158271 - DNA, 120 bp, Artificial Sequence
  ENSG00000106648_14 (sequence is synthesized)
ccccatttctttctcttcataattctcatcactatctgtccatttctctgggccggtggtgctgtccacgtggctgttgaagtctcccacaggttgcaggagctgaggtgggcagcctgc

SEQ ID NO: 158272 - DNA, 120 bp, Artificial Sequence
  ENSG00000106648_15 (sequence is synthesized)
ggtgaatgctgtgccgtacctgcagggcatgaaggaaaccgcctgagatgcaggcagatggataaccccgcagaggaggagaaggcaggggttttgcaaagtgaagaagaaagagaatgt

SEQ ID NO: 158273 - DNA, 120 bp, Artificial Sequence
  ENSG00000106648_16 (sequence is synthesized)
tcaaaaagatgcaaataaggagaagtgtttgaacgagatgacacaacatccaaggcatttagatggatggttttcttcatattgcttctgcctgcaggtgtcttcaaaaacattacccag

SEQ ID NO: 158274 - DNA, 120 bp, Artificial Sequence
  ENSG00000106648_17 (sequence is synthesized)
aatgagatgatctaggaattccatgaaagaagcggaatcagaccaactgcagttaagaagaagatccctccttctgctgggattaccatgaacctgttcctgttcaacctgcccctgacc

SEQ ID NO: 158275 - DNA, 120 bp, Artificial Sequence
  ENSG00000106648_18 (sequence is synthesized)
cagattgctgggacttaggaatttagacctctgagatgatttgaaagaaaaactagactatcacctggaaacttttcggggaaaggttaaaataataagaaacaaaaagagagaggggct

SEQ ID NO: 158276 - DNA, 120 bp, Artificial Sequence
  ENSG00000106648_19 (sequence is synthesized)
atcgatctcttgatgcaaccatggcatccggcaatagccatctaccttgcaatatttataattactcctccctgttcctcagtcaagcgcaccaaccagaaaattcctttccacctatat

SEQ ID NO: 158277 - DNA, 120 bp, Artificial Sequence
  ENSG00000106648_20 (sequence is synthesized)
tcagccacagtatgccaggggctttcagaacaccacctttccaccagcaatgggatgctcagggccagccgcctggagggtggcttagccctaaaatcccctttacagcccattttcctg

SEQ ID NO: 158278 - DNA, 120 bp, Artificial Sequence
  ENSG00000106648_21 (sequence is synthesized)
gaccattagcaaccatcatactaggtcaagttccccaggaagaagactattcgactaagatttgcatggaaaactttattcggagcagatctggggacaaacactgcaaggcagggacac

SEQ ID NO: 158279 - DNA, 120 bp, Artificial Sequence
  ENSG00000106648_22 (sequence is synthesized)
aagtaggttcaatcagaggaagagcctagatggcagtgcagcttccagaagagactccacccaccccacaggcagcttgcgctctccagagtccccccagatagacaagggagctgcacc

SEQ ID NO: 158280 - DNA, 80 bp, Artificial Sequence
  ENSG00000106665_0 (sequence is synthesized)
tcggtgcgcgcctcccgccttcccagagacgtggcgcgaggcccgggccctgagcacctatcgcggggatccccggcgcc

SEQ ID NO: 158281 - DNA, 120 bp, Artificial Sequence
  ENSG00000106665_1 (sequence is synthesized)
ggcagcgccgcgcagggaggggccgcagcatcctcgccccccagcgcgcccgggcccgagaggaggaggccggggctctccgggcctcccgccgcttagcctgatgctggaaggacgaag

SEQ ID NO: 158282 - DNA, 120 bp, Artificial Sequence
  ENSG00000106665_2 (sequence is synthesized)
ctgatgctggaaggacgaaggtgagtgaagatggcagagaggacgtgaccagcactcacccttgtccacctgcccagtggcaccgccatgcagaagcccagcggcctgaagccccccggc

SEQ ID NO: 158283 - DNA, 120 bp, Artificial Sequence
  ENSG00000106665_3 (sequence is synthesized)
cgtggggggaagcactccagccccatgggccggacatctactgggtcagcttcatcctcggcggcggtggccgctagctccaaggaaggctccccactgcacaaacagtcatctggaccc

SEQ ID NO: 158284 - DNA, 120 bp, Artificial Sequence
  ENSG00000106665_4 (sequence is synthesized)
tcctcctccccggccgcagctgctgcccccgagaagccgggccccaaggcggcggaagtgggggatgacttcctgggggactttgtggtgggcgagcgggtgtgggtgaacggcgtgaag

SEQ ID NO: 158285 - DNA, 120 bp, Artificial Sequence
  ENSG00000106665_5 (sequence is synthesized)
ccaggcgtggtgcagtatctgggagagacgcagttcgcaccgggccagtgggctggcgtggtgctggacgacccggtgggcaagaatgatggcgcggtgggcggcgtgcgctacttcgag

SEQ ID NO: 158286 - DNA, 120 bp, Artificial Sequence
  ENSG00000106665_6 (sequence is synthesized)
tgcccggccctccagggtatcttcacgcggccctccaagctgacccggcagcccacggccgagggctcggggagtgatgcccactccgtggagtcgctgactgcccagaacctgtcattg

SEQ ID NO: 158287 - DNA, 120 bp, Artificial Sequence
  ENSG00000106665_7 (sequence is synthesized)
cattcgggcacggccacgcccccgctgaccagccgcgtcatccccctgcgggagagcgtcctcaacagctccgtgaagactggcaacgagtcgggatccaacctctcagacagcggctct

SEQ ID NO: 158288 - DNA, 120 bp, Artificial Sequence
  ENSG00000106665_8 (sequence is synthesized)
gtgaagcggggcgaaaaggacctgcgcctgggggaccgcgtgctggttggcgggacgaagactggcgtggtgcggtacgtgggggagacagactttgccaagggcgagtggtgtggcgtg

SEQ ID NO: 158289 - DNA, 120 bp, Artificial Sequence
  ENSG00000106665_9 (sequence is synthesized)
gagctggacgagccccttgggaagaatgatggggcggtggcgggcaccaggtacttccagtgcccacccaagtttggtctcttcgcgcccatccacaaagtgatccgtatcggcttccca

SEQ ID NO: 158290 - DNA, 120 bp, Artificial Sequence
  ENSG00000106665_10 (sequence is synthesized)
tctaccagcccagccaaggccaagaagaccaagcgtatggccatgggtgtgtcagcactgacccacagtcccagcagttcctccatcagctccgtcagctctgtggcctcctccgtgggg

SEQ ID NO: 158291 - DNA, 120 bp, Artificial Sequence
  ENSG00000106665_11 (sequence is synthesized)
ggtcggcccagccgcagtggcctgctcacggagacctcttcacgctacgcccgcaagatctcgggcaccacggccttgcaggaggcactgaaggagaagcagcagcacattgagcagctg

SEQ ID NO: 158292 - DNA, 120 bp, Artificial Sequence
  ENSG00000106665_12 (sequence is synthesized)
ctggctgaacgagacctggaacgggctgaggtggccaaggccacaagccacatctgcgaggtggagaaggagattgccctgctcaaggcacagcatgagcagtatgttgcagaagccgag

SEQ ID NO: 158293 - DNA, 120 bp, Artificial Sequence
  ENSG00000106665_13 (sequence is synthesized)
gagaagctgcagcgagcccggctgctcgtggagagcgtgcggaaagagaaggtggacctgtccaaccagctggaggaggagaggaggaaggtggaggatctgcagttccgcgtggaggag

SEQ ID NO: 158294 - DNA, 120 bp, Artificial Sequence
  ENSG00000106665_14 (sequence is synthesized)
gagtccatcaccaagggagacctggagacccagacgcagctggagcacgcgcgcattggggagctggaacagagcctgctactggagaaggcgcaggccgagcggctgctccgagaatta

SEQ ID NO: 158295 - DNA, 120 bp, Artificial Sequence
  ENSG00000106665_15 (sequence is synthesized)
gcggacaacaggctgaccacagtggccgagaagtcgcgcgtgctgcagctggaggaggagctcaccctgcgccgaggtgaaatcgaggagctccagcagtgcctgttgcactcgggtccc

SEQ ID NO: 158296 - DNA, 120 bp, Artificial Sequence
  ENSG00000106665_16 (sequence is synthesized)
ccacctccggaccacccagacgccgccgagatcctgcggctacgggagcggctgctctcggccagcaaggaacaccagagggagagtggggtgctgcgggataaatacgagaaggccctg

SEQ ID NO: 158297 - DNA, 120 bp, Artificial Sequence
  ENSG00000106665_17 (sequence is synthesized)
aaggcctaccaggcggaggtggacaagctccgcgcggccaacgagaagtacgcacaggaggtggcgggcctgaaggacaaggttcagcaggccaccagcgagaacatggggctaatggac

SEQ ID NO: 158298 - DNA, 120 bp, Artificial Sequence
  ENSG00000106665_18 (sequence is synthesized)
aactggaaatccaagctggactcgctggcctcggaccaccagaagtccctggaggacctcaaagccaccctgaactcgggcccaggcgcccagcagaaggagatcggcgagctgaaggca

SEQ ID NO: 158299 - DNA, 120 bp, Artificial Sequence
  ENSG00000106665_19 (sequence is synthesized)
gtgatggagggcatcaagatggagcaccagctggagctgggtaacttgcaggccaagcatgacctggagaccgccatgcacgtgaaggagaaggaggccctgcgagagaagctgcaggag

SEQ ID NO: 158300 - DNA, 120 bp, Artificial Sequence
  ENSG00000106665_20 (sequence is synthesized)
gcccaggaggagctggctgggctgcagcggcactggcgggcccagctggaggtgcaagccagccagcaccggctggagctgcaggaggcccaggaccagcgccgggatgccgagctgcgt

SEQ ID NO: 158301 - DNA, 120 bp, Artificial Sequence
  ENSG00000106665_21 (sequence is synthesized)
gtgcacgagctggaaaaactggacgtggagtaccggggccaggcgcaggctatcgagttcctcaaggagcagatctcgctggccgagaagaagatgttggactacgagcggctgcagcgg

SEQ ID NO: 158302 - DNA, 120 bp, Artificial Sequence
  ENSG00000106665_22 (sequence is synthesized)
gcagaagcccagggcaaacaggaggtcgagagtttgcgggagaagctcctggtggctgagaacagactccaggcggtcgaggccctgtgctcctcccagcacacccacatgattgagtcg

SEQ ID NO: 158303 - DNA, 120 bp, Artificial Sequence
  ENSG00000106665_23 (sequence is synthesized)
agggcctgcaggacaagctgaacaagagggacaaagaggtgacagccttgacctcccagaccgagatgctcagggcccaagtaagtgcgctggagagcaagtgtaagtcaggcgagaaga

SEQ ID NO: 158304 - DNA, 120 bp, Artificial Sequence
  ENSG00000106665_24 (sequence is synthesized)
aggtggacgccctcctgaaggagaagcggcgcctggaggcagagctggagaccgtgtcccggaagacccatgacgcctcgggccagctagtcctcatcagccaggagctgctgcggaagg

SEQ ID NO: 158305 - DNA, 120 bp, Artificial Sequence
  ENSG00000106665_25 (sequence is synthesized)
agcggagcctgaacgaactgcgggtgttgctgctggaggccaatcgtcactccccagggccggagagggacctgagccgtgaggtacacaaggctgagtggcggatcaaggagcagaaac

SEQ ID NO: 158306 - DNA, 120 bp, Artificial Sequence
  ENSG00000106665_26 (sequence is synthesized)
tcaaggatgacatccggggcctgcgtgaaaagctgaccgggctggacaaagagaaatccctgtcggatcagaggcgctactccctcatcgaccggtcctcggcgcccgagcttctgcggc

SEQ ID NO: 158307 - DNA, 120 bp, Artificial Sequence
  ENSG00000106665_27 (sequence is synthesized)
tgcagcaccagctgatgagcacggaggacgccctgcgggatgcgctggaccaggctcagcaggtggagaagctgatggaggccatgaggagctgccctgacaaggcccagaccatcggca

SEQ ID NO: 158308 - DNA, 120 bp, Artificial Sequence
  ENSG00000106665_28 (sequence is synthesized)
attccggttctgcaaacggcatccaccagcaggacaaagctcagaaacaagaggacaagcactgatcctgaggggatactgtggagcagcccagtccacaccagagccccacgcggctgc

SEQ ID NO: 158309 - DNA, 120 bp, Artificial Sequence
  ENSG00000106665_29 (sequence is synthesized)
ccggcagtacctcctccaggcaggagccgggactgtcactttggagacaaaacagtgtttgtaacaataacgtactcaccgccgcggacaatcccccaccccgatccctcgccagaccag

SEQ ID NO: 158310 - DNA, 120 bp, Artificial Sequence
  ENSG00000106665_30 (sequence is synthesized)
gacgcttcctcaagcccagccttctacagagagtgtgaacggtacagccccggcctgacccggggaccttcagcctggacacccggcagcttctggagtttgtcagtggaggcagagggg

SEQ ID NO: 158311 - DNA, 120 bp, Artificial Sequence
  ENSG00000106665_31 (sequence is synthesized)
atccggccaggcccctctgtccagaaggagctgccctgaggaccatcttagcggccctgtcctctttttccgcccattctccctcgggtctccccagaggggccggcgggggctggggag

SEQ ID NO: 158312 - DNA, 120 bp, Artificial Sequence
  ENSG00000106665_32 (sequence is synthesized)
ggggtaagtttatccatgcagacaccaagggggagcatccagtctttaagagccaagtgggggccccttttccgaagccacttccaggccaaggcagtcgccagggcttcttgtccccac

SEQ ID NO: 158313 - DNA, 120 bp, Artificial Sequence
  ENSG00000106665_33 (sequence is synthesized)
cttctgaaccttcttcaaacagtagtacaagctcccctcagccagcctgcctgcccagcgaggcccccaggttcaaggtgttggcgggggcggagggcaggggaacgggatccttctccc

SEQ ID NO: 158314 - DNA, 120 bp, Artificial Sequence
  ENSG00000106665_34 (sequence is synthesized)
gctgcccaccaacaccaacacacacacacctctaagctgctggccgaagatgtcaccaaggccaaagacacagtattatgaaggtttggaaacccctctcctcacctcccaccgtgacct

SEQ ID NO: 158315 - DNA, 120 bp, Artificial Sequence
  ENSG00000106665_35 (sequence is synthesized)
tgggcaaaccctggctcggagcccagggcagaggcagctcagagtggaggctctaggcaggtttgacaaaggtcagtaatacggtttcccctggggttgaccagatgttccaaaatatct

SEQ ID NO: 158316 - DNA, 120 bp, Artificial Sequence
  ENSG00000106665_36 (sequence is synthesized)
gcatccacctggagatgcagctaagtgggtccttatgtacacaccacgttcacacacacacagagggaccacgtgtgcacgcatgaccgtgtgggtggcggcgtttgctgtgaaccacgc

SEQ ID NO: 158317 - DNA, 120 bp, Artificial Sequence
  ENSG00000106665_37 (sequence is synthesized)
tcaggccacacagagacacatacttggtttctgggactgagacccaggcctggcaggaccgtgcctacagatactgcaaacgttcctacagcctagaggtgcgtatacacacccaagtac

SEQ ID NO: 158318 - DNA, 120 bp, Artificial Sequence
  ENSG00000106665_38 (sequence is synthesized)
acgcagccaggcattcaggggtgtgtttgccacatggagcatcccttcctggtcttgccaggcacctgcacagagcgtctccagccccatctcctaacgggggctgggggtaagagaaat

SEQ ID NO: 158319 - DNA, 120 bp, Artificial Sequence
  ENSG00000106665_39 (sequence is synthesized)
ctaactgcgctcccccaacccctcgccctgccatcttcccctcaagcctgctaagttatcccaggcctgtgcgtggtggaaaaagccagccttggccctgcagcctccacctcgccgctg

SEQ ID NO: 158320 - DNA, 120 bp, Artificial Sequence
  ENSG00000106665_40 (sequence is synthesized)
ggggaccaacaggttgcttacagctttgcaccccggcatcagcacaggggtccctgccccaccctccggcagctcagggagtgttttcctgtgaggcctcccccatcagtggaccagagg

SEQ ID NO: 158321 - DNA, 120 bp, Artificial Sequence
  ENSG00000106665_41 (sequence is synthesized)
gagaagcccgatgccccatcccggctttcccgtaacgcacaggacacgtgtgcaattcataggaacggcccagatcgccctcatgagtgccacctggtacaggtaggtggcgctcacgtt

SEQ ID NO: 158322 - DNA, 120 bp, Artificial Sequence
  ENSG00000106665_42 (sequence is synthesized)
cctgcccaaatgcagcccatcggggagtcacagtcagtccccccggcccccctcccagtccctgttggctttcggtagctctcgcatgcagttctattaacagccgtctagaagcgatgc

SEQ ID NO: 158323 - DNA, 120 bp, Artificial Sequence
  ENSG00000106665_43 (sequence is synthesized)
tttagtggcctaacccagggtcaaatacagctctttctagcaaaatcaggcagctctgccccatcggtaggggcaccgattagtctactaacagccagaggtccatctagcagggtgccg

SEQ ID NO: 158324 - DNA, 120 bp, Artificial Sequence
  ENSG00000106665_44 (sequence is synthesized)
ggaggagctgagcccccggaggtgggctcctggtgacgggtgtccaagaagcggtttccttgggagcttctgcctccgtgggcctctcagcccgccccgtgtggccgcccgggtgtggct

SEQ ID NO: 158325 - DNA, 120 bp, Artificial Sequence
  ENSG00000106665_45 (sequence is synthesized)
cagccatgtcccctccccaggtccttcattcacccctcccctccccacagtggaattgttgaagtgtggcgagtctgtgctcgggacaataaagcttgtgacaggtccaggaccccggca

SEQ ID NO: 158326 - DNA, 120 bp, Artificial Sequence
  ENSG00000106665_46 (sequence is synthesized)
gccttcctgctgggtcacattttggtttgcatcatctgccatttggtaagagtcacctcctgtgtgctgtgagctatgtactcctgcaagggaggaggccagtttacggagggataggca

SEQ ID NO: 158327 - DNA, 62 bp, Artificial Sequence
  ENSG00000106665_47 (sequence is synthesized)
aattgcttgaacccaggaagcggaggttgtagtgagccaagatcccgccaggtatgatggtg

SEQ ID NO: 158328 - DNA, 62 bp, Artificial Sequence
  ENSG00000106665_48 (sequence is synthesized)
ggaggctgcaatgagctataattgtgccactgtactccagtctgggtgacagagccagaccc

SEQ ID NO: 158329 - DNA, 120 bp, Artificial Sequence
  ENSG00000106665_49 (sequence is synthesized)
cccctgggagaatcagcgccctgcccaggtctttgcccttgggtgggacagaagctcacgtgttcccaatcctcttcctcccttccctgccggctgaccccagcgctggagagcaagtgt

SEQ ID NO: 158330 - DNA, 120 bp, Artificial Sequence
  ENSG00000106665_50 (sequence is synthesized)
tcattacaactaattgagactcaaatgggacttgggatgtatgaacagaagtatgaggggcaggatgatagaggtgactgcctactcagctctgtgcttccctgatctgcagtgccagac

SEQ ID NO: 158331 - DNA, 120 bp, Artificial Sequence
  ENSG00000106665_51 (sequence is synthesized)
tctggctggctcggaggacagccagcctgggcaggagactggaaactcctgccaagagtggcagggagcctattggttgtgttttgacttttgtcatagtgatgtgtgccaggctgattt

SEQ ID NO: 158332 - DNA, 120 bp, Artificial Sequence
  ENSG00000106665_52 (sequence is synthesized)
ttttttttaataggtcttttcttctttggcctctgggtttattattaaaaagaaatgttggagagaaagaagctagcatttaatgaagtccctccaggaggtggccccaagcacgctgtg

SEQ ID NO: 158333 - DNA, 120 bp, Artificial Sequence
  ENSG00000106665_53 (sequence is synthesized)
cacacactaacccaaagcagccaatatttgtttgatggatgggaaactgaggccagaagtcttgtctctgggagacagagaaacaaattcccaggacaaatttctgtaggcattgcaggg

SEQ ID NO: 158334 - DNA, 120 bp, Artificial Sequence
  ENSG00000106665_54 (sequence is synthesized)
tgtttaatataataaacattttcaacaaaggaagggtaggaggtattcatgtataagctgcacaggcggccttcagcagagctgggtgcagaatgggggtcctctgttgtcagggaggtc

SEQ ID NO: 158335 - DNA, 120 bp, Artificial Sequence
  ENSG00000106665_55 (sequence is synthesized)
cgactgaggacgtctgcactccctgccaccgcagcaagtccctgagtccgtcactgaggtccccctttgtaggagtagggtgtgcaaactgcaggtgtgcttgctgggctggctggggct

SEQ ID NO: 158336 - DNA, 120 bp, Artificial Sequence
  ENSG00000106665_56 (sequence is synthesized)
gggatgcgctggaccaggctcagcaggtggagaagctgatggaggccatgaggagctgccctgacaaggcccaggacaagcactgatcctgaggggatactgtggagcagcccagtccac

SEQ ID NO: 158337 - DNA, 120 bp, Artificial Sequence
  ENSG00000106665_57 (sequence is synthesized)
ctggagtgaggaagaacttggaccctggaggccaagtgtgaccccgtcacagagctcctgtgggagggccatggccctacccactgctgctttggtccaggagcattgatgcttctcgtc

SEQ ID NO: 158338 - DNA, 120 bp, Artificial Sequence
  ENSG00000106665_58 (sequence is synthesized)
ctcttcttgacattagctcatgttatcttggggcagagagggggatagagctggtgggccaggtggccgatctcgagcgatcaccctgctctcctctaagctccgataaagtctccaaag

SEQ ID NO: 158339 - DNA, 120 bp, Artificial Sequence
  ENSG00000106682_0 (sequence is synthesized)
gcgcgcgcgtgcgcgtgcctgcgtccaagggatttgcgatcaggcggcgcggcggacagccccggcggcggggcggggggagttatattgcggggtccttcctcgctcaccctggttcct

SEQ ID NO: 158340 - DNA, 120 bp, Artificial Sequence
  ENSG00000106682_1 (sequence is synthesized)
ctcggagcggagacggcaaatggcggacttcgacacctacgacgatcgggcctacagcagcttcggcggcggcagagggtcccgcggcagtgctggtggccatggttcccgtagccagaa

SEQ ID NO: 158341 - DNA, 120 bp, Artificial Sequence
  ENSG00000106682_2 (sequence is synthesized)
ggagttgcccacagagcccccctacacagcatacgtaggaaatctacctttcaatacggttcagggcgacatagatgctatctttaaggatctcagcataaggagtgtacggctagtcag

SEQ ID NO: 158342 - DNA, 120 bp, Artificial Sequence
  ENSG00000106682_3 (sequence is synthesized)
agacaaagacacagataaatttaaaggattctgctatgtagaattcgatgaagtggattcccttaaggaagccttgacatacgatggtgcactgttgggcgatcggtcacttcgtgtgga

SEQ ID NO: 158343 - DNA, 120 bp, Artificial Sequence
  ENSG00000106682_4 (sequence is synthesized)
cattgcagaaggcagaaaacaagataaaggtggctttggattcagaaaaggtggaccagatgacagaggaatgggtagctctcgagaatctagaggtggatgggattcccgggatgactt

SEQ ID NO: 158344 - DNA, 120 bp, Artificial Sequence
  ENSG00000106682_5 (sequence is synthesized)
caattctggcttcagggatgacttcttagggggcaggggaggtagtcgcccaggcgaccggcgaacaggcccccccatgggcagccgcttcagagatggccctcccctccgtggatccaa

SEQ ID NO: 158345 - DNA, 120 bp, Artificial Sequence
  ENSG00000106682_6 (sequence is synthesized)
catggatttcagagaacccacagaagaggaaagagcacagagaccacgactccagcttaaacctcgaacagtcgcgacgcccctcaatcaagtagccaatcccaactctgctatcttcgg

SEQ ID NO: 158346 - DNA, 120 bp, Artificial Sequence
  ENSG00000106682_7 (sequence is synthesized)
gggtgccaggcctagagaggaagtcgttcaaaaggagcaagaatgagcctgcggttgggagggaatggggcgtggggggttagagcaggaccacagcctggtgagtccccgggcagccgt

SEQ ID NO: 158347 - DNA, 120 bp, Artificial Sequence
  ENSG00000106682_8 (sequence is synthesized)
cctgcagccgccactcctgcgcctgccattggcctcctcacagcggaaacacagcttgtgagtgcatgtcagctgttaacaagtggtttttagtacattctgggctttgctgtatctatc

SEQ ID NO: 158348 - DNA, 120 bp, Artificial Sequence
  ENSG00000106682_9 (sequence is synthesized)
tagtgcctgtttgtgcgtttttttctttcttccgctgcttccccattttccttctgtcctttttctcctgctccttgttttcccagcagcacatggggttcctcggaggagcagaggtgg

SEQ ID NO: 158349 - DNA, 120 bp, Artificial Sequence
  ENSG00000106682_10 (sequence is synthesized)
ccgccgtgggggggcgtttgggctgcggtgctgcgtcatttttcctttgctttctctttactttagacactggcccaactccaggcgtttcctttcattccctcagtgcttctcttctga

SEQ ID NO: 158350 - DNA, 120 bp, Artificial Sequence
  ENSG00000106682_11 (sequence is synthesized)
aaaccagagtcactgacagagggaacagcagagaccttgttggtattcagctgtgatggatatagagaatcagaggcaccttgttttcacaactaggataaaaatatctgcagggtcctt

SEQ ID NO: 158351 - DNA, 120 bp, Artificial Sequence
  ENSG00000106682_12 (sequence is synthesized)
tccattcctatttagagggagtcctggctccatgaccccctcccgagtggactgtccaagcagataggctcacacgagaaacagtgaggctgaaagggggggctatggaagagcggtagg

SEQ ID NO: 158352 - DNA, 120 bp, Artificial Sequence
  ENSG00000106682_13 (sequence is synthesized)
gagtccacggagaagatgcagtgaatgcttgcatgcattcacacgtgtgtgtgtcccagctagttcactcctttcgccgtgcgtggtggaggctggcctctctggctgggtgcagtgaat

SEQ ID NO: 158353 - DNA, 120 bp, Artificial Sequence
  ENSG00000106682_14 (sequence is synthesized)
ggccagcgggtttcttttctgctgggccaaggcgctttgggggtggagggggtggtgctggtgctgcactgggctgactgcggcgctgacgcagcgtttccccccatccctgttgcctgt

SEQ ID NO: 158354 - DNA, 120 bp, Artificial Sequence
  ENSG00000106682_15 (sequence is synthesized)
gtgttgtgtggatctgttcctagtataggcaacataatgagatactgtgcttcccacctccccttcagttcagagccaaaatgggtctagaatctggcactttactcatttcctttgata

SEQ ID NO: 158355 - DNA, 120 bp, Artificial Sequence
  ENSG00000106682_16 (sequence is synthesized)
aattgtactatgcagagctgtcaggaaccttcagatagcagtagaggactgcagctgtctaggtctgcggccacatcttggggacacactggactgttcccatgtgcagggttcagcagt

SEQ ID NO: 158356 - DNA, 120 bp, Artificial Sequence
  ENSG00000106682_17 (sequence is synthesized)
tatgtgggagtgctaggggttaggcttttgagcttgaacgcctgcgtgtgaacagatgaaaaatccttcagtacccaagtcccagtctgtcctatggggagcagtttgggggcggccggc

SEQ ID NO: 158357 - DNA, 120 bp, Artificial Sequence
  ENSG00000106682_18 (sequence is synthesized)
agcaggagcctgggaaagaggccctcgccaggtgatggcagggccagggtggcctggggcacccagcggaatgtgcttagtatttggtcaccagccgtcatcctgggcttttcctactgt

SEQ ID NO: 158358 - DNA, 120 bp, Artificial Sequence
  ENSG00000106682_19 (sequence is synthesized)
gtcttgttacaaggcctcagcaatccacagaactctctctccttccttccacctgtcagcttctctgcttctgagataagaaccatttgtgtaacaccaacacttaacttcagaaagaca

SEQ ID NO: 158359 - DNA, 120 bp, Artificial Sequence
  ENSG00000106682_20 (sequence is synthesized)
tgcattatgtggtgtaatcaaacccgatgctttcagatgacctacttacatcttcaatgtggataagataaagaacaaaacacatgcatctaaactgctgggcaatccagttgactttta

SEQ ID NO: 158360 - DNA, 120 bp, Artificial Sequence
  ENSG00000106682_21 (sequence is synthesized)
aatgtaagaatggaattccaaacacttaacacattcagctatatgacagaaagtaaatctatggatatggtattttgtgaatgatcttttaaataaaagaaaaccttacgtaatatttaa

SEQ ID NO: 158361 - DNA, 120 bp, Artificial Sequence
  ENSG00000106682_22 (sequence is synthesized)
gtcacacagtggacactttaccagtgctagcttgaatgaggtctacctccatggcccagccctgctgccccctagtgatttcattgaatgggatgaaaaggtcccgcggcagtgctggtg

SEQ ID NO: 158362 - DNA, 120 bp, Artificial Sequence
  ENSG00000106682_23 (sequence is synthesized)
tcttctaaagctgaacatcataaagatttgcagtatgcctaccaattccaactcgtgaacgttcctagtagaactcgattatctcataggtgtgataggttctcgtgagctcttaaaagt

SEQ ID NO: 158363 - DNA, 120 bp, Artificial Sequence
  ENSG00000106682_24 (sequence is synthesized)
ttgcgtaaaatcctagaaagaatggctgatgcttctgcaagcctggcgttttttgttttctgttggaagcaaaagctcttaaaatgatttcattgaaccttccatcacttgagttgtatg

SEQ ID NO: 158364 - DNA, 120 bp, Artificial Sequence
  ENSG00000106682_25 (sequence is synthesized)
tcttccaaatgaatttttccatgtttgcgcagcaaggtaatgacacgacctcaactttatcttttttgtgtatcctcaggaatgggtagctctcgagaatctagaggtggatgggattcc

SEQ ID NO: 158365 - DNA, 120 bp, Artificial Sequence
  ENSG00000106682_26 (sequence is synthesized)
tgcagtaagtatcctcgggttttctctgtcatagcagttgagattgttttctttgccaatacttacactattttccctttatcattagctgttgggcgatcggtcacttcgtgtggacat

SEQ ID NO: 158366 - DNA, 120 bp, Artificial Sequence
  ENSG00000106683_0 (sequence is synthesized)
tgggcgagctcgcgggcccggccgcccccagccccagccccgccgggccccgccccccgtcgagtgcatgaggttgacgctactttgttgcacctggagggaagaacgtatgggagagga

SEQ ID NO: 158367 - DNA, 120 bp, Artificial Sequence
  ENSG00000106683_1 (sequence is synthesized)
aggaagcgagttgcccgtgtgtgcaagctgcggccagaggatctatgatggccagtacctccaggccctgaacgcggactggcacgcagactgcttcaggtgttgtgactgcagtgcctc

SEQ ID NO: 158368 - DNA, 120 bp, Artificial Sequence
  ENSG00000106683_2 (sequence is synthesized)
cctgtcgcaccagtactatgagaaggatgggcagctcttctgcaagaaggactactgggcccgctatggcgagtcctgccatgggtgctctgagcaaatcaccaagggactggttatggt

SEQ ID NO: 158369 - DNA, 120 bp, Artificial Sequence
  ENSG00000106683_3 (sequence is synthesized)
ggctggggagctgaagtaccaccccgagtgtttcatctgcctcacgtgtgggacctttatcggtgacggggacacctacacgctggtggagcactccaagctgtactgcgggcactgcta

SEQ ID NO: 158370 - DNA, 120 bp, Artificial Sequence
  ENSG00000106683_4 (sequence is synthesized)
ctaccagactgtggtgacccccgtcatcgagcagatcctgcctgactcccctggctcccacctgccccacaccgtcaccctggtgtccatcccagcctcatctcatggcaagcgtggact

SEQ ID NO: 158371 - DNA, 120 bp, Artificial Sequence
  ENSG00000106683_5 (sequence is synthesized)
ttcagtctccattgaccccccgcacggcccaccgggctgtggcaccgagcactcacacaccgtccgcgtccagggagtggatccgggctgcatgagcccagatgtgaagaattccatcca

SEQ ID NO: 158372 - DNA, 120 bp, Artificial Sequence
  ENSG00000106683_6 (sequence is synthesized)
cgtcggagaccggatcttggaaatcaatggcacgcccatccgaaatgtgcccctggacgagattgacctgctgattcaggaaaccagccgcctgctccagctgaccctcgagcatgaccc

SEQ ID NO: 158373 - DNA, 120 bp, Artificial Sequence
  ENSG00000106683_7 (sequence is synthesized)
tcacgatacactgggccacgggctggggcctgagaccagccccctgagctctccggcttatactcccagcggggaggcgggcagctctgcccggcagaaacctgtcttgaggagctgcag

SEQ ID NO: 158374 - DNA, 120 bp, Artificial Sequence
  ENSG00000106683_8 (sequence is synthesized)
catcgacaggtctccgggcgctggctcactgggctccccggcctcccagcgcaaggacctgggtcgctctgagtccctccgcgtagtctgccggccacaccgcatcttccggccgtcgga

SEQ ID NO: 158375 - DNA, 120 bp, Artificial Sequence
  ENSG00000106683_9 (sequence is synthesized)
cctcatccacggggaggtgctgggcaagggctgcttcggccaggctatcaaggtgacacaccgtgagacaggtgaggtgatggtgatgaaggagctgatccggttcgacgaggagaccca

SEQ ID NO: 158376 - DNA, 120 bp, Artificial Sequence
  ENSG00000106683_10 (sequence is synthesized)
gaggacgttcctcaaggaggtgaaggtcatgcgatgcctggaacaccccaacgtgctcaagttcatcggggtgctctacaaggacaagaggctcaacttcatcactgagtacatcaaggg

SEQ ID NO: 158377 - DNA, 120 bp, Artificial Sequence
  ENSG00000106683_11 (sequence is synthesized)
cggcacgctccggggcatcatcaagagcatggacagccagtacccatggagccagagagtgagctttgccaaggacatcgcatcagggatggcctacctccactccatgaacatcatcca

SEQ ID NO: 158378 - DNA, 120 bp, Artificial Sequence
  ENSG00000106683_12 (sequence is synthesized)
agcctcaagaagccagaccgcaagaagcgctacaccgtggtgggcaacccctactggatggcacctgagatgatcaacggccgcagctatgatgagaaggtggatgtgttctcctttggg

SEQ ID NO: 158379 - DNA, 120 bp, Artificial Sequence
  ENSG00000106683_13 (sequence is synthesized)
atcgtcctgtgcgagatcatcgggcgggtgaacgcagaccctgactacctgccccgcaccatggactttggcctcaacgtgcgaggattcctggaccgctactgccccccaaactgcccc

SEQ ID NO: 158380 - DNA, 120 bp, Artificial Sequence
  ENSG00000106683_14 (sequence is synthesized)
ccgagcttcttccccatcaccgtgcgctgttgcgatctggaccccgagaagaggccatcctttgtgaagctggaacactggctggagaccctccgcatgcacctggccggccacctgcca

SEQ ID NO: 158381 - DNA, 120 bp, Artificial Sequence
  ENSG00000106683_15 (sequence is synthesized)
ctgggcccacagctggagcagctggacagaggtttctgggagacctaccggcgcggcgagagcggactgcctgcccaccctgaggtccccgactgagccagggccactcagctgcccctg

SEQ ID NO: 158382 - DNA, 120 bp, Artificial Sequence
  ENSG00000106683_16 (sequence is synthesized)
tccccacctctggagaatccacccccaccagattcctccgcgggaggtggccctcagctgggacagtggggacccaggcttctcctcagagccaggccctgacttgccttctcccacccc

SEQ ID NO: 158383 - DNA, 120 bp, Artificial Sequence
  ENSG00000106683_17 (sequence is synthesized)
gtggaccgcttcccctgccttctctctgccgtggcccagagccggcccagctgcacacacacaccatgctctcgccctgctgtaacctctgtcttggcagggctgtcccctcttgcttct

SEQ ID NO: 158384 - DNA, 120 bp, Artificial Sequence
  ENSG00000106683_18 (sequence is synthesized)
ccttgcatgagctggagggcctgtgtgagttacgcccctttccacacgccgctgccccagcaaccctgttcacgctccacctgtctggtccatagctccctggaggctgggccaggaggc

SEQ ID NO: 158385 - DNA, 120 bp, Artificial Sequence
  ENSG00000106683_19 (sequence is synthesized)
agcctccgaaccatgccccatataacgcttgggtgcgtgggagggcgcacatcagggcagaggccaagttccaggtgtctgtgttcccaggaaccaaatggggagtctggggcccgtttt

SEQ ID NO: 158386 - DNA, 120 bp, Artificial Sequence
  ENSG00000106683_20 (sequence is synthesized)
ccccccagggggtgtctaggtagcaacaggtatcgaggactctccaaacccccaaagcagagagagggctgatcccatggggcggaggtccccagtggctgagcaaacagccccttctct

SEQ ID NO: 158387 - DNA, 120 bp, Artificial Sequence
  ENSG00000106683_21 (sequence is synthesized)
cgctttgggtcttttttttgtttctttcttaaagccactttagtgagaagcaggtaccaagcctcagggtgaagggggtcccttgagggagcgtggagctgcggtgccctggccggcgat

SEQ ID NO: 158388 - DNA, 120 bp, Artificial Sequence
  ENSG00000106683_22 (sequence is synthesized)
ggggaggagccggctccggcagtgagaggataggcacagtggaccgggcaggtgtccaccagcagctcagcccctgcagtcatctcagagccccttcccgggcctctcccccaaggctcc

SEQ ID NO: 158389 - DNA, 120 bp, Artificial Sequence
  ENSG00000106683_23 (sequence is synthesized)
ctgcccctcctcatgcccctctgtcctctgcgttttttctgtgtaatctattttttaagaagagtttgtattattttttcatacggctgcagcagcagctgccaggggcttgggatttta

SEQ ID NO: 158390 - DNA, 120 bp, Artificial Sequence
  ENSG00000106683_24 (sequence is synthesized)
tttttgtggcgggcgggggtgggagggccattttgtcactttgcctcagttgagcatctaggaagtattaaaactgtgaagctttctcagtgcactttgaacctggaaaacaatcccaac

SEQ ID NO: 158391 - DNA, 120 bp, Artificial Sequence
  ENSG00000106683_25 (sequence is synthesized)
aggcccgtgggaccatgacttagggaggtgggacccacccacccccatccaggaaccgtgacgtccaaggaaccaaacccagacgcagaacaataaaataaattccgtactccccaccca

SEQ ID NO: 158392 - DNA, 120 bp, Artificial Sequence
  ENSG00000106683_26 (sequence is synthesized)
caagagcatggtgagtcctgggcagagccagccacccccgctgtgcggccccgggcaaagcagctccctctgtgagcctcagtctcatctcttcaatggggggaagccacaggggtctca

SEQ ID NO: 158393 - DNA, 120 bp, Artificial Sequence
  ENSG00000106683_27 (sequence is synthesized)
aaggccctctgaaccctgattcctaatcaaaaaggggagcgactgactccatctaaagctaggaaaggccaggtacaatggtgcacacctgttattctggcactttgggagcccaaggca

SEQ ID NO: 158394 - DNA, 90 bp, Artificial Sequence
  ENSG00000106683_28 (sequence is synthesized)
accacacagcaagaccctgtctcaaaaactaaaataaaattcagagctttccttaaggatttgaataaaattacaaatccatctttagaa

SEQ ID NO: 158395 - DNA, 90 bp, Artificial Sequence
  ENSG00000106683_29 (sequence is synthesized)
aagaccctgtctcaaaaactaaaataaaattcagagctttccttaaggatttgaataaaattacaaatccatctttagaaataaagtgct

SEQ ID NO: 158396 - DNA, 120 bp, Artificial Sequence
  ENSG00000106683_30 (sequence is synthesized)
gcaccactgcactctagcctgggtgacagcgagattccttctcaaaaaaaaagcacttggaggaagcctcacagagccctgtgctggaccacaccctggggatccagtcctggcctccag

SEQ ID NO: 158397 - DNA, 120 bp, Artificial Sequence
  ENSG00000106683_31 (sequence is synthesized)
gtgctggaccacaccctggggatccagtcctggcctccagccccatttctgtaccaccctgagaccatgggatcttcctcaggttggattaccttgtatccaaggtgtggaccctatggg

SEQ ID NO: 158398 - DNA, 120 bp, Artificial Sequence
  ENSG00000106683_32 (sequence is synthesized)
ctcctgctaggtgtaacttgacacaacgggttccgttgtcaggtgcaatttagaaactctgggctaggccaagcgcagtggctcacacctgaattcccaaactttggaaggccgaggcag

SEQ ID NO: 158399 - DNA, 120 bp, Artificial Sequence
  ENSG00000106683_33 (sequence is synthesized)
gagggtcactagaggtcaggaggtcaagaccagcttggacaacataatgagatcccaatcccatctctacaaaaaaaattaaaaaattagccaaatgtggtgacacatgcctgtggttcc

SEQ ID NO: 158400 - DNA, 78 bp, Artificial Sequence
  ENSG00000106683_34 (sequence is synthesized)
aggaggtcgagtaaaaaataaagatctccaaggggatgaggtttgagaatgaggcgtctcccccaaatgatttgagcc

SEQ ID NO: 158401 - DNA, 120 bp, Artificial Sequence
  ENSG00000106683_35 (sequence is synthesized)
aggtttgagaatgaggcgtctcccccaaatgatttgagcccaaagccccgttctcctggcatggctcagtgctgccactgcgcaggtgaccttgctgggcccttctacctcttacctgtc

SEQ ID NO: 158402 - DNA, 120 bp, Artificial Sequence
  ENSG00000106683_36 (sequence is synthesized)
tgtgaaagtaggttctaattttttaaaaacctagaaagatgagttttttgtttttgtttttgtttttcccgagatggagttttgctcttattgtccagcctgaagtgcaatggcgtgatc

SEQ ID NO: 158403 - DNA, 73 bp, Artificial Sequence
  ENSG00000106683_37 (sequence is synthesized)
cctcgtgatccaaccactacagaaagatgagattttatagaaaataaatatagcttgttttctcagaggaggc

SEQ ID NO: 158404 - DNA, 120 bp, Artificial Sequence
  ENSG00000106683_38 (sequence is synthesized)
tttatagaaaataaatatagcttgttttctcagaggaggcagattgggagctatagaggaatatccctgcttagagtttgaaatcagttctgttaggaaataatgtttgtaggggccggg

SEQ ID NO: 158405 - DNA, 68 bp, Artificial Sequence
  ENSG00000106683_39 (sequence is synthesized)
ggtggcgccccggaggcgaaggttgtagggagctgagatggtaccactgcactccaccctgggtgaca

SEQ ID NO: 158406 - DNA, 120 bp, Artificial Sequence
  ENSG00000106683_40 (sequence is synthesized)
cagagcaagactccgtctgaaaaaaaaaacaaaagaattcctgtcttctctccgaaacaaagcagcatcagtgcccccgcaggtgggagggagcgcttgcaggagggagcagtgggtccg

SEQ ID NO: 158407 - DNA, 120 bp, Artificial Sequence
  ENSG00000106683_41 (sequence is synthesized)
gggagggagcgcttgcaggagggagcagtgggtccgccacgacggtctggggagcaggtggggagggggcagagggtgcagcgtgtggtgggagggaggaagccacactgctatcttcag

SEQ ID NO: 158408 - DNA, 120 bp, Artificial Sequence
  ENSG00000106683_42 (sequence is synthesized)
gtgcttcccgcagctccatttgcaaagagcggatgggtttggggaaggaaggggtccccaccctgtgccaatacagcgtatcagaggtatgttctctgggctgtctacaggttggcttgg

SEQ ID NO: 158409 - DNA, 120 bp, Artificial Sequence
  ENSG00000106683_43 (sequence is synthesized)
aagtcccctggcacccacgcggctgcagcctcctcctgtgcgctgcagccacgctggccccaccctctgcagcctccaatcctgagcccctgagggaggatggggaagcagctggtctgg

SEQ ID NO: 158410 - DNA, 120 bp, Artificial Sequence
  ENSG00000106683_44 (sequence is synthesized)
ccacccctgccctcccttagacctccagagcccccagtgtagccacagaggatgctgttggcttcagccccaagaagacgccgcttcctccagagggctaagtgttgtgactgcagtgcc

SEQ ID NO: 158411 - DNA, 120 bp, Artificial Sequence
  ENSG00000106683_45 (sequence is synthesized)
gaagtggtgaccggagggaagccaagtgcactcaaaccctcgggtgagtcatcaccgccgggtctttcacagctgctgaaagtgagcaacagtgatgaaggtgttgtgactgcagtgcct

SEQ ID NO: 158412 - DNA, 120 bp, Artificial Sequence
  ENSG00000106683_46 (sequence is synthesized)
atccgcaaaggttcactgaggccccgagccccagccactgagccaccaagtcagcctgggccaggcctgggtgccctgtctgcaatggaggcagagacggggtctcggggcagttctgag

SEQ ID NO: 158413 - DNA, 120 bp, Artificial Sequence
  ENSG00000106683_47 (sequence is synthesized)
gatgctgggtgcacagcgggggcctcgccggcaggaatcacttatgctctctcctgggccaagctttgtggatgcccagcctggggccgcggggagctggcaggtcagtggcagacactg

SEQ ID NO: 158414 - DNA, 120 bp, Artificial Sequence
  ENSG00000106683_48 (sequence is synthesized)
actgggttcacgtgggcacgtggctccactccggtcactgcttcctgggcagagggatgacgtggaaggtagacctaggggggacagggttgcttcctgcccatgtccagcattctagaa

SEQ ID NO: 158415 - DNA, 120 bp, Artificial Sequence
  ENSG00000106683_49 (sequence is synthesized)
ttgtccacatctaggcagggcgttccaccatcagtgctggactggaccacccaattcctttggacgcttgactcagcccaaacccgtgctccctccaggaccctgggcagggcagcccca

SEQ ID NO: 158416 - DNA, 120 bp, Artificial Sequence
  ENSG00000106686_0 (sequence is synthesized)
atttgctctaggtattcagctaaactaagaaaaattggtccaaggctcggcacaaaaggatcttctcattccagtcctttcgcccacgcagggaacgatgcctctggaggtggtggtgga

SEQ ID NO: 158417 - DNA, 120 bp, Artificial Sequence
  ENSG00000106686_1 (sequence is synthesized)
gctgcagatccgggcgatttcttgcccaggagtgttcctgcctggcaaacaagatgtgtacctcggggtctacctcatgaatcagtacctggagaccaacagctttccctctgcgttccc

SEQ ID NO: 158418 - DNA, 120 bp, Artificial Sequence
  ENSG00000106686_2 (sequence is synthesized)
cattatgattcaggagagcatgagatttgaaaaggtatttgaaagtgcagtagatcctggagctgtagtagaccttttggaaagcttcctagccaggtttgaattaatacagctagttcc

SEQ ID NO: 158419 - DNA, 120 bp, Artificial Sequence
  ENSG00000106686_3 (sequence is synthesized)
tccagtgtgggatgagttggcctactacgaagaaaacacacgagattttcttttcccagagcccaagctgacaccttcgcaccctaggaggtgtagggaggtgctcatgaagacggctct

SEQ ID NO: 158420 - DNA, 120 bp, Artificial Sequence
  ENSG00000106686_4 (sequence is synthesized)
gggttttccaggcattgctcccaaaatagagttttctacaaggacagccatcagagaatgtgtgtttctgcatagaaacagatttcttgaagaaagacatgagtcacggaggcctttatc

SEQ ID NO: 158421 - DNA, 120 bp, Artificial Sequence
  ENSG00000106686_5 (sequence is synthesized)
cgccctctcaatattctaccaggcatttcttccaggaccagccagctcagttgaaccttggaaataatttcaaaatctctggaggaagcaagcctccatttgttgttagacacgtggaca

SEQ ID NO: 158422 - DNA, 120 bp, Artificial Sequence
  ENSG00000106686_6 (sequence is synthesized)
gtgcaaagccctttggtgagaatatttcagagcatcatttgaggaggtctagaagaaaatctaagttttcagactttccgtttccaacgagaagaggttccatcctggttctcagtccac

SEQ ID NO: 158423 - DNA, 120 bp, Artificial Sequence
  ENSG00000106686_7 (sequence is synthesized)
atggaagaatatccatgagagggtatgcagtcttctgacatcccacagagcacagctgcaccaaaacaaggggaaattaatgaaagcttaaggagaatcatgaagagctcactcactgag

SEQ ID NO: 158424 - DNA, 120 bp, Artificial Sequence
  ENSG00000106686_8 (sequence is synthesized)
acaattgaagcatccttaaagaaatgaacactttttgttgtctgtgttgagtcactgatgtctaatcccctttaaaccaaaccctgtactcagtcttttgtgcccaggtaagagttgttg

SEQ ID NO: 158425 - DNA, 120 bp, Artificial Sequence
  ENSG00000106686_9 (sequence is synthesized)
attaaagtgtttgctgtttgggggctaacattttcttgtcaagctggaaaatttgtgtttttgcatgtttgttttgaacatgaaagagaaagcgctgtagttgggtggcaggtgcttatc

SEQ ID NO: 158426 - DNA, 120 bp, Artificial Sequence
  ENSG00000106686_10 (sequence is synthesized)
ccacctttcttttgctgaggctgatgctcggattgtattcatggtccgtctttgggctggggaaacaaagggaagatgttggttcagcaagaacacagaagcttaaagaagaaactgaac

SEQ ID NO: 158427 - DNA, 120 bp, Artificial Sequence
  ENSG00000106686_11 (sequence is synthesized)
tcttgacagccttgcagctaacgtaaaggttatcaaagagccagatgaacggattgttttaaggagtgactcatcatcatgtttagattcaagtcagtttggaaagtcttcatccagtaa

SEQ ID NO: 158428 - DNA, 120 bp, Artificial Sequence
  ENSG00000106686_12 (sequence is synthesized)
acaaggggatgctgatttccacgggaaagcttcatttgccacctaccagcattccacctctcctggccccttggatcagccccttctcagagaaaggttccatcctggttctcagtccac

SEQ ID NO: 158429 - DNA, 120 bp, Artificial Sequence
  ENSG00000106686_13 (sequence is synthesized)
gacccgtcccggtgggagggacctgggctgggggggacggtaggggaacaagggcgtgggactggggaagcttctgggaacatttgctctagggaacgatgcctctggaggtggtggtgg

SEQ ID NO: 158430 - DNA, 120 bp, Artificial Sequence
  ENSG00000106686_14 (sequence is synthesized)
gatttctttgcttacattattttcacaaacaatgaaaatacatttgcatatgtctggagagcaggccagagagcaaaagcagaaacctttatttgccaaacagcactctctagtagggtt

SEQ ID NO: 158431 - DNA, 120 bp, Artificial Sequence
  ENSG00000106686_15 (sequence is synthesized)
tgcaaagcaaacactgcagctggcctactgcctgagtataagccaagcacacttcccatggctcttctaagaatcagggtatgctttaataaagggccttgtacccactggactaaaaaa

SEQ ID NO: 158432 - DNA, 120 bp, Artificial Sequence
  ENSG00000106686_16 (sequence is synthesized)
aattggggatagcaggagctgatggaaagaagatcgggattgttagcatttctctatccgtctagcacgccagacagggccagtctctccggctgggggcactgcgtgggcaacagcgac

SEQ ID NO: 158433 - DNA, 120 bp, Artificial Sequence
  ENSG00000106686_17 (sequence is synthesized)
cgtgagggcgcgcgtctgcgctggggcctcgcgcgcgttccacgatgaagactgcgcgtttgagtgtccctggcaacgccacgcttccgccttctggaagcctgcactccagcttcgagt

SEQ ID NO: 158434 - DNA, 120 bp, Artificial Sequence
  ENSG00000106686_18 (sequence is synthesized)
ttctacctctgaagtaaattatatcattgaaagaccaagctaccctctgaagaaatactcactgcatgaacagagatatttttaaggggaaattaatgaaagcttaaggagaatcatgaa

SEQ ID NO: 158435 - DNA, 120 bp, Artificial Sequence
  ENSG00000106686_19 (sequence is synthesized)
caggaacggacactcactgaaattggaattttgaactgagataaacatcatacttgttttattgggatgacttccaggaacagaccgtaggcagtggcagagggaagattcttgagcccc

SEQ ID NO: 158436 - DNA, 120 bp, Artificial Sequence
  ENSG00000106686_20 (sequence is synthesized)
atggggactgtacttaagagttgtgtttgaaaataacatacaactttatgtgtctgtaagtttatataacacatgccttttttctgccaatctattaaattttgtctattttcagaataa

SEQ ID NO: 158437 - DNA, 120 bp, Artificial Sequence
  ENSG00000106686_21 (sequence is synthesized)
aagggctgctttcctggatgcttcttcaggaattcgaaggaagaaagacatgagtcacggaggcctttatctacatcacatgaaccaatatttcccttaaatactataaagatgaaacta

SEQ ID NO: 158438 - DNA, 120 bp, Artificial Sequence
  ENSG00000106686_22 (sequence is synthesized)
tcacgaatgtatactcagtgcccagcacataggagatgctcagtaaacatgctgattgaatgactaacaggtatttaagtatggctgactgccctggatccctctcccaggctctggccc

SEQ ID NO: 158439 - DNA, 120 bp, Artificial Sequence
  ENSG00000106686_23 (sequence is synthesized)
cttggcagcagagtgttgccagaacaaaacttgccagttccagctgctgcccttatgatctgtgtgatcttgaaaaagtggcttaatctgtcttcaacctcctgtttccttatctctaaa

SEQ ID NO: 158440 - DNA, 120 bp, Artificial Sequence
  ENSG00000106686_24 (sequence is synthesized)
gatggagttaaggtcccacctacttgatgacttcatagggctgctatgaggattaaataaacaggttcatgatttttaaattccaaaatgtttcttttattccccagagaaaacaaggca

SEQ ID NO: 158441 - DNA, 120 bp, Artificial Sequence
  ENSG00000106686_25 (sequence is synthesized)
ggatatgatcttactttgttaatccagggcatagggaaatctctgcagccttgattagtactccctggatgttcaaagggaaaggaagaggcaaagaggagcatgcaaaatctttctgtg

SEQ ID NO: 158442 - DNA, 120 bp, Artificial Sequence
  ENSG00000106686_26 (sequence is synthesized)
catgcatcacctatgacatctacttttcttagagacatgaagaactctcttaaaataggtaatatcaccactctaggctatttggtgatgttaacaaaataaactggtccttgagcagaa

SEQ ID NO: 158443 - DNA, 120 bp, Artificial Sequence
  ENSG00000106686_27 (sequence is synthesized)
ccttgagcagaatcagctaaaggtccccttgaagcctctgtcagctggtccacatttgaagttcaaaacatgcatcaagaagcagtgggctctccaggtgcagtggttcatgcctgtaat

SEQ ID NO: 158444 - DNA, 120 bp, Artificial Sequence
  ENSG00000106686_28 (sequence is synthesized)
gctgctggtttaggttgacatcatcgaatgtggaaaccttcagacttcctggtgccataatcaatgagatggtgtcatcgttgactccacagtaaaaagaggaccggagcattatggggt

SEQ ID NO: 158445 - DNA, 120 bp, Artificial Sequence
  ENSG00000106686_29 (sequence is synthesized)
gagagccagcaatagtccacgatgctgtactgcatgtagcccagaaaaaagccaaaagctacgtcggtgacattgtgccgccccagcatgaccctggataggcccaagacgaaggcccac

SEQ ID NO: 158446 - DNA, 120 bp, Artificial Sequence
  ENSG00000106686_30 (sequence is synthesized)
tgcatagaaacagatttcttgtaagtacaatacaaatctagtgatagaaatgaccggatttttttttttcaaatttaaagaatttttgcccaaactcagtttattaagtttacatgaaac

SEQ ID NO: 158447 - DNA, 120 bp, Artificial Sequence
  ENSG00000106686_31 (sequence is synthesized)
taaacaagtagaaacctggaaagtttttactaggtttgtatttctataattcaaactgtttgctcagccagtcatattagagtatgtttggtacatacgtttggcagcatgatgtagctg

SEQ ID NO: 158448 - DNA, 120 bp, Artificial Sequence
  ENSG00000106686_32 (sequence is synthesized)
gaagcagggtgattcagaagctaaaattacaaatttgatgtaagtgagctaattagcttttgttattgttgttctatgacatttacttgtgatcttatgaacaacagtttccatctttct

SEQ ID NO: 158449 - DNA, 75 bp, Artificial Sequence
  ENSG00000106686_33 (sequence is synthesized)
atttacttgtgatcttatgaacaacagtttccatctttcttttttaaaaatttaaaaattttaggctgggcatgg

SEQ ID NO: 158450 - DNA, 120 bp, Artificial Sequence
  ENSG00000106686_34 (sequence is synthesized)
tgggtgacaagagtgagactccatctcagaaaaaaataatgataaataaataaataataaacataaaataaaaatttagaaattttaattttttatgggtacgtagtacctgtatatatt

SEQ ID NO: 158451 - DNA, 120 bp, Artificial Sequence
  ENSG00000106686_35 (sequence is synthesized)
gggtacatgagatattttgatataggcatacagtatgtaataatcacatcaaggtaaatggtgtatccatcacctaaaacatttatcttttgagttacaaacaatccaattatattcttt

SEQ ID NO: 158452 - DNA, 120 bp, Artificial Sequence
  ENSG00000106686_36 (sequence is synthesized)
acaaacaatccaattatattcttttagttattttaaaatttacagttaaattattatcgactatagtcaccctgttgttctatcaaatactagatcttattcattctttgtatttttttt

SEQ ID NO: 158453 - DNA, 81 bp, Artificial Sequence
  ENSG00000106686_37 (sequence is synthesized)
tatcaaatactagatcttattcattctttgtattttttttttgtgccctttaaccatccccactccccctcagctctcatg

SEQ ID NO: 158454 - DNA, 120 bp, Artificial Sequence
  ENSG00000106686_38 (sequence is synthesized)
tctttctgtgcctggcttatttcacttgatataatggcctcaacttccatccacgttgttgcaagacataaaaaataatggctgaatagcactccattatgtgtatgtaatataatttct

SEQ ID NO: 158455 - DNA, 77 bp, Artificial Sequence
  ENSG00000106686_39 (sequence is synthesized)
tgatggacacttaggttggggccacctttcttttgctgaggctgatgctcggattgtattcatggtccgtctttggt

SEQ ID NO: 158456 - DNA, 120 bp, Artificial Sequence
  ENSG00000106686_40 (sequence is synthesized)
tccctcaccccaatttctttctgttttgcttttaccttattgcatataatgttgttgccacttaaaatcctttctagaacaagatggagaaggaataaaggtagtttgtgaagcttctcc

SEQ ID NO: 158457 - DNA, 120 bp, Artificial Sequence
  ENSG00000106686_41 (sequence is synthesized)
aaatactttgggacagggtagagtaaaacctgtaagtgaaacaaaatgcttatcccagatctcatgtagggtcctagaaaagaccttgaaaatgtgggctgtatgttacagaatacttaa

SEQ ID NO: 158458 - DNA, 120 bp, Artificial Sequence
  ENSG00000106686_42 (sequence is synthesized)
tgagaaagaagggccaataatctgtgcaaatctatcaaaactcttagctaaataactcatataatgggagaccaatgattaattttaaggaaggcattatctgctttttagttttgcctt

SEQ ID NO: 158459 - DNA, 120 bp, Artificial Sequence
  ENSG00000106686_43 (sequence is synthesized)
atttatcctctcttctctccaatttatttgtgatgtgttcatagcaatttttcagtgtttctttctcttccattctaccatcttaatgctgttttaacttcctaggtccttctttcagtg

SEQ ID NO: 158460 - DNA, 120 bp, Artificial Sequence
  ENSG00000106686_44 (sequence is synthesized)
cttctttcagtgttaactttttaaacaaatagttttattgttttttttcttgaactcctggcctcaagagatcctctgcttcagcctccctacgtgttgggattacaggcatgagccacc

SEQ ID NO: 158461 - DNA, 120 bp, Artificial Sequence
  ENSG00000106686_45 (sequence is synthesized)
tttttttcccttaaaacaaaagtatcactttatgttagaaaattagaaaacaaagataaataagcaaaaaggacccaaaacttaaaaaaaactgtctcattcttgccatttagagatcag

SEQ ID NO: 158462 - DNA, 120 bp, Artificial Sequence
  ENSG00000106686_46 (sequence is synthesized)
cattaatttttttagtatattctgtacacacatcacacttttaaaaaagattgagatcacgctgcattgcatattattttgtacccttcttttttttacttaatttatgataaacatttt

SEQ ID NO: 158463 - DNA, 120 bp, Artificial Sequence
  ENSG00000106686_47 (sequence is synthesized)
ctcatgtcctcaggtactcttgtgccagacaatttttcatggcttcatagtattccattgtatggaagtactgtaatctgtctggccattcattttccttttgttgagcacttaactgat

SEQ ID NO: 158464 - DNA, 120 bp, Artificial Sequence
  ENSG00000106686_48 (sequence is synthesized)
atatcagccagggtccagtcaggaaaccacaccaaacttgtgactgtaacagaaagatttaatttttaaaaatggctaaacaggggttgaaagaaagactgaaagataaaaggggaacac

SEQ ID NO: 158465 - DNA, 120 bp, Artificial Sequence
  ENSG00000106686_49 (sequence is synthesized)
cagacctctggagaagggctgctttcctggatgcttcttcaggaattcgaaggtgggacttggatgagctggaactcagatctcaaaggaggggcactgctcactgctggtgccacagga

SEQ ID NO: 158466 - DNA, 120 bp, Artificial Sequence
  ENSG00000106686_50 (sequence is synthesized)
gcttggaggaaggttcctgtgggtctagactcaaatctgaacagggggctctggtcagctgccgctgatatgtctggaggagtgcaatggggctagtcctggcataataggggaaaggct

SEQ ID NO: 158467 - DNA, 120 bp, Artificial Sequence
  ENSG00000106686_51 (sequence is synthesized)
ataatctggagccatttgcagctgttaaggcgaagaatggttgcaggaatgatgctaacaggaatagaatgcaaaactggaagtagccagtcactgtgtctcctccagccttgcactttc

SEQ ID NO: 158468 - DNA, 120 bp, Artificial Sequence
  ENSG00000106686_52 (sequence is synthesized)
tctagcaccttccagtggcagagcctacagagaccaggtggaaaagcaaaaaagggagtttgtagagtccctggaccagtattatatagctgaggtggatttgcaactgagcgcaattgc

SEQ ID NO: 158469 - DNA, 120 bp, Artificial Sequence
  ENSG00000106686_53 (sequence is synthesized)
ttactcaccaatacagctggtttctaacttttaaactatcataagcatttttgtagctatacatatagccatagttatttccttataatacattcctggaagtgaaattgctagacccct

SEQ ID NO: 158470 - DNA, 120 bp, Artificial Sequence
  ENSG00000106686_54 (sequence is synthesized)
ctatgtgtcaaattctctattatctatctattggaggtgtctgacactttctaacttccccctattataaataaatctcactgttaattagttgaatacattatactagcaagttataaa

SEQ ID NO: 158471 - DNA, 120 bp, Artificial Sequence
  ENSG00000106686_55 (sequence is synthesized)
tactactgatgttaaactgaacaggaaaaaaattagagaaatgtccttcttaagtttatgttttataaatctgaggtgtgttatctttgaccttaatttttaaaaattcaattaaataca

SEQ ID NO: 158472 - DNA, 120 bp, Artificial Sequence
  ENSG00000106688_0 (sequence is synthesized)
gcaaaactaccgggctggcagggcggcgggcgcggtgcgcgatcccgggtggcggcggcaacggcggtggtgacggcggcgactgcagcggccggctctcacctctcccctgtgcacccg

SEQ ID NO: 158473 - DNA, 120 bp, Artificial Sequence
  ENSG00000106688_1 (sequence is synthesized)
catctcgccgcgccgccgagcagccagcagtccccgggtcgcccagcccacgcgcgcacggccgagcccagcgcacaatagcggcgacagccatggggaaaccggcgaggaaaggatgcg

SEQ ID NO: 158474 - DNA, 120 bp, Artificial Sequence
  ENSG00000106688_2 (sequence is synthesized)
agtggaagcgcttcctgaagaataactgggtgttgctgtccaccgtggccgcggtggtgctaggcattaccacaggagtcttggttcgagaacacagcaacctctcaactctagagaaat

SEQ ID NO: 158475 - DNA, 120 bp, Artificial Sequence
  ENSG00000106688_3 (sequence is synthesized)
tctactttgcttttcctggagaaattctaatgcggatgctgaaactcatcattttgccattaattatatccagcatgattacaggtgttgctgcactggattccaacgtatccggaaaaa

SEQ ID NO: 158476 - DNA, 120 bp, Artificial Sequence
  ENSG00000106688_4 (sequence is synthesized)
ttggtctgcgcgctgtcgtgtattatttctgtaccactctcattgctgttattctaggtattgtgctggtggtgagcatcaagcctggtgtcacccagaaagtgggtgaaattgcgagga

SEQ ID NO: 158477 - DNA, 120 bp, Artificial Sequence
  ENSG00000106688_5 (sequence is synthesized)
caggcagcacccctgaagtcagtacggtggatgccatgttagatctcatcaggaatatgttccctgagaatcttgtccaggcctgttttcagcagtacaaaactaagcgtgaagaagtga

SEQ ID NO: 158478 - DNA, 120 bp, Artificial Sequence
  ENSG00000106688_6 (sequence is synthesized)
agcctcccagcgatccagagatgaacatgacagaagagtccttcacagctgtcatgacaactgcaatttccaagaacaaaacaaaggaatacaaaattgttggcatgtattcagatggca

SEQ ID NO: 158479 - DNA, 120 bp, Artificial Sequence
  ENSG00000106688_7 (sequence is synthesized)
taaacgtcctgggcttgattgtcttttgccttgtctttggacttgtcattggaaaaatgggagaaaagggacaaattctggtggatttcttcaatgctttgagtgatgcaaccatgaaaa

SEQ ID NO: 158480 - DNA, 120 bp, Artificial Sequence
  ENSG00000106688_8 (sequence is synthesized)
tcgttcagatcatcatgtgttatatgccactaggtattttgttcctgattgctgggaagatcatagaagttgaagactgggaaatattccgcaagctgggcctttacatggccacagtcc

SEQ ID NO: 158481 - DNA, 120 bp, Artificial Sequence
  ENSG00000106688_9 (sequence is synthesized)
tgactgggcttgcaatccactccattgtaattctcccgctgatatatttcatagtcgtacgaaagaaccctttccgatttgccatgggaatggcccaggctctcctgacagctctcatga

SEQ ID NO: 158482 - DNA, 120 bp, Artificial Sequence
  ENSG00000106688_10 (sequence is synthesized)
tctcttccagttcagcaacactgcctgtcaccttccgctgtgctgaagaaaataaccaggtggacaagaggatcactcgattcgtgttacccgttggtgcaacaatcaacatggatggga

SEQ ID NO: 158483 - DNA, 120 bp, Artificial Sequence
  ENSG00000106688_11 (sequence is synthesized)
ctgcgctctatgaagcagtggcagcggtgtttattgcacagttgaatgacctggacttgggcattgggcagatcatcaccatcagtatcacggccacatctgccagcatcggagctgctg

SEQ ID NO: 158484 - DNA, 120 bp, Artificial Sequence
  ENSG00000106688_12 (sequence is synthesized)
gcgtgccccaggctggcctggtgaccatggtgattgtgctgagtgccgtgggcctgcccgccgaggatgtcaccctgatcattgctgtcgactggctcctggaccggttcaggaccatgg

SEQ ID NO: 158485 - DNA, 120 bp, Artificial Sequence
  ENSG00000106688_13 (sequence is synthesized)
tcaacgtccttggtgatgcttttgggacgggcattgtggaaaagctctccaagaaggagctggagcagatggatgtttcatctgaagtcaacattgtgaatccctttgccttggaatcca

SEQ ID NO: 158486 - DNA, 120 bp, Artificial Sequence
  ENSG00000106688_14 (sequence is synthesized)
caatccttgacaacgaagactcagacaccaagaagtcttatgtcaatggaggctttgcagtagacaagtctgacaccatctcattcacccagacctcacagttctagggcccctggctgc

SEQ ID NO: 158487 - DNA, 120 bp, Artificial Sequence
  ENSG00000106688_15 (sequence is synthesized)
atatacagacctccagattattttctatatttggattcacagcctttgcgctctgggttttgggatttgggtgtggggtaagttgaagggaaatcaatttaaaggaaagttctattatct

SEQ ID NO: 158488 - DNA, 120 bp, Artificial Sequence
  ENSG00000106688_16 (sequence is synthesized)
gggttttagaaattctataagagacaaagtttggaagtacataaagtaataactgttagaattaggtaatggatatgaaagagaaaatgctttctcatgcatagacaagtgttttgggtt

SEQ ID NO: 158489 - DNA, 120 bp, Artificial Sequence
  ENSG00000106688_17 (sequence is synthesized)
tttaaaaaaaatattctgtcattggttacaaatttttactcaggctttctattggcatggatttcctttgacctctcacttttttataaattataatgcatctaaaccacctgtccccag

SEQ ID NO: 158490 - DNA, 120 bp, Artificial Sequence
  ENSG00000106688_18 (sequence is synthesized)
ttaatgtgccaaaatgtcaatttttaacttatctccagccaatttcaaagaaaacagaccagcatagttctgcaataacagttttaagatgggcatagggtttggaagaaagggagaagg

SEQ ID NO: 158491 - DNA, 120 bp, Artificial Sequence
  ENSG00000106688_19 (sequence is synthesized)
attcttttttcaatgtactgtattgggacgctggtaactgttaacccagtgttcagcatagagctatatatatatatatatgtatatatttattattttcatataatttgccagacagag

SEQ ID NO: 158492 - DNA, 120 bp, Artificial Sequence
  ENSG00000106688_20 (sequence is synthesized)
atcagaattgaaccgtcaatgtgaaataaagagttctccttgtacttgaataataaccacgattccaacccaggtctgctttggggcttatcagaactcctttctaaggagcactagaat

SEQ ID NO: 158493 - DNA, 120 bp, Artificial Sequence
  ENSG00000106688_21 (sequence is synthesized)
gagaaatcatgttgttcgatcgtttcacatctgtatatcagctctaaagcagagatgtattatggtgatactccaaggtggcatagccattcatttacaacttccagatttgagctgcct

SEQ ID NO: 158494 - DNA, 120 bp, Artificial Sequence
  ENSG00000106688_22 (sequence is synthesized)
ggagggaatccatatcagctctgcataagattatatacaaagctgtcactcacaaaaggctggatgtgctttcatccaactggaaggctttattcttccaagttcattcatactcaaaga

SEQ ID NO: 158495 - DNA, 120 bp, Artificial Sequence
  ENSG00000106688_23 (sequence is synthesized)
ggccagtactttgccatccttgcacttctgttatcagggcccaaataacagtggcaagctaccaactaagttgtattttaataaagattccatgggttgaacaagccacgttgcagaaaa

SEQ ID NO: 158496 - DNA, 120 bp, Artificial Sequence
  ENSG00000106688_24 (sequence is synthesized)
agagcttcccctaacctgggttgttgcagagtaaatcccacgacataagctggtatcagtggttcgggggaaatagttccattctatgactcttgtctcctcctccaggaggactgttct

SEQ ID NO: 158497 - DNA, 120 bp, Artificial Sequence
  ENSG00000106688_25 (sequence is synthesized)
aactagtaatcttggccctattcattacatcctctgcttgtcattctgctaatttatgaagatagtttattatagtctgtacttcagttctcatcttgtaaataatgcttaacataaact

SEQ ID NO: 158498 - DNA, 120 bp, Artificial Sequence
  ENSG00000106688_26 (sequence is synthesized)
tgtacttacactgaaatccaaaatagtcatgtttctgcagtattctgtagccaacttaaacctgtgctttcatgtttaagaaatgagaaattgtgccaaagatagcagaagagtagataa

SEQ ID NO: 158499 - DNA, 120 bp, Artificial Sequence
  ENSG00000106688_27 (sequence is synthesized)
gtgctcagtattgacgacctacatctgaaatctacaacataatgatactgaattgttatgtaaacatcataaatagtaaataatgattcaatgtgaattttaaaatgcaaatattgctat

SEQ ID NO: 158500 - DNA, 120 bp, Artificial Sequence
  ENSG00000106688_28 (sequence is synthesized)
tgtttataggaaataaatctaaatataaatgaaattgaatcagtaatttatcttgggctaaatggttctaccccttactaggttgccccaattagtggcactagttggcagagctgttca

SEQ ID NO: 158501 - DNA, 120 bp, Artificial Sequence
  ENSG00000106688_29 (sequence is synthesized)
tgagctgccagttatcattttggagtcagtttgaaaccagcctcttaacacactgctgttaactcataaaagagaagagtgttccatttcagtctcaataaacacttccctcattctttc

SEQ ID NO: 158502 - DNA, 120 bp, Artificial Sequence
  ENSG00000106688_30 (sequence is synthesized)
ctgaaacctccaatgacagcttgccgaaagatgattcagttgtttctcaacttggcccattccccacgtccaagtccaattggagaacggcttttgactccgtttatatgagcatctttg

SEQ ID NO: 158503 - DNA, 120 bp, Artificial Sequence
  ENSG00000106688_31 (sequence is synthesized)
atagagagcaaaggtttctggcaaggcgggatgcctgccttccacctctaatccagctgtccttgacactccagacagccctttcaaatctgggcaacacttagtcatcttactggtagc

SEQ ID NO: 158504 - DNA, 120 bp, Artificial Sequence
  ENSG00000106689_0 (sequence is synthesized)
aattctcccggtggctcgactcggctcgcaggcttcggagaaacccctactccagtcgccgactcagcgcccaagagggtcgccttgggctgggggcgcaccccagggaggggaggggtc

SEQ ID NO: 158505 - DNA, 120 bp, Artificial Sequence
  ENSG00000106689_1 (sequence is synthesized)
caggcagctgggccgccgcggacacctagcggcttcagggtgaaccccgaccgcagccgtcgccgcctcgggcagagtttgcgcccttgctttgcgccccgggcgctgaagccgggcggg

SEQ ID NO: 158506 - DNA, 120 bp, Artificial Sequence
  ENSG00000106689_2 (sequence is synthesized)
cgatgcccgcggcgtgaaagcgcccgcggcgggcgccgacctctgtcctagtctcctgctccccccgccccgcttgtcccgtgcccttgtgaccctggctttggcgccgtcgcccaggcg

SEQ ID NO: 158507 - DNA, 80 bp, Artificial Sequence
  ENSG00000106689_3 (sequence is synthesized)
ttggcgccgtcgcccaggcgccccgcaatgtagctgcccctgcgcctcggcgggaggcgtcctgccccgcgagcgcccgg

SEQ ID NO: 158508 - DNA, 120 bp, Artificial Sequence
  ENSG00000106689_4 (sequence is synthesized)
atgcaccgggcccgttagcgccaggagcgccaggcagctgaggcggggggcaagccctccctcggaggagccgcgcccccggccccgccggtcccgccgcgatgctgttccacagtctgt

SEQ ID NO: 158509 - DNA, 120 bp, Artificial Sequence
  ENSG00000106689_5 (sequence is synthesized)
cgggccccgaggtgcacggggtcatcgacgagatggaccgcagggccaagagcgaggctcccgccatcagctccgccatcgaccgcggcgacaccgagacgaccatgccgtccatcagca

SEQ ID NO: 158510 - DNA, 120 bp, Artificial Sequence
  ENSG00000106689_6 (sequence is synthesized)
gtgaccgcgccgcgctgtgcgccggctgcgggggcaagatctcggaccgctactacctgctggcggtggacaagcagtggcacatgcgctgcctcaagtgctgcgagtgcaagctcaacc

SEQ ID NO: 158511 - DNA, 120 bp, Artificial Sequence
  ENSG00000106689_7 (sequence is synthesized)
tggagtcggagctcacctgtttcagcaaggacggtagcatctactgcaaggaagactactacaggcgcttctctgtgcagcgctgcgcccgctgccacctgggcatctcggcctcggaga

SEQ ID NO: 158512 - DNA, 120 bp, Artificial Sequence
  ENSG00000106689_8 (sequence is synthesized)
tggtgatgcgcgctcgggacttggtttatcacctcaactgcttcacgtgcaccacgtgtaacaagatgctgaccacgggcgaccacttcggcatgaaggacagcctggtctactgccgct

SEQ ID NO: 158513 - DNA, 120 bp, Artificial Sequence
  ENSG00000106689_9 (sequence is synthesized)
gccaaccctctgggtcttccctactacaatggcgtgggcactgtgcagaaggggcggccgaggaaacgtaagagcccgggccccggtgcggatctggcggcctacaacgctgcgctaagc

SEQ ID NO: 158514 - DNA, 120 bp, Artificial Sequence
  ENSG00000106689_10 (sequence is synthesized)
tgcaacgaaaacgacgcagagcacctggaccgtgaccagccatacccgagcagccagaagaccaagcgcatgcgcacgtccttcaagcaccaccagcttcggaccatgaagtcttacttt

SEQ ID NO: 158515 - DNA, 120 bp, Artificial Sequence
  ENSG00000106689_11 (sequence is synthesized)
gccattaaccacaaccccgacgccaaggacttgaagcagctcgcgcaaaagacgggcctcaccaagcgggtcctccaggtctggttccagaacgcccgagccaagttcaggcgcaacctc

SEQ ID NO: 158516 - DNA, 120 bp, Artificial Sequence
  ENSG00000106689_12 (sequence is synthesized)
ttacggcaggaaaacacgggcgtggacaagtcgacagacgcggcgctgcagacagggacgccatcgggcccggcctcggagctctccaacgcctcgctcagcccctccagcacgcccacc

SEQ ID NO: 158517 - DNA, 120 bp, Artificial Sequence
  ENSG00000106689_13 (sequence is synthesized)
accctgacagacttgactagccccaccctgccaactgtgacgtccgtcttaacttctgtgcctggcaacctggagggccatgagcctcacagcccctcacaaacgactcttaccaacctt

SEQ ID NO: 158518 - DNA, 120 bp, Artificial Sequence
  ENSG00000106689_14 (sequence is synthesized)
ttctaatgactcgcaacccctcaccccacaatttctttaaaaaagaaattatctttagttgaattccaagtgtattttaaaatagaggctttgagcaactaactaaccacattttaggat

SEQ ID NO: 158519 - DNA, 120 bp, Artificial Sequence
  ENSG00000106689_15 (sequence is synthesized)
ctcgcctggaaacagaggtaaaaaaaagaagtgtgcgcccggctaatgcagcggtgtggaccgaggaacaacttggaagatctacctgcaacacaacatttgtgtcactgtacagttttg

SEQ ID NO: 158520 - DNA, 120 bp, Artificial Sequence
  ENSG00000106689_16 (sequence is synthesized)
tggactgagcgaggaaaaacaacaaataatttaagttggctagagcttctgtattttcaaagactgccacgtgccttaggaatactgttttatctccatactttggatgacttgttcatt

SEQ ID NO: 158521 - DNA, 120 bp, Artificial Sequence
  ENSG00000106689_17 (sequence is synthesized)
tttctctccctctttttctctgtatatttatgaccagagcaaaaatgtaaaaaacaaaaaaaacaacaaaaaaagtttgttactttgaatagtcctaaaaagaaaaaaagaaaaaaaaaa

SEQ ID NO: 158522 - DNA, 120 bp, Artificial Sequence
  ENSG00000106689_18 (sequence is synthesized)
aaggaaaaatcaaaccccctccaacggtcgctttgttgttttagaattttaaggtggaagtctgttcgaatatcagaatttgtaaaatctaaccagtaataaaaccacttattgaaacta

SEQ ID NO: 158523 - DNA, 120 bp, Artificial Sequence
  ENSG00000106692_0 (sequence is synthesized)
gtaaagcggagcggctgcagcctgctgttgagtgagaaaacaaaattatcttcctttccaaatccaaaaagatgaaaacgactgagatactttcaaaagacaaccaagtgagcagcacag

SEQ ID NO: 158524 - DNA, 120 bp, Artificial Sequence
  ENSG00000106692_1 (sequence is synthesized)
actaatgagtagaatcaataagaacgtggttttggcccttttaacgctgacaagttctgcatttctgctgtttcagttgtactactacaagcactatttatcaacaaagaatggagctgg

SEQ ID NO: 158525 - DNA, 120 bp, Artificial Sequence
  ENSG00000106692_2 (sequence is synthesized)
tttgtcaaaatccaaaggaagccgaattggatttgatagcacacagtggcgtgcagttaaaaaatttattatgttaacatccaaccaaaatgtaccagtgtttcttattgatcctttgat

SEQ ID NO: 158526 - DNA, 120 bp, Artificial Sequence
  ENSG00000106692_3 (sequence is synthesized)
actggaattgattaataagaactttgaacaagtcaaaaatacttctcatggctctacttcacaatgcaagtttttctgtgttccaagagactttactgcatttgcactgcagtatcacct

SEQ ID NO: 158527 - DNA, 120 bp, Artificial Sequence
  ENSG00000106692_4 (sequence is synthesized)
atggaagaatgaggaaggctggtttcggatagctgagaatatgggatttcagtgcctaaagattgagagtaaagatccccggctagacgggatagactcactctctggaactgaaatccc

SEQ ID NO: 158528 - DNA, 120 bp, Artificial Sequence
  ENSG00000106692_5 (sequence is synthesized)
cctgcactatatctgcaaactggccactcatgcgatccacttggtagtctttcatgagaggagtggcaactacctctggcacggccacttgagacttaaagaacacattgacaggaaatt

SEQ ID NO: 158529 - DNA, 120 bp, Artificial Sequence
  ENSG00000106692_6 (sequence is synthesized)
tgttcccttccgaaagttacagtttggtcgttatccaggagcttttgacaggccagagttacagcaagttactgttgatggactggaagttctcattccaaaggatccaatgcactttgt

SEQ ID NO: 158530 - DNA, 120 bp, Artificial Sequence
  ENSG00000106692_7 (sequence is synthesized)
agaagaagtaccacactctaggtttattgagtgtaggtataaagaagctcgagcattctttcagcagtaccttgatgataacactgtggaagctgtggcctttcggaagagtgcaaagga

SEQ ID NO: 158531 - DNA, 120 bp, Artificial Sequence
  ENSG00000106692_8 (sequence is synthesized)
attactgcaactagcagcgaaaacattaaacaaattgggagtaccattctggctgagcagtggaacttgtctaggatggtatcgacaatgcaacattattccttatagcaaagatgttga

SEQ ID NO: 158532 - DNA, 120 bp, Artificial Sequence
  ENSG00000106692_9 (sequence is synthesized)
cctaggaatttttatacaagattacaaatctgatattattttagcatttcaggatgcaggacttccgctcaaacacaaatttgggaaggtagaagacagcttggaactatccttccaggg

SEQ ID NO: 158533 - DNA, 120 bp, Artificial Sequence
  ENSG00000106692_10 (sequence is synthesized)
aaaagatgatgtaaaacttgatgtttttttcttctatgaagaaactgatcacatgtggaatggaggcactcaggccaaaacaggaaaaaaattcaaatacctgtttccgaagtttacact

SEQ ID NO: 158534 - DNA, 120 bp, Artificial Sequence
  ENSG00000106692_11 (sequence is synthesized)
gtgctggactgagtttgtagacatgaaggtccatgtaccctgtgaaaccctcgaatacattgaagccaactatggtaagacctggaagattcctgtaaagacgtgggactggaagcgctc

SEQ ID NO: 158535 - DNA, 120 bp, Artificial Sequence
  ENSG00000106692_12 (sequence is synthesized)
tcctcccaatgtgcaacccaatggaatctggcctatttctgagtgggatgaggttatccagttatattgagatagtaggttgaaatgggagaatttctcttttggaaaaaaaggtagata

SEQ ID NO: 158536 - DNA, 120 bp, Artificial Sequence
  ENSG00000106692_13 (sequence is synthesized)
actgtttaaaaaatacatgtctatttgtcaaacataagtgggaaccaaagaaaaaatgtgacaagtttgaagacacagaaagagtcatctgatgtaattctctcacttagtactgaggaa

SEQ ID NO: 158537 - DNA, 120 bp, Artificial Sequence
  ENSG00000106692_14 (sequence is synthesized)
ttttcatgtgccacatacaatgctaggttacagtggagaagcctagatgaatgagacaaatacctacttcttttattcctccttttggtaaacaactcaattttcctttgagggaaccct

SEQ ID NO: 158538 - DNA, 120 bp, Artificial Sequence
  ENSG00000106692_15 (sequence is synthesized)
cccccaccctttgaagagttcaagttctgtacaggtttttaaaacgtgaagtaatgtttgaactggaagatgagctcaccaggcaaagctaaggaaggatatactagttgaaaagaataa

SEQ ID NO: 158539 - DNA, 120 bp, Artificial Sequence
  ENSG00000106692_16 (sequence is synthesized)
cccactcctcttctgggcatttaagctggtatgttagtgctacttttaagattgtggagtctgagttaatattcaagtgatcagactttgagtgacatcaagaaaagatgatatcaggtt

SEQ ID NO: 158540 - DNA, 120 bp, Artificial Sequence
  ENSG00000106692_17 (sequence is synthesized)
catttttcaactaatcttatgtggaattgaattagagaacaaggcattattcttttagggaaggtgagagcttatttgtatcagagcttattacttgtcaggataagtaaatttctgtac

SEQ ID NO: 158541 - DNA, 120 bp, Artificial Sequence
  ENSG00000106692_18 (sequence is synthesized)
atgtactgttttcatatgtgaagtgagaagaaactttatgcttgtttaatgcttaaatttccatccattgtgagaatattttcactgacctctgatggcacttgttgacaaatcattcaa

SEQ ID NO: 158542 - DNA, 120 bp, Artificial Sequence
  ENSG00000106692_19 (sequence is synthesized)
gtgagaccatgttactagacatgatcttgaaagaggccatgatttcacaaaactcatttttattttattctcagacagtctgttaggtaaaaatatgagaaattcatgtacattttatat

SEQ ID NO: 158543 - DNA, 120 bp, Artificial Sequence
  ENSG00000106692_20 (sequence is synthesized)
taatctgtgcactcccaattttaatgacactaaaatattaatagaattttttaaatatactctaatttttaaaacatactctttattatcttcatttatcaattacagcttcgtatctct

SEQ ID NO: 158544 - DNA, 120 bp, Artificial Sequence
  ENSG00000106692_21 (sequence is synthesized)
cttcgtatctctaatttatggtctatataccaatttaaatggcatgtaaacctgcctgtttcttctcctcttctaatatatcagatctccaaaatggaagctaaatggtggacttgacaa

SEQ ID NO: 158545 - DNA, 120 bp, Artificial Sequence
  ENSG00000106692_22 (sequence is synthesized)
ctattcaccctacctcagatcatagagtttgtaaagtttgtgtccctccccagtttttcagtctgttgaatgtcgatggggcaagaactcagacttctactttaccaagtaccacacact

SEQ ID NO: 158546 - DNA, 120 bp, Artificial Sequence
  ENSG00000106692_23 (sequence is synthesized)
ctggaatgctttagtttccttttcccctcaagatgtctgagtcagctaggatgctgtttaccccatctctctcttatatcacttgaatgatatattgtaagtgagaggtaaaggaaaatg

SEQ ID NO: 158547 - DNA, 120 bp, Artificial Sequence
  ENSG00000106692_24 (sequence is synthesized)
taggcacaataagcactgctatttttctctttgtctaggaaaggaagctgaatcttatatcttatctatgctatttaggactactttctggagcttggcagattttcctctgacaccaga

SEQ ID NO: 158548 - DNA, 120 bp, Artificial Sequence
  ENSG00000106692_25 (sequence is synthesized)
gaacaatagtagtctcaagaatggaaacctgaatgtctgagggaatgggctggtagactttttcgaaaacaaattagagaaagtaacttacaaccacccattccggatttgtaaagcaac

SEQ ID NO: 158549 - DNA, 120 bp, Artificial Sequence
  ENSG00000106692_26 (sequence is synthesized)
atgaaaacctttgataaatgataaccaacagtcttctgtcctaatttgcattctcaatgcagaattattgggtctttcataaataacatgagtggtttctggagacatttaagattgtca

SEQ ID NO: 158550 - DNA, 120 bp, Artificial Sequence
  ENSG00000106692_27 (sequence is synthesized)
gcaaacttgtcccaaaatggcacatcatcataatccattttctctttgctagaaaatcagcccatagagtgcattcccaaattctaaatagctgaccctaaattcatttttcatgcttaa

SEQ ID NO: 158551 - DNA, 120 bp, Artificial Sequence
  ENSG00000106692_28 (sequence is synthesized)
aaataatagaacaaataataatactatttttgggcaaaatccaccctacttgatgaggaccatttgcttgtgctcagtatttagaaatgcatacactccacatttctccccatttccaat

SEQ ID NO: 158552 - DNA, 120 bp, Artificial Sequence
  ENSG00000106692_29 (sequence is synthesized)
tgggactcccattctttgccaggagatcttacccatcccttttcagattaatcttttatcctttcctgaagtacaaagtcttaagagtgtctgaaatccaagacatcttggcccaattga

SEQ ID NO: 158553 - DNA, 120 bp, Artificial Sequence
  ENSG00000106692_30 (sequence is synthesized)
atacttttcttgtcttctggtttcacaggcttcagctcatgggttccaccctaacttggggaaacaaaagccttctctagaatctgaaggccaggcttacctctgattctgattcatcca

SEQ ID NO: 158554 - DNA, 120 bp, Artificial Sequence
  ENSG00000106692_31 (sequence is synthesized)
tacttcatcttatgtattttaacagttgggttctgtggagtgtccagagaccttgggttaggtatatccatcttcagtacctcattggatcacttttctttcatcacttgagtattctag

SEQ ID NO: 158555 - DNA, 120 bp, Artificial Sequence
  ENSG00000106692_32 (sequence is synthesized)
cagtcattctcctaatctgaccactttcaggtttagtttacctggcttacctggggaagttgacaacttgttggtagttaggcacccatgaatgtctccagagacatcctgagaggcaag

SEQ ID NO: 158556 - DNA, 120 bp, Artificial Sequence
  ENSG00000106692_33 (sequence is synthesized)
attcctcttaattgataaccaggacaaccaggtagtcacccagtcctctctaagcagggagcacttgtccttctctcctctgctgcagctactgatatctggcccctggaataaaaccat

SEQ ID NO: 158557 - DNA, 120 bp, Artificial Sequence
  ENSG00000106692_34 (sequence is synthesized)
agttcctaaaattgagcatccctaagagtagctgcttggtgggacagctgatttctttgattccctagctgcaaaacctgaaattgaccactaggtgacagaatgtttgccagtatcccc

SEQ ID NO: 158558 - DNA, 120 bp, Artificial Sequence
  ENSG00000106692_35 (sequence is synthesized)
acaaaacaagttaaaacttaagtgaaaatcattctgcttttgaatcttaaaagctagaaaaaccataatgtaatattctttttaaaccctcttattttataactaaataaataatcacag

SEQ ID NO: 158559 - DNA, 120 bp, Artificial Sequence
  ENSG00000106692_36 (sequence is synthesized)
aaaagaatgatctgaacaagaacagctgaggctaaaacccaagactgccgtgactcctagtccaatgtctgtttcgcatcacaacacagtatctttaacagtgcttgagatgcttaacag

SEQ ID NO: 158560 - DNA, 120 bp, Artificial Sequence
  ENSG00000106692_37 (sequence is synthesized)
agaaggcatccagtgcttcattgaggctaagtctcagggtgtttctgccgcttagtatctttttgttcagattgagaacctaaggcgacagagaggtcaaggggaagtattttctagttc

SEQ ID NO: 158561 - DNA, 120 bp, Artificial Sequence
  ENSG00000106692_38 (sequence is synthesized)
agaattcagaattcttaggcaaccttcatacctttatctggaaaatgccttctctccagacaataagacagttcacatctggagacatcagcctttggtacctaattctctaagctcaag

SEQ ID NO: 158562 - DNA, 120 bp, Artificial Sequence
  ENSG00000106692_39 (sequence is synthesized)
atgcatcccattgccactttaccattctatttcccaagggaaccatcagcaccaacctgctaaatgcctgtatttgaagtctctccccttcctgaagtgaccttttatgaggctctttcc

SEQ ID NO: 158563 - DNA, 120 bp, Artificial Sequence
  ENSG00000106692_40 (sequence is synthesized)
ttcctaagggacctttccctggtagtagtggtctcattcacaaaaaagaataatagatgtaactggagtcactttgcagttttcaagattttttttttatctgcttggctggaaaggaga

SEQ ID NO: 158564 - DNA, 120 bp, Artificial Sequence
  ENSG00000106692_41 (sequence is synthesized)
ctagagtatctagtttttagtatttaaactacttttaattatttatattgatactctctgataaatgcaggtagttaagaatagattgtactcattcctttttgagtttgtgacctcaaa

SEQ ID NO: 158565 - DNA, 120 bp, Artificial Sequence
  ENSG00000106692_42 (sequence is synthesized)
ccattgtttttattcttacacgactacagtacttcaaatggcacatagataggcaggatattacataggtaagcaggaatttatacattgggtaccagagctaaatctggaaaacacatt

SEQ ID NO: 158566 - DNA, 120 bp, Artificial Sequence
  ENSG00000106692_43 (sequence is synthesized)
tggaatgagcttccacacttcagtctaaaatctcacccaaacttatggctacatatttttctaagtttcccccctagtttcactttctggaaagtgaacagttttttaaatcctaaatgt

SEQ ID NO: 158567 - DNA, 120 bp, Artificial Sequence
  ENSG00000106692_44 (sequence is synthesized)
tataaatccttaggagaaatattccctcaaaacctagtcaagaaagtgccacattcccaccttctaacaggtaattattagttgtaatagctttaatgcatggaaaaacttcagttactg

SEQ ID NO: 158568 - DNA, 120 bp, Artificial Sequence
  ENSG00000106692_45 (sequence is synthesized)
accagtcaagagaatttctcaagaaaaatcccagcaacgttccctctttcctccttgtcttccactatcattaagacctgggctagatcacctctaacatctcactcagggaaggcaatg

SEQ ID NO: 158569 - DNA, 120 bp, Artificial Sequence
  ENSG00000106692_46 (sequence is synthesized)
tgttgccataaaaagaccacaagcttttgagttaggcctgaatttgaatttcagcttaatcatgtgggatttatggtgggggccctttcagtctcaatttccacattagtgaactgggga

SEQ ID NO: 158570 - DNA, 120 bp, Artificial Sequence
  ENSG00000106692_47 (sequence is synthesized)
aatgatacatacttctaagggtttttagggggattaaatgaagtatacagttcttagcctcaggcctaggattaagtaagtactcaagaaatgtgcaattttctagttccatgtttcttt

SEQ ID NO: 158571 - DNA, 120 bp, Artificial Sequence
  ENSG00000106692_48 (sequence is synthesized)
tctaatcttcaaatggaattatagaaaccatgggtcagaacatattcctttactcaaaagattgcatgactgaatttgcttaagaaaaaaaaaattgtatcaagtcattaatacaattat

SEQ ID NO: 158572 - DNA, 120 bp, Artificial Sequence
  ENSG00000106692_49 (sequence is synthesized)
acattaattatattacattaatacaatatatggtttgtgaattcagagacattaccagtttgcctccttctctcaatagaacttgtattttcattttcttggttaagcagttgtctccta

SEQ ID NO: 158573 - DNA, 120 bp, Artificial Sequence
  ENSG00000106692_50 (sequence is synthesized)
atattatcccatatgctacctagtttgctggtcccaagcagtttactgtacttcactagatttggtacctgctctcccctggacttctttttcaatattctagcctttcctagatgtaaa

SEQ ID NO: 158574 - DNA, 120 bp, Artificial Sequence
  ENSG00000106692_51 (sequence is synthesized)
tctttacctccttgttagtgaaattagatataagccatgatttggagagggaagaaatctggaatacttaatttcatttaattatctatgctgatgaatgcctgtatcattgttaataaa

SEQ ID NO: 158575 - DNA, 120 bp, Artificial Sequence
  ENSG00000106692_52 (sequence is synthesized)
ggagaattgaaaatactcatttctactttctgccctcaaatttctgtttctatctcaactaggcaagaatcagcagggtgcatgatgccattttaagctgcttcacatcagactgaaatc

SEQ ID NO: 158576 - DNA, 120 bp, Artificial Sequence
  ENSG00000106692_53 (sequence is synthesized)
ctaattacagttcataagtgaaacagactaattcaatggcaataccttttgtataggtcctgtgcttaaaggaggcaagtataaattttctaataagaaatccctgcttcttttgggtgc

SEQ ID NO: 158577 - DNA, 62 bp, Artificial Sequence
  ENSG00000106692_54 (sequence is synthesized)
tctgcagtgagccaagatcgcggcattgcacttcagcctgggcgatagagcaagactctgtc

SEQ ID NO: 158578 - DNA, 120 bp, Artificial Sequence
  ENSG00000106692_55 (sequence is synthesized)
caagactctgtctcagaaaaaaaaaaaaaggaaagaaagaaatctctgcttccgtactatcaaaacttctaccctagaataccccctggcaccttctaacccaacctaatacagagattt

SEQ ID NO: 158579 - DNA, 120 bp, Artificial Sequence
  ENSG00000106692_56 (sequence is synthesized)
ccaacctaatacagagattttgtagggacccattaacaagctcctatataattataagcagctctcacagtagggttgaaagagaatataaggaaaattagaagtactgtatttttgcta

SEQ ID NO: 158580 - DNA, 120 bp, Artificial Sequence
  ENSG00000106692_57 (sequence is synthesized)
ttggaaatgaaatattgtttcatgcacctttgaaaaaaataacaggattttacagccttctgatgattcattcaaagcatggggaatagttcatatgtttgttaaatgaaaatcttatgt

SEQ ID NO: 158581 - DNA, 120 bp, Artificial Sequence
  ENSG00000106692_58 (sequence is synthesized)
agctatttgtgtgtccctcccacttcataactacaaaaacatatatatgaatttctaaacaaagtgatattttaaagatgaattgattcaatgtgtacttaccagtttactgtgtggttt

SEQ ID NO: 158582 - DNA, 120 bp, Artificial Sequence
  ENSG00000106692_59 (sequence is synthesized)
tatcttcaggtacagatagtttgtggtactacttgaaaatacctttaatattattttcatcagaatttgtaatatataatccagtttgggatgatgaataaaatttttctaatctcttga

SEQ ID NO: 158583 - DNA, 120 bp, Artificial Sequence
  ENSG00000106692_60 (sequence is synthesized)
gtaaagcggagcggctgcagcctgctgttgagtgagattgaaaggaaacacactgaatgaggaaaaactaacatacggtcatcaacatccttgtataacctagtttttaaaaaaattgga

SEQ ID NO: 158584 - DNA, 120 bp, Artificial Sequence
  ENSG00000106692_61 (sequence is synthesized)
tgtcaaaatccaaaggaagccgaattggatttgatagcacacagtgggtatgtagaataaacaagaaatttctcaattataatgttcatttagttcattcatttactccgtaagtatttg

SEQ ID NO: 158585 - DNA, 120 bp, Artificial Sequence
  ENSG00000106692_62 (sequence is synthesized)
caggaaaaaaattcaaatacctgtttccgaagtttacactgtgctggactgagtttgtagacatgaaggtccatgtaccctgtgaaaccctcgaatacattgaagccaactatggaaagg

SEQ ID NO: 158586 - DNA, 120 bp, Artificial Sequence
  ENSG00000106692_63 (sequence is synthesized)
cctgctgttgagtgagattgaaaggaaacacactgaatgaggaaaaactaacatacggtcatcaacatccttgtataacctagtttttaaaaaaattggatttcaaagctggagaacaaa

SEQ ID NO: 158587 - DNA, 120 bp, Artificial Sequence
  ENSG00000106692_64 (sequence is synthesized)
ttgaagaactaaatgtgtttaaccaaaatcaaacagtggagacaagaaaacaaaattatcttcctttccaaatccaaaaagatgaaaacgactgagatactttcaaaagacaaccaagtg

SEQ ID NO: 158588 - DNA, 120 bp, Artificial Sequence
  ENSG00000106692_65 (sequence is synthesized)
ttacttccacggtacgcaagcaaaaagttgaagagcagcttaccacattcagcagatgaatgggctattatggtctcagcataatctcttttcaacaagatgtttttcagtcttataaac

SEQ ID NO: 158589 - DNA, 120 bp, Artificial Sequence
  ENSG00000106692_66 (sequence is synthesized)
aaaatgagttactgaaggtcagatgataatagtgatttagaattaattggatttagaatcaactggacacgtttccaaggagcgttaatgattgtattgataacaacttggaggatgtgt

SEQ ID NO: 158590 - DNA, 120 bp, Artificial Sequence
  ENSG00000106692_67 (sequence is synthesized)
ctgcttattgagagcagagaccatatgtgctatttaatcatttgtattttttagcacaatgataagcatggtatctattggcgtgcagttaaaaaatttattatgttaacatccaaccaa

SEQ ID NO: 158591 - DNA, 120 bp, Artificial Sequence
  ENSG00000106692_68 (sequence is synthesized)
taaaagtgatgaatataataactatgcctccagaatgtgaagttcttaattcaacttcacatttcctaaagatgctgcctagatttatttggtttgcttctttccttcccattttgaatc

SEQ ID NO: 158592 - DNA, 120 bp, Artificial Sequence
  ENSG00000106692_69 (sequence is synthesized)
aactggtatgggtagaagccagaagtttgaaaggtatcttctatcataaaaccaggtcagtcattagtagcaagttaccaacaattattacctttctggccaggcacagtggctcatgcc

SEQ ID NO: 158593 - DNA, 120 bp, Artificial Sequence
  ENSG00000106692_70 (sequence is synthesized)
tttaatcccagcacttcgggaggccaagctttttgatgagaccacaaaggataatacttagaggagtttcctggcctgtattacaagatagaccatgagttctgcctcaattcaacttca

SEQ ID NO: 158594 - DNA, 120 bp, Artificial Sequence
  ENSG00000106701_0 (sequence is synthesized)
agtgcagtgagtagcggtcttggggtgtgcgatctcgctgagcctcctcacacggttcgtcgtctcgggttcgagcccagtgggcttagccactcgccatggactcccagaaagaagctc

SEQ ID NO: 158595 - DNA, 120 bp, Artificial Sequence
  ENSG00000106701_1 (sequence is synthesized)
tacagaggatcatttcaactctggcaaataaaaatgatgaaattcagaactttattgatacactacatcatacactaaaaggagttcaggaaaattcgtccaacatactctcagagttag

SEQ ID NO: 158596 - DNA, 120 bp, Artificial Sequence
  ENSG00000106701_2 (sequence is synthesized)
atgaagaatttgatagtttatactctatactggatgaagtaaaagaaagtatgattaactgtatcaagcaggaacaagctcgtaaatcccaagagttacagagtcagattagtcaatgta

SEQ ID NO: 158597 - DNA, 120 bp, Artificial Sequence
  ENSG00000106701_3 (sequence is synthesized)
ataatgccctggagaactctgaagaactattagaatttgcaacaaggtcattagatataaaggaacctgaagaattttcaaaggctgccagacagatcaaggatagagtcacaatggctt

SEQ ID NO: 158598 - DNA, 120 bp, Artificial Sequence
  ENSG00000106701_4 (sequence is synthesized)
cagcctttcgcctttctttgaaaccaaaggtcagtgacaacatgactcatttaatggtggatttctcacaggaaagacagatgctgcaaactttgaagtttttgccagtccccaaagctc

SEQ ID NO: 158599 - DNA, 120 bp, Artificial Sequence
  ENSG00000106701_5 (sequence is synthesized)
cagagatagatccagtagagtgtttggtggcagataactctgtaacagtggcttggagaatgccagaagaagataataagattgaccattttatactggaacataggaagactaattttg

SEQ ID NO: 158600 - DNA, 120 bp, Artificial Sequence
  ENSG00000106701_6 (sequence is synthesized)
atggacttccacgtgtaaaggatgagcgatgctgggagataattgataatattaagggtactgaatatacactatcaggcttaaaatttgattcaaagtatatgaatttcagagtgcgag

SEQ ID NO: 158601 - DNA, 120 bp, Artificial Sequence
  ENSG00000106701_7 (sequence is synthesized)
tgatccagtgactctagagaccaaagcacttaacttcaatttggataactcctcatcccatttgaacctgaaagttgaagatacatgtgtagagtgggatcctactggaggaaaaggtca

SEQ ID NO: 158602 - DNA, 120 bp, Artificial Sequence
  ENSG00000106701_8 (sequence is synthesized)
agaaagtaaaattaaaggaaaagagaacaagggcagtggtacaccatccccaaaacgaacatctgtaggctccaggccaccagcagtaagaggcagtagagatcgttttactggagaatc

SEQ ID NO: 158603 - DNA, 120 bp, Artificial Sequence
  ENSG00000106701_9 (sequence is synthesized)
atacacagtgctgggagacactgctattgaaagtggacaacattattgggaggtcaaggcccagaaggattgtaaatcctacagtgtgggagtagcatacaaaacgttggggaaatttga

SEQ ID NO: 158604 - DNA, 120 bp, Artificial Sequence
  ENSG00000106701_10 (sequence is synthesized)
ccaattgggaaagacaaacactagttggtgtatccatgtcaacaactggctacaaaacacatttgcagcaaagcataataataaagtcaaagctttggatgttactgttcctgaaaaaat

SEQ ID NO: 158605 - DNA, 120 bp, Artificial Sequence
  ENSG00000106701_11 (sequence is synthesized)
aggtgtattttgtgattttgatgggggtcaactttcattctatgatgcaaattctaaacagttgctatattcctttaagacaaaatttactcagccagtactacctggtttcatggtatg

SEQ ID NO: 158606 - DNA, 120 bp, Artificial Sequence
  ENSG00000106701_12 (sequence is synthesized)
gtgtggtggactttctttgagtactgggatgcaggttccaagtgctgtgagaacacttcagaaaagtgaaaatggaatgactggttcagctagcagcctgaacaatgttgttactcaata

SEQ ID NO: 158607 - DNA, 120 bp, Artificial Sequence
  ENSG00000106701_13 (sequence is synthesized)
gtgtctactcagaatacgtttaccctccgtcttgattaggtggccttttctgtgcagttactaatcacaggaatttggtagtagtgaaaatcaggtttgctgtgttctgctttgaggcct

SEQ ID NO: 158608 - DNA, 120 bp, Artificial Sequence
  ENSG00000106701_14 (sequence is synthesized)
aaactgatgattgaagagtaaatgggggaaaaggcagtgtttaattaacataaaaactcatttttgtatttcttggattactttgactattctaatgtttaattacatatggtaacccta

SEQ ID NO: 158609 - DNA, 120 bp, Artificial Sequence
  ENSG00000106701_15 (sequence is synthesized)
aggcctggggagaaaagcttttaaatcttgccttctttcttctgtactttgtctttttaaaatctcattactatctattatttagttctaacacagaagctttaaaaatacatagtcatc

SEQ ID NO: 158610 - DNA, 120 bp, Artificial Sequence
  ENSG00000106701_16 (sequence is synthesized)
caaggttttctaaaaattgaaatcatatgttgggaatggtaaaaaggttttcaaatggtttatttttcctcttttataaataagttttacaaaattttcctcttttgtttattgactaga

SEQ ID NO: 158611 - DNA, 120 bp, Artificial Sequence
  ENSG00000106701_17 (sequence is synthesized)
ttgtatataattttcttttttccaaaatattgtgataagaaatttctagacacaacagcttaaaatcacccaaatttcagttctttacctactgcactaacaatggcaaggggggtattc

SEQ ID NO: 158612 - DNA, 120 bp, Artificial Sequence
  ENSG00000106701_18 (sequence is synthesized)
tttatatgttgccttgtttaactacagttcttttcattccatcactttaggtgatgggtaagatttttgaaagccttatattttttgattttgttgtctagtttaatcctacctttaata

SEQ ID NO: 158613 - DNA, 120 bp, Artificial Sequence
  ENSG00000106701_19 (sequence is synthesized)
gttgtgtttggtaaaattcccacttgaatgtgacactgataataattatgctgatttttagcatctcttataggaatcaaagtttattaaagttacatagaggattgaaaaatgtatatc

SEQ ID NO: 158614 - DNA, 120 bp, Artificial Sequence
  ENSG00000106701_20 (sequence is synthesized)
actcaatttttatctaagaaggataggttataaagggaggtacctaaatactcaaataatgtatatattctttttcataacatatggaatgctttaagcaattgttttgaaaaaaatctg

SEQ ID NO: 158615 - DNA, 120 bp, Artificial Sequence
  ENSG00000106701_21 (sequence is synthesized)
cgtatctttgacttaattggcacatgactttttcaagcagccattcattcagaggtttgttttctctcagtccttttgctacattcactttcttttcaaagaaatgttaattattacaaa

SEQ ID NO: 158616 - DNA, 120 bp, Artificial Sequence
  ENSG00000106701_22 (sequence is synthesized)
aattgacatagatatctttcccaaacttggggtaaaacccatggttatgtggaacataactgttcttaaaaagtcaattataatttgtaactcacatcctttgagctaaactaaattaaa

SEQ ID NO: 158617 - DNA, 120 bp, Artificial Sequence
  ENSG00000106701_23 (sequence is synthesized)
attacagtatttaataattctttgggcatttttaagaggtctgaatttgtatttttcttcatttttgaaactttacatttgttgactttttttcattctcatttaaaatatattgtgcta

SEQ ID NO: 158618 - DNA, 120 bp, Artificial Sequence
  ENSG00000106701_24 (sequence is synthesized)
tgataaccaaccttcttccaaggagtgaccattactgcctacatttgcgttgctttctacatagagacttgtataatagtattaatagtagctcattctctctaaaaatttactgcccac

SEQ ID NO: 158619 - DNA, 120 bp, Artificial Sequence
  ENSG00000106701_25 (sequence is synthesized)
tgataggatgttttgtttccttgataaaacaaatgtaaatgaggaattttatttgaattggaatattgtttttctagaggacattcatatctgcactattatctgatgacatgttggtaa

SEQ ID NO: 158620 - DNA, 120 bp, Artificial Sequence
  ENSG00000106701_26 (sequence is synthesized)
ttttaaagactgcaaggcagtttagagaatgaagtaaaccaatagatactcttttgattctccaaagaaatataattttggtttttgttcctcagagagagtttgaaagaaattttcaga

SEQ ID NO: 158621 - DNA, 120 bp, Artificial Sequence
  ENSG00000106701_27 (sequence is synthesized)
tgttctgttccctatagagggcctattccaggatctaaatgaatgggaatttataattcctttcatagactcaaacctgaaagcagaaatttttagtagttgagttgctttaagtgaatt

SEQ ID NO: 158622 - DNA, 120 bp, Artificial Sequence
  ENSG00000106701_28 (sequence is synthesized)
ttaacaaatatgacacagaaaaggtcagatgctgttgtataaaattttttactagtgtgtcttatataattctttcttctcattaattcagtgcctttttcctctaagcatactcttggt

SEQ ID NO: 158623 - DNA, 120 bp, Artificial Sequence
  ENSG00000106701_29 (sequence is synthesized)
ggctggaggagtatacatgattcttgtgttcatgttgtcatttgaaactcttcacataaaattttctaatattcatttggaaaacctctccactggagaggtttcatctctgagaggttt

SEQ ID NO: 158624 - DNA, 120 bp, Artificial Sequence
  ENSG00000106701_30 (sequence is synthesized)
tgtaataatagtgtaagttcagtaaatccagtccaaattctcatcacatgtattatttgatactaaattttcaattattacttcaaaataagagtctgaggatttcttcttactggcgtt

SEQ ID NO: 158625 - DNA, 120 bp, Artificial Sequence
  ENSG00000106701_31 (sequence is synthesized)
cttaaaggtctctaaaattaaagaacaagatgtggttttttgtttaagacgtttttagtttatttgttgttaagttaaactggagaaagtttgtcatcctcattttcaaactgaaaacta

SEQ ID NO: 158626 - DNA, 120 bp, Artificial Sequence
  ENSG00000106701_32 (sequence is synthesized)
gtttgtcatcctcattttcaaactgaaaactaatcaaatatagtgcctatttagtctcaaaataaggtaactattaacttgattatactatataatattctcaattacatttgaatttaa

SEQ ID NO: 158627 - DNA, 120 bp, Artificial Sequence
  ENSG00000106701_33 (sequence is synthesized)
ttgtaaaaagtattaaatcctttgaaacatcttttgttgcttatttagtttttgtttctacaggtcaaacatgattgctttctataaaagaaatgcttgagaggttgactataatggata

SEQ ID NO: 158628 - DNA, 120 bp, Artificial Sequence
  ENSG00000106701_34 (sequence is synthesized)
tgtcacaggtataaaacagttgttttctaaaaacatgcatttagtatggcattctcttttagcaactgaattcccaacgagttttattaagctggatatcgaaatgaaggagctgcctta

SEQ ID NO: 158629 - DNA, 120 bp, Artificial Sequence
  ENSG00000106701_35 (sequence is synthesized)
agcactttagaaaaagaatttttttacaattcattttgactctcatggctgaccatgtcattatgtctttaaattttggtaaatatgtagataccaagcattaataactaatgcacacag

SEQ ID NO: 158630 - DNA, 120 bp, Artificial Sequence
  ENSG00000106701_36 (sequence is synthesized)
aaatttaatatacagcaattctttgaatgttccaggtgtacgtaaactaactgaaagtattaaggacatgcctgtctatacatgggtttcattgatggtatctgtatcatcttgacaaat

SEQ ID NO: 158631 - DNA, 120 bp, Artificial Sequence
  ENSG00000106701_37 (sequence is synthesized)
cgtgaactgctgctgtatggctagactttgcctatttactctgttatgcaaacagtaatttttccctatgttatgaagagagacatattggcttgctttaatttacttatttatgaaatt

SEQ ID NO: 158632 - DNA, 120 bp, Artificial Sequence
  ENSG00000106701_38 (sequence is synthesized)
aaagcatgaataatatgtataatttgaattttttgtgactgatccttggcagtataaatgataaaagtaaatgtaatggaatcttttaattaggctaagatatgctatttcataacttat

SEQ ID NO: 158633 - DNA, 120 bp, Artificial Sequence
  ENSG00000106701_39 (sequence is synthesized)
atactttgtccataaaattataattgtttatgtaattttattgtttcttatggaaacaattggaaaagtatatggaaaatgattatttcaaagaatatttatttaaagagggaagtgtag

SEQ ID NO: 158634 - DNA, 120 bp, Artificial Sequence
  ENSG00000106701_40 (sequence is synthesized)
atttaaagagggaagtgtagacttcttactgtaaaatatgtgattccaggcttaagaaattgattatattttaaaataattatttttttaaaaacgtaatttgtttttaaaagatgagtc

SEQ ID NO: 158635 - DNA, 120 bp, Artificial Sequence
  ENSG00000106701_41 (sequence is synthesized)
tccattcattggctaatccatacagcaaatatttgagtgtttgtgatatggcagtaaaaatgtgattactttgtatgtacattaaccaaaaccagtgaagtttgatggactgtgcataga

SEQ ID NO: 158636 - DNA, 120 bp, Artificial Sequence
  ENSG00000106701_42 (sequence is synthesized)
gttttgcagcttttgagtagtgtgacagagtttgcctcttaaaattgttttgctaataagtcagaagtttaaaatgtgttatagtttgctaaaaaaaaatcaaattaactgcatataaaa

SEQ ID NO: 158637 - DNA, 120 bp, Artificial Sequence
  ENSG00000106701_43 (sequence is synthesized)
tggttcacttttatatagtcacatgtaatgggcctgaaaaagtttcttctttgattatgtagttactctagatacattcttttagggaagtgtatggtcaacatatatttactcagtata

SEQ ID NO: 158638 - DNA, 120 bp, Artificial Sequence
  ENSG00000106701_44 (sequence is synthesized)
cagataaccacaaagttgttatttttaaccaaaatatacatttcataatgttggcactggagtattataagagatcatgaatgtttccttaattatcatggcaagattacctcacgttca

SEQ ID NO: 158639 - DNA, 120 bp, Artificial Sequence
  ENSG00000106701_45 (sequence is synthesized)
gtatagtttagttttgtgtgtatcttacagtatgcatgttctgaaattatttgtgatcctgatatgtcacatataatagctttgttacctggagtatttgattaacctaaacagtttaag

SEQ ID NO: 158640 - DNA, 120 bp, Artificial Sequence
  ENSG00000106701_46 (sequence is synthesized)
cattttgaattagttggagtttaaatggattacatttggtgtatattgtcttcattgaaaagatattgttggatatgccacatcagagttagcattgacttataaataaataccagaatt

SEQ ID NO: 158641 - DNA, 120 bp, Artificial Sequence
  ENSG00000106701_47 (sequence is synthesized)
taccagagtacacttttctcttcagatgactcaattattaaataaaagaatatttcttatttctgggtcaatataaggtactgacttctgatgcataatcacttaagctatgtgagttta

SEQ ID NO: 158642 - DNA, 120 bp, Artificial Sequence
  ENSG00000106701_48 (sequence is synthesized)
aactggtatcttttcttagtggtacccattcaatgtaagctggtccatgggaatggacatgaagaggatttcacagtatgtagagcagaaggcacgtgaatgtgtttgctttggcttgga

SEQ ID NO: 158643 - DNA, 120 bp, Artificial Sequence
  ENSG00000106701_49 (sequence is synthesized)
gcttattaagttttgactacggttaaaataagtcaaatagtaagtggtaaaacacatttttgttagtattggaactttctggagaacataagggctatgagaatgcatatatatattttt

SEQ ID NO: 158644 - DNA, 120 bp, Artificial Sequence
  ENSG00000106701_50 (sequence is synthesized)
taacatttcctatatatctaaggtaccaaagcactgagtctaatttacctattaagggagactctttaaaatcaactttataactaattcatactataagacagataatagctaaagttt

SEQ ID NO: 158645 - DNA, 120 bp, Artificial Sequence
  ENSG00000106701_51 (sequence is synthesized)
tggaataatttatattaaaagccgcaagtcttaaaaatccctggatatgacataaaaaggattttggcttcttttttgaagtatttaaaattaatcaccttagctctaccatatactaga

SEQ ID NO: 158646 - DNA, 120 bp, Artificial Sequence
  ENSG00000106701_52 (sequence is synthesized)
tctgtgaccgctacacaaattgtttatcatctttgggtctctattgccttctttataaaataagtgtaagttgttcagcctgcctcacagggctgttgtgaggaaataaaatgaaatgga

SEQ ID NO: 158647 - DNA, 120 bp, Artificial Sequence
  ENSG00000106701_53 (sequence is synthesized)
gtatgtgaaattgcttcagcaacagcaaagtgctacgtaaatgtaaagtgttgtttttagctaataatggatttaagtgtttggataattgtagatgcatttactttgataaagcgtgtg

SEQ ID NO: 158648 - DNA, 120 bp, Artificial Sequence
  ENSG00000106701_54 (sequence is synthesized)
cttaaagtggtatcaccagtgatttctaacatgattttaaaaaaataaaaccccaattaaaatgttctttaatattcatttaatttgtgcatgacttgtggcctttttgtattttctcaa

SEQ ID NO: 158649 - DNA, 120 bp, Artificial Sequence
  ENSG00000106701_55 (sequence is synthesized)
gcctattactctagagctgtaaaagctcttgcacagcattgttgtgtcagtgtagaatagtggcataaataaatgaattaagctacatttccatgcaggcatttgcactttgaagttagg

SEQ ID NO: 158650 - DNA, 120 bp, Artificial Sequence
  ENSG00000106701_56 (sequence is synthesized)
gctgcccagtgccacatgcaaagagtgtatttggtctaaacagttctttccaaacaaccaaatggctgggcagcttgttgtcacggataaatgatataaaatgtaaccactgaacatttg

SEQ ID NO: 158651 - DNA, 120 bp, Artificial Sequence
  ENSG00000106701_57 (sequence is synthesized)
acaactttgttgcattatcatttttaaaaaaagatgaagcatttcaaaatcttgttaacctggttatctcttggtatctctcctgacatatttgttttgctttaaattggattaaatggt

SEQ ID NO: 158652 - DNA, 120 bp, Artificial Sequence
  ENSG00000106701_58 (sequence is synthesized)
ttacaggttatctgaatctacagatttagtatgtctattatctggacatgattttgctatgcagttgtgataataaaaattctaattcctcaggtttggccttttaagttatggctgaag

SEQ ID NO: 158653 - DNA, 120 bp, Artificial Sequence
  ENSG00000106701_59 (sequence is synthesized)
acctttaatgatacttatgatgcactcagtgccatacaatagtgttttaagaagcacatggcctcattttccttagaaacaagacaaagcctttttaaaatgtttttttttcactttaaa

SEQ ID NO: 158654 - DNA, 120 bp, Artificial Sequence
  ENSG00000106701_60 (sequence is synthesized)
atagggtattcaaagtggagtaacgtgtattttgaaatgattttgtgttctatatagaatgtcccagttaagattttacagaagcacctggaatatctcattaaaaatttaaaaactctt

SEQ ID NO: 158655 - DNA, 120 bp, Artificial Sequence
  ENSG00000106701_61 (sequence is synthesized)
gatttctttactgatttctaatactaataaagccttggggtttcttgataagtaaaatgctggctgttcatttattccaaagcaaacacttagaagtgtgtgtctttagggtcatcaaca

SEQ ID NO: 158656 - DNA, 120 bp, Artificial Sequence
  ENSG00000106701_62 (sequence is synthesized)
aatatgtttaaaaagtgtttctgtgtttctgtctatgagctgcttgggaaagcatcatcactttatgcacatgagcactgtaattgtgtaacttcttattgcagataaatgcccccactg

SEQ ID NO: 158657 - DNA, 120 bp, Artificial Sequence
  ENSG00000106701_63 (sequence is synthesized)
gaaatgtagatccttacttaagggatatgtttagtataaaaatgtaaaaagtagagcaagaagcctgctaatgttttaacttagatcctggtgtttaagtgattgtaaattgtaaattgt

SEQ ID NO: 158658 - DNA, 120 bp, Artificial Sequence
  ENSG00000106701_64 (sequence is synthesized)
aattttttttttaagtagggtcattttaaatgattaccattttgtcaaatcaaaactcagaaatgtagaatatattttaaaatgatgtgaaaagatttggaaattaagctatataattag

SEQ ID NO: 158659 - DNA, 120 bp, Artificial Sequence
  ENSG00000106701_65 (sequence is synthesized)
caaaaattactgtgtagttatcaagataaaatttgagtttgatgttatttacttcacctttgtggagtatgtagtgagctgcattgtgttagaaaggtagctttataactgatttatgcc

SEQ ID NO: 158660 - DNA, 120 bp, Artificial Sequence
  ENSG00000106701_66 (sequence is synthesized)
tagtgattgttttcattttatgattttctgtgaacttgaaggtagaaaaaacttccttgagaaggtaacatttgccaccttacatctttggatattaaaattgaactttaattgatttct

SEQ ID NO: 158661 - DNA, 120 bp, Artificial Sequence
  ENSG00000106701_67 (sequence is synthesized)
tcttttaaacacatgaatcaaaacaaaagttcttttgctgtaagccaatgcatgaattaattctttaaatttggaggtgagttgtaaagaagcttactaatgcacataggtggacttatt

SEQ ID NO: 158662 - DNA, 120 bp, Artificial Sequence
  ENSG00000106701_68 (sequence is synthesized)
gaagcttactaatgcacataggtggacttattatataaaggaattacaagggaaatgtactatatttaaaagtactttaaaagtatgatatgttggccaggtatggtggctcatgcctgt

SEQ ID NO: 158663 - DNA, 120 bp, Artificial Sequence
  ENSG00000106701_69 (sequence is synthesized)
ggtgggtggtttgcttgagcccaggagtttgaggccagcttgggcaacatgatgagatcctgcctgtacaaaatacacaaaaaaattagccgggcatggtgatgtgcacctgtagtccca

SEQ ID NO: 158664 - DNA, 120 bp, Artificial Sequence
  ENSG00000106701_70 (sequence is synthesized)
gatgtgcacctgtagtcccagctactcgaaggctgagatgggaggattgcctgagcctaggaagttgaggctgcaccgagctgtgattacactgctgcactctagcctgggcaacagagc

SEQ ID NO: 158665 - DNA, 120 bp, Artificial Sequence
  ENSG00000106701_71 (sequence is synthesized)
tttccttcccgggccctccgcaccggccggctgctggatgcccagtggcctatttcagggccggagagaccgctatcgctggaggaaaaaggatgggggaagggagtgcagcctgcagag

SEQ ID NO: 158666 - DNA, 120 bp, Artificial Sequence
  ENSG00000106701_72 (sequence is synthesized)
gcactagcggtagacagacgggcggcgctccccaccctccacggctacttcccgggagcagtcagccgctgcgcgcaggcgcggtgcgctcctcagcccctcccttctgcgggccgccct

SEQ ID NO: 158667 - DNA, 120 bp, Artificial Sequence
  ENSG00000106701_73 (sequence is synthesized)
taaaggaaaagagaacaagggcagttacaaatttttaaaaattgtttttctgttatcaaaagagctcttaatacattttgaagcagtgctaagtgaaatttttctctttatttgtatgac

SEQ ID NO: 158668 - DNA, 120 bp, Artificial Sequence
  ENSG00000106701_74 (sequence is synthesized)
gttcactttctatttgttgccctgagttacttgggaaatatttttcagaatgcatgtttcctctcagcagacactctgaccaccagttggggaggcaaactatcagtgtattttgaaaaa

SEQ ID NO: 158669 - DNA, 120 bp, Artificial Sequence
  ENSG00000106701_75 (sequence is synthesized)
gtttcctgattgtttctgaatctgctgtgccttttcagttgacaatcattgatttattacaaaatgccaaaggcctttgttttttcaatttagtactttggctcaggaagatacaggtgt

SEQ ID NO: 158670 - DNA, 120 bp, Artificial Sequence
  ENSG00000106701_76 (sequence is synthesized)
tccttaattgatagtatcacatactctactcagctgagctcattctagtcagatattgtacacctactctgtactgaggatacagagatgagatgtggttcctagcaacagttagttccc

SEQ ID NO: 158671 - DNA, 120 bp, Artificial Sequence
  ENSG00000106714_0 (sequence is synthesized)
cgggagtgagagcaggagcgacgcagagcggccgtcgccgtgcccgggtctcagggcgcctggctgaagtgagcatggcttcagtggcctgggccgtcctcaaggtgctgctgcttctcc

SEQ ID NO: 158672 - DNA, 120 bp, Artificial Sequence
  ENSG00000106714_1 (sequence is synthesized)
ccactcagacttggagccccgtgggagcaggaaatccacctgactgtgatgccccactggcctctgccttgcctaggtcatccttcagcagctcctcagagctgtccagcagccacggcc

SEQ ID NO: 158673 - DNA, 120 bp, Artificial Sequence
  ENSG00000106714_2 (sequence is synthesized)
cggggttttcaaggcttaatcgaagagatggagctggtggctggactccacttgtgtcaaataaataccaatggctgcaaattgaccttggagagagaatggaggtcactgctgtcgcca

SEQ ID NO: 158674 - DNA, 120 bp, Artificial Sequence
  ENSG00000106714_3 (sequence is synthesized)
cccaaggaggatatgggagctctgactgggtgaccagctacctcctgatgttcagtgatggtgggagaaactggaagcagtatcgccgagaagaaagcatctggggttttccaggaaaca

SEQ ID NO: 158675 - DNA, 120 bp, Artificial Sequence
  ENSG00000106714_4 (sequence is synthesized)
caaacgcagacagtgtggtgcactacagactccagcctccctttgaagccaggttcctgcgctttctccctttagcctggaaccctaggggcaggattgggatgcggatcgaagtgtacg

SEQ ID NO: 158676 - DNA, 120 bp, Artificial Sequence
  ENSG00000106714_5 (sequence is synthesized)
gatgtgcatataaatctgaggtggtttattttgatggacaaagtgctctgctgtatagacttgataaaaaacctttaaaaccaataagagacgttatttctttgaaatttaaagccatgc

SEQ ID NO: 158677 - DNA, 120 bp, Artificial Sequence
  ENSG00000106714_6 (sequence is synthesized)
agagcaatggaattctacttcacagagaaggacaacatggaaatcacattactctggaattaattaaaggaaagcttgtcttttttcttaattcaggcaatgctaagctgccttccacta

SEQ ID NO: 158678 - DNA, 120 bp, Artificial Sequence
  ENSG00000106714_7 (sequence is synthesized)
ttgctcctgtgaccctcaccctgggcagcctgctggacgaccagcactggcattccgtcctcatcgagctcctcgacacgcaggtcaacttcaccgtggacaaacacactcatcatttcc

SEQ ID NO: 158679 - DNA, 120 bp, Artificial Sequence
  ENSG00000106714_8 (sequence is synthesized)
aagcaaagggagattccagttacttggatcttaattttgagatcagctttgggggaattccgacacccggaagatcgcgggcattcagacgtaaaagctttcatgggtgtttagaaaatc

SEQ ID NO: 158680 - DNA, 120 bp, Artificial Sequence
  ENSG00000106714_9 (sequence is synthesized)
tttattataatggagtggatgttaccgaattagccaagaaacacaaaccacagatcctcatgatgggaaatgtgtccttctcatgtccacagccacagactgtccctgtgacttttctga

SEQ ID NO: 158681 - DNA, 120 bp, Artificial Sequence
  ENSG00000106714_10 (sequence is synthesized)
gctccaggagttatctggctctgccaggcaactctggggaggacaaagtgtctgtcacttttcaatttcgaacgtggaacagagcaggacatttgcttttcggcgaacttcgacgtggtt

SEQ ID NO: 158682 - DNA, 120 bp, Artificial Sequence
  ENSG00000106714_11 (sequence is synthesized)
cagggagtttcgtcctctttcttaaggatggcaagctcaaactgagtctcttccagccgggacagtcaccaaggaatgtcacagcaggtgctggattaaacgatgggcagtggcactctg

SEQ ID NO: 158683 - DNA, 120 bp, Artificial Sequence
  ENSG00000106714_12 (sequence is synthesized)
tgtccttctctgccaagtggagccatatgaatgtggtggtggacgatgacacagctgttcagcccctggtggctgtgctcattgattcaggtgacacctattattttggaggctgcctgg

SEQ ID NO: 158684 - DNA, 120 bp, Artificial Sequence
  ENSG00000106714_13 (sequence is synthesized)
acaacagctctggctctggatgtaaaagccccctgggagggtttcagggctgcctaaggctcatcaccattggtgacaaagcggtggatcccatcttagtacagcagggggcgctgggga

SEQ ID NO: 158685 - DNA, 120 bp, Artificial Sequence
  ENSG00000106714_14 (sequence is synthesized)
gtttcagggacctccagatagactcctgcggcatcacagacaggtgcttgcccagctactgtgagcatgggggcgagtgttcccagtcgtgggacaccttctcctgtgactgtctaggca

SEQ ID NO: 158686 - DNA, 120 bp, Artificial Sequence
  ENSG00000106714_15 (sequence is synthesized)
caggctatacgggcgagacctgccattcctctctctacgagcagtcttgtgaagcccacaagcaccgagggaacccgtctgggctttactatattgatgcagatggaagtggccccctgg

SEQ ID NO: 158687 - DNA, 120 bp, Artificial Sequence
  ENSG00000106714_16 (sequence is synthesized)
gaccatttcttgtgtactgcaatatgacagcagacgccgcgtggacggtggtgcagcacggtggccccgacgcggtgaccctccgaggtgcccccagcgggcacccgcgctcggctgtgt

SEQ ID NO: 158688 - DNA, 120 bp, Artificial Sequence
  ENSG00000106714_17 (sequence is synthesized)
ccttcgcgtacgcagcgggcgcggggcagctgcggtccgcggtgaacctggcggagcgctgcgagcagcggctggctctgcgctgcgggacggcgcggcgcccggactcacgagatggaa

SEQ ID NO: 158689 - DNA, 120 bp, Artificial Sequence
  ENSG00000106714_18 (sequence is synthesized)
ccccactgagctggtgggttggaagaaccaatgaaacacacacttcctggggaggttctctgcctgatgctcaaaagtgtacttgtggattagaggggaactgcattgattctcagtatt

SEQ ID NO: 158690 - DNA, 120 bp, Artificial Sequence
  ENSG00000106714_19 (sequence is synthesized)
actgcaactgtgatgctggccggaatgaatggactagtgacacaatagtcctttcccaaaaggagcacctgccagtcactcagattgtgatgacagacgcaggccgaccacattccgaag

SEQ ID NO: 158691 - DNA, 120 bp, Artificial Sequence
  ENSG00000106714_20 (sequence is synthesized)
cagcttatacactggggccactgctctgccgcggagatcagtcattctggaattcagcttccttcaacactgagacttcataccttcatttccctgctttccacggagaactcactgctg

SEQ ID NO: 158692 - DNA, 120 bp, Artificial Sequence
  ENSG00000106714_21 (sequence is synthesized)
cagtttcctccggggtgtttatggagaacctggggatcacagatttcatcaggattgagctgcgtgctcccacagaagtgaccttttccttcgatgtggggaatggaccttgtgaggtca

SEQ ID NO: 158693 - DNA, 120 bp, Artificial Sequence
  ENSG00000106714_22 (sequence is synthesized)
cggtgcagtcacccactccctttaatgacaatcagtggcaccacgtgagggcagagagaaatgttaaaggagcgtctcttcaagttgatcagcttcctcagaagatgcagcctgcccctg

SEQ ID NO: 158694 - DNA, 120 bp, Artificial Sequence
  ENSG00000106714_23 (sequence is synthesized)
ctgatgggcacgttcgtttacagctcaacagccagctcttcattggtggaacggccaccagacagagaggctttctaggatgcattcggtctctgcagttgaacggggtggccctggatc

SEQ ID NO: 158695 - DNA, 120 bp, Artificial Sequence
  ENSG00000106714_24 (sequence is synthesized)
tggaagaaagagccacagtgacgccaggagtggagccagggtgtgcaggacactgcagcacctatggacacttgtgtcgcaatggagggagatgcagagagaaacgcaggggggtcacct

SEQ ID NO: 158696 - DNA, 120 bp, Artificial Sequence
  ENSG00000106714_25 (sequence is synthesized)
gtgactgtgccttctcagcctatgatgggccgttctgctccaatgagatttccgcatattttgcaactggctcctcaatgacataccattttcaagaacattacactttaagtgaaaact

SEQ ID NO: 158697 - DNA, 120 bp, Artificial Sequence
  ENSG00000106714_26 (sequence is synthesized)
ccagctctctcgtttcttcattacacagagatgtaacattgaccagagaaatgatcacactgagcttccgaaccacacgaactccgagcttattgctgtatgtgagctctttctatgagg

SEQ ID NO: 158698 - DNA, 120 bp, Artificial Sequence
  ENSG00000106714_27 (sequence is synthesized)
aatacctttcagttatcctcgccaacaatggaagtttgcagattaggtacaagctagatagacatcaaaatcctgatgcatttacctttgattttaaaaacatggctgatgggcaacttc

SEQ ID NO: 158699 - DNA, 120 bp, Artificial Sequence
  ENSG00000106714_28 (sequence is synthesized)
accaagtgaagattaacagagaagaagctgtggtcatggtagaggttaaccagagcacaaagaaacaagtcatcttgtcctcagggacagaattcaacgccgtcaaatctctcatattgg

SEQ ID NO: 158700 - DNA, 120 bp, Artificial Sequence
  ENSG00000106714_29 (sequence is synthesized)
gaaaggttttagaggctgccggcgcggacccggacacaaggcgggcggcgactagtggcttcactggctgcctctcggcggtgcgcttcggccgcgctgctcccctgaaggcggcgctgc

SEQ ID NO: 158701 - DNA, 120 bp, Artificial Sequence
  ENSG00000106714_30 (sequence is synthesized)
ggccacgtggcccctatggcccgctgcgcagcgggggcggcgtccggctccccggcgcgggaactggctccccgactcgcggggggcgcaggtcgttctggaccagcggatgagggagag

SEQ ID NO: 158702 - DNA, 120 bp, Artificial Sequence
  ENSG00000106714_31 (sequence is synthesized)
caggtcgttctggaccagcggatgagggagagcccttggttaatgcagacagaagagactctgctgtcatcggaggtgtgatagcagtggtgatatttattttgctttgcatcactgcca

SEQ ID NO: 158703 - DNA, 120 bp, Artificial Sequence
  ENSG00000106714_32 (sequence is synthesized)
tagccatacgcatctatcaacagagaaagttacgcaaagaaaatgagtcaaaagtctcaaaaaaagaagagtgctaggacagctctaaacagtgagctcgatgtgcaaaacgcagtccat

SEQ ID NO: 158704 - DNA, 120 bp, Artificial Sequence
  ENSG00000106714_33 (sequence is synthesized)
gaaaaccagaaagagcgagtcttctgattggcagctgtggctgtctctatcatcgtgactgtggacttccctgctgttgccatcagggtgcacacaagcaggtgcagtgctgtcacctgg

SEQ ID NO: 158705 - DNA, 120 bp, Artificial Sequence
  ENSG00000106714_34 (sequence is synthesized)
ctgaagacctgcagcctcggagcctctgggaggtccctttctccctcggtgaaacacagtcctccacatcaatttccaaacaatgaattaggtatggccattcatcactgttcagtagtt

SEQ ID NO: 158706 - DNA, 120 bp, Artificial Sequence
  ENSG00000106714_35 (sequence is synthesized)
tccccgtccaaaggctctcttccaaaactgcagtttgatctgtgttaataattgtggggttttagatgagaaaatggctataaagctgtggccctactttattttttaaaaatgacagaa

SEQ ID NO: 158707 - DNA, 120 bp, Artificial Sequence
  ENSG00000106714_36 (sequence is synthesized)
cttttgttcagatgtaaaagacaaaattgcactttaatgttttttgttacttgaaaacatatctgggatccctttttttggtcctctgctgatatttataaaacaagaaatgcttcttgg

SEQ ID NO: 158708 - DNA, 120 bp, Artificial Sequence
  ENSG00000106714_37 (sequence is synthesized)
actaccttcactggcatttccatagtcctggaatccagagccaagtggcctatctaaaattcacagcccttttattctcctgtgtgatggttaatacaacacagttgaagcctggaaaca

SEQ ID NO: 158709 - DNA, 120 bp, Artificial Sequence
  ENSG00000106714_38 (sequence is synthesized)
aacactaccattatttttggtgtattgctttttctaattgactgtttttaatgattttgatacattttaatgttgaaattaatattgaatgttagctatgaaattttagtattgaatttt

SEQ ID NO: 158710 - DNA, 120 bp, Artificial Sequence
  ENSG00000106714_39 (sequence is synthesized)
tggaacagaacattggtaggtaacaagatgcaagaggatgtcaatacaagattgtctgcctgtttttctttgtaatttgtaattacagtttttgtaacttgtgattatgtttttaactaa

SEQ ID NO: 158711 - DNA, 120 bp, Artificial Sequence
  ENSG00000106714_40 (sequence is synthesized)
atttaccaccagatacaaacaatacttcttacacagagttatcctttatttatatcattaagacgtgaatgaaacatcatcctaacttacttccccaagatattgagaggtcatatctgt

SEQ ID NO: 158712 - DNA, 120 bp, Artificial Sequence
  ENSG00000106714_41 (sequence is synthesized)
ttttctttatcattcatttctttttctaaaagttgttactgatatgcttttgatttcctatgactctattatgttgtacagaacatcttttcaatttattaaaaaaatagcttaactgaa

SEQ ID NO: 158713 - DNA, 120 bp, Artificial Sequence
  ENSG00000106714_42 (sequence is synthesized)
aagcccacaagcaccgagggaacccgtctgggctttactatattgatgcagatggaagtggccccctgggaccatttcttgtgtactgcaatatgacagatattagaaatgaacactgct

SEQ ID NO: 158714 - DNA, 120 bp, Artificial Sequence
  ENSG00000106714_43 (sequence is synthesized)
tgtttatggagaacctggggatcacagatttcatcaggattgagctgcgtggtaagctcgccactctggacaagtcacaggctcccacagaagtgaccttttccttcgatgtggggaatg

SEQ ID NO: 158715 - DNA, 120 bp, Artificial Sequence
  ENSG00000106714_44 (sequence is synthesized)
atgatgggccgttctgctccaatggtaagtgtgaccaaggagcaggttatagggaaagtacatgaaacttaaataacatgaagaatgcttctggcatttgatattataaagagaggataa

SEQ ID NO: 158716 - DNA, 120 bp, Artificial Sequence
  ENSG00000106714_45 (sequence is synthesized)
ctaatgaaaaaatttgataatattaatagaagagcaacccattcagtgctgctcttccataagtcaagaagaagccaaatatggccaggatctgggagagaggaggtggttgtttattct

SEQ ID NO: 158717 - DNA, 120 bp, Artificial Sequence
  ENSG00000106714_46 (sequence is synthesized)
gtattgctttgttttgtttgtttagcaatgcaattctgtcaaaggtattattaatattttactatttaaaatatcaaaatatctatttgttttactttactcaataggggaatgttctct

SEQ ID NO: 158718 - DNA, 120 bp, Artificial Sequence
  ENSG00000106714_47 (sequence is synthesized)
agtttatcatagtgactgctggtggaatctattcattgatactgcagtgggaacttgtcttattctgattataaaagaacaaatactttagcaacttaaaaacacggtttaaaagcacac

SEQ ID NO: 158719 - DNA, 120 bp, Artificial Sequence
  ENSG00000106714_48 (sequence is synthesized)
aacatagttattaaaatgggaataagtaagaaaatagacctgagtcaccacagaggaagtaaattacacattgtcatcggcattggaaggaaaatatactgtatagagaacaacaatgct

SEQ ID NO: 158720 - DNA, 120 bp, Artificial Sequence
  ENSG00000106714_49 (sequence is synthesized)
tggttttatgtttcagattttctccacagaatgagtacatatttaagtttaaaacaaccaattccatctttttcatggattctgccaattatagatccttccattatgaagaagagtaaa

SEQ ID NO: 158721 - DNA, 120 bp, Artificial Sequence
  ENSG00000106714_50 (sequence is synthesized)
gccagcaagtgggtacatcgtggatagagtggtagctgatggcatcataggaattgcttataaaatagcttctctttctaaatgattaattatttgaaggtggcttcttgagcttttgta

SEQ ID NO: 158722 - DNA, 120 bp, Artificial Sequence
  ENSG00000106714_51 (sequence is synthesized)
atggtacttaaaagtgatttattttcatctttcctttcctcatcttcctttgcttccttatcattaaaattgtactttctgttgatgtttgcttctcatgggacatctaataggttaacc

SEQ ID NO: 158723 - DNA, 120 bp, Artificial Sequence
  ENSG00000106714_52 (sequence is synthesized)
agagcacaaagaaacaagtcatcttgtcctcagggacagaattcaacgccgtcaaatctctcatattgggaaaggttttaggtaagtaggagaaagagctttttcccaaataagtgtcat

SEQ ID NO: 158724 - DNA, 120 bp, Artificial Sequence
  ENSG00000106714_53 (sequence is synthesized)
gtcacaaactctggaagcattcatcatgctgaaagaagctccttgtcttacttgaataataatttcacagtgagtgacaatcaaggtgcaaactgtactcttgcctgagtgtacatataa

SEQ ID NO: 158725 - DNA, 120 bp, Artificial Sequence
  ENSG00000106714_54 (sequence is synthesized)
tcatgactaagtgctacctgtgagatgtgcaagggcgttcctggaaaaatacctccacacttaacctctcacttggcaatcatgcataatgaatcacggtatttttctaatccttcttga

SEQ ID NO: 158726 - DNA, 120 bp, Artificial Sequence
  ENSG00000106714_55 (sequence is synthesized)
aaagtgaaatgttgtcaaagctgacacgaagttcacagattatgtatgtattaatcaacatcaactccggagaccatcattcaatgataaaactacgtttgagttgaacacaagagaaaa

SEQ ID NO: 158727 - DNA, 120 bp, Artificial Sequence
  ENSG00000106714_56 (sequence is synthesized)
aactggtaatcttattacagcagatgaatacagttttatttttctctcaagccctgctttgcctgttgtttccatcctttttgactttagtatctaacaggaatggggaggcatattcat

SEQ ID NO: 158728 - DNA, 120 bp, Artificial Sequence
  ENSG00000106714_57 (sequence is synthesized)
aaatatctgttacgcaaggtagaaagttacagtaattgtctatcatattgtctatcataatctgttgtaaaagcacagttagctttacatttaataaaggaactgaggaaagtaatcttt

SEQ ID NO: 158729 - DNA, 120 bp, Artificial Sequence
  ENSG00000106714_58 (sequence is synthesized)
ttttaaaaaaacccatcttatgtaactcaattaagaaaatgaactatactttaatattaggatcaaaaagttgaataatatttattatatacatctttgtttccttccaaataaaggaga

SEQ ID NO: 158730 - DNA, 120 bp, Artificial Sequence
  ENSG00000106714_59 (sequence is synthesized)
cccgagcgctccagaaagctgcggcgcgagtccgcggggccgacctcggagacgcagctggggccgggcgcggcttggcgggagggtctgcagcgccgagggaggctgctggtgcgtgag

SEQ ID NO: 158731 - DNA, 120 bp, Artificial Sequence
  ENSG00000106714_60 (sequence is synthesized)
aacacaaaccacagatcctcatgatggagttggctcatgggttgcaggaccaaaacctgaaaatatctctgactgtgtgtcaccagaccacacaatgaatacatcacttaggttagcatg

SEQ ID NO: 158732 - DNA, 120 bp, Artificial Sequence
  ENSG00000106714_61 (sequence is synthesized)
agaaaaagggaaaaacagctgtgaagcccatgaactttccaagaaggtaaaggagaaaaaaaaaaaaaaagatgggtttgaagtctaagttttactatgaacagcaccctgctgagatca

SEQ ID NO: 158733 - DNA, 120 bp, Artificial Sequence
  ENSG00000106714_62 (sequence is synthesized)
taaaaatgaaaaataccatcaagatacatgaaaaaggaaacaccaaagggaagagtgataacaaggctccacagagtgcagtttcctttgacaagatgaaaaagaaatgaaaagaggaag

SEQ ID NO: 158734 - DNA, 120 bp, Artificial Sequence
  ENSG00000106714_63 (sequence is synthesized)
gttggctttgttggagatgcgttactcagatacagatacaaagatgggtttggccaatgggcatccgtgtcaagaagcctgacctaacacgttctgaatattaagctaccttttatctgc

SEQ ID NO: 158735 - DNA, 120 bp, Artificial Sequence
  ENSG00000106714_64 (sequence is synthesized)
cagtccttggtgttcagaagaatccctcctcctcaccctaacttctatggggctatttacaaagacactgtcattgaagtgaggaagagtgagttgggccttatgacacaaagagacaag

SEQ ID NO: 158736 - DNA, 120 bp, Artificial Sequence
  ENSG00000106714_65 (sequence is synthesized)
actatttgaggacaacagacacaggttttcatatacattccatgttattctgaattactgatgggttcactgatggaattattgagtatagccaataaggagaaccacaattaagctggt

SEQ ID NO: 158737 - DNA, 120 bp, Artificial Sequence
  ENSG00000106714_66 (sequence is synthesized)
atctctgggttctggatatcatcctcaagaaaactatttactaattacattgaatgaggttattaaaatgtgtaagtttcacacaaaaacaaaaagacaattcattccaaattgtgcata

SEQ ID NO: 158738 - DNA, 120 bp, Artificial Sequence
  ENSG00000106714_67 (sequence is synthesized)
tggatatataatgttaattatgggaattccattttaagaattactacaattctatgtgttctgtataaaaacaggaaaatagttgttccaatatataaaaggaaaacatttaaaaatgta

SEQ ID NO: 158739 - DNA, 120 bp, Artificial Sequence
  ENSG00000106714_68 (sequence is synthesized)
ttttgttgggaaaatcagttgccagaattcattcagtcaactaacaagcactcctctgtggcaagaagccctgcctctctgttgtagcaggcagctacccacctaaatgatgaggtcaag

SEQ ID NO: 158740 - DNA, 120 bp, Artificial Sequence
  ENSG00000106714_69 (sequence is synthesized)
aaatatacagctgataaaaagataaaaaatatgtaatagtccagtgattacatgtgtactatggatcagtgccaattacttgtaagcttttggtatttagtttgttacagcaaatgtttt

SEQ ID NO: 158741 - DNA, 120 bp, Artificial Sequence
  ENSG00000106714_70 (sequence is synthesized)
cttttttaaattttcttctgcaaatgttttcttgtcatgaaaactgtttcccatttggcagaattacaaaaacagtcaagaagaaatgttctgattgatgtatacagttagaatgtgtat

SEQ ID NO: 158742 - DNA, 120 bp, Artificial Sequence
  ENSG00000106714_71 (sequence is synthesized)
taaagattattataaaatgataactgaattatatccatttctaaagtatgttgggacagaattttttaaaaatgtgattctgttttgaaaattgttttaccactggatcagtgtggttct

SEQ ID NO: 158743 - DNA, 120 bp, Artificial Sequence
  ENSG00000106714_72 (sequence is synthesized)
taaacttggctttatcttggagtcaccagaggagattcaaaagataccattacctggctctacctccagagatcgggattttaattggtctgtatctggattttaagagcccttctggtg

SEQ ID NO: 158744 - DNA, 120 bp, Artificial Sequence
  ENSG00000106714_73 (sequence is synthesized)
attcgactgtttagctaggtttgagagccactaccctagattatctgtcctgctccagtaacattctttttctaaaatcatttatagtatattagaaataaatccatggaaattccaagt

SEQ ID NO: 158745 - DNA, 120 bp, Artificial Sequence
  ENSG00000106714_74 (sequence is synthesized)
atagttaattaaatgtcagacaagctggtacaataaggtaactaaagtatgttcaagcaagctgaaatacaagttttgatgaaatatgatcagttaatctaaggattaaattttatgacc

SEQ ID NO: 158746 - DNA, 120 bp, Artificial Sequence
  ENSG00000106714_75 (sequence is synthesized)
gaatgagtacatatttaagtttaaaacaaccaattccatctttttcatggattctgccaattatagatccttccattatgaagaagagtaaagccagcaagttaaccagagcacaaagaa

SEQ ID NO: 158747 - DNA, 120 bp, Artificial Sequence
  ENSG00000106723_0 (sequence is synthesized)
gaggcgccgtctggctcaggctggggccggcgggagcgcgaacgagcgacggcggaacccgtgggcctgtggactgcagcctcggcggtcagcagagtgcttgtgatttcacgtattttt

SEQ ID NO: 158748 - DNA, 120 bp, Artificial Sequence
  ENSG00000106723_1 (sequence is synthesized)
gctgaactcgtaaaagagacacttggatggtggattaaccagaacactaacattctgtgaaaagtttcaaattggagaatattgaattttcaccctagtccagcagctccgctgctcact

SEQ ID NO: 158749 - DNA, 120 bp, Artificial Sequence
  ENSG00000106723_2 (sequence is synthesized)
taaatacagatgaatgaagaccccattcggaaagacacctggccagcggtccagagctgatgcaggccatgctggagtatctgccaacatgatgaagaagaggacatcccacaaaaaaca

SEQ ID NO: 158750 - DNA, 120 bp, Artificial Sequence
  ENSG00000106723_3 (sequence is synthesized)
tcggagcagtgtgggtccgagcaaacctgtttcccagccccggcggaacatcgtaggctgcaggattcagcatgggtggaaagaggggaatggccctgttacccagtggaaaggaaccgt

SEQ ID NO: 158751 - DNA, 120 bp, Artificial Sequence
  ENSG00000106723_4 (sequence is synthesized)
tctggaccaggtgcctgtaaatccttctttgtatcttataaaatacgatggatttgactgtgtttatggactagaacttaataaagatgaaagagtttctgcgcttgaagtcctccctga

SEQ ID NO: 158752 - DNA, 120 bp, Artificial Sequence
  ENSG00000106723_5 (sequence is synthesized)
tagagttgcgacatctcgaatcagcgatgcacacttggcagacacaatgattggcaaagcagtggaacatatgtttgagacagaggatggttctaaagatgagtggaggggaatggtctt

SEQ ID NO: 158753 - DNA, 120 bp, Artificial Sequence
  ENSG00000106723_6 (sequence is synthesized)
agcacgtgcacctgtcatgaacacatggttttacattacctatgagaaagaccctgtcttgtacatgtaccaactcttagatgattacaaagaaggcgaccttcgcattatgcctgattc

SEQ ID NO: 158754 - DNA, 120 bp, Artificial Sequence
  ENSG00000106723_7 (sequence is synthesized)
caatgattcacctccagcagaaagggaaccaggagaagttgtggacagcctggtaggcaaacaagtggaatatgccaaagaagatggctcgaaaaggactggcatggtcattcatcaagt

SEQ ID NO: 158755 - DNA, 120 bp, Artificial Sequence
  ENSG00000106723_8 (sequence is synthesized)
agaagccaagccctccgtctatttcatcaagtttgatgatgatttccatatttatgtctacgatttggtgaaaacatcctagatgtcatcacaaactctgccaaatttgtggaactatga

SEQ ID NO: 158756 - DNA, 120 bp, Artificial Sequence
  ENSG00000106723_9 (sequence is synthesized)
aatgtattatttgtagacataaagacttgattgctttccagtttaatgaaagcttaaatgtccctgcgaacccacaatctctgccagcagaactggttttgttctgaatagtacagattg

SEQ ID NO: 158757 - DNA, 120 bp, Artificial Sequence
  ENSG00000106723_10 (sequence is synthesized)
atgtgaacacaaagcattttgtgtaaggagaacccctttcttttaaaagaagtctgtctatttcgaggggagttacaggcaagtttggtaaaagttaagctagtatcatagtcatttaaa

SEQ ID NO: 158758 - DNA, 120 bp, Artificial Sequence
  ENSG00000106723_11 (sequence is synthesized)
attgtaatagatcttaaccattttccccctcaccctaactctcttattctgccgccacaatgcaagcatagtttgatgttttcgttattgccttttttgagatgtatgtatctgtatcta

SEQ ID NO: 158759 - DNA, 120 bp, Artificial Sequence
  ENSG00000106723_12 (sequence is synthesized)
cctatatctatatgtgtgtatacatatataatatatacacacagatacaagtgtacacacacacaccacacaccacacacaccccactggcagtctttgtggattaggatgggggtgaca

SEQ ID NO: 158760 - DNA, 120 bp, Artificial Sequence
  ENSG00000106723_13 (sequence is synthesized)
taattttcttgagtttaacaggagtgctttacccaagtcagtcatggatatgatatcactgctctttatttaaaagtaaactttgggcacaggaaccatatgggaacattcagcttgttt

SEQ ID NO: 158761 - DNA, 120 bp, Artificial Sequence
  ENSG00000106723_14 (sequence is synthesized)
aaaaaaaaaaaatcagaagttcagagcaccttttcaatctggagcccttaaaccataagtccaaatatgaattatttgtgaacagttaatgacccatattagaattttacaatctggtga

SEQ ID NO: 158762 - DNA, 120 bp, Artificial Sequence
  ENSG00000106723_15 (sequence is synthesized)
acaatctgggtaaaaggctacctttaattctaagcttcatttttttttgggggggggttacattttaatcataaattcttttttgcaaagcccaggttcttgttccacacagtgtaatgt

SEQ ID NO: 158763 - DNA, 120 bp, Artificial Sequence
  ENSG00000106723_16 (sequence is synthesized)
aggtgtattttggacagcacatatggtccattgtgtacaagtcagtaatctggatttcagtacatggatttaaaaggcaacaatccatcactggtttgtgtgtttttggttaagtttctg

SEQ ID NO: 158764 - DNA, 120 bp, Artificial Sequence
  ENSG00000106723_17 (sequence is synthesized)
gaagaatacaatgcttttatattggaagtataagttttgagtggcattgttgccttctaacaagctctctgggacttttaaagttttattactattattgctaatgtatgattatggtca

SEQ ID NO: 158765 - DNA, 120 bp, Artificial Sequence
  ENSG00000106723_18 (sequence is synthesized)
ttcctgcctacccctggcttttcctcacaaagaatgtctagacaaacagcagcttagtctcctgacacctcttgtggggtgcatgttcctgctccaggtatgctgttcatgtggattcat

SEQ ID NO: 158766 - DNA, 120 bp, Artificial Sequence
  ENSG00000106723_19 (sequence is synthesized)
tccattcagtggccccttggggtttgcatgccagtgaagcgttaccatagaagagccagccgtttgtgttcgcttggtaggtgtaagtaatagcagcccttagccacggagtctttatgt

SEQ ID NO: 158767 - DNA, 120 bp, Artificial Sequence
  ENSG00000106723_20 (sequence is synthesized)
ggtttattcctgcaaggttgttttaaactgaaatagaactgctagtgtgattggttgatcagcaaaacagctgctctcattttgttttggaggaaccctggtggtttgacagccaggaga

SEQ ID NO: 158768 - DNA, 120 bp, Artificial Sequence
  ENSG00000106723_21 (sequence is synthesized)
aaggccatatgtgaaaccagtctcttgtggagattggaaatcctccctgatatttgggcagagcctaaacgtgcatgcttgtcactcaaacaccagaagtttgaatcagaggtctgagtg

SEQ ID NO: 158769 - DNA, 120 bp, Artificial Sequence
  ENSG00000106723_22 (sequence is synthesized)
acctcttttgtggctgttcttgatggtttccaggcctcgttatgcatggtttgcttgatgcccattttttgtgccttgtgctgttggatggtaacgaccactcaccatgtaaacacagta

SEQ ID NO: 158770 - DNA, 120 bp, Artificial Sequence
  ENSG00000106723_23 (sequence is synthesized)
cctcagttttctgtccacagctgcagtcgctctgtccctcgtgcttcactgtgggcagccagggacaagcttctgaaagcagtgtgatacccaagtcataggtgcttctcgtatgtgaac

SEQ ID NO: 158771 - DNA, 120 bp, Artificial Sequence
  ENSG00000106723_24 (sequence is synthesized)
aggtgtcattctacagatctgttatgtgttttcctgttgactcttaagagtccctgcatgtaaatctcaaagctgagcctggctcccagagtccagactgacattacagcgcaagagttt

SEQ ID NO: 158772 - DNA, 120 bp, Artificial Sequence
  ENSG00000106723_25 (sequence is synthesized)
gcaagtgtgtccagcatgcaccaactgtgcagaacttggctcggtaactttgcgtggaaaaataaagtacattttgaagtatcttgagggttgggtcaattgagacatttctagcattac

SEQ ID NO: 158773 - DNA, 120 bp, Artificial Sequence
  ENSG00000106723_26 (sequence is synthesized)
ttaatgacttgcattgtggtttttctgcaagcaactttaatgactttttttataccacatggtctcccagtttctagatgaatgcaacatgatgatggtgatgatgacgatgagtttaat

SEQ ID NO: 158774 - DNA, 120 bp, Artificial Sequence
  ENSG00000106723_27 (sequence is synthesized)
cattgttcatttattgcctttagggctgagggaaagggaaggtttgtttttttttctccccattttcccccattctgtctttcttttggtgacttacaccacatgtaatgacgctatgac

SEQ ID NO: 158775 - DNA, 120 bp, Artificial Sequence
  ENSG00000106723_28 (sequence is synthesized)
taattctgctcccaagcccttgtatcttgggcttcattttaggctcatgtgtcagatctgcatgcattgcttgcatttttctggtatctgaatgttggttccttgttccaggaattcaac

SEQ ID NO: 158776 - DNA, 120 bp, Artificial Sequence
  ENSG00000106723_29 (sequence is synthesized)
attaatttccaaaagtatcatgggacttgtgacaatacaagacatgaatctatgtataaaatttatcggcctttctcatttacctgctctagtattattgtattgtgtgtgcgtgcgtgt

SEQ ID NO: 158777 - DNA, 120 bp, Artificial Sequence
  ENSG00000106723_30 (sequence is synthesized)
gtgatgtcaggctgccacgtaaaacttcagagaaaaatcttaaaagcagaccatccttttttgcatgctctattctaagtagaatgttcaatgtaactgactaaaattgcatgttaaaga

SEQ ID NO: 158778 - DNA, 120 bp, Artificial Sequence
  ENSG00000106723_31 (sequence is synthesized)
tttgttttctttatttttatttgttttcagtttcctgtatatttgcttactgtgccgttttagtggttttaggataaaaatgcactggtgaagcaaatgtagtgccaacagaaggtgatt

SEQ ID NO: 158779 - DNA, 120 bp, Artificial Sequence
  ENSG00000106723_32 (sequence is synthesized)
cagaaggtgattttccagttgtaaatgtcatgcagcatttgaagggactgtgttttcttaaaaaaaaatcacagttacttctaaaccagatttcatttcttttattgttttatgtgccaa

SEQ ID NO: 158780 - DNA, 120 bp, Artificial Sequence
  ENSG00000106723_33 (sequence is synthesized)
accacgaagtgcattgggcttcaatctctgaacactgtagacccattagaagactgttccgattgttacaaattgtagtgcctgaaaacactcttaagctgattgtcttaacaaaatgaa

SEQ ID NO: 158781 - DNA, 120 bp, Artificial Sequence
  ENSG00000106723_34 (sequence is synthesized)
agttctccaaagacaaaacagaacaattattataacaaaataattatggttgaaatgtctgtggttccttggaaatgctgcgctctttgtgtttttccatcattagtgcagttggaatga

SEQ ID NO: 158782 - DNA, 120 bp, Artificial Sequence
  ENSG00000106723_35 (sequence is synthesized)
atgtgtataggtcagaggtcttcgtgttcacattttaaaattaggtaaatgacctcatctttcaagcttgaattcatttttaattttaattttattttatacaatgtgtagacagttccc

SEQ ID NO: 158783 - DNA, 120 bp, Artificial Sequence
  ENSG00000106723_36 (sequence is synthesized)
tgttctctgcatttagaagtatacacaatataaatctgttaattctgtaagtaatttttataattatgatgtaactctatcttatccttaaaacatttaaaataaaccctttatgtgcaa

SEQ ID NO: 158784 - DNA, 120 bp, Artificial Sequence
  ENSG00000106723_37 (sequence is synthesized)
ggagcgggggcggggaggcgccgtctggctcaggctggggccggcgggagcgcgaacgagcgacggcggaacccgtgggcctgtggactgcagcctcggcggtcagcaggccatgctgga

SEQ ID NO: 158785 - DNA, 120 bp, Artificial Sequence
  ENSG00000106723_38 (sequence is synthesized)
gagcgggggcggggaggcgccgtctggctcaggctggggccggcgggagcgcgaacgagcgacggcggaacccgtgggcctgtggactgcagcctcggcggtcagcagcaatgaggtctt

SEQ ID NO: 158786 - DNA, 120 bp, Artificial Sequence
  ENSG00000106723_39 (sequence is synthesized)
gcagcaatgaggtcttactgtgtagcccaggctgctctggaactcctggactcaagtgatcttcctaccttggtcttccaaagtgttgggattacagatggagtttcgctcttgttgccc

SEQ ID NO: 158787 - DNA, 75 bp, Artificial Sequence
  ENSG00000106723_40 (sequence is synthesized)
aagtttatctcgacaatgctagttgcagtctgtgtgaccctgaccaagttattttaatgtctgtgctgcagtttt

SEQ ID NO: 158788 - DNA, 120 bp, Artificial Sequence
  ENSG00000106723_41 (sequence is synthesized)
gaccctgaccaagttattttaatgtctgtgctgcagtttttcagtttccaagatggaatagttatagtgcatatcttcctcatggttgtgaggagtgcatgacacatagcgagtgctcag

SEQ ID NO: 158789 - DNA, 120 bp, Artificial Sequence
  ENSG00000106723_42 (sequence is synthesized)
gaggcgccgtctggctcaggctggggccggcgggagcgcgaacgagcgacggcggaacccgtgggcctgtggactgcagcctcggcggtcagcagtttttcagtttccaagatggaatag

SEQ ID NO: 158790 - DNA, 120 bp, Artificial Sequence
  ENSG00000106733_0 (sequence is synthesized)
ctggcatccctctaacccaggaggagcgtggggaaaggggctgtgggcctctcggggagcgagctgcgggtagcggcgcactgggtacaggcgcgcgcttggctgtcgcctctgccgctg

SEQ ID NO: 158791 - DNA, 120 bp, Artificial Sequence
  ENSG00000106733_1 (sequence is synthesized)
tgtttgggaggactcgaactggcgccaggaaatattaggaagctgtgattttcaaagctaattatgaaaacatttatcattggaatcagtggtgtgacaaacagtggcaaaacaacactg

SEQ ID NO: 158792 - DNA, 120 bp, Artificial Sequence
  ENSG00000106733_2 (sequence is synthesized)
gctaagaatttgcagaaacacctcccaaattgcagtgtcatatctcaggatgatttcttcaagccagagtctgagatagagacagataaaaatggatttttgcagtacgatgtgcttgaa

SEQ ID NO: 158793 - DNA, 120 bp, Artificial Sequence
  ENSG00000106733_3 (sequence is synthesized)
gcacttaacatggaaaaaatgatgtcagccatttcctgctggatggaaagcgcaagacactctgtggtatcaacagaccaggaaagtgctgaggaaattcccattttaatcatcgaaggt

SEQ ID NO: 158794 - DNA, 120 bp, Artificial Sequence
  ENSG00000106733_4 (sequence is synthesized)
tttcttctttttaattataagccccttgacactatatggaatagaagctatttcctgactattccatatgaagaatgtaaaaggaggaggagtacaagggtctatcagcctccagactct

SEQ ID NO: 158795 - DNA, 120 bp, Artificial Sequence
  ENSG00000106733_5 (sequence is synthesized)
ccgggatactttgatggccatgtgtggcccatgtatctaaagtacagacaagaaatgcaggacatcacatgggaagttgtgtacctggatggaacaaaatctgaagaggacctctttttg

SEQ ID NO: 158796 - DNA, 120 bp, Artificial Sequence
  ENSG00000106733_6 (sequence is synthesized)
caagtatatgaagatctaatacaagaactagcaaagcaaaagtgtttgcaagtgacagcataaagacggaacacaacaaatccttcctgaagtgaattaggaaactccaaggagtaattt

SEQ ID NO: 158797 - DNA, 120 bp, Artificial Sequence
  ENSG00000106733_7 (sequence is synthesized)
cacatggttttcccaacatgtggaacaataaatatccatgccaatggacaggactgtaccttagcaagttgctccctctccagggagcgcatagatacagcagagctcacagtgagtcag

SEQ ID NO: 158798 - DNA, 120 bp, Artificial Sequence
  ENSG00000106733_8 (sequence is synthesized)
aaagtctccactttctgaacatagctctataacaatgattgtcaaacttttctaactggagctcagagtaagaaataaagattacatcacaatccaatatctgtggaattcattgtgtat

SEQ ID NO: 158799 - DNA, 120 bp, Artificial Sequence
  ENSG00000106733_9 (sequence is synthesized)
gtttatgtatttgtgtgtaggtgtgtatgtgtgtgtgtgatacatacatacatcaagtatcacaagacattgaccttatatattatgcactgtgatgtttttccgtctttaattataaaa

SEQ ID NO: 158800 - DNA, 120 bp, Artificial Sequence
  ENSG00000106733_10 (sequence is synthesized)
aacatattgatcacaaccacaatttggaaaatgttgctccataccatcccataccaacactcaccacctgcaaataatagcattactaggagctgcagtcacaatgaataaatcaacaat

SEQ ID NO: 158801 - DNA, 79 bp, Artificial Sequence
  ENSG00000106733_11 (sequence is synthesized)
tgtatctaataccattgtatctcattgttgagactttgttacaaatagggtttctggtttctttctcccccctcgtggt

SEQ ID NO: 158802 - DNA, 120 bp, Artificial Sequence
  ENSG00000106733_12 (sequence is synthesized)
tacaaatagggtttctggtttctttctcccccctcgtggttcattttgtttttgtcaaaccagtggtctaaaatcacagaaataagcaattacttcaatcatgtggaatccaggggacct

SEQ ID NO: 158803 - DNA, 120 bp, Artificial Sequence
  ENSG00000106733_13 (sequence is synthesized)
atctttggaaagcacagaaggagatctgaattgtgtgatctcttgaggctgctttcaatgctggaatttaaattatgtactgaacaatcttttgcttattaataaaaagattacacacaa

SEQ ID NO: 158804 - DNA, 120 bp, Artificial Sequence
  ENSG00000106733_14 (sequence is synthesized)
gctgcctccaagagaccgcgcagcctggagaagtcgccagggacaggatcaggacttgatcctcgcggatcgatatggtctcattcctctagcgttggggtgatgacctactgcccgcct

SEQ ID NO: 158805 - DNA, 120 bp, Artificial Sequence
  ENSG00000106733_15 (sequence is synthesized)
gctgcctgttactgtaaggcctgctaagaattttttttttttttactttttttaatgactgaaaagaaataaaaagaaatataatactttgtgacacgtgaaaattacatgaaattacga

SEQ ID NO: 158806 - DNA, 120 bp, Artificial Sequence
  ENSG00000106733_16 (sequence is synthesized)
aacagctctttaagatactgaggatgtccaaatggtgtttctgtgtggatggagtgggggacggagaagcagtgaggattccagagtcctggggaagagcagaccactgtggaatatcag

SEQ ID NO: 158807 - DNA, 120 bp, Artificial Sequence
  ENSG00000106733_17 (sequence is synthesized)
tggagcactggcttcataaatgccaacaagagatggaagagttttctataaacagagaaacagaagagtcagtcaaccacatttacccactttcccatttattttgtggagctaacacca

SEQ ID NO: 158808 - DNA, 120 bp, Artificial Sequence
  ENSG00000106733_18 (sequence is synthesized)
gagacaaggtctgattgggcactgctttcattcaggatgatttatcattccccatatcattctccttcatcacgatggaggagaaaacttagtttctttccagctgtgcccagcttcaga

SEQ ID NO: 158809 - DNA, 120 bp, Artificial Sequence
  ENSG00000106733_19 (sequence is synthesized)
tcagtggacatgagccccaggttaaaacacgctttcaataaatgactgaatcgagaagtgcctccctcccgtgtgatctcctcgatgctgcaaaactagatctaaagaggagtaactcag

SEQ ID NO: 158810 - DNA, 120 bp, Artificial Sequence
  ENSG00000106733_20 (sequence is synthesized)
tgccccttctcctggacttcacagtccggtcagaagagacaaataactggcctgttgtgataagctacagcagacctcccagctggcccccaggtggagagagatggggaaaaggaggca

SEQ ID NO: 158811 - DNA, 120 bp, Artificial Sequence
  ENSG00000106733_21 (sequence is synthesized)
aaaacccttgtgaactaagtatgctgttattttaggccccttgacactatatggaatagaagctatttcctgactattccatatgaagaatgtaaaaggaggaggaggtaagttttgaag

SEQ ID NO: 158812 - DNA, 120 bp, Artificial Sequence
  ENSG00000106733_22 (sequence is synthesized)
ccatctttgtgagttgtaattcaaaacaaaaaatgtagaagaaaaatgaggacagcaacattattgagcaatgcgtatacgtcatttttcagagacaggaagccttaactcttttacaaa

SEQ ID NO: 158813 - DNA, 120 bp, Artificial Sequence
  ENSG00000106733_23 (sequence is synthesized)
tcctcaaacaaagcaagcccatggtgattaggattttaatgtaagtgagcctgttctgccacagctacaaagaacaccaattagttcaaagcttaatccaacatagtggtctctccattg

SEQ ID NO: 158814 - DNA, 120 bp, Artificial Sequence
  ENSG00000106733_24 (sequence is synthesized)
ttatttacactatttgtctcttagttctcttataaagcactagaaggaaaaagaataattaagaatgatagtcagtggattacaaagttaattttaatatcaaagaactaaatccatgtt

SEQ ID NO: 158815 - DNA, 120 bp, Artificial Sequence
  ENSG00000106733_25 (sequence is synthesized)
actgtcgttctaactgccattgagttaaaacatgtagtacatgtagtcctaatcctgtttagattcagcctctgagtgatttccccattatcctgaccattcatattttactttatcaat

SEQ ID NO: 158816 - DNA, 120 bp, Artificial Sequence
  ENSG00000106733_26 (sequence is synthesized)
agaattactccttaagtgacccttttgggtgaacaccttcagtgcacctaaagtgccgtatgcacaacaccactttctttcttctgtttctttcctcctttcttctttctttctcttctc

SEQ ID NO: 158817 - DNA, 120 bp, Artificial Sequence
  ENSG00000106733_27 (sequence is synthesized)
ttttaattaaataattttcacataagccagtgtggatttatctgtaacaatccaatatttttgacctattatagctggctagcatctatttctttctttaatcactattaatttcctttt

SEQ ID NO: 158818 - DNA, 120 bp, Artificial Sequence
  ENSG00000106733_28 (sequence is synthesized)
aagttatggtcctgggtgccttggttaaacctattggcatttacaagagatgttgggtgtcaaagtaaacattgtatattaataagcctgttagcatttgaactgctctcttttcccctt

SEQ ID NO: 158819 - DNA, 80 bp, Artificial Sequence
  ENSG00000106771_0 (sequence is synthesized)
accgcccctcgggggcggctgtggcggaggaacgatggccgacggcggcggccctaaggacgcgccaagcctgcggagct

SEQ ID NO: 158820 - DNA, 120 bp, Artificial Sequence
  ENSG00000106771_1 (sequence is synthesized)
gagtggcggtggcggggagaccccgcggaccgcggcgctggcgctgcgcttcgacaagcccattaagcaggccttctacaacaccggggccgtgctgttcgtgtgcctgtgctgcggcgc

SEQ ID NO: 158821 - DNA, 120 bp, Artificial Sequence
  ENSG00000106771_2 (sequence is synthesized)
cgcggtgctggtctacttcatcctggaggccttcctgcggccgctgctctgggccgtgctatgcggcacttttctgcaccccttcaagagctcgctgacgcgcctgggccgccactggct

SEQ ID NO: 158822 - DNA, 120 bp, Artificial Sequence
  ENSG00000106771_3 (sequence is synthesized)
gcagcgcctgcaccgcgcgcacacgcccatcgtcctggccgcgctgctcctgccgctctgcttcgtcgactacggcgtcgaggccctgggcgagcaggcgctgcgccgccgccgcctgct

SEQ ID NO: 158823 - DNA, 120 bp, Artificial Sequence
  ENSG00000106771_4 (sequence is synthesized)
cctgctgctcggcgccggcggcccgctcctgtacggcctctactgcctcggcagctacttgggcgtgcaggtgctgctggtgcacgctgccacgctcatctgccgcgggctggactactt

SEQ ID NO: 158824 - DNA, 120 bp, Artificial Sequence
  ENSG00000106771_5 (sequence is synthesized)
cagcagcctgtggatctggacgttggtggttggctatgtgttgactgtttcattcaagtggaatgcaagcactgaacgctacttgagagcagtttcaattcctgtctggattatattgct

SEQ ID NO: 158825 - DNA, 120 bp, Artificial Sequence
  ENSG00000106771_6 (sequence is synthesized)
ttttcatttagcatccctggctggctcatggagaattccagtattcctggttattgttttcctgatgtctgtgggtaccctctatgaaaaacagaatggaaaagagtcttctggggcaga

SEQ ID NO: 158826 - DNA, 120 bp, Artificial Sequence
  ENSG00000106771_7 (sequence is synthesized)
gttaccagggcaggttatctccatggcagcttctactctggcaaacttggccatctctatcacagggtatgaatcaagcagtgaagaccagccctccactcagcctgcagaagcagtgga

SEQ ID NO: 158827 - DNA, 120 bp, Artificial Sequence
  ENSG00000106771_8 (sequence is synthesized)
caggggagaatccgctccaacgttgtccacctccccttcaccctcctccccttcacccacttccccttcacctactctgggcagacgaaggcctgaaataggaacgtttcttagaaagaa

SEQ ID NO: 158828 - DNA, 120 bp, Artificial Sequence
  ENSG00000106771_9 (sequence is synthesized)
gaaaactagtgacatctactttgtgtctctagtttgggccattgtcgtcatgcagatctggttgaacctgtggattgtgcagttgctgccagtgccgattgcagtctggatactcaaaaa

SEQ ID NO: 158829 - DNA, 120 bp, Artificial Sequence
  ENSG00000106771_10 (sequence is synthesized)
gcttgtcattcactttggagttgtggatttcctagagaaacgctaccatgtgtggtggggcattatagaaagcttcctgaaggagcggcagggagctctcgcgccttggcccattgtcgg

SEQ ID NO: 158830 - DNA, 120 bp, Artificial Sequence
  ENSG00000106771_11 (sequence is synthesized)
gcttggaaaattcttgttaaaagttgatagcaagctctggcactggctaaataagaagatgatcatctggttggagaagatgttagataaaataattagcattttcatcatatttttgtt

SEQ ID NO: 158831 - DNA, 120 bp, Artificial Sequence
  ENSG00000106771_12 (sequence is synthesized)
agtgataggaactcttcttttagccctactcctgactgcaaaggtacatcaagagagtgtacacatgattgaagtcacaagtaatttgattaatgaaactctagcaaatcaccctgagtg

SEQ ID NO: 158832 - DNA, 120 bp, Artificial Sequence
  ENSG00000106771_13 (sequence is synthesized)
ggcaaattggcttcctgaggctcaggtagtccaaagagccctgaattctgcggctaacaacgtgtatcagtatggacgagaatggataactcacaagctccataaaattctaggagataa

SEQ ID NO: 158833 - DNA, 120 bp, Artificial Sequence
  ENSG00000106771_14 (sequence is synthesized)
ggtgaacaatactgctgtaattgaaaagcaagtactagaactttgggacagactgtatcactcttggtttgtaaagaatgtaacacactctggaaggcacaaaggacagaagttgcatgt

SEQ ID NO: 158834 - DNA, 120 bp, Artificial Sequence
  ENSG00000106771_15 (sequence is synthesized)
cagtcgtcagaatagctggctgggagacattctggactggcaggatattgtttcctttgttcacgagaacattgagacatttctttcgatcttggagtctctgtggatcgttatgagccg

SEQ ID NO: 158835 - DNA, 120 bp, Artificial Sequence
  ENSG00000106771_16 (sequence is synthesized)
gaatgtgagcctgctgttcaccactgtcactacactcttgaccatcctcttctacagcgggacagcccttctcaattttgtactctctctgataattttcctgaccacactattttatct

SEQ ID NO: 158836 - DNA, 120 bp, Artificial Sequence
  ENSG00000106771_17 (sequence is synthesized)
attaagttccagtgatgagtactacaagccagtgaagtgggtgataagcctgactccactatctcagccaggtccttcttctaatattattggccagtctgtggaagaagctatcagagg

SEQ ID NO: 158837 - DNA, 120 bp, Artificial Sequence
  ENSG00000106771_18 (sequence is synthesized)
ggtgtttgatgcttccctcaaaatggctggcttctatggattgtatacctggctgactcatactatgtttggcatcaatattgtcttcataccatcagcattagcagcaatccttggagc

SEQ ID NO: 158838 - DNA, 120 bp, Artificial Sequence
  ENSG00000106771_19 (sequence is synthesized)
agtgccattcctggggacatactgggcagcagtacctgcagttcttgacctgtggctgacacaagggttaggatgcaaggccattttactgttgatttttcatctcttgccaacatactt

SEQ ID NO: 158839 - DNA, 120 bp, Artificial Sequence
  ENSG00000106771_20 (sequence is synthesized)
tgtagatactgcaatctactctgacatatcaggaggtggccatccttacctgacaggcttggcagtggccggtggagcatactacctaggcctggaaggagcaatcatcggtcctattct

SEQ ID NO: 158840 - DNA, 120 bp, Artificial Sequence
  ENSG00000106771_21 (sequence is synthesized)
tctctgcatacttgtggttgcttccaatatctatagtgccatgctagtgagtcccacgaattcagttcccacgccaaaccagaccccatggcctgctcagcctcagcggactttccgtga

SEQ ID NO: 158841 - DNA, 120 bp, Artificial Sequence
  ENSG00000106771_22 (sequence is synthesized)
catttctgaagatctgaaatcttcagtaggttgatgtggtttcctctgcagtgatttttctaggaagttcaaatttgacagcgagttcagctcagctgtggccctctgcccttccagctg

SEQ ID NO: 158842 - DNA, 120 bp, Artificial Sequence
  ENSG00000106771_23 (sequence is synthesized)
tgcctagcaagcaaaacccaggaaagaagcagaagcctcctggccttacatacagaatgcctggacaagagagaacttgctgcgggctgctttgtattttaaaacacagcttgagagttc

SEQ ID NO: 158843 - DNA, 120 bp, Artificial Sequence
  ENSG00000106771_24 (sequence is synthesized)
agagttggtggtttgctcacttaactgttgttaagatggcttgaaaagtttcattttatacactggtaccctggcttgaaatttttccactttggttatctatgttactatattatatat

SEQ ID NO: 158844 - DNA, 120 bp, Artificial Sequence
  ENSG00000106771_25 (sequence is synthesized)
ttataaagttattttaagaactctaaactacctgctgttaaaagaatagatggtgtaattttttcctggtttaagaaatgtattgttaaacttttctaagacagtcacttttcaaggaag

SEQ ID NO: 158845 - DNA, 120 bp, Artificial Sequence
  ENSG00000106771_26 (sequence is synthesized)
agggctttcacttttgagtgtgtagttgagtgagcaggaaaaatgaatcttctacccttctcccacaatgtattatacgctctttaagaaataataaatcataagtataagggtggggtg

SEQ ID NO: 158846 - DNA, 120 bp, Artificial Sequence
  ENSG00000106771_27 (sequence is synthesized)
gcttatttgatgttcagttttatattataaccctgggagatacaaagactgaagctcttcctcctcttccttttctcttcacgcttctttacactattgccaaattataaaacttggctg

SEQ ID NO: 158847 - DNA, 120 bp, Artificial Sequence
  ENSG00000106771_28 (sequence is synthesized)
accacgttgaagtgaaatacttattaagctgctatgaatggtaacagtatgataaaattcatgctgttattaggttttctccttccaggtggttgaagtgaaaaatctcaggtgtagcaa

SEQ ID NO: 158848 - DNA, 120 bp, Artificial Sequence
  ENSG00000106771_29 (sequence is synthesized)
tactctgatttgttaaatgtatccgtttcattatttggaactctgccaataagttagttttcagcagaattttgtatttatgtagtattttcccatctcttagcacagtgccttgcacat

SEQ ID NO: 158849 - DNA, 120 bp, Artificial Sequence
  ENSG00000106771_30 (sequence is synthesized)
gactctaaatgaatgcttgttgaattgaattgcaactttaaaaatatctcagatatcacaataaccagcatagtgctttacattttacaaagtccttttgcacatactatttcacaagta

SEQ ID NO: 158850 - DNA, 120 bp, Artificial Sequence
  ENSG00000106771_31 (sequence is synthesized)
catcacatcagctttcatatagctttatattattttacatcagttttacactgatggagaagctaaggttcagaaaagtgaccaactcaaagtcgtaaagtgtagtaggatttggcctca

SEQ ID NO: 158851 - DNA, 120 bp, Artificial Sequence
  ENSG00000106771_32 (sequence is synthesized)
gatctttgactccgttgtgtgcagattctgctgtattagtgttccttctaaatattgtatgcagttttcccagtgttacgagattggtgttgctatccatttgttgtgaatgaagacttg

SEQ ID NO: 158852 - DNA, 120 bp, Artificial Sequence
  ENSG00000106771_33 (sequence is synthesized)
gctgaaccctttctactgtttaaaacaatcatcaggcctatcctctgctcccaggggaatgtgggagagaaaagggttcttggccaggctgtaggtggtggctcacatctgtaatcccag

SEQ ID NO: 158853 - DNA, 75 bp, Artificial Sequence
  ENSG00000106771_34 (sequence is synthesized)
cggtggtgtggctatagtctgagctactcaggaggctgatgtatgaggatcacctgagtccaggaggtcgaggct

SEQ ID NO: 158854 - DNA, 67 bp, Artificial Sequence
  ENSG00000106771_35 (sequence is synthesized)
actgtcccaaggaaaaaaaaaagtgttggggggtagttcttaagcgttgaagatttcctttttggaa

SEQ ID NO: 158855 - DNA, 120 bp, Artificial Sequence
  ENSG00000106771_36 (sequence is synthesized)
ggggggtagttcttaagcgttgaagatttcctttttggaaagtatttaaaggtagaaatattaataatttttcctaaaacatctccctaagaagtcactgataattataattagtttaaa

SEQ ID NO: 158856 - DNA, 120 bp, Artificial Sequence
  ENSG00000106771_37 (sequence is synthesized)
tttattcttacactacttaagaaaaatttcatttagaaaaggctaccatgagatcttttgactatatggagtagactgcatacagatctctttatttctattatgaatattttagcgatt

SEQ ID NO: 158857 - DNA, 120 bp, Artificial Sequence
  ENSG00000106771_38 (sequence is synthesized)
ataatcagctattccactgagtattagatttggtcactaagtaactcatgtttttctttagtcaatcattcattcattcactaaaacatttgttgagagttggctaaactctagattctg

SEQ ID NO: 158858 - DNA, 120 bp, Artificial Sequence
  ENSG00000106771_39 (sequence is synthesized)
tgccaggcactgtacagggtgatggagatcactcataagaaggcctcttgctcttagccagatcatatgtaatactaaatttaaattttttgcattaaaaggctaaaaaatcatttgttt

SEQ ID NO: 158859 - DNA, 120 bp, Artificial Sequence
  ENSG00000106771_40 (sequence is synthesized)
ttgttaattatatactggttgatttatagatgtaattagcacatattcataagagacaaatatatacaatgagttactatacatatacaaagtgattttagctgtataaagtgatattgc

SEQ ID NO: 158860 - DNA, 120 bp, Artificial Sequence
  ENSG00000106771_41 (sequence is synthesized)
aaaaaactacagctaatgtttcttgctgggtaattattagcataaatatcaggttcttagaggtctttaagagaatactttagagctaccaaaattagcagcagtgatgtaatatcaccc

SEQ ID NO: 158861 - DNA, 120 bp, Artificial Sequence
  ENSG00000106771_42 (sequence is synthesized)
tgaaataccaggagcagaggtgccccagagtgcttcacagctatgatcaggaaacttgacctgccccattgctacagcaacggcataaggactaggaaggtccactagctggggaggtct

SEQ ID NO: 158862 - DNA, 120 bp, Artificial Sequence
  ENSG00000106771_43 (sequence is synthesized)
tggaaccctccgagccagaaagaagcattccagcatgattcctcagatgcaatgaggaaggtttacagaattttcacagggcaacagagatcaagtggtatgaaaaggtaggagttttaa

SEQ ID NO: 158863 - DNA, 120 bp, Artificial Sequence
  ENSG00000106771_44 (sequence is synthesized)
gctcaagtctcaaagataacctacctttacattctcagtcagaatttgacccagaaagaggaagtttcttcaggaacagaccgtacgttgatgaagtagaagtcatttcagtaaaaacgg

SEQ ID NO: 158864 - DNA, 120 bp, Artificial Sequence
  ENSG00000106771_45 (sequence is synthesized)
agtacagaacttggtcataatatcttgcattttatagatttattaaagattagtttcaagttcacattcgctattcagttgtaaaccgaatggatgggaggggagaaaatacaagctctc

SEQ ID NO: 158865 - DNA, 120 bp, Artificial Sequence
  ENSG00000106771_46 (sequence is synthesized)
cacacaggtatgctcctctcttttctgagagagaaggcatgggattttcagcataaattccatgttatgtgagtgctgtttgagttctgaagttcctatcaatatctgttcctgcaagtg

SEQ ID NO: 158866 - DNA, 120 bp, Artificial Sequence
  ENSG00000106771_47 (sequence is synthesized)
atctctgtaagaccaccttacatgctggtcttagttattgttaaaattgcaaggtttcttcacaccctctttgataagaagtgtttagctggcagagctttcccttgacttctgagtcta

SEQ ID NO: 158867 - DNA, 120 bp, Artificial Sequence
  ENSG00000106771_48 (sequence is synthesized)
gtgtgggttggcccatgacagtgggaagaaatccaacatgttacatggagaccttgtatgtaaacaaactctgtagcctttgaaagtggaactgctttttacagttaaagggctgctaaa

SEQ ID NO: 158868 - DNA, 120 bp, Artificial Sequence
  ENSG00000106771_49 (sequence is synthesized)
tggcttgcagatgagatcttctggctcaccttgatcttcacatgaacccattgtgacctatctggatttcctaggacctgtagtttccatttgggttatattagtgcctcaggaatgtgt

SEQ ID NO: 158869 - DNA, 120 bp, Artificial Sequence
  ENSG00000106771_50 (sequence is synthesized)
cactactggtcaagcaatactcagaaattcaggctgtgaggggttagattagaggaaagtaatttaggtgagctatccagagctttcaacctcagggtttataggaaaaaaaaacaaaat

SEQ ID NO: 158870 - DNA, 120 bp, Artificial Sequence
  ENSG00000106771_51 (sequence is synthesized)
acaaaaacccttaggacttctcatactctagccctgaccttgcagtctcctctgaggggcctcctaagacccttaaaataatattacaataggactttgagtgtgcatttcacagtggaa

SEQ ID NO: 158871 - DNA, 120 bp, Artificial Sequence
  ENSG00000106771_52 (sequence is synthesized)
atagcctctggctagcattacttccaaatgctagttccagctaaaaacaagtactttttattagtttcttgtctttcaacattctgccatcaaaatatattcattttattaacttaccga

SEQ ID NO: 158872 - DNA, 120 bp, Artificial Sequence
  ENSG00000106771_53 (sequence is synthesized)
ttattgggaacctgcaaaaaaaaaaaaaaaaaaaaacacacatgctgtctgcagccactgtttggttatttttgatagtttaagagaattataaatcaagttgttctgtctactagagtc

SEQ ID NO: 158873 - DNA, 120 bp, Artificial Sequence
  ENSG00000106771_54 (sequence is synthesized)
agaaattctgtgctagaatgggacttctaaaattaggtggtcctgtcactttctagagaaagacccaaattcataggtttaagtggcttgtctgacatacacatacagccagttagtaac

SEQ ID NO: 158874 - DNA, 120 bp, Artificial Sequence
  ENSG00000106771_55 (sequence is synthesized)
agaattcagaatagaatagagttcttttttttctgtcagtccgttgttctacttctctttccttttcttcatggttgagcagcttttggcaaaatgtgttccatatagcagtagttccaa

SEQ ID NO: 158875 - DNA, 120 bp, Artificial Sequence
  ENSG00000106771_56 (sequence is synthesized)
gagatgttaatagatgtaagaaaaaaagtgtgtgtgtgttgggggtgggggattgcatggtcaattaaaatgaaggaatgctgagtttgtttccttactgtaggacttctaagagttttg

SEQ ID NO: 158876 - DNA, 120 bp, Artificial Sequence
  ENSG00000106771_57 (sequence is synthesized)
aacatgctattacacattgtgaatttataaaaggggacaaacactgtttgaccttagactgcactccccttctttattcctcagagcatctcaaaggactacagggtcctttgagaaaca

SEQ ID NO: 158877 - DNA, 120 bp, Artificial Sequence
  ENSG00000106771_58 (sequence is synthesized)
tggcccttgatcaagtttacaactctttgagaagacatccctaatggaaatactgaatggcagatctattactgtggtaccatgtagtgtgtaataaatcttgaagtccagaaagcaagt

SEQ ID NO: 158878 - DNA, 120 bp, Artificial Sequence
  ENSG00000106771_59 (sequence is synthesized)
atatttgctgtttagagctatacttaaggtatagagattcttttccacctgtggtgtgtaaaatcagtattgtgtttaattttgcaggtttttcaaggatcaactaatgtgcaaatacag

SEQ ID NO: 158879 - DNA, 120 bp, Artificial Sequence
  ENSG00000106771_60 (sequence is synthesized)
tggtgatatattgatattacattttaataatgcttttgtatggcactttatagttttcagacaccttttgtaacagccctgtgagacagacaatattatccttattgtacagatgggggg

SEQ ID NO: 158880 - DNA, 120 bp, Artificial Sequence
  ENSG00000106771_61 (sequence is synthesized)
gctctggaggctctgaaaagtttttggtgatattcccctaagtttataccacaaaatgatggagccagaatttagttgcagaacttctgactccaagtccagagttctttactagacatc

SEQ ID NO: 158881 - DNA, 120 bp, Artificial Sequence
  ENSG00000106771_62 (sequence is synthesized)
tggtttcttactagctttttgctagctttttattttacagtgaaaagtatggaagcaaatcctgataattttggcttattatcaaatatcatttattttttattgcagagacccagcaga

SEQ ID NO: 158882 - DNA, 120 bp, Artificial Sequence
  ENSG00000106771_63 (sequence is synthesized)
tgtaactctcattgtagccatcccaaagaaaacccttctttgccctttgcagtgccacttatttaggtaactgaagtgtatttccagtacaatttgattttgaactaagatttgatatag

SEQ ID NO: 158883 - DNA, 120 bp, Artificial Sequence
  ENSG00000106771_64 (sequence is synthesized)
agttgtaattgcttacataactctttgaaaatgtatcatccctgggttctcaggtgaaggaggcaattcaaaagtaaaaaagaatattcgaatacaataaataccctctgttctcacaca

SEQ ID NO: 158884 - DNA, 120 bp, Artificial Sequence
  ENSG00000106771_65 (sequence is synthesized)
aatgctgtttcttagctaacttgctttgacaacctactgatgtaacttctttattaatgtgaaatatttatattttgaaataaaattactagtgttgaatgaatcatgtggtaaacttaa

SEQ ID NO: 158885 - DNA, 120 bp, Artificial Sequence
  ENSG00000106771_66 (sequence is synthesized)
gaggatttttttctcctgggggtatacaaaagaactggtagtaggaattttcagtgaaatagccttttgtgttcccacaaatgaaattttcattgaaaatagtattgtttacaaggcatg

SEQ ID NO: 158886 - DNA, 120 bp, Artificial Sequence
  ENSG00000106771_67 (sequence is synthesized)
tttggtatttttgataccactttattctgggttcttgttgcagagtcatatggctcctttaagacgttctctagtgaaagccattggtccggatgacaaagcaggttttacaattgggga

SEQ ID NO: 158887 - DNA, 120 bp, Artificial Sequence
  ENSG00000106771_68 (sequence is synthesized)
gccactctgcccctggatccatgtcccagaacactactaaatgactaaatcactagattacagggcttcactttgctcctaacagtatacctcttgggatgctttagaaaagcttggtgt

SEQ ID NO: 158888 - DNA, 120 bp, Artificial Sequence
  ENSG00000106771_69 (sequence is synthesized)
ttctttttgcatgtacaaggtcacgtttgccgctaacgtcttctttttcaactacagcttttcttctgtagtgaccatatgaaggtgctttccctgcacccctctgcaccaccccataga

SEQ ID NO: 158889 - DNA, 120 bp, Artificial Sequence
  ENSG00000106771_70 (sequence is synthesized)
gtccaggtttttatgattttgtgctgccttgagattacttacgggttgccacctttgtgctctctgaacagttccttatttcccctccttatagtgctgcactgccttactaatcttcca

SEQ ID NO: 158890 - DNA, 120 bp, Artificial Sequence
  ENSG00000106771_71 (sequence is synthesized)
actgaaaaacacagagcacctgacattgcagattttcatgtattgaattcctatattagtcaccaaatatatgtgtctgtttttatctctcttgtattttcctctctgattttactttgg

SEQ ID NO: 158891 - DNA, 120 bp, Artificial Sequence
  ENSG00000106771_72 (sequence is synthesized)
agttaggaatattttttttcccacaaattctctcccaatgacctactttctttgatagcatttgtaagagatgttactttgtaggcttagttacatagtttaagaaacataggaagattt

SEQ ID NO: 158892 - DNA, 120 bp, Artificial Sequence
  ENSG00000106771_73 (sequence is synthesized)
tgttaaggcaaagaaagatggtgaaatacaagttacactatcccttattggctctttccaaaaggggaggactggccacagcctgggtttcttagagtttaaactgtattcttggaaaca

SEQ ID NO: 158893 - DNA, 120 bp, Artificial Sequence
  ENSG00000106771_74 (sequence is synthesized)
tgttattcacgcttaattttctttccatttgttttggtggtgaaatatctgcttcagagtgaaaagttgatgaattatttcagagaatagggtattttaaggtgtttcagttattttttc

SEQ ID NO: 158894 - DNA, 120 bp, Artificial Sequence
  ENSG00000106771_75 (sequence is synthesized)
taaacatatttccaaataaaacatatttcatattacataaagaataacttagtaaatgtatttaaagtaaggtgtttatgtttctttgaaataaaatgaaaatagcattctcaggccagc

SEQ ID NO: 158895 - DNA, 120 bp, Artificial Sequence
  ENSG00000106771_76 (sequence is synthesized)
aatagcattctcaggccagcagaaaaactgaagctattacatgatttggaatcaagtggtcacgtgatttttctgaatcacgatatgacactgtttatttactctttctttttatctttg

SEQ ID NO: 158896 - DNA, 120 bp, Artificial Sequence
  ENSG00000106772_0 (sequence is synthesized)
ctccgccgcagccgcctcagagcggcaggagggagcagtcggtcgctgcgccccggcgggccactttcccgggaccccgctcgtcttccttgggccgagattttccactgcgcccctccg

SEQ ID NO: 158897 - DNA, 120 bp, Artificial Sequence
  ENSG00000106772_1 (sequence is synthesized)
agtacccgggttccaaacccctagccacgacatggaagaatttttgcaacgcgccaaatctaaactgaatcgaagcaaacgcttggagaaggtccatgtggttattgggcctaaatcgtg

SEQ ID NO: 158898 - DNA, 120 bp, Artificial Sequence
  ENSG00000106772_2 (sequence is synthesized)
tgacttggattctctcatttctaccttcacatatgcttactttctagacaaggtcagtccaccaggggttctgtgtttaccagtgctgaacataccaagaactgaattcaactacttcac

SEQ ID NO: 158899 - DNA, 120 bp, Artificial Sequence
  ENSG00000106772_3 (sequence is synthesized)
cgagacgaggtttattttagaagagctaaatatttccgaatcattccacatattccgggatgaaattaacctgcatcagctaaatgatgaagggaagttatcgataacacttgttggcag

SEQ ID NO: 158900 - DNA, 120 bp, Artificial Sequence
  ENSG00000106772_4 (sequence is synthesized)
cagtgtgctggcgagtgaagacaaaactttagaatcagcagttgtcaaagtcattaatccggttgagcagagcgatgccaacgttgagttccgagagtcttcctcttctctcgtgctaaa

SEQ ID NO: 158901 - DNA, 120 bp, Artificial Sequence
  ENSG00000106772_5 (sequence is synthesized)
ggagattctccaagaggctcctgagctcatcaccgagcaactggctcatcgcctcagaggtagcattcttttcaagtggatgaccatggaatcagagaagatctcagagaagcaggagga

SEQ ID NO: 158902 - DNA, 120 bp, Artificial Sequence
  ENSG00000106772_6 (sequence is synthesized)
aattctttctatcctggaagaaaaatttcctaacttgcctccaagagaggacatcatcaacgtcctacaggagacccagttcagtgctcagggtttaagtattgaacagacaatgttgaa

SEQ ID NO: 158903 - DNA, 120 bp, Artificial Sequence
  ENSG00000106772_7 (sequence is synthesized)
agatctaaaggagctgtcagatggagaaataaaagtggccattagtactgtgagcatgaaccttgagaattgtctatttcacagcaatattaccagtgacttgaaagcatttacagacaa

SEQ ID NO: 158904 - DNA, 120 bp, Artificial Sequence
  ENSG00000106772_8 (sequence is synthesized)
gtttggttttgatgtcctcatcctgttctccagctatctgtcagaggagcagcagccgagacgacagattgctgtgtactcagaaaacatggagctgtgcagtcagatttgctgtgagct

SEQ ID NO: 158905 - DNA, 120 bp, Artificial Sequence
  ENSG00000106772_9 (sequence is synthesized)
ggaagagtgtcagaacccttgcctagaactggagccctttgactgtggctgtgatgagatcctggtgtaccaacaagaggacccttcagtgacttgtgatcaggtggttctcgttgtcaa

SEQ ID NO: 158906 - DNA, 120 bp, Artificial Sequence
  ENSG00000106772_10 (sequence is synthesized)
ggaagtcatcaacaggaggtgtccagagatggtctccaatagccggacatcctcaacagaagccgtggcaggcagtgcccccctctcccaggggtcttctgggattatggaattgtatgg

SEQ ID NO: 158907 - DNA, 120 bp, Artificial Sequence
  ENSG00000106772_11 (sequence is synthesized)
ttctgacatagagccacaacccagctctgtgaatttcatagagaaccctccagatctcaatgattctaaccaggctcaggtggatgccaatgtagaccttgttagcccagacagcggact

SEQ ID NO: 158908 - DNA, 120 bp, Artificial Sequence
  ENSG00000106772_12 (sequence is synthesized)
ggctaccattaggagcagccgctcatccaaggagagctctgttttcctcagtgacgacagccccgtgggagaaggtgctgggcctcaccacacccttctcccagggcttgactcctacag

SEQ ID NO: 158909 - DNA, 120 bp, Artificial Sequence
  ENSG00000106772_13 (sequence is synthesized)
ccccatccctgaaggggcggtggcggaggaacatgcatggtctggagaacacggtgagcacttcgacctcttcaattttgacccagcacccatggcttctgggcagtcccagcaatcttc

SEQ ID NO: 158910 - DNA, 120 bp, Artificial Sequence
  ENSG00000106772_14 (sequence is synthesized)
tcattctgcagactactccccagcagatgacttcttccccaacagtgacctgtcagaaggacagctccccgctgggcctgaaggacttgatggcatgggaaccaacatgtctaattattc

SEQ ID NO: 158911 - DNA, 120 bp, Artificial Sequence
  ENSG00000106772_15 (sequence is synthesized)
atccagttcacttttgtcaggggctggcaaagatagccttgtggaacatgatgaggagtttgtccagagacaagacagtcccagagataactctgaaagaaatttgagcctgacagattt

SEQ ID NO: 158912 - DNA, 120 bp, Artificial Sequence
  ENSG00000106772_16 (sequence is synthesized)
tgtgggagatgaatccccttccccagaaaggctaaaaaatactggaaagaggatcccaccaacacccatgaatagtttagtagaaagctcgccatccactgaagaaccagcctcactcta

SEQ ID NO: 158913 - DNA, 120 bp, Artificial Sequence
  ENSG00000106772_17 (sequence is synthesized)
tacagaagatatgacccaaaaagcaactgacacaggtcacatggggccacctcagacccatgcacggtgcagcagctggtggggtggtttggaaattgactccaaaaatattgcagatgc

SEQ ID NO: 158914 - DNA, 120 bp, Artificial Sequence
  ENSG00000106772_18 (sequence is synthesized)
gtggagttccagtgaacaggaatctgttttccagagccctgaatcatggaaagagcataagccaagctccattgataggagagcctcagattctgtatttcaaccaaagagcctcgaatt

SEQ ID NO: 158915 - DNA, 120 bp, Artificial Sequence
  ENSG00000106772_19 (sequence is synthesized)
tacaaagtcaggtccctgggagtctgaatttggtcagcctgaactgggtagcaatgatattcaagacaaaaatgaggaaagcttgccgttccagaacctgcccatggagaagtcaccttt

SEQ ID NO: 158916 - DNA, 120 bp, Artificial Sequence
  ENSG00000106772_20 (sequence is synthesized)
gccaaatacatctccccaaggaacaaaccacctgatagaagactttgcttctttgtggcattctggtcgctctcccacagccatgcccgagccctggggaaatcctacagatgatggtga

SEQ ID NO: 158917 - DNA, 120 bp, Artificial Sequence
  ENSG00000106772_21 (sequence is synthesized)
accagcagctgtggcgccattcccagcctggagtgcatttggtaaagaagatcatgatgaagctttaaaaaatacctggaatttgcacccaacaagcagcaagacaccttctgttaggga

SEQ ID NO: 158918 - DNA, 120 bp, Artificial Sequence
  ENSG00000106772_22 (sequence is synthesized)
cccgaatgagtgggccatggcaaaaagtgggtttgccttttcttcttcagaactactggacaattcacccagtgagataaacaatgaagcagctccagaaatctggggcaagaaaaacaa

SEQ ID NO: 158919 - DNA, 120 bp, Artificial Sequence
  ENSG00000106772_23 (sequence is synthesized)
tgactccagggatcacatctttgcacctggaaatcccagttctgatctggatcacacatggactaattctaagccaccaaaagaagatcagaatggtttagtggatcctaaaactagggg

SEQ ID NO: 158920 - DNA, 120 bp, Artificial Sequence
  ENSG00000106772_24 (sequence is synthesized)
caaggtatatgaaaaggtagattcctggaacctttttgaggagaatatgaagaaaggagggtcagatgtcctagttccttgggaagattccttcttatcttacaaatgttctgattacag

SEQ ID NO: 158921 - DNA, 120 bp, Artificial Sequence
  ENSG00000106772_25 (sequence is synthesized)
tgcatccaacctaggagaagattcggtgccttcccccttagataccaattattccacctcagactcttacacatcaccaacatttgctggagacgaaaaggaaactgaacacaagccatt

SEQ ID NO: 158922 - DNA, 120 bp, Artificial Sequence
  ENSG00000106772_26 (sequence is synthesized)
tgctaaagaggaaggttttgagtcaaaagatggtaactccacggcagaggagactgacattcctcctcagtcactgcaacagtcatctcgaaatcgaatcagttcaggtcctgggaacct

SEQ ID NO: 158923 - DNA, 120 bp, Artificial Sequence
  ENSG00000106772_27 (sequence is synthesized)
agacatgtgggcttcacctcatacagataacagttctgaaataaataccactcacaacctggatgaaaatgaactcaagacagagcacacagatggtaagaatatctccatggaggatga

SEQ ID NO: 158924 - DNA, 120 bp, Artificial Sequence
  ENSG00000106772_28 (sequence is synthesized)
cgtcggggaaagcagccagtccagttacgacgaccccagcatgatgcaactgtacaatgaaacaaaccgacaactcacacttttgcacagcagcaccaactcccggcagacggcccctga

SEQ ID NO: 158925 - DNA, 120 bp, Artificial Sequence
  ENSG00000106772_29 (sequence is synthesized)
cagtctcgacttgtggaacagagtgattttggaggatactcagtccactgcaacgatctcagatatggacaatgatttggactgggatgactgcagtgggggtgcggcaatccccagtga

SEQ ID NO: 158926 - DNA, 120 bp, Artificial Sequence
  ENSG00000106772_30 (sequence is synthesized)
tggtcaaacagaaggatacatggctgaaggttccgagccggaaacccgatttacagtgagacagctggaaccctggggcttggagtatcaggaagcaaatcaggtagattgggagctccc

SEQ ID NO: 158927 - DNA, 120 bp, Artificial Sequence
  ENSG00000106772_31 (sequence is synthesized)
tgcctctgatgagcataccaaggacagtgctcccagtgaacatcacacattgaatgagaaaagtgggcagctaattgcaaacagtatttgggattctgtcatgagagataaagacatgtc

SEQ ID NO: 158928 - DNA, 120 bp, Artificial Sequence
  ENSG00000106772_32 (sequence is synthesized)
atcattcatgttaccaggctcctcacatatcacagattcagagcaaagggaattgcctcctgaaatccccagccattcagcaaatgttaaagacactcattccccagatgcgccagcagc

SEQ ID NO: 158929 - DNA, 120 bp, Artificial Sequence
  ENSG00000106772_33 (sequence is synthesized)
ctctggaaccagtgaatcagaggcacttatatctcatcttgacaagcaggacacagagagggaaaccctgcaaagtgatgcagcatccttggcgactaggcttgagaatccagggtattt

SEQ ID NO: 158930 - DNA, 120 bp, Artificial Sequence
  ENSG00000106772_34 (sequence is synthesized)
tccacacccagatccatggaaaggtcatggcgatggacaaagtgaaagtgagaaggaagcccagggagccactgacagggggcaccttgatgaagaggaggtgatcgcctctggtgtgga

SEQ ID NO: 158931 - DNA, 120 bp, Artificial Sequence
  ENSG00000106772_35 (sequence is synthesized)
gaatgcctcagggatttctgaaaaagggcagagtgaccaggaactgtcttctctggttgcatctgaacatcaggaaatctgcattaaatcaggcaaaatcagctctcttgctgtcacttt

SEQ ID NO: 158932 - DNA, 120 bp, Artificial Sequence
  ENSG00000106772_36 (sequence is synthesized)
cagtcctcaaaccgaggaaccagaggaagttttagagtatgaggaggggtcttacaatctagactcccgtgatgtgcaaacagggatgtccgcagataacctgcagccaaaagataccca

SEQ ID NO: 158933 - DNA, 120 bp, Artificial Sequence
  ENSG00000106772_37 (sequence is synthesized)
tgaaaaacacctcatgagtcaaagaaattcaggtgaaactactgagacttcagatgggatgaatttcacaaaatatgtatctgtacctgaaaaggatcttgagaaaactgaagaatgtaa

SEQ ID NO: 158934 - DNA, 120 bp, Artificial Sequence
  ENSG00000106772_38 (sequence is synthesized)
ctttctagagccagagaacgtgggtggagggccacctcacagagttccccgaagtcttgattttggggacgtccctatagacagtgatgtgcatgtcagcagcacatgttctgagataac

SEQ ID NO: 158935 - DNA, 120 bp, Artificial Sequence
  ENSG00000106772_39 (sequence is synthesized)
caaaaatcttgacgttaaggggtctgaaaatagccttccaggagccggttcgtctggaaattttgacagagatactatttctagtgagtatactcattcaagtgcatcaagtcctgagtt

SEQ ID NO: 158936 - DNA, 120 bp, Artificial Sequence
  ENSG00000106772_40 (sequence is synthesized)
aaatgactcttcagttgcactgtcctcctggggccagcaacccagttctgggtatcaagaagaaaaccaaggcaactggagtgaacagaatcaccaagaatctgaactaattaccactga

SEQ ID NO: 158937 - DNA, 120 bp, Artificial Sequence
  ENSG00000106772_41 (sequence is synthesized)
tggccaagtagaaatagttaccaaagtgaaggatttagagaaaaacagaataaatgagtttgaaaagagctttgatcgcaaaactcctacatttttagagatctggaatgactcagttga

SEQ ID NO: 158938 - DNA, 120 bp, Artificial Sequence
  ENSG00000106772_42 (sequence is synthesized)
tggtgattccttttcctctttatccagtcctgaaacaggcaaatattctgaacattcagggacacatcaggaaagcaatctaattgctagctaccaggagaaaaatgaacatgacatttc

SEQ ID NO: 158939 - DNA, 120 bp, Artificial Sequence
  ENSG00000106772_43 (sequence is synthesized)
tgcaactgtgcagccagaggatgccagggtcatttcaacaagctcaggttctgatgatgacagtgtcggtggtgaagagtcaatagaggaagagatccaggtggccaactgccacgttgc

SEQ ID NO: 158940 - DNA, 120 bp, Artificial Sequence
  ENSG00000106772_44 (sequence is synthesized)
tgaggatgaatccagagcttgggattcattgaatgaatctaataagttcttggtcacagctgatcctaagtctgaaaatatttatgactacctagacagctcagagccagcagagaatga

SEQ ID NO: 158941 - DNA, 120 bp, Artificial Sequence
  ENSG00000106772_45 (sequence is synthesized)
gaataagtcaaacccattctgtgacaatcaacaaagcagccctgatccctggactttctcaccattaacggagactgaaatgcagattacagcagtggagaaggagaagagatcttctcc

SEQ ID NO: 158942 - DNA, 120 bp, Artificial Sequence
  ENSG00000106772_46 (sequence is synthesized)
agaaacagggacaacaggagatgttgcatggcaaatatctcccaaagcttcgttcccaaagaacgaagataattctcaactggaaatgctgggcttctcagctgatagcactgagtggtg

SEQ ID NO: 158943 - DNA, 120 bp, Artificial Sequence
  ENSG00000106772_47 (sequence is synthesized)
gaaggcctcaccccaggaagggagactaattgaaagtccatttgaaagggagctgtctgactccagtggtgtgttggagataaattcttcagtacaccaaaatgccagtccctggggagt

SEQ ID NO: 158944 - DNA, 120 bp, Artificial Sequence
  ENSG00000106772_48 (sequence is synthesized)
accagttcagggtgatattgagcccgtggaaacacactatactaatccttttagtgacaaccatcagtcaccctttctggaaggtaatgggaagaactcccatgagcaactctggaacat

SEQ ID NO: 158945 - DNA, 120 bp, Artificial Sequence
  ENSG00000106772_49 (sequence is synthesized)
tcaaccaaggcagccagacccagatgctgacaagttcagccagcttgtaaaattagaccaaattaaagaaaaggactcaagagagcaaacctttgtgtctgctgctggtgatgagctgac

SEQ ID NO: 158946 - DNA, 120 bp, Artificial Sequence
  ENSG00000106772_50 (sequence is synthesized)
tcctgaaacacctacccaagagcagtgtcaggacaccatgctgccagtctgtgatcatccggacacagcctttactcacgcagaggaaaatagttgtgttacatctaatgtttcaactaa

SEQ ID NO: 158947 - DNA, 120 bp, Artificial Sequence
  ENSG00000106772_51 (sequence is synthesized)
tgaaggtcaagaaacaaatcagtgggaacaagaaaaatcatacctaggtgagatgacaaattcaagcattgccacagaaaattttcctgctgtcagttctcccacccaactgataatgaa

SEQ ID NO: 158948 - DNA, 120 bp, Artificial Sequence
  ENSG00000106772_52 (sequence is synthesized)
atgggatggctctaccccaagtgaggactcccgaggtacctttgtgccagatattttacatggcaactttcaagagggtgggcagctggcctctgccgcgcctgacttgtggatagatgc

SEQ ID NO: 158949 - DNA, 120 bp, Artificial Sequence
  ENSG00000106772_53 (sequence is synthesized)
taagaagcccttcagtttgaaagcagatggtgagaatcctgatatcctgacgcactgcgaacatgacagcaattctcaggcttccgacagccctgatatatgtcacgattctgaagcaaa

SEQ ID NO: 158950 - DNA, 120 bp, Artificial Sequence
  ENSG00000106772_54 (sequence is synthesized)
gcaagagactgagaagcacctcagtgcttgcatgggacctgaagtggaatccagtgagctttgtctcactgagccagagatagatgaagaacccatttatgagcctggacgggagtttgt

SEQ ID NO: 158951 - DNA, 120 bp, Artificial Sequence
  ENSG00000106772_55 (sequence is synthesized)
cccatccaatgcagaactcgattctgaaaacgcaactgtgctgcctccaattggctatcaagcagacataaagggctcctctcagcccgcctctcataaaggttcacctgaaccttctga

SEQ ID NO: 158952 - DNA, 120 bp, Artificial Sequence
  ENSG00000106772_56 (sequence is synthesized)
aataaacggtgacaacagtacaggtttacaagtatcagaaaaaggagccagcccagatatggcaccaattttggaaccagttgacagaagaatcccaaggattgaaaatgtggcaactag

SEQ ID NO: 158953 - DNA, 120 bp, Artificial Sequence
  ENSG00000106772_57 (sequence is synthesized)
catttttgtaactcaccaagagccaactccagaaggtgacggttcttggatatcagacagcttttctcctgaaagtcagcctggtgcaagagctttgtttgatggtgatccacatttatc

SEQ ID NO: 158954 - DNA, 120 bp, Artificial Sequence
  ENSG00000106772_58 (sequence is synthesized)
cacagagaatcctgccttggttcctgatgctttgctagcctcagacacttgtctggatataagcgaagctgcctttgaccacagtttcagcgatgcctcaggtctcaacacatccacggg

SEQ ID NO: 158955 - DNA, 120 bp, Artificial Sequence
  ENSG00000106772_59 (sequence is synthesized)
aacaatagatgacatgagtaaactgacattatccgaaggccatccggaaacgccagttgatggggacctagggaagcaagatatctgctcatctgaagcctcgtggggtgattttgaata

SEQ ID NO: 158956 - DNA, 120 bp, Artificial Sequence
  ENSG00000106772_60 (sequence is synthesized)
tgatgtaatgggccagaatatcgatgaagatttactgagagagcctgaacacttcctgtatggtggtgaccctcctttggaggaagattctctgaagcagtcgctggcaccgtacacacc

SEQ ID NO: 158957 - DNA, 120 bp, Artificial Sequence
  ENSG00000106772_61 (sequence is synthesized)
tccctttgatttgtcttatctcacagaacctgcccagagtgctgaaacaatagaggaagctgggtctccagaggatgaatctctgggatgcagagcagcagagatagtgctttctgcact

SEQ ID NO: 158958 - DNA, 120 bp, Artificial Sequence
  ENSG00000106772_62 (sequence is synthesized)
tcctgatcgaagaagtgagggaaaccaggctgagaccaaaaacagactgcctggatcccagctggctgtgctgcatattcgtgaagaccctgagtccgtttatttgccggtaggagcagg

SEQ ID NO: 158959 - DNA, 120 bp, Artificial Sequence
  ENSG00000106772_63 (sequence is synthesized)
ctccaacattttgtctccatcaaacgttgactgggaagtagaaacagataattctgatttaccagcaggtggagacataggaccaccaaatggtgccagcaaggaaatatcagaattgga

SEQ ID NO: 158960 - DNA, 120 bp, Artificial Sequence
  ENSG00000106772_64 (sequence is synthesized)
agaagaaaaaacaattcctaccaaagagcctgagcagataaaatcagaatacaaggaagaaagatgtacagagaagaatgaagatcgtcatgcactacacatggattacatacttgtaaa

SEQ ID NO: 158961 - DNA, 120 bp, Artificial Sequence
  ENSG00000106772_65 (sequence is synthesized)
ccgtgaagaaaattcacactcaaagccagagacctgtgaagaaagagaaagcatagctgaattagaattgtatgtaggttccaaagaaacagggctgcagggaactcagttagcaagctt

SEQ ID NO: 158962 - DNA, 120 bp, Artificial Sequence
  ENSG00000106772_66 (sequence is synthesized)
cccagacacatgtcagccagcctccttaaatgaaagaaaaggtctctctgcagagaaaatgtcttctaaaagcgatacgagatcatcttttgaaagccctgcacaagaccagagttggat

SEQ ID NO: 158963 - DNA, 120 bp, Artificial Sequence
  ENSG00000106772_67 (sequence is synthesized)
gttcttgggccatagtgaggttggtgatccatcactggatgccagggactcagggcctgggtggtctggcaagactgtggagccgttctctgaactcggcttgggtgagggtccccagct

SEQ ID NO: 158964 - DNA, 120 bp, Artificial Sequence
  ENSG00000106772_68 (sequence is synthesized)
gcagattctggaagaaatgaagcctctagaatctttggcactagaggaagcctctggtccagtcagccaatcacagaagagtaagagccgaggcagggctggcccggatgcagttacgtt

SEQ ID NO: 158965 - DNA, 120 bp, Artificial Sequence
  ENSG00000106772_69 (sequence is synthesized)
gcaggctgtcacccatgacaatgaatgggaaatgctttcaccacagcctgttcagaaaaacatgatccctgacacggaaatggaggaggagacagagttccttgagctcggaaccaggat

SEQ ID NO: 158966 - DNA, 120 bp, Artificial Sequence
  ENSG00000106772_70 (sequence is synthesized)
atcaagaccaaatggactactgtcagaggatgtaggaatggacatcccctttgaagagggcgtgctgagtcccagtgctgcagacatgaggcctgaacctcctaattctctggatcttaa

SEQ ID NO: 158967 - DNA, 120 bp, Artificial Sequence
  ENSG00000106772_71 (sequence is synthesized)
tgacactcatcctcggagaatcaagctcacagccccaaatatcaatctttctctggaccaaagtgaaggatctattctctctgatgataacttggacagtccagatgaaattgacatcaa

SEQ ID NO: 158968 - DNA, 120 bp, Artificial Sequence
  ENSG00000106772_72 (sequence is synthesized)
tgtggatgaacttgatacccccgatgaagcagattcttttgagtacactggccatgatcccacagccaacaaagattctggccaagagtcagagtctattccagaatatacggccgaaga

SEQ ID NO: 158969 - DNA, 120 bp, Artificial Sequence
  ENSG00000106772_73 (sequence is synthesized)
ggaacgggaggacaaccggctttggaggacagtggtcattggagaacaagagcagcgcattgacatgaaggtcatcgagccctacaggagagtcatttctcacggaggatactatgggga

SEQ ID NO: 158970 - DNA, 120 bp, Artificial Sequence
  ENSG00000106772_74 (sequence is synthesized)
cggtctaaatgccatcattgtgtttgccgcctgttttctgccagacagcagtcgggcggattaccactatgtcatggaaaatcttttcctatatgtaataagtactttagagttgatggt

SEQ ID NO: 158971 - DNA, 120 bp, Artificial Sequence
  ENSG00000106772_75 (sequence is synthesized)
agctgaagactatatgattgtgtacttgaatggtgcaaccccaagaaggaggatgccagggctaggctggatgaagaaatgctaccagatgattgacagacggttgaggaagaatttgaa

SEQ ID NO: 158972 - DNA, 120 bp, Artificial Sequence
  ENSG00000106772_76 (sequence is synthesized)
atcattcatcattgttcatccatcttggttcatcagaacaatccttgctgtgacacgaccttttataagttcaaaattcagcagtaaaattaaatatgtcaatagcttatcagaactcag

SEQ ID NO: 158973 - DNA, 120 bp, Artificial Sequence
  ENSG00000106772_77 (sequence is synthesized)
tgggctgatcccaatggattgcatccacattccagagagcatcatcaaactggatgaagaactgagggaagcatcagaggcagctaaaactagctgcctttacaatgatccagaaatgtc

SEQ ID NO: 158974 - DNA, 120 bp, Artificial Sequence
  ENSG00000106772_78 (sequence is synthesized)
ttctatggagaaggatattgacttgaagctgaaagaaaagccttagttggccatgctggaagaagaggatgcttttctggttcatggttctgttgaaacatatctacctgaaagagacag

SEQ ID NO: 158975 - DNA, 120 bp, Artificial Sequence
  ENSG00000106772_79 (sequence is synthesized)
ggctgatgttacctttttccactttgcactacctggtgccattctaaatttctaaggggaaaaatagaaagtttgtttactcttaagatattttatgaaattgtgtgtactttcctattt

SEQ ID NO: 158976 - DNA, 120 bp, Artificial Sequence
  ENSG00000106772_80 (sequence is synthesized)
tgccaattatgtgcctcaaagattttagttgagccttagcaagaaagtaggaccttccatttcaatacttcattaacacggtgtagtgatactttgtcccttagactggtgtttaccagt

SEQ ID NO: 158977 - DNA, 120 bp, Artificial Sequence
  ENSG00000106772_81 (sequence is synthesized)
aagatacctttaatccactgttaagtatgagtggatttgtttccatagattagctggatttccttttggtgattgcattaggtttaaagtacacaggtctcaactctccccaggaaagtt

SEQ ID NO: 158978 - DNA, 120 bp, Artificial Sequence
  ENSG00000106772_82 (sequence is synthesized)
tcccctgtttgactccacctttaaaatcctaagcctgactaggacagccacaaaccacacaaggtgtaaaaccatcatcagctaagtgcccgttttgttcttgtttaccagaatctcctt

SEQ ID NO: 158979 - DNA, 120 bp, Artificial Sequence
  ENSG00000106772_83 (sequence is synthesized)
taacttctcaaagggaagccgggctttctaatccacgtcaactttattttagttgtcaaattgggcattatattttatgtaaattggtcttttaacatcattttcctgatgaatgttggt

SEQ ID NO: 158980 - DNA, 120 bp, Artificial Sequence
  ENSG00000106772_84 (sequence is synthesized)
gaccaccacattgtgaaatttaagaatccgtgttgcatgtttggtagctctctgagtttcaggccataaactcagctccagaggttaccttttaagtgccaagaactcaagtgcaaggtg

SEQ ID NO: 158981 - DNA, 120 bp, Artificial Sequence
  ENSG00000106772_85 (sequence is synthesized)
gcctactcaaaaatcatttggtagcattcagttattcatgaattcctctctcgcatgcattataaaaagtgatctgctttaaaacaccgtaatctgatcataggcttaaaattaaatatg

SEQ ID NO: 158982 - DNA, 120 bp, Artificial Sequence
  ENSG00000106772_86 (sequence is synthesized)
agtattactttcatgtacaaaatatttcctttatagtcttcatatgccctttaaaatgccaacaagatttcaagtctgtaggcctctagtgaggtggggtggcaaaccacagctaagtct

SEQ ID NO: 158983 - DNA, 120 bp, Artificial Sequence
  ENSG00000106772_87 (sequence is synthesized)
cgctcaccactgcaagctaagaatggtttttacattttgggttggaaaaattttttttgaatatttcatgacacatgaaaattattcaaatgttagtgccgataaataaagtggtactga

SEQ ID NO: 158984 - DNA, 120 bp, Artificial Sequence
  ENSG00000106772_88 (sequence is synthesized)
aacacagccacacaaacttgtttttgtactgtctacagctactttcacactacagccgcagagctgagcagttcagcagaccgtatgtcccacaatgcctaaaacattgactatgtttac

SEQ ID NO: 158985 - DNA, 120 bp, Artificial Sequence
  ENSG00000106772_89 (sequence is synthesized)
agaaaaagtttgctgacccctgctctagcaaacgcatcctttcctactccaccccaatttgtatttagatagtttctctaacagaacggacaaatgaggctgcaaactaatttatttttg

SEQ ID NO: 158986 - DNA, 120 bp, Artificial Sequence
  ENSG00000106772_90 (sequence is synthesized)
tcaaaaatcaatgttttgacatccacagacagtgaaataaaagaaatggcttgctgaaaaacatgaggagtcctagccacaaaatcactgcttaggttgcaattgccaaaatgaagcctt

SEQ ID NO: 158987 - DNA, 120 bp, Artificial Sequence
  ENSG00000106772_91 (sequence is synthesized)
cttagaagcacttctttagtatatacaggtgttggctgaagtccgtgcctcactctgggaaccattcttagtctccagtgtctcctattacaaagaagctggcagaaataaaaatgaagg

SEQ ID NO: 158988 - DNA, 120 bp, Artificial Sequence
  ENSG00000106772_92 (sequence is synthesized)
ggtgagagcggttccaccctagtctcatggtggaaaattcattggggagagctgtccaggatatttggagtcctgggtagaaggagcttgtaactactttaaagtcgacatctttgcaca

SEQ ID NO: 158989 - DNA, 120 bp, Artificial Sequence
  ENSG00000106772_93 (sequence is synthesized)
ggtgattgagtttctctgacctcattgcttcacctctgtctcctcccgtccttccgcacgtgcccacacacacgcagttcagccctctttcctccataagcctccatcgttttctctttt

SEQ ID NO: 158990 - DNA, 120 bp, Artificial Sequence
  ENSG00000106772_94 (sequence is synthesized)
ctcctcttgatcctttcaagcgagtatcttgttgaattgtatgttctgttggatctcctccttcataacatctggcttgttggacagaaaaaccctacagcccaccccctcccacagccc

SEQ ID NO: 158991 - DNA, 120 bp, Artificial Sequence
  ENSG00000106772_95 (sequence is synthesized)
acctccacttttgaaagcccaaattacacctctcccagaacacagtgttgacgtaaatacagttacccaatattcctgtttgttcacctatttgctactttcactcagtagcatcccatt

SEQ ID NO: 158992 - DNA, 120 bp, Artificial Sequence
  ENSG00000106772_96 (sequence is synthesized)
ttgtaaaatgaattccatggtcaccctgtcacaggaagtaatgaaaaatccagtgttcagtgtagtggtgcaaacctgagggcatagagctgttcatagagggctcttgttatagccaaa

SEQ ID NO: 158993 - DNA, 120 bp, Artificial Sequence
  ENSG00000106772_97 (sequence is synthesized)
cagacacagcaacaatctcaccatttatatatatatttttaacttgtccagctcatctatggaaaactactcaggtggtatgctgtttgaagcctcatcttcctacatgaaaattatggg

SEQ ID NO: 158994 - DNA, 120 bp, Artificial Sequence
  ENSG00000106772_98 (sequence is synthesized)
catttgtcccaatgattttgtttcagctgttctgtaggctgcataaccactctgatatttaggtatctgctattttattatcttaaaagacaaattaatttaattgcatgtgctagggaa

SEQ ID NO: 158995 - DNA, 120 bp, Artificial Sequence
  ENSG00000106772_99 (sequence is synthesized)
aagctaccatgtacattcaccccaagtaaatagaatcctagatgaatcctagaaaaataatccctaagcagataggtagacagaggtaaacattcacatgatttagctctctagctcttg

SEQ ID NO: 158996 - DNA, 120 bp, Artificial Sequence
  ENSG00000106772_100 (sequence is synthesized)
cactctgaacattcttgctttggttctgacttctgggaactgctttgcatttctcctatagatctgtagttaagggaaccaaggggtcattggggcaaaagcattgtttctcaaagctcc

SEQ ID NO: 158997 - DNA, 120 bp, Artificial Sequence
  ENSG00000106772_101 (sequence is synthesized)
ttgattaagagaaagaacagaaatttgcacagaagatagtgtcaaggagtgagaaagtttgtttgagggcagtagctcagtgtggaagaaaatcctgaagtttctgttgaagccatacaa

SEQ ID NO: 158998 - DNA, 120 bp, Artificial Sequence
  ENSG00000106772_102 (sequence is synthesized)
tgttctatggggttactctctaagacattctctgaggtgtgtgaggaagtcactactcctagcctttgttaagatgtaattttaaatattcagttatggtactatgtttgcaactctcgt

SEQ ID NO: 158999 - DNA, 120 bp, Artificial Sequence
  ENSG00000106772_103 (sequence is synthesized)
cttatcacaatgcctcagtagtttgttcccttagaaacatttagatgtgcacaaattaatcttttatatatctaaaggtttttctatcatgcattggattgctcagaataaagtgtctgt

SEQ ID NO: 159000 - DNA, 120 bp, Artificial Sequence
  ENSG00000106772_104 (sequence is synthesized)
tagacttcgttttggtaaataaattctccataatgtagattaataatataaaagtctttaatgacacaatatatctatatagcctcactgtataattcagaaataaaaattgattctgca

SEQ ID NO: 159001 - DNA, 120 bp, Artificial Sequence
  ENSG00000106772_105 (sequence is synthesized)
atcatgtgaccagaaaatggaggcgaatctgtatttccagttaactgctcagaagagagatgctgaagagctgtagtcgtgcatccttctcaccctccgttagaaagcctcctctcatcc

SEQ ID NO: 159002 - DNA, 120 bp, Artificial Sequence
  ENSG00000106772_106 (sequence is synthesized)
cattgattgatttcccacaattgcagtctgagcaactggaatgtaactctctccattggataagtccatgatagtcctttgcttctttgtgatacatttgacttggaatatagtggcagg

SEQ ID NO: 159003 - DNA, 120 bp, Artificial Sequence
  ENSG00000106772_107 (sequence is synthesized)
ttattatttgggtgaaaacactatgctaagtcaatgaaaaatgccaaacctggattctcaagatgaatgctctttcattcatctcagtaaaacaaagcctaaaacaaacactcagatgtg

SEQ ID NO: 159004 - DNA, 120 bp, Artificial Sequence
  ENSG00000106772_108 (sequence is synthesized)
ggtgtatatttaacctgtttaatagcaattatgatatgtgtgattaggttcacttccatattttctgtgtaccaccctgtattgttcatagaacttttcttaaaaaaaaaaaagaaaaaa

SEQ ID NO: 159005 - DNA, 120 bp, Artificial Sequence
  ENSG00000106772_109 (sequence is synthesized)
tcagttaataaaagaagacttcattgagtgtactttatatggtcaggatagtgctaagctctgtaaaggctgtacaaaacaaggactttgatcaggttgtttctgcaggatgaaacaaaa

SEQ ID NO: 159006 - DNA, 120 bp, Artificial Sequence
  ENSG00000106772_110 (sequence is synthesized)
agtcgagctcagcatgaatctgggaaatggggaaggggcagccattttatttaaaatcatgaagtgagtctagacttctccggaacatgacatctcaaagaccctattctagagccaata

SEQ ID NO: 159007 - DNA, 120 bp, Artificial Sequence
  ENSG00000106772_111 (sequence is synthesized)
ttcagggaactatagagctaagtatatttcctcatattcaattcaataaacatttgaaatcctactaggcaaagacaactttccaatataaaacgggcttttcatgctacatatctgata

SEQ ID NO: 159008 - DNA, 120 bp, Artificial Sequence
  ENSG00000106772_112 (sequence is synthesized)
tccattccaaatgcagacatttacactcgtgagtattaaagcaatagatcttccttatgacaacaaaaagctgactgcagaaaagcaaagcttctgggaaaagtcttcgagcgcgtcttg

SEQ ID NO: 159009 - DNA, 120 bp, Artificial Sequence
  ENSG00000106772_113 (sequence is synthesized)
gcttgttcatagggggagaagacctgactaattagctccagcccttctaatccgaaggagcagaaataattaaagtatctggggcaagctgtgccgcacagcagcaggctacagaagggg

SEQ ID NO: 159010 - DNA, 120 bp, Artificial Sequence
  ENSG00000106772_114 (sequence is synthesized)
agatggagaaataaaagtggccattagtactgtgagcatgaaccttgagatgagcaggattgagcttttccccaagggcacatggctggtgaatagagacgcctttcaatccaggaactc

SEQ ID NO: 159011 - DNA, 120 bp, Artificial Sequence
  ENSG00000106772_115 (sequence is synthesized)
tggctccaaatgcatgcctgggaccactgtgctacagtgcaccttaagaagtttacaaagaggaaagtagtggtttgtgagtttaatgtccagtatatataataactatcaactgaattc

SEQ ID NO: 159012 - DNA, 120 bp, Artificial Sequence
  ENSG00000106772_116 (sequence is synthesized)
ctaaataagtaaaagattttctaacagacctctcatttttgtgccagtggatcctttttgtgatttctagaagcttctgtttttatttcaggttataggtggccatgattgacagtttgg

SEQ ID NO: 159013 - DNA, 120 bp, Artificial Sequence
  ENSG00000106772_117 (sequence is synthesized)
agcctgacagagaaagtatgggtcacagaggccatacataaccattgctctttattaacccccactctgtgctagcatttatgctaggcactggggctgagggaagactgttacatgctg

SEQ ID NO: 159014 - DNA, 120 bp, Artificial Sequence
  ENSG00000106772_118 (sequence is synthesized)
tgttacaagaaacctggggctgggtttgcaggggaagagaatttaatcaggacgataaaatttgaagaagagaaatcagagcttgccaatttcttgtataagttcccactatctgcaatg

SEQ ID NO: 159015 - DNA, 120 bp, Artificial Sequence
  ENSG00000106772_119 (sequence is synthesized)
ttcttttccccagatccttacgtgactgactccttctctttattcagatgttaatcagatgtcacctcctcagagaagtcttccttgacctctgtaatcaaagatgcttcccacttcccg

SEQ ID NO: 159016 - DNA, 120 bp, Artificial Sequence
  ENSG00000106780_0 (sequence is synthesized)
agagggaggtggcgatggtgcgcccggtggcggtggcggcggcggttgcggaggcttccttggtcggattgcaacgaggagaagatgactgaccaaccgactggctgaatgaatgaatgg

SEQ ID NO: 159017 - DNA, 120 bp, Artificial Sequence
  ENSG00000106780_1 (sequence is synthesized)
ctgaatgaatgaatggcggagccgagcgcgccatgaggagcctgccgagcctgggcggcctcgccctgttgtgctgcgccgccgccgccgccgccgccgccgtcgcctcagccgcctcgg

SEQ ID NO: 159018 - DNA, 80 bp, Artificial Sequence
  ENSG00000106780_2 (sequence is synthesized)
cccgggttgcggggcgagcccagccaccccttccctagggcgacggctcccacggcccaggccccgaggaccgggccccc

SEQ ID NO: 159019 - DNA, 120 bp, Artificial Sequence
  ENSG00000106780_3 (sequence is synthesized)
gcgcgccaccgtccaccgacccctggctgcgacttctccagcccagtccccggagaccacccctctttgggcgactgctggaccctcttccaccacctttcaggcgccgctcggcccctc

SEQ ID NO: 159020 - DNA, 120 bp, Artificial Sequence
  ENSG00000106780_4 (sequence is synthesized)
gccgaccacccctccggcggcggaacgcacttcgaccacctctcaggcgccgaccagacccgcgccgaccaccctttcgacgaccactggcccggcgccgaccacccctgtagcgaccac

SEQ ID NO: 159021 - DNA, 120 bp, Artificial Sequence
  ENSG00000106780_5 (sequence is synthesized)
cgtaccggcgcccacgactccccggaccccgacccccgatctccccagcagcagcaacagcagcgtcctccccaccccacctgccaccgaggccccctcttcgcctcctccagagtatgt

SEQ ID NO: 159022 - DNA, 120 bp, Artificial Sequence
  ENSG00000106780_6 (sequence is synthesized)
atgtaactgctctgtggttggaagcctgaatgtgaatcgctgcaaccagaccacagggcagtgtgagtgtcggccaggttatcaggggcttcactgtgaaacctgcaaagagggctttta

SEQ ID NO: 159023 - DNA, 120 bp, Artificial Sequence
  ENSG00000106780_7 (sequence is synthesized)
cctaaattacacttctgggctctgtcagccatgtgactgtagtccacatggagctctcagcataccgtgcaacagttctgggaaatgccagtgcaaagtgggtgtcattggctctatatg

SEQ ID NO: 159024 - DNA, 120 bp, Artificial Sequence
  ENSG00000106780_8 (sequence is synthesized)
tgaccgatgccaagatggatattatggctttagtaagaatggctgcttgccctgccaatgcaataatcggtctgccagttgcgatgccctcacaggtgcttgtttaaactgccaggaaaa

SEQ ID NO: 159025 - DNA, 120 bp, Artificial Sequence
  ENSG00000106780_9 (sequence is synthesized)
tagcaaaggaaatcactgtgaagaatgtaaagaaggattttatcagagtcctgatgccactaaagaatgtcttcgctgcccttgttcagcagtgacatctacaggcagctgctctataaa

SEQ ID NO: 159026 - DNA, 120 bp, Artificial Sequence
  ENSG00000106780_10 (sequence is synthesized)
atcgagtgaattggaacctgaatgtgaccagtgtaaagatggttacataggcccgaactgcaataaatgtgaaaatggctattacaattttgacagcatctgtagaaagtgccaatgtca

SEQ ID NO: 159027 - DNA, 120 bp, Artificial Sequence
  ENSG00000106780_11 (sequence is synthesized)
cggccatgtggacccagttaaaactccaaagatttgtaagcccgagagtggtgagtgcatcaactgcctccataacaccactgggttttggtgtgagaactgcctagaaggttatgttca

SEQ ID NO: 159028 - DNA, 120 bp, Artificial Sequence
  ENSG00000106780_12 (sequence is synthesized)
cgacctcgagggaaattgcatcaagaaagaagttattcttccaacacctgaaggttctaccattttggtttccaatgcctctttgaccacatcagtgcccacccctgttataaatagtac

SEQ ID NO: 159029 - DNA, 120 bp, Artificial Sequence
  ENSG00000106780_13 (sequence is synthesized)
ttttacccctacaaccctgcagactatcttttcagtaagcacttctgaaaacagcacttcagctttagctgatgtatcatggacccaatttaacatcatcattttgacagtcatcatcat

SEQ ID NO: 159030 - DNA, 120 bp, Artificial Sequence
  ENSG00000106780_14 (sequence is synthesized)
tgttgtggtgctgctaatgggatttgtgggggctgtatatatgtaccgcgagtaccaaaaccggaaactcaatgcccccttttggaccatcgagctgaaagaagacaatatcagtttcag

SEQ ID NO: 159031 - DNA, 120 bp, Artificial Sequence
  ENSG00000106780_15 (sequence is synthesized)
cagctaccatgacagcattcccaatgcagatgtttcgggattgttggaagatgatggcaatgaagtggctcccaatgggcagctgaccctgacgacgcccatacataactacaaagccta

SEQ ID NO: 159032 - DNA, 120 bp, Artificial Sequence
  ENSG00000106780_16 (sequence is synthesized)
aggagctagaactgttctgaattgttaaaccacagtgcttgctaagacagagtcagcccctgggccagacaaagcctggctagagtttgctgagaaagcaaaggcaaatagtgcatctga

SEQ ID NO: 159033 - DNA, 120 bp, Artificial Sequence
  ENSG00000106780_17 (sequence is synthesized)
aattttcaggtacaaatttgtaatgcgcttagcctatctattgctcttagttttcccatgaagatctgaagcgttcactgtcattaggacttgaagtaaagtatatttttgtaccaaacc

SEQ ID NO: 159034 - DNA, 120 bp, Artificial Sequence
  ENSG00000106780_18 (sequence is synthesized)
acatgggagtatggaaaggctgaaccccatagtgcagcccaaaaccactttgacctccagatagactcctggggaagcattcaccaagccagtggtaacaagatgatgaatgtggagggg

SEQ ID NO: 159035 - DNA, 120 bp, Artificial Sequence
  ENSG00000106780_19 (sequence is synthesized)
gaaaagactgctggaagacttcatctccattcctgaaacattttttttaaaacagtgtcagggattatattcgttttactatacaaaaggacatcattgaggaaaagcttgtttctaggc

SEQ ID NO: 159036 - DNA, 120 bp, Artificial Sequence
  ENSG00000106780_20 (sequence is synthesized)
tgtatcacagtaaataatcttgattgtttctagaacaggggtagaaaagtcccaagatcttcagaagggcttggttttttcctcccaggattcttgctcagtgatgagttgaaagcacag

SEQ ID NO: 159037 - DNA, 120 bp, Artificial Sequence
  ENSG00000106780_21 (sequence is synthesized)
gataagcttctaagggaggaaggcagcattggggagcaggaggctgatggtcctcctcagggtctcagtgtaaatgataaattgtctaaaaataaggaatattcctgcctctagagaaat

SEQ ID NO: 159038 - DNA, 120 bp, Artificial Sequence
  ENSG00000106780_22 (sequence is synthesized)
aaggtgtacatagttaatgtagcatatctggtcgacgttgtatttgtatctatttgtaaaaaaaaaatcatgtcatattttatcatctggaatttatttgtacagcagttaatggtgttg

SEQ ID NO: 159039 - DNA, 120 bp, Artificial Sequence
  ENSG00000106780_23 (sequence is synthesized)
taaaaagaaaaatatggggattgcttaaaatactgtaaaatagatggcaatattgctagagctgggactctggtgagcatccgtcatttttagtccttcttgaggacattgctgaaattt

SEQ ID NO: 159040 - DNA, 120 bp, Artificial Sequence
  ENSG00000106780_24 (sequence is synthesized)
ataagaggtcgaatgtttctttctttcctttctcagtctaaaagtagagttatatgctctttgacttactatgattcaagcaatagattttgaagtcagtaatcgttaagctgggacata

SEQ ID NO: 159041 - DNA, 120 bp, Artificial Sequence
  ENSG00000106780_25 (sequence is synthesized)
ggatgcattctccaaaaacattaatctaattagacattagccaccctatatattttacatagattaatataaaacatatcctcattaaaaaatgtttttcttgaatgtaaaagatagtct

SEQ ID NO: 159042 - DNA, 120 bp, Artificial Sequence
  ENSG00000106780_26 (sequence is synthesized)
agttttcatgcctatgaaatatttataatcctccctcaccccaaataaaaaatctcctacatgtgaacatagcctgtcactcatttgccatgaggtatgtgccatctccctgcagtgcta

SEQ ID NO: 159043 - DNA, 120 bp, Artificial Sequence
  ENSG00000106780_27 (sequence is synthesized)
tagttctcccattgtcttcctgtctggttaatgagcagctttgtagatgggtgtgtctagttagttcttgctttttgatggagttttttcctagaggccaactactgttgctctcgttta

SEQ ID NO: 159044 - DNA, 120 bp, Artificial Sequence
  ENSG00000106780_28 (sequence is synthesized)
ttatgatattgacattttgggttaagcaaggtgggtgggaaaggtggtcagatgttaaatataacttattaggaggaacagtgaactgtgaagtggttagaaaaaaaataaaaacttctt

SEQ ID NO: 159045 - DNA, 120 bp, Artificial Sequence
  ENSG00000106780_29 (sequence is synthesized)
attagattagacctaggaaattcaagctgacccctttgcctaacttccctagagaaaaacctagaacttggtcatccctttataggagacccctaagttgttctcagggtttggagatga

SEQ ID NO: 159046 - DNA, 120 bp, Artificial Sequence
  ENSG00000106780_30 (sequence is synthesized)
tgttctggagggagtacaagcaaataatctacttctggtaatctgagggtgctttgcgtatttggccattgctcagaagaatagaggttacattatattacattatatgaaaattattta

SEQ ID NO: 159047 - DNA, 120 bp, Artificial Sequence
  ENSG00000106780_31 (sequence is synthesized)
gtttttctatagccctttgtagtttgcaaagcacttttccatatgtgtgtcctctcttccacaccatagccccctgaggaagtaattgttgtccccattttatagatgaaaaggctgagg

SEQ ID NO: 159048 - DNA, 120 bp, Artificial Sequence
  ENSG00000106780_32 (sequence is synthesized)
cacagaggagctaaatatcttgttcaaggctatacaatgtgtgtgattattaggcttggaatcagggcctctaactctaaagcacatgttttttcaactatatgcagaaattgcctagcc

SEQ ID NO: 159049 - DNA, 120 bp, Artificial Sequence
  ENSG00000106780_33 (sequence is synthesized)
atggacacaagaaagctgggaggaagagttctacttgtggatgtttttaattttttttaaatatcaggagcaatccagggccatacagctatgaagcacttagtgaaaagaacacaagaa

SEQ ID NO: 159050 - DNA, 120 bp, Artificial Sequence
  ENSG00000106780_34 (sequence is synthesized)
gatttactaactgaagttagtattagtgattagaaaacaaaactgccagtttgtgcttcattaaggtgaactcatctctccaagcaggaagggaaaatttgctttccctagcagttgctg

SEQ ID NO: 159051 - DNA, 120 bp, Artificial Sequence
  ENSG00000106780_35 (sequence is synthesized)
catatgtgtgtacagactgcacaattctaagaaattgtgcaaaatggcatacctgtctttctcccagatacaccgccccctgccccccccaaaaaaggtcaggattaaaggtggtgagaa

SEQ ID NO: 159052 - DNA, 120 bp, Artificial Sequence
  ENSG00000106780_36 (sequence is synthesized)
gtgaacatttattaaacagaagttaaaccaatagagagaaaggaggtttgttggagtctaagaggattttgaccatgtagaaattccttgaaacagaccttaaaaggtattgaaaaattg

SEQ ID NO: 159053 - DNA, 120 bp, Artificial Sequence
  ENSG00000106780_37 (sequence is synthesized)
aatcacaaagaaagtttacctttaaatacttgttaatggctcctagatcatggttataatttttctcaatgggaaaaaaagtcttaaaatttgttttaaataagatcctctaatgtctcg

SEQ ID NO: 159054 - DNA, 120 bp, Artificial Sequence
  ENSG00000106780_38 (sequence is synthesized)
agctttttgattctggaaataatttgctttaaaatataaatcaatcagaaagtgatctaccactgaaatcattctaggaaactagcatgggatgcactgcacaatgttctttcctctaaa

SEQ ID NO: 159055 - DNA, 120 bp, Artificial Sequence
  ENSG00000106780_39 (sequence is synthesized)
tgcactgcacaatgttctttcctctaaaggcatgggccccataaactgtggcatctggcagcaggatgccatcagtcctttagaaagcctaattttgggccgggtgcggtggctcacgcc

SEQ ID NO: 159056 - DNA, 75 bp, Artificial Sequence
  ENSG00000106780_40 (sequence is synthesized)
ttacagtgagccgagatggcgccatttgaagaaaaagaaagcctaatattgggagaatgtttgtgtaaggattgg

SEQ ID NO: 159057 - DNA, 120 bp, Artificial Sequence
  ENSG00000106780_41 (sequence is synthesized)
agaaagcctaatattgggagaatgtttgtgtaaggattggaaatctgtttatttttaaataagatagcactgatgtgaatcttatttggaaattacagatactgccattaagcgatgctt

SEQ ID NO: 159058 - DNA, 120 bp, Artificial Sequence
  ENSG00000106780_42 (sequence is synthesized)
ttatcttcattaattcattttggtaagcgcctatgcatttctgatggttaggtgccctaggtagtgttaagtatgtccgtgtcctcccttactcccctctcgctccctctaccctctatc

SEQ ID NO: 159059 - DNA, 120 bp, Artificial Sequence
  ENSG00000106780_43 (sequence is synthesized)
ccctagggttcttttattaatggaatttctccagttatagagaaaaaaatgacatttgaaaactaaagctcatttatattaatactaaggtcctgtgggcctagtgcgttactcttccca

SEQ ID NO: 159060 - DNA, 120 bp, Artificial Sequence
  ENSG00000106780_44 (sequence is synthesized)
gtgatacctagattttaagagtagagaacagaggaaacatgggatgagaggagagaggttttttagacaacatttgtagacacctcaaattatatcactgttctctagcgccaatattcc

SEQ ID NO: 159061 - DNA, 120 bp, Artificial Sequence
  ENSG00000106780_45 (sequence is synthesized)
caggtaaattgaccattaaagcaatactcactgacctactagtttattttggtcagctgagtaccatcaggatatttaaccctttaagtgctgttttgggagtagaaaactaaagcaaca

SEQ ID NO: 159062 - DNA, 120 bp, Artificial Sequence
  ENSG00000106780_46 (sequence is synthesized)
atacttcctcttgacagctttgattggaatggggttattagatcattcaccttggtcctacactttttaggatgcttggtgaacataacaccacttataatgaacatccctggttcctat

SEQ ID NO: 159063 - DNA, 120 bp, Artificial Sequence
  ENSG00000106780_47 (sequence is synthesized)
attttgggctatgtgggtaggaattgttacttgttactgcagcagcagccctagaaagtaagcccagggcttcagatctaagttagtccaaaagctaaatgatttaaagtcaagttgtaa

SEQ ID NO: 159064 - DNA, 120 bp, Artificial Sequence
  ENSG00000106780_48 (sequence is synthesized)
tgctaggcataagcactctataatacattaaattataggccgagcaattagggaatgtttctgaaacattaaacttgtatttatgtcactaaaattctaacacaaacttaaaaaatgtgt

SEQ ID NO: 159065 - DNA, 120 bp, Artificial Sequence
  ENSG00000106780_49 (sequence is synthesized)
gtgtctcatacatatgctgtactaggcttcatcatgcatttctaaatttgtgtatgatttgaatatatgaaagaatttatacaagagtgttatttaaaattattaaaaataaatgtatat

SEQ ID NO: 159066 - DNA, 120 bp, Artificial Sequence
  ENSG00000106780_50 (sequence is synthesized)
tgtacctattgtagatttgttgtttacttttttgtgtggtcagagttgtttcatgtcttcaaatacatgccaaggatcatttactttcagcccacttcataaaaatctttgaactcttca

SEQ ID NO: 159067 - DNA, 120 bp, Artificial Sequence
  ENSG00000106785_0 (sequence is synthesized)
ctgtgtcccggggagccggaggaggtggagatgaatggcgggcgcggcgaccgggagccggacccctgggaggtcggagcttgtcgagggatgcggctggcgctgcccggagcatggcga

SEQ ID NO: 159068 - DNA, 120 bp, Artificial Sequence
  ENSG00000106785_1 (sequence is synthesized)
ccgcgtggctgagctcttctgtcgccgctgccgccgctgcgtgtgcgcgctttgcccggtgctgggcgcgcaccgtggccaccctgtgggcctggcgctggaggcagcggtgcacgtgca

SEQ ID NO: 159069 - DNA, 120 bp, Artificial Sequence
  ENSG00000106785_2 (sequence is synthesized)
gaaactcagccaagaatgtttaaagcagctggcaatcaagaagcagcagcacattgacaacataacccagatagaagatgccaccgagaagctcaaggctaatgcagagtcaagtaaaac

SEQ ID NO: 159070 - DNA, 120 bp, Artificial Sequence
  ENSG00000106785_3 (sequence is synthesized)
ctggctgaaggggaaattcactgaactcagattactacttgacgaagaggaagcgctggccaagaaattcattgataaaaacacgcagcttaccctccaggtgtacagggaacaagctga

SEQ ID NO: 159071 - DNA, 120 bp, Artificial Sequence
  ENSG00000106785_4 (sequence is synthesized)
ctcttgcagagagcaacttgacatcatgaatgatctctccaacagggtctggagtatcagccaggagcccgatcctgtccagaggcttcaggcatacacggccaccgagcaggagatgca

SEQ ID NO: 159072 - DNA, 120 bp, Artificial Sequence
  ENSG00000106785_5 (sequence is synthesized)
gcagcagatgagcctcggggagctgtgccatcccgtgcccctctcctttgagcccgtcaagagcttctttaagggcctcgtggaagccgtggagagtacattacagacgccattggacat

SEQ ID NO: 159073 - DNA, 120 bp, Artificial Sequence
  ENSG00000106785_6 (sequence is synthesized)
tcgccttaaggaaagcataaactgccagctctcagacccttccagcaccaagccaggtaccttgttgaaaaccagcccctcaccagagcgatcgctattgctgaaatacgcgcgcacgcc

SEQ ID NO: 159074 - DNA, 120 bp, Artificial Sequence
  ENSG00000106785_7 (sequence is synthesized)
cacgctggatcctgacacgatgcacgcgcgcctgcgcctgtccgccgatcgcctgacggtgcgctgcggcctgctgggcagcctggggcccgtgcccgtgctgcggttcgacgcgctctg

SEQ ID NO: 159075 - DNA, 120 bp, Artificial Sequence
  ENSG00000106785_8 (sequence is synthesized)
gcaagtgctggctcgtgactgcttcgccaccggccgccactactgggaggttgacgtgcaggaggcgggcgccggctggtgggtgggcgcggcctacgcctcccttcggcgccgcggggc

SEQ ID NO: 159076 - DNA, 120 bp, Artificial Sequence
  ENSG00000106785_9 (sequence is synthesized)
ctcggccgccgcccgcctgggctgcaaccgccagtcctggtgcctcaagcgctacgaccttgagtactgggccttccacgacggccagcgcagccgcctgcggccccgcgacgacctcga

SEQ ID NO: 159077 - DNA, 120 bp, Artificial Sequence
  ENSG00000106785_10 (sequence is synthesized)
ccggctcggcgtcttcctggactacgaggccggcgtcctcgccttctacgacgtgacgggcggcatgagccacctgcataccttccgcgccacgttccaggagccgctctacccggccct

SEQ ID NO: 159078 - DNA, 120 bp, Artificial Sequence
  ENSG00000106785_11 (sequence is synthesized)
gcggctctgggagggggccatcagcatcccccggctgccctaggggccaggaccggcgtgacagcctccaggtacgccgcagctgcccagtctcgcctaatctacctagatcagcgtggc

SEQ ID NO: 159079 - DNA, 120 bp, Artificial Sequence
  ENSG00000106785_12 (sequence is synthesized)
tggtccccttactgcctgcttcttagggccctctccctgccccagctttccccgaccaatcacgcctacagtgctttgaaggtttcctctcctaggctagtttcaaacaggccctaaaca

SEQ ID NO: 159080 - DNA, 120 bp, Artificial Sequence
  ENSG00000106785_13 (sequence is synthesized)
agtctgctgctgccctctcatcagacctccgcaccctcaccccaccatcacttacactactttaatccagttccttcaaagtgatacccccacaggtaagccctcagcatcctgaataca

SEQ ID NO: 159081 - DNA, 120 bp, Artificial Sequence
  ENSG00000106785_14 (sequence is synthesized)
tcatccgcagcctgggaaccttctccctcgtacagcacaggaacctgacacatagtaggcacacagtaaacgtttgtgaatgaatgggagtcatccagtcctgactcttctgtctcttga

SEQ ID NO: 159082 - DNA, 120 bp, Artificial Sequence
  ENSG00000106785_15 (sequence is synthesized)
ggtcccttgaatcttccgcttcctccccaccgatttcagcgtgtccacatcacagctccctccagaagctgcaagagcttcttagcagttcctggtctgaaccctctcccagtcctcatc

SEQ ID NO: 159083 - DNA, 120 bp, Artificial Sequence
  ENSG00000106785_16 (sequence is synthesized)
ttccaccctaaaactagagtgatcttcctaaaacttcacttaacccctcagctatgaaaaggcttccaggagtttccatgaaataacaaaaaaaaatacaagcgcctcaccttagcattc

SEQ ID NO: 159084 - DNA, 120 bp, Artificial Sequence
  ENSG00000106785_17 (sequence is synthesized)
aaggcttgtctagtctgcccaaaattacttatcctcacctagctcctaccactcttcttagagactctccagtcagaaatgtgtcgcatagttccacctccacacctctctgctgccagc

SEQ ID NO: 159085 - DNA, 120 bp, Artificial Sequence
  ENSG00000106785_18 (sequence is synthesized)
cgcaggcttacctgcgccaggaagtctaaccaaggaacaagaatctcactatcagagccacaaatctgggacctgtctttccaactaaattggaggctttggaagggcagctttgtccta

SEQ ID NO: 159086 - DNA, 120 bp, Artificial Sequence
  ENSG00000106785_19 (sequence is synthesized)
tactctctccaccctgaaaagttcccagaaagccccttccctcccaagcagtgaattaataaccagcaggtgcctatcactgagtaacagaagagctgagttaggcgggcctcacaggtc

SEQ ID NO: 159087 - DNA, 120 bp, Artificial Sequence
  ENSG00000106785_20 (sequence is synthesized)
acccagccagatctcatctggggagtctgaggtcctgaaagaaagcagagctgcgtaaagttaccccggggtgatataggggggccagacgtgtgccccgttcacccacccccaggcaag

SEQ ID NO: 159088 - DNA, 120 bp, Artificial Sequence
  ENSG00000106785_21 (sequence is synthesized)
catctgacctgtcccctggcccagcccttaggcccagctttcaacctgcttactcatttctcaggggattttgggaaggaatcagcaggtgacagttgctaagcaaccaaagggggtggt

SEQ ID NO: 159089 - DNA, 120 bp, Artificial Sequence
  ENSG00000106785_22 (sequence is synthesized)
gtttcccaactgtcttgggacaaaaagggtaagagcacccttagatccagatgttgccaaggaaacccagagtgcccagctgtctggaatgaagtgacagaggtagaaaacagtaggccc

SEQ ID NO: 159090 - DNA, 120 bp, Artificial Sequence
  ENSG00000106785_23 (sequence is synthesized)
tcacaggaggccaccttcgctagcagggagtgggaggcttctttccagggatttgtgtctccgttctgaaggttctgcgtcctgttttgtcaattccctagacggttttgaagttatatt

SEQ ID NO: 159091 - DNA, 120 bp, Artificial Sequence
  ENSG00000106785_24 (sequence is synthesized)
ctgttaaagcatcttcataggtgcttggtgggaggccaaggtcgccgaatcctcgtggtttaaatagactttcagtgcattagtttgaaccatataaaactgacaattttcaatagtttt

SEQ ID NO: 159092 - DNA, 120 bp, Artificial Sequence
  ENSG00000106785_25 (sequence is synthesized)
tgagttaaaaatggcacttttgatatgagacaatgtagcagaataccaggcagacagaaccttgcaaacaccttaacttctaaccaaagactttaaaactctggctggacagagttttaa

SEQ ID NO: 159093 - DNA, 120 bp, Artificial Sequence
  ENSG00000106785_26 (sequence is synthesized)
gcactatgctgcaggaatcctgagaaaaaggggaaattaattctattaggaatggcccaaactgaattgtgacaggcagagggtgttcctgacagagggaagatgaatacacttgacccc

SEQ ID NO: 159094 - DNA, 120 bp, Artificial Sequence
  ENSG00000106785_27 (sequence is synthesized)
aacatttctgcccatccctgatgaccaagacctcttcccagacccacagctgcaggggccaagtaataacagctcttaatagtttataatgcactgttttaatgctttacgactaaactc

SEQ ID NO: 159095 - DNA, 120 bp, Artificial Sequence
  ENSG00000106785_28 (sequence is synthesized)
atctgatcctttcatcagccctagagggtagaaagttttcccaattctacacatggcaaaatggagacccagagtcacttgcccaaggtcgcacagctagtggtggagctggagtctggg

SEQ ID NO: 159096 - DNA, 120 bp, Artificial Sequence
  ENSG00000106785_29 (sequence is synthesized)
cccaggctgtgagttccaggtctgtgctcatggccaccaggccctactgctcagggtgaatgcagctggtctctggccagtgcctggtgctctggcccctctcgtggagctactgcccat

SEQ ID NO: 159097 - DNA, 120 bp, Artificial Sequence
  ENSG00000106785_30 (sequence is synthesized)
gatgctttcctagtgcctggttactctgcgagacttgagtctacctttggactgccttccttgggggtctgagatgaggccttatggcccagaggggaacttgattcaaaaatttgggat

SEQ ID NO: 159098 - DNA, 120 bp, Artificial Sequence
  ENSG00000106785_31 (sequence is synthesized)
tcatgtagcagagacagagctagactgtaaaggtcacaaactagctgtgtcaaggcccgtgatagccagaaagcggcagtttcagtccatatcaattgtgtgaccagggctagtcacttt

SEQ ID NO: 159099 - DNA, 120 bp, Artificial Sequence
  ENSG00000106785_32 (sequence is synthesized)
ttacttctcagtgccatctataaaatggggataatagcactacctaccaagtgctgtgaggctcaaatgagccaaaggttataaacttgccttaaaactatagtcctatacaaaaattag

SEQ ID NO: 159100 - DNA, 120 bp, Artificial Sequence
  ENSG00000106785_33 (sequence is synthesized)
acagagcaagactcttgtctcaaaaaaaacaaaaaaaacatatatactgctgtatcatgccaggatttatcagcattcccaagggagcttgcacggtactgaccgagtgctgagactact

SEQ ID NO: 159101 - DNA, 120 bp, Artificial Sequence
  ENSG00000106785_34 (sequence is synthesized)
tactggtattcccagctgccatgtggcagcagcaggagctactagaatattctcagcacaggaatgaggcttccttggtttccatgtctgtaagggttactgatcacttaccttcttctc

SEQ ID NO: 159102 - DNA, 120 bp, Artificial Sequence
  ENSG00000106785_35 (sequence is synthesized)
tttcagacttgaatctgtagacatttctttattgatatggcaaattgcttgcagatatttttaaatgacagcaattttctaatatttggtttaataaaatgtgaataatgtcccttttaa

SEQ ID NO: 159103 - DNA, 120 bp, Artificial Sequence
  ENSG00000106785_36 (sequence is synthesized)
gcctccagacttgaatctgtagacatttctttattgatatggcaaattgcttgcagatatttttaaatgacagcaattttctaatatttggtttaataaaatgtgaataatgtccctttt

SEQ ID NO: 159104 - DNA, 120 bp, Artificial Sequence
  ENSG00000106785_37 (sequence is synthesized)
atcgtacagtatgttcccttctgcatatgctgctttctcactcagcatcatttccttgagatgcatccaggctgctgcacgcatcaatagttcattcctggctgggcgcggtggctcacg

SEQ ID NO: 159105 - DNA, 65 bp, Artificial Sequence
  ENSG00000106785_38 (sequence is synthesized)
ggccaagatggtgaaaccccatctctgcaaaaaatacaaaaattagccgggcaccatggcatgtc

SEQ ID NO: 159106 - DNA, 120 bp, Artificial Sequence
  ENSG00000106785_39 (sequence is synthesized)
cactgatcatttcatcagcctggctcagggagggctggtcctgaccatccctctcaggccagcctatcctttttccacacacggcagcagaaccgagtagagtccggcaggacacacctt

SEQ ID NO: 159107 - DNA, 120 bp, Artificial Sequence
  ENSG00000106785_40 (sequence is synthesized)
ctcattgcaggccatctcacagggcagcagctgcttggttggggagcccagggcacgctccacaagacgcactgaccgcaccagctcggccagttctccaggctccagcgaggccgagtg

SEQ ID NO: 159108 - DNA, 120 bp, Artificial Sequence
  ENSG00000106785_41 (sequence is synthesized)
gtcactccccttccaggtcttgtccaaagttatgtgacgttccaacaccttggcccccagagccactgcggccacagatatcgctatgcctgtttcatgcccagaataccctatgggaat

SEQ ID NO: 159109 - DNA, 120 bp, Artificial Sequence
  ENSG00000106789_0 (sequence is synthesized)
cactgacatctttgctggactcttttaatcctcataaacccaggctgctggcacttgaaatttgagaagggcaatcagtctggcctcctgcctttctggcctgcaggcccagcctggaca

SEQ ID NO: 159110 - DNA, 120 bp, Artificial Sequence
  ENSG00000106789_1 (sequence is synthesized)
aacaatttaggtggagctcctggaggctggaagcagagaggaggtacctcaccatcctctcctgccagctgttgcagactctgcctggggaactgattaagggtgagcagaggcatttat

SEQ ID NO: 159111 - DNA, 120 bp, Artificial Sequence
  ENSG00000106789_2 (sequence is synthesized)
ctccatgttaacaagcagatgtcatggcacccccagtaccggagctccaagttccgtcatgtctttggcaaaccagccagcaaggagaactgctacgactccgtgcctatcacccgcagc

SEQ ID NO: 159112 - DNA, 120 bp, Artificial Sequence
  ENSG00000106789_3 (sequence is synthesized)
gttcacgacaaccacttctgtgccgtgaacccccacttcattgcagttgtgactgagtgtgctggtggaggggccttcctcgtcatccccctgcaccagacagggaagttggacccccac

SEQ ID NO: 159113 - DNA, 120 bp, Artificial Sequence
  ENSG00000106789_4 (sequence is synthesized)
tacccaaaagtctgcgggcacagaggcaacgttttggatgtcaagtggaacccttttgatgattttgagatcgcctcctgttctgaagatgccacaattaagatctggagcatccccaag

SEQ ID NO: 159114 - DNA, 120 bp, Artificial Sequence
  ENSG00000106789_5 (sequence is synthesized)
cagctgctgaccaggaacctcacggcctacaggaaggaactcgtgggccacgcgcgcagagtaggcctggtggagtggcaccccacggccgccaacatcctcttcagtgctggctatgac

SEQ ID NO: 159115 - DNA, 120 bp, Artificial Sequence
  ENSG00000106789_6 (sequence is synthesized)
tacaaggtgatgatctggaacctggatacaaaggagtctgtcatcacaagccccatgagtacgattagctgtcaccaagatgtgatcctctccatgtccttcaacaccaacggcagcctg

SEQ ID NO: 159116 - DNA, 120 bp, Artificial Sequence
  ENSG00000106789_7 (sequence is synthesized)
ttggccaccacctgcaaagaccgcaagattcgggttattgacccccgagcagggaccgtcctccaggaggccagctacaaagggcaccgggccagcaaagtgctgtttctggggaacctg

SEQ ID NO: 159117 - DNA, 120 bp, Artificial Sequence
  ENSG00000106789_8 (sequence is synthesized)
aagaagctgatgtccacaggcacatcccgatggaacaaccggcaggtggccttgtgggaccaggataacctctctgtgcctctgatggaggaggacctggacggctcctcgggcgtgctg

SEQ ID NO: 159118 - DNA, 120 bp, Artificial Sequence
  ENSG00000106789_9 (sequence is synthesized)
tttcccttctatgacgcggacaccagcatgctctacgtggtggggaagggagatggcaacatccgctactacgaggtgagcgccgacaagcctcacctgagctacctgactgagtaccgc

SEQ ID NO: 159119 - DNA, 120 bp, Artificial Sequence
  ENSG00000106789_10 (sequence is synthesized)
tcctataacccacagaaggggatcggtgtcatgccaaagagaggactcgacgtgtcctcctgcgagatcttccgcttctacaagctgatcacaaccaaaagcctcatcgagcccatctcc

SEQ ID NO: 159120 - DNA, 120 bp, Artificial Sequence
  ENSG00000106789_11 (sequence is synthesized)
atgattgtgccccggcggtcagaatcctaccaagaggacatataccctccaacagcaggggcccagccctccctgacggcccaggagtggctcagcgggatgaatcgagacccaatcctg

SEQ ID NO: 159121 - DNA, 120 bp, Artificial Sequence
  ENSG00000106789_12 (sequence is synthesized)
gtgtcccttaggcctggctctgagctgctgagaccccacccactgcctgcagagagacctatcttcaattccatggccccagcctcaccccggctcttgaatcagacagaaaagctggct

SEQ ID NO: 159122 - DNA, 120 bp, Artificial Sequence
  ENSG00000106789_13 (sequence is synthesized)
gcagaagatggctggaggtcttcctccctgttggaggagaagatgccaaggtgggcagcagaacacaggctggaggagaagaaaacctggctgacaaatggctttgacgttttcgaatgc

SEQ ID NO: 159123 - DNA, 120 bp, Artificial Sequence
  ENSG00000106789_14 (sequence is synthesized)
cccccaccaaagacagagaatgagttgctgcagatgttctaccggcaacaggaggagatccgaaggctccgggagctgttgacccagcgagaggtccaggccaaacagttggaactggag

SEQ ID NO: 159124 - DNA, 120 bp, Artificial Sequence
  ENSG00000106789_15 (sequence is synthesized)
atcaaaaacttgcggatgggctcagagcagctctgagcagagacctctgccctcctcaccctcagggacaccactcggctccatggggaggtttagaaccaaaccacaagtcccctcaag

SEQ ID NO: 159125 - DNA, 120 bp, Artificial Sequence
  ENSG00000106789_16 (sequence is synthesized)
gacaaccactatttctatattttttaccagaaaacaaaactctccatcgctgaaagagattccagtgggacatggtgccgtttttctgtttgccttcttgcaacaacagtttctgaattg

SEQ ID NO: 159126 - DNA, 120 bp, Artificial Sequence
  ENSG00000106789_17 (sequence is synthesized)
actttgttttcagatgatgccttctgttgaattctgttattaagggcccatgatgagctgtaacttctcaagaggaaagaacacagtagaaaactagagctggaaggatctaggttgacc

SEQ ID NO: 159127 - DNA, 84 bp, Artificial Sequence
  ENSG00000106789_18 (sequence is synthesized)
acacagtagaaaactagagctggaaggatctaggttgacctgtctgtgattttcaaactgtggtccagagaataggggaagact

SEQ ID NO: 159128 - DNA, 70 bp, Artificial Sequence
  ENSG00000106789_19 (sequence is synthesized)
tggccagccgtggtggtgagcgtctgtagtccctgctattcgggaggctgagataggagaattgcttgaa

SEQ ID NO: 159129 - DNA, 71 bp, Artificial Sequence
  ENSG00000106789_20 (sequence is synthesized)
ggtgagcgtctgtagtccctgctattcatgagccacgattgcggactgcactgcagcctgggtgacagagc

SEQ ID NO: 159130 - DNA, 120 bp, Artificial Sequence
  ENSG00000106789_21 (sequence is synthesized)
agagagagaataggggaagactaagcaggaaggctgtgtctcccttccccacactgtattccaaccagacagctcccttctattttatatgttgggctagtatgaaaaacaattctgcta

SEQ ID NO: 159131 - DNA, 120 bp, Artificial Sequence
  ENSG00000106789_22 (sequence is synthesized)
ggaaaaaaaaatttttttagaagtttgaaagctagtgatttgacccaagttcctcattttacagctggggaaactaaggcctagagagaggcaagtgatatttgtttcatggcagggctg

SEQ ID NO: 159132 - DNA, 120 bp, Artificial Sequence
  ENSG00000106789_23 (sequence is synthesized)
ggctgagatcctgcttttctgggtctgtctttttgctcttttgggtctgatgcagttctcagcccaaagagtagaaatctgttgcttctggcctcagctgtgccccagcttactcagtga

SEQ ID NO: 159133 - DNA, 120 bp, Artificial Sequence
  ENSG00000106789_24 (sequence is synthesized)
cctcttgcaagtcctgccctctctggtctcagtttcttcatctgaaccaggggtaccctggaacaagctgctctctgcaggatctgccacctgaaaccttgacctaagagaaaactacct

SEQ ID NO: 159134 - DNA, 120 bp, Artificial Sequence
  ENSG00000106789_25 (sequence is synthesized)
gtggggtgatctgggtttgctacagaaactaacggacactggcaaggggtcagaggcattcaacccaattctacaacacaggcaggtggtcaaaaccaacctttccaaccagaatcagcc

SEQ ID NO: 159135 - DNA, 120 bp, Artificial Sequence
  ENSG00000106789_26 (sequence is synthesized)
tgatatggatagatgctgtcccttatggagggacgcagacttcagaactgtgcccatgactgctgactgccaccaccaaggccctcaggtacacagcctgcctcctgcaggatgatgtgg

SEQ ID NO: 159136 - DNA, 120 bp, Artificial Sequence
  ENSG00000106789_27 (sequence is synthesized)
gcagatttcagccctagttaacagaagagtcccccaggaggtagggggcccccatcactggagacatgccagcagagcctctggccacctaaccaggaggtcttctgaaatgactatacg

SEQ ID NO: 159137 - DNA, 120 bp, Artificial Sequence
  ENSG00000106789_28 (sequence is synthesized)
aggtaaagaagtagtaccagatggtcccaaagttcccttttagcctgaaagcttttctttgtccctccttagtgaatctgtgttccgagccctactctaaagttcagtggtcaatacaat

SEQ ID NO: 159138 - DNA, 120 bp, Artificial Sequence
  ENSG00000106789_29 (sequence is synthesized)
agtccaccaagagactgggaatgattagaagtgaaattggtccctccttaccaaggaggggcagatgatctccattgcacagggcgattagattctggagctgaggtggggactgcagga

SEQ ID NO: 159139 - DNA, 120 bp, Artificial Sequence
  ENSG00000106789_30 (sequence is synthesized)
ggccacctagtctggtaggtttcaacccaagctgtgtacattagaattcccttgggagcgtgcaggaaatacagatgcccatgccacattccagaccaactgaagctgaatctccagagt

SEQ ID NO: 159140 - DNA, 120 bp, Artificial Sequence
  ENSG00000106789_31 (sequence is synthesized)
agggcctgtatggtcatataagctccacaggtgatctgcagtacagtgaagatggaagactgcatgtgtacctatttgcaataaagatgaagaggacagcaagctccagacaggagctgg

SEQ ID NO: 159141 - DNA, 120 bp, Artificial Sequence
  ENSG00000106789_32 (sequence is synthesized)
gactcaacccagatctcttaagtcctgcctggtggctccttaaaagtccagaagtgttgccccaagccctccctcaacatctctgggaaccgcagctgcagcacgatgggggttcagtgc

SEQ ID NO: 159142 - DNA, 120 bp, Artificial Sequence
  ENSG00000106789_33 (sequence is synthesized)
ccctgtttgccccttacccagctgtggtttattctgcttgtatgtctgcacaggccggatgctcgtgttccttgtcttattctccatttactcagtcactggggctcactcccgtctgat

SEQ ID NO: 159143 - DNA, 120 bp, Artificial Sequence
  ENSG00000106789_34 (sequence is synthesized)
gcactagccaagattgccttagtgtgctccagaaaagaaggccaaatcccaggcattgtcagggcagcagagctctacaggataggcttacctttcccacctgtgtggctagcacttcac

SEQ ID NO: 159144 - DNA, 120 bp, Artificial Sequence
  ENSG00000106789_35 (sequence is synthesized)
agtttacaaattcctcccacctccactcagtgacacatgctgttctaacacaggtcaggcaggcattacagtccccatgttcagaatcaaagacctagcctcagagaagtgaagaaacat

SEQ ID NO: 159145 - DNA, 120 bp, Artificial Sequence
  ENSG00000106789_36 (sequence is synthesized)
catgccaaggtcattgactgccaagcggtagaggtggggttgcatccagagagcttcccggtatgcctctgcacaatgccattccttggccagctccctccaccccaagggacccagact

SEQ ID NO: 159146 - DNA, 120 bp, Artificial Sequence
  ENSG00000106789_37 (sequence is synthesized)
gcacacttaacaaacaggacacaggtgtctttgaacaaacttttttgtattattatttttacatctagaataaattatttaaattatttcacagcaagggagagggataggtaattttta

SEQ ID NO: 159147 - DNA, 120 bp, Artificial Sequence
  ENSG00000106789_38 (sequence is synthesized)
tcagatatttttttaaaccatctgttttttaaattacatttttgtttatgttcttgagctgatgtagtggaacttgcctagcacattcaggtcccagccagttggcagagcatgctctca

SEQ ID NO: 159148 - DNA, 120 bp, Artificial Sequence
  ENSG00000106789_39 (sequence is synthesized)
tctccttattccataccctgggcgtcccctttctgttgactcaggaactttctgagaatgaggacagcactaggagatgagctttggcaggtatccaccttaacgctacaataattgtgc

SEQ ID NO: 159149 - DNA, 120 bp, Artificial Sequence
  ENSG00000106789_40 (sequence is synthesized)
ttcctgaaacaaaacttgagattgtatcatagaaggaaacaggaagtcagaaatcaaatctatgcttttaattgaaaccgtgcctgaaacagtttgaatgattgttttaatgttgtttct

SEQ ID NO: 159150 - DNA, 120 bp, Artificial Sequence
  ENSG00000106789_41 (sequence is synthesized)
gaaattccttgtacctttgtgaaaaataatgataataaataaaagtgaaaataaatagatgtggaatatgcaatggaaataatgtaacaaaataataaacatctggccattttactacaa

SEQ ID NO: 159151 - DNA, 80 bp, Artificial Sequence
  ENSG00000106799_0 (sequence is synthesized)
gctagggaggtggggcgaggcgaggtttgctggggtgaggcagcggcgcggccgggccgggccgggccacaggcggtggc

SEQ ID NO: 159152 - DNA, 120 bp, Artificial Sequence
  ENSG00000106799_1 (sequence is synthesized)
ccccggctgctcctcctcgtgctggcggcggcggcggcggcggcggcggcgctgctcccgggggcgacggcgttacagtgtttctgccacctctgtacaaaagacaattttacttgtgtg

SEQ ID NO: 159153 - DNA, 120 bp, Artificial Sequence
  ENSG00000106799_2 (sequence is synthesized)
acagatgggctctgctttgtctctgtcacagagaccacagacaaagttatacacaacagcatgtgtatagctgaaattgacttaattcctcgagataggccgtttgtatgtgcaccctct

SEQ ID NO: 159154 - DNA, 120 bp, Artificial Sequence
  ENSG00000106799_3 (sequence is synthesized)
tcaaaaactgggtctgtgactacaacatattgctgcaatcaggaccattgcaataaaatagaacttccaactactgtaaagtcatcacctggccttggtcctgtggaactggcagctgtc

SEQ ID NO: 159155 - DNA, 120 bp, Artificial Sequence
  ENSG00000106799_4 (sequence is synthesized)
attgctggaccagtgtgcttcgtctgcatctcactcatgttgatggtctatatctgccacaaccgcactgtcattcaccatcgagtgccaaatgaagaggacccttcattagatcgccct

SEQ ID NO: 159156 - DNA, 120 bp, Artificial Sequence
  ENSG00000106799_5 (sequence is synthesized)
tttatttcagagggtactacgttgaaagacttaatttatgatatgacaacgtcaggttctggctcaggtttaccattgcttgttcagagaacaattgcgagaactattgtgttacaagaa

SEQ ID NO: 159157 - DNA, 120 bp, Artificial Sequence
  ENSG00000106799_6 (sequence is synthesized)
agcattggcaaaggtcgatttggagaagtttggagaggaaagtggcggggagaagaagttgctgttaagatattctcctctagagaagaacgttcgtggttccgtgaggcagagatttat

SEQ ID NO: 159158 - DNA, 120 bp, Artificial Sequence
  ENSG00000106799_7 (sequence is synthesized)
caaactgtaatgttacgtcatgaaaacatcctgggatttatagcagcagacaataaagacaatggtacttggactcagctctggttggtgtcagattatcatgagcatggatcccttttt

SEQ ID NO: 159159 - DNA, 120 bp, Artificial Sequence
  ENSG00000106799_8 (sequence is synthesized)
gattacttaaacagatacacagttactgtggaaggaatgataaaacttgctctgtccacggcgagcggtcttgcccatcttcacatggagattgttggtacccaaggaaagccagccatt

SEQ ID NO: 159160 - DNA, 120 bp, Artificial Sequence
  ENSG00000106799_9 (sequence is synthesized)
gctcatagagatttgaaatcaaagaatatcttggtaaagaagaatggaacttgctgtattgcagacttaggactggcagtaagacatgattcagccacagataccattgatattgctcca

SEQ ID NO: 159161 - DNA, 120 bp, Artificial Sequence
  ENSG00000106799_10 (sequence is synthesized)
aaccacagagtgggaacaaaaaggtacatggcccctgaagttctcgatgattccataaatatgaaacattttgaatccttcaaacgtgctgacatctatgcaatgggcttagtattctgg

SEQ ID NO: 159162 - DNA, 120 bp, Artificial Sequence
  ENSG00000106799_11 (sequence is synthesized)
gaaattgctcgacgatgttccattggtggaattcatgaagattaccaactgccttattatgatcttgtaccttctgacccatcagttgaagaaatgagaaaagttgtttgtgaacagaag

SEQ ID NO: 159163 - DNA, 120 bp, Artificial Sequence
  ENSG00000106799_12 (sequence is synthesized)
ttaaggccaaatatcccaaacagatggcagagctgtgaagccttgagagtaatggctaaaattatgagagaatgttggtatgccaatggagcagctaggcttacagcattgcggattaag

SEQ ID NO: 159164 - DNA, 120 bp, Artificial Sequence
  ENSG00000106799_13 (sequence is synthesized)
aaaacattatcgcaactcagtcaacaggaaggcatcaaaatgtaattctacagctttgcctgaactctccttttttcttcagatctgctcctgggttttaatttgggaggtcaattgttc

SEQ ID NO: 159165 - DNA, 120 bp, Artificial Sequence
  ENSG00000106799_14 (sequence is synthesized)
tacctcactgagagggaacagaaggatattgcttccttttgcagcagtgtaataaagtcaattaaaaacttcccaggatttctttggacccaggaaacagccatgtgggtcctttctgtg

SEQ ID NO: 159166 - DNA, 120 bp, Artificial Sequence
  ENSG00000106799_15 (sequence is synthesized)
cactatgaacgcttctttcccaggacagaaaatgtgtagtctacctttattttttattaacaaaacttgttttttaaaaagatgattgctggtcttaactttaggtaactctgctgtgct

SEQ ID NO: 159167 - DNA, 120 bp, Artificial Sequence
  ENSG00000106799_16 (sequence is synthesized)
ggagatcatctttaagggcaaaggagttggattgctgaattacaatgaaacatgtcttattactaaagaaagtgatttactcctggttagtacattctcagaggattctgaaccactaga

SEQ ID NO: 159168 - DNA, 120 bp, Artificial Sequence
  ENSG00000106799_17 (sequence is synthesized)
gtttccttgattcagactttgaatgtactgttctatagtttttcaggatcttaaaactaacacttataaaactcttatcttgagtctaaaaatgacctcatatagtagtgaggaacataa

SEQ ID NO: 159169 - DNA, 120 bp, Artificial Sequence
  ENSG00000106799_18 (sequence is synthesized)
ttcatgcaattgtattttgtatactattattgttctttcacttattcagaacattacatgccttcaaaatgggattgtactataccagtaagtgccacttctgtgtctttctaatggaaa

SEQ ID NO: 159170 - DNA, 120 bp, Artificial Sequence
  ENSG00000106799_19 (sequence is synthesized)
tgagtagaattgctgaaagtctctatgttaaaacctatagtgtttgaattcaaaaagcttatttatctgggtaacccaaactttttctgttttgtttttggaagggtttttgtggtatgt

SEQ ID NO: 159171 - DNA, 120 bp, Artificial Sequence
  ENSG00000106799_20 (sequence is synthesized)
catttggtattctattctgaaaatgcctttctcctaccaaaatgtgcttaagccactaaagaaatgaagtggcattaattagtaaattattagcatggtcatgtttgaatattctcacat

SEQ ID NO: 159172 - DNA, 120 bp, Artificial Sequence
  ENSG00000106799_21 (sequence is synthesized)
caagcttttgcattttaattgtgttgtctaagtatacttttaaaaaatcaagtggcactctagatgcttatagtactttaatatttgtagcatacagactaatttttctaaaagggaaag

SEQ ID NO: 159173 - DNA, 120 bp, Artificial Sequence
  ENSG00000106799_22 (sequence is synthesized)
tctgtctagctgcttgtgaaaagttatgtggtattctgtaagccatttttttctttatctgttcaaagacttattttttaagacatgaattacatttaaaattagaatatggttaatatt

SEQ ID NO: 159174 - DNA, 120 bp, Artificial Sequence
  ENSG00000106799_23 (sequence is synthesized)
aaataataggcctttttctaggaaggcgaaggtagttaataatttgaatagataacagatgtgcaagaaagtcacatttgttatgtatgtaggagtaaacgttcggtggatcctctgtct

SEQ ID NO: 159175 - DNA, 120 bp, Artificial Sequence
  ENSG00000106799_24 (sequence is synthesized)
ttgtaactgaggttagagctagtgtggttttgaggtctcactacactttgaggaaggcagcttttaattcagtgtttccttatgtgtgcgtacattgcaactgcttacatgtaatttatg

SEQ ID NO: 159176 - DNA, 120 bp, Artificial Sequence
  ENSG00000106799_25 (sequence is synthesized)
taatgcattcagtgcacccttgttacttgggagaggtggtagctaaagaacattctgagtataggtttttctccatttacagatgtctttggtcaaatattgaaagcaaacttgtcatgg

SEQ ID NO: 159177 - DNA, 120 bp, Artificial Sequence
  ENSG00000106799_26 (sequence is synthesized)
tcttcttacattaagttgaaactagcttataataactggtttttacttccaatgctatgaagtctctgcagggcttttacagttttcgaagtccttttatcactgtgatcttattctgag

SEQ ID NO: 159178 - DNA, 120 bp, Artificial Sequence
  ENSG00000106799_27 (sequence is synthesized)
tatcatagctctgaggcaagacttcgactttatagtgctatcagttccccgatacagggtcagagtaacccatacagtattttggtcaggaagagaaagtggccatttacactgaatgag

SEQ ID NO: 159179 - DNA, 120 bp, Artificial Sequence
  ENSG00000106799_28 (sequence is synthesized)
ttgcattctgataatgtcttatctcttatacgtagaataaatttgaaagactatttgatcttaaaaccaaagtaattttagaatgagtgacatattacataggaatttagtgtcaatttc

SEQ ID NO: 159180 - DNA, 120 bp, Artificial Sequence
  ENSG00000106799_29 (sequence is synthesized)
atgtgtttaaaaacatcatgggaaaaatgcttagaggttactattttgactacaaagttgagtttttttctgtagttaccataatttcattgaagcaaatgaatgagtttgagaggtttg

SEQ ID NO: 159181 - DNA, 120 bp, Artificial Sequence
  ENSG00000106799_30 (sequence is synthesized)
gaatgagtttgagaggtttgtttttatagttgtgttgtattacttgtttaataataatctctaattctgtgatcaggtactttttttgtgggggttttttttttgtttttttttttttgt

SEQ ID NO: 159182 - DNA, 120 bp, Artificial Sequence
  ENSG00000106799_31 (sequence is synthesized)
taagcctaccagatctgctttatgaaatccaggggaccaatgcattttatcactaaaactatttttatataattttaagaatataccaaaagttgtctgatttaaagttgtaatacatga

SEQ ID NO: 159183 - DNA, 120 bp, Artificial Sequence
  ENSG00000106799_32 (sequence is synthesized)
tttctcactttcatgtaaggttatccacttttgctgaagatattttttattgaatcaaagattgagttacaattatacttttcttacctaagtggataaaatgtacttttgatgaatcag

SEQ ID NO: 159184 - DNA, 120 bp, Artificial Sequence
  ENSG00000106799_33 (sequence is synthesized)
ggaatttttttaaagttggagtttagttctaaattgactttacgtattactgcagttaattccttttttggctagggatggtttgataaaccacaattggctgatattgaaaatgaaaga

SEQ ID NO: 159185 - DNA, 120 bp, Artificial Sequence
  ENSG00000106799_34 (sequence is synthesized)
aacttaaaaggtgggatggatcatgattactgtcgataactgcagataaatttgattagagtaataattttgtcatttaaaaacacagttgtttatactgcccatcctaggatgctcacc

SEQ ID NO: 159186 - DNA, 120 bp, Artificial Sequence
  ENSG00000106799_35 (sequence is synthesized)
ttccaagattcaacgtggctaaaacatcttctggtaaattgtgcgtccatattcattttgtcagtagccaggagaaatggggatgggggaaatacgacttagtgaggcatagacatccct

SEQ ID NO: 159187 - DNA, 120 bp, Artificial Sequence
  ENSG00000106799_36 (sequence is synthesized)
ggtccatcctttctgtctccagctgtttcttggaacctgctctcctgcttgctggtccctgacgcagagaccgttgcctcccccacagccgtttgactgaaggctgctctggagacctag

SEQ ID NO: 159188 - DNA, 120 bp, Artificial Sequence
  ENSG00000106799_37 (sequence is synthesized)
agtaaaacggctgatggaagttgtgggacccacttccatttccttcagtcattagaggtggaagggaggggtctccaagtttggagattgagcagatgaggcttgggatgcccctgcttt

SEQ ID NO: 159189 - DNA, 120 bp, Artificial Sequence
  ENSG00000106799_38 (sequence is synthesized)
gacttcagccatggatgaggagtgggatggcagcaaggtggctcctgtggcagtggagttgtgccagaaacagtggccagttgtatcgcctataagacagggtaaggtctgaagagctga

SEQ ID NO: 159190 - DNA, 120 bp, Artificial Sequence
  ENSG00000106799_39 (sequence is synthesized)
gcctgtaattctgctgtaataatgatagtgctcaagaagtgccttgagttggtgtacagtgccatggccatcaagaatcccagatttcaggttttattacaaaatgtaagtggtcacttg

SEQ ID NO: 159191 - DNA, 120 bp, Artificial Sequence
  ENSG00000106799_40 (sequence is synthesized)
gcgattttgtagtacatgcatgagttaccttttttctctatgtctgagaactgtcagattaaaacaagatggcaaagagatcgttagagtgcacaacaaaatcactatcccattagacac

SEQ ID NO: 159192 - DNA, 120 bp, Artificial Sequence
  ENSG00000106799_41 (sequence is synthesized)
atcatcaaaagcttatttttattcttgcactggaagaatcgtaagtcaactgtttcttgaccatggcagtgttctggctccaaatggtagtgattccaaataatggttctgttaacactt

SEQ ID NO: 159193 - DNA, 120 bp, Artificial Sequence
  ENSG00000106799_42 (sequence is synthesized)
tggcagaaaatgccagctcagatattttgagatactaaggattatctttggacatgtactgcagcttcttgtctctgttttggattactggaatacccatgggccctctcaagagtgctg

SEQ ID NO: 159194 - DNA, 120 bp, Artificial Sequence
  ENSG00000106799_43 (sequence is synthesized)
gacttctaggacattaagatgattgtcagtacattaaacttttcaatcccattatgcaatcttgtttgtaaatgtaaacttctaaaaatatggttaataacattcaacctgtttattaca

SEQ ID NO: 159195 - DNA, 120 bp, Artificial Sequence
  ENSG00000106799_44 (sequence is synthesized)
acttaaaaggaacttcagtgaatttgtttttattttttaacaagatttgtgaactgaatatcatgaaccatgttttgatacccctttttcacgttgtgccaacggaatagggtgtttgat

SEQ ID NO: 159196 - DNA, 120 bp, Artificial Sequence
  ENSG00000106799_45 (sequence is synthesized)
atttcttcatatgttaaggagatgcttcaaaatgtcaattgctttaaacttaaattacctctcaagagaccaaggtacatttacctcattgtgtatataatgtttaatatttgtcagagc

SEQ ID NO: 159197 - DNA, 120 bp, Artificial Sequence
  ENSG00000106799_46 (sequence is synthesized)
attctccaggtttgcagttttatttctataaagtatgggtattatgttgctcagttactcaaatggtactgtattgtttatatttgtaccccaaataacatcgtctgtactttctgtttt

SEQ ID NO: 159198 - DNA, 120 bp, Artificial Sequence
  ENSG00000106799_47 (sequence is synthesized)
ctgtattgtatttgtgcaggattctttaggctttatcagtgtaatctctgccttttaagatatgtacagaaaatgtccatataaatttccattgaagtcgaatgatactgagaagcctgt

SEQ ID NO: 159199 - DNA, 120 bp, Artificial Sequence
  ENSG00000106799_48 (sequence is synthesized)
aaagaggagaaaaaaacataagctgtgtttccccataagtttttttaaattgtatattgtatttgtagtaatattccaaaagaatgtaaataggaaatagaagagtgatgcttatgttaa

SEQ ID NO: 159200 - DNA, 120 bp, Artificial Sequence
  ENSG00000106799_49 (sequence is synthesized)
gtcctaacactacagtagaagaatggaagcagtgcaaataaattacatttttcccaagtgccagtggcatattttaaaataaagtgtatacgttggaatgagtcatgccatatgtagttg

SEQ ID NO: 159201 - DNA, 120 bp, Artificial Sequence
  ENSG00000106799_50 (sequence is synthesized)
ctgtagatggcaactagaacctttgagttacaagagtctttagaagttttctaaccctgcctagtgcaagttacaatattatagcgtgttcggggagtgccctcctgtctgcaggtgtgt

SEQ ID NO: 159202 - DNA, 120 bp, Artificial Sequence
  ENSG00000106799_51 (sequence is synthesized)
ctctgtgcctgggggcttttctccacatgcttaggggtgtgggtcttccattggggcatgatggacctgtctacaggtgatctctgttgcctttgggtcagcacatttgttagtctcctg

SEQ ID NO: 159203 - DNA, 120 bp, Artificial Sequence
  ENSG00000106799_52 (sequence is synthesized)
ggggtgaaaacttggcttacaagagaactggaaaaatgatgagatgtggtccccaaacccttgattgactctggggaggggctttgtgaataggattgctctcacattaaagatagttac

SEQ ID NO: 159204 - DNA, 120 bp, Artificial Sequence
  ENSG00000106799_53 (sequence is synthesized)
ttcaatttgaaggctggatttagggatttttttttttccttataacaaagacatcaccaggatatgaagcttttgttgaaagttggaaaaaaagtgaaattaaagacattcccagacaaa

SEQ ID NO: 159205 - DNA, 120 bp, Artificial Sequence
  ENSG00000106799_54 (sequence is synthesized)
agattgacagaaatgactaatacaggtatctggcctcaaggagtttacagtttcataggagaaagaaaaacaaaactagcaattctgcgttacagtgtttctgccacctctgtacaaaag

SEQ ID NO: 159206 - DNA, 120 bp, Artificial Sequence
  ENSG00000106799_55 (sequence is synthesized)
aatacaggtatctggcctcaaggagtttacagtttcataggagaaagaaaaacaaaactagcaattctgaatctttctctttttccagcgttacagtgtttctgccacctctgtacaaaa

SEQ ID NO: 159207 - DNA, 120 bp, Artificial Sequence
  ENSG00000106799_56 (sequence is synthesized)
aattggaatgtttggatttaagaacatgtctgtgctttgcaatttcatgtgaccatggtgaaattatgcacacattctatcattgtgattcaacaagtattttttgaatgctgctgtgca

SEQ ID NO: 159208 - DNA, 120 bp, Artificial Sequence
  ENSG00000106803_0 (sequence is synthesized)
agtctcgccagctgccggtctttcgggggctccgtaactttctatccgtccgcgtcagcgccttgccaccctcatctccaatatgcctggtccgacccccagtggcactaacgtgggatc

SEQ ID NO: 159209 - DNA, 120 bp, Artificial Sequence
  ENSG00000106803_1 (sequence is synthesized)
ctcagggcgctctcccagcaaagcagtggccgcccgggcggcgggatccactgtccggcagaggaaaaatgccagctgtgggacaaggagtgcaggccgcacaacctcggcaggcaccgg

SEQ ID NO: 159210 - DNA, 120 bp, Artificial Sequence
  ENSG00000106803_2 (sequence is synthesized)
cgcttctgtatttatgttgcacatttggggcaagtacactcgttcgtagattcagttacatccatctgtcatctgaagaaggaggaaaaaacccaacatttcttggaccaaaagtatagt

SEQ ID NO: 159211 - DNA, 120 bp, Artificial Sequence
  ENSG00000106803_3 (sequence is synthesized)
gactatctgttcatgagagaaattttctgtaagcttgctgttttacaggggatttatcaataattgattttgaggaatcagtttttttctatggctaataaactttttaattcacttata

SEQ ID NO: 159212 - DNA, 120 bp, Artificial Sequence
  ENSG00000106803_4 (sequence is synthesized)
atcttgtctgaccccggttatatttttccttcggtagggattggactttctgaaggacgttgtgatccaaaggaaggaggccggaggtctctacttcccatacagcagcctggtccgacc

SEQ ID NO: 159213 - DNA, 120 bp, Artificial Sequence
  ENSG00000106803_5 (sequence is synthesized)
ccgggcggcgggatccactgtccggcagaggtaaggaaccctgcagttcgttcgcttccagactcggagataggacccagaacctcgctgattctggggtggagaccctagcatgtgaag

SEQ ID NO: 159214 - DNA, 120 bp, Artificial Sequence
  ENSG00000106803_6 (sequence is synthesized)
ttgctcagtttagggcactactcttaaaaaaggaaagttaacaaactggaatagagtcagagataactttgagaaaaccgatgtcattaaactggtgtctctggacctgaggtttgcact

SEQ ID NO: 159215 - DNA, 120 bp, Artificial Sequence
  ENSG00000106803_7 (sequence is synthesized)
cacatttccatctggcggccccataagcaatctgtcctacagataactcgtcctacacaaaacttagtctcttttcagctcagctctctcactctcaattatatctccttacttccatat

SEQ ID NO: 159216 - DNA, 120 bp, Artificial Sequence
  ENSG00000106803_8 (sequence is synthesized)
ggcactgttgtacactcatttactcagagccagaaacgtcagcgtcatcttggatttttcttatgctctttctctctctagtcatatgccagactttaaactctgcttgaaagctttctc

SEQ ID NO: 159217 - DNA, 120 bp, Artificial Sequence
  ENSG00000106804_0 (sequence is synthesized)
tatatccgtggtttcctgctacctccaaccatgggccttttgggaatactttgttttttaatcttcctggggaaaacctggggacaggagcaaacatatgtcatttcagcaccaaaaata

SEQ ID NO: 159218 - DNA, 120 bp, Artificial Sequence
  ENSG00000106804_1 (sequence is synthesized)
ttccgtgttggagcatctgaaaatattgtgattcaagtttatggatacactgaagcatttgatgcaacaatctctattaaaagttatcctgataaaaaatttagttactcctcaggccat

SEQ ID NO: 159219 - DNA, 120 bp, Artificial Sequence
  ENSG00000106804_2 (sequence is synthesized)
gttcatttatcctcagagaataaattccaaaactctgcaatcttaacaatacaaccaaaacaattgcctggaggacaaaacccagtttcttatgtgtatttggaagttgtatcaaagcat

SEQ ID NO: 159220 - DNA, 120 bp, Artificial Sequence
  ENSG00000106804_3 (sequence is synthesized)
ttttcaaaatcaaaaagaatgccaataacctatgacaatggatttctcttcattcatacagacaaacctgtttatactccagaccagtcagtaaaagttagagtttattcgttgaatgac

SEQ ID NO: 159221 - DNA, 120 bp, Artificial Sequence
  ENSG00000106804_4 (sequence is synthesized)
gacttgaagccagccaaaagagaaactgtcttaactttcatagatcctgaaggatcagaagttgacatggtagaagaaattgatcatattggaattatctcttttcctgacttcaagatt

SEQ ID NO: 159222 - DNA, 120 bp, Artificial Sequence
  ENSG00000106804_5 (sequence is synthesized)
ccgtctaatcctagatatggtatgtggacgatcaaggctaaatataaagaggacttttcaacaactggaaccgcatattttgaagttaaagaatatgtcttgccacatttttctgtctca

SEQ ID NO: 159223 - DNA, 120 bp, Artificial Sequence
  ENSG00000106804_6 (sequence is synthesized)
atcgagccagaatataatttcattggttacaagaactttaagaattttgaaattactataaaagcaagatatttttataataaagtagtcactgaggctgacgtttatatcacatttgga

SEQ ID NO: 159224 - DNA, 120 bp, Artificial Sequence
  ENSG00000106804_7 (sequence is synthesized)
ataagagaagacttaaaagatgatcaaaaagaaatgatgcaaacagcaatgcaaaacacaatgttgataaatggaattgctcaagtcacatttgattctgaaacagcagtcaaagaactg

SEQ ID NO: 159225 - DNA, 120 bp, Artificial Sequence
  ENSG00000106804_8 (sequence is synthesized)
tcatactacagtttagaagatttaaacaacaagtacctttatattgctgtaacagtcatagagtctacaggtggattttctgaagaggcagaaatacctggcatcaaatatgtcctctct

SEQ ID NO: 159226 - DNA, 120 bp, Artificial Sequence
  ENSG00000106804_9 (sequence is synthesized)
ccctacaaactgaatttggttgctactcctcttttcctgaagcctgggattccatatcccatcaaggtgcaggttaaagattcgcttgaccagttggtaggaggagtcccagtaacactg

SEQ ID NO: 159227 - DNA, 120 bp, Artificial Sequence
  ENSG00000106804_10 (sequence is synthesized)
aatgcacaaacaattgatgtaaaccaagagacatctgacttggatccaagcaaaagtgtaacacgtgttgatgatggagtagcttcctttgtgcttaatctcccatctggagtgacggtg

SEQ ID NO: 159228 - DNA, 120 bp, Artificial Sequence
  ENSG00000106804_11 (sequence is synthesized)
ctggagtttaatgtcaaaactgatgctccagatcttccagaagaaaatcaggccagggaaggttaccgagcaatagcatactcatctctcagccaaagttacctttatattgattggact

SEQ ID NO: 159229 - DNA, 120 bp, Artificial Sequence
  ENSG00000106804_12 (sequence is synthesized)
gataaccataaggctttgctagtgggagaacatctgaatattattgttacccccaaaagcccatatattgacaaaataactcactataattacttgattttatccaagggcaaaattatc

SEQ ID NO: 159230 - DNA, 120 bp, Artificial Sequence
  ENSG00000106804_13 (sequence is synthesized)
cactttggcacgagggagaaattttcagatgcatcttatcaaagtataaacattccagtaacacagaacatggttccttcatcccgacttctggtctattacatcgtcacaggagaacag

SEQ ID NO: 159231 - DNA, 120 bp, Artificial Sequence
  ENSG00000106804_14 (sequence is synthesized)
acagcagaattagtgtctgattcagtctggttaaatattgaagaaaaatgtggcaaccagctccaggttcatctgtctcctgatgcagatgcatattctccaggccaaactgtgtctctt

SEQ ID NO: 159232 - DNA, 120 bp, Artificial Sequence
  ENSG00000106804_15 (sequence is synthesized)
aatatggcaactggaatggattcctgggtggcattagcagcagtggacagtgctgtgtatggagtccaaagaggagccaaaaagcccttggaaagagtatttcaattcttagagaagagt

SEQ ID NO: 159233 - DNA, 120 bp, Artificial Sequence
  ENSG00000106804_16 (sequence is synthesized)
gatctgggctgtggggcaggtggtggcctcaacaatgccaatgtgttccacctagctggacttaccttcctcactaatgcaaatgcagatgactcccaagaaaatgatgaaccttgtaaa

SEQ ID NO: 159234 - DNA, 120 bp, Artificial Sequence
  ENSG00000106804_17 (sequence is synthesized)
gaaattctcaggccaagaagaacgctgcaaaagaagatagaagaaatagctgctaaatataaacattcagtagtgaagaaatgttgttacgatggagcctgcgttaataatgatgaaacc

SEQ ID NO: 159235 - DNA, 120 bp, Artificial Sequence
  ENSG00000106804_18 (sequence is synthesized)
tgtgagcagcgagctgcacggattagtttagggccaagatgcatcaaagctttcactgaatgttgtgtcgtcgcaagccagctccgtgctaatatctctcataaagacatgcaattggga

SEQ ID NO: 159236 - DNA, 120 bp, Artificial Sequence
  ENSG00000106804_19 (sequence is synthesized)
aggctacacatgaagaccctgttaccagtaagcaagccagaaattcggagttattttccagaaagctggttgtgggaagttcatcttgttcccagaagaaaacagttgcagtttgcccta

SEQ ID NO: 159237 - DNA, 120 bp, Artificial Sequence
  ENSG00000106804_20 (sequence is synthesized)
cctgattctctaaccacctgggaaattcaaggcgttggcatttcaaacactggtatatgtgttgctgatactgtcaaggcaaaggtgttcaaagatgtcttcctggaaatgaatatacca

SEQ ID NO: 159238 - DNA, 120 bp, Artificial Sequence
  ENSG00000106804_21 (sequence is synthesized)
tattctgttgtacgaggagaacagatccaattgaaaggaactgtttacaactataggacttctgggatgcagttctgtgttaaaatgtctgctgtggagggaatctgcacttcggaaagc

SEQ ID NO: 159239 - DNA, 120 bp, Artificial Sequence
  ENSG00000106804_22 (sequence is synthesized)
cagtcacttggtgacattcactgtgcttcctctggaaattggccttcacaacatcaatttttcactggagacttggtttggaaaagaaatcttagtaaaaacattacgagtggtgccaga

SEQ ID NO: 159240 - DNA, 120 bp, Artificial Sequence
  ENSG00000106804_23 (sequence is synthesized)
aggtgtcaaaagggaaagctattctggtgttactttggatcctaggggtatttatggtaccattagcagacgaaaggagttcccatacaggatacccttagatttggtccccaaaacaga

SEQ ID NO: 159241 - DNA, 120 bp, Artificial Sequence
  ENSG00000106804_24 (sequence is synthesized)
aatcaaaaggattttgagtgtaaaaggactgcttgtaggtgagatcttgtctgcagttctaagtcaggaaggcatcaatatcctaacccacctccccaaagggagtgcagaggcggagct

SEQ ID NO: 159242 - DNA, 120 bp, Artificial Sequence
  ENSG00000106804_25 (sequence is synthesized)
gatgagcgttgtcccagtattctatgtttttcactacctggaaacaggaaatcattggaacatttttcattctgacccattaattgaaaagcagaaactgaagaaaaaattaaaagaagg

SEQ ID NO: 159243 - DNA, 120 bp, Artificial Sequence
  ENSG00000106804_26 (sequence is synthesized)
gatgttgagcattatgtcctacagaaatgctgactactcttacagtgtgtggaagggtggaagtgctagcacttggttaacagcttttgctttaagagtacttggacaagtaaataaata

SEQ ID NO: 159244 - DNA, 120 bp, Artificial Sequence
  ENSG00000106804_27 (sequence is synthesized)
cgtagagcagaaccaaaattcaatttgtaattctttattgtggctagttgagaattatcaattagataatggatctttcaaggaaaattcacagtatcaaccaataaaattacagggtac

SEQ ID NO: 159245 - DNA, 120 bp, Artificial Sequence
  ENSG00000106804_28 (sequence is synthesized)
cttgcctgttgaagcccgagagaacagcttatatcttacagcctttactgtgattggaattagaaaggctttcgatatatgccccctggtgaaaatcgacacagctctaattaaagctga

SEQ ID NO: 159246 - DNA, 120 bp, Artificial Sequence
  ENSG00000106804_29 (sequence is synthesized)
caactttctgcttgaaaatacactgccagcccagagcacctttacattggccatttctgcgtatgctctttccctgggagataaaactcacccacagtttcgttcaattgtttcagcttt

SEQ ID NO: 159247 - DNA, 120 bp, Artificial Sequence
  ENSG00000106804_30 (sequence is synthesized)
gaagagagaagctttggttaaaggtaatccacccatttatcgtttttggaaagacaatcttcagcataaagacagctctgtacctaacactggtacggcacgtatggtagaaacaactgc

SEQ ID NO: 159248 - DNA, 120 bp, Artificial Sequence
  ENSG00000106804_31 (sequence is synthesized)
ctatgctttactcaccagtctgaacttgaaagatataaattatgttaacccagtcatcaaatggctatcagaagagcagaggtatggaggtggcttttattcaacccaggacacaatcaa

SEQ ID NO: 159249 - DNA, 120 bp, Artificial Sequence
  ENSG00000106804_32 (sequence is synthesized)
tgccattgagggcctgacggaatattcactcctggttaaacaactccgcttgagtatggacatcgatgtttcttacaagcataaaggtgccttacataattataaaatgacagacaagaa

SEQ ID NO: 159250 - DNA, 120 bp, Artificial Sequence
  ENSG00000106804_33 (sequence is synthesized)
tttccttgggaggccagtagaggtgcttctcaatgatgacctcattgtcagtacaggatttggcagtggcttggctacagtacatgtaacaactgtagttcacaaaaccagtacctctga

SEQ ID NO: 159251 - DNA, 120 bp, Artificial Sequence
  ENSG00000106804_34 (sequence is synthesized)
ggaagtttgcagcttttatttgaaaatcgatactcaggatattgaagcatcccactacagaggctacggaaactctgattacaaacgcatagtagcatgtgccagctacaagcccagcag

SEQ ID NO: 159252 - DNA, 120 bp, Artificial Sequence
  ENSG00000106804_35 (sequence is synthesized)
ggaagaatcatcatctggatcctctcatgcggtgatggacatctccttgcctactggaatcagtgcaaatgaagaagacttaaaagcccttgtggaaggggtggatcaactattcactga

SEQ ID NO: 159253 - DNA, 120 bp, Artificial Sequence
  ENSG00000106804_36 (sequence is synthesized)
ttaccaaatcaaagatggacatgttattctgcaactgaattcgattccctccagtgatttcctttgtgtacgattccggatatttgaactctttgaagttgggtttctcagtcctgccac

SEQ ID NO: 159254 - DNA, 120 bp, Artificial Sequence
  ENSG00000106804_37 (sequence is synthesized)
tttcacagtgtacgaataccacagaccagataaacagtgtaccatgttttatagcacttccaatatcaaaattcagaaagtctgtgaaggagccgcgtgcaagtgtgtagaagctgattg

SEQ ID NO: 159255 - DNA, 120 bp, Artificial Sequence
  ENSG00000106804_38 (sequence is synthesized)
tgggcaaatgcaggaagaattggatctgacaatctctgcagagacaagaaaacaaacagcatgtaaaccagagattgcatatgcttataaagttagcatcacatccatcactgtagaaaa

SEQ ID NO: 159256 - DNA, 120 bp, Artificial Sequence
  ENSG00000106804_39 (sequence is synthesized)
tgtttttgtcaagtacaaggcaacccttctggatatctacaaaactggggaagctgttgctgagaaagactctgagattaccttcattaaaaaggtaacctgtactaacgctgagctggt

SEQ ID NO: 159257 - DNA, 120 bp, Artificial Sequence
  ENSG00000106804_40 (sequence is synthesized)
aaaaggaagacagtacttaattatgggtaaagaagccctccagataaaatacaatttcagtttcaggtacatctaccctttagattccttgacctggattgaatactggcctagagacac

SEQ ID NO: 159258 - DNA, 120 bp, Artificial Sequence
  ENSG00000106804_41 (sequence is synthesized)
aacatgttcatcgtgtcaagcatttttagctaatttagatgaatttgccgaagatatctttttaaatggatgctaaaattcctgaagttcagctgcatacagtttgcacttatggactcc

SEQ ID NO: 159259 - DNA, 120 bp, Artificial Sequence
  ENSG00000106804_42 (sequence is synthesized)
tgttgttgaagttcgtttttttgttttcttctttttttaaacattcatagctggtcttatttgtaaagctcactttacttagaattagtggcacttgcttttattagagaatgatttcaa

SEQ ID NO: 159260 - DNA, 120 bp, Artificial Sequence
  ENSG00000106804_43 (sequence is synthesized)
atgctgtaactttctgaaataacatggccttggagggcatgaagacagatactcctccaaggttattggacaccggaaacaataaattggaacacctcctcaaacctaccactcaggaat

SEQ ID NO: 159261 - DNA, 120 bp, Artificial Sequence
  ENSG00000106804_44 (sequence is synthesized)
gtttgctggggccgaaagaacagtccattgaaagggagtattacaaaaacatggcctttgcttgaaagaaaataccaaggaacaggaaactgatcattaaagcctgagtttgctttcaaa

SEQ ID NO: 159262 - DNA, 82 bp, Artificial Sequence
  ENSG00000106804_45 (sequence is synthesized)
aatgaatataccatattctgttgtacgaggagaacagatccaattgaaaggaactgtttacaactataggacttctgggatg

SEQ ID NO: 159263 - DNA, 120 bp, Artificial Sequence
  ENSG00000106804_46 (sequence is synthesized)
cagccaacttgacagcattttaaagtgtcatgcatatcactatactgccatattttatttaatctttaaattttcagtgcatttccatcatatcaaaataagaaacaagtacatctgtga

SEQ ID NO: 159264 - DNA, 120 bp, Artificial Sequence
  ENSG00000106804_47 (sequence is synthesized)
tattttgggcttagttcctgttaattacctttcctcctgagtgtgggttacactttcctatttctttttatctagtaattttggattgaatcttctactttattaataaaaatattataa

SEQ ID NO: 159265 - DNA, 120 bp, Artificial Sequence
  ENSG00000106804_48 (sequence is synthesized)
agtacaaggcaacccttctggatatctacaaaactggtgagaattcattcgttcattcgttccttcattcagcaactatttagtactgactatgtgccaggcattatattaaacacagaa

SEQ ID NO: 159266 - DNA, 120 bp, Artificial Sequence
  ENSG00000106804_49 (sequence is synthesized)
gatacaactcaaataagacagagctcttgcctttttaaagcttatattctacttggggagaaacattttttaaagatgttcgtataaatatttctcattgaattcatttttctaaaactt

SEQ ID NO: 159267 - DNA, 120 bp, Artificial Sequence
  ENSG00000106804_50 (sequence is synthesized)
cagcaaaatgtttttttcaattgcgtaattgtccaatttctttttctttacaacttttattttaggttcaggggatacgtgtgcaaatttgctacatgggtaaattgcatgttttggggg

SEQ ID NO: 159268 - DNA, 120 bp, Artificial Sequence
  ENSG00000106804_51 (sequence is synthesized)
aaatgatgcaaacagcaatgcaaaacacaatgttaagggcggaagtacgctgagaggcctataaagatgaatgatgacgcaggaattggaagaagtcgtgtttgtcagctattaccaaaa

SEQ ID NO: 159269 - DNA, 120 bp, Artificial Sequence
  ENSG00000106804_52 (sequence is synthesized)
agacctgttggaccatgtgatgttcaagacccttctacttctataattctatacaaataattagaaaataacatcctgggcttaatcgtggactcggttatctactttacttttgacact

SEQ ID NO: 159270 - DNA, 120 bp, Artificial Sequence
  ENSG00000106804_53 (sequence is synthesized)
tgggctcaagcactcctactgcctcagccttccaaagtgctaggatcacaggcatgagccaccacacctgtcctctatttattcctttattcaataaatatgcattgagtatcctatgta

SEQ ID NO: 159271 - DNA, 120 bp, Artificial Sequence
  ENSG00000106809_0 (sequence is synthesized)
gctaatgcacagacatgaacatctattgaggaaaaccacaaaaaacttcaaaacagctacaacggtatcctaagaatatttcaattaaatattagtatgtctgctgaaggcacttaatta

SEQ ID NO: 159272 - DNA, 120 bp, Artificial Sequence
  ENSG00000106809_1 (sequence is synthesized)
ttaagaaacttaaaattatcaatctttcttgaatttctgatagagaagtaaaactattttccaaaactatttttcagaatgttcactgatacataaaaactgctagcatctaattaaaga

SEQ ID NO: 159273 - DNA, 120 bp, Artificial Sequence
  ENSG00000106809_2 (sequence is synthesized)
tcactaagggttaaatactgttctctggcccttactgcgcacaccctgccaaaacatcctctaagcttttaaatattgcttcgatggtctgaatttttatttccagggaaaaagagagtt

SEQ ID NO: 159274 - DNA, 120 bp, Artificial Sequence
  ENSG00000106809_3 (sequence is synthesized)
ttgtcccacagtcagcaggccactagtttattaacttccagtcaccttgatttttgctaaaatgaagactctgcagtctacacttctcctgttactgcttgtgcctctgataaagccagc

SEQ ID NO: 159275 - DNA, 120 bp, Artificial Sequence
  ENSG00000106809_4 (sequence is synthesized)
accaccaacccagcaggactcacgcattatctatgattatggaacagataattttgaagaatccatatttagccaagattatgaggataaatacctggatggaaaaaatattaaggaaaa

SEQ ID NO: 159276 - DNA, 120 bp, Artificial Sequence
  ENSG00000106809_5 (sequence is synthesized)
agaaactgtgataatacccaatgagaaaagtcttcaattacaaaaagatgaggcaataacaccattacctcccaagaaagaaaatgatgaaatgcccacgtgtctgctgtgtgtttgttt

SEQ ID NO: 159277 - DNA, 120 bp, Artificial Sequence
  ENSG00000106809_6 (sequence is synthesized)
aagtggctctgtatactgtgaagaagttgacattgatgctgtaccacccttaccaaaggaatcagcctatctttacgcacgattcaacaaaattaaaaagctgactgccaaagattttgc

SEQ ID NO: 159278 - DNA, 120 bp, Artificial Sequence
  ENSG00000106809_7 (sequence is synthesized)
agacatacctaacttaagaagactcgattttacaggaaatttgatagaagatatagaagatggtactttttcaaaactttctctgttagaagaactttcacttgctgaaaatcaactact

SEQ ID NO: 159279 - DNA, 120 bp, Artificial Sequence
  ENSG00000106809_8 (sequence is synthesized)
aaaacttccagttcttcctcccaagctcactttatttaatgcaaaatacaacaaaatcaagagtaggggaatcaaagcaaatgcattcaaaaaactgaataacctcaccttcctctactt

SEQ ID NO: 159280 - DNA, 120 bp, Artificial Sequence
  ENSG00000106809_9 (sequence is synthesized)
ggaccataatgccctggaatccgtgcctcttaatttaccagaaagtctacgtgtaattcatcttcagttcaacaacatagcttcaattacagatgacacattctgcaaggctaatgacac

SEQ ID NO: 159281 - DNA, 120 bp, Artificial Sequence
  ENSG00000106809_10 (sequence is synthesized)
cagttacatccgggaccgcattgaagagatacgcctggagggcaatccaatcgtcctgggaaagcatccaaacagttttatttgcttaaaaagattaccgatagggtcatacttttaacc

SEQ ID NO: 159282 - DNA, 120 bp, Artificial Sequence
  ENSG00000106809_11 (sequence is synthesized)
tctattggtacaacatataaatgaaagtacacctacactaatagtctgtctcaacaatgagtaaaggaacttaagtattggtttaatattaaccttgtatctcattttgaaggaatttaa

SEQ ID NO: 159283 - DNA, 120 bp, Artificial Sequence
  ENSG00000106809_12 (sequence is synthesized)
ttaaacagcattacaaaatcctagtttatactagactaccatttaaaaatcatgtttttatataaatgcccaaatttgagatgcattattcctattactaatgatgtaagtacgaggata

SEQ ID NO: 159284 - DNA, 120 bp, Artificial Sequence
  ENSG00000106809_13 (sequence is synthesized)
aatccaagaaactttcaactctttgcctttcctggcctttactggatcccaaaagcatttaaggtacatgttccaaaaactttgaaaagctaaatgtttcccatgatcgctcattcttct

SEQ ID NO: 159285 - DNA, 120 bp, Artificial Sequence
  ENSG00000106809_14 (sequence is synthesized)
tttatgattcatacgttattccttataaagtaagaactttgttttcctcctatcaaggcagctattttattaaatttttcacttagtctgagaaatagcagatagtctcatatttaggaa

SEQ ID NO: 159286 - DNA, 120 bp, Artificial Sequence
  ENSG00000106809_15 (sequence is synthesized)
aactttccaaataaaataaatgttattctctgataaagagctaatacagaaatgttcaagttattttactttctggtaatgtcttcagtaaaatattttctttatctaaatattaacatt

SEQ ID NO: 159287 - DNA, 120 bp, Artificial Sequence
  ENSG00000106809_16 (sequence is synthesized)
ctaagtctaccaaaaaaagttttaaactcaagcaggccaaaaccaatatgcttataagaaataatgaaaagttcatccatttctgataaagttctctatggcaaagtctttcaaatacga

SEQ ID NO: 159288 - DNA, 120 bp, Artificial Sequence
  ENSG00000106809_17 (sequence is synthesized)
gataactgcaaaatattttccttttatactacagaaatgagaatctcatcaataaattagttcaagcataagatgaaaacagaatattctgtggtgccagtgcacactaccttcccaccc

SEQ ID NO: 159289 - DNA, 120 bp, Artificial Sequence
  ENSG00000106809_18 (sequence is synthesized)
atacacatccatgttcactgtaacaaactgaatattcacaataaagcttctgagtaacactttctgattactcatgataaactgacatggctaactgcaagaattaaatcttctatctga

SEQ ID NO: 159290 - DNA, 120 bp, Artificial Sequence
  ENSG00000106809_19 (sequence is synthesized)
gagtaataatttatgatgactcagtggtgccagagtaaagtttctaaaataacattcctctcacttgtaccccactaaaagtattagactacacattacattgaagttaaacacaaaatt

SEQ ID NO: 159291 - DNA, 120 bp, Artificial Sequence
  ENSG00000106809_20 (sequence is synthesized)
atcagtgttttagaaacatgagtccggactgtgtaagtaaaagtacaaacattatttccaccataaagtatgtattgaaatcaagttgtctctgtgtacagaatacatacttattcccat

SEQ ID NO: 159292 - DNA, 120 bp, Artificial Sequence
  ENSG00000106809_21 (sequence is synthesized)
ttttaagcatttgcttctgttttccctacctagaatgtcagatgtttttcagttatctccccatttgtcaaagttgacctcaagataacatttttcattaaagcatctgagatctaagaa

SEQ ID NO: 159293 - DNA, 120 bp, Artificial Sequence
  ENSG00000106809_22 (sequence is synthesized)
cacaattattattctaacaatgattattagctcattcacttattttgataactaatgatcacagctattatactactttctcgttattttgtgtgcatgcctcatttccctgacttaaac

SEQ ID NO: 159294 - DNA, 120 bp, Artificial Sequence
  ENSG00000106809_23 (sequence is synthesized)
ctcactgagagcgcaaaatgcagctttatactttttactttcaattgcctagcacaatagtgagtacatttgaattgaatatataataaatattgcaaaataaaatccatctaaatagaa

SEQ ID NO: 159295 - DNA, 120 bp, Artificial Sequence
  ENSG00000106809_24 (sequence is synthesized)
atttttatgataaaacttatggagcaaaacaccatcaaataactctcaaattaagaaaaaattcaaaagtcagtagttttagataagataatgataagggagaaagaacattggtaaaag

SEQ ID NO: 159296 - DNA, 120 bp, Artificial Sequence
  ENSG00000106809_25 (sequence is synthesized)
gtatgaattccagaattaaagaaataatttggggatttctagataagaggatatatatgaacatgcataccttacaccttcatatacacaaccttaaatcacaaataaaacaaaataaac

SEQ ID NO: 159297 - DNA, 120 bp, Artificial Sequence
  ENSG00000106809_26 (sequence is synthesized)
aatacaaattataccaccaagattcagaagatatcagacgaaataattagagaaagtaaaaatatgctgtctccattatattcataatgtttcattcttgacactaataattagaggctt

SEQ ID NO: 159298 - DNA, 120 bp, Artificial Sequence
  ENSG00000106809_27 (sequence is synthesized)
taaatttttaaatgatttactttttactaacattgctgaaaaaaactaaagacatacataaatggaaagatgtcttgtgtttatggatggtaagatttaatgttgttaagacaacaatac

SEQ ID NO: 159299 - DNA, 120 bp, Artificial Sequence
  ENSG00000106809_28 (sequence is synthesized)
tatccaatatgatatgcagactgaacacagttgccatcaaaatctcaatgatgctttcacacaaataaaatggaacttcaagagacccccaaataaagagaagaatcttgaaaataagaa

SEQ ID NO: 159300 - DNA, 120 bp, Artificial Sequence
  ENSG00000106809_29 (sequence is synthesized)
gcatttcaccctagagaaagaatgctggcaaagatctctaccacatggaaactgttcttaaagctgctgggccctgaaattttactcagcagtttgaaatcaagacatagcttttctcat

SEQ ID NO: 159301 - DNA, 120 bp, Artificial Sequence
  ENSG00000106809_30 (sequence is synthesized)
tcaccctcccacttggggctaatgcacagacatgaacatctattgaggaaaaccacaaaaaacttcaaaacagctacaacgactctgcagtctacacttctcctgttactgcttgtgcct

SEQ ID NO: 159302 - DNA, 120 bp, Artificial Sequence
  ENSG00000106809_31 (sequence is synthesized)
aggggaatcaaagcaaatgcattcaaagtaagtattttatagtaaaactaagcatagtatgagtgatgatatgatagataaaagagaaactttggtctagaattgtattttgattacact

SEQ ID NO: 159303 - DNA, 120 bp, Artificial Sequence
  ENSG00000106809_32 (sequence is synthesized)
taaaaactattttgatttaataaatgaagacattatttacataataaataaccatcctattaggctcattcagcctagcttatacccatatctcagttaaaatacataacctttatttta

SEQ ID NO: 159304 - DNA, 120 bp, Artificial Sequence
  ENSG00000106819_0 (sequence is synthesized)
agtactaacatggactaatctgtgggagcagtttattccagtatcacccagggtgcagccacaccaggactgtgttgaagggtgttttttttcttttaaatgtaatacctcctcatcttt

SEQ ID NO: 159305 - DNA, 120 bp, Artificial Sequence
  ENSG00000106819_1 (sequence is synthesized)
tcttcttacacagtgtctgagaacatttacattatagataagtagtacatggtggataacttctacttttaggaggactactctcttctgacagtcctagactggtcttctacactaaga

SEQ ID NO: 159306 - DNA, 120 bp, Artificial Sequence
  ENSG00000106819_2 (sequence is synthesized)
caccatgaaggagtatgtgctcctattattcctggctttgtgctctgccaaacccttctttagcccttcacacatcgcactgaagaatatgatgctgaaggatatggaagacacagatga

SEQ ID NO: 159307 - DNA, 120 bp, Artificial Sequence
  ENSG00000106819_3 (sequence is synthesized)
tgatgatgatgatgatgatgatgatgaggacaactctctttttccaacaagagagccaagaagccatttttttccatttgatctgtttccaatgtgtccatttggatgtcagtgctattc

SEQ ID NO: 159308 - DNA, 120 bp, Artificial Sequence
  ENSG00000106819_4 (sequence is synthesized)
tcagtgctattcacgagttgtacattgctcagatttaggtttgacctcagtcccaaccaacattccatttgatactcgaatgcttgatcttcaaaacaataaaattaaggaaatcaaaga

SEQ ID NO: 159309 - DNA, 120 bp, Artificial Sequence
  ENSG00000106819_5 (sequence is synthesized)
aaatgattttaaaggactcacttcactttatggtctgatcctgaacaacaacaagctaacgaagattcacccaaaagcctttctaaccacaaagaagttgcgaaggctgtatctgtccca

SEQ ID NO: 159310 - DNA, 120 bp, Artificial Sequence
  ENSG00000106819_6 (sequence is synthesized)
caatcaactaagtgaaataccacttaatcttcccaaatcattagcagaactcagaattcatgaaaataaagttaagaaaatacaaaaggacacattcaaaggaatgaatgctttacacgt

SEQ ID NO: 159311 - DNA, 120 bp, Artificial Sequence
  ENSG00000106819_7 (sequence is synthesized)
tttggaaatgagtgcaaaccctcttgataataatgggatagagccaggggcatttgaaggggtgacggtgttccatatcagaattgcagaagcaaaactgacctcagttcctaaaggctt

SEQ ID NO: 159312 - DNA, 120 bp, Artificial Sequence
  ENSG00000106819_8 (sequence is synthesized)
accaccaactttattggagcttcacttagattataataaaatttcaacagtggaacttgaggattttaaacgatacaaagaactacaaaggctgggcctaggaaacaacaaaatcacaga

SEQ ID NO: 159313 - DNA, 120 bp, Artificial Sequence
  ENSG00000106819_9 (sequence is synthesized)
tatcgaaaatgggagtcttgctaacataccacgtgtgagagaaatacatttggaaaacaataaactaaaaaaaatcccttcaggattaccagagttgaaatacctccagataatcttcct

SEQ ID NO: 159314 - DNA, 120 bp, Artificial Sequence
  ENSG00000106819_10 (sequence is synthesized)
ttatacagtgcaataagtttattcaacaacccggtgaaatactgggaaatgcaacctgcaacatttcgttgtgttttgagcagaatgagcgttcagcttgggaactttggaatgtaataa

SEQ ID NO: 159315 - DNA, 120 bp, Artificial Sequence
  ENSG00000106819_11 (sequence is synthesized)
ttagtaattggtaatgtccatttaatataagattcaaaaatccctacatttggaatacttgaactctattaataatggtagtattatatatacaagcaaatatctattctcaagtggtaa

SEQ ID NO: 159316 - DNA, 120 bp, Artificial Sequence
  ENSG00000106819_12 (sequence is synthesized)
gtccactgacttattttatgacaagaaatttcaacggaattttgccaaactattgatacataagggttgagagaaacaagcatctattgcagtttctttttgcgtacaaatgatcttaca

SEQ ID NO: 159317 - DNA, 120 bp, Artificial Sequence
  ENSG00000106819_13 (sequence is synthesized)
taaatctcatgcttgaccattcctttcttcataacaaaaaagtaagatattcggtatttaacactttgttatcaagcatattttaaaaagaactgtactgtaaatggaatgcttgactta

SEQ ID NO: 159318 - DNA, 120 bp, Artificial Sequence
  ENSG00000106819_14 (sequence is synthesized)
gcaaaatttgtgctctttcatttgctgttagaaaaacagaattaacaaagacagtaatgtgaagagtgcattacactattcttattctttagtaacttgggtagtactgtaatattttta

SEQ ID NO: 159319 - DNA, 120 bp, Artificial Sequence
  ENSG00000106819_15 (sequence is synthesized)
atcatcttaaagtatgatttgatataatcttattgaaattaccttatcatgtcttagagcccgtctttatgtttaaaactaatttcttaaaataaagccttcagtaaatgttcattacca

SEQ ID NO: 159320 - DNA, 120 bp, Artificial Sequence
  ENSG00000106819_16 (sequence is synthesized)
acttgataaatgctactcataagagctggtttggggctatagcatatgcttttttttttttaattattacctgatttaaaaatctctgtaaaaacgtgtagtgtttcataaaatctgtaa

SEQ ID NO: 159321 - DNA, 120 bp, Artificial Sequence
  ENSG00000106819_17 (sequence is synthesized)
ctcgcattttaatgatccgctattataagcttttaatagcatgaaaattgttaggctatataacattgccacttcaactctaaggaatatttttgagatatccctttggaagaccttgct

SEQ ID NO: 159322 - DNA, 120 bp, Artificial Sequence
  ENSG00000106819_18 (sequence is synthesized)
tggaagagcctggacactaacaattctacaccaaattgtctcttcaaatacgtatggactggataactctgagaaacacatctagtataactgaataagcagagcatcaaattaaacaga

SEQ ID NO: 159323 - DNA, 120 bp, Artificial Sequence
  ENSG00000106819_19 (sequence is synthesized)
cagaaaccgaaagctctatataaatgctcagagttctttatgtatttcttattggcattcaacatatgtaaaatcagaaaacagggaaattttcattaaaaatattggtttgaaataaaa

SEQ ID NO: 159324 - DNA, 120 bp, Artificial Sequence
  ENSG00000106823_0 (sequence is synthesized)
caaatacttttcaacattcccttctgtcctttctttgtttttaaagaaagctctgattttgtttcattttcagctggagacttaaatgacaccaagcaaagcctacttagtttagatctc

SEQ ID NO: 159325 - DNA, 120 bp, Artificial Sequence
  ENSG00000106823_1 (sequence is synthesized)
cagaaattggctggtggaaaaaaatcaaacatgaagattgcagttttgttttgtttttttctgcttatcatttttcaaactgactttggaaaaaatgaagaaattcctaggaagcaaagg

SEQ ID NO: 159326 - DNA, 120 bp, Artificial Sequence
  ENSG00000106823_2 (sequence is synthesized)
aggaagatctaccacagaaggttgaggaaaagttcaacctcacacaagcacagatcaaacagacagcttggaattcagcaaacaacagtttttacaccagtagcaagacttcctattgtt

SEQ ID NO: 159327 - DNA, 120 bp, Artificial Sequence
  ENSG00000106823_3 (sequence is synthesized)
aactttgattatagcatggaggaaaagtttgaatccttttcaagttttcctggagtagaatcaagttataatgtgttaccaggaaagaagggacactgtttggtaaagggcataaccatg

SEQ ID NO: 159328 - DNA, 120 bp, Artificial Sequence
  ENSG00000106823_4 (sequence is synthesized)
tacaacaaagctgtgtggtcgcctgagccctgcactacctgcctctgctcagatggaagagttctttgtgatgaaaccatgtgccatccccagaggtgcccccaaacagttatacctgaa

SEQ ID NO: 159329 - DNA, 120 bp, Artificial Sequence
  ENSG00000106823_5 (sequence is synthesized)
ggggaatgctgcccggtctgctccgctactgtctcctattctctactcagtggtatagcattaaatgatagaaatgaattttctggtgattcttcagaacaaagagaacctaccaattta

SEQ ID NO: 159330 - DNA, 120 bp, Artificial Sequence
  ENSG00000106823_6 (sequence is synthesized)
cttcataagcaactgccacctcctcaggtgggaatggaccgaatagtaagaaaagaagcacttcaatctgaggaggatgaagaagtgaaagaagaagatacagagcaaaagagagagacc

SEQ ID NO: 159331 - DNA, 120 bp, Artificial Sequence
  ENSG00000106823_7 (sequence is synthesized)
cctgaatctagaaatcaggggcaactttacagtgagggggacagcagaggaggagacagaaagcagaggcctggagaggagaggaggctggcacaccagcaacaacgccaaggaagggag

SEQ ID NO: 159332 - DNA, 120 bp, Artificial Sequence
  ENSG00000106823_8 (sequence is synthesized)
gaggaggaggatgaggaggaggagggtgaggagggtgaggaggatgaggaggacgaggaggacccggtaagaggagatatgttccgaatgccctctcgatccccgcttcctgctcctccc

SEQ ID NO: 159333 - DNA, 120 bp, Artificial Sequence
  ENSG00000106823_9 (sequence is synthesized)
agaggcacactgcgcctgccaagcgggtgctctctgtcctacaggaccatcagctgcatcaacgccatgcttacccagataccaccgctgacagcaccacagataacaagtctggagctc

SEQ ID NO: 159334 - DNA, 120 bp, Artificial Sequence
  ENSG00000106823_10 (sequence is synthesized)
actggcaattccatcgcctccatcccagatgaagcatttaatggattaccaaatttggaaaggcttgatctgagtaaaaataatatcacttcttcaggcataggtccaaaagcattcaag

SEQ ID NO: 159335 - DNA, 120 bp, Artificial Sequence
  ENSG00000106823_11 (sequence is synthesized)
cttctgaagaagttaatgcgtttgaatatggatggaaataatttgatacagattccttcacaattgccatctacattagaagaacttaaagtcaatgagaacaatcttcaggctatcgat

SEQ ID NO: 159336 - DNA, 120 bp, Artificial Sequence
  ENSG00000106823_12 (sequence is synthesized)
gaagaaagtttatcagacttaaatcagttggtcaccttagaattggaaggaaacaatctcagtgaagccaatgtcaatcctttagctttcaaacctttgaagagcctagcctacttgcgt

SEQ ID NO: 159337 - DNA, 120 bp, Artificial Sequence
  ENSG00000106823_13 (sequence is synthesized)
aatttagaattataccgcagggtcttcctggttctattgaggaattatacctagaaaataaccaaattgaagaaataactgaaatttgtttcaatcataccagaaagatcaatgtcattg

SEQ ID NO: 159338 - DNA, 120 bp, Artificial Sequence
  ENSG00000106823_14 (sequence is synthesized)
tactacgttataacaaaattgaagaaaataggattgctcctttagcctggataaatcaagaaaatctagaatccattgatctctcctacaacaagctctatcacgtcccgtcctatctac

SEQ ID NO: 159339 - DNA, 120 bp, Artificial Sequence
  ENSG00000106823_15 (sequence is synthesized)
ccaagtccttgctgcacctagtactccttgggaaccagattgaacggatccctggctatgtgtttggccacatggaaccaggcctggaatacttgtacctgtcatttaacaaacttgctg

SEQ ID NO: 159340 - DNA, 120 bp, Artificial Sequence
  ENSG00000106823_16 (sequence is synthesized)
atgatggcatggaccgtgtctccttctatggggcatatcattctctgagagaattatttctggatcacaatgacttaaaatctataccacctgggatacaagaaatgaaagcactacatt

SEQ ID NO: 159341 - DNA, 120 bp, Artificial Sequence
  ENSG00000106823_17 (sequence is synthesized)
ttctgaggctgaacaacaacaagatacggaacattcttccagaagaaatttgcaatgctgaagaggatgatgactcaaatctggaacatcttcatcttgaaaacaattatattaaaatta

SEQ ID NO: 159342 - DNA, 120 bp, Artificial Sequence
  ENSG00000106823_18 (sequence is synthesized)
gagaaataccatcttacacattttcatgcataagatcatactcaagtatcgttcttaaaccacaaaacatcaagtaattccaagttttcctttgctgtttataaactttactcatgtatt

SEQ ID NO: 159343 - DNA, 120 bp, Artificial Sequence
  ENSG00000106823_19 (sequence is synthesized)
tgtagtagctgcatttgtcattaataagagagacataatcctcctgttatactcagtatcattatatgctagtcaacctgattcactaacacacagatgaacaaccaaaatatacctaaa

SEQ ID NO: 159344 - DNA, 120 bp, Artificial Sequence
  ENSG00000106823_20 (sequence is synthesized)
aggtatagtctctaggagttttattaatagtaaaggtaaaatctctcagtttcctacctctagaaagaggccatctcactagaataggatattatgcatactgagctagaccagaagagt

SEQ ID NO: 159345 - DNA, 120 bp, Artificial Sequence
  ENSG00000106823_21 (sequence is synthesized)
ctggaacaaaataaacacagcctttataatcaacttgaatactggtgttagctgagaactctgtaagtccctttaaaaattatgtatcttttggttcaagattaagaagcataatgacaa

SEQ ID NO: 159346 - DNA, 120 bp, Artificial Sequence
  ENSG00000106823_22 (sequence is synthesized)
caaaaaaagcaggcagaatttatgaataagtgttgtttattattaaaacaataatttgttaatttcttataaggtcctgtgctataattactggtataaatataactgaatattggggta

SEQ ID NO: 159347 - DNA, 120 bp, Artificial Sequence
  ENSG00000106823_23 (sequence is synthesized)
gctttcatttcttccattaattacatgtgtaaaattaaaacactactgtaatgttaatttcctggttttgaaaatcatattatggttatgtacattgttaacattaaggaaagctggcag

SEQ ID NO: 159348 - DNA, 120 bp, Artificial Sequence
  ENSG00000106823_24 (sequence is synthesized)
aagggtgtgcataaattctatactctttttgaaacttttctataattctaaaattattttttaaagttaaacagtatattaagattaccttcactattcctcactcaagattaagacatt

SEQ ID NO: 159349 - DNA, 120 bp, Artificial Sequence
  ENSG00000106823_25 (sequence is synthesized)
ttttgaaaagcagtagagtttgcttaaaatacaaattaattattcttgactataaccttgtaaaggtaaatctaatgtataaatttttgaaaaattttgcaccactggtcatagcatcta

SEQ ID NO: 159350 - DNA, 120 bp, Artificial Sequence
  ENSG00000106823_26 (sequence is synthesized)
tctcctttgccttaatttactgaaatacatcattttattcggttcaattgaaataaagctatgtctttactatgtattggccctaccaaaatcatatattaaaattttctaacataatga

SEQ ID NO: 159351 - DNA, 120 bp, Artificial Sequence
  ENSG00000106823_27 (sequence is synthesized)
tacgctgtgtttcagatgctgttctagagacagtgacaaacagatcagatgtggcctttcctctctggtagaggcaataagcaggaaatcaaacagacaagtaagcaggcaagtgctgtg

SEQ ID NO: 159352 - DNA, 120 bp, Artificial Sequence
  ENSG00000106823_28 (sequence is synthesized)
cagtcagaaaaatgggtgacaatgcgacgagcacactggggcctgagggccgccaggagactacggccaccctcaacggcctggattaacagcagatccagaccggtgcctgtggagcag

SEQ ID NO: 159353 - DNA, 120 bp, Artificial Sequence
  ENSG00000106823_29 (sequence is synthesized)
acgcactgtgggcttgctgtgtatgtcgcttctcaactctgctctggctgcagaatcccaagaaaaaaatgaaaatcagaatgactgattgaagcttttttcttaagtggaagttgtact

SEQ ID NO: 159354 - DNA, 120 bp, Artificial Sequence
  ENSG00000106823_30 (sequence is synthesized)
tatttctactgattttataatttttaaaatatggctagcatggaacttgttcagccctgaaatttcatgatgttctagatgggaagttttaattccataaaaaagtgataaatgtcctta

SEQ ID NO: 159355 - DNA, 120 bp, Artificial Sequence
  ENSG00000106823_31 (sequence is synthesized)
tagcaaacactcttcacaatataatgtactaaaaaacagatgttctgtttggcttcaaaaattacactataattactaacacacatatacactaaagaagtcctggtctagccatgatct

SEQ ID NO: 159356 - DNA, 120 bp, Artificial Sequence
  ENSG00000106823_32 (sequence is synthesized)
ggggaatgctgcccggtctgctccgctactggtacagagatttagctaagcaaaatatcagtgtgtgattaatctttaacttccatttgtttttgttactaattttagattaaaattatg

SEQ ID NO: 159357 - DNA, 120 bp, Artificial Sequence
  ENSG00000106823_33 (sequence is synthesized)
ttaacatagaaaatatctgggaaaatgtatggtaggggatataaataatagactgtggctttatagttctagctctatcagattcagtaaacttggatgagattacattccacatttgac

SEQ ID NO: 159358 - DNA, 120 bp, Artificial Sequence
  ENSG00000106823_34 (sequence is synthesized)
tctcagctttagagatatggtaacagaatttctacaacagatcctgaattcttattgcattaagggctctgctttggtctatatgtgcattatcccacttaatccagtgcaacgtgcctt

SEQ ID NO: 159359 - DNA, 120 bp, Artificial Sequence
  ENSG00000106823_35 (sequence is synthesized)
tatcatcttgaagccagggtaaacaaaggaagagtgatttgcatctaaagagaacaaagccccaaccctctggctatacccaaccactcaaaggcagcacaggaacccacatcactgctt

SEQ ID NO: 159360 - DNA, 120 bp, Artificial Sequence
  ENSG00000106823_36 (sequence is synthesized)
ggataatcccaggaaaatgcagaaaaagtgtagcctgaagcatgattttctcatgtggcacttctgtgtgcaggagatcacagcgcgggttttgttggctgctcatggaccccttctcca

SEQ ID NO: 159361 - DNA, 120 bp, Artificial Sequence
  ENSG00000106823_37 (sequence is synthesized)
atgaggctcatacctgactgaatgaaggacccttgggagggaggcccagtctcctctgagaaaagcctaaccaacaccttatgaaaataagcaaataaatacttgttaaataattggctg

SEQ ID NO: 159362 - DNA, 120 bp, Artificial Sequence
  ENSG00000106823_38 (sequence is synthesized)
ggaagggatagggacatcttctcttgtctataaccaaggtagattgctcccatgcacacagatgatcacagggtaggtgtctacaaaagtctccttgccaggaaaaacttttgactattt

SEQ ID NO: 159363 - DNA, 120 bp, Artificial Sequence
  ENSG00000106823_39 (sequence is synthesized)
agaaattgtgttttgcgttatactaccaaatatttcactaatatttaaaaagagttaggaaaaaagtgttcaatgaaatggattccttggagtgaaataaatacaaggtttacaaagtaa

SEQ ID NO: 159364 - DNA, 120 bp, Artificial Sequence
  ENSG00000106829_0 (sequence is synthesized)
ggagagctcgccagagcgctcgcatggcgggccggtgattgtagtcaatctggccgtattctcaggcagggtcgcccggggcggactacatctcccgggatgctgcgcggccgccccgcg

SEQ ID NO: 159365 - DNA, 120 bp, Artificial Sequence
  ENSG00000106829_1 (sequence is synthesized)
gaagattgtgaatatgtatcagaatgttaatgattagctgctgctaaatttggtcaaagaagtcacctacacagagcgtgttgttagagctgtgctgagcgggtgtttgggttgttggct

SEQ ID NO: 159366 - DNA, 120 bp, Artificial Sequence
  ENSG00000106829_2 (sequence is synthesized)
gctttcttccccctttctcacacacttgtatattattttgaggtggtgttcgcagagtttgaaaggagagagaattaaaaaaaaaagccgcaagcgtttcactcttttatttttataatc

SEQ ID NO: 159367 - DNA, 120 bp, Artificial Sequence
  ENSG00000106829_3 (sequence is synthesized)
cccttcaatttggggttaaaaaaaagacaagaaaacaggaaggaagagaaataaggaaatgagatgtggtaaaagaagctaaaaggtgccttttaaaagatcgttgctgtgaagtgaaaa

SEQ ID NO: 159368 - DNA, 120 bp, Artificial Sequence
  ENSG00000106829_4 (sequence is synthesized)
aaatctccagagaaaccaaaaagcaccgccgagacctcttccgaaccaaaggagtttgtgtttgcttttagggaagaagaaagatcattcattcggaggaataacaaccaattaaaagac

SEQ ID NO: 159369 - DNA, 120 bp, Artificial Sequence
  ENSG00000106829_5 (sequence is synthesized)
aaataaaaaaagtttggagtgggacgcagagcgagcgagaggagctgccggcgggcggtggggcgcggagcccgcactttcccggccgggtgagcggcggccgcggcgccgggctcggcg

SEQ ID NO: 159370 - DNA, 120 bp, Artificial Sequence
  ENSG00000106829_6 (sequence is synthesized)
ggtgcgcctcggcggagcgaacgtcggagcgttgccttgggagacgcgcgccggacaatgcccgcggcgggccagtgacgcccgcggggaatgcggagcggcccggcagccggcacccag

SEQ ID NO: 159371 - DNA, 120 bp, Artificial Sequence
  ENSG00000106829_7 (sequence is synthesized)
gcgcgttcctgccgcccgtgtcacgcgagacccggcgggggccgggaccgcccgagccgcccctcagaccgagccggccgcctccgctgccgcggccgcctcctcttcggggtcattaaa

SEQ ID NO: 159372 - DNA, 120 bp, Artificial Sequence
  ENSG00000106829_8 (sequence is synthesized)
tcattaaagccaatgagccgcgcgcctctgccgagcgcagccaactaaatcggcttggatgattcgcgacctgagcaagatgtacccgcagaccagacacccagcaccgcatcagcctgc

SEQ ID NO: 159373 - DNA, 120 bp, Artificial Sequence
  ENSG00000106829_9 (sequence is synthesized)
tcaaccctttaaatttacaatttccgaatcctgtgatcggattaaggaagagtttcagtttttacaggctcaataccacagtctgaagctggaatgtgagaaactcgccagtgagaagac

SEQ ID NO: 159374 - DNA, 120 bp, Artificial Sequence
  ENSG00000106829_10 (sequence is synthesized)
agagatgcagcggcattatgtcatgtattatgaaatgtcctatgggttgaatatagaaatgcacaagcaggcagagattgtcaagaggctgaatgctatctgtgcacaagtcattccttt

SEQ ID NO: 159375 - DNA, 120 bp, Artificial Sequence
  ENSG00000106829_11 (sequence is synthesized)
cctgtcccaagagcaccagcaacaagtggtgcaggctgtggaacgggccaagcaggtgaccatggcagaactgaacgccatcattgggcaacaactccaggcccagcatttatcacatgg

SEQ ID NO: 159376 - DNA, 120 bp, Artificial Sequence
  ENSG00000106829_12 (sequence is synthesized)
acatggtctccccgtacctctgactccacacccttcagggctccagccccctgccattccacccatcggtagcagtgccgggcttctggccctctccagtgctctaggaggtcagtccca

SEQ ID NO: 159377 - DNA, 120 bp, Artificial Sequence
  ENSG00000106829_13 (sequence is synthesized)
tcttccaattaaagatgagaagaagcaccatgacaatgatcaccaaagagacagagactccatcaagagctcttcagtatccccatcagccagtttccgaggtgctgagaagcacagaaa

SEQ ID NO: 159378 - DNA, 120 bp, Artificial Sequence
  ENSG00000106829_14 (sequence is synthesized)
ctccgcagactactcctcagagagcaaaaagcagaaaactgaagaaaaggaaattgcagctcgttatgacagcgatggtgagaaaagtgatgacaacttggtggttgacgtttccaatga

SEQ ID NO: 159379 - DNA, 120 bp, Artificial Sequence
  ENSG00000106829_15 (sequence is synthesized)
ggatccatcttcccctcgagggagcccagcacattcccccagagagaatggcctagacaagacacgcctgctcaagaaagatgccccgattagtccagcctctattgcatcttccagcag

SEQ ID NO: 159380 - DNA, 120 bp, Artificial Sequence
  ENSG00000106829_16 (sequence is synthesized)
tactccctcctccaaatccaaagaacttagccttaatgaaaaatctactactcccgtctcaaagtccaatacccctactccacgaactgatgcgcccaccccaggcagtaactctactcc

SEQ ID NO: 159381 - DNA, 120 bp, Artificial Sequence
  ENSG00000106829_17 (sequence is synthesized)
cggattgaggcctgtacctggaaaaccaccaggagttgaccctttggcctcaagcctaaggaccccaatggcagtaccttgtccatatccaactccatttgggattgtgccccatgctgg

SEQ ID NO: 159382 - DNA, 120 bp, Artificial Sequence
  ENSG00000106829_18 (sequence is synthesized)
aatgaacggagagctgaccagccccggagcggcctacgctgggctccacaacatctcccctcagatgagcgcagctgctgccgccgccgctgctgctgctgcctatgggagatcaccagt

SEQ ID NO: 159383 - DNA, 120 bp, Artificial Sequence
  ENSG00000106829_19 (sequence is synthesized)
ggtgggatttgatccacaccatcacatgcgtgtgccagcaatacctccaaacctgacaggcattccaggaggaaaaccagcatactccttccatgttagcgcagatggtcagatgcagcc

SEQ ID NO: 159384 - DNA, 120 bp, Artificial Sequence
  ENSG00000106829_20 (sequence is synthesized)
tgtcccttttccacccgacgccctcatcggacctggaatcccccggcatgctcgccagatcaacaccctcaaccacggggaggtggtgtgcgcggtgaccatcagcaaccccacgagaca

SEQ ID NO: 159385 - DNA, 120 bp, Artificial Sequence
  ENSG00000106829_21 (sequence is synthesized)
acatcagccacccaggcaataagagtcctgtctcccagctcgactgtctgaacagggataactacatccgttcctgcagattgctccctgatggtcgcaccctaattgttggaggggaag

SEQ ID NO: 159386 - DNA, 120 bp, Artificial Sequence
  ENSG00000106829_22 (sequence is synthesized)
ccagtactttgtccatttgggacctggcggctccaaccccacgcatcaaggcagagctgacatcctcggcccccgcctgctatgccctggccatcagccccgattccaaggtctgcttct

SEQ ID NO: 159387 - DNA, 120 bp, Artificial Sequence
  ENSG00000106829_23 (sequence is synthesized)
catgctgcagcgacggcaacatcgctgtgtgggatctgcacaaccagaccttggtgaggcaattccagggccacacagatggagccagctgtattgacatttctaatgatggcaccaagc

SEQ ID NO: 159388 - DNA, 120 bp, Artificial Sequence
  ENSG00000106829_24 (sequence is synthesized)
tctggacaggtggtttggacaacacggtcaggtcctgggacctgcgcgaggggcggcagctgcagcagcacgacttcacctcccagatcttttctctgggctactgcccaactggagagt

SEQ ID NO: 159389 - DNA, 120 bp, Artificial Sequence
  ENSG00000106829_25 (sequence is synthesized)
ggcttgcagtggggatggagaacagcaatgtggaagttttgcatgtcaccaagccagacaaataccaactacatcttcatgagagctgtgtgctgtcgctcaagtttgcccattgtggca

SEQ ID NO: 159390 - DNA, 120 bp, Artificial Sequence
  ENSG00000106829_26 (sequence is synthesized)
aatggtttgtaagcactggaaaggacaaccttctgaatgcctggagaacaccttatggggccagtatattccagtccaaagaatcctcatcggtgcttagctgtgacatctccgtggacg

SEQ ID NO: 159391 - DNA, 120 bp, Artificial Sequence
  ENSG00000106829_27 (sequence is synthesized)
acaaatacattgtcactggctctggggataagaaggccacagtttatgaagttatttattaaagacaaatcttcatgcagactggacttctcctcctggtagcactttgctctgtcatcc

SEQ ID NO: 159392 - DNA, 120 bp, Artificial Sequence
  ENSG00000106829_28 (sequence is synthesized)
tttttgttcacccccatccccgcatctaaaaccaaggatttcagatactcattgcagttgtggagtttaatcccctttcttaacctcacttcccacttgctattgaattgtgaatagtca

SEQ ID NO: 159393 - DNA, 120 bp, Artificial Sequence
  ENSG00000106829_29 (sequence is synthesized)
ttaaaaacctgtgataccaaatcttcagctgtctacttggaagaacatggaataagcatacttaacagtgaaaagaatctttaattatgtattatatctgtaatatatttattttgttta

SEQ ID NO: 159394 - DNA, 120 bp, Artificial Sequence
  ENSG00000106829_30 (sequence is synthesized)
aagaaggctttctaacaatgactgactaaataaagctgtctgctcctgcattgataatgaaggtgcgttgtatttgatacccctccccccctttttttggcaaaggaggggaaaggaagg

SEQ ID NO: 159395 - DNA, 120 bp, Artificial Sequence
  ENSG00000106829_31 (sequence is synthesized)
tttaaaataattgatttaaaatgtcactaagtgtagactgatgactgtatagagatgtgaaatgtataattacacatggaagcaatatgttgctgtgttgttattaggttttttttgttt

SEQ ID NO: 159396 - DNA, 120 bp, Artificial Sequence
  ENSG00000106829_32 (sequence is synthesized)
ttgttttctacatcttttaaagacttttggaaatttggctgaacaattagaacacaacaggccaactcatactcatttggatctatttagacaacgttaaccaatatatctatagcttta

SEQ ID NO: 159397 - DNA, 120 bp, Artificial Sequence
  ENSG00000106829_33 (sequence is synthesized)
gattatattcgataaaagtaattggactttttttctttttttgactcgttgacaagtgtctttgtaatatgtttttagttccctttttttgttgtattataggcagatgaacaaattaaa

SEQ ID NO: 159398 - DNA, 120 bp, Artificial Sequence
  ENSG00000106829_34 (sequence is synthesized)
tttggcctcaaagagagaacttactcccttctggatatttttgccacatttctttgcaaaaggagatatatatatctttagtcagttttgttgttatgagaaattatgggttattttgtg

SEQ ID NO: 159399 - DNA, 120 bp, Artificial Sequence
  ENSG00000106829_35 (sequence is synthesized)
gcatgctctttgggagctgcacagttatggggaggactcccactgctgtgcaagttaagtcttttacaaaacaaggacagcagaggagggtttgcagagacctccctctgaaaaacacaa

SEQ ID NO: 159400 - DNA, 120 bp, Artificial Sequence
  ENSG00000106829_36 (sequence is synthesized)
agaatggactctctcctgggatgaggacttgctttctttacctccggttctttccatgtcttagttggatgtccctgaaatggacacaggctgtgccattgtgccagaaacattgtgtta

SEQ ID NO: 159401 - DNA, 120 bp, Artificial Sequence
  ENSG00000106829_37 (sequence is synthesized)
tcttttatgttgttgttgttgctgttaaactataatatgtgacttctttttttattattttttgtttgaatgctttaaaaatcttttaagtctgtggatctgctgatgtacagtgccttt

SEQ ID NO: 159402 - DNA, 120 bp, Artificial Sequence
  ENSG00000106829_38 (sequence is synthesized)
gctgctatggatcaaaatcaaaagaaccgtgtagatatactttattgtataagtagaaaattacttaatttcatactagaaatggatggatgctgcaagttgaaatggactgtccattga

SEQ ID NO: 159403 - DNA, 120 bp, Artificial Sequence
  ENSG00000106829_39 (sequence is synthesized)
cgttcctaatgtggtagcagaaaaaaaaaaatggtgtcttaagtgcttagtgtttgatgtcattaacagtttcgtaaaactctacagtgtagaaagattttgatactaaactgtgcgttg

SEQ ID NO: 159404 - DNA, 120 bp, Artificial Sequence
  ENSG00000106829_40 (sequence is synthesized)
tacatagttctaatgcattgtattgaccaccagtacttctataatggtagattgtttgtgaattcagacttttaagcattaaacataaataacttctagtatgcttatttttctaattct

SEQ ID NO: 159405 - DNA, 120 bp, Artificial Sequence
  ENSG00000106829_41 (sequence is synthesized)
ttgtcttgatgacattagtttattttttatctttggctgtgccactcctatatattaaaaatgcctagttttttcaagggagattgttgttaaagtaaagtggttttttttgttgttaaa

SEQ ID NO: 159406 - DNA, 120 bp, Artificial Sequence
  ENSG00000106829_42 (sequence is synthesized)
atacagaaccttcccactgctgcagagagttctattggatgatgctgcgtctctgacagactctgatgaggcttgctggttctgacattccttctggctaaaactgactcctgatactca

SEQ ID NO: 159407 - DNA, 120 bp, Artificial Sequence
  ENSG00000106829_43 (sequence is synthesized)
gtattatgaaatgtcctatgggttgaatatagaaatgcacaagcaggtaagttatttctttataaccattttaaatgacagtaatactgggacactatgaaaagaaaattgtatgttttg

SEQ ID NO: 159408 - DNA, 120 bp, Artificial Sequence
  ENSG00000106829_44 (sequence is synthesized)
cagttttattctgcaagccgttgtggctacctttgctttatgtattttgggcattgcaaacttgtcttgtgaaagagcttttcttggaaaatattaaacagtaaaattaaattgtgtggc

SEQ ID NO: 159409 - DNA, 120 bp, Artificial Sequence
  ENSG00000106829_45 (sequence is synthesized)
gccttcgttggcttgatgtgaaagaatggatagagggtgagctgggaggatgaaaatgaaatctgtggagctacaaaagaaattgatgtaaaatccttgtactggtcccctgaggctact

SEQ ID NO: 159410 - DNA, 120 bp, Artificial Sequence
  ENSG00000106829_46 (sequence is synthesized)
tagttgggtcttaccaagaactataaccgttacttccaaaatttgtacagagtaaatgagcctgataggaggatgtgataaggttcaacattgggtcttgaaatctagcaattagttcag

SEQ ID NO: 159411 - DNA, 120 bp, Artificial Sequence
  ENSG00000106829_47 (sequence is synthesized)
tagtgttgtgtgcttctactggtaggaaaagctaataactaccctgacgagctcaacgagtggcccgaggactgtgatctcacagtttaccgtttttgcagagagcctcttttattttcg

SEQ ID NO: 159412 - DNA, 120 bp, Artificial Sequence
  ENSG00000106829_48 (sequence is synthesized)
tgtcagattatctgtaaaatggacttctccctccagtgttgtaaaccataacaattctggcattcctctaattgtgtggggagagggagtatacccaacagatgcttgtcgagcaggaga

SEQ ID NO: 159413 - DNA, 120 bp, Artificial Sequence
  ENSG00000106829_49 (sequence is synthesized)
aggttgttaagaagaaattgacttgaagaggccgactgctgcccatcatggagcaaataaagcaaaactgccgaagcatggtggagcagcgagacgggccctcagcaatttgttgctatt

SEQ ID NO: 159414 - DNA, 120 bp, Artificial Sequence
  ENSG00000106829_50 (sequence is synthesized)
atctgctggagaaaatgctgtccagggcagataaaaggctcggcatggtacagagaatagactggattggccaaaagcaggctgcagttaatgtgtaaataagtgaaatcaaggccactg

SEQ ID NO: 159415 - DNA, 120 bp, Artificial Sequence
  ENSG00000106829_51 (sequence is synthesized)
gcagttcatcttaaacaaaatgttggacaaaatcagtgatgaaacaactgaggatgaaggagagttggagagttgaaggagcagtgaaaaagaatggaagaaaacatgatgtgcaggtgg

SEQ ID NO: 159416 - DNA, 120 bp, Artificial Sequence
  ENSG00000106829_52 (sequence is synthesized)
agaggctggcctttgaaaggaaaaggacccttctctaagattagcatacaagaggaagagaagaagctcattttagaactgttctgagatagaataaaaccaaacaaggacctcaggaag

SEQ ID NO: 159417 - DNA, 120 bp, Artificial Sequence
  ENSG00000106829_53 (sequence is synthesized)
aaggcctccttccttaggcaggtgtaaataaattaaacatttcttctaccgtaaataaaaagaaggcagaacaatcgaaactggggagacttggaaaacgctgaggccaaactttcgata

SEQ ID NO: 159418 - DNA, 120 bp, Artificial Sequence
  ENSG00000106829_54 (sequence is synthesized)
ttgatttattggggccgggagaatgaaaggttgggaagattctggggccttttgacatccttggttctttattactccggacttgattccttctcacttttttctgccattccactgaag

SEQ ID NO: 159419 - DNA, 120 bp, Artificial Sequence
  ENSG00000106829_55 (sequence is synthesized)
attctttgctgttaacttgcctgctgtgcttaggaattaagagtccgtaggataccaaattttcatcagacttttttgatgcatctgcttgggatgtataaagaaactggagatgttaag

SEQ ID NO: 159420 - DNA, 120 bp, Artificial Sequence
  ENSG00000106829_56 (sequence is synthesized)
aatgctgtgtttgaatttaatttttcttagttttgtgtgttttctcttagaatttgtgtcttaaggtggttaaagatagtgatgggctcttgatttattggcataggttatatgaagata

SEQ ID NO: 159421 - DNA, 120 bp, Artificial Sequence
  ENSG00000106829_57 (sequence is synthesized)
gggcgaacgaacgagccgagagggtggcggccgcctccctcctcccccggcctgaccgcagcccgacgccatggcgcgggtccccccgacgggccagtttcgattccgggcaccgcatca

SEQ ID NO: 159422 - DNA, 120 bp, Artificial Sequence
  ENSG00000106829_58 (sequence is synthesized)
acaaattgaaggctgtagcaaccctgaatggagctgttcttccaatagcctgtgctcacttcgtgtctctgtgtcacattttggcagagattgtcaagaggctgaatgctatctgtgcac

SEQ ID NO: 159423 - DNA, 120 bp, Artificial Sequence
  ENSG00000106829_59 (sequence is synthesized)
caagagcagcaacaactccaggcccagcatttatcacatggacatggtctccccgtacctctgactccacacccttcagggctccagccccctgccattccacccatcggtagcagtgcc

SEQ ID NO: 159424 - DNA, 120 bp, Artificial Sequence
  ENSG00000106829_60 (sequence is synthesized)
tttacattttgttccgccaaaggggcaaaaagcaatagatgactacaaaatgaaattaagcactttgccttcaatctcctgtgaaatttgatggctgccttagaaactttggatcacatt

SEQ ID NO: 159425 - DNA, 120 bp, Artificial Sequence
  ENSG00000106829_61 (sequence is synthesized)
ctcaccaatttaagtggatgtgttcatgaaaactctcctctaaggagactggatagctctttttcatatttctttgctttgcaatcagcttgtgttgctaacctaggccaaaaaaaaaaa

SEQ ID NO: 159426 - DNA, 120 bp, Artificial Sequence
  ENSG00000106829_62 (sequence is synthesized)
acctcgaaaccagcctctgcctgggctgttgggcgcgaggagggttgcgggaggagagttttaatctctctttgcttgcgtgcgcgatgaccctcaccccccgctaacgccgcatagtag

SEQ ID NO: 159427 - DNA, 120 bp, Artificial Sequence
  ENSG00000106829_63 (sequence is synthesized)
ctccctcctccaaatccaaagaacttagccttaagagggatatggggaaattgagtgaaacacgtcttagcgaagatgaacaatgcacattggggttacagagatggttttgtcgcctgt

SEQ ID NO: 159428 - DNA, 120 bp, Artificial Sequence
  ENSG00000106829_64 (sequence is synthesized)
tttctcctatctcctcttaacagctttgcaagtatatgctaaagaataaaaagaaaagaaagtctcaagtgacttaaaaatcactcggctaaatagatgataatttctcaaccatgcttc

SEQ ID NO: 159429 - DNA, 120 bp, Artificial Sequence
  ENSG00000106852_0 (sequence is synthesized)
ctctcctcctgctcctgcagcagcctctgctcccactgcggctgtggtccccctcggcgcagctctccgcgctgcgcgcccgctgagcccgaggttccccggcccatgtactggaagcat

SEQ ID NO: 159430 - DNA, 120 bp, Artificial Sequence
  ENSG00000106852_1 (sequence is synthesized)
gagaacgccgccccggcgttgcccgagggctgccggctgccggccgagggcggccccgccaccgaccaggtgatggcccagccagggtccggctgcaaagcgaccacccgctgtcttgaa

SEQ ID NO: 159431 - DNA, 120 bp, Artificial Sequence
  ENSG00000106852_2 (sequence is synthesized)
gggaccgcgccgcccgccatggctcagtctgacgccgaggccctggcaggagctctggacaaggacgagggtcaggcctccccatgtacgcccagcacgccatctgtctgctcaccgccc

SEQ ID NO: 159432 - DNA, 120 bp, Artificial Sequence
  ENSG00000106852_3 (sequence is synthesized)
tctgccgcctcctccgtgccgtctgcaggcaagaacatctgctccagctgcggcctcgagatcctggaccgatatctgctcaaggtcaacaacctcatctggcacgtgcggtgcctcgag

SEQ ID NO: 159433 - DNA, 120 bp, Artificial Sequence
  ENSG00000106852_4 (sequence is synthesized)
tgctccgtgtgtcgcacgtcgctgaggcagcagaacagctgctacatcaagaacaaggagatcttctgcaagatggactacttcagccgattcgggaccaagtgtgcccggtgcggccga

SEQ ID NO: 159434 - DNA, 120 bp, Artificial Sequence
  ENSG00000106852_5 (sequence is synthesized)
cagatctacgccagcgactgggtgcggagagctcgcggcaacgcctaccacctggcctgcttcgcctgcttctcgtgcaagcgccagctgtccactggtgaggagttcggcctggtcgag

SEQ ID NO: 159435 - DNA, 120 bp, Artificial Sequence
  ENSG00000106852_6 (sequence is synthesized)
gagaaggtgctctgccgcatccactacgacaccatgattgagaacctcaagagggccgccgagaacgggaacggcctcacgttggagggggcagtgccctcggaacaggacagtcaaccc

SEQ ID NO: 159436 - DNA, 120 bp, Artificial Sequence
  ENSG00000106852_7 (sequence is synthesized)
aagccggccaagcgcgcgcggacgtccttcaccgcggaacagctgcaggttatgcaggcgcagttcgcgcaggacaacaaccccgacgctcagacgctgcagaagctggcggacatgacg

SEQ ID NO: 159437 - DNA, 120 bp, Artificial Sequence
  ENSG00000106852_8 (sequence is synthesized)
ggcctcagccggagagtcatccaggtgtggtttcaaaactgccgggcgcgtcataaaaagcacacgccgcaacacccagtgccgccctcgggggcgcccccgtcccgccttccctccgcc

SEQ ID NO: 159438 - DNA, 120 bp, Artificial Sequence
  ENSG00000106852_9 (sequence is synthesized)
ctgtccgacgacatccactacaccccgttcagcagccccgagcgggcgcgcatggtcaccctgcacggctacattgagagtcaggtacagtgcgggcaggtgcactgccggctgccttac

SEQ ID NO: 159439 - DNA, 120 bp, Artificial Sequence
  ENSG00000106852_10 (sequence is synthesized)
accgcaccccccgtccacctcaaagccgatatggatgggccgctctccaaccggggtgagaaggtcatcctttttcagtactaacgctgccggcacttccgcatctgcccgtgggcgccc

SEQ ID NO: 159440 - DNA, 120 bp, Artificial Sequence
  ENSG00000106852_11 (sequence is synthesized)
cacagctgcccctcagccgctgagatccagtgtccaagctgcggccaggagtccacccacctccgcatccacccccgtccgccatcctgcccaccaccaggtcggttcccgaggcctggc

SEQ ID NO: 159441 - DNA, 120 bp, Artificial Sequence
  ENSG00000106852_12 (sequence is synthesized)
ctttccctctcctgctgagaaccagaacccaccaggagcaccacagagtcctcctcttggaaggcagaactccctgaaatctggaatcagggtggaaacagcctgtttttcccatttaaa

SEQ ID NO: 159442 - DNA, 120 bp, Artificial Sequence
  ENSG00000106852_13 (sequence is synthesized)
caggagtcctcttcaacttcagctgattacaataacaaaaggcggaattgaattgtgcgatgccaacggccttctcatttacaggtttttttcccccacattggcctttatttactactt

SEQ ID NO: 159443 - DNA, 120 bp, Artificial Sequence
  ENSG00000106852_14 (sequence is synthesized)
gaaagctatgttctaattttatcatttccatctgtctggttatgtcaagttaattcagaaagagaagagacagtgaccaaccctgagaggcctaatagggcagagatggaggcctgccca

SEQ ID NO: 159444 - DNA, 120 bp, Artificial Sequence
  ENSG00000106852_15 (sequence is synthesized)
gactaggaggcagcggggatagacagggaatggggagaagaaagacccccattggtttggaaatcaaggagagggcggtgacatattggaccagaagaggcactagccattttaaggaga

SEQ ID NO: 159445 - DNA, 120 bp, Artificial Sequence
  ENSG00000106852_16 (sequence is synthesized)
ggaaagagaaaactctggggtcagggagagaccctacccccacctaattatccagcatatatgtaagaaacatagcagcgatggtattcgatctgtgccatgactcttctgaatgtttgg

SEQ ID NO: 159446 - DNA, 120 bp, Artificial Sequence
  ENSG00000106852_17 (sequence is synthesized)
acaggttagagttggggacccctgttggccacttgttgacctctcatagtggtgcttgggccaggtcttctcaatggaaggggaatcccttataggggagagggaacagagcccagtgaa

SEQ ID NO: 159447 - DNA, 120 bp, Artificial Sequence
  ENSG00000106852_18 (sequence is synthesized)
atggcagtcagaatgttaaccctggatccatctctaagtagagagagggtgcccattgcctaggtgagtgtgccaagctcaggattccaactggtgcctctgagcttcccaatcaatact

SEQ ID NO: 159448 - DNA, 120 bp, Artificial Sequence
  ENSG00000106852_19 (sequence is synthesized)
tcctggagccagccccacccacccctgagaacagaggtcagacacagctgcgtaacatccatcctgctacaactcttccaccccaaacaaaagggctcaggctacacacgaccatgattt

SEQ ID NO: 159449 - DNA, 120 bp, Artificial Sequence
  ENSG00000106852_20 (sequence is synthesized)
atgttttcaggggatgcccatttgtcccaagcttatcctgtaattctagaattacctggtgtcctgatgcattttccactagaggttgctaatcagcatgttttagcccaagtccgcctt

SEQ ID NO: 159450 - DNA, 120 bp, Artificial Sequence
  ENSG00000106852_21 (sequence is synthesized)
cctgctgtggttaacctgttatgttgcttttggaaggagactctaagacagggaaagcaagttcatggtacatacgcagccattgtctctgtttttacccatggcagacattgctaatca

SEQ ID NO: 159451 - DNA, 120 bp, Artificial Sequence
  ENSG00000106852_22 (sequence is synthesized)
atggcagctctatttcactgagtctggataaggtttcagagttcaaatgcttgacgttggcacttaacatgaaagcctataggtcattcttgctctgggatctacaggcagggtaggcac

SEQ ID NO: 159452 - DNA, 120 bp, Artificial Sequence
  ENSG00000106852_23 (sequence is synthesized)
aggtgcagcctaagaagggaacctgcttcctctcccttccaaagacagtgacagctgactgagggcaaagagcaggcaccactcagaacgtggtgagtacagctcagctcagcactcagt
